United States Patent Application Publication US 2025/0084491 A1 - sequence listing, part 26

SEQ ID NO: 490320 - DNA, 75 bp, synthetic construct
  source 1..75: mol_type = other DNA
gtcacaaaacaatctgctgtggatgtggaatgcagaaatagccgcacagttatctgctgcttctgctgaaaactt

SEQ ID NO: 490321 - DNA, 75 bp, synthetic construct
  source 1..75: mol_type = other DNA
ttgcgccgccatctgctgatggcttctttgcttaccgttctggcggtcggtgcctggttgtttactatctcgctg

SEQ ID NO: 490322 - DNA, 75 bp, synthetic construct
  source 1..75: mol_type = other DNA
ttcgccgctaccagaccgccctgatgccggacaacgccggaaaccaggtgcagcgcatcgtggcccgttttgccc

SEQ ID NO: 490323 - DNA, 75 bp, synthetic construct
  source 1..75: mol_type = other DNA
tctatttgctgtcagaactgactctgctaacgggaaatgagctcaccgatggcgaaccgtgcagaaagcatttca

SEQ ID NO: 490324 - DNA, 75 bp, synthetic construct
  source 1..75: mol_type = other DNA
ctttatttctgaaaactttaatgaataacccaataattaaaaatttattagcgcagaagattattggatattttt

SEQ ID NO: 490325 - DNA, 75 bp, synthetic construct
  source 1..75: mol_type = other DNA
taagggcaagttatcgacaatttttaatggcagaagacgatgctgtagatacttatgtcgaatggattggtagtt

SEQ ID NO: 490326 - DNA, 75 bp, synthetic construct
  source 1..75: mol_type = other DNA
attatggaagatgtacctgataactgtacttatgtcaccaggaaggaatccagagtgataatttgcgaacagtaa

SEQ ID NO: 490327 - DNA, 75 bp, synthetic construct
  source 1..75: mol_type = other DNA
aggcatgccgaaaatggaacaaacccgttcgatttcacgctacggcttatcgcaagtgaccatcatttttgaaga

SEQ ID NO: 490328 - DNA, 75 bp, synthetic construct
  source 1..75: mol_type = other DNA
tgaaatacatcgctatggacagtattcttgaagaggatgtgcgtgcgcaattactagccgatgaaatgagctcta

SEQ ID NO: 490329 - DNA, 75 bp, synthetic construct
  source 1..75: mol_type = other DNA
caaatatctgaaaatgtgcggctaaacgctgaagcattacttagaaaagttaatcaagagactactaaaaaattc

SEQ ID NO: 490330 - DNA, 75 bp, synthetic construct
  source 1..75: mol_type = other DNA
ccctgcgcgtaaagcggcgttatggtcttttggtattgaaacagcagcaggtgttacccgtcgtggcgttaagca

SEQ ID NO: 490331 - DNA, 75 bp, synthetic construct
  source 1..75: mol_type = other DNA
aggaattaatatagcatattgcattagctatgttatgtattttttaataatttatctcaacctaaataagattat

SEQ ID NO: 490332 - DNA, 75 bp, synthetic construct
  source 1..75: mol_type = other DNA
gagtatcctgttggggagtcacgcgatctggtggcagagcttaaagctgctgctcagcggttaggtgttaccgat

SEQ ID NO: 490333 - DNA, 75 bp, synthetic construct
  source 1..75: mol_type = other DNA
gctagctctatagatttagcagatgaaataaaaacatcagtaaactatgctgctcttgaagtagtgatcaatgat

SEQ ID NO: 490334 - DNA, 75 bp, synthetic construct
  source 1..75: mol_type = other DNA
taactgttgctcactatagtgcaaataaggaaaacgggttacctgtcggactaattgatgatgtcatttacaaac

SEQ ID NO: 490335 - DNA, 75 bp, synthetic construct
  source 1..75: mol_type = other DNA
gccagtaaaatagagttggccgatgagattatatcatctgttaattatgcggcgttagaggttataataaatgat

SEQ ID NO: 490336 - DNA, 75 bp, synthetic construct
  source 1..75: mol_type = other DNA
caagcacttatgcgcttggtttaaactggtctaactccattctgggtggtttcaacatcagtggctataaaacat

SEQ ID NO: 490337 - DNA, 75 bp, synthetic construct
  source 1..75: mol_type = other DNA
cgcagagcgctgtcgtgacaggaccggcaggcgaggaaatcttctgcgacgaacatggtcgcgtgcgggtgaagt

SEQ ID NO: 490338 - DNA, 75 bp, synthetic construct
  source 1..75: mol_type = other DNA
gaggcggtggacgtgtcgctgcgcaacgttatcccgtttatggcctttgtctcgctgctgattgccctggtgcag

SEQ ID NO: 490339 - DNA, 75 bp, synthetic construct
  source 1..75: mol_type = other DNA
agataacggcctgttactcgacgatatcttacagtttagcgaagacggccagttccatctgatggggcgtcgcgg

SEQ ID NO: 490340 - DNA, 75 bp, synthetic construct
  source 1..75: mol_type = other DNA
accttaacactatgaagttattcagatacaagcccgttcatgagttcgataaaatacattttggcttaatcaata

SEQ ID NO: 490341 - DNA, 75 bp, synthetic construct
  source 1..75: mol_type = other DNA
aagatgaaattaatcaatttgctaaggagaatttttcatgggaaaagcaaatgcaaaaattattaatgactgttt

SEQ ID NO: 490342 - DNA, 75 bp, synthetic construct
  source 1..75: mol_type = other DNA
gtgaccaaagactacacctttaaacgacccggctgggcagggcgttttgatcaggaaggccagtaccaggattac

SEQ ID NO: 490343 - DNA, 75 bp, synthetic construct
  source 1..75: mol_type = other DNA
gccggacgagtcgctggtacacatgaagccgttgtcaggccgcattatgtgctgatctaccaagtggagggcgat

SEQ ID NO: 490344 - DNA, 75 bp, synthetic construct
  source 1..75: mol_type = other DNA
ccctgtctgacagggagcaaatcatggaatacatcagtaaagataatccgctagcggcaatagcccttgataatc

SEQ ID NO: 490345 - DNA, 75 bp, synthetic construct
  source 1..75: mol_type = other DNA
cagcctgacctttccgatcggtatcggcgaacgactggtgcccgccagcctgtcccgtgaaaatctgcacatcat

SEQ ID NO: 490346 - DNA, 75 bp, synthetic construct
  source 1..75: mol_type = other DNA
ctggctgccctttccaggtatgcagttccaggccgaagatgatgcctttcgtctcttttcaccgctgatggcgga

SEQ ID NO: 490347 - DNA, 75 bp, synthetic construct
  source 1..75: mol_type = other DNA
cgttcaggtgcttctctctgctggcggtgagctgccgtggcaggacgtacaatataccgcgagctggctgcgcgt

SEQ ID NO: 490348 - DNA, 75 bp, synthetic construct
  source 1..75: mol_type = other DNA
ggacattacctgatgatgtcctttacatggtcaccaaaaccaccagctatatgttctttaccgcaatggcgggga

SEQ ID NO: 490349 - DNA, 75 bp, synthetic construct
  source 1..75: mol_type = other DNA
gtggacggcctgccgccggatgcttttgcggtggtttcctttcatctgaaccagtcactctcttcgctcttttcc

SEQ ID NO: 490350 - DNA, 75 bp, synthetic construct
  source 1..75: mol_type = other DNA
cgacgataagggccgcctgaccggcgaacggcagacggtggagaacccggagacgggggaactgctgtggcagca

SEQ ID NO: 490351 - DNA, 75 bp, synthetic construct
  source 1..75: mol_type = other DNA
ggttgcgaaaagaaaaaaagtgacgacctgattgatttattccgtcctgtactgaaggacgaagatctgatagca

SEQ ID NO: 490352 - DNA, 75 bp, synthetic construct
  source 1..75: mol_type = other DNA
gacctctactcttacgggttacattgatcgtactggttgcttcattggtggttcgcgtgaactacctctcatcgg

SEQ ID NO: 490353 - DNA, 75 bp, synthetic construct
  source 1..75: mol_type = other DNA
acacagtacgatgcgtggggaaaggcggtcagcaccacgcagggcgggctgacgcgcagtatggagtacgatgct

SEQ ID NO: 490354 - DNA, 75 bp, synthetic construct
  source 1..75: mol_type = other DNA
gagcgtgcgcaccctcgcaccggacctggacatccgcatcccgtatgcgaccgacccggcgggaaaccggctgcc

SEQ ID NO: 490355 - DNA, 75 bp, synthetic construct
  source 1..75: mol_type = other DNA
gcgcttatcagcgaagacggcaatacggcgtggagcgcggaatatgatgaatggggcaaccagcttaatgaggag

SEQ ID NO: 490356 - DNA, 75 bp, synthetic construct
  source 1..75: mol_type = other DNA
ggtggcgattgtcgttgctagtttagctcctgtacctgccattatcgtcgtgttcagcactgcggcgcgatgttt

SEQ ID NO: 490357 - DNA, 75 bp, synthetic construct
  source 1..75: mol_type = other DNA
ggatggaaggccttgcattggttattggctttttgttgtattgcttggtactcaatgcgtctacgccattacttc

SEQ ID NO: 490358 - DNA, 75 bp, synthetic construct
  source 1..75: mol_type = other DNA
gtattttagatatattaggaatttggcaaagagacacttggattattggaagttctgaaaatgctcaagaagcat

SEQ ID NO: 490359 - DNA, 75 bp, synthetic construct
  source 1..75: mol_type = other DNA
gtgtaattgccacaactggagatattctttatcgtgatggctctataaatagcggaacgaagggattaatttcat

SEQ ID NO: 490360 - DNA, 75 bp, synthetic construct
  source 1..75: mol_type = other DNA
cattgaagatactccgcaatatcgactcaaactcgtgaacggccctgacgctgacagtgacaacggtaaaacagt

SEQ ID NO: 490361 - DNA, 75 bp, synthetic construct
  source 1..75: mol_type = other DNA
aagataaatgccgccatcgcgggcgtaatgtatttgtttttactctctttggtggcaattgtcggtgatgctgcc

SEQ ID NO: 490362 - DNA, 75 bp, synthetic construct
  source 1..75: mol_type = other DNA
cagttacgatgcgctggaccggctggtacagcagggcggctttgacgggcggacgcaacgttatcattatgacct

SEQ ID NO: 490363 - DNA, 75 bp, synthetic construct
  source 1..75: mol_type = other DNA
tttgcttatttcacgcaaacggattcttttgcaaatgagaaaaggaaatactctaaaggtactaaagtaattgat

SEQ ID NO: 490364 - DNA, 75 bp, synthetic construct
  source 1..75: mol_type = other DNA
gaacgttttgctcgcgacgtactggggcgtgcacatgccactggcgaagtggacgatagcaaatttaacgtgctt

SEQ ID NO: 490365 - DNA, 75 bp, synthetic construct
  source 1..75: mol_type = other DNA
aaatcagcattacgccgctggacgctgacgcgtcagtgctgatttcaacaggcattgacgccacgcaaaccaacc

SEQ ID NO: 490366 - DNA, 75 bp, synthetic construct
  source 1..75: mol_type = other DNA
tcgaccggggagctagggcgctttactaccctctttttctggtgggagaataatgatctgctaggtatttccggt

SEQ ID NO: 490367 - DNA, 75 bp, synthetic construct
  source 1..75: mol_type = other DNA
atcgagttacgccagaaacaatacgagtactaccgtgatttactgttcagtttcccgaaacctgaaactgtcagt

SEQ ID NO: 490368 - DNA, 75 bp, synthetic construct
  source 1..75: mol_type = other DNA
cttaacatgcgtaaaaaacagtacaactactatcgcgaccagttgttgagttttaaagagggtgaggttgagtgg

SEQ ID NO: 490369 - DNA, 75 bp, synthetic construct
  source 1..75: mol_type = other DNA
tttaaaggatttaacttaggtgtatatcaggatttaaagacgtctgtgcgagataacgaaatcaacataaaaatg

SEQ ID NO: 490370 - DNA, 75 bp, synthetic construct
  source 1..75: mol_type = other DNA
gctgacaagtttgaagcatgggtacatggccctgtagccagagatttgtataccagatttgcagattacaaatgg

SEQ ID NO: 490371 - DNA, 75 bp, synthetic construct
  source 1..75: mol_type = other DNA
ttgccgattatctgttgcactttgcgcatgaacacggcgacttaatatctccactgaaattacagaaaatggttt

SEQ ID NO: 490372 - DNA, 75 bp, synthetic construct
  source 1..75: mol_type = other DNA
acggcgaaaggctgcatgttcggcaagaacatcaccagtcccgcaaatccgcgcgagacgcagccgcatttcttc

SEQ ID NO: 490373 - DNA, 75 bp, synthetic construct
  source 1..75: mol_type = other DNA
gccagcatctgtctgggttcaggtcgatgtggcagactccccgcatttaattgaacgcttcacagcacttttcga

SEQ ID NO: 490374 - DNA, 75 bp, synthetic construct
  source 1..75: mol_type = other DNA
ttgactatcgtactggtaaacttacagcgggcaataatcagttgcccaattttgacgatccgatcgctgctgctg

SEQ ID NO: 490375 - DNA, 75 bp, synthetic construct
  source 1..75: mol_type = other DNA
atgcatatcagtgtttcagccagcgcaaaccagggtaagggcagtgaaaaaggtaacggtaccacccatacagaa

SEQ ID NO: 490376 - DNA, 75 bp, synthetic construct
  source 1..75: mol_type = other DNA
ccagcaggcgatacaggccgcaacggcagcagtacaggggctggccggcggtaatctgagtgcagccctggcagg

SEQ ID NO: 490377 - DNA, 75 bp, synthetic construct
  source 1..75: mol_type = other DNA
ttatcaaaaagtacgaagagttgagtacggcacagcaaaagcaactgatcagtgactgtgcagccagcccggcaa

SEQ ID NO: 490378 - DNA, 75 bp, synthetic construct
  source 1..75: mol_type = other DNA
tgacccgctgcaggggcggtatatcactcaggatccgattggactgaaggggggatggaacctgtatggatatca

SEQ ID NO: 490379 - DNA, 75 bp, synthetic construct
  source 1..75: mol_type = other DNA
gcttgcgtgatgggtcacagcgctaaggcgatttgtgcggcgtttggggtaagccttgcgtatgcgctgaagatg

SEQ ID NO: 490380 - DNA, 75 bp, synthetic construct
  source 1..75: mol_type = other DNA
atgaaactgactgcactggcgattctggttaccccgacgctggtgctgatgggcgcggcgctggcaatgatgacc

SEQ ID NO: 490381 - DNA, 75 bp, synthetic construct
  source 1..75: mol_type = other DNA
aatcacctggacgttccgcgcaccttccggctgtcagttgtcaggaatttatgtccaggacacgggaagaagttc

SEQ ID NO: 490382 - DNA, 75 bp, synthetic construct
  source 1..75: mol_type = other DNA
tatttccctgaaatcgttatcagcagcaggtgcgacattcaacagcgagaataacggcgttatgtactggacagc

SEQ ID NO: 490383 - DNA, 75 bp, synthetic construct
  source 1..75: mol_type = other DNA
gaactatcaattgagagcatagacttacttaaagatcaaataagagcatttaagcaagctgatataagaataaca

SEQ ID NO: 490384 - DNA, 75 bp, synthetic construct
  source 1..75: mol_type = other DNA
agcggtagccggcgcactgtcaggtaagacgactgttgagaataactatctgagcagtaagcagatagatgcttg

SEQ ID NO: 490385 - DNA, 75 bp, synthetic construct
  source 1..75: mol_type = other DNA
aatacttccaggcgatgtatgacatggaacggcaaatcaacgcaaacctgccgattggcggccttccctacgttg

SEQ ID NO: 490386 - DNA, 75 bp, synthetic construct
  source 1..75: mol_type = other DNA
ctggaatagatatcaacgcattaactcctggcatgagatcaggtagtcgtggtcttgctcaggcggaggggattc

SEQ ID NO: 490387 - DNA, 75 bp, synthetic construct
  source 1..75: mol_type = other DNA
actcatggtgcagatagtcatggagaatattgggacgaaatattttcaggtaaagatgagaaaatagttaaaagt

SEQ ID NO: 490388 - DNA, 75 bp, synthetic construct
  source 1..75: mol_type = other DNA
ttgctgtttgtctttcttgcggtcttgccgcgagtgcgttcgccgcggacggggtaaaaacgcgtccttttaacg

SEQ ID NO: 490389 - DNA, 75 bp, synthetic construct
  source 1..75: mol_type = other DNA
caggcgaaccagcacctccgcacacggctgtgccacatcacggatatccccggcccgggcatcatgcgtgccctg

SEQ ID NO: 490390 - DNA, 75 bp, synthetic construct
  source 1..75: mol_type = other DNA
aatcgtctgcgtacggagccggtacagattgaaatatcgcccggtgaccgtgagggatggtcggtggtgacactg

SEQ ID NO: 490391 - DNA, 75 bp, synthetic construct
  source 1..75: mol_type = other DNA
cttaaaggatgtgtcaaagacttcgccaccacattctgggcaagaaaacttgattgtattcataaccaatttcct

SEQ ID NO: 490392 - DNA, 75 bp, synthetic construct
  source 1..75: mol_type = other DNA
cccggactttcctggaagcgcagaaataccccttggcgtatattgctcaagcgaacaaaagctctcattttatct

SEQ ID NO: 490393 - DNA, 75 bp, synthetic construct
  source 1..75: mol_type = other DNA
gaaccccgaacacatggcagagtgtgaccacaggataatgcgctctgagtttcccgattatcgagaactgttcag

SEQ ID NO: 490394 - DNA, 75 bp, synthetic construct
  source 1..75: mol_type = other DNA
ggaatgctatttcacaattttttaaaattggtattcaagttgctaatcttgtttatcttgccaaaattatacctc

SEQ ID NO: 490395 - DNA, 75 bp, synthetic construct
  source 1..75: mol_type = other DNA
ttgcaaatgcaatacattttattccatgttttatattcacgatgaaaacaataaaatcaaatgttttaagcatat

SEQ ID NO: 490396 - DNA, 75 bp, synthetic construct
  source 1..75: mol_type = other DNA
gtccgcaactttagtttcagtatgttagaactacatgttcggtctctttgccatttatatgcttttacttgtgcc

SEQ ID NO: 490397 - DNA, 75 bp, synthetic construct
  source 1..75: mol_type = other DNA
ggtgcatttgtttatattctcgctttatttttagtgtctagcgattttcgaagttattttattgctcgtgtactg

SEQ ID NO: 490398 - DNA, 75 bp, synthetic construct
  source 1..75: mol_type = other DNA
ttatatgcactttcaattatatatccagtaaatgatattgccaacttattagtccttgtgttatttgctgtggca

SEQ ID NO: 490399 - DNA, 75 bp, synthetic construct
  source 1..75: mol_type = other DNA
tagcctctcgttctttatatccagtattaagccattatcaagatgacatattgaaagtaagaaatacatacctaa

SEQ ID NO: 490400 - DNA, 75 bp, synthetic construct
  source 1..75: mol_type = other DNA
tcaggtggggtataccagcagctgggttggcatcagttattcactctcattttcgtggaatgaatctgtagggat

SEQ ID NO: 490401 - DNA, 75 bp, synthetic construct
  source 1..75: mol_type = other DNA
gtcagaaacacaaaaattggtggagtggtttttaacgccgcaggggcagagcctggtggaagatgtaggttatgt

SEQ ID NO: 490402 - DNA, 75 bp, synthetic construct
  source 1..75: mol_type = other DNA
tgtacccctactcagagacagtgcctgtatgttttatctttgtgactgctgggcaatccaacgctcgaggatatt

SEQ ID NO: 490403 - DNA, 75 bp, synthetic construct
  source 1..75: mol_type = other DNA
acagaaccggcgcggtgctgctgtagcgagagcaattatccaggaatggtttaccagcggctggtatgggatggt

SEQ ID NO: 490404 - DNA, 75 bp, synthetic construct
  source 1..75: mol_type = other DNA
ccactgttacggtaattaaaactctgatggatgcgcttattgacatctctgttattgcagacagggcgcataagc

SEQ ID NO: 490405 - DNA, 75 bp, synthetic construct
  source 1..75: mol_type = other DNA
ttttatgttgtcctattcttttcagcaccattaattgcaaaattttatcatcaaccggaacttgaacttctatct

SEQ ID NO: 490406 - DNA, 75 bp, synthetic construct
  source 1..75: mol_type = other DNA
cgtcaatgtcatgaggattttctggatttcaaattaagattaattaaaagacttgatgaattgcttgcagaggat

SEQ ID NO: 490407 - DNA, 75 bp, synthetic construct
  source 1..75: mol_type = other DNA
ggaacctcgaattttcaattacccggacaccccttacccggccattacagtgaaagcgccctgtattctacgcta

SEQ ID NO: 490408 - DNA, 75 bp, synthetic construct
  source 1..75: mol_type = other DNA
ttttgccgtgtcaggtggtgattgtattaatacaattgatggtgtagccattgttggtgattactcggtagcaga

SEQ ID NO: 490409 - DNA, 75 bp, synthetic construct
  source 1..75: mol_type = other DNA
aataagtgatctgaaaaaaaatagcttaaaggctcaggaatacctggctatgtgtgaggaggctatcagggcttc

SEQ ID NO: 490410 - DNA, 75 bp, synthetic construct
  source 1..75: mol_type = other DNA
tataccctgataacgctttcatgctcagcggcggagttaggcgtacagggacacgcagcactactctggtgccac

SEQ ID NO: 490411 - DNA, 75 bp, synthetic construct
  source 1..75: mol_type = other DNA
ctgtgccgtctgcatcaatgcctgatgcatgggataacatgcagtctattgacaagttcgttaatagcagcgaag

SEQ ID NO: 490412 - DNA, 75 bp, synthetic construct
  source 1..75: mol_type = other DNA
gagcatgcagagtttctctacgaaagtggtcatgccgaagtcatcattatcaagcagggcccagccggtgcactc

SEQ ID NO: 490413 - DNA, 75 bp, synthetic construct
  source 1..75: mol_type = other DNA
gcacaaagataaaaacaaccatcattacaatatgtgcattatcatataatcttacagcgcaagcttccccgtcag

SEQ ID NO: 490414 - DNA, 75 bp, synthetic construct
  source 1..75: mol_type = other DNA
atatgatgcactgaaaaaggtaagtgcaaatctacagcaacagctggaagaagggcaacttgtgcaacaaacatt

SEQ ID NO: 490415 - DNA, 75 bp, synthetic construct
  source 1..75: mol_type = other DNA
atgctcgtgtaaccaaacaagtccaagacatcttttgtcgtttggggaaatcttgtagcgagagttgggagaatt

SEQ ID NO: 490416 - DNA, 75 bp, synthetic construct
  source 1..75: mol_type = other DNA
ctaaccctcgctctcggtaaaaataacgtagtgcttaccgagtattcacaacagctcagcgagttgcagcagcag

SEQ ID NO: 490417 - DNA, 75 bp, synthetic construct
  source 1..75: mol_type = other DNA
catggagaacactttatcagccgggaaataatgcgggcaacggtgtttaattatatcgaatgtgattacaatcgc

SEQ ID NO: 490418 - DNA, 75 bp, synthetic construct
  source 1..75: mol_type = other DNA
gtaaaattgacactgacccagtaaatcctgaaaaccagattcaggtttgtgtggagaatgaagacggttctcacg

SEQ ID NO: 490419 - DNA, 75 bp, synthetic construct
  source 1..75: mol_type = other DNA
aatgaaacatatagagttcagcagcaagcctggcaagaagaaaaggataccttaattcaggagcaaaccttgctg

SEQ ID NO: 490420 - DNA, 75 bp, synthetic construct
  source 1..75: mol_type = other DNA
cggggtcatattgcgccctgtccggggtgccggatgcacatgtctctggcgcaatgcccgggctttttattcgca

SEQ ID NO: 490421 - DNA, 75 bp, synthetic construct
  source 1..75: mol_type = other DNA
gcaggatgtggcggcagccgcaacggcccgtgatgatgcacaacgttttgcggagaaagcccgacaggatgcaac

SEQ ID NO: 490422 - DNA, 75 bp, synthetic construct
  source 1..75: mol_type = other DNA
cttttctgtatgaagatgttatccgttttgacactaagagtgatttcctggcccgggtaaggaatgcgctgccag

SEQ ID NO: 490423 - DNA, 75 bp, synthetic construct
  source 1..75: mol_type = other DNA
atgaatggtccattggtatattagaaaaaaaccagctttacttaggtataaaaggggttgttagtgcaacatttg

SEQ ID NO: 490424 - DNA, 75 bp, synthetic construct
  source 1..75: mol_type = other DNA
cgagcactgctgtcacatttgtcgccgttaggctgggagcatatcaatctgacaggcgattacatctggaaaagc

SEQ ID NO: 490425 - DNA, 75 bp, synthetic construct
  source 1..75: mol_type = other DNA
cggcgcaaccattacactaacctccatacacaaccgtgcagggattctgaaaagtgttttcagccatgtcaccac

SEQ ID NO: 490426 - DNA, 75 bp, synthetic construct
  source 1..75: mol_type = other DNA
acgcaggaactgaatcgcactgaaacggcgcgggaagtccagagaccgagcattgatgctcaccttctgtggctt

SEQ ID NO: 490427 - DNA, 75 bp, synthetic construct
  source 1..75: mol_type = other DNA
tcagtcagaccggtcattttcatgacggtattgcggtcaatgccgttctgagcatggtgcgggcaattttaagtt

SEQ ID NO: 490428 - DNA, 75 bp, synthetic construct
  source 1..75: mol_type = other DNA
atgagttttaaaaaaaaattactttatcataagttacttgctctacctatcttaactctttttattattttttcc

SEQ ID NO: 490429 - DNA, 75 bp, synthetic construct
  source 1..75: mol_type = other DNA
tgggatctttagtccatcttacttcataaagagttttaaaaatcactttggaattacaccaaaacaatttattat

SEQ ID NO: 490430 - DNA, 75 bp, synthetic construct
  source 1..75: mol_type = other DNA
tgaggtaagaatgaacaaagcaatgcaattgttacttgaaaatgagctgcaaatacatcaaatatcaaaggctgt

SEQ ID NO: 490431 - DNA, 75 bp, synthetic construct
  source 1..75: mol_type = other DNA
cggtaaccccaggcactacgcttggtcgtttcaaaacaatttcagccaatcagcccgtcaccatcggcgatgtca

SEQ ID NO: 490432 - DNA, 75 bp, synthetic construct
  source 1..75: mol_type = other DNA
agaaaagggcaatttgaagatgtatctctaaaactacaccagggcgaggttctgggattgtgtggtttacttggt

SEQ ID NO: 490433 - DNA, 75 bp, synthetic construct
  source 1..75: mol_type = other DNA
tgtcagagtaacattttcacgtgattcattatggcaagagtggaatgataaaattaagcaagataatatactaaa

SEQ ID NO: 490434 - DNA, 75 bp, synthetic construct
  source 1..75: mol_type = other DNA
attgaacaaaaacaggtgcgtttttctccgcgtatcgacgtgtctttcaacggtgtgatccaactgactgatggg

SEQ ID NO: 490435 - DNA, 75 bp, synthetic construct
  source 1..75: mol_type = other DNA
tcgctaattgagcaaccgctaacgttttatcaacaaacgttattttcttccattatgtgcctcgctgttctgcta

SEQ ID NO: 490436 - DNA, 75 bp, synthetic construct
  source 1..75: mol_type = other DNA
atgaacataaaaaaaaaattactttatcataaattactcgtcctacctatcttaacgctttttgtaatttttatc

SEQ ID NO: 490437 - DNA, 75 bp, synthetic construct
  source 1..75: mol_type = other DNA
gggctgccaatcaactttctccaggcgatattactgagttaatgaccggaaaaactatagtccaccagaaaaaac

SEQ ID NO: 490438 - DNA, 75 bp, synthetic construct
  source 1..75: mol_type = other DNA
aacattgtcacacaaaaacacctgttggtatatatgcgcatgtgtgatatgcatatatacacaaataaagaatgc

SEQ ID NO: 490439 - DNA, 75 bp, synthetic construct
  source 1..75: mol_type = other DNA
aagccatcacgctgaaaatcgacccgtcggtagtactggcgacccgtaaatatgtggatgacaaaatctcagaac

SEQ ID NO: 490440 - DNA, 75 bp, synthetic construct
  source 1..75: mol_type = other DNA
cagcggtgaaggcggaacatcgcactggggcggcggtggacgtgcaggcgctggcggtggtgttatcggtaaagc

SEQ ID NO: 490441 - DNA, 75 bp, synthetic construct
  source 1..75: mol_type = other DNA
acaataacgggcggcggtggcggagggggcggctgcaaggctacatccaataatgaaacgtttttcggtgctggc

SEQ ID NO: 490442 - DNA, 75 bp, synthetic construct
  source 1..75: mol_type = other DNA
aaccgatgcaactggcttctgatcctctttccatgcgtatttatacgcctgaagagtgtgaaagactggatgcca

SEQ ID NO: 490443 - DNA, 75 bp, synthetic construct
  source 1..75: mol_type = other DNA
gccgcatccagacgatttatcagccggggagcttcacaccactcatcagagttgaaactgccaccggtgaactgg

SEQ ID NO: 490444 - DNA, 75 bp, synthetic construct
  source 1..75: mol_type = other DNA
cacgcagggccatgaaacgcggtatgaatataacgccgccggtgacctgaccaccgtcattgccccggacggcag

SEQ ID NO: 490445 - DNA, 75 bp, synthetic construct
  source 1..75: mol_type = other DNA
tctggaagaaatggcgaagcgaagtccacagttgtttgcccactggcgtctgaagatgagaggcggacttgtttg

SEQ ID NO: 490446 - DNA, 75 bp, synthetic construct
  source 1..75: mol_type = other DNA
gacggttttcgttgaatacccaaatgatgataaaaagtactggtacattgatgagaagacatttgatctaataga

SEQ ID NO: 490447 - DNA, 75 bp, synthetic construct
  source 1..75: mol_type = other DNA
tatctgatatcaaaattagaagcaagagacaaactaatattttctttaagagtttcatcggctatttcctttggt

SEQ ID NO: 490448 - DNA, 75 bp, synthetic construct
  source 1..75: mol_type = other DNA
tcctgcgcaatattggagcaacaaattcaacaaccatgtcttttagtggtggtacaggatggttcaggctggcaa

SEQ ID NO: 490449 - DNA, 75 bp, synthetic construct
  source 1..75: mol_type = other DNA
tggtggcggggcaataaattccgctgctgatgtttcgaaaatggcaaagtctggtacaggaagagagattattgc

SEQ ID NO: 490450 - DNA, 75 bp, synthetic construct
  source 1..75: mol_type = other DNA
cgcctgacggatgaactgcgtgctcagggttaccactttaacgtaaaaaccgtggcggcaagcctgcgccgtcag

SEQ ID NO: 490451 - DNA, 75 bp, synthetic construct
  source 1..75: mol_type = other DNA
tgctatttttgattgcgatcatataccttctgtttcttttttaacgaaaacaatgggttggtttattgctgatga

SEQ ID NO: 490452 - DNA, 75 bp, synthetic construct
  source 1..75: mol_type = other DNA
gaccttttggacatccggatggtgatattcgtgatttatcatttcttgatgctcatcaggctgtctacgttcagc

SEQ ID NO: 490453 - DNA, 75 bp, synthetic construct
  source 1..75: mol_type = other DNA
ataaacaatattgctaaagaaatggagaagctaggaattaaagtaataaggaaagcagataaatatttgccacca

SEQ ID NO: 490454 - DNA, 75 bp, synthetic construct
  source 1..75: mol_type = other DNA
ccacgacgccagcggcagacgaacagagaaacgctgcgaccggaagaaaatccgcttcacgtatctgtgggacgg

SEQ ID NO: 490455 - DNA, 75 bp, synthetic construct
  source 1..75: mol_type = other DNA
agaagaatcattgatgccgatcgtcgcccgccttgatgcagaagatcgttgtcctctggacgcattaataattcg

SEQ ID NO: 490456 - DNA, 75 bp, synthetic construct
  source 1..75: mol_type = other DNA
tggccattatatttagttgctaaacaattagttcaggccagccaaccgacagaagaatcattaatgccgatcgtc

SEQ ID NO: 490457 - DNA, 75 bp, synthetic construct
  source 1..75: mol_type = other DNA
gctgcctcgaatccgaatatcggtaaagatctgaccgatgcggaaaaagtagaactgggcggttccggctcagga

SEQ ID NO: 490458 - DNA, 75 bp, synthetic construct
  source 1..75: mol_type = other DNA
cggcaggcgcatccgtcggtggccccgcagtgggtgacgcggacgaatcatgcggtgagcgacctgacgggccgt

SEQ ID NO: 490459 - DNA, 75 bp, synthetic construct
  source 1..75: mol_type = other DNA
attatcacattgcagaagttcagcgaatgcaggcattgatcaggctgaaagaagacatcagggatgagcggcaga

SEQ ID NO: 490460 - DNA, 75 bp, synthetic construct
  source 1..75: mol_type = other DNA
aacacagaaaatgggcattatatcgtcatcattaactgccgccacatagaggttgataatgtgaacttgaggggg

SEQ ID NO: 490461 - DNA, 75 bp, synthetic construct
  source 1..75: mol_type = other DNA
gtgggtgacgcggacgaatcatgcggtgagcgacctgacgggccgcccgctgatgctctttaacagtgaaggtaa

SEQ ID NO: 490462 - DNA, 75 bp, synthetic construct
  source 1..75: mol_type = other DNA
tgccggaggccaccggctgaaacaggccggaaacacgcagtatgactatgacgccgcaggccggatggtcagccg

SEQ ID NO: 490463 - DNA, 75 bp, synthetic construct
  source 1..75: mol_type = other DNA
gtgtttaacggctttgagctgataagccagcagttcagccgggtacggcagccgcatccgtccgtcgccccgctg

SEQ ID NO: 490464 - DNA, 75 bp, synthetic construct
  source 1..75: mol_type = other DNA
atggtgccgtcagcatcgagtcgattattacccattagtggtgatgatgattgaagctcgtgaactggttaacga

SEQ ID NO: 490465 - DNA, 75 bp, synthetic construct
  source 1..75: mol_type = other DNA
ctggaccgttccgaaggagcacagcaaaacgaaggtagccatattccggcccataccggaagcgatactgccgtt

SEQ ID NO: 490466 - DNA, 75 bp, synthetic construct
  source 1..75: mol_type = other DNA
caatggtgttcctcgccagtgccgcttcagattatgtcaatggacaactattagtcattgatggtggatattcaa

SEQ ID NO: 490467 - DNA, 75 bp, synthetic construct
  source 1..75: mol_type = other DNA
cctggctgaagtacgggcgcagggggtggagatgatgcgcgaacatccatcaatcaaactttgctctttgacgca

SEQ ID NO: 490468 - DNA, 75 bp, synthetic construct
  source 1..75: mol_type = other DNA
tatgatggcgatattattaagcccaagaaacagtgggtctgggcaaaagaacgattgttgaaagctatcgaagat

SEQ ID NO: 490469 - DNA, 75 bp, synthetic construct
  source 1..75: mol_type = other DNA
ggttcggcagtcagcgtattgcggctgatgtcctgaggctgagaaagagcggaatgccggtggtgacaacgaccg

SEQ ID NO: 490470 - DNA, 75 bp, synthetic construct
  source 1..75: mol_type = other DNA
ggagtgctggtggtgactacgaatgtggaggtgcatgataatctgacaggaacaacccgcaaaataccggcatac

SEQ ID NO: 490471 - DNA, 75 bp, synthetic construct
  source 1..75: mol_type = other DNA
tatgataaaaagacattcaaactaaatggcgtaaatttgaaatttatacatccagaaattttaccttacaaacaa

SEQ ID NO: 490472 - DNA, 75 bp, synthetic construct
  source 1..75: mol_type = other DNA
accttaaacgggttgacgagaatgtcagaaagcaggccggggagtttctgactgtgaacagtcgttatttctggt

SEQ ID NO: 490473 - DNA, 75 bp, synthetic construct
  source 1..75: mol_type = other DNA
cccggcgggctgcgcagattactgaaagtcttcaggcctttatcggtggaggtcgtgacgggcagaagcagaagg

SEQ ID NO: 490474 - DNA, 75 bp, synthetic construct
  source 1..75: mol_type = other DNA
cagggctggccgaagaccaccagaaagcgactgagtcaattaagcaggctgatgcagctgttaagttggcacacg

SEQ ID NO: 490475 - DNA, 75 bp, synthetic construct
  source 1..75: mol_type = other DNA
cacggtaaaggctacgccagtttctgggtggtcgtcacacagattgtcatccttgacgccgtcttctcgttggat

SEQ ID NO: 490476 - DNA, 75 bp, synthetic construct
  source 1..75: mol_type = other DNA
tttctggctggcgaaggtgaatccctggtaaccgaagagctgccagtaaaatctgaagcacaggatatgctgacc

SEQ ID NO: 490477 - DNA, 75 bp, synthetic construct
  source 1..75: mol_type = other DNA
ttgatatgaaagaacgtgatatgcattcagagtttctaatgtcatacagtaacggtacaatggaaattaaaaatg

SEQ ID NO: 490478 - DNA, 75 bp, synthetic construct
  source 1..75: mol_type = other DNA
ctgatgcaaatattgctattgtgcctaatggtttttgttctgaatcgtatgaacaaaataatactgaagatttga

SEQ ID NO: 490479 - DNA, 75 bp, synthetic construct
  source 1..75: mol_type = other DNA
tgaagctgtataaacagattcgtagcagaagccctcacgcgcagctagttatgcatcttcataatgctttcgagc

SEQ ID NO: 490480 - DNA, 75 bp, synthetic construct
  source 1..75: mol_type = other DNA
tgaggcaaatgaccggttcatgcagtcgtcatttatgctggccggaggggtattataatccggactatatcaggg

SEQ ID NO: 490481 - DNA, 75 bp, synthetic construct
  source 1..75: mol_type = other DNA
atgactacgaagcggatggtaatggcatcgtactgttaccggagcgcgtgatattcaacaaagagaatatcggca

SEQ ID NO: 490482 - DNA, 75 bp, synthetic construct
  source 1..75: mol_type = other DNA
cttaatattgaaaacagacgaataacactaaaagtttccgagatcaacttttgcaataatgcaacgtcatgtatt

SEQ ID NO: 490483 - DNA, 75 bp, synthetic construct
  source 1..75: mol_type = other DNA
ttgccagtaaaaaaggcgaaaaagctgaatatcagaaaaaagttctggatgcagcgaaagctattggagcgcaat

SEQ ID NO: 490484 - DNA, 75 bp, synthetic construct
  source 1..75: mol_type = other DNA
atggaggcgaaacggcaggtgagggggcaggcggaaggaagtgatgtctggttgcatcaacaacaggcggcgctg

SEQ ID NO: 490485 - DNA, 75 bp, synthetic construct
  source 1..75: mol_type = other DNA
ttcgacggttcggctaaaacgacgggggcaacacctctgttgagcaataccagtgctggcgaagcaacaggtgtc

SEQ ID NO: 490486 - DNA, 75 bp, synthetic construct
  source 1..75: mol_type = other DNA
acggtaacatcgtattaggttcagccgcgccagatcttgacctggatgcaagctcatcagaacagacgctgaact

SEQ ID NO: 490487 - DNA, 75 bp, synthetic construct
  source 1..75: mol_type = other DNA
cacgcaaaagcgtcatgctgacctttgatgacggctacctggataactggttttatgcctttccggtgttacagg

SEQ ID NO: 490488 - DNA, 75 bp, synthetic construct
  source 1..75: mol_type = other DNA
tttttttatcggggcggaaaacttccccgtaaaagcgttatgttgacatttgatgatggatatcttgacaactgg

SEQ ID NO: 490489 - DNA, 75 bp, synthetic construct
  source 1..75: mol_type = other DNA
gactggctggcagcgcagggggagagaagcggttttacactgctggatacctcggttgatgcctaccgacaacag

SEQ ID NO: 490490 - DNA, 75 bp, synthetic construct
  source 1..75: mol_type = other DNA
ctgttgcgacaaattcattagcatatataaatatacaaaaccacggaggaactgtacttattagaaaaaacggca

SEQ ID NO: 490491 - DNA, 75 bp, synthetic construct
  source 1..75: mol_type = other DNA
tccccatcccctgcccgggcaatccggaaaaatcccttgccatccagtctgaaatcgttcggattctggataaat

SEQ ID NO: 490492 - DNA, 75 bp, synthetic construct
  source 1..75: mol_type = other DNA
aagcacaaatcaggccaaagtatctttactacttcttgacgacggttggccttggcgaaatgaaccaagcaggag

SEQ ID NO: 490493 - DNA, 75 bp, synthetic construct
  source 1..75: mol_type = other DNA
aatcgagttgcgccagaaacaatacgagtactatcgtgatttactgttcagtttcccaacacctgaaactgtcag

SEQ ID NO: 490494 - DNA, 75 bp, synthetic construct
  source 1..75: mol_type = other DNA
gatttgctttataaggagtatagagaaaggttttcgttagagtcacttctgaataatattgaacagctatattta

SEQ ID NO: 490495 - DNA, 75 bp, synthetic construct
  source 1..75: mol_type = other DNA
tatgcgctgttaggcccggatgtggtgattgtgggatcagcgatcacgcatgcagcggatcctgctgatgaagcg

SEQ ID NO: 490496 - DNA, 75 bp, synthetic construct
  source 1..75: mol_type = other DNA
ccagtcatgcatctgtgcggcgaaggaggctggaaagcaggtggtggtggatatgatctgcgtcgacgatctccc

SEQ ID NO: 490497 - DNA, 75 bp, synthetic construct
  source 1..75: mol_type = other DNA
ctaccgtgggatgatgtcgttaccaacccactgaaggcgcaacgactggcagaagaacttaacgaaaagcaggtg

SEQ ID NO: 490498 - DNA, 75 bp, synthetic construct
  source 1..75: mol_type = other DNA
caacaccattccgttccaggcgcgttattatgcaatcggcgaggcaacccctggcgcagctaatgcggatgcgac

SEQ ID NO: 490499 - DNA, 75 bp, synthetic construct
  source 1..75: mol_type = other DNA
tttgtatggtctggcgggttttggttatatcatcgtcgccacctacctgccgctcatggcgaaagacgcgggcca

SEQ ID NO: 490500 - DNA, 75 bp, synthetic construct
  source 1..75: mol_type = other DNA
acgctctatagcaaactcgatgagctatctgcaggagcatttgattacgtcattgtcgatgaagcccatcatacg

SEQ ID NO: 490501 - DNA, 75 bp, synthetic construct
  source 1..75: mol_type = other DNA
gcactcaaaaatgtatgatcaggaacgacgagaaaatattcgattgttcagggaaggggattataaatacatttt

SEQ ID NO: 490502 - DNA, 75 bp, synthetic construct
  source 1..75: mol_type = other DNA
atgtgaaggctcttaatcaactagttaccggcgccacgctggcaaatgttacctataaaattttagttaccaact

SEQ ID NO: 490503 - DNA, 75 bp, synthetic construct
  source 1..75: mol_type = other DNA
tgcctgacggcgaatttgctggtgcaggctattagtgtgttgcttactctcgccagcgactcgcctctcttgctt

SEQ ID NO: 490504 - DNA, 75 bp, synthetic construct
  source 1..75: mol_type = other DNA
atcaagaccgatggaagtacaggtgtttatatcggtggtctcaacggcaataacgccaatggtgctgcgcgtttt

SEQ ID NO: 490505 - DNA, 75 bp, synthetic construct
  source 1..75: mol_type = other DNA
cgttaagcggtcatttgtcagtcagctatggcaatggcgcaggggtagaatcgccgtggaatactcaggcgggag

SEQ ID NO: 490506 - DNA, 75 bp, synthetic construct
  source 1..75: mol_type = other DNA
acagatgctggcgattggttttggcgaggcaaccatgaatacgctgcaacgcttaagtggttttatttcgtcaca

SEQ ID NO: 490507 - DNA, 75 bp, synthetic construct
  source 1..75: mol_type = other DNA
ctggcccaggtgatctggagtccgggttgaaaatagttaccaaccagctgagcgacgtaaatcgcaaactggatt

SEQ ID NO: 490508 - DNA, 75 bp, synthetic construct
  source 1..75: mol_type = other DNA
tctgcttccttgcgttctgctttgagtacgctggggtacagcaccacggcctgagctataactgctcccttccgc

SEQ ID NO: 490509 - DNA, 75 bp, synthetic construct
  source 1..75: mol_type = other DNA
tgcgggtgtcgataaggttccgttccctgagcgcatcaagttcattgaggaaaaccacgagaacatcatggcttg

SEQ ID NO: 490510 - DNA, 75 bp, synthetic construct
  source 1..75: mol_type = other DNA
tttttcgttacctgatatagcggaattcaacattcctgacgggctggatgctgtcagagatgcgttgcgaagaaa

SEQ ID NO: 490511 - DNA, 75 bp, synthetic construct
  source 1..75: mol_type = other DNA
acagcaaagatttaaaaccggttcacatggttgaggttgtcgaaaagattgatttttctttgcccgagatagcga

SEQ ID NO: 490512 - DNA, 75 bp, synthetic construct
  source 1..75: mol_type = other DNA
ttccggtgcgatcatcggtgcggtactcggcgcatggttcctgacgcagatcgatagcgtactggtgctgttgcg

SEQ ID NO: 490513 - DNA, 75 bp, synthetic construct
  source 1..75: mol_type = other DNA
tgttgatgagtttacttcaaccacaacagatgctggcgattggttttggcgaggcaaccatgaatacgctgcaac

SEQ ID NO: 490514 - DNA, 75 bp, synthetic construct
  source 1..75: mol_type = other DNA
ggtttttcaggtataaaaaaagcggccccgaaatggagccgcctttctgaacagataacccgctgcgccgtttgt

SEQ ID NO: 490515 - DNA, 75 bp, synthetic construct
  source 1..75: mol_type = other DNA
ggatgttcagcagaacagcgtctggcggcaagaaaagccagagccgcgccactgatgcagtcactgtatgactgg

SEQ ID NO: 490516 - DNA, 75 bp, synthetic construct
  source 1..75: mol_type = other DNA
ggctcactgcgcgatgagctgggtaatgactccaacttactgatagtgttttatgttcagataatgcccgatgac

SEQ ID NO: 490517 - DNA, 75 bp, synthetic construct
  source 1..75: mol_type = other DNA
atggcgcagatacgcttgcgggttgataccattcaggcagcaggtccgttcactaccgtaatcactgccgaagaa

SEQ ID NO: 490518 - DNA, 75 bp, synthetic construct
  source 1..75: mol_type = other DNA
tattcagatgctcgccatgccacgcagtgacctgcgggttattacccgccagggcgatattggcatggaagagtt

SEQ ID NO: 490519 - DNA, 75 bp, synthetic construct
  source 1..75: mol_type = other DNA
atcgacagatttcgttgctggctaaagaaaagccggtagaaggcagtccactgtttttactacaaatgtgtacgg

SEQ ID NO: 490520 - DNA, 75 bp, synthetic construct
  source 1..75: mol_type = other DNA
tcaatgtgaagttattacagatttaattagctacatcatcggttgcatgatgggccgttactccctcgatcgcga

SEQ ID NO: 490521 - DNA, 75 bp, synthetic construct
  source 1..75: mol_type = other DNA
atcaagccaaaaaaaggcgaatctgcgctggagaccattcgccgctatctttccacccagttctggaaagatcat

SEQ ID NO: 490522 - DNA, 75 bp, synthetic construct
  source 1..75: mol_type = other DNA
taagaaaaattaacttttccgcaaaagatcgtgccgacgcattaaattctcaggcaaaatggtttccttgccaaa

SEQ ID NO: 490523 - DNA, 75 bp, synthetic construct
  source 1..75: mol_type = other DNA
ctaaataggctgattcgatgtgtttgcgggaaaaaaatcggcccagatccgcgaaattttaatcagcgagtcagc

SEQ ID NO: 490524 - DNA, 75 bp, synthetic construct
  source 1..75: mol_type = other DNA
agaataaagaatatggtggactaatatgtaagaagcaaggtgaatatttccctatgaatccgataagttcaaatg

SEQ ID NO: 490525 - DNA, 75 bp, synthetic construct
  source 1..75: mol_type = other DNA
aatgaggagaacccgcatcacctgcaccagccgtaccggctgccggggcagcagtatgataaggagtcggggctg

SEQ ID NO: 490526 - DNA, 75 bp, synthetic construct
  source 1..75: mol_type = other DNA
agttaatgggtgaaccattaattattagtaaaggacgctatgaattaagcattatggcactatttaaagaaaaga

SEQ ID NO: 490527 - DNA, 75 bp, synthetic construct
  source 1..75: mol_type = other DNA
aggcaattgctgccctcgaacaagaacttggtgtgaatatactgttacgcgatcgccgtaaagctatacaactga

SEQ ID NO: 490528 - DNA, 75 bp, synthetic construct
  source 1..75: mol_type = other DNA
atgactcttacccaaataaattctttactcgccgtgctggattacggtggctttactgaagccagcaagcgattg

SEQ ID NO: 490529 - DNA, 75 bp, synthetic construct
  source 1..75: mol_type = other DNA
aatactggcgattccggtactggatagacaagaaagagcggttacaggctattggggtgtatccgctgattagcc

SEQ ID NO: 490530 - DNA, 75 bp, synthetic construct
  source 1..75: mol_type = other DNA
ttaacccagtggaacaagcccgcaaggaaaaagccattgatgcgctcaacatggcggcaggatttaagaaggtgg

SEQ ID NO: 490531 - DNA, 75 bp, synthetic construct
  source 1..75: mol_type = other DNA
atttttcgcacgcgatttttcaggagaagatattcgcaaggtacaggttacttggggaaaagcccaccggattaa

SEQ ID NO: 490532 - DNA, 75 bp, synthetic construct
  source 1..75: mol_type = other DNA
cggaagactggtttgctaccagagtgagcggttggtcagagtcttacacgaaacaggttagatcggcactggaga

SEQ ID NO: 490533 - DNA, 75 bp, synthetic construct
  source 1..75: mol_type = other DNA
ggccttctacaaagcccttgagagagccgggagcgttcagattcagacggcaatacgtttgcttatattaagcgc

SEQ ID NO: 490534 - DNA, 75 bp, synthetic construct
  source 1..75: mol_type = other DNA
ggacaagccctacaaactcacagattcacaaacgccaggccttttcttgctggtccatcccaacggtagtaagta

SEQ ID NO: 490535 - DNA, 75 bp, synthetic construct
  source 1..75: mol_type = other DNA
tatgtatggcccgcgccttgctgctgttaaggttcttaacaataaagggaaagttactatagatggtcagcttgt

SEQ ID NO: 490536 - DNA, 75 bp, synthetic construct
  source 1..75: mol_type = other DNA
atcaggttttaatcttaaatctacacttaagctagcagatgaccatactattggatatgcagatcctattgttga

SEQ ID NO: 490537 - DNA, 75 bp, synthetic construct
  source 1..75: mol_type = other DNA
cggctggacaatcaagggcaaacccgccagtggacgtgctgtattgtcacaggaacaggacgggattaaatcgca

SEQ ID NO: 490538 - DNA, 75 bp, synthetic construct
  source 1..75: mol_type = other DNA
gcttttttttcctgggctggacaggatgaaacagtgaaacgccagcattgggatttgctgggcaacagtagtcag

SEQ ID NO: 490539 - DNA, 75 bp, synthetic construct
  source 1..75: mol_type = other DNA
tttgtgtgatccttgcagtacttactttcaggaaagtttcaaactattccagaaataaaggtcggggaaagttcc

SEQ ID NO: 490540 - DNA, 75 bp, synthetic construct
  source 1..75: mol_type = other DNA
cgaatgacatcgaaaaactgcgtgctatggcacttgccatggtacaaaaagtgatgtcggagaatgccgaaaaag

SEQ ID NO: 490541 - DNA, 75 bp, synthetic construct
  source 1..75: mol_type = other DNA
ccgttatcaccgaactggttaaccgaaatccggttgcagatctggactcagccctgaaagcccgccgaccaggtc

SEQ ID NO: 490542 - DNA, 75 bp, synthetic construct
  source 1..75: mol_type = other DNA
atccaaaaggcagaggaacgtcaggaacgagatcaactcggtcgtctcatctatcccaaaaaagagtttactgaa

SEQ ID NO: 490543 - DNA, 75 bp, synthetic construct
  source 1..75: mol_type = other DNA
ctctagaagaattagcctgggatgagcaatacctagtacgcgtctgtgttgtactggccgaacttgccagccacg

SEQ ID NO: 490544 - DNA, 75 bp, synthetic construct
  source 1..75: mol_type = other DNA
caacgacgggccatgatgcaggactacgccgacgccattgattcaatattggctggtgacggcaacccgcttgag

SEQ ID NO: 490545 - DNA, 75 bp, synthetic construct
  source 1..75: mol_type = other DNA
tcagcgaagacggcaatacggcgtggagcgcggaatatgatgaatggggcaaccagcttaatgaggagaacccgc

SEQ ID NO: 490546 - DNA, 75 bp, synthetic construct
  source 1..75: mol_type = other DNA
ggcagcagcatgatgaggagtcggggctgtactataaccgtcaccggcactacgatccgttgcaggggcggtata

SEQ ID NO: 490547 - DNA, 75 bp, synthetic construct
  source 1..75: mol_type = other DNA
agctggttcaaaagttggttcatccatccaaaaggcagaggaacgtcaggaacgagatcaactcggtcgtctcat

SEQ ID NO: 490548 - DNA, 75 bp, synthetic construct
  source 1..75: mol_type = other DNA
caacggcgagcaatgatgcaggattacgccgacgctattgattcaatattggctggtactggcaatccgcttgag

SEQ ID NO: 490549 - DNA, 75 bp, synthetic construct
  source 1..75: mol_type = other DNA
ttgagcaagacaccactcacagcaaaggccatcgcagccgcgcagccaaaagacaagccctataaactcaccgat

SEQ ID NO: 490550 - DNA, 75 bp, synthetic construct
  source 1..75: mol_type = other DNA
ggggagatcttcaaatttgccgttatcaccgaactggttaaccggaatccggttgcagatctggatacggcattg

SEQ ID NO: 490551 - DNA, 75 bp, synthetic construct
  source 1..75: mol_type = other DNA
ggcattctacaaagcccttgagagagccgggagcgtccagattcagacggcaatacgtttgcttatcctcacggc

SEQ ID NO: 490552 - DNA, 75 bp, synthetic construct
  source 1..75: mol_type = other DNA
ctcaacatggcggcaggttttaagacggtagcggaggactggtttgctaccagagtgagcggttggtcagagtct

SEQ ID NO: 490553 - DNA, 75 bp, synthetic construct
  source 1..75: mol_type = other DNA
caacggcgggccatgatgcaggactacagcgacgccatcgaccagatattggctggaaacggaaatcccctggaa

SEQ ID NO: 490554 - DNA, 75 bp, synthetic construct
  source 1..75: mol_type = other DNA
atgggaggatgcaacgttacaccacccgtagtgggactatgtacattcgcggactgactgcctcatgggatgcag

SEQ ID NO: 490555 - DNA, 75 bp, synthetic construct
  source 1..75: mol_type = other DNA
gcgcagacccgatcctcaacaataccagtacgggtgaagccaccggtgtcggcgtgcgtttaatgaataaagatc

SEQ ID NO: 490556 - DNA, 75 bp, synthetic construct
  source 1..75: mol_type = other DNA
aaagaaattgagctaggtcaggtgaccaccagccacattaatcagtctcatcacagcgatgcggttgctgtcgac

SEQ ID NO: 490557 - DNA, 75 bp, synthetic construct
  source 1..75: mol_type = other DNA
ggtattgaagatccgcttcgatcaggggatgggctactggcgcatcaacttttcatcgcaatggcattactttga

SEQ ID NO: 490558 - DNA, 75 bp, synthetic construct
  source 1..75: mol_type = other DNA
tttttctctgcttcaggattgaataaagctgaaaactatcatttaaaaaagcttccactgaaccgccccgggaat

SEQ ID NO: 490559 - DNA, 75 bp, synthetic construct
  source 1..75: mol_type = other DNA
tattggtaacgataatgagcgaaaatatggtttttatgatgcaaatgttggtgttgttgagttttcagatacaga

SEQ ID NO: 490560 - DNA, 75 bp, synthetic construct
  source 1..75: mol_type = other DNA
ctgcactgttgacgggcggaggtgcagcaggtgccgccagtgtcgcgctgacaccgttcgtcggcgtgccggtgg

SEQ ID NO: 490561 - DNA, 75 bp, synthetic construct
  source 1..75: mol_type = other DNA
gcagctggttggcgcggcggaggtctattggcctggtctattgttattggccgcatcgccccagctggccctgct

SEQ ID NO: 490562 - DNA, 75 bp, synthetic construct
  source 1..75: mol_type = other DNA
aatagtgaaggtgcattctccatccacaatcatgtggcagacaatgtgttgctggaaaacggtggtcatttagac

SEQ ID NO: 490563 - DNA, 75 bp, synthetic construct
  source 1..75: mol_type = other DNA
ctcatattatcaaccatggccagcagagtgtttatggcggagtatctaatggaagtcttattgaatctggtggat

SEQ ID NO: 490564 - DNA, 75 bp, synthetic construct
  source 1..75: mol_type = other DNA
gcccggtaaccaataaaatcctggatacggcttttaaaggcttaaccccttatctgcctacccatatttcgttcg

SEQ ID NO: 490565 - DNA, 75 bp, synthetic construct
  source 1..75: mol_type = other DNA
tgaaaattgttttgaacgcgttacctttgttaattcgcacatgtcatttgactaaagaacaggtactcgatctcc

SEQ ID NO: 490566 - DNA, 75 bp, synthetic construct
  source 1..75: mol_type = other DNA
agagcgcatcgcacgcctgctgacgttggcgcctgggccagcatcagcgttgccactccgcgcgccccatttttt

SEQ ID NO: 490567 - DNA, 75 bp, synthetic construct
  source 1..75: mol_type = other DNA
ggaatatatacagattatgacgtcactcctgcttatggaaaaaatgtctacaaaataattcaagagcatagtatt

SEQ ID NO: 490568 - DNA, 75 bp, synthetic construct
  source 1..75: mol_type = other DNA
agtacaattcatatataaaagctttcagatccatatctcaatatcatatagattttttaatagtcgacaaaacta

SEQ ID NO: 490569 - DNA, 75 bp, synthetic construct
  source 1..75: mol_type = other DNA
catcgtcagatagcccgtaagctgaagatcagtgcctcagttgtatcaaaatggagatgtgagttagtggagcaa

SEQ ID NO: 490570 - DNA, 75 bp, synthetic construct
  source 1..75: mol_type = other DNA
cacacagttcgtgaagcaggctgcgacgttctttggacccgatcgtcacttcgaagattactggcaacagccagc

SEQ ID NO: 490571 - DNA, 75 bp, synthetic construct
  source 1..75: mol_type = other DNA
cggccatccctgttgttacaatagtaattttatctggtcagcaatcgcataagttggaactaattgctgtgcatt

SEQ ID NO: 490572 - DNA, 75 bp, synthetic construct
  source 1..75: mol_type = other DNA
acaatcgcccgtaacgttcgctccctcatcctctggacagaacgcggcgcagcccgtcacgcaaaaatgctcgaa

SEQ ID NO: 490573 - DNA, 75 bp, synthetic construct
  source 1..75: mol_type = other DNA
gaggcttataaaaagaagtatgtttctgatgtagaaaaaaacaatgctgagatgcagttaattgataaaaaaatg

SEQ ID NO: 490574 - DNA, 75 bp, synthetic construct
  source 1..75: mol_type = other DNA
ctcctggcaccttcagttcgcgaatgctgtttgccgatgaattttttctgatctgccatcgcagtcacccgctgg

SEQ ID NO: 490575 - DNA, 75 bp, synthetic construct
  source 1..75: mol_type = other DNA
gctcgccgattgattcagtcacatgatgacgctgtcgttgagatcgcatcctatgccaccggttacaaaggcaaa

SEQ ID NO: 490576 - DNA, 75 bp, synthetic construct
  source 1..75: mol_type = other DNA
gaaaccttattactcggtaagcagtttgggtacaagatggaatgcagcagtaaaacgtgctggtattcgccgccg

SEQ ID NO: 490577 - DNA, 75 bp, synthetic construct
  source 1..75: mol_type = other DNA
atccacggcacgcagttgaaacgcgagcaacgtgattactgttcagtacgttgcgcttcgcacgaccagatggct

SEQ ID NO: 490578 - DNA, 75 bp, synthetic construct
  source 1..75: mol_type = other DNA
cgcaacggctcacagctggcgcgcaaagaaaaagagtattgctccaaacgttgcgcttcgcacgaccagatggct

SEQ ID NO: 490579 - DNA, 75 bp, synthetic construct
  source 1..75: mol_type = other DNA
ggtcagcatcgtgaccggcctgacgctgttccagtttcagcataagaacatcgccattgtgccgtttcgcgatct

SEQ ID NO: 490580 - DNA, 75 bp, synthetic construct
  source 1..75: mol_type = other DNA
aaaagtaagtactcccttgctgtggaattattggagtcaactttaatagcaggtgttacatttaaatcgctggac

SEQ ID NO: 490581 - DNA, 75 bp, synthetic construct
  source 1..75: mol_type = other DNA
agttgctgaatgcaagtgaaacggcagaagatctgcttgctctagtttgtgatttatatgctcaagaattacata

SEQ ID NO: 490582 - DNA, 75 bp, synthetic construct
  source 1..75: mol_type = other DNA
aagatgaacgagatttgttagataacccctgtctgaacattaaaataggaaccgagattttatataaccattttt

SEQ ID NO: 490583 - DNA, 75 bp, synthetic construct
  source 1..75: mol_type = other DNA
aagcagatgctgacttagcagcagtggcactgttgcaaatagtcggtggtgataaacttatcatccccttttgct

SEQ ID NO: 490584 - DNA, 75 bp, synthetic construct
  source 1..75: mol_type = other DNA
ttctgagcgaactaacaactctcgacgctgaaatgagcattgtggctggccaacgccctaaaatggatgcttatc

SEQ ID NO: 490585 - DNA, 75 bp, synthetic construct
  source 1..75: mol_type = other DNA
tataacaatggcgaatgtaaagccagtgatgccaatgcctttggtttttgttctaaaaaatacagtgactgggga

SEQ ID NO: 490586 - DNA, 75 bp, synthetic construct
  source 1..75: mol_type = other DNA
cctggctgatggtgccgtttgcgctactgcttggtgtcggtcctctggtgcgctgggggcgggatcgcccgcgta

SEQ ID NO: 490587 - DNA, 75 bp, synthetic construct
  source 1..75: mol_type = other DNA
aatcagaaactgaatctcaatgatcctcaggttatcgcgaaactcatttctgctatatctcaaaaagaaggggct

SEQ ID NO: 490588 - DNA, 75 bp, synthetic construct
  source 1..75: mol_type = other DNA
gcgggagcggtgacgttgttatttataacaacaccggcgggaatgccgtggtaacttcagcgcaattgggggcga

SEQ ID NO: 490589 - DNA, 75 bp, synthetic construct
  source 1..75: mol_type = other DNA
ttgcaatggaaaaccaaaaaaagaggctgcaatatgcaaaaaaatatatgttgtatataccagacttaatgaaat

SEQ ID NO: 490590 - DNA, 75 bp, synthetic construct
  source 1..75: mol_type = other DNA
gcgcaggtatgtacctttgcgtcccaattgcttattcctaaacaatcggaagaagagttaacgcaaaatgtggtg

SEQ ID NO: 490591 - DNA, 75 bp, synthetic construct
  source 1..75: mol_type = other DNA
tgtaccaactaaatggctggtatggtgcaaacggtggcgtgctacctcagtacttcgcccttcatctattttgtc

SEQ ID NO: 490592 - DNA, 75 bp, synthetic construct
  source 1..75: mol_type = other DNA
gaggggattatttccgatggtctcaccgttcaaaaagcggtcgataatgccctcccaagtttaaaacttccacgt

SEQ ID NO: 490593 - DNA, 75 bp, synthetic construct
  source 1..75: mol_type = other DNA
ctaagtatcagtatatctaggttgaattatgcgcatcagatagtaatgaatatggttcattactataccaaaacg

SEQ ID NO: 490594 - DNA, 75 bp, synthetic construct
  source 1..75: mol_type = other DNA
cgttaatacaattattattggtttactaaatgagataagcaaaaaaaaagtaggctgggatgtaaatgaggtttt

SEQ ID NO: 490595 - DNA, 75 bp, synthetic construct
  source 1..75: mol_type = other DNA
gtaactctgcgctggtgtatatcgaaaaatatacgggcaatgcgccgaagttaacggcgtttgatcagccagcta

SEQ ID NO: 490596 - DNA, 75 bp, synthetic construct
  source 1..75: mol_type = other DNA
ataccttttggatacttgattgtagaaaacccattatggctagaaaatatatacattgccgctccaattttccta

SEQ ID NO: 490597 - DNA, 75 bp, synthetic construct
  source 1..75: mol_type = other DNA
ctgtttacctctttctcaggaagtttagtctccaggattcccggggcggttcagtgagggccggggatatcgact

SEQ ID NO: 490598 - DNA, 75 bp, synthetic construct
  source 1..75: mol_type = other DNA
tttcgctggtggtccgcagcatttcggcatgtacgacaccgaagctgaggcctacattgtccgctgcgctgtcct

SEQ ID NO: 490599 - DNA, 75 bp, synthetic construct
  source 1..75: mol_type = other DNA
atgtaccgactgttactgtattccttcctgatactaccggtggctgcatctgccggtacaacaatttataccgat

SEQ ID NO: 490600 - DNA, 75 bp, synthetic construct
  source 1..75: mol_type = other DNA
aagcccctgagatgcaggctgcattcaccattcctgatttacgtattatccgcgacctggtctgcgatggtcacg

SEQ ID NO: 490601 - DNA, 75 bp, synthetic construct
  source 1..75: mol_type = other DNA
cccgtggagacattggcacgaatgcagattatgtatggaaactgcaggccactctgggtgcgttgggaatacgga

SEQ ID NO: 490602 - DNA, 75 bp, synthetic construct
  source 1..75: mol_type = other DNA
gacaacgattacaacctcaatattccgcgctatgtcgatacctttgaagaagaggatgagattgacctggtggcg

SEQ ID NO: 490603 - DNA, 75 bp, synthetic construct
  source 1..75: mol_type = other DNA
ttagctggccattgcgatttgggtgcggaaggcgaattattaacaaacaaaaccattaaactggatgttggttat

SEQ ID NO: 490604 - DNA, 75 bp, synthetic construct
  source 1..75: mol_type = other DNA
atgataatggtggtgttgagaactataggttttaatatccaaatgaaaaagttgagtatattcataagtgccctt

SEQ ID NO: 490605 - DNA, 75 bp, synthetic construct
  source 1..75: mol_type = other DNA
gaaaactaaccagctcctgcaacagatcgtagatgggaaaggcggaagaggcgggagcggtgacgttgttattta

SEQ ID NO: 490606 - DNA, 75 bp, synthetic construct
  source 1..75: mol_type = other DNA
gtcatgcagctggtggagacagacaaagaacggcatcaggttacgatgcgacggctggaatgttccaggaaggca

SEQ ID NO: 490607 - DNA, 75 bp, synthetic construct
  source 1..75: mol_type = other DNA
cagttcaacagcattatctccagctggtgctgccaatgcttgtaaagaggataaaaatagcattgcctttcaatt

SEQ ID NO: 490608 - DNA, 75 bp, synthetic construct
  source 1..75: mol_type = other DNA
cggcacttcgggttatgcaggactgaccgaagatgtcatcatgaatacctccgccatccccgaaaactacaagga

SEQ ID NO: 490609 - DNA, 75 bp, synthetic construct
  source 1..75: mol_type = other DNA
tccggctgaagctaccgccacaaacacattactggacagttgctttattcaggccgggaaacgctatctgattgc

SEQ ID NO: 490610 - DNA, 75 bp, synthetic construct
  source 1..75: mol_type = other DNA
gtgatctgtttcatggtttgaatatagctcctaatgaagatggttatcgtcttgctggttttcctgatggacatc

SEQ ID NO: 490611 - DNA, 75 bp, synthetic construct
  source 1..75: mol_type = other DNA
tactatattatcctgatgttagtaaaatcaataaaatgattgactcactgggaaaaaaacagtgcgaaatattac

SEQ ID NO: 490612 - DNA, 75 bp, synthetic construct
  source 1..75: mol_type = other DNA
tgcagttaaaccggtctgtattgatggtttttttgaaggtagttttatttatggcaatagattcagcgatgctca

SEQ ID NO: 490613 - DNA, 75 bp, synthetic construct
  source 1..75: mol_type = other DNA
ccaaatgctttaaataaatacttcagaaatgatggctgcgatgatacagaggttatataccattataatggcaat

SEQ ID NO: 490614 - DNA, 75 bp, synthetic construct
  source 1..75: mol_type = other DNA
ttaccgacagcatgggggttaatcgtgccaatatactcatcattagcggcattgttgttgtcgtgcttggtatgt

SEQ ID NO: 490615 - DNA, 75 bp, synthetic construct
  source 1..75: mol_type = other DNA
aaatacgagcgatctttctgtgccaccatcgacttacagataaatacggtagctgttccgttctgcaaatcccgg

SEQ ID NO: 490616 - DNA, 75 bp, synthetic construct
  source 1..75: mol_type = other DNA
tatcctggtgttgatagcacccgtattggtttgttggggatttgcgggggaggagggtattcacttgctgccgcc

SEQ ID NO: 490617 - DNA, 75 bp, synthetic construct
  source 1..75: mol_type = other DNA
tggggttaaatcaaccacgttaattattcttgatgaggccgacatggctttgcatccatcatcacaagagcgatt

SEQ ID NO: 490618 - DNA, 75 bp, synthetic construct
  source 1..75: mol_type = other DNA
gcccgcattgccaaagtactacaaccgttcaaaccggcgtttccaaaaatggagctggtgtcggtcagtatcgga

SEQ ID NO: 490619 - DNA, 75 bp, synthetic construct
  source 1..75: mol_type = other DNA
gcgttcgaagaaaagcatggttcccaggttgatttaatttttcgttttcttgatcacgcctttgcaaccggcgtg

SEQ ID NO: 490620 - DNA, 75 bp, synthetic construct
  source 1..75: mol_type = other DNA
taggtatttaccgcttgttaaagcggtagctttagttgaaggtgattggacaaaagaacttatagagaaacgtag

SEQ ID NO: 490621 - DNA, 75 bp, synthetic construct
  source 1..75: mol_type = other DNA
tatgccggtgtttctggattatcaggcccgctggtttgcggatgaaagtcaggtctgcatcgcggaaaaatcccg

SEQ ID NO: 490622 - DNA, 75 bp, synthetic construct
  source 1..75: mol_type = other DNA
actaccgcgcggatgattacaaatttgatattaatgccgctgcgccggaaaccgtaaactgtagtggtcaagtaa

SEQ ID NO: 490623 - DNA, 75 bp, synthetic construct
  source 1..75: mol_type = other DNA
ttgtcatttatttcatttgtttgtatgtttttgtctggtagtattaatataatttattatgggcttttcctttct

SEQ ID NO: 490624 - DNA, 75 bp, synthetic construct
  source 1..75: mol_type = other DNA
aaccgtcctctggatgcgatttatcccattgtatatcttgactgtattgtcctgaaagtacaacaggacagccgg

SEQ ID NO: 490625 - DNA, 75 bp, synthetic construct
  source 1..75: mol_type = other DNA
cccatataacagaagaaaaagaattagcgaaaataatcaaagatgcaattgaagacgagttttctggattcgttg

SEQ ID NO: 490626 - DNA, 75 bp, synthetic construct
  source 1..75: mol_type = other DNA
aaaccgggttagtcgccattttacgcggcgtgaaaccggatgagattgtcgccatcggtgaaaaactgtacgccg

SEQ ID NO: 490627 - DNA, 75 bp, synthetic construct
  source 1..75: mol_type = other DNA
ggagctggtgtcggtcagtatcggaattgctcaaaaataataaaagtcactattgatggtaaaggtaatgtgatt

SEQ ID NO: 490628 - DNA, 75 bp, synthetic construct
  source 1..75: mol_type = other DNA
tttaaggtgcaggcgctttcaagccgcccgtctaacctgcgtggtttacagggggatgtggtgattgatgaagcg

SEQ ID NO: 490629 - DNA, 75 bp, synthetic construct
  source 1..75: mol_type = other DNA
ctaccaccacgccaccgtggtgatgatgttgataacgatgattttgatgattatcaccagtttgaacgagggggc

SEQ ID NO: 490630 - DNA, 75 bp, synthetic construct
  source 1..75: mol_type = other DNA
atgagcaccagagaaagcaaacttaaagcccttcatgcgccccgcaaaatcgacctgcgtagggaagccgaactg

SEQ ID NO: 490631 - DNA, 75 bp, synthetic construct
  source 1..75: mol_type = other DNA
cgtctcgcctgtcgttacgacgaactgtcggctgataccgccctgcttcgaattatgaaggcgtgtgtagttctg

SEQ ID NO: 490632 - DNA, 75 bp, synthetic construct
  source 1..75: mol_type = other DNA
tggacggttcgtgcacaggcaggcaggttatactgtctgatcgaggacgtaaaagaaggcaaaccacgcttccag

SEQ ID NO: 490633 - DNA, 75 bp, synthetic construct
  source 1..75: mol_type = other DNA
tttacttttcgtttttatttttaagtttttttgtttttattaagtatcgactttacgaactcgatcatagaagct

SEQ ID NO: 490634 - DNA, 75 bp, synthetic construct
  source 1..75: mol_type = other DNA
tatatgtcctgcggcttgcgcgcatttctcgattatgtaaaaacgggtcagatctgccagagtcagcgtcaccga

SEQ ID NO: 490635 - DNA, 75 bp, synthetic construct
  source 1..75: mol_type = other DNA
aaaaaacccagccgaagctgggtcgttgcgttggttatctgtcagtagttatgtactggctgaaggatttgtaca

SEQ ID NO: 490636 - DNA, 75 bp, synthetic construct
  source 1..75: mol_type = other DNA
acgctaaacgcattgaggaaattatcgctgaaaataaaccgcccttttctgttttccgcgacaaattcatcacca

SEQ ID NO: 490637 - DNA, 75 bp, synthetic construct
  source 1..75: mol_type = other DNA
cgttgaatacttatacagtcgaaatgataagagctcctggggcgtacgcgaagaagaaggtcaaagtatactatt

SEQ ID NO: 490638 - DNA, 75 bp, synthetic construct
  source 1..75: mol_type = other DNA
ttttattcaaacgttgaatacttatacagtcgaaatgataagagttcctggggggtacgcgaagaagaaggtcaa

SEQ ID NO: 490639 - DNA, 75 bp, synthetic construct
  source 1..75: mol_type = other DNA
tgacagccagcaattcagttgtgttcagcgaaacgtcattaatgtcgatctttctagtgccagcactacacagcc

SEQ ID NO: 490640 - DNA, 75 bp, synthetic construct
  source 1..75: mol_type = other DNA
gtggactatgaagcgcgccgcgtgatgattgaccagagccataagctgatcgccaatatcgacaacatcatcgcg

SEQ ID NO: 490641 - DNA, 75 bp, synthetic construct
  source 1..75: mol_type = other DNA
agtggcacagtcactggcgccaggcaggttatgactaccgggaagaccacaaggagcgggataagctggtctatc

SEQ ID NO: 490642 - DNA, 75 bp, synthetic construct
  source 1..75: mol_type = other DNA
ttaccgttgtgtacaatggcgaaatgtatatcgaagatactataaaaagtgtcttatcacaaaactgcaatgatg

SEQ ID NO: 490643 - DNA, 75 bp, synthetic construct
  source 1..75: mol_type = other DNA
atgatctcatatcagggacttgttcgcaccttccttaaaacactggaacaacgtcttaaaattcgcttattcaat

SEQ ID NO: 490644 - DNA, 75 bp, synthetic construct
  source 1..75: mol_type = other DNA
ctgaaatatacctgggatgaaatccaggggtttattatcgataagatttcggcggtgatggcaccagtacttatc

SEQ ID NO: 490645 - DNA, 75 bp, synthetic construct
  source 1..75: mol_type = other DNA
gtgattgccattacttctctgactgactctccgctgcggcggctggcgcatttcaccctcgataccgtttccgga

SEQ ID NO: 490646 - DNA, 75 bp, synthetic construct
  source 1..75: mol_type = other DNA
tttgggagataccagcggaacgtatgaaaatgcgtaggcctcacattgttcctttatctactcaggtatctggcc

SEQ ID NO: 490647 - DNA, 75 bp, synthetic construct
  source 1..75: mol_type = other DNA
aaatccacgatgtatacatcagcagcaaaagtacgacggcagaagaagccctgaaacgcatcagtgaactgtatg

SEQ ID NO: 490648 - DNA, 75 bp, synthetic construct
  source 1..75: mol_type = other DNA
atattttgatttggactctatagctttaacaaaacaacttaaagataatggaactttaattcagaaagaaccaat

SEQ ID NO: 490649 - DNA, 75 bp, synthetic construct
  source 1..75: mol_type = other DNA
ctttatgaagaagattatgtttgcatagcacgacggaatcatccgttgtcagcgaattcagaaatgacactcgaa

SEQ ID NO: 490650 - DNA, 75 bp, synthetic construct
  source 1..75: mol_type = other DNA
ggaataatcaaaaacgatgcacaccggggttaccgggtacacatatttcatcatgccagcgagtccggttctggc

SEQ ID NO: 490651 - DNA, 75 bp, synthetic construct
  source 1..75: mol_type = other DNA
atgtctgactttgccactttctttgccgtggcccgtaatcaaagctttcgtgcagcgggcgatgagttaggctta

SEQ ID NO: 490652 - DNA, 75 bp, synthetic construct
  source 1..75: mol_type = other DNA
ccagatctattacccaaaccgccagtatatgtcctgcggcttgcgcgcatttctcgattatgtaaaaacgggtca

SEQ ID NO: 490653 - DNA, 75 bp, synthetic construct
  source 1..75: mol_type = other DNA
cagaggccaccggagccgccggataacttcggagacctgaaaaaagcagtagatcgcacttatggccgaaatggg

SEQ ID NO: 490654 - DNA, 75 bp, synthetic construct
  source 1..75: mol_type = other DNA
agtaaaccgcacttacgcagaaatggggataggagggagatgtaaaaaatctggcgtagctaccagaaataagca

SEQ ID NO: 490655 - DNA, 75 bp, synthetic construct
  source 1..75: mol_type = other DNA
ggcctgtgcactgaggataatatcgcaatgcccccctatagcgcgctggccagcggccgcctctctcgtaaagaa

SEQ ID NO: 490656 - DNA, 75 bp, synthetic construct
  source 1..75: mol_type = other DNA
aatcctggcagtcgttcccccgccaggaaaaacagccctcagcccgccgttttacccgcagccagtcgctgaacg

SEQ ID NO: 490657 - DNA, 75 bp, synthetic construct
  source 1..75: mol_type = other DNA
gtgcggcaaggtatcccgtatgcgacggacccggcaggaaactggctgccggacccggaactgcacccggacagc

SEQ ID NO: 490658 - DNA, 75 bp, synthetic construct
  source 1..75: mol_type = other DNA
catctttaccactgcgaccaccggggactgccgctggcgctcatcagcccggaaggggaaacggcgtggcagggg

SEQ ID NO: 490659 - DNA, 75 bp, synthetic construct
  source 1..75: mol_type = other DNA
gggatgtcctccgggttcagttgcgattttatttacgggaacgccggcatccgataccaacctgctggctctgga

SEQ ID NO: 490660 - DNA, 75 bp, synthetic construct
  source 1..75: mol_type = other DNA
gacttccttgggagaaaaaatcagtgaggctacgcgtaaactccagagtaagataagaaaactagagtcgattat

SEQ ID NO: 490661 - DNA, 75 bp, synthetic construct
  source 1..75: mol_type = other DNA
tggcattcagctacaggtcggggaatcgacggtaatcaggctgtcgaaggatggcatcaccatcgtgggcggttc

SEQ ID NO: 490662 - DNA, 75 bp, synthetic construct
  source 1..75: mol_type = other DNA
gttacagtgacacgggaaggctgacgggcgtccacaccacggcagcgaacctggatatcgatatcccgtatgcga

SEQ ID NO: 490663 - DNA, 75 bp, synthetic construct
  source 1..75: mol_type = other DNA
gccaacaccccagtactaggtacgactgcaactgccaataaccgagttgttgacgatatccaagcccagcttggg

SEQ ID NO: 490664 - DNA, 75 bp, synthetic construct
  source 1..75: mol_type = other DNA
tcgtcgcggcactcctccagcaagcaggcagcggcgtggtttaccccatcgcgctggcttcatcttcggtgaaag

SEQ ID NO: 490665 - DNA, 75 bp, synthetic construct
  source 1..75: mol_type = other DNA
acgcagatgaccattcgttcgaaaacctataagggcagcgggtttaatgaactgaagtttgacgatgcgacaggg

SEQ ID NO: 490666 - DNA, 75 bp, synthetic construct
  source 1..75: mol_type = other DNA
ttaacaatgcgtctggaagccagtgccgtttctggtcaggcgatggtgtcggacaatcaggatttaggttttatt

SEQ ID NO: 490667 - DNA, 75 bp, synthetic construct
  source 1..75: mol_type = other DNA
tacgaatgttgctgcgcaggcttatttaacaatgcgtctggaagccagtgccgtttctggtcaggcgatggtgtc

SEQ ID NO: 490668 - DNA, 75 bp, synthetic construct
  source 1..75: mol_type = other DNA
ggctggcgtatgcgtcttaaccttgcccaggcgctgatttgccgttcagacttgctgctgctcgacgaaccgact

SEQ ID NO: 490669 - DNA, 75 bp, synthetic construct
  source 1..75: mol_type = other DNA
cgcagagtgactgggagaacagggagttctcactcaacaatctgaatcttaataatgcggacttcagtctgtccc

SEQ ID NO: 490670 - DNA, 75 bp, synthetic construct
  source 1..75: mol_type = other DNA
gatggatggggcataacaacgaagccaccacctggaagtacctgacttatctgagatacgaaacactgcttaagg

SEQ ID NO: 490671 - DNA, 75 bp, synthetic construct
  source 1..75: mol_type = other DNA
ctgagtcgccttggtgtggatattgtggaatacaccgtggaatgcggccccggtattgcccgtccggaaaaatac

SEQ ID NO: 490672 - DNA, 75 bp, synthetic construct
  source 1..75: mol_type = other DNA
gcgaatccctgcgctggagtttgctggttgccctgaacaaaacccgcccttacaccgccagtgaaacgttgctgc

SEQ ID NO: 490673 - DNA, 75 bp, synthetic construct
  source 1..75: mol_type = other DNA
aaatcggtcatcttttacaggaaagctttacatgcgctacctaaagtagactggagagaacatgataataatact

SEQ ID NO: 490674 - DNA, 75 bp, synthetic construct
  source 1..75: mol_type = other DNA
gtaattatgatgaattaaaaaatgattactgttatgctcggtacttgattttttcttcaaaagatatacctgatg

SEQ ID NO: 490675 - DNA, 75 bp, synthetic construct
  source 1..75: mol_type = other DNA
tttgcaatgagcagcaccgctttattgtcgcggaacagctgcgtcaactgaacaaactcaccgagaacattattc

SEQ ID NO: 490676 - DNA, 75 bp, synthetic construct
  source 1..75: mol_type = other DNA
atgacaaaataacatggtcactgacaggctataacacggttgcaaacaaggaagcaacccggaatgccgccgccc

SEQ ID NO: 490677 - DNA, 75 bp, synthetic construct
  source 1..75: mol_type = other DNA
cggagaaaaactggatattgaactggtgagtgcaccggggaacagcagtaaagatgtctttaaaggaagtgaaca

SEQ ID NO: 490678 - DNA, 75 bp, synthetic construct
  source 1..75: mol_type = other DNA
catgaaggacaaggactacaatccgctgattggccgaactggtgtggatgtgggtaaatccttctctggtaagga

SEQ ID NO: 490679 - DNA, 75 bp, synthetic construct
  source 1..75: mol_type = other DNA
tcgtttcaacaggcagaaaaggtgacgcccgcgagtgtgcagctccgggcgccttggcgtgtcgtatcagtggag

SEQ ID NO: 490680 - DNA, 75 bp, synthetic construct
  source 1..75: mol_type = other DNA
gtctttgcggcacactatccgctatgataggtccagataaatttgattctatagatagcaccgcatatgacgcct

SEQ ID NO: 490681 - DNA, 75 bp, synthetic construct
  source 1..75: mol_type = other DNA
atacgatgaatggggcaacctgctgaatgaagagaacccgcatcagctgcagcagcttatccgcctgccggggca

SEQ ID NO: 490682 - DNA, 75 bp, synthetic construct
  source 1..75: mol_type = other DNA
cacatcctgaagcgtatgccgccggatgaagcctactggtgcacgccggaacgcttacagcagctggccatcagg

SEQ ID NO: 490683 - DNA, 75 bp, synthetic construct
  source 1..75: mol_type = other DNA
taaggcactaattaaaggcacacttaagattgatttaagtgattcattcgttacaagtgtagagggctccccaga

SEQ ID NO: 490684 - DNA, 75 bp, synthetic construct
  source 1..75: mol_type = other DNA
tgtcggcaatcaaagaaactgcggtaatggcaaagggtattctgaatgccaaaactcaaactgagataaattccg

SEQ ID NO: 490685 - DNA, 75 bp, synthetic construct
  source 1..75: mol_type = other DNA
gcatgttcttaagcatatttacggattattacttcatttatccagagaacatataaaacccatcaacgaacacta

SEQ ID NO: 490686 - DNA, 75 bp, synthetic construct
  source 1..75: mol_type = other DNA
tgattatatattctcttccaattatgttaacaatttggtctgtggcaaaagttctgcaaacagccaaccaatttt

SEQ ID NO: 490687 - DNA, 75 bp, synthetic construct
  source 1..75: mol_type = other DNA
tgttatgtatggcagcagtgcattttatttacgaaaggatactacttccatctgttcgtttgcattaccgcaata

SEQ ID NO: 490688 - DNA, 75 bp, synthetic construct
  source 1..75: mol_type = other DNA
ctgcgcgaatggtgattaccggtcagcaaattaccgtttgaaacaggaatgggcattttggagaaaaacagcgaa

SEQ ID NO: 490689 - DNA, 75 bp, synthetic construct
  source 1..75: mol_type = other DNA
gggaccatccggttgctggacgacagggaagagacaaagcaggaactgaatgccaaaacctcactttcgaatcgt

SEQ ID NO: 490690 - DNA, 75 bp, synthetic construct
  source 1..75: mol_type = other DNA
ctggtggaaaaagcgcgtactctctatgacgcttcaggggaagggagtgaggtacagaatattgactttctttcg

SEQ ID NO: 490691 - DNA, 75 bp, synthetic construct
  source 1..75: mol_type = other DNA
aagaacggctcatcaaactggacaaccggcagatggcaatgtttctggtgctcctgatgcaggcactgttcttca

SEQ ID NO: 490692 - DNA, 75 bp, synthetic construct
  source 1..75: mol_type = other DNA
tgggatctgcccataccctgtatgaagagttccggggtgtgattggtgcggctgcgtccggcaacggaccgctgt

SEQ ID NO: 490693 - DNA, 75 bp, synthetic construct
  source 1..75: mol_type = other DNA
atgcgctgtatcgggaagattttaaacccaccaggcagtccagggcgaagagcctgcagttgctggagcagaaat

SEQ ID NO: 490694 - DNA, 75 bp, synthetic construct
  source 1..75: mol_type = other DNA
actgcaggcaatggagtacagtctgatttacgccatgttcccactgtataatgcgctgtatcgggaagattttaa

SEQ ID NO: 490695 - DNA, 75 bp, synthetic construct
  source 1..75: mol_type = other DNA
atagctggagatgcccagctttctactccatgcactgacagcatcataaacagcattgcagcaggcattcgcatt

SEQ ID NO: 490696 - DNA, 75 bp, synthetic construct
  source 1..75: mol_type = other DNA
acatatgggttttaaactttcaggacgttccgagcgggacaatcaaggtagaccctaccctctattacatcttta

SEQ ID NO: 490697 - DNA, 75 bp, synthetic construct
  source 1..75: mol_type = other DNA
gcgccattttgaatatcattggtccgccaatccctgattctcgtggtattcaactcgaaattctttgcaaacagg

SEQ ID NO: 490698 - DNA, 75 bp, synthetic construct
  source 1..75: mol_type = other DNA
gggtggtggttcagaacatcacaacatccagagatccttctggccagccggttgaaacatggcatgacggcgcag

SEQ ID NO: 490699 - DNA, 75 bp, synthetic construct
  source 1..75: mol_type = other DNA
cttaagaaaggtggatttactcaggctgagattgcaaagaaattgagtatcagtttatcgactgtgaagcggcac

SEQ ID NO: 490700 - DNA, 75 bp, synthetic construct
  source 1..75: mol_type = other DNA
catccagcttcaaggatagagccttctgctgaaagttgcttgtcttttttgattgctcgtcaggatacgattgac

SEQ ID NO: 490701 - DNA, 75 bp, synthetic construct
  source 1..75: mol_type = other DNA
atcatgaaatgaaccggcaggacacgcttgtaattccagatctaagctgtcttggcggaactgtggaggacttac

SEQ ID NO: 490702 - DNA, 75 bp, synthetic construct
  source 1..75: mol_type = other DNA
catatcttaattatttagtggatcttgaaaaatcccctaatttcgcagtaatgattgacggcgaatggggaagcg

SEQ ID NO: 490703 - DNA, 75 bp, synthetic construct
  source 1..75: mol_type = other DNA
cggaactaaagccgacctgacattggtgccggtgcagcaaaccgccgtgccggttcaggccagcggtggcgcaac

SEQ ID NO: 490704 - DNA, 75 bp, synthetic construct
  source 1..75: mol_type = other DNA
gtttagcggttgcgattgcgttggcggcttgcgcagataaaagcgcggatattcagacgccagccccggctgcaa

SEQ ID NO: 490705 - DNA, 75 bp, synthetic construct
  source 1..75: mol_type = other DNA
atgcggtcctgaatgtcactgggcctccggttccggatatcaaaggaacccggctggaaattctctgcaaacagg

SEQ ID NO: 490706 - DNA, 75 bp, synthetic construct
  source 1..75: mol_type = other DNA
gcgtcactattcagaacttcacaatatcaaaaacaccttccggccagccggtagaaagctgggctgatggaaaaa

SEQ ID NO: 490707 - DNA, 75 bp, synthetic construct
  source 1..75: mol_type = other DNA
ctcgaaacgtgggaggacggtcacacactctgggcaagcgtgaacatggtcagcagcaaggaggccatttcatcg

SEQ ID NO: 490708 - DNA, 75 bp, synthetic construct
  source 1..75: mol_type = other DNA
cgattactgttttcgctgtatcgctaccacggtgaaactatctgccttgttctggaatatattcgcaatcatgcc

SEQ ID NO: 490709 - DNA, 75 bp, synthetic construct
  source 1..75: mol_type = other DNA
atgagattaacgacgaaattttcggcctttgtcacgctgctcaccgggttaacaatttttgtgactctgctgggc

SEQ ID NO: 490710 - DNA, 75 bp, synthetic construct
  source 1..75: mol_type = other DNA
gcctgcggtcacccgcgaaggacaggtccatcaccgcgaactcatgtgccgcatctttgatggtaacgaagaagt

SEQ ID NO: 490711 - DNA, 75 bp, synthetic construct
  source 1..75: mol_type = other DNA
gcgcattaaggccacaaattaccgaattaatgatgtcggcagatatcgttcgtgtagacctgctgcatggtgata

SEQ ID NO: 490712 - DNA, 75 bp, synthetic construct
  source 1..75: mol_type = other DNA
gggagtcgatatcacgtatctgaagcaagatgaatggcaccggacatccacggtgcttgtcgatctgaacgatca

SEQ ID NO: 490713 - DNA, 75 bp, synthetic construct
  source 1..75: mol_type = other DNA
aagcgggcgatattattaccagcctcaacggcaaactgctgaatagctttgctgagttgcgctctcgtatcgcga

SEQ ID NO: 490714 - DNA, 75 bp, synthetic construct
  source 1..75: mol_type = other DNA
gaaactaatacgcattgagatacagatggctgaggggtttattgatggctgcctatcgatgctggaaattagtct

SEQ ID NO: 490715 - DNA, 75 bp, synthetic construct
  source 1..75: mol_type = other DNA
ggggaatctaacagggcttggaaggctggtttattcgatcatatttatgtgactaacgacattttaaccaaaggc

SEQ ID NO: 490716 - DNA, 75 bp, synthetic construct
  source 1..75: mol_type = other DNA
cttatctcgcaggaattaaacatcttaatcggcttgagcaagtactgatccgctctcatcttgagcagacaaacg

SEQ ID NO: 490717 - DNA, 75 bp, synthetic construct
  source 1..75: mol_type = other DNA
tctggccgcagcttgagcaagagatgaaaacgctggcagcagcacagcagaacggtgtgctgaaagtggtgatca

SEQ ID NO: 490718 - DNA, 75 bp, synthetic construct
  source 1..75: mol_type = other DNA
agtatgaccgtctgcaaatcagccgtcttattccactattgcgttactggccagaggaaaatctggcgattcagg

SEQ ID NO: 490719 - DNA, 75 bp, synthetic construct
  source 1..75: mol_type = other DNA
cctcatcccgctgctacgctattggccgcaagaaaatctggcgattcaggtcaccgttgagtcgttgattcgtcc

SEQ ID NO: 490720 - DNA, 75 bp, synthetic construct
  source 1..75: mol_type = other DNA
ctggcgattcaggttaccgttgagtcgctgattcgcccgcgttttcagcgttggctgcgcgatacgttaatgcaa

SEQ ID NO: 490721 - DNA, 75 bp, synthetic construct
  source 1..75: mol_type = other DNA
gtccacccacgttagtgtggccagttccacttctgcacggtttttccagctcttacggtgtattacctccgcttt

SEQ ID NO: 490722 - DNA, 75 bp, synthetic construct
  source 1..75: mol_type = other DNA
caatcacaggactcccttgccacagccaaagctcatggcgaatccgctgaacgagagtgccagcgcctatctgga

SEQ ID NO: 490723 - DNA, 75 bp, synthetic construct
  source 1..75: mol_type = other DNA
aagactgaatgatgcgctgaccaaaatttctgggttggagcaagagcgaattaaagctggtgggggagagaaaaa

SEQ ID NO: 490724 - DNA, 75 bp, synthetic construct
  source 1..75: mol_type = other DNA
aaaatggggtatgtgggttatttgaaagttaaagctgagttttcagttaataacatagctaacgaaattataaaa

SEQ ID NO: 490725 - DNA, 75 bp, synthetic construct
  source 1..75: mol_type = other DNA
gtcagcagcccgggcaggcaacattgcactggttcagttactgcttgaccgcggtgcagatccctcgctaatcgg

SEQ ID NO: 490726 - DNA, 75 bp, synthetic construct
  source 1..75: mol_type = other DNA
ccgccctgatggcatttatcccgcttgctgcaaatgcaggtgaaattactttactaccatcaattaaattacaaa

SEQ ID NO: 490727 - DNA, 75 bp, synthetic construct
  source 1..75: mol_type = other DNA
gttatgaagacgcgaatgcgttaattactgaactgatattatttattgaagatgttgacgctgagaatcatgaag

SEQ ID NO: 490728 - DNA, 75 bp, synthetic construct
  source 1..75: mol_type = other DNA
ggctgcttttacgcgaagattcgtcatatatttttatgttgatgctgattgttggttctgccgtaatcgtgtctg

SEQ ID NO: 490729 - DNA, 75 bp, synthetic construct
  source 1..75: mol_type = other DNA
attatcgatctcgctcaacgttgcggagcgcttgcagtaacagcgaaaggggcgggcaatgacagcgctgccatg

SEQ ID NO: 490730 - DNA, 75 bp, synthetic construct
  source 1..75: mol_type = other DNA
actggcggatgtcgtcaagctctcggaagaagaatggcgacttatcagtggaaaaacacagaacgatcaggatat

SEQ ID NO: 490731 - DNA, 75 bp, synthetic construct
  source 1..75: mol_type = other DNA
gaggccgagcaaagatccgtcgccgataaagccactgcagacgcgaaagcaaaagccttagcccagcaagaagcg

SEQ ID NO: 490732 - DNA, 75 bp, synthetic construct
  source 1..75: mol_type = other DNA
cttgcccggatggcgtaacacggtatatggatgtgagatacagggataaggcagagattaataaactcagtacgg

SEQ ID NO: 490733 - DNA, 75 bp, synthetic construct
  source 1..75: mol_type = other DNA
ctggtggggtaaaaccctcagtgtgatactgtgtatggtgagtatgattactacagcaacaggagttcttgatcc

SEQ ID NO: 490734 - DNA, 75 bp, synthetic construct
  source 1..75: mol_type = other DNA
taagaagatgggctttaaagttacagggcgctctgaggtggacgatttgggcaaaccgtatccattgctgaatct

SEQ ID NO: 490735 - DNA, 75 bp, synthetic construct
  source 1..75: mol_type = other DNA
taagaagatgggctttaaggtttcagggcgttccgaggtggacgatttggggaaaccgtatccgctgctgaatct

SEQ ID NO: 490736 - DNA, 75 bp, synthetic construct
  source 1..75: mol_type = other DNA
gcttaatcgtgctatcaatgatgcggagtcggtactggggataacccgccgccgtcgtccgctgggagtgaggtt

SEQ ID NO: 490737 - DNA, 75 bp, synthetic construct
  source 1..75: mol_type = other DNA
tgaaatgctacccgctgctccccggtggcctgttggctatcgaagcggtattcatcggcatgaccagcgcggaac

SEQ ID NO: 490738 - DNA, 75 bp, synthetic construct
  source 1..75: mol_type = other DNA
caacacagtgcgtggtctttgaagatgctgatttcggtattcaggctgctcgcgccgcaggcatggacgttgtgg

SEQ ID NO: 490739 - DNA, 75 bp, synthetic construct
  source 1..75: mol_type = other DNA
ctgccgatcacgtcaaacaccataaacctgcaccagacacgtttttgctgtgtgcgcagcgtatgggcgtgcaac

SEQ ID NO: 490740 - DNA, 75 bp, synthetic construct
  source 1..75: mol_type = other DNA
tgctgattgatgagcaccaatttagttgggacgacgcgtttggggtctgttgcgaggttttctcttacaccaacc

SEQ ID NO: 490741 - DNA, 75 bp, synthetic construct
  source 1..75: mol_type = other DNA
cgatctttccgaacagatttcgctggcggggacggaagcctccggtaccagtaatatgaaatttgcccttaacgg

SEQ ID NO: 490742 - DNA, 75 bp, synthetic construct
  source 1..75: mol_type = other DNA
tgatgaatgtgttgcatgtgattacccgctataaccgcatcaaggccgacccggatgcgaagtgggtaccgcgcg

SEQ ID NO: 490743 - DNA, 75 bp, synthetic construct
  source 1..75: mol_type = other DNA
acatcgttaacggtagccagaaagagtcgcctgactactggctggaatacggtaacccgtgggaattcaaacgcc

SEQ ID NO: 490744 - DNA, 75 bp, synthetic construct
  source 1..75: mol_type = other DNA
gatcgtctcgtggagcgctggttacgctcgaatcgtgcccagctatcgcaagaaactcgacaggtttactacctg

SEQ ID NO: 490745 - DNA, 75 bp, synthetic construct
  source 1..75: mol_type = other DNA
cgatgctgaacattgccaatatgggttacttctcttctgaccgtacgatcaaagagtatgccgattatatttggc

SEQ ID NO: 490746 - DNA, 75 bp, synthetic construct
  source 1..75: mol_type = other DNA
ttcatcggcatgaccagcgcggaacatgttcgtgaagaggtggcggcaaatcttgaagtcttgctgttactgatg

SEQ ID NO: 490747 - DNA, 75 bp, synthetic construct
  source 1..75: mol_type = other DNA
cgggtataaatacaattaccacaatttaaccgtggatttatttggtcgtgtcgataatttattcgataaagaata

SEQ ID NO: 490748 - DNA, 75 bp, synthetic construct
  source 1..75: mol_type = other DNA
aattaagcctgattttcaatagtgtggatatcaaagcagatgacccaggtgggctaaccgaagcagaatggaagg

SEQ ID NO: 490749 - DNA, 75 bp, synthetic construct
  source 1..75: mol_type = other DNA
atgacgctctgccgcagacagatatcccgtttgaggtggtgtatctggatgcgcctgagcgcgtgctggatgagg

SEQ ID NO: 490750 - DNA, 75 bp, synthetic construct
  source 1..75: mol_type = other DNA
tatttcaaatggtccaggtatatctgtaatcactgctttattctttaaagtatttggggcgaaaataattcatgt

SEQ ID NO: 490751 - DNA, 75 bp, synthetic construct
  source 1..75: mol_type = other DNA
ttacagacgcagtggcagctgagcgaaaaactgtcgctggatgctggcgtgcgctacagctccgtgtggtttgat

SEQ ID NO: 490752 - DNA, 75 bp, synthetic construct
  source 1..75: mol_type = other DNA
gtattgtgccgtttcattttccataaatttacaatttcattaccatgacggcgttttccccattcttaacctggc

SEQ ID NO: 490753 - DNA, 75 bp, synthetic construct
  source 1..75: mol_type = other DNA
ccctgtacgcgcttgtgacgatgtctccttttcgtcaacaacgctatatgaatatttagccccactttgtgagca

SEQ ID NO: 490754 - DNA, 75 bp, synthetic construct
  source 1..75: mol_type = other DNA
tgacctctgcactcgcgccattgattcgtctctcttatggccgcatggtgtggatggccctgccttacaccctcg

SEQ ID NO: 490755 - DNA, 75 bp, synthetic construct
  source 1..75: mol_type = other DNA
tctgccctccgtcgctacgccgaacggtcaggctgcgttcctgttcctgctgacctctgcactcgcgccattgat

SEQ ID NO: 490756 - DNA, 75 bp, synthetic construct
  source 1..75: mol_type = other DNA
gaaactgcatatgcaggcaaggtataaggccacacattatcccgtcaccgggggaaaggcaaatggacaggtatg

SEQ ID NO: 490757 - DNA, 75 bp, synthetic construct
  source 1..75: mol_type = other DNA
tgctcatagcagtgtttattgttcgattcttgaagctcttgaacaaggggcgagtggcgttaagagtggttgttg

SEQ ID NO: 490758 - DNA, 75 bp, synthetic construct
  source 1..75: mol_type = other DNA
gctgtcgatccgtatcgatcctgaacaccatacctgtcaggagtcaaaaggcattgtgcaggaaagattgcagga

SEQ ID NO: 490759 - DNA, 75 bp, synthetic construct
  source 1..75: mol_type = other DNA
ctggcgcactgaccttagcttgctaaatgatctgcaacagcattgtgatttcccgatggtgaataacgcagtaca

SEQ ID NO: 490760 - DNA, 75 bp, synthetic construct
  source 1..75: mol_type = other DNA
cacggcaaaacctcgccgattacacatagcggtgagggcgtatttcgggggctggcaaatccacttaccgtgaca

SEQ ID NO: 490761 - DNA, 75 bp, synthetic construct
  source 1..75: mol_type = other DNA
cgctaccattcgctggtggtggaacctgactcattaccagcgtgctttgaagtgacggcctggagcgaaacccgc

SEQ ID NO: 490762 - DNA, 75 bp, synthetic construct
  source 1..75: mol_type = other DNA
ctgactcattaccagcgtgctttgacgtgacggcctggagcgaaacccgcgagattatggggattcgccatcgcc

SEQ ID NO: 490763 - DNA, 75 bp, synthetic construct
  source 1..75: mol_type = other DNA
gcttcgttccggtgggcccggggcatgaccgtcgtcgccgccctgatggcggtcttcttcatcatgcaacttgtc

SEQ ID NO: 490764 - DNA, 75 bp, synthetic construct
  source 1..75: mol_type = other DNA
ccggtgctgccgggcctcctgcgcgatctggttcactcgaacgacgtcaccgcccactatggcattctgctggcg

SEQ ID NO: 490765 - DNA, 75 bp, synthetic construct
  source 1..75: mol_type = other DNA
caccaccgccgttaataccgggctattttttggcctgcgcgggcgggtgatcccaacctccagcgcctgtacctc

SEQ ID NO: 490766 - DNA, 75 bp, synthetic construct
  source 1..75: mol_type = other DNA
ctcgaacgccgtatctccgccgtttataaagacattcctggcggccagctgcttggcccgacctacgactacacc

SEQ ID NO: 490767 - DNA, 75 bp, synthetic construct
  source 1..75: mol_type = other DNA
cttacaggtctggcgtgtggtattgttatgcgcaggtcttggatgctggctttgtccgctcattcgtcgccgtga

SEQ ID NO: 490768 - DNA, 75 bp, synthetic construct
  source 1..75: mol_type = other DNA
gtcttggatgctggctttgtccgctcattcgtcgccgtgaacctcacgttgccggacttgttctggggctaatcc

SEQ ID NO: 490769 - DNA, 75 bp, synthetic construct
  source 1..75: mol_type = other DNA
cagcctgctggcgcgtcaggggctggcgaagtttgaagaagatagcggcgcacagccggatgacatcacccgcac

SEQ ID NO: 490770 - DNA, 75 bp, synthetic construct
  source 1..75: mol_type = other DNA
actacacccatcgcctgctcgatttcaccctgctggcaaacggcgaagcgccgacgctgaccaccgccgacagcg

SEQ ID NO: 490771 - DNA, 75 bp, synthetic construct
  source 1..75: mol_type = other DNA
cagcggcgataacgtcgaagcgattttcctgttgcgcgcctaccgcaccacgctggcgaagctggcggtcagtga

SEQ ID NO: 490772 - DNA, 75 bp, synthetic construct
  source 1..75: mol_type = other DNA
gtatatgttttagcgcatagaaaaaatacattcagcagcgacattattgatttcagtaatagtgagtataaaaat

SEQ ID NO: 490773 - DNA, 75 bp, synthetic construct
  source 1..75: mol_type = other DNA
tcgtcgccaataaacatgaatggctgaacgcaacgttatttgctgtgcgcgatcgtctcgtggagcgctggttac

SEQ ID NO: 490774 - DNA, 75 bp, synthetic construct
  source 1..75: mol_type = other DNA
tatttcaagaagctctgggaaaccattggtccttattttgaggctggccgggaacttctgaagaaggtttttgcc

SEQ ID NO: 490775 - DNA, 75 bp, synthetic construct
  source 1..75: mol_type = other DNA
aggacggtcttcaggctgcacagagccttgcccccatcagcgtcatgatggatcagatggggatgaacggggagt

SEQ ID NO: 490776 - DNA, 75 bp, synthetic construct
  source 1..75: mol_type = other DNA
gaccattcaggacattttaagccgccattatcagttgcataaaacctacgataacctggcggataaaatcgcgat

SEQ ID NO: 490777 - DNA, 75 bp, synthetic construct
  source 1..75: mol_type = other DNA
aagaaaacacgctggattgagaccgaagagattctggctgttgcttacgatcaaatcatccccggttacgatact

SEQ ID NO: 490778 - DNA, 75 bp, synthetic construct
  source 1..75: mol_type = other DNA
gcgaggcgctggaaacctggccggttgatatgctgggtaaaattctgccgcgtcacctgcagatcatctttgaaa

SEQ ID NO: 490779 - DNA, 75 bp, synthetic construct
  source 1..75: mol_type = other DNA
tctattcgtgcggttgttcgcccggcctatatttgggaccaatataaccagacaggtgttgaactgggctatttc

SEQ ID NO: 490780 - DNA, 75 bp, synthetic construct
  source 1..75: mol_type = other DNA
tgcgttttttgataacgtgaaagtggttaacgttaaaaactgctatttttccgaacaaagagaaccgatatactg

SEQ ID NO: 490781 - DNA, 75 bp, synthetic construct
  source 1..75: mol_type = other DNA
agtcagaggttgatgtgctaaacatggtttttgctgatgccaaattatctattgagttctttctagatgatgaag

SEQ ID NO: 490782 - DNA, 75 bp, synthetic construct
  source 1..75: mol_type = other DNA
tctcgtttaaggatgcgcctcccgggatgcgggtgaccgatacccgctccagtggtatcgacgtgaatcacgacg

SEQ ID NO: 490783 - DNA, 75 bp, synthetic construct
  source 1..75: mol_type = other DNA
aaaatggcaaactcgggagtgaaagtaatcattgaaactcacagtgatcatatattaaatggtgttaggttatct

SEQ ID NO: 490784 - DNA, 75 bp, synthetic construct
  source 1..75: mol_type = other DNA
tattcgtgagctggaaaacgcggtggaacgggcagtggtgctgctgaccggggaatatatttccgaacgcgagct

SEQ ID NO: 490785 - DNA, 75 bp, synthetic construct
  source 1..75: mol_type = other DNA
gttatttcgctgccaccgtttcaggttgatctctcccgccgtgaattatccattaatgacgaagtgatcaaactg

SEQ ID NO: 490786 - DNA, 75 bp, synthetic construct
  source 1..75: mol_type = other DNA
tgttaacgaaattaggtatggcgggcgatgtgcaaaaagcactggaagaacgcaatatttttagcgttatttatg

SEQ ID NO: 490787 - DNA, 75 bp, synthetic construct
  source 1..75: mol_type = other DNA
tgaaagaaaataattgcgatagcgtaatttccttaggtggtggttctccgcacgactgtgcgaaaggcattgcgc

SEQ ID NO: 490788 - DNA, 75 bp, synthetic construct
  source 1..75: mol_type = other DNA
gcgtcagaacggcgacggtgtcggcggatctatcacttatgattacgaaggcttcggcgttggtgctgcagtttc

SEQ ID NO: 490789 - DNA, 75 bp, synthetic construct
  source 1..75: mol_type = other DNA
gatggtgacaaaacctacatgcgtatcggcttcaaaggcgaaactcaggttactgatcaactgactggttacggt

SEQ ID NO: 490790 - DNA, 75 bp, synthetic construct
  source 1..75: mol_type = other DNA
cgccggggccgatgattacgtaaccaaaccgtttcatattgaagaggtcatggcgcggatgcaggcgttgatgcg

SEQ ID NO: 490791 - DNA, 75 bp, synthetic construct
  source 1..75: mol_type = other DNA
accacttatctgctcggttctaacgccgcagctgtagtgcgtcacgcagagtgctccgtgctggttgtgcgctga

SEQ ID NO: 490792 - DNA, 75 bp, synthetic construct
  source 1..75: mol_type = other DNA
accggatatcaccacctacctgctcggctctaacgccgccgccgtcgtgcgtcatgcagagtgctccgtgctggt

SEQ ID NO: 490793 - DNA, 75 bp, synthetic construct
  source 1..75: mol_type = other DNA
tgtactgagacacccgcagaaagtattgacacgcagcttcttaaagcgctggctgaggttgcgcccgtcgtggag

SEQ ID NO: 490794 - DNA, 75 bp, synthetic construct
  source 1..75: mol_type = other DNA
gtacaaaaggctctggaagaacacaatattttcagcgttatttatgatggtacccggccaaacccgaccacagaa

SEQ ID NO: 490795 - DNA, 75 bp, synthetic construct
  source 1..75: mol_type = other DNA
cgtgactgcgctgctgcaatgggggagaacgtgacgggtaaaaatgacgaggaaggtgctgaagtctgtattaat

SEQ ID NO: 490796 - DNA, 75 bp, synthetic construct
  source 1..75: mol_type = other DNA
tatttcattaggtggtggttctccgcatgactgtgcaaaaggtattgcgctggtagccaccaatgggggcgatat

SEQ ID NO: 490797 - DNA, 75 bp, synthetic construct
  source 1..75: mol_type = other DNA
tggtctgaaatacgacgctaacaacatctacctggctgctcagtacacccagacctacaacgcaactcgcgtagg

SEQ ID NO: 490798 - DNA, 75 bp, synthetic construct
  source 1..75: mol_type = other DNA
acagagtgcatgtccatgttgaggaaggctcgcaaaagaccgcattctggaattggcgaagaagatccccgctca

SEQ ID NO: 490799 - DNA, 75 bp, synthetic construct
  source 1..75: mol_type = other DNA
gttacaacgttcaccgaatattttgctgatcccagggacgtcttcttgttgcgcatttacgggagaatatggctg

SEQ ID NO: 490800 - DNA, 75 bp, synthetic construct
  source 1..75: mol_type = other DNA
ggcctgagcaacgtcacaccgacgcaggttgcagaggcgcgcaagattgccgaaattgtctgtgtgcaaaacgaa

SEQ ID NO: 490801 - DNA, 75 bp, synthetic construct
  source 1..75: mol_type = other DNA
atcatcttccacctgcacgacaccctcggcatgagcgttgacgcaatcaacaaaatgctgaccaaagagtctggc

SEQ ID NO: 490802 - DNA, 75 bp, synthetic construct
  source 1..75: mol_type = other DNA
caaactgctgaccaaagagtctggcctgctgggtctgaccgaagtaaccagcgactgccgctatgttgaagacaa

SEQ ID NO: 490803 - DNA, 75 bp, synthetic construct
  source 1..75: mol_type = other DNA
agcggcaaaaatgctgaacaaaccggtagaagaactgaacatcatcacctgccacctgggcaacggtggttccgt

SEQ ID NO: 490804 - DNA, 75 bp, synthetic construct
  source 1..75: mol_type = other DNA
gtctggttgacggtctgaactttgctgttcagtatcagggtcaaaacggcagcgtaagcggtgaaggttctgagg

SEQ ID NO: 490805 - DNA, 75 bp, synthetic construct
  source 1..75: mol_type = other DNA
ctttcgactacggtcgtaactacggcgttgtttacgacgtaacttcttggaccgacgtactgccagaattcggtg

SEQ ID NO: 490806 - DNA, 75 bp, synthetic construct
  source 1..75: mol_type = other DNA
ttccctgggttgggcgaacaaagcacagaacttcgaagctgttgctcagtaccagttcgactttggtctgcgtcc

SEQ ID NO: 490807 - DNA, 75 bp, synthetic construct
  source 1..75: mol_type = other DNA
gtctggttgacggcctgaactttgctgttcagtaccagggtaaaaacggtagcgtaaacggcgaaggcatgacca

SEQ ID NO: 490808 - DNA, 75 bp, synthetic construct
  source 1..75: mol_type = other DNA
ttggcttcaaaggtgaaactcaggttactgaccagctgaccggttacggccagtgggaatatcagatccagggca

SEQ ID NO: 490809 - DNA, 75 bp, synthetic construct
  source 1..75: mol_type = other DNA
tgtttatgacgtaacatcctggaccgacgtgctgccagaattcggtggtgacacctacagctctgacaacttcat

SEQ ID NO: 490810 - DNA, 75 bp, synthetic construct
  source 1..75: mol_type = other DNA
ttttagcacttatctgctgggttcaacggcggctgccgtagtacgccatgcaaaatgtcccgtgctggttgtgcg

SEQ ID NO: 490811 - DNA, 75 bp, synthetic construct
  source 1..75: mol_type = other DNA
acgtcagaagtgagcgtggcattaacccttgataccaccggttcaacctccactggcgatacgttgctgacgcaa

SEQ ID NO: 490812 - DNA, 75 bp, synthetic construct
  source 1..75: mol_type = other DNA
ctctgctcactttgcacagcctgaatatgctgcattctcgcggcttcctcgcggaagttttcggcatcctcgcgc

SEQ ID NO: 490813 - DNA, 75 bp, synthetic construct
  source 1..75: mol_type = other DNA
aaggcctggcgctggtggcactgattggcaacgacctgtcaaaagcctgcggcgtcggcaaagaggtctttggcg

SEQ ID NO: 490814 - DNA, 75 bp, synthetic construct
  source 1..75: mol_type = other DNA
ggatatctggactgacgtccccggcatctacaccaccgatccgcgcgtggtgcccgcagcaaaacgcatagatga

SEQ ID NO: 490815 - DNA, 75 bp, synthetic construct
  source 1..75: mol_type = other DNA
ttggctgaagggttggagccagccgagcgattcgaaaaactcgatgccattcgtaatattcagttcgccattctg

SEQ ID NO: 490816 - DNA, 75 bp, synthetic construct
  source 1..75: mol_type = other DNA
ttggcggtactagcgtagctgattttgacgctatgaaccgtagcgctgacattgtgctttctgataccaatgtgc

SEQ ID NO: 490817 - DNA, 75 bp, synthetic construct
  source 1..75: mol_type = other DNA
tgtcacgccagaagataaatgccattgctgccagtttccggcaccgctgcgcccacacgtggtgtggtttggtga

SEQ ID NO: 490818 - DNA, 75 bp, synthetic construct
  source 1..75: mol_type = other DNA
ctgaaagttcgttgttcacaaagtggtcaggttctcgactggaccggagacgttaccccagaagataaatgccat

SEQ ID NO: 490819 - DNA, 75 bp, synthetic construct
  source 1..75: mol_type = other DNA
atcctgaactggtgcaagcgttttataacgcccgtcgtcgacagttgcagcagccagaaattcagcctaacgccg

SEQ ID NO: 490820 - DNA, 75 bp, synthetic construct
  source 1..75: mol_type = other DNA
agcaccaggtgaattatgtgagatatgctgatgatttcatctgttcaggcagctcccgtgaattgctgggaaatg

SEQ ID NO: 490821 - DNA, 75 bp, synthetic construct
  source 1..75: mol_type = other DNA
tcggtaacgtgctcatggggttgggtctggtggtgatggtagttggtgtggggtattcaatcctcaaccagttac

SEQ ID NO: 490822 - DNA, 75 bp, synthetic construct
  source 1..75: mol_type = other DNA
tctggtggtaatggtggtcggcgtggggtattcaatcctcaaccagttaccacagtttaatatgccccagtattt

SEQ ID NO: 490823 - DNA, 75 bp, synthetic construct
  source 1..75: mol_type = other DNA
cagcaggtctataacggccttgccggaatgtggctggtggaagatgaagtcagtaaatcgctgcctatccccaac

SEQ ID NO: 490824 - DNA, 75 bp, synthetic construct
  source 1..75: mol_type = other DNA
cggatggcaggaatagatcagaataggttaaataaagaatggacggatgatcgaggagataacactcagaaaaaa

SEQ ID NO: 490825 - DNA, 75 bp, synthetic construct
  source 1..75: mol_type = other DNA
cagaggctggaaagataccgtctgggttgatggacaagtggaactgcttgtttattacggtcagccttcctgggc

SEQ ID NO: 490826 - DNA, 75 bp, synthetic construct
  source 1..75: mol_type = other DNA
ttgagccatccagtattctggtttctaccctggtgctaacgctgcgcccaaccggccttctgccgctggtcacag

SEQ ID NO: 490827 - DNA, 75 bp, synthetic construct
  source 1..75: mol_type = other DNA
agggattcctgcccgctcctgtatcggtgaagcaactttcgctggcaccgggcgagcgccgcgagattctggtgg

SEQ ID NO: 490828 - DNA, 75 bp, synthetic construct
  source 1..75: mol_type = other DNA
tgattttatcagttatcaagaaaatccgaatgaagtaacgcagaacaagctggatagcgaatggtttccctataa

SEQ ID NO: 490829 - DNA, 75 bp, synthetic construct
  source 1..75: mol_type = other DNA
atggcaatgggaacaggctactttctggtcagggcgataagaccacctgcggcggcaaaattaattgaaggcgcg

SEQ ID NO: 490830 - DNA, 75 bp, synthetic construct
  source 1..75: mol_type = other DNA
agttgcagcatgatttttatgatttttttaatcctcctaaacccgctaaaggaagaagagataaggctgtcaact

SEQ ID NO: 490831 - DNA, 75 bp, synthetic construct
  source 1..75: mol_type = other DNA
gatgagaggattctctcacactttcaacgtggagttgaaaaatatgcacatgagtatgggttagatgaagaagct

SEQ ID NO: 490832 - DNA, 75 bp, synthetic construct
  source 1..75: mol_type = other DNA
tttttgattaattatatgttggcaattacgaatgatatgaatgatttgattgctaagaaagagtttcctgatgaa

SEQ ID NO: 490833 - DNA, 75 bp, synthetic construct
  source 1..75: mol_type = other DNA
gggccgactatccgcgtctggaagggcgatgatgttaagctgatctacagtaaccgcctgacagaaaatgtctca

SEQ ID NO: 490834 - DNA, 75 bp, synthetic construct
  source 1..75: mol_type = other DNA
aaaaagagacttgaagatctggatgtcaaagttgtctctactgtaaaagaattcttttcttctgaggttatttct

SEQ ID NO: 490835 - DNA, 75 bp, synthetic construct
  source 1..75: mol_type = other DNA
tgaaaaatatcttccagctactatagaagtcttgtcatcacctttcatgataatcaaacatggtgctgtttataa

SEQ ID NO: 490836 - DNA, 75 bp, synthetic construct
  source 1..75: mol_type = other DNA
gtagcgaaatgccggacggcgcggcgagcctgcgacatcgcccgcacggcgtgctggcggtgtttgggccgtata

SEQ ID NO: 490837 - DNA, 75 bp, synthetic construct
  source 1..75: mol_type = other DNA
ggcagcaggctggcttgccgccaggcgtgctgaacctggtgcagggcgggcgcgaaaccggtcaggcgctgagtg

SEQ ID NO: 490838 - DNA, 75 bp, synthetic construct
  source 1..75: mol_type = other DNA
cgttgctggcgtaccagatgaagaggtgttcggaccgttattgcgcgtctggcgttatgatactttcgatgaagc

SEQ ID NO: 490839 - DNA, 75 bp, synthetic construct
  source 1..75: mol_type = other DNA
catcgccccagcgcctggtatgccgcagattactgcgcatggccgatggcgagcctggagtcggactcgttaaca

SEQ ID NO: 490840 - DNA, 75 bp, synthetic construct
  source 1..75: mol_type = other DNA
actgttgctggaggcgcgggcggggattgttaactggaacaaaccgcttaccggtgctgccagtaccgcgccatt

SEQ ID NO: 490841 - DNA, 75 bp, synthetic construct
  source 1..75: mol_type = other DNA
ggcgttatgacaatttcgatgaagcgattcgaatggcgaataacactcgcttcggcctctcatgcggtctggttt

SEQ ID NO: 490842 - DNA, 75 bp, synthetic construct
  source 1..75: mol_type = other DNA
gtcagccggagaaaattctcgcccttgagatgggcggtaataatccgctaattatcgatgaggtggcggatatcg

SEQ ID NO: 490843 - DNA, 75 bp, synthetic construct
  source 1..75: mol_type = other DNA
tgcggtaatcttttacccgaaagaagggcgttttgactgcgtcgcgcgcccctggctaacagaggctggcagccg

SEQ ID NO: 490844 - DNA, 75 bp, synthetic construct
  source 1..75: mol_type = other DNA
tcgtttcaaggtgaaattagatactacgtattgtataaaatatgccattataccagtttcggtatacatcgtttc

SEQ ID NO: 490845 - DNA, 75 bp, synthetic construct
  source 1..75: mol_type = other DNA
gcaaacgctgcttgcaccgcgtttgctacaagcgggaacatcgttgctgacgccgggtatcattgaaatgacggg

SEQ ID NO: 490846 - DNA, 75 bp, synthetic construct
  source 1..75: mol_type = other DNA
acgggtcaggcgctgagtgcgctggaagacctcgacggtttgctgtttaccggtagcgccaacactggctatcag

SEQ ID NO: 490847 - DNA, 75 bp, synthetic construct
  source 1..75: mol_type = other DNA
agagacatcgttgctgacgccggggatcattgaaatgacaggcgttgctggcgtaccagatgaagaggtgttcgg

SEQ ID NO: 490848 - DNA, 75 bp, synthetic construct
  source 1..75: mol_type = other DNA
cgttactggcgtgccggatgaagaggtatttggaccgctattgcgcgtctggcgttacgataccttcgatgaagc

SEQ ID NO: 490849 - DNA, 75 bp, synthetic construct
  source 1..75: mol_type = other DNA
atgatcaataaaattgcgatatcaatcaaggcatatcacgtgcgcacgggggaacagcgcagcgaaatgccggac

SEQ ID NO: 490850 - DNA, 75 bp, synthetic construct
  source 1..75: mol_type = other DNA
aagcctggaatcggactcgttaacgctgcccactacgcttaaccccgggctggatttttccgatgaggtggtgcc

SEQ ID NO: 490851 - DNA, 75 bp, synthetic construct
  source 1..75: mol_type = other DNA
ggaggcggcaaccgaagtgacggcgatgattaataaaattgctatttcaatcaaggcatatcacgtgcgtacggg

SEQ ID NO: 490852 - DNA, 75 bp, synthetic construct
  source 1..75: mol_type = other DNA
cgggcggggattgttaactggaacaaaccgcttaccggcgctgccagtaccgcgccattcggcggcattggcgct

SEQ ID NO: 490853 - DNA, 75 bp, synthetic construct
  source 1..75: mol_type = other DNA
ttaaggcgtatcacgttcgtaccggcgagcagcgtagcgaaatgccggacggcgcggcgagcctgcgccatcgtc

SEQ ID NO: 490854 - DNA, 75 bp, synthetic construct
  source 1..75: mol_type = other DNA
cggcggcattggtgcttccggtaaccatcgccccagcgcctgtatgccgcagattactgcgcatggcctatggcg

SEQ ID NO: 490855 - DNA, 75 bp, synthetic construct
  source 1..75: mol_type = other DNA
ccgaacgggcatatcgttccggcgctgctggcaggcaacacaattatctttaaacccagcgaactgacaccgtgg

SEQ ID NO: 490856 - DNA, 75 bp, synthetic construct
  source 1..75: mol_type = other DNA
ccgcgttgggcgcggctctcctttggcgatcgtcaggtaagagttgaacgctttgccggactgctggaaagcaat

SEQ ID NO: 490857 - DNA, 75 bp, synthetic construct
  source 1..75: mol_type = other DNA
attgttaactggaacaaaccgcttaccggtgctgccagtaccgcgccattcggcggcattggcgcttccggcaac

SEQ ID NO: 490858 - DNA, 75 bp, synthetic construct
  source 1..75: mol_type = other DNA
cgccgggaatcgttgaaatgacgggtgttgctggcgtgccagatgaagaagtgttcggaccgctattgcgcgtct

SEQ ID NO: 490859 - DNA, 75 bp, synthetic construct
  source 1..75: mol_type = other DNA
ttacaagcaggaacaacgttgcttacgccgggaatcgttgaaatgacgggtgttgctggcgtgccagatgaagaa

SEQ ID NO: 490860 - DNA, 75 bp, synthetic construct
  source 1..75: mol_type = other DNA
ctggagtcggactcgttaacgctgcccgcaacgcttaaccccgggctggatttttccgatgaggtggtgcgatga

SEQ ID NO: 490861 - DNA, 75 bp, synthetic construct
  source 1..75: mol_type = other DNA
ctgttttctttatctcgacaaagatgctacatgccaatagttcaagtagtgttattatatctgtggttctgatgg

SEQ ID NO: 490862 - DNA, 75 bp, synthetic construct
  source 1..75: mol_type = other DNA
tttatttcagctatcttagttcaaataatcatgctatgtagagcatattatcaagggatatatttgcatgcagac

SEQ ID NO: 490863 - DNA, 75 bp, synthetic construct
  source 1..75: mol_type = other DNA
gataaaataccgttaaaactgcgcttaatgctggaatataatggtagtagtttctggataaataccataaatggc

SEQ ID NO: 490864 - DNA, 75 bp, synthetic construct
  source 1..75: mol_type = other DNA
tctgaagaaaccaaacaagtttttcgttttaatgagattacacgcgataacaacaatcgagaaatatatggatgg

SEQ ID NO: 490865 - DNA, 75 bp, synthetic construct
  source 1..75: mol_type = other DNA
tatcaggaacttgttcgcaccttccctaacgcagatgagtggatgacaacgtttagagaaaatattgcacaaacc

SEQ ID NO: 490866 - DNA, 75 bp, synthetic construct
  source 1..75: mol_type = other DNA
taatgcaggaatcaaaggaagtcctgatggttttaattggcaatctcttgagcaacgtgctgaaaatataaaagc

SEQ ID NO: 490867 - DNA, 75 bp, synthetic construct
  source 1..75: mol_type = other DNA
taatgcaggaattaaaggaagtcctgatggttttaattggcaatctcttgagcagcgtgctgaaaagataaaagc

SEQ ID NO: 490868 - DNA, 75 bp, synthetic construct
  source 1..75: mol_type = other DNA
gttatttcttgccgctcgttccgatggtatgggcaaagcctgtcagtggtgcatagaatatttaagaaacccaca

SEQ ID NO: 490869 - DNA, 75 bp, synthetic construct
  source 1..75: mol_type = other DNA
tgcacaggctcgttatgctgcggggacgctggaaattcttgaatccttcctgggaaactcgcctatcagagaaga

SEQ ID NO: 490870 - DNA, 75 bp, synthetic construct
  source 1..75: mol_type = other DNA
caggatggttaaggcgaacaaaaccacgtcacaaaacgctgcgaatatcacctgagacaatttataaaacgctgt

SEQ ID NO: 490871 - DNA, 75 bp, synthetic construct
  source 1..75: mol_type = other DNA
atagatgaaaagttgtcaaaaaaacctagcctaagtgaagtcaacagcgctatttcatcagccgtaaataaacag

SEQ ID NO: 490872 - DNA, 75 bp, synthetic construct
  source 1..75: mol_type = other DNA
tatttcatcagccgtaaataaacagatcgcatggactgttgcaacaggcttggcgattttaggtctcgccaaatt

SEQ ID NO: 490873 - DNA, 75 bp, synthetic construct
  source 1..75: mol_type = other DNA
acatcatctggcattgccgttattgaacagcggtaaattgcttaaaaagccaatgcgcgaacataaacacgccac

SEQ ID NO: 490874 - DNA, 75 bp, synthetic construct
  source 1..75: mol_type = other DNA
gcaccttccctaacgcagatgagtggatgacaacgtttagagaaaatattgcacaaacctggcaacagcctgaac

SEQ ID NO: 490875 - DNA, 75 bp, synthetic construct
  source 1..75: mol_type = other DNA
tttgtaaccccttcaaaggaacaaaagggacttgctagaagagtttacaatttccttctcaattggcatgaccat

SEQ ID NO: 490876 - DNA, 75 bp, synthetic construct
  source 1..75: mol_type = other DNA
ttcgtgaattagttggtgatgagcaagaagatgatgacggcattcagatcgccaggttcgtctacaaacgattcc

SEQ ID NO: 490877 - DNA, 75 bp, synthetic construct
  source 1..75: mol_type = other DNA
ttcgtgagttagttggtgatgaacaagaagatgatgacggcattcagattgccaggttcgtctacaaacgtttcc

SEQ ID NO: 490878 - DNA, 75 bp, synthetic construct
  source 1..75: mol_type = other DNA
gtggttatcatttaaatcgttgcatgatgccactgaacgctttgcctcttatcctggtgaaggaaagaccactat

SEQ ID NO: 490879 - DNA, 75 bp, synthetic construct
  source 1..75: mol_type = other DNA
ccggccttaatgatacctgcgggtttacttacggcgaatataaccaggagtggctgacctttacttctgtaatgg

SEQ ID NO: 490880 - DNA, 75 bp, synthetic construct
  source 1..75: mol_type = other DNA
cggtatgcttctggtcgggcgtgtccaaatctatgacaatttaaacaaagaatttatagatgtccttgttgaagg

SEQ ID NO: 490881 - DNA, 75 bp, synthetic construct
  source 1..75: mol_type = other DNA
atctgggagccacgctatacatgcctgcaacacgggaagatattgctgatgccgtcctgcacgggaaaatcccgg

SEQ ID NO: 490882 - DNA, 75 bp, synthetic construct
  source 1..75: mol_type = other DNA
tgccaggcgttgcggggattggccccaaaagcgccacgcagttgctggtcgagtttcagagtctggaagggatct

SEQ ID NO: 490883 - DNA, 75 bp, synthetic construct
  source 1..75: mol_type = other DNA
gtcgccgtttttgatgatgaaaaccgcaatagcggctggcgtcatcagcgtttaccagattacaaagcgggtcga

SEQ ID NO: 490884 - DNA, 75 bp, synthetic construct
  source 1..75: mol_type = other DNA
aacaccccggttgccgatgaggaatggtggcaggatttccgggccgcaatgctggaacttcaggaacgtcgtcgg

SEQ ID NO: 490885 - DNA, 75 bp, synthetic construct
  source 1..75: mol_type = other DNA
aaaccgaagaagtctatgatgttattaaaatgcaggcgctggcaaatgaactttcgagtcatgactgccgtgacc

SEQ ID NO: 490886 - DNA, 75 bp, synthetic construct
  source 1..75: mol_type = other DNA
ggagcaatgtgtgaacccgccacacatcgccgctgggcggctggcattctggacagggctcgtttttatgggtta

SEQ ID NO: 490887 - DNA, 75 bp, synthetic construct
  source 1..75: mol_type = other DNA
cactggaagaattaagcaccttaaatcagaacggaacccgcttaccaagtcatccggatcggctaaaaacgtgtg

SEQ ID NO: 490888 - DNA, 75 bp, synthetic construct
  source 1..75: mol_type = other DNA
tttttctctacgggtttgaagactgtgtgactgactccgttcgatgcatggataaaccggaagaagcgaaaagga

SEQ ID NO: 490889 - DNA, 75 bp, synthetic construct
  source 1..75: mol_type = other DNA
ttttacggtgcgtggctaccagaaagggaccgtacacattgtctttaagcgttctgaccttgttgaaaaactgaa

SEQ ID NO: 490890 - DNA, 75 bp, synthetic construct
  source 1..75: mol_type = other DNA
gagcagcatcggggcgcagtatggtgaatttctcgggaacggcgacaatatcggtgagttgttcgaaggggaata

SEQ ID NO: 490891 - DNA, 75 bp, synthetic construct
  source 1..75: mol_type = other DNA
ggtactgccgcgcaaactgattgaagagaaactgtatgaaccgccccgggtttcctggagagtgttttatctgtg

SEQ ID NO: 490892 - DNA, 75 bp, synthetic construct
  source 1..75: mol_type = other DNA
aggggcgcaacgttcctgacttcaggaacagcatcggggcgcagtatggtgaatttctcgggaacggcgacaatg

SEQ ID NO: 490893 - DNA, 75 bp, synthetic construct
  source 1..75: mol_type = other DNA
attctgctcgatgcttccggtgacatttttctctacgggtttgaagactgcgtgactgactccgttcgatgcatg

SEQ ID NO: 490894 - DNA, 75 bp, synthetic construct
  source 1..75: mol_type = other DNA
accatggttggaattgccgtcggcattcagtttttggcgacagttttgacacgcggctatgccgggcggctggcc

SEQ ID NO: 490895 - DNA, 75 bp, synthetic construct
  source 1..75: mol_type = other DNA
ctcttcggtatttcttgccggggcgatatcggcggtgctggggattattgtgacgatactgtcgtttcgccgggg

SEQ ID NO: 490896 - DNA, 75 bp, synthetic construct
  source 1..75: mol_type = other DNA
ggtgcgtgggtcgcattagcgggcgcggccttaaccggagctggatgttcgcttatctttcctgcgctgggcgtg

SEQ ID NO: 490897 - DNA, 75 bp, synthetic construct
  source 1..75: mol_type = other DNA
caacgttcctgacttcaggaacagcatcggggcgcagtatggtgaatttctcgggaacggcgacaatgtcggtaa

SEQ ID NO: 490898 - DNA, 75 bp, synthetic construct
  source 1..75: mol_type = other DNA
attctactcgatgcttccggtgacatttttctctacgggtttgaagactgcgtgactgactccattcgatgcatg

SEQ ID NO: 490899 - DNA, 75 bp, synthetic construct
  source 1..75: mol_type = other DNA
gggatccacggcaatgaaacggcgccagtggaaatgctggacgcgttgcttagcgcgatatatcacggagaaatg

SEQ ID NO: 490900 - DNA, 75 bp, synthetic construct
  source 1..75: mol_type = other DNA
tcgacgcgttacggctggctgatgtggcgactggcgctgtatgcgctggttgcgtggggcctctggaaaatccgg

SEQ ID NO: 490901 - DNA, 75 bp, synthetic construct
  source 1..75: mol_type = other DNA
atgaaaccgaccaccatctccttattgcagaagtacaaacaagaaaaaaaacgttttgcgaccatcaccgcttat

SEQ ID NO: 490902 - DNA, 75 bp, synthetic construct
  source 1..75: mol_type = other DNA
tggtgttaagttatcaacgactttgtgccaccgcccagcctacggaaaaaaaaagaagaagagtgggatccagca

SEQ ID NO: 490903 - DNA, 75 bp, synthetic construct
  source 1..75: mol_type = other DNA
ctcttacgtctggcaaacactaaagctggaacgccagcctatgaaagagcgctgaataacgctgcgaatgccatc

SEQ ID NO: 490904 - DNA, 75 bp, synthetic construct
  source 1..75: mol_type = other DNA
attcctaaattcgccaaaaatttcctcgctgaaacgggcgacatccgcgctgctgtgcggcagtatatggctgaa

SEQ ID NO: 490905 - DNA, 75 bp, synthetic construct
  source 1..75: mol_type = other DNA
cggttgaactggcaaaacgtattaccgaagcgctggcgattccggttatcggcattggcgcaggtaacgttactg

SEQ ID NO: 490906 - DNA, 75 bp, synthetic construct
  source 1..75: mol_type = other DNA
ctgatgaaggacttaacgtcatgctggtaggcgattcgctgggcatgacggttcaggggcacgactccaccctgc

SEQ ID NO: 490907 - DNA, 75 bp, synthetic construct
  source 1..75: mol_type = other DNA
agttaccttgcggatggcgatgcagtcgacaaattattagctctgacggtataaccctccatctccacggaaaac

SEQ ID NO: 490908 - DNA, 75 bp, synthetic construct
  source 1..75: mol_type = other DNA
ccatcgtcagggatgctgttgccaaatggcgtaaaggctggatcccaccggttactactgccgcaagacttcctt

SEQ ID NO: 490909 - DNA, 75 bp, synthetic construct
  source 1..75: mol_type = other DNA
ggttcacaccagcagtcttcacaggcgttacaaaatttacaacgtcaactgggattaatagctggaggtgaggct

SEQ ID NO: 490910 - DNA, 75 bp, synthetic construct
  source 1..75: mol_type = other DNA
gacaatcgcaagctaacaggattagaacgattggcgcaactgcaacccttggtgtatcactgggacttgaggctg

SEQ ID NO: 490911 - DNA, 75 bp, synthetic construct
  source 1..75: mol_type = other DNA
aaagcgagctgagcagtatgcaaaaagaagtcagctagttaaaaaacagcttgagaaatatggtgaatatagccc

SEQ ID NO: 490912 - DNA, 75 bp, synthetic construct
  source 1..75: mol_type = other DNA
tctatcgtccagtcgatcgaccgacagacccttatgcgcaagctggagaaacaattggcgggtatttagttccag

SEQ ID NO: 490913 - DNA, 75 bp, synthetic construct
  source 1..75: mol_type = other DNA
gatgacccgtatcgcccgtctggaaggcgtgaaagcacgcgtggctccgatcctttatatggaaggtgcctgcgg

SEQ ID NO: 490914 - DNA, 75 bp, synthetic construct
  source 1..75: mol_type = other DNA
gcctccaaagcgagggcttctggacccatggagggagtggttaaaagagcaacgagaaagtgggaattataacgc

SEQ ID NO: 490915 - DNA, 75 bp, synthetic construct
  source 1..75: mol_type = other DNA
cgggggtttacaggcagtgaaaccatcgtcagggatgcggttgccaaatggcgtaaaggctggaacccaccggtt

SEQ ID NO: 490916 - DNA, 75 bp, synthetic construct
  source 1..75: mol_type = other DNA
tgatcagcgtacgctggcgacctggttcagaaaatatccggaaatacagattgtctcgcgtgatcgcagtggagt

SEQ ID NO: 490917 - DNA, 75 bp, synthetic construct
  source 1..75: mol_type = other DNA
gatgtagtttcagggaaatatcccgtattacaggcctgtcgcgtgtgacagtcagtcgctgggtgcgttcaggaa

SEQ ID NO: 490918 - DNA, 75 bp, synthetic construct
  source 1..75: mol_type = other DNA
atgttaatagtcaatcttgatactcaccgtcccctcgtcctgcttcccggccgtgatcagcgtacgctggcgacc

SEQ ID NO: 490919 - DNA, 75 bp, synthetic construct
  source 1..75: mol_type = other DNA
ctgcataacaagggatgtagtttcagggaaatatcccgtattacaggcctgtcgcgagtgacagtcagtcgctgg

SEQ ID NO: 490920 - DNA, 75 bp, synthetic construct
  source 1..75: mol_type = other DNA
cgagtcgcttgctcccttcgccggttcacaccaacagtcttcacaggcgttacaaaatttacaacgtcaactggg

SEQ ID NO: 490921 - DNA, 75 bp, synthetic construct
  source 1..75: mol_type = other DNA
gattgatttgggtgaaacgccggagcagatcctcagcaagctggatgacgatcgcatcaaagaggacgatgtgcg

SEQ ID NO: 490922 - DNA, 75 bp, synthetic construct
  source 1..75: mol_type = other DNA
gatgccgttcttctttaatctcaaggggcgcaccgatgcgatgctggagaaagtgaaattcttccgtccgcattt

SEQ ID NO: 490923 - DNA, 75 bp, synthetic construct
  source 1..75: mol_type = other DNA
gactctgttcatagttgtcgtcggcgccggatacagcatccaccctgctcaggacatacgctatggcttgtattt

SEQ ID NO: 490924 - DNA, 75 bp, synthetic construct
  source 1..75: mol_type = other DNA
gaggttatggtcctgcataacaagggatgtagtttcagggaaatatcccgtattacaggcctgtcggcggtatcc

SEQ ID NO: 490925 - DNA, 75 bp, synthetic construct
  source 1..75: mol_type = other DNA
tcctcgggaatcctcctgcgctgaagcaagggaaacgttattgccatagtgatatgaaccgaatgtttggcggtc

SEQ ID NO: 490926 - DNA, 75 bp, synthetic construct
  source 1..75: mol_type = other DNA
aaaaagaacctgagctgaaaatagcgcagcaactggcactcgagttctaccgtattctgaaaacccaaaataaat

SEQ ID NO: 490927 - DNA, 75 bp, synthetic construct
  source 1..75: mol_type = other DNA
atgcactctcttaagacacttctacagttaccttgcggatggcgatgcagtcgacaaattattagctctgacggt

SEQ ID NO: 490928 - DNA, 75 bp, synthetic construct
  source 1..75: mol_type = other DNA
tattacaggcctgtcgcgtgtgacagtcagtcgctgggtgcgttcaggaacattccctgaaatgtcaacccgacc

SEQ ID NO: 490929 - DNA, 75 bp, synthetic construct
  source 1..75: mol_type = other DNA
accagcggaacacaagcgacttgcagactgcggtttagcctttcctctggcgaaactgatgcagattttctggac

SEQ ID NO: 490930 - DNA, 75 bp, synthetic construct
  source 1..75: mol_type = other DNA
tgagtgctacgagtgtggctttaccggtgagttcgagtgcaccagcaaaggcttcacttgtccgaaatgtggtaa

SEQ ID NO: 490931 - DNA, 75 bp, synthetic construct
  source 1..75: mol_type = other DNA
aagtgaaagtagaaacccaggggtcgattggtctggaaaatgaactgactgcggaagacgtggcaagcgccgata

SEQ ID NO: 490932 - DNA, 75 bp, synthetic construct
  source 1..75: mol_type = other DNA
gtgcagatactcttcttcgcagggttatcaataccccggggacgaaacagtcaggcgcgcctcatgtcggtattg

SEQ ID NO: 490933 - DNA, 75 bp, synthetic construct
  source 1..75: mol_type = other DNA
agacatatacctctgatacgtcttgttgccagtgagttgtcaccaaagaaatcacctgatccagaaccatctgtg

SEQ ID NO: 490934 - DNA, 75 bp, synthetic construct
  source 1..75: mol_type = other DNA
atggcgatgcagtcgacaaattattagctctgacggtataaccctccatctccacggaaaacgcaaaacagcaca

SEQ ID NO: 490935 - DNA, 75 bp, synthetic construct
  source 1..75: mol_type = other DNA
gagggagtggttaaaagagcaacgagaatgtggtaattataactccggccggatatggcgggaaatggtggccag

SEQ ID NO: 490936 - DNA, 75 bp, synthetic construct
  source 1..75: mol_type = other DNA
ttttccgccaaagagagcgcatttaaggcaagtgaggaacaaactgatgcaggttttctgcactaccgaattgga

SEQ ID NO: 490937 - DNA, 75 bp, synthetic construct
  source 1..75: mol_type = other DNA
ttcatcgtgagaatgagatgtttgctgtgcactggcagataaaagaaaaaatagtcataacgctgtgccaacacg

SEQ ID NO: 490938 - DNA, 75 bp, synthetic construct
  source 1..75: mol_type = other DNA
acaagggatgtagtttcagggaaatatcccgtattacaggcctgtcgcgtgtgacagtcagtcgctgggtgggtt

SEQ ID NO: 490939 - DNA, 75 bp, synthetic construct
  source 1..75: mol_type = other DNA
cgaatattcagattacaagcagtacgttgacgagaaactggataacagcctgacctgggatacccgtttatcctg

SEQ ID NO: 490940 - DNA, 75 bp, synthetic construct
  source 1..75: mol_type = other DNA
aagaaacccttcttgcccgaaagcatctcaagcaactggaaacactggcgaacaagctggatacactcgatgaac

SEQ ID NO: 490941 - DNA, 75 bp, synthetic construct
  source 1..75: mol_type = other DNA
atacacgtctgatcaaagaggtaacacagaattttgctctggcctttgagggtagctatcaatatatggatctga

SEQ ID NO: 490942 - DNA, 75 bp, synthetic construct
  source 1..75: mol_type = other DNA
cgacgattttaggttgcaactcgaaaacgaaatgcgcaaagatggagatagcgcgttggcaacttggattaaaag

SEQ ID NO: 490943 - DNA, 75 bp, synthetic construct
  source 1..75: mol_type = other DNA
atgagtaataaaaattacgagagtcaccgcaaagcaattgttagtaaaggtataccccccactctattaaatagg

SEQ ID NO: 490944 - DNA, 75 bp, synthetic construct
  source 1..75: mol_type = other DNA
atgaagcgagttcttattcctggcgtcattttatgtggcgctgatgtggcgcaggccgtcgatgacaaaaatatg

SEQ ID NO: 490945 - DNA, 75 bp, synthetic construct
  source 1..75: mol_type = other DNA
cgaagcagatgctgggccgcacgccgggcaatatcgctgccattcgcccaatgaaagatggcgttatcgctgact

SEQ ID NO: 490946 - DNA, 75 bp, synthetic construct
  source 1..75: mol_type = other DNA
cgcccacaattagattctgtcgtgcgaattgcgtcgctcactaagctaatgaccagtgagatgctggtgaaattg

SEQ ID NO: 490947 - DNA, 75 bp, synthetic construct
  source 1..75: mol_type = other DNA
gaaagatgggcgtccgggaattattcagaaaactggcggcggcggcggattcattacctatatggcgatgatccc

SEQ ID NO: 490948 - DNA, 75 bp, synthetic construct
  source 1..75: mol_type = other DNA
taaaacagatgaggctgcagacagagttattgatcatttgatcaagtttcctgatttttatgactcggagatatt

SEQ ID NO: 490949 - DNA, 75 bp, synthetic construct
  source 1..75: mol_type = other DNA
tcaagtttcctgatttttataactcggagatattcagggaggcagataaagaggaagatataacatttaatacac

SEQ ID NO: 490950 - DNA, 75 bp, synthetic construct
  source 1..75: mol_type = other DNA
tgctgaagacccgctgacctgtgtggcgcgtggtggcggcaaggcgctggaaatgatcgacatgcacggcggcga

SEQ ID NO: 490951 - DNA, 75 bp, synthetic construct
  source 1..75: mol_type = other DNA
aacagaaattcatcagcatctcactggattaccgactcttgccgatgcaactctttttttactgtcttccgcatt

SEQ ID NO: 490952 - DNA, 75 bp, synthetic construct
  source 1..75: mol_type = other DNA
ctgaaggtctgcgctcagccgcaactcgtaccggaggcacaatgggcaaggcgctctccgccagtgcccgcgttc

SEQ ID NO: 490953 - DNA, 75 bp, synthetic construct
  source 1..75: mol_type = other DNA
atgagctactacgatgacctccgggctggcgacgaggagatgatccgtgagtggggacggcccgttaaattacgc

SEQ ID NO: 490954 - DNA, 75 bp, synthetic construct
  source 1..75: mol_type = other DNA
ctcgactggctgttgctggaagattccatgacaaaacgttttgaacagcagggaaaaacggtgagcgtgacgatg

SEQ ID NO: 490955 - DNA, 75 bp, synthetic construct
  source 1..75: mol_type = other DNA
tgaaaaaggagttaagcgagccctgataagcacgcctaatcatactctggttctgcaacaactggaggatattta

SEQ ID NO: 490956 - DNA, 75 bp, synthetic construct
  source 1..75: mol_type = other DNA
tgcgagaaggtacactaaattcacagaatcttcgtcagcttctggaaaactctgtttcttcatgctttttgactg

SEQ ID NO: 490957 - DNA, 75 bp, synthetic construct
  source 1..75: mol_type = other DNA
ccggagagatacggttatctgaaaggcagtggcaacaggaggaacatattattgtcaatcccgacaacgatgccc

SEQ ID NO: 490958 - DNA, 75 bp, synthetic construct
  source 1..75: mol_type = other DNA
cacatgaactactcacacctgttcttggccagagtgttaatcctctgggcatgggctactcatccgataatggaa

SEQ ID NO: 490959 - DNA, 75 bp, synthetic construct
  source 1..75: mol_type = other DNA
acacaatgatcttacgtgatactatgccgatccttcgtcgctatcatttatggtctaatggatggaatattcgtg

SEQ ID NO: 490960 - DNA, 75 bp, synthetic construct
  source 1..75: mol_type = other DNA
tgatgaaaatgcttttggtgcggcgagattcaccagtatcttaaaacaaatggcttttgatttgtcatgtaaaat

SEQ ID NO: 490961 - DNA, 75 bp, synthetic construct
  source 1..75: mol_type = other DNA
acccgggactttattgagataggccgtgatgccggactgtgggggcgacgttcccgcctgcgattaagcggtaaa

SEQ ID NO: 490962 - DNA, 75 bp, synthetic construct
  source 1..75: mol_type = other DNA
ggctaccaagtgtattatcggattgatggaatggctggtgcggatatagcggataatgcaccaggggaaacccgc

SEQ ID NO: 490963 - DNA, 75 bp, synthetic construct
  source 1..75: mol_type = other DNA
ggcgcgcctgttgatgatttcacgctaccggagcactacacccgcaagcgtatccgtgcgatgggccgcgtgtcg

SEQ ID NO: 490964 - DNA, 75 bp, synthetic construct
  source 1..75: mol_type = other DNA
aagccttatacccagttgtttgaagagcagattacccgtccattggggatgaaagacaccacctacaccccctca

SEQ ID NO: 490965 - DNA, 75 bp, synthetic construct
  source 1..75: mol_type = other DNA
acctgcgaagggcaaaccattaaacctgatttagattcgcaggcgatagcgcatatcgagcgccgccagagccgc

SEQ ID NO: 490966 - DNA, 75 bp, synthetic construct
  source 1..75: mol_type = other DNA
tctggcgaaaagacagcggcgataatgtgcatctgcttgccgtgtttagcccgtggcgcagtggcgataccacga

SEQ ID NO: 490967 - DNA, 75 bp, synthetic construct
  source 1..75: mol_type = other DNA
gttacggtgaaccctgcgcaccggtgatttccggtttcatgtttggccccgttccggtcataacccgttttatgg

SEQ ID NO: 490968 - DNA, 75 bp, synthetic construct
  source 1..75: mol_type = other DNA
aattacaggattgtctgaccgtgcatcgaaccgttcgttcagtgacgcggtatcccgtgtcagttgctggcagaa

SEQ ID NO: 490969 - DNA, 75 bp, synthetic construct
  source 1..75: mol_type = other DNA
tgacctgagctttatgcaacgtgaatccgacgggcaaaagcagcagctttctaacgatcaaatcgatttataccg

SEQ ID NO: 490970 - DNA, 75 bp, synthetic construct
  source 1..75: mol_type = other DNA
ctgcctgtagccacaactcttcacttcccccttttaccgccagtgggtttgccgaagaccagggtgcagtgcgca

SEQ ID NO: 490971 - DNA, 75 bp, synthetic construct
  source 1..75: mol_type = other DNA
gactatagcttcgcaaaactgtttgccgaagaaggacttaacgtcatgctggtcggcgattcactgggcatgacg

SEQ ID NO: 490972 - DNA, 75 bp, synthetic construct
  source 1..75: mol_type = other DNA
acgcttcgcgaccatcaccgcttacgactacagcttcgctaaactgtttgccgaagaaggacttaacgtgatgct

SEQ ID NO: 490973 - DNA, 75 bp, synthetic construct
  source 1..75: mol_type = other DNA
gtggtcacttaggcttaacgccacagtccgtgaatatttttggtggctacaaagtgcaggggcgtggtgatgagg

SEQ ID NO: 490974 - DNA, 75 bp, synthetic construct
  source 1..75: mol_type = other DNA
cacagctgctggtgctggaatgcgtgccggttgaactggcaaaacgtattaccgaagcactggcgatcccggtta

SEQ ID NO: 490975 - DNA, 75 bp, synthetic construct
  source 1..75: mol_type = other DNA
tgctgaccgaacgtgccgttcctgtatgtggtcacttaggtttaacaccacagtcagtgaatattttcggtggct

SEQ ID NO: 490976 - DNA, 75 bp, synthetic construct
  source 1..75: mol_type = other DNA
gactacagcttcgcgaaactatttgctgatgaaggacttaacgtcatgctggtaggcgactcgctgggcatgacc

SEQ ID NO: 490977 - DNA, 75 bp, synthetic construct
  source 1..75: mol_type = other DNA
gcaagcgcgtgaaaaagtatctccagtcctccggcgtctttgatgcgtttaatgagctgctctgtacgctggaag

SEQ ID NO: 490978 - DNA, 75 bp, synthetic construct
  source 1..75: mol_type = other DNA
cttcctgcgggatcgttgaaatacgccataaccgatgcctggaacgtctatctggcagccgggcgcggttttgaa

SEQ ID NO: 490979 - DNA, 75 bp, synthetic construct
  source 1..75: mol_type = other DNA
cggacaagggcaaacatccaacatcgatttaagcagtgtacaaaatgtggaagtgctgcgtggccccttctctgc

SEQ ID NO: 490980 - DNA, 75 bp, synthetic construct
  source 1..75: mol_type = other DNA
actttaaccaccggtttaaactatgaaaacatgagtgaaaaccgcaagggctacaataacttccgcttgaattac

SEQ ID NO: 490981 - DNA, 75 bp, synthetic construct
  source 1..75: mol_type = other DNA
atctggcaacccataccagcgccctgccccgtgaacagcccggtggcgcggcacatcgtccggtgtttgtctggc

SEQ ID NO: 490982 - DNA, 75 bp, synthetic construct
  source 1..75: mol_type = other DNA
gccggagagcgagaaacgacccagtaccagtcaatacccatggccccccaacttaacccgtcacatgcgggcggc

SEQ ID NO: 490983 - DNA, 75 bp, synthetic construct
  source 1..75: mol_type = other DNA
acttaacccgtcacacgcgggtggcgtgattactctacaacgccattaccaggggatagacagtcgctggacaca

SEQ ID NO: 490984 - DNA, 75 bp, synthetic construct
  source 1..75: mol_type = other DNA
caaatgtggagcatttcttgccgttacgactacaattttctcaattaattaacgtattgtgccgtttcgttttcc

SEQ ID NO: 490985 - DNA, 75 bp, synthetic construct
  source 1..75: mol_type = other DNA
gtctgtgcctgtttttaattcctgtgtgcggacaggtgacacgccgcacacgcgcccccggcgcgggggcggtgg

SEQ ID NO: 490986 - DNA, 75 bp, synthetic construct
  source 1..75: mol_type = other DNA
agctttcagaagatatggggctgtccggttatttcatcgtactcacaacgccgtcacgttttcacccgacgacca

SEQ ID NO: 490987 - DNA, 75 bp, synthetic construct
  source 1..75: mol_type = other DNA
ggcgtgccggaatacgggcaaaaaggtgagttgcgccgtgacgaacgcaatctgatgtggaacgtcgatccctat

SEQ ID NO: 490988 - DNA, 75 bp, synthetic construct
  source 1..75: mol_type = other DNA
aacgtttcgcgggagattttcgcgtaaacgcgtcctggacctggcttgatgcgacctatcgcagcaatgtttgca

SEQ ID NO: 490989 - DNA, 75 bp, synthetic construct
  source 1..75: mol_type = other DNA
gtaacggcgatgacagcggtgatgccagttatcataaatggctacctgccggttcgttaaaatatgcaatgaccg

SEQ ID NO: 490990 - DNA, 75 bp, synthetic construct
  source 1..75: mol_type = other DNA
gccgtccattagatttgctaagaaaatggcatgaaaaagttgaattatggatcttagaagaagcaaaaataaaaa

SEQ ID NO: 490991 - DNA, 75 bp, synthetic construct
  source 1..75: mol_type = other DNA
atggcacgagaaaattgagacatggatcttaaatgaagcaggtattaccataaaaaacaacgttgatatgcattg

SEQ ID NO: 490992 - DNA, 75 bp, synthetic construct
  source 1..75: mol_type = other DNA
atgtccgcgaagaggtggcggcgaatcttgaagtcttgctactgctgatgtttatggtggcaggcatctatttta

SEQ ID NO: 490993 - DNA, 75 bp, synthetic construct
  source 1..75: mol_type = other DNA
ttactcctttggttttgaaagaaataagtcaataatttccaatgctttcagacatcgtgggaaaaatataatact

SEQ ID NO: 490994 - DNA, 75 bp, synthetic construct
  source 1..75: mol_type = other DNA
gcgaacaaacttcaatggaggatcttttccctaaagatattttagatatcaagattgatggtaagaaattcaaca

SEQ ID NO: 490995 - DNA, 75 bp, synthetic construct
  source 1..75: mol_type = other DNA
gctatacggcaggtgtgctgtgcgaaggagtgcctgcatgcgtttctccttggccttttttcctctgggatgaag

SEQ ID NO: 490996 - DNA, 75 bp, synthetic construct
  source 1..75: mol_type = other DNA
tgcatggtatccggctaacagcacagcggaacaggtaacaaccatcaacgttaaaaccggagaacagacagcatg

SEQ ID NO: 490997 - DNA, 75 bp, synthetic construct
  source 1..75: mol_type = other DNA
gcatttctccagctgttccaggctggtgggcaagattcaaagatgacgattgcggcgagtggtggagtccgatcg

SEQ ID NO: 490998 - DNA, 75 bp, synthetic construct
  source 1..75: mol_type = other DNA
gcctgtctcctgccgttcctggctggtgggcgaagtttatcgatactgatgactggtcagcctggtatagtccga

SEQ ID NO: 490999 - DNA, 75 bp, synthetic construct
  source 1..75: mol_type = other DNA
acatcattgaccggtgtcaccgatgaacatgctatcggtaaagccttcaccgaatctctgccattcaccgcactg

SEQ ID NO: 491000 - DNA, 75 bp, synthetic construct
  source 1..75: mol_type = other DNA
aattattcagtttgtgttgcaggcatcggaacatgctcagctgtcgctgttctatattttcaacggtctgctgtc

SEQ ID NO: 491001 - DNA, 75 bp, synthetic construct
  source 1..75: mol_type = other DNA
agagccatttattgcaagaagtgcgaatctgcaatgaaacgctcacgcagagaatgcaacaaattaattctgcaa

SEQ ID NO: 491002 - DNA, 75 bp, synthetic construct
  source 1..75: mol_type = other DNA
ttaatttgtagcattatggatattagattagctaaattagcaaagagtttaggttgttcatatagtcgttatgcc

SEQ ID NO: 491003 - DNA, 75 bp, synthetic construct
  source 1..75: mol_type = other DNA
ggcggaaagtattcctggttcaggatcttcactgattgcctgaacatgctatctgacagtacaacaaatattttt

SEQ ID NO: 491004 - DNA, 75 bp, synthetic construct
  source 1..75: mol_type = other DNA
actcattgagcagcggcttgaaagtcttcagacaccggaagcgctggcagacaggcaacgccggatactcaatgg

SEQ ID NO: 491005 - DNA, 75 bp, synthetic construct
  source 1..75: mol_type = other DNA
aaagctctgaaaacggatccatcaatgcaacatcagcatacccggatgacacttatcgggcagcggcttgaaagt

SEQ ID NO: 491006 - DNA, 75 bp, synthetic construct
  source 1..75: mol_type = other DNA
gagggtataacggcggcaatgtaattctgtcgaaggcgttggctaacggttatcagatttctatatcaagagagc

SEQ ID NO: 491007 - DNA, 75 bp, synthetic construct
  source 1..75: mol_type = other DNA
gatttaactcttgggtataatttttctgatccagatgatgaggctcctgacatgagaaacggcagtaagacctac

SEQ ID NO: 491008 - DNA, 75 bp, synthetic construct
  source 1..75: mol_type = other DNA
attttcatgagtttgaaaagttgattagaaaatcatggggatatggttgtccgatatgctttgttactgtaaaca

SEQ ID NO: 491009 - DNA, 75 bp, synthetic construct
  source 1..75: mol_type = other DNA
ggttatggaactgaccacccttagccgtcgaactttgttaaaccttgaagcccgtggtgagtttcctgagcgtgt

SEQ ID NO: 491010 - DNA, 75 bp, synthetic construct
  source 1..75: mol_type = other DNA
ggaatacacggtaatgagacggcacctgtggagatgctggacgcgttgcttggcgcgatatctcacggcgagatc

SEQ ID NO: 491011 - DNA, 75 bp, synthetic construct
  source 1..75: mol_type = other DNA
gtgagcagactgcgatggaagatctttttactcatgatgtattatcaactattcttggtggtaaaaaatttaaca

SEQ ID NO: 491012 - DNA, 75 bp, synthetic construct
  source 1..75: mol_type = other DNA
cggtctgcaaagctatggagatagccagtatctggtgaaactcggcactgggtatttgctgaaagatgatggaac

SEQ ID NO: 491013 - DNA, 75 bp, synthetic construct
  source 1..75: mol_type = other DNA
tggcctatgagatagcaaaggactattacgctggggtgatggcgaagaagggtgtggtttcgggtgaagttgaca

SEQ ID NO: 491014 - DNA, 75 bp, synthetic construct
  source 1..75: mol_type = other DNA
cccctgccgttgtgcaatctatgcaggtatttgtgcaggttgtgctgtatgcaggtttatttatttttgcgcaat

SEQ ID NO: 491015 - DNA, 75 bp, synthetic construct
  source 1..75: mol_type = other DNA
ccatcaaaaaaccaggtggtggccccgtgaaatggactcattacagcgacttccctatgaccgctgaagaatgca

SEQ ID NO: 491016 - DNA, 75 bp, synthetic construct
  source 1..75: mol_type = other DNA
gtaatgaacacgatcttatctgttcctgggtattcgacaaggatccgcagatcccggtctttactgaaggtactg

SEQ ID NO: 491017 - DNA, 75 bp, synthetic construct
  source 1..75: mol_type = other DNA
caatcgtgggcagagtattcagatcccaagtcacgttggacagcacgtaaagggctgttttggggcgcggctgaa

SEQ ID NO: 491018 - DNA, 75 bp, synthetic construct
  source 1..75: mol_type = other DNA
ttaggcgcagaatattggagctacgacaaaaataaactctggtcgccatttggctatccggtacaccatgccaat

SEQ ID NO: 491019 - DNA, 75 bp, synthetic construct
  source 1..75: mol_type = other DNA
cgctccgttatcgggtggtttcgcaaattactcgccactcgccgtccttcgaaatgcatatggcaagtgacacgc

SEQ ID NO: 491020 - DNA, 75 bp, synthetic construct
  source 1..75: mol_type = other DNA
gcaaggtaagcgttattgtcatagcgatatgaatcgaatgtttggcggacgctggcagctatttgccgaaagcgg

SEQ ID NO: 491021 - DNA, 75 bp, synthetic construct
  source 1..75: mol_type = other DNA
taccgtctggcgcatcgcgtgggtgagttgagccacctggctgatggctcatatgccattgcggaacgctggaat

SEQ ID NO: 491022 - DNA, 75 bp, synthetic construct
  source 1..75: mol_type = other DNA
ggttttgcggtgctggcagtgatgacgatgattttaccgctgctggcctgggcatttaatggcagcgtccgtaaa

SEQ ID NO: 491023 - DNA, 75 bp, synthetic construct
  source 1..75: mol_type = other DNA
cacactacacaggtgtctatgcccatcgttgtagcttggggttgatgtcggtcagaggacatgtgcccggtggtg

SEQ ID NO: 491024 - DNA, 75 bp, synthetic construct
  source 1..75: mol_type = other DNA
gtacgaaagaacacttatcacagaacgcgttaatgctggtctggctgctgctctccggcggggagaaaaggcgga

SEQ ID NO: 491025 - DNA, 75 bp, synthetic construct
  source 1..75: mol_type = other DNA
aaagccgctattggtcgtctgaaaggcgaggaactggcgcaatataatctgtggctggattatctggacgcactg

SEQ ID NO: 491026 - DNA, 75 bp, synthetic construct
  source 1..75: mol_type = other DNA
gaaattactgaatcagaaagacagctactaattaaccaggctaacgaatacatgaacagtaagcaatggcctggc

SEQ ID NO: 491027 - DNA, 75 bp, synthetic construct
  source 1..75: mol_type = other DNA
cgccgcccagtccactactgacaaagacgacgtctgggttgccgtcatcaccaaagaagaagttcgcaaggaatc

SEQ ID NO: 491028 - DNA, 75 bp, synthetic construct
  source 1..75: mol_type = other DNA
gccattcaccgtctttcgaattacatatggcaggtgaaacgctgaactttacgccgtttaaaaagggaatattgc

SEQ ID NO: 491029 - DNA, 75 bp, synthetic construct
  source 1..75: mol_type = other DNA
agccgccaacggtttatcgcgcgctggattttctgcttgagcaaggttttgtgcataaggtggaatccaccaaca

SEQ ID NO: 491030 - DNA, 75 bp, synthetic construct
  source 1..75: mol_type = other DNA
cccgcctcgccgatgacctggggcgagcaaaccgacgtaccggaatctgccgactggtataactccagctacatc

SEQ ID NO: 491031 - DNA, 75 bp, synthetic construct
  source 1..75: mol_type = other DNA
tccgtcatgaagctatgttgcgtttagctcatagccttaaacatgtcccggatattgaggaaatttattgggaga

SEQ ID NO: 491032 - DNA, 75 bp, synthetic construct
  source 1..75: mol_type = other DNA
ttaattccagtctggggttaatgactgcttttttcggaaggcatacctggacgctgactataccgatcgaggtct

SEQ ID NO: 491033 - DNA, 75 bp, synthetic construct
  source 1..75: mol_type = other DNA
gcaaaaatggggtttgccctgcggcataatgtgattgaagcacatgggctctgtgcggcatgtgtggaagtggaa

SEQ ID NO: 491034 - DNA, 75 bp, synthetic construct
  source 1..75: mol_type = other DNA
gaaaaggagtatagatcatttttcagtagagcatgaaaatgttatcaactgctttaacattttaaaagaaaagtt

SEQ ID NO: 491035 - DNA, 75 bp, synthetic construct
  source 1..75: mol_type = other DNA
ggctgcctgcgtgggcagatattcctccacccacgcatgaagagcttattgaaattactgaatcagaaagacagc

SEQ ID NO: 491036 - DNA, 75 bp, synthetic construct
  source 1..75: mol_type = other DNA
acctgggcaaagaatctgtgcgctggcaccttgatctacataccgcaattcgtggctccttgcatccgcagttcg

SEQ ID NO: 491037 - DNA, 75 bp, synthetic construct
  source 1..75: mol_type = other DNA
tttctggagaatggttatgtgtcagatgatattcattatgacatggttaaaaataacttaatcatcatgaaacaa

SEQ ID NO: 491038 - DNA, 75 bp, synthetic construct
  source 1..75: mol_type = other DNA
cctcaggatgttcatcgaccaggctgtattctgcaaacagcctctgagatacgaaaagttgtggttaaagtctca

SEQ ID NO: 491039 - DNA, 75 bp, synthetic construct
  source 1..75: mol_type = other DNA
gatattattttttatcacgatagtgaacatgaatcatttatagaaatgataccgggtagctacgctattttcttt

SEQ ID NO: 491040 - DNA, 75 bp, synthetic construct
  source 1..75: mol_type = other DNA
ctgaaatatgatgcgaacaacatctatctggctaccacctattctgaaacccagaacatgactgtttttggtaat

SEQ ID NO: 491041 - DNA, 75 bp, synthetic construct
  source 1..75: mol_type = other DNA
aatattctttcttatgtctatccgtttgttgctatgtgtaatgagtgtaaatttcggcgcaatgacttgaactat

SEQ ID NO: 491042 - DNA, 75 bp, synthetic construct
  source 1..75: mol_type = other DNA
atgcgtgatatgtacgaagttttagatcgttggggggcttgggctgcagcagaaaatagtggtgtcgactggcag

SEQ ID NO: 491043 - DNA, 75 bp, synthetic construct
  source 1..75: mol_type = other DNA
gttcccaatcgttgaaagcaccggtgagaccagctcatatggagacttcaacaacaacggcatgaccgcagcgaa

SEQ ID NO: 491044 - DNA, 75 bp, synthetic construct
  source 1..75: mol_type = other DNA
aagacggtcaggcggtgtatgacgatatccaggcgctttacatgcagttagtgaagcagaccaaggggtacgttg

SEQ ID NO: 491045 - DNA, 75 bp, synthetic construct
  source 1..75: mol_type = other DNA
tctgtccgcgtataaacaaaagaaaaccggtggcacctggggcgcaatcattcgccagccgctggcatttgcaag

SEQ ID NO: 491046 - DNA, 75 bp, synthetic construct
  source 1..75: mol_type = other DNA
atgaaactgatcgtcgggatgacaggggctaccggtgcgcctcttggtgtggcattactgcaagcgctgcgggag

SEQ ID NO: 491047 - DNA, 75 bp, synthetic construct
  source 1..75: mol_type = other DNA
ttttgccgcatggtaaaaagtcacgcctccagtgcgatgatgatgaaggcattatgatagacggttgtgttgctc

SEQ ID NO: 491048 - DNA, 75 bp, synthetic construct
  source 1..75: mol_type = other DNA
atctggttgttgatgcaaatgccgttgcttacaacagcagcgatgtaaaagacatcactgccgacgtactgaaac

SEQ ID NO: 491049 - DNA, 75 bp, synthetic construct
  source 1..75: mol_type = other DNA
agaaaatagtggtgtggactggcagccgatagcggctggtttcaagggacttttaccacacggtaaaaagtcacg

SEQ ID NO: 491050 - DNA, 75 bp, synthetic construct
  source 1..75: mol_type = other DNA
atgagactgatcgtcgggatgacaggggccactggcgcgcctcttggggtggcattactgcaagcactgcgggag

SEQ ID NO: 491051 - DNA, 75 bp, synthetic construct
  source 1..75: mol_type = other DNA
tgatgtcgaagtgggcgaaaaccaccattgaactggaaacgccttacagcgctcgcgatgttgccgccctcgcag

SEQ ID NO: 491052 - DNA, 75 bp, synthetic construct
  source 1..75: mol_type = other DNA
ttgctgagcgcggtgccagtccgtgcaataacacgctggcggcaattggcagcggcggcgtctattccacgccag

SEQ ID NO: 491053 - DNA, 75 bp, synthetic construct
  source 1..75: mol_type = other DNA
tggggcgcgaaccgcactcggtgattggttcatcctgcattggcgcatcagtcatcggggggatctgtaacaact

SEQ ID NO: 491054 - DNA, 75 bp, synthetic construct
  source 1..75: mol_type = other DNA
gaagttttatcgcgagaacgatccgaccaacagcatgaatccggggatcggtaaaaccagtaagcggaaaaactg

SEQ ID NO: 491055 - DNA, 75 bp, synthetic construct
  source 1..75: mol_type = other DNA
cgccgacaaaattattctgatgcaggccgccaatacaggtctgaccgaaggatcgacgccaaacggtaacgacta

SEQ ID NO: 491056 - DNA, 75 bp, synthetic construct
  source 1..75: mol_type = other DNA
tggattatttcaaacaggctgaaggtgatttctttgtctgtacgccggaggaaggcagcaaagcatttttacacc

SEQ ID NO: 491057 - DNA, 75 bp, synthetic construct
  source 1..75: mol_type = other DNA
gaagttttatcgcgagaacgatccgaccaacagtatgaatccggggattggtaaaaccagtaagcggaaaaactg

SEQ ID NO: 491058 - DNA, 75 bp, synthetic construct
  source 1..75: mol_type = other DNA
gttaaaaaaggtgtggatgtgcatgcgttgaaggagcagatgctggaactattgcagcagcgcggcgcacaatat

SEQ ID NO: 491059 - DNA, 75 bp, synthetic construct
  source 1..75: mol_type = other DNA
cggttgaactggcaaaacgtattaccgaagcactggcgatcccggttattggcattggcgcaggcaacgtcactg

SEQ ID NO: 491060 - DNA, 75 bp, synthetic construct
  source 1..75: mol_type = other DNA
atgtccatgaaaatgggtgacctagcaaagcgcaaagaaccagatgcactggccaagaacacaactcctttgcgc

SEQ ID NO: 491061 - DNA, 75 bp, synthetic construct
  source 1..75: mol_type = other DNA
cataagactggggtcggtgaccgcacatatgcccggaacatgggaaagctgggatctgaatctggggggcggcaa

SEQ ID NO: 491062 - DNA, 75 bp, synthetic construct
  source 1..75: mol_type = other DNA
gaaattcgggcatttattccccagtcatttgccgccgcggatgaagagctggcgcgataaatatgaacatcattt

SEQ ID NO: 491063 - DNA, 75 bp, synthetic construct
  source 1..75: mol_type = other DNA
ccgtctggtcggtcattcacacctgctcaccgatcccgcaaaaacggcccgctatcgcaagggcttccgttctgg

SEQ ID NO: 491064 - DNA, 75 bp, synthetic construct
  source 1..75: mol_type = other DNA
tcctgaacaagcatttgaaaacgccgcaactgtcatgcgcgcgggtgcgaatatggtcaaaatcgaaggcggtgc

SEQ ID NO: 491065 - DNA, 75 bp, synthetic construct
  source 1..75: mol_type = other DNA
agcaggtagcacagaaaaccggtgtttctaacacgctggaaaatgagttcaaaggccgtgccagcgaactgcagc

SEQ ID NO: 491066 - DNA, 75 bp, synthetic construct
  source 1..75: mol_type = other DNA
ggcccgtaaaggtgcgcaggatgagattcaggcgcagatgcgtgatggcggcgtattttccggaggcaggcgatg

SEQ ID NO: 491067 - DNA, 75 bp, synthetic construct
  source 1..75: mol_type = other DNA
tggtcatgcaacaattgctagggagttaggtattaccattcgtgcatcagaggacagaattaaaccgatgaaacg

SEQ ID NO: 491068 - DNA, 75 bp, synthetic construct
  source 1..75: mol_type = other DNA
atgacattgtccaccatgtggtagcccgcgtgctggatcaatttggcctcgaacatccccacgccaggcgctggc

SEQ ID NO: 491069 - DNA, 75 bp, synthetic construct
  source 1..75: mol_type = other DNA
acgatggcacgaacgggcagataggtccggctgccctgaaggcggtttatgacctcgggaaaaaagcggcagcgg

SEQ ID NO: 491070 - DNA, 75 bp, synthetic construct
  source 1..75: mol_type = other DNA
tttatggcagattaacctctttcctgattatttgttcttttgtatgaaaaatgaagggtattataatagagacag

SEQ ID NO: 491071 - DNA, 75 bp, synthetic construct
  source 1..75: mol_type = other DNA
tcgttttaattttcatggggaaatttatcaaataaggatggaaaatgtttcgttttataatgatgaatctgttgt

SEQ ID NO: 491072 - DNA, 75 bp, synthetic construct
  source 1..75: mol_type = other DNA
ttacagtggtgatgaccgtggcgttatcattctaccgaagaagtacgctatgttatctttccgttcaacccgtag

SEQ ID NO: 491073 - DNA, 75 bp, synthetic construct
  source 1..75: mol_type = other DNA
atgccctgaaagcggtttttagccagttaatggcagacgcgacgctgacgccgctgttcaactatcactatcgca

SEQ ID NO: 491074 - DNA, 75 bp, synthetic construct
  source 1..75: mol_type = other DNA
ccgtcactgtgacgatgcgcattattcagaagcgcactggaacacctatgtggagaagatccgccagtccgagtt

SEQ ID NO: 491075 - DNA, 75 bp, synthetic construct
  source 1..75: mol_type = other DNA
cgagttcagaaatacgcatttttacagattagtaatcaatccctatctgcgcttttacaccggcatcaaacgcat

SEQ ID NO: 491076 - DNA, 75 bp, synthetic construct
  source 1..75: mol_type = other DNA
cgagcaaatacaggccaagaaaatcgagtttaaagagaaggttgctgatgccgcattgtcccagtggtcggcaaa

SEQ ID NO: 491077 - DNA, 75 bp, synthetic construct
  source 1..75: mol_type = other DNA
agtgcagcacttggtttatcaacaattccaaccaacaccaaacgctataccggtaatgcagcattcgatgcggca

SEQ ID NO: 491078 - DNA, 75 bp, synthetic construct
  source 1..75: mol_type = other DNA
ggacctgaagccattctgccactgcgtcgtggtgctgacggtaagctgggggttgtggcggatattggtggttca

SEQ ID NO: 491079 - DNA, 75 bp, synthetic construct
  source 1..75: mol_type = other DNA
ctggcggtcagatagcccgccatgtgattaatcaactggcagataagcaaaccattaaacaaactttatttgccc

SEQ ID NO: 491080 - DNA, 75 bp, synthetic construct
  source 1..75: mol_type = other DNA
gaagaaatacaggtgtcttttggtaatatgtcgctgtatgacgttgacggacataaaaatgctgttaccaaaaat

SEQ ID NO: 491081 - DNA, 75 bp, synthetic construct
  source 1..75: mol_type = other DNA
atccctcgtccggagtttatcggcatcgccgagaagggcggtaatattgatgtgctggtacaggcattaagcggc

SEQ ID NO: 491082 - DNA, 75 bp, synthetic construct
  source 1..75: mol_type = other DNA
cgacgagcataaccgggcgttgctgcgcggcgttattgcttcgggtaatcgcaactttggtgaggcgtatggccg

SEQ ID NO: 491083 - DNA, 75 bp, synthetic construct
  source 1..75: mol_type = other DNA
catcctgatcgtgccctcttacggcggcggcggtacggctggcgcggtgccacgacaggtaattcgctttttaaa

SEQ ID NO: 491084 - DNA, 75 bp, synthetic construct
  source 1..75: mol_type = other DNA
accgctggggagcatgggctgcagcagataacagtggtgtggactggcagccgatagcagcaggctttaaggggc

SEQ ID NO: 491085 - DNA, 75 bp, synthetic construct
  source 1..75: mol_type = other DNA
gtaacgctgggtttgtttgactatctggcagatctgtttggttttgacgactctgccctgggccgctttaaaacg

SEQ ID NO: 491086 - DNA, 75 bp, synthetic construct
  source 1..75: mol_type = other DNA
attctggtgtttggcgttggcaacgcactggtgcatattttatcgagctttaatttgctgccggtgtatcagtaa

SEQ ID NO: 491087 - DNA, 75 bp, synthetic construct
  source 1..75: mol_type = other DNA
gcgggattagccgctaccatctgggcggcaattgttccggcgctgctggcccgcgcatcgcgtaaacgcttcggt

SEQ ID NO: 491088 - DNA, 75 bp, synthetic construct
  source 1..75: mol_type = other DNA
tgtgctggtacaggcgttaagcggcgtactgaacagccgtagtctggaccttctgctggtcgtgttctcaaactt

SEQ ID NO: 491089 - DNA, 75 bp, synthetic construct
  source 1..75: mol_type = other DNA
cttcggtagcctgctggggcatgtgcagcctgcgacattgttcaacgtcgccgaaagcaatgcgtcttatgcacc

SEQ ID NO: 491090 - DNA, 75 bp, synthetic construct
  source 1..75: mol_type = other DNA
ccgaaagcaatgcgtcttatgcgccgtatctgctgatgacgctgccgttctgcctggcatcgtttggttatcacg

SEQ ID NO: 491091 - DNA, 75 bp, synthetic construct
  source 1..75: mol_type = other DNA
ctatccagaaccgtctggattctgcagtcaccaacctgaacaacaccactaccaacctgtctgaagcgcagtccc

SEQ ID NO: 491092 - DNA, 75 bp, synthetic construct
  source 1..75: mol_type = other DNA
cttaacttctcaattttcgttgataccccgctggatatctgcctgatgcgccgcatcaagcgtgacgttaacgag

SEQ ID NO: 491093 - DNA, 75 bp, synthetic construct
  source 1..75: mol_type = other DNA
ggcggatgaaatccctataattgccgcgtttggcgcttcgtcgccccttcctaacatccaggttaatcaggtcgc

SEQ ID NO: 491094 - DNA, 75 bp, synthetic construct
  source 1..75: mol_type = other DNA
agcggtagtaccttagcgacaactggttctatccagctgtctggcacaacttataactttggtgcagcggcaact

SEQ ID NO: 491095 - DNA, 75 bp, synthetic construct
  source 1..75: mol_type = other DNA
tcgaaagcgcagattatccagcaggccggtaactccgtgctggcaaaagccaaccaggtaccgcagcaggttctg

SEQ ID NO: 491096 - DNA, 75 bp, synthetic construct
  source 1..75: mol_type = other DNA
accgtctggattccgcagtcaccaacctgaacaacaccactaccaacctgtctgaagcgcagtcccgtattcagg

SEQ ID NO: 491097 - DNA, 75 bp, synthetic construct
  source 1..75: mol_type = other DNA
gtgtgaaagtgctctctcaagacaacagcctaaaaattcaggttggggctaacgatggtgaaactattaccatcg

SEQ ID NO: 491098 - DNA, 75 bp, synthetic construct
  source 1..75: mol_type = other DNA
gctggggctgagtgggtttaatgtgaatggtagcgcagataaggcaagtgtcgcggcgacagctgacggaatggt

SEQ ID NO: 491099 - DNA, 75 bp, synthetic construct
  source 1..75: mol_type = other DNA
ccgttatggtgctaatcgcaagcctgttaacgactggctgtgtatcttcgagttatggaaactattcgaatgcta

SEQ ID NO: 491100 - DNA, 75 bp, synthetic construct
  source 1..75: mol_type = other DNA
aacaatatgcggacattatcgtgccacgcggtggtaaaaaccgcatcgcgatcgatatattgaaagctaaaataa

SEQ ID NO: 491101 - DNA, 75 bp, synthetic construct
  source 1..75: mol_type = other DNA
gcgcggcgggaaaaaccgcatcgcgatcgatatattgaaagcgaaaataagtcagttcttgaataagcttgataa

SEQ ID NO: 491102 - DNA, 75 bp, synthetic construct
  source 1..75: mol_type = other DNA
caacggctgaaacaacctattttggatcgacagttaagcttgctgacgctaatacacttgatgcagatattacag

SEQ ID NO: 491103 - DNA, 75 bp, synthetic construct
  source 1..75: mol_type = other DNA
ttgcaaatactctgaaaccagcggctggcactactgcatcaggtgtttatactcgtagtactggtgatgtgaagt

SEQ ID NO: 491104 - DNA, 75 bp, synthetic construct
  source 1..75: mol_type = other DNA
gtgatttaattccggatgaacatgagtggatattcagaaaacagaaatctttgtatatgcgccgggaaatggcgc

SEQ ID NO: 491105 - DNA, 75 bp, synthetic construct
  source 1..75: mol_type = other DNA
ttgatttaattccggatgaacatgagttgatattcagaaaaccgaaatctttgtatatgcgccgggaaatggcgc

SEQ ID NO: 491106 - DNA, 75 bp, synthetic construct
  source 1..75: mol_type = other DNA
ggtttattcaagaaagctggtgatggtcaatcaatcgggtttaagaagactgcatcagtcacgatggggggaaca

SEQ ID NO: 491107 - DNA, 75 bp, synthetic construct
  source 1..75: mol_type = other DNA
aagcgattattttgcagctgggtctgcccgctgaacccgattaccgatttagcaaactggttacgcaggcgtttt

SEQ ID NO: 491108 - DNA, 75 bp, synthetic construct
  source 1..75: mol_type = other DNA
aaatactgatgatgatgatcttatttcttgggtacctgtaacttctcctctattctcagactattcaagagcact

SEQ ID NO: 491109 - DNA, 75 bp, synthetic construct
  source 1..75: mol_type = other DNA
agtgataattatgactgcgctagaattgctgataagtatggtgttgaatttatttttagggatagcaaatactgt

SEQ ID NO: 491110 - DNA, 75 bp, synthetic construct
  source 1..75: mol_type = other DNA
aaccgccgatcccctgaaagctctggacgaagcgatcagctccatcgacaaattccgctcctccctcggtgcggt

SEQ ID NO: 491111 - DNA, 75 bp, synthetic construct
  source 1..75: mol_type = other DNA
aagtgtccaatatgtcgaaagcgcagatcatccagcaggccggtaactccgtgctggcaaaagccaaccaggtac

SEQ ID NO: 491112 - DNA, 75 bp, synthetic construct
  source 1..75: mol_type = other DNA
atccagaaccgtctggattctgcggtcaccaacctgaacaacaccactaccaacctgtctgaagcgcagtcccgt

SEQ ID NO: 491113 - DNA, 75 bp, synthetic construct
  source 1..75: mol_type = other DNA
ctaaagccgaaaccaccgccgatcccctgaaagctctggacgaagcgatcagctccatcgacaaattccgttctt

SEQ ID NO: 491114 - DNA, 75 bp, synthetic construct
  source 1..75: mol_type = other DNA
gcctgtcgaaatcaactgctgctgatgttattgctagtctcacggatggggcgacagtaactgcggctggtgtaa

SEQ ID NO: 491115 - DNA, 75 bp, synthetic construct
  source 1..75: mol_type = other DNA
tcgtgagctgacggttcaggcgacgaccggaactaactccacctctgacctggactccattcaggacgaaatcaa

SEQ ID NO: 491116 - DNA, 75 bp, synthetic construct
  source 1..75: mol_type = other DNA
tcagcagctggcggcattttacagctcggcgtttcggtcatgtcagagttttttcccaaaagcaaagccaaagtc

SEQ ID NO: 491117 - DNA, 75 bp, synthetic construct
  source 1..75: mol_type = other DNA
tcgttagcgtttgccggtgacttctactccgtgatgttctggattgaagtcctgctgatgctcttcccgctggtc

SEQ ID NO: 491118 - DNA, 75 bp, synthetic construct
  source 1..75: mol_type = other DNA
ggaaagtatcgctcaagcgtctgaacaaggtgatgttcttcatcatcgcgctcggcgctctgttgccgaccatgc

SEQ ID NO: 491119 - DNA, 75 bp, synthetic construct
  source 1..75: mol_type = other DNA
cccgtactattcgtttgccgattcacatcgtaaaggagctgaacgtttacctgcgaaccgcacgtgagttgtccc

SEQ ID NO: 491120 - DNA, 75 bp, synthetic construct
  source 1..75: mol_type = other DNA
tgggacctacgtgcgcccgcaccgacaccctcacaccttcgagctactgttgccattaaggggtcgtttcgtggt

SEQ ID NO: 491121 - DNA, 75 bp, synthetic construct
  source 1..75: mol_type = other DNA
ataaactcaggcaacttcgagagatcagacttgctggtcttgatgtgatccatgttattcatcgacacggtatgg

SEQ ID NO: 491122 - DNA, 75 bp, synthetic construct
  source 1..75: mol_type = other DNA
gctgatgatgacgacttactgagcaacaagctaaagcaaatcagagaaataagattagcgggacttgaagttatc

SEQ ID NO: 491123 - DNA, 75 bp, synthetic construct
  source 1..75: mol_type = other DNA
gacgaggcaaatgtcaaatggggagttaatggcattgccggtgattatctgcataaagttggttccgggacatta

SEQ ID NO: 491124 - DNA, 75 bp, synthetic construct
  source 1..75: mol_type = other DNA
actctgcataattatggagtaaaaggtgcacgaaatgactggctcctgatacctcatgactttatcagtcaaaaa

SEQ ID NO: 491125 - DNA, 75 bp, synthetic construct
  source 1..75: mol_type = other DNA
tcaggacagtggcaccctgatattccagggacatccggttatccatgcctccatcagtggcagtgcaccggtcag

SEQ ID NO: 491126 - DNA, 75 bp, synthetic construct
  source 1..75: mol_type = other DNA
agggcagtaagaactggaccatgcacgggcagaaagacaatgacctcaatgcaggaaaaaatctggtattcagtg

SEQ ID NO: 491127 - DNA, 75 bp, synthetic construct
  source 1..75: mol_type = other DNA
tgcacagcaaaaattccgacttttactggatcttaaggctcaggatacaaatgtcagtgaaccgacgattggaaa

SEQ ID NO: 491128 - DNA, 75 bp, synthetic construct
  source 1..75: mol_type = other DNA
tatgcgctttggtctggagtttgagaaatccgcctttggtaaatataacgtggataatgcggtaaacgcgaattt

SEQ ID NO: 491129 - DNA, 75 bp, synthetic construct
  source 1..75: mol_type = other DNA
gccattaacgagatgaatcagttaagtgagcatattctggtcgagcgcgcaacaggcggtaaaggtggcggcggc

SEQ ID NO: 491130 - DNA, 75 bp, synthetic construct
  source 1..75: mol_type = other DNA
gaaactctcaaccactaaaaccgaacttttgtttgttgagaacatctatcgtttgctgaaaaagggcggtaccgc

SEQ ID NO: 491131 - DNA, 75 bp, synthetic construct
  source 1..75: mol_type = other DNA
gaaggacagggactacaatccgctgattggtcgtaccggtgtggatgtgggtaaatccttctcaggtaaggactg

SEQ ID NO: 491132 - DNA, 75 bp, synthetic construct
  source 1..75: mol_type = other DNA
gctgaagcaggctaccgctttcatgtcactgaggatacctggattgagccacaggcagaactggtttacggtgct

SEQ ID NO: 491133 - DNA, 75 bp, synthetic construct
  source 1..75: mol_type = other DNA
tttgttatcggtttctcagcagctggcggcattttacagctcggtgtttcggtcatgtcagagtttttccccaaa

SEQ ID NO: 491134 - DNA, 75 bp, synthetic construct
  source 1..75: mol_type = other DNA
cttctgtgactgccgctctgaccaaaaaggcccggattcttttgcaagagagtctgtatggttatgacattgacg

SEQ ID NO: 491135 - DNA, 75 bp, synthetic construct
  source 1..75: mol_type = other DNA
tcattatcccaaagtcagcattgttggtggaggcagtgaaggccattgacgaaatcttcgagatgatgaaaaggg

SEQ ID NO: 491136 - DNA, 75 bp, synthetic construct
  source 1..75: mol_type = other DNA
tcatcagaagttatggttgtgttaaaaagggagaggaggtataaacagggtgaagactgttcctctgcgaaaaca

SEQ ID NO: 491137 - DNA, 75 bp, synthetic construct
  source 1..75: mol_type = other DNA
atgaaatcttggcatgaagatgttagaagatattttgcagaacaccttatctatgatgaatccagtgattccctg

SEQ ID NO: 491138 - DNA, 75 bp, synthetic construct
  source 1..75: mol_type = other DNA
cggtaaatgaagcgacttctcttcagcaaggacagaatgtcacggcctactttaatgccgacagcgtgattatcg

SEQ ID NO: 491139 - DNA, 75 bp, synthetic construct
  source 1..75: mol_type = other DNA
ttttggcctggagctggagaaatcggcgttcgggaaatataacgtggataatgcgataaacgccaacttccgata

SEQ ID NO: 491140 - DNA, 75 bp, synthetic construct
  source 1..75: mol_type = other DNA
tgggcgaaggctgcgccagcgacgcagagctattaacgctggtttcctctgccaatattgcctgtggatttcatg

SEQ ID NO: 491141 - DNA, 75 bp, synthetic construct
  source 1..75: mol_type = other DNA
aaagggagaggaggtataaacagggtgaagactgttcctctgcgaaaacaagattatggttttacactgtttatg

SEQ ID NO: 491142 - DNA, 75 bp, synthetic construct
  source 1..75: mol_type = other DNA
cctgaatgtgaaatccccgtctccaccctgagtcttacccatcgcttcctgcacctctacttctttggtcaggag

SEQ ID NO: 491143 - DNA, 75 bp, synthetic construct
  source 1..75: mol_type = other DNA
ttcgcagctattgtactggcctttgttttacctatagcaggtttcagcggaagctggggagtgctcgcaacatta

SEQ ID NO: 491144 - DNA, 75 bp, synthetic construct
  source 1..75: mol_type = other DNA
tttgttcaggtctggggaaatggagccaacttcgacaacgtgattttacgccgttcatatgaacggcaggagatc

SEQ ID NO: 491145 - DNA, 75 bp, synthetic construct
  source 1..75: mol_type = other DNA
tctctcttgatggctccacgcagtcggaggacgatcaggtttcaacccgcaatacccaaaaatcaccccaatcag

SEQ ID NO: 491146 - DNA, 75 bp, synthetic construct
  source 1..75: mol_type = other DNA
atggtgaacatgtcaagagattacgccaaaaaactaaaggcgatcagaaatgcggaaaaacttacacaatctcag

SEQ ID NO: 491147 - DNA, 75 bp, synthetic construct
  source 1..75: mol_type = other DNA
cgtactcattcgtctactgccgatacttcctcctttaaaacaaaacgatcataatcgtcatgaggcgagcaaagc

SEQ ID NO: 491148 - DNA, 75 bp, synthetic construct
  source 1..75: mol_type = other DNA
gcaagccgcattccggctgaccacatggtgctgatggcaggtttcaccgccggtaatgaaaaaggcgaactggtg

SEQ ID NO: 491149 - DNA, 75 bp, synthetic construct
  source 1..75: mol_type = other DNA
gcaagtcgcattccggctgatcacatggtgctgatggcaggtttcaccgccggtaatgaaaaaggcgaactggtg

SEQ ID NO: 491150 - DNA, 75 bp, synthetic construct
  source 1..75: mol_type = other DNA
agggatcttctgaacgctcaatctctgtcgtggtcaataacgatgatgcgaccactggcgtgcgcgttactcatc

SEQ ID NO: 491151 - DNA, 75 bp, synthetic construct
  source 1..75: mol_type = other DNA
acgcacgtttcactggacaaactgcgcgcattacataacgcacaggatgaaaaacttcccgccgttaccgcgctg

SEQ ID NO: 491152 - DNA, 75 bp, synthetic construct
  source 1..75: mol_type = other DNA
acttcggcgctaaagttcttcacccccgcacaattacccccatcgcccagttccagatcccttgcctgattaaaa

SEQ ID NO: 491153 - DNA, 75 bp, synthetic construct
  source 1..75: mol_type = other DNA
gaataaacatatcgacttacgtgtctgcggcgttgccaactcgaaggctctgctcaccaatgtgcatggcctaaa

SEQ ID NO: 491154 - DNA, 75 bp, synthetic construct
  source 1..75: mol_type = other DNA
gtaaggatgtccgtgggacatttatggcaaagaacgagacgctactgtcactggtaaatgttcatgtggtgaatg

SEQ ID NO: 491155 - DNA, 75 bp, synthetic construct
  source 1..75: mol_type = other DNA
tcgtcgtgcctgccggattggtttgcgacaatatcaacaccggcatcttcattcctgcaggtaaaacgttacaca

SEQ ID NO: 491156 - DNA, 75 bp, synthetic construct
  source 1..75: mol_type = other DNA
gcaaagacgttcgcggcgtctttatggcgaaaaaagaaacactgctgtcacttgcaaatgttcatgcggtgaatg

SEQ ID NO: 491157 - DNA, 75 bp, synthetic construct
  source 1..75: mol_type = other DNA
aacgaccgtgatattttgatatccgaccatgtcatcgagcgcatcaactgtaccaacggcaaaatcaactggggc

SEQ ID NO: 491158 - DNA, 75 bp, synthetic construct
  source 1..75: mol_type = other DNA
atgcgtaatatcaaagtgatgcaggaatcctcagttggaccagcattgagcatgaacttcgacatgcgcaaagac

SEQ ID NO: 491159 - DNA, 75 bp, synthetic construct
  source 1..75: mol_type = other DNA
gaccatcgataacctgaccgttagccacgctaattacgccatcttacgccagggatttcataaccagattatcgg

SEQ ID NO: 491160 - DNA, 75 bp, synthetic construct
  source 1..75: mol_type = other DNA
ctaagcaaattgtttttttcattaactttatatttaaaggtaaaaacctagtatgtttatcaaattgtcgcgaaa

SEQ ID NO: 491161 - DNA, 75 bp, synthetic construct
  source 1..75: mol_type = other DNA
cagcaggcgctggataccgccgttgagcgtggaaatcagttgctgcgccgctttgagaaatcgacgaagtcttaa

SEQ ID NO: 491162 - DNA, 75 bp, synthetic construct
  source 1..75: mol_type = other DNA
cagcactggcgctcggactggctttaatggcaaatgcgcaggcagtgacgaccattccgttctggcattctatgg

SEQ ID NO: 491163 - DNA, 75 bp, synthetic construct
  source 1..75: mol_type = other DNA
tgcttgtcttgatggctttgctatcaggctgccaagctaattacatccgcgatgttcagggagggactgtcgcac

SEQ ID NO: 491164 - DNA, 75 bp, synthetic construct
  source 1..75: mol_type = other DNA
acccgcgaaacattgcagcgtctggggctggaagatattgccgccgatctggcagcacacaatctactgcctgcg

SEQ ID NO: 491165 - DNA, 75 bp, synthetic construct
  source 1..75: mol_type = other DNA
atatagagcgcggcgcagaacagtgcgaagtgttaatggcgttacctgacgggcaaaccttgtgcgccacggtgc

SEQ ID NO: 491166 - DNA, 75 bp, synthetic construct
  source 1..75: mol_type = other DNA
tggccggtgtactggaagcgcgcggtcacaacgttaccgttatcgatccagtcgaaaaactgctggcagtcggtc

SEQ ID NO: 491167 - DNA, 75 bp, synthetic construct
  source 1..75: mol_type = other DNA
agcgactacgacgccattattaaagagatggatgccaacgaaggttcgcttctgcttgcaacccgtttcgacctc

SEQ ID NO: 491168 - DNA, 75 bp, synthetic construct
  source 1..75: mol_type = other DNA
agattgatttaagcgcgtataacaccacgctggggaaactgattcgttccgtgaaggaccggcgcgacctgatga

SEQ ID NO: 491169 - DNA, 75 bp, synthetic construct
  source 1..75: mol_type = other DNA
cgtcatgtcaaaccgcacggcatgttgtataaccaggcggcgaaagaggcacaactggcagacgccatcgccaga

SEQ ID NO: 491170 - DNA, 75 bp, synthetic construct
  source 1..75: mol_type = other DNA
agcaggctgccttctatatagaagagaatgtcaaagaagcctccgttgctaccgcaacccaggttcagggtaaat

SEQ ID NO: 491171 - DNA, 75 bp, synthetic construct
  source 1..75: mol_type = other DNA
tcatttctcgtcagtttgtcgaagtgattattgcgccgtccgccagcgaagatgccctgaaaatcacggcaacta

SEQ ID NO: 491172 - DNA, 75 bp, synthetic construct
  source 1..75: mol_type = other DNA
acatcagatccagcctatcgatatggtggttgttaacctgtatccgttcgcccagaccgttgcccgtgaaggctg

SEQ ID NO: 491173 - DNA, 75 bp, synthetic construct
  source 1..75: mol_type = other DNA
gcaaacggtctgcctgcatggcgacggcgagcacgctctggcgttcgcccgccgattacgagctacatttgccaa

SEQ ID NO: 491174 - DNA, 75 bp, synthetic construct
  source 1..75: mol_type = other DNA
atgtttttgagcggtccgtggtttggtgtgtggatcttgcacggcaactacagcagtagcctgttattcgacacc

SEQ ID NO: 491175 - DNA, 75 bp, synthetic construct
  source 1..75: mol_type = other DNA
ctcgccacattcgctacgtgctgttggtggtcattctggtgggatcggccttaactggcacgctcatctgggaat

SEQ ID NO: 491176 - DNA, 75 bp, synthetic construct
  source 1..75: mol_type = other DNA
aagaacaggcgctggcgcaaacgctggagatggtgcaacacggcagagtcaaaagtatcaccggcgaatgggcaa

SEQ ID NO: 491177 - DNA, 75 bp, synthetic construct
  source 1..75: mol_type = other DNA
ttggcgaaggctgcgccagcgatgctgaattgttaacgctgatttcctcagccaatattgcctgtggatttcacg

SEQ ID NO: 491178 - DNA, 75 bp, synthetic construct
  source 1..75: mol_type = other DNA
ggagatggtgcaacacggcagagtcaaaagtatcaacggcgaatgggcaacggtcacggcgcaaacggtctgcct

SEQ ID NO: 491179 - DNA, 75 bp, synthetic construct
  source 1..75: mol_type = other DNA
agaatccgtgatggcggtctaccagcaatttattaatgagattaagagtttttcagtgaagcaagggggtaatgt

SEQ ID NO: 491180 - DNA, 75 bp, synthetic construct
  source 1..75: mol_type = other DNA
tgccgcgctggctcgcgccaatatcaatattgtcgccattgcccaagggtcttctgaacgctcaatctccgtggt

SEQ ID NO: 491181 - DNA, 75 bp, synthetic construct
  source 1..75: mol_type = other DNA
atttgcctcaggcaattactgtacagacatcactttatttcgatatgcaaatcgagtggctcacaaaagtcgtca

SEQ ID NO: 491182 - DNA, 75 bp, synthetic construct
  source 1..75: mol_type = other DNA
ctgggtgagcaggtggtaatacaggcgttctctgatacacaacgcgtatttgagcagatagaggcgactgagaaa

SEQ ID NO: 491183 - DNA, 75 bp, synthetic construct
  source 1..75: mol_type = other DNA
tggccggcgtattagaagcgcgcggtcacaacgttactgttatcgatccggtcgaaaaactgcgggcaggggggc

SEQ ID NO: 491184 - DNA, 75 bp, synthetic construct
  source 1..75: mol_type = other DNA
tttacgcgccgattgttgcgagatctggacggatgttgacggtgtttatacctgcgacccgcgtcaggtgcccga

SEQ ID NO: 491185 - DNA, 75 bp, synthetic construct
  source 1..75: mol_type = other DNA
tgattctcgcccgtgaaaccgggcgtgaactggaactggcggatattgaaatcgaacctgtgctgccagccgggt

SEQ ID NO: 491186 - DNA, 75 bp, synthetic construct
  source 1..75: mol_type = other DNA
ttgcacacagaaataccctcacatccattacagcgctgttatttctgttctgttgtgcactgtatgcgcctgccg

SEQ ID NO: 491187 - DNA, 75 bp, synthetic construct
  source 1..75: mol_type = other DNA
taaaatactttcggacttagaagaaaaagaacttgttggtgcacctatttatcaaaacaaaaatcatctttacac

SEQ ID NO: 491188 - DNA, 75 bp, synthetic construct
  source 1..75: mol_type = other DNA
agtacgacctgatcattatcgatactccaccagaagattcgccaatcacatgggcagcggatgaagctgctgatg

SEQ ID NO: 491189 - DNA, 75 bp, synthetic construct
  source 1..75: mol_type = other DNA
gtccgatcccgacaaggcttttgcgaaaggcatggtagcgcaccatgaaggggcaatagcaatggctgagaccga

SEQ ID NO: 491190 - DNA, 75 bp, synthetic construct
  source 1..75: mol_type = other DNA
actggctgaggacatcattaaagcgcagaaaggcgaaatcgaccagatgaacaaatggcttgataaccagaaata

SEQ ID NO: 491191 - DNA, 75 bp, synthetic construct
  source 1..75: mol_type = other DNA
catgaaagacatgcatgacaaaatgatgactgctgtaaatgaatccgatcccgacaaggcttttgcgaaaggcat

SEQ ID NO: 491192 - DNA, 75 bp, synthetic construct
  source 1..75: mol_type = other DNA
cggtggattacggtgagaaatctgctgtcagtgataagccgcttctgccttatatcccgtctgccagttttgctc

SEQ ID NO: 491193 - DNA, 75 bp, synthetic construct
  source 1..75: mol_type = other DNA
ggataacggtattcaggtatcacagcagatgctacgggaacttaatctgggggatgctgtttcaggtaatgtttc

SEQ ID NO: 491194 - DNA, 75 bp, synthetic construct
  source 1..75: mol_type = other DNA
ttattggctgggcatttgcggccggtgccgtggatggcattggcagcggtgtggccaaaattggtcaggaaacac

SEQ ID NO: 491195 - DNA, 75 bp, synthetic construct
  source 1..75: mol_type = other DNA
ctgcataccttccatcattatcaataacaccgtacgttcatttcagaggtcagtcatgaataccagagctctttt

SEQ ID NO: 491196 - DNA, 75 bp, synthetic construct
  source 1..75: mol_type = other DNA
gtgatgccgagagaggatgaggtggcggaaacgctgacttggacaccaaagattctggaacgcaaaagcgttcga

SEQ ID NO: 491197 - DNA, 75 bp, synthetic construct
  source 1..75: mol_type = other DNA
ccgccgcccaatatgaccggtgtggtctcacagacttttgataaaaaggtgtctgacgcggcggttgcagatatc

SEQ ID NO: 491198 - DNA, 75 bp, synthetic construct
  source 1..75: mol_type = other DNA
aacgaccggttatctggctttcctcgtcgggccgccgctgctgggctatctcggcgaacattatggattacgtag

SEQ ID NO: 491199 - DNA, 75 bp, synthetic construct
  source 1..75: mol_type = other DNA
gcgctggttattctcgcggctattgtcgcgaaagccgccgcgaaagccgtcgccaaacccgataccaaaacgcag

SEQ ID NO: 491200 - DNA, 75 bp, synthetic construct
  source 1..75: mol_type = other DNA
ttcatcgtctagaaaataaaatgccggtcttagatgccctgactgattatgaaaattatgatgattacagtgatg

SEQ ID NO: 491201 - DNA, 75 bp, synthetic construct
  source 1..75: mol_type = other DNA
cagataacaatttatcgggtgaagatgaaaggcggtagtgatgagcaagctcaaagagaagccgtcaccgaaacg

SEQ ID NO: 491202 - DNA, 75 bp, synthetic construct
  source 1..75: mol_type = other DNA
tattttaaatttttacgagcgagttgctgtaagtattcgtgaaggtatttatgatgaaaaaatgataaaaagaac

SEQ ID NO: 491203 - DNA, 75 bp, synthetic construct
  source 1..75: mol_type = other DNA
ttcgatcgctgaaatgggcggtgtactctttggcttgtcgatcggttcgatgagcggaattctctgctcggcgtg

SEQ ID NO: 491204 - DNA, 75 bp, synthetic construct
  source 1..75: mol_type = other DNA
cgtaaagaacgccgcggcgactacctcggcgcaaccgtacaggttattccgcacatcactaacgctatcaaagag

SEQ ID NO: 491205 - DNA, 75 bp, synthetic construct
  source 1..75: mol_type = other DNA
ttcggactgctcacggcctctttccactggtggcgcaggaaagttaaccggctgccaccatgggatgatgtgtaa

SEQ ID NO: 491206 - DNA, 75 bp, synthetic construct
  source 1..75: mol_type = other DNA
acggtgctgacagggggcttatggggcatttcctggggatgtgcaatgtggtttatctactgggggccgtcagga

SEQ ID NO: 491207 - DNA, 75 bp, synthetic construct
  source 1..75: mol_type = other DNA
atgccatttaaaaaactctccagacgcaacttcctgacggcaagctcggcgcttgccttccttcatacccctttc

SEQ ID NO: 491208 - DNA, 75 bp, synthetic construct
  source 1..75: mol_type = other DNA
cgcaacctgaccatcgataacctgaccgttagccacgctaattacgccatcttacgccagggatttcataaccag

SEQ ID NO: 491209 - DNA, 75 bp, synthetic construct
  source 1..75: mol_type = other DNA
gcatttcctggggatgtgcaatgtggtttatctactgggggccgtcaggaatggtagcaggtgaggccattatta

SEQ ID NO: 491210 - DNA, 75 bp, synthetic construct
  source 1..75: mol_type = other DNA
gtttatctactgggggccgtcaggaatggtggcaggttcgctgtataccgaattgcagactgtgttccgatgcgt

SEQ ID NO: 491211 - DNA, 75 bp, synthetic construct
  source 1..75: mol_type = other DNA
gcactggcgcagggtattattgtgaatccggcacagcgtctagcgttcaaactcaaggagccacatattcgcgcg

SEQ ID NO: 491212 - DNA, 75 bp, synthetic construct
  source 1..75: mol_type = other DNA
aagcggcgattgttggcctgactaaatcgctggcggtggagtacgcgcaatccggtattcgcgttaacgccatct

SEQ ID NO: 491213 - DNA, 75 bp, synthetic construct
  source 1..75: mol_type = other DNA
tccggactgctcatggcctctttccactggtggcgcaggaaagttaaccggctgccaccatgggatgatgtgtaa

SEQ ID NO: 491214 - DNA, 75 bp, synthetic construct
  source 1..75: mol_type = other DNA
acaacggctttttgctgttccggcttaactcctacagtcagatcttttccagtgaagtctccggcgtggcgttaa

SEQ ID NO: 491215 - DNA, 75 bp, synthetic construct
  source 1..75: mol_type = other DNA
ggcggtactcgcgccaatatcatcatcgcattcgctatcttcctgtttattggcattattcgcggctggatttcg

SEQ ID NO: 491216 - DNA, 75 bp, synthetic construct
  source 1..75: mol_type = other DNA
cgttagctggcctgttgcggatgaaaaggatgcagaatttttccgacctaatcagggatacggaaagcaactgat

SEQ ID NO: 491217 - DNA, 75 bp, synthetic construct
  source 1..75: mol_type = other DNA
gaacacaacacggcggcgtgctggtgaaggactgagagtgggaaaatactttttccgggggcatttgttcagcaa

SEQ ID NO: 491218 - DNA, 75 bp, synthetic construct
  source 1..75: mol_type = other DNA
gtggcagtgtgctgaaggtgggtaaatatcttttccgggatgcgtttattcagcaactggcgaatggtcgctggc

SEQ ID NO: 491219 - DNA, 75 bp, synthetic construct
  source 1..75: mol_type = other DNA
tcatcatctctctgctgtgcggctttgctggcgcgaacttcgcttccagtatggcaaacatcagcttcttctttc

SEQ ID NO: 491220 - DNA, 75 bp, synthetic construct
  source 1..75: mol_type = other DNA
cagataaccatttatcgggtaaagatgaaaggcggtagtgatgagcaagctcagaaagaagccgtcaccgaaacg

SEQ ID NO: 491221 - DNA, 75 bp, synthetic construct
  source 1..75: mol_type = other DNA
aaccaggtgaaaggtattcccctgaaaacggtcagggagcgtgtcaggctgcttaaagccagcccctcaggaaaa

SEQ ID NO: 491222 - DNA, 75 bp, synthetic construct
  source 1..75: mol_type = other DNA
gtgcgtgctgcatatattcatacatccgagcatttagatgaacggaggttgatggttcagtggtgggctgattat

SEQ ID NO: 491223 - DNA, 75 bp, synthetic construct
  source 1..75: mol_type = other DNA
aatggtgcaatggtgggctgactatctagatgcgactcagataaatttcatcactccgtacgattttggaaggtc

SEQ ID NO: 491224 - DNA, 75 bp, synthetic construct
  source 1..75: mol_type = other DNA
gagttcgactttgataactctctttggcgcgtacctgcaaaacgagaggaaattaagggtgtgcgttattcgtac

SEQ ID NO: 491225 - DNA, 75 bp, synthetic construct
  source 1..75: mol_type = other DNA
ggcaggtcatgcggcgcgtaggtcaggcccgttatccgattgatgtggtcaaagttcctcttgagacaccgctca

SEQ ID NO: 491226 - DNA, 75 bp, synthetic construct
  source 1..75: mol_type = other DNA
acacaggtacctttcatcagtatttttcttcccgcccgtctgacatcacagtcaaaatctcccaccacgtcaaaa

SEQ ID NO: 491227 - DNA, 75 bp, synthetic construct
  source 1..75: mol_type = other DNA
atgttctgaggcgtcttcctgaagcgcgttttgcaacagggcatgaccatcagggcaggccaagaaaaaatcgtc

SEQ ID NO: 491228 - DNA, 75 bp, synthetic construct
  source 1..75: mol_type = other DNA
attaatcttccgttcatacactggtcacggattagcaatgataagcgcctcgtgttatcagtggttgtctttacc

SEQ ID NO: 491229 - DNA, 75 bp, synthetic construct
  source 1..75: mol_type = other DNA
ccgctggcattatctgctgataccgtgctgcatcatgatgttcgccattaccccgataatattatcaacatggcg

SEQ ID NO: 491230 - DNA, 75 bp, synthetic construct
  source 1..75: mol_type = other DNA
atagtcgcttcccggtttgccacatatacccctttctttaatctgaactattttgcactggccgcaaaggagcat

SEQ ID NO: 491231 - DNA, 75 bp, synthetic construct
  source 1..75: mol_type = other DNA
tgtcgtggtggttaattttattaataaaggcaaccgggccgatcaacgtgtgtttgaattgctgagccagaagtt

SEQ ID NO: 491232 - DNA, 75 bp, synthetic construct
  source 1..75: mol_type = other DNA
ccggagagccagcaatatgcatttgctcatacgaatttgcctcccgtaaagagcatgacttggcgcgtatcccat

SEQ ID NO: 491233 - DNA, 75 bp, synthetic construct
  source 1..75: mol_type = other DNA
actgttctgcgggaaatcgggacagctgttgctggcaaaagtcagcatcggaaatcaggagcaacagcgagagaa

SEQ ID NO: 491234 - DNA, 75 bp, synthetic construct
  source 1..75: mol_type = other DNA
attctttatcctggcacttcttattattaaggcaatgaaatcgattacgttgcgtttgattcttgccttcccgtt

SEQ ID NO: 491235 - DNA, 75 bp, synthetic construct
  source 1..75: mol_type = other DNA
tccttaccttaccgggcacaggctctggtaatttcatcgcattttacgccgtcttcatggggttgtttctgaccg

SEQ ID NO: 491236 - DNA, 75 bp, synthetic construct
  source 1..75: mol_type = other DNA
taaataataaagatttcgatattgaagcgatcgcatcgggtctgacattgcttgcattacaggcacaggagaaat

SEQ ID NO: 491237 - DNA, 75 bp, synthetic construct
  source 1..75: mol_type = other DNA
agtatcagcctgtattcatggtgtacatttgacaccacattcaatgatggttttgcaatcagtatcctacagaca

SEQ ID NO: 491238 - DNA, 75 bp, synthetic construct
  source 1..75: mol_type = other DNA
cgcggatttgcaatgataagtgcctcgtgttatctgtgggggtctttactctttctaatctcctggtatcctcag

SEQ ID NO: 491239 - DNA, 75 bp, synthetic construct
  source 1..75: mol_type = other DNA
tgcgttttattctggcttttccgttcacattactgactgcggcagacatcagtatcagtttgtattcatggtgta

SEQ ID NO: 491240 - DNA, 75 bp, synthetic construct
  source 1..75: mol_type = other DNA
tcacccacaacgcccagggtaaagcaacggcgctcattctggataaagacgatgtcgtgcagctacgcgaaattg

SEQ ID NO: 491241 - DNA, 75 bp, synthetic construct
  source 1..75: mol_type = other DNA
tgctccctcgctggcttacaaccccatggcttgcattatgccgctggtctgtaaatccctcatacctctccccgc

SEQ ID NO: 491242 - DNA, 75 bp, synthetic construct
  source 1..75: mol_type = other DNA
ttggttataaccagatatataaaatagttgataataaccttgctggtatagatttttctgtcccacgattaaata

SEQ ID NO: 491243 - DNA, 75 bp, synthetic construct
  source 1..75: mol_type = other DNA
aggctccacgctggacatcaacaaccggttcactggcgggattgaagctcacgacagtaatgtaaatgtctcctc

SEQ ID NO: 491244 - DNA, 75 bp, synthetic construct
  source 1..75: mol_type = other DNA
ttcagggcagtacgcctgtgcagcttaatctggaaaatggcaaacgttacagccagaccggcacgctgaaatttt

SEQ ID NO: 491245 - DNA, 75 bp, synthetic construct
  source 1..75: mol_type = other DNA
ttactcacaacgctcagggtaaagcgacggcactcattctggataaagacgatgtcgtgcagttacgcgaaatta

SEQ ID NO: 491246 - DNA, 75 bp, synthetic construct
  source 1..75: mol_type = other DNA
gggaactacgcactgggacatgcaaggtaaaaaaggcaatgacatggatgccggaaaaaatctcctgtttactgg

SEQ ID NO: 491247 - DNA, 75 bp, synthetic construct
  source 1..75: mol_type = other DNA
ggacctgatcgaagagggcaacctggggctgatccgcgcggtagagaagtttgatccggaacgtggtttccgctt

SEQ ID NO: 491248 - DNA, 75 bp, synthetic construct
  source 1..75: mol_type = other DNA
ccggcgggggcgtatcctctctggggaaaggcattgccgcagcctccctcgcagccattcttgaagcccgtggcc

SEQ ID NO: 491249 - DNA, 75 bp, synthetic construct
  source 1..75: mol_type = other DNA
gctttatgaagaacccgtcaccgggacagtccctgaacatcccgctggtcagtgcgccggccggaacatcagggg

SEQ ID NO: 491250 - DNA, 75 bp, synthetic construct
  source 1..75: mol_type = other DNA
catttggcaaaatgtaggaaaagacagaaataaggcaattgagatcgttaaacagcagaagattgaggccagtag

SEQ ID NO: 491251 - DNA, 75 bp, synthetic construct
  source 1..75: mol_type = other DNA
tttcagttctgttgatattgccagcggtcgtccgacagttattctttctgatacacggcagattaatccggataa

SEQ ID NO: 491252 - DNA, 75 bp, synthetic construct
  source 1..75: mol_type = other DNA
tttgacctgctgaataatggcgagacggttcttcgtgatgcatccggagagaaaaggattaaaggggagaaggac

SEQ ID NO: 491253 - DNA, 75 bp, synthetic construct
  source 1..75: mol_type = other DNA
accgcgtgaaaacgtgatttggtttgatctccacgaagatgagcaaagtctgaaaaataaggtggcggaacatcc

SEQ ID NO: 491254 - DNA, 75 bp, synthetic construct
  source 1..75: mol_type = other DNA
aaacgcccagcgcgttctggatatgcaggaaaatcccggcatgttctttaccgtggtgcaaattggtctgaacgc

SEQ ID NO: 491255 - DNA, 75 bp, synthetic construct
  source 1..75: mol_type = other DNA
gccgcctcacgcaaaatcaaacttaaactgctggctgatgaaggcaatataaatgcccaacgcgttctgaatatg

SEQ ID NO: 491256 - DNA, 75 bp, synthetic construct
  source 1..75: mol_type = other DNA
aaaacatcaggcacaggtaccctgagccagggcagtaaaaactggaccatgcacgggcagaaagacaatgacctc

SEQ ID NO: 491257 - DNA, 75 bp, synthetic construct
  source 1..75: mol_type = other DNA
aagaacagggattgaactgggcaagaccttcagtggtaaggactggagtgtgacggcccgtgccgggaccagctg

SEQ ID NO: 491258 - DNA, 75 bp, synthetic construct
  source 1..75: mol_type = other DNA
tccggacgtcctgttgacagccccgggtgcttttgccggcagttcactgacagtgcatgatggcggtcatcttac

SEQ ID NO: 491259 - DNA, 75 bp, synthetic construct
  source 1..75: mol_type = other DNA
ggttaccggatctgaggggctgttcacaccgatgttgtatatgatagaaggatacgatttgactggtaactatgc

SEQ ID NO: 491260 - DNA, 75 bp, synthetic construct
  source 1..75: mol_type = other DNA
gttcctgattcagacagtcagtttgctccgattctgtataccacggaaggatatgatttaaccggtgataacgcc

SEQ ID NO: 491261 - DNA, 75 bp, synthetic construct
  source 1..75: mol_type = other DNA
gcgctttggactggagtttgagaaatccgcctttggtaaatacaacgtggataacgccatcaacgccaacttccg

SEQ ID NO: 491262 - DNA, 75 bp, synthetic construct
  source 1..75: mol_type = other DNA
atctttgaaggttcgctggtgcaggcgggtctgcgtggcaacggtccggatgaaaagagtctgttcgtcaagctg

SEQ ID NO: 491263 - DNA, 75 bp, synthetic construct
  source 1..75: mol_type = other DNA
agccagcggctcagataacaccctgaacgtcagttttatgaagaacccgactccggggcagtcactgaatatccc

SEQ ID NO: 491264 - DNA, 75 bp, synthetic construct
  source 1..75: mol_type = other DNA
aaaggtacacccggaagtttatatagccgtaatctgaatggacagacgtcctactatattcttaaatcagcgagt

SEQ ID NO: 491265 - DNA, 75 bp, synthetic construct
  source 1..75: mol_type = other DNA
agcgcgagcaatcctcgccagagaaacggcacatgtaaaattccagccgtggcaggatgataagtggagtcgagt

SEQ ID NO: 491266 - DNA, 75 bp, synthetic construct
  source 1..75: mol_type = other DNA
tttccagcggcaccgctgttgcgccagaagcgggcgcgacgctgattttacaggtcgtcagcctgagcggcgggc

SEQ ID NO: 491267 - DNA, 75 bp, synthetic construct
  source 1..75: mol_type = other DNA
agcctgcgttttcataccaacgcgccgctggtcagccagccggaacaggcgaccttcgcggtaacggatgaggcg

SEQ ID NO: 491268 - DNA, 75 bp, synthetic construct
  source 1..75: mol_type = other DNA
atgactattgcagaacgtcttatacagaaaggtttcgacgaaggttttaaagaaagctttaaagaaggggcgctt

SEQ ID NO: 491269 - DNA, 75 bp, synthetic construct
  source 1..75: mol_type = other DNA
gatatcgacaggattaatcaccatattgttaatgtggagaagattaactttagattgccggaacggagggagtag

SEQ ID NO: 491270 - DNA, 75 bp, synthetic construct
  source 1..75: mol_type = other DNA
atgccatttaaaaaactctcccgacgcaccttcctgacggcaagctcggcgcttgccttccttcatacccctttc

SEQ ID NO: 491271 - DNA, 75 bp, synthetic construct
  source 1..75: mol_type = other DNA
tgaatatcgccaccaccagcgtgctgctgacgctggccgataacgacacgccggtgtggcttgccgcgccattga

SEQ ID NO: 491272 - DNA, 75 bp, synthetic construct
  source 1..75: mol_type = other DNA
tatcccctccaggagaacggagagatactgctggcatttccgcgtctgtttattgttgcccgccgtacggagtaa

SEQ ID NO: 491273 - DNA, 75 bp, synthetic construct
  source 1..75: mol_type = other DNA
tgaccgagagcgaacagcagctttttcttaagcgctaccatcagatgctggaatttcggcttcatcgttcatctg

SEQ ID NO: 491274 - DNA, 75 bp, synthetic construct
  source 1..75: mol_type = other DNA
atatgcacttcgccgccgaacgattgcgtccagcaacggagttgcttgccagaatcccactggaaaatgtctggc

SEQ ID NO: 491275 - DNA, 75 bp, synthetic construct
  source 1..75: mol_type = other DNA
ctgccgctcactctgataatggggcgcaagtaaaggttagcaacagaacatatcgcgttgttttaagtgataata

SEQ ID NO: 491276 - DNA, 75 bp, synthetic construct
  source 1..75: mol_type = other DNA
gattgccgaagcgcgcagtgctttgccagactgccagttcgtggaagcagacatccgcaactggcaaccggaaca

SEQ ID NO: 491277 - DNA, 75 bp, synthetic construct
  source 1..75: mol_type = other DNA
gatatcgacaggattaatcaccatattgttaatgtggaaaagattaactttagattgccggaacggagagagtag

SEQ ID NO: 491278 - DNA, 75 bp, synthetic construct
  source 1..75: mol_type = other DNA
tcaagggacattggcgtctatagctcaattaagactccaacctctttaaaaggcctatattatagcattgatatt

SEQ ID NO: 491279 - DNA, 75 bp, synthetic construct
  source 1..75: mol_type = other DNA
gtatggacagctgcctgtcgaagccggtaacgctggatgtgataaaacagacgctgacggtatatgccgagaggg

SEQ ID NO: 491280 - DNA, 75 bp, synthetic construct
  source 1..75: mol_type = other DNA
acagcgagaagcaatcaccgaaaccgccgccgcacttggctttatctcggcaattggtgcagttggcggcttttt

SEQ ID NO: 491281 - DNA, 75 bp, synthetic construct
  source 1..75: mol_type = other DNA
attgcccggtcagttggcggtgctatctccgataaatttggcggcgtgcgggtgacgcttatcaactttattttt

SEQ ID NO: 491282 - DNA, 75 bp, synthetic construct
  source 1..75: mol_type = other DNA
cggtattgccgtacaaaatccccatactccttttggaatatttattgttattgccttgctgtgtggtttcgctgg

SEQ ID NO: 491283 - DNA, 75 bp, synthetic construct
  source 1..75: mol_type = other DNA
atgaccggtatgacgaatgtaacaaagctggccagcgagccgtcaggccaggaatttctggtatttacccttggt

SEQ ID NO: 491284 - DNA, 75 bp, synthetic construct
  source 1..75: mol_type = other DNA
gctcgcgcgcttcccgcccgacaaagcgttaacattaacgactacaacccacacgactggatcgcctcatttaaa

SEQ ID NO: 491285 - DNA, 75 bp, synthetic construct
  source 1..75: mol_type = other DNA
attatcggtgccaacatcaccaactgtaaatttagtgatttacagggcgacgccattgaatggaacgtggcaatt

SEQ ID NO: 491286 - DNA, 75 bp, synthetic construct
  source 1..75: mol_type = other DNA
caccgagttagagtttttccagtatcgattttccgattcgtttggggggaacccaccgttatattcgtgcggtct

SEQ ID NO: 491287 - DNA, 75 bp, synthetic construct
  source 1..75: mol_type = other DNA
tagatgataacggctgggttggcgaagtcagcgcttcaggagagattcatgttcaggcgacgtggcgtaacatta

SEQ ID NO: 491288 - DNA, 75 bp, synthetic construct
  source 1..75: mol_type = other DNA
acgcgaggcttgggggattggtaagaagagtatcaccaatgttgttcatctacttgagaaatttggagttaaggt

SEQ ID NO: 491289 - DNA, 75 bp, synthetic construct
  source 1..75: mol_type = other DNA
cgccattgaatggaacgtggcgattaacgaccgtgatattttgatatctgaccatgtcatcgagcgcatcaactg

SEQ ID NO: 491290 - DNA, 75 bp, synthetic construct
  source 1..75: mol_type = other DNA
cattatcagtggcttccagcagtcaggacgtcgcagcggaaaacagggtgtaggcacgccgggattcttcggtct

SEQ ID NO: 491291 - DNA, 75 bp, synthetic construct
  source 1..75: mol_type = other DNA
aacgcagtgggaaaaaccggttcgcgtggcagggctgaccagccttgcgcttcagggccatgcgcactataccga

SEQ ID NO: 491292 - DNA, 75 bp, synthetic construct
  source 1..75: mol_type = other DNA
tgcagaacaccctccccggtcaggtgttgcttcagtcatggctcgtccgcaatggcatagatcgtaagctctctt

SEQ ID NO: 491293 - DNA, 75 bp, synthetic construct
  source 1..75: mol_type = other DNA
tttgccacctaccgtaacaccgacttttttggccttgttgatggtcttaattttgccgtgcagtatcagggagaa

SEQ ID NO: 491294 - DNA, 75 bp, synthetic construct
  source 1..75: mol_type = other DNA
cttcatgcagggacgcggtaacggttttgccacctaccgtaacaccgacttttttggccttgttgatggtcttaa

SEQ ID NO: 491295 - DNA, 75 bp, synthetic construct
  source 1..75: mol_type = other DNA
tttccggtgatgccagcaatacccagaccacctccgtggatatgaagtctgcgctgtatcaggatgtgaaaaatg

SEQ ID NO: 491296 - DNA, 75 bp, synthetic construct
  source 1..75: mol_type = other DNA
actgcaagagcgtaccttagttcatacggcgcaccgattcacaactacgcaggggataaccttgctaatggggtg

SEQ ID NO: 491297 - DNA, 75 bp, synthetic construct
  source 1..75: mol_type = other DNA
tttgaaccagttcccggcacagggttgagcgtccgtataacttctgaaaactcagaaggtaaaggggctgcttca

SEQ ID NO: 491298 - DNA, 75 bp, synthetic construct
  source 1..75: mol_type = other DNA
acgcagattgcaaatacagcctttgttaaggcagctataacggcacttatcaacggtgcgcctggcacattggat

SEQ ID NO: 491299 - DNA, 75 bp, synthetic construct
  source 1..75: mol_type = other DNA
ctcgttcgaacatgccgatgcgttgtttcagggattgaatcttctcagcccgcgtaaattgcaggcactgcttcg

SEQ ID NO: 491300 - DNA, 75 bp, synthetic construct
  source 1..75: mol_type = other DNA
tggcgaccgccagttagcaggcagtgttccggaactggccgcgtatgagatcgcctgcggcgttccttcgttaat

SEQ ID NO: 491301 - DNA, 75 bp, synthetic construct
  source 1..75: mol_type = other DNA
caggcggatcgctcacggcgtatactgccggacgggtcgtgaaccggattgggtggatgcggtttactgcctgca

SEQ ID NO: 491302 - DNA, 75 bp, synthetic construct
  source 1..75: mol_type = other DNA
gtttcagtattggtggtgcggtgtccagttcccagcgtacatgggatcagaaccatacgggactgatgggaaccg

SEQ ID NO: 491303 - DNA, 75 bp, synthetic construct
  source 1..75: mol_type = other DNA
cattgatgattatggaagcatgggtaagggcgttaaaccttcatacacaacctgattatcaacggcattaccggt

SEQ ID NO: 491304 - DNA, 75 bp, synthetic construct
  source 1..75: mol_type = other DNA
agcgcagtttgtcgtatttaactaagcttgccacgaaagacagttctgatggcatgcgtaattttggttgcagtc

SEQ ID NO: 491305 - DNA, 75 bp, synthetic construct
  source 1..75: mol_type = other DNA
aaggcagatcctaaattgataacccggtttattgaatctttaaaatctcagattgagcatacacagaaacgtaaa

SEQ ID NO: 491306 - DNA, 75 bp, synthetic construct
  source 1..75: mol_type = other DNA
atccgggtctccgtttcgggtcgccctggtggtgtttatcttgatttgccagcaaatgtcctggctgcgacgatg

SEQ ID NO: 491307 - DNA, 75 bp, synthetic construct
  source 1..75: mol_type = other DNA
gagggctctttgcccgtcaggattggggttattacatcggcaaagccgccggaattgcgcttgtgtggagagatt

SEQ ID NO: 491308 - DNA, 75 bp, synthetic construct
  source 1..75: mol_type = other DNA
atggaccatgtaaccaacttcatatcaaccgtatccatgacacgttgaataaatcacttagtgaatacccaagga

SEQ ID NO: 491309 - DNA, 75 bp, synthetic construct
  source 1..75: mol_type = other DNA
gaatacaggcactcagactcgacctgttctatcagaaaggtacagagcgctataaacgtcattcatggaatgaaa

SEQ ID NO: 491310 - DNA, 75 bp, synthetic construct
  source 1..75: mol_type = other DNA
tataaacgtcattcatggaacgaaaccgaacgagaagtacgtatgctggttgaacgcaccctgcagcacacaaat

SEQ ID NO: 491311 - DNA, 75 bp, synthetic construct
  source 1..75: mol_type = other DNA
ccgccccgtcaattacgatgatgctgcagccatcgacaacctgcgctacatcatcagctatctcgccaaggagaa

SEQ ID NO: 491312 - DNA, 75 bp, synthetic construct
  source 1..75: mol_type = other DNA
atgtgcctggatgtgttgcgcgttctcaataagcaagcgggcgtatacgacttattgtcggaagcatttgtggaa

SEQ ID NO: 491313 - DNA, 75 bp, synthetic construct
  source 1..75: mol_type = other DNA
gacaccagacacgcaacgctggttgactgaacgagtcaaaccaggtgctgttgtgtatgcagatttcaaacaggc

SEQ ID NO: 491314 - DNA, 75 bp, synthetic construct
  source 1..75: mol_type = other DNA
gtttcagtattggtggtgcggtgtccagttcccaacgtacatgggatcagaaccatacgggactgatggggaccg

SEQ ID NO: 491315 - DNA, 75 bp, synthetic construct
  source 1..75: mol_type = other DNA
atgagggcatagcatctaaccagattgagctatgccgagtgatcgtgcctgacaatgctcaagccgttaccgcag

SEQ ID NO: 491316 - DNA, 75 bp, synthetic construct
  source 1..75: mol_type = other DNA
tactgtaagggtaccgattttgccgcattttttgctgtgcagtcggtgaacaaaccacgactgtataatactgat

SEQ ID NO: 491317 - DNA, 75 bp, synthetic construct
  source 1..75: mol_type = other DNA
ggttaataattttcttgctgaagttgccagtggttctttagtcattaacagtgatttaatcggtagtattgaaaa

SEQ ID NO: 491318 - DNA, 75 bp, synthetic construct
  source 1..75: mol_type = other DNA
tcatttagcgaattaccctacccgcgtgatctggcaaaattgtttgagacaacagattatgcccgttggcgtagt

SEQ ID NO: 491319 - DNA, 75 bp, synthetic construct
  source 1..75: mol_type = other DNA
catatttcccatgttgctgccagtgctcatgccccgtttttgagtgctattgctccgggtatgttgtccatgaat

SEQ ID NO: 491320 - DNA, 75 bp, synthetic construct
  source 1..75: mol_type = other DNA
gattaaacctcattttcaacttgagggtttaagcatgtcattgcgtcttgttgcagatttaccatcaagtggaag

SEQ ID NO: 491321 - DNA, 75 bp, synthetic construct
  source 1..75: mol_type = other DNA
tcagacatatctgcaaaactggatcatgcaatatgttgtggcatcagacagcgccggccaggatacaaaggcccg

SEQ ID NO: 491322 - DNA, 75 bp, synthetic construct
  source 1..75: mol_type = other DNA
cttctggcgacacctgcgtacataatgctgggtggtgtaattgatggttggtggccgcttaatatcctttttacc

SEQ ID NO: 491323 - DNA, 75 bp, synthetic construct
  source 1..75: mol_type = other DNA
atgaacggtctggaaatcaccgacggcacaggccaactctatctcacgggcctgcttacccctaactttgccgct

SEQ ID NO: 491324 - DNA, 75 bp, synthetic construct
  source 1..75: mol_type = other DNA
accttcgtcccaaatcaaaacgcttagcgctgccaactggcggcactctactggagagactgactcatggcgaaa

SEQ ID NO: 491325 - DNA, 75 bp, synthetic construct
  source 1..75: mol_type = other DNA
tcaagcatatttgcaggactggattatgcaatatgttgtcgcttcagataatgcaggccaagagacaaaagcacg

SEQ ID NO: 491326 - DNA, 75 bp, synthetic construct
  source 1..75: mol_type = other DNA
tattagattaagagctaaagtttattggtccgaaaggaaatattggaaagcaacttcttgctattatcattacct

SEQ ID NO: 491327 - DNA, 75 bp, synthetic construct
  source 1..75: mol_type = other DNA
aacacaaaaggcgctggagatgatcaacaatgggaaggtatataggtacgcagatcaggatgtgttaaatatttt

SEQ ID NO: 491328 - DNA, 75 bp, synthetic construct
  source 1..75: mol_type = other DNA
gctatctcagaccgaagagaaaaagaactgtcagagctaggatttatccctcttatttactgtaagggaactgat

SEQ ID NO: 491329 - DNA, 75 bp, synthetic construct
  source 1..75: mol_type = other DNA
gctattcagcatggttcgttcattgaagatgataaacaacacgtcgtttttaaccgcgataacgcaagtgaaaag

SEQ ID NO: 491330 - DNA, 75 bp, synthetic construct
  source 1..75: mol_type = other DNA
gaatggcacgttgtcgaaaaaatccagactgggcgaagcgttcagctatgtcctgaatcagtgggacgccctctg

SEQ ID NO: 491331 - DNA, 75 bp, synthetic construct
  source 1..75: mol_type = other DNA
ggtggcatcatggctgggtgcccgttaccgcgggaaaacaccacgtttcacccagaattattcgtcactgagcgc

SEQ ID NO: 491332 - DNA, 75 bp, synthetic construct
  source 1..75: mol_type = other DNA
ttaatactgaccagatgctgaagcagctgggcaacctgaatccgcagcagtttatgtccggcagccagggagggg

SEQ ID NO: 491333 - DNA, 75 bp, synthetic construct
  source 1..75: mol_type = other DNA
cgattgccgaaagatcgtagaaggcctcaggaagttagggtgccaatgttctttggatgatgttttccctccatc

SEQ ID NO: 491334 - DNA, 75 bp, synthetic construct
  source 1..75: mol_type = other DNA
gaaggggatgacaaatcctccttggtagtcagcgcgcttaaacgctgcgctagcttgtattacgaggacgagtgt

SEQ ID NO: 491335 - DNA, 75 bp, synthetic construct
  source 1..75: mol_type = other DNA
ttttgttgacgtttactggtatcacccattacttcttggagctgtaaagaaaggttcagaactcgaaaaagaaat

SEQ ID NO: 491336 - DNA, 75 bp, synthetic construct
  source 1..75: mol_type = other DNA
aagtgtcatgataacataaatcagagatgtgaaagtcatggtgatatttcatcaagtatagtaactccaatatac

SEQ ID NO: 491337 - DNA, 75 bp, synthetic construct
  source 1..75: mol_type = other DNA
ctgaatgtcagacatatctgcaaaactggatcatgcaatatgtagtggcatcagataacgctggccaggagacaa

SEQ ID NO: 491338 - DNA, 75 bp, synthetic construct
  source 1..75: mol_type = other DNA
ctgctgatagtgagtttttatacttcaatcagtggaatactgaaggctgagatgttcccggcacaggttcgcgca

SEQ ID NO: 491339 - DNA, 75 bp, synthetic construct
  source 1..75: mol_type = other DNA
tacgtagcgttgtcgctgaaatcaataggaatggaaacagccttcttctggtatgtgaccttaatggccgtggtg

SEQ ID NO: 491340 - DNA, 75 bp, synthetic construct
  source 1..75: mol_type = other DNA
tattgtcgccaataaagacacgctggtgatgattggcgatttaagttctcacggcgtgttgttaggtattttagg

SEQ ID NO: 491341 - DNA, 75 bp, synthetic construct
  source 1..75: mol_type = other DNA
atgaatcagactctctcactttcacagtggttgacagcctctcgccctgtaacaactcctgttgcctggcttggg

SEQ ID NO: 491342 - DNA, 75 bp, synthetic construct
  source 1..75: mol_type = other DNA
aacgtctgctggcgctggacggtattcgcgaggcggcggcagttcccgttacgcgcggcgggcgtcagagcattg

SEQ ID NO: 491343 - DNA, 75 bp, synthetic construct
  source 1..75: mol_type = other DNA
tgaactttttgatggtgtacttagcgacagcgaacttaactggcaaggttcattgctgttggtagcaagttcccc

SEQ ID NO: 491344 - DNA, 75 bp, synthetic construct
  source 1..75: mol_type = other DNA
tgatttcggtgtcgagttcgccagtcgctatcagggcctgcgccatgactctggtgacccggttgaatggggtga

SEQ ID NO: 491345 - DNA, 75 bp, synthetic construct
  source 1..75: mol_type = other DNA
gcccgctggcaggatgtctggcagctcttgccggtggtggtcactgcagtccctgtcgtgttgctgctggcgaat

SEQ ID NO: 491346 - DNA, 75 bp, synthetic construct
  source 1..75: mol_type = other DNA
caccccaaatcataccttcgtgaagctgttgaagggtggattcttaacggtggcgttaatcagaaatgctcctga

SEQ ID NO: 491347 - DNA, 75 bp, synthetic construct
  source 1..75: mol_type = other DNA
aaagtcatgcagattgactcgctggaagcgccggatttgatctggctgctgcaacagacgggagatgaagtgctg

SEQ ID NO: 491348 - DNA, 75 bp, synthetic construct
  source 1..75: mol_type = other DNA
ttccgcatgaccgacgccaatatgaagcgccataaatattccaactttaaggacttctgggagcaactgaagccg

SEQ ID NO: 491349 - DNA, 75 bp, synthetic construct
  source 1..75: mol_type = other DNA
gagcgtgcaggtgagtatttacccgttccgcatgaccgacgccaatatgaagcgccataaatattccaactttaa

SEQ ID NO: 491350 - DNA, 75 bp, synthetic construct
  source 1..75: mol_type = other DNA
ctattatcaagaagtatgcaaatctcacacatgggacattaatgaacgcgtgcaaggcggtgtgattgaggacgt

SEQ ID NO: 491351 - DNA, 75 bp, synthetic construct
  source 1..75: mol_type = other DNA
aataaacctctaatttttttagttcctgatgtagatgcttatagttctgcacgcggtgggtttactttagaacct

SEQ ID NO: 491352 - DNA, 75 bp, synthetic construct
  source 1..75: mol_type = other DNA
ctggattaccgccaggcggtggcgtactacgcttcctgccgccagactgtcatagaaggcggcaaccacgcattc

SEQ ID NO: 491353 - DNA, 75 bp, synthetic construct
  source 1..75: mol_type = other DNA
tgtggcgaaaatcgacgcgcctttactgcttcactacgctgaactggatacgcgaatcaacgaaggttggcccgc

SEQ ID NO: 491354 - DNA, 75 bp, synthetic construct
  source 1..75: mol_type = other DNA
tctgaccatcgacatcaaatcaccgttaatgattcaaataattctgaactattttatgaggattatactgattaa

SEQ ID NO: 491355 - DNA, 75 bp, synthetic construct
  source 1..75: mol_type = other DNA
gatacagtcattttttcgatactgtcttcattgattgactcagctatttctgaccatcgacatcaaatcaccgtt

SEQ ID NO: 491356 - DNA, 75 bp, synthetic construct
  source 1..75: mol_type = other DNA
cgcttcagagacaacagttgacacacaaaaattctctgacatcctctactcagcggggtgttccctaaaggatat

SEQ ID NO: 491357 - DNA, 75 bp, synthetic construct
  source 1..75: mol_type = other DNA
gttacaaattcaaaacccgagcaaattaacgcaaatcgctattgccgactccgataaattgcgcgtcggtgattt

SEQ ID NO: 491358 - DNA, 75 bp, synthetic construct
  source 1..75: mol_type = other DNA
ctgcattaacgccatccgtgaactggcgaagaaagtggatatcccggcaggcctacgcgacctgaacgtgaaaga

SEQ ID NO: 491359 - DNA, 75 bp, synthetic construct
  source 1..75: mol_type = other DNA
agaaggattaattgaaattagttctgacacagttattttttcgatactgtcttcattgattgactccgccatttc

SEQ ID NO: 491360 - DNA, 75 bp, synthetic construct
  source 1..75: mol_type = other DNA
ttacgaggcggcgttgaaagccaataataaggtttatgaggcgtatatctatccgggggtaatgactccaactta

SEQ ID NO: 491361 - DNA, 75 bp, synthetic construct
  source 1..75: mol_type = other DNA
tacggggttatctggtgaagcccgcaaaaatgagcggcaaaacgccagccggggtagtggtgcatgagaatcgag

SEQ ID NO: 491362 - DNA, 75 bp, synthetic construct
  source 1..75: mol_type = other DNA
gtggtggtgcatgagaatcgtggactgaatccgtatatcgaagatgtggcacggcgagtggcgaaggcggggtat

SEQ ID NO: 491363 - DNA, 75 bp, synthetic construct
  source 1..75: mol_type = other DNA
tgccgtagtacaaatgaaatcaagataaatatcttttttggtcaacaacgagaaggattaattgaaattaattct

SEQ ID NO: 491364 - DNA, 75 bp, synthetic construct
  source 1..75: mol_type = other DNA
acaggtgtgcgaccgttactggtgggttcgccactatgacaaacgttgccgccgtagcgataatcgtcgtcatag

SEQ ID NO: 491365 - DNA, 75 bp, synthetic construct
  source 1..75: mol_type = other DNA
acaggtgtgcgaccgttactggtgggttcgtcattatgacaaacgttgccgccgtaacgataatcgtcgtcatag

SEQ ID NO: 491366 - DNA, 75 bp, synthetic construct
  source 1..75: mol_type = other DNA
caacacgattctggtgaaaggcgttaccagtgacggtaacgatatgacgtactggtattccgtggactgggtgca

SEQ ID NO: 491367 - DNA, 75 bp, synthetic construct
  source 1..75: mol_type = other DNA
atctgttccgggtatctgatgcggtggtctggtatcacgatgaaaatcgcgaagtacccgccgtggcattcccgt

SEQ ID NO: 491368 - DNA, 75 bp, synthetic construct
  source 1..75: mol_type = other DNA
cctttgtcacgctgctcaccgggttaacaatttttgtgactttgctgggctgttcgctaagtttctacaacgcca

SEQ ID NO: 491369 - DNA, 75 bp, synthetic construct
  source 1..75: mol_type = other DNA
tgggccaccctgtgaaactggaaattgaaccgggtcgctttctggtagcgcagtctggcgtattaattactcaag

SEQ ID NO: 491370 - DNA, 75 bp, synthetic construct
  source 1..75: mol_type = other DNA
taatggttttgaattcaaggcccagttgcagggtaaagataaagtcggtgacttctatactgcggcagcttacgc

SEQ ID NO: 491371 - DNA, 75 bp, synthetic construct
  source 1..75: mol_type = other DNA
ccaatgcactggttgaggccagctataaattgactcttcaggaacagcgattcttgttactttgcattggtcgat

SEQ ID NO: 491372 - DNA, 75 bp, synthetic construct
  source 1..75: mol_type = other DNA
atatacgaaattctccagcaattccgcagtactggggaacgtattatcgccctcgatgattttaaatcatcactg

SEQ ID NO: 491373 - DNA, 75 bp, synthetic construct
  source 1..75: mol_type = other DNA
catagccaaaaaaccaataccggtggcgaaaacagcaagcacggtatctggtacaccgatctgcccgccgcactg

SEQ ID NO: 491374 - DNA, 75 bp, synthetic construct
  source 1..75: mol_type = other DNA
cgccagggcatcgggtatggctgcgcgttaatccggggtttggtcacggacatagccaaaaaaccaataccggtg

SEQ ID NO: 491375 - DNA, 75 bp, synthetic construct
  source 1..75: mol_type = other DNA
aatcagttaaaaccagacagccgttactacaaagcgattaatattggattccccaatgcctatgaccgtgcgcat

SEQ ID NO: 491376 - DNA, 75 bp, synthetic construct
  source 1..75: mol_type = other DNA
gggttcaacgatctgatgcgcccggcaatgtacggtagttaccaccatatcagtgccctggcagctgatggtcgt

SEQ ID NO: 491377 - DNA, 75 bp, synthetic construct
  source 1..75: mol_type = other DNA
atgccacattcactgttcagcaccgataccgatctcaccgccgaaaatctgctgcgcttgcctgcagaattcggt

SEQ ID NO: 491378 - DNA, 75 bp, synthetic construct
  source 1..75: mol_type = other DNA
tgaacctggtcggtttctggtggcgcagtctggcgtactgataacccaggtacggagcgtcaaacaaatgggcag

SEQ ID NO: 491379 - DNA, 75 bp, synthetic construct
  source 1..75: mol_type = other DNA
atgtcagatctgatagcttacaaatcaaacgcccttatcgaggcaagctacaagctcactttgcaggaacagcgc

SEQ ID NO: 491380 - DNA, 75 bp, synthetic construct
  source 1..75: mol_type = other DNA
gaacacgcgtaaacggcttgaaccccagccgaagagtaacgccgagaacacctcacagactacggtcagaacgct

SEQ ID NO: 491381 - DNA, 75 bp, synthetic construct
  source 1..75: mol_type = other DNA
ggcaggcggagcgggggctagggcaggaaacgcctctggaatctctgctgacgcagtaccaggatgcccgtgcgc

SEQ ID NO: 491382 - DNA, 75 bp, synthetic construct
  source 1..75: mol_type = other DNA
ctattgttaccggcagcgacccgcgcgggctaccggagttcagcgctatccgcgaggaaatcaacaaagccagtc

SEQ ID NO: 491383 - DNA, 75 bp, synthetic construct
  source 1..75: mol_type = other DNA
gcgcgctgagtccgacgccgattgcaggctattctctgtcgttcatcgcggcatgcgggggcggcgtgagctggc

SEQ ID NO: 491384 - DNA, 75 bp, synthetic construct
  source 1..75: mol_type = other DNA
gcaataagatatcacccaacctatttgtcaagcacttaatggttttgtcagatattggaggcgaaagacttcatc

SEQ ID NO: 491385 - DNA, 75 bp, synthetic construct
  source 1..75: mol_type = other DNA
tcttgttttgatgccgtacggttatgcaataagatatcacccaacctatttgtcaagcacttaatggttttgtca

SEQ ID NO: 491386 - DNA, 75 bp, synthetic construct
  source 1..75: mol_type = other DNA
aaatggggttcgtagatgatcttattaatgcaggttcatttgattctgcctataaaaatgtaaaggatattctta

SEQ ID NO: 491387 - DNA, 75 bp, synthetic construct
  source 1..75: mol_type = other DNA
attacggcggaggagtatttcaattcattccctgatatgggcagaaaaaacgctgagattcagttacaggaagcc

SEQ ID NO: 491388 - DNA, 75 bp, synthetic construct
  source 1..75: mol_type = other DNA
tacaaacaattcagagatttaaataaaatactaataaaaccctgtgttgacgaactgaacaaaaaaagcgacctg

SEQ ID NO: 491389 - DNA, 75 bp, synthetic construct
  source 1..75: mol_type = other DNA
caaagcagggcagtgcggcgaaaggttttatcgcgggtgttgtctgctctgcggctgtcgtcgccgcgctctgtt

SEQ ID NO: 491390 - DNA, 75 bp, synthetic construct
  source 1..75: mol_type = other DNA
ggcaggcggagcgggggctggggcaggaaacacccgttgagtcgctgctgacgcagtaccaggacgcccgtgcgc

SEQ ID NO: 491391 - DNA, 75 bp, synthetic construct
  source 1..75: mol_type = other DNA
atacgtatagaggggaaaaaaagtattcctaaagatatgttgaccattaaaaataccatcgagagaaaagtattg

SEQ ID NO: 491392 - DNA, 75 bp, synthetic construct
  source 1..75: mol_type = other DNA
tacgaagccacggtatcagatacggccagaacgtccggaatgagtaaccgggagtttgaagcctttgaagtggga

SEQ ID NO: 491393 - DNA, 75 bp, synthetic construct
  source 1..75: mol_type = other DNA
tccaggccgtcaggaagccagcttcgacgggcaaacgctggagttaaccggtactgagtttaccctgctctattt

SEQ ID NO: 491394 - DNA, 75 bp, synthetic construct
  source 1..75: mol_type = other DNA
aacggctggagctttaccccgttgagcaggtatcaggttttatccatcgggcagtaagtcaggaacgggcgatta

SEQ ID NO: 491395 - DNA, 75 bp, synthetic construct
  source 1..75: mol_type = other DNA
agtaagccgaaaccggattctacagaaccgtaacgcagcacgccgcagcggttatcacgatcgtgaggctctatt

SEQ ID NO: 491396 - DNA, 75 bp, synthetic construct
  source 1..75: mol_type = other DNA
tggaaacggaacttgatttgattcagaaaatgggcctgcaaaattatttgcaagcacagattcgcgaagaaggct

SEQ ID NO: 491397 - DNA, 75 bp, synthetic construct
  source 1..75: mol_type = other DNA
tcatgttggagatatagctttacaggtggaaagtaaatataatatttatctcccatatttatgtggacgccatgc

SEQ ID NO: 491398 - DNA, 75 bp, synthetic construct
  source 1..75: mol_type = other DNA
tatccaggcaggcaaatgtcggaagaggggcagcagaaagcaaagagccggatacactgaaatgctggatattta

SEQ ID NO: 491399 - DNA, 75 bp, synthetic construct
  source 1..75: mol_type = other DNA
cgttcccggatggtactacagtgaaaaatacttttacatcaggacaattaacatccgcatctgaatttaagaaac

SEQ ID NO: 491400 - DNA, 75 bp, synthetic construct
  source 1..75: mol_type = other DNA
tccgcgagcgtgacaagtcatttccgtttctggaaatcgtgggcgagccggggacaggtaaatccacgctgatag

SEQ ID NO: 491401 - DNA, 75 bp, synthetic construct
  source 1..75: mol_type = other DNA
cgttcccggatggcgctacggtaaaaaacacctttacatcaggacaattaacatcctcatctgaatttaaaaaac

SEQ ID NO: 491402 - DNA, 75 bp, synthetic construct
  source 1..75: mol_type = other DNA
gccttaaccagaatggcattgcggccgtttctgtcatgtctgccgtgaactaccctgataaggcgctggaagagc

SEQ ID NO: 491403 - DNA, 75 bp, synthetic construct
  source 1..75: mol_type = other DNA
tatccagacaggcgaacgccgggaggggaatagccgaggccagagagaaggaggtattgaaatgctggatattta

SEQ ID NO: 491404 - DNA, 75 bp, synthetic construct
  source 1..75: mol_type = other DNA
gcgattccagtatttacaaggcgcaactcctttcttactactactctcgccgtgcagagtctgcaatcggcagag

SEQ ID NO: 491405 - DNA, 75 bp, synthetic construct
  source 1..75: mol_type = other DNA
aacccgtactattcgtttgccgattcacatcgtaaaggagctgaacgtttacctgcgaaccgcacgtgagttgtc

SEQ ID NO: 491406 - DNA, 75 bp, synthetic construct
  source 1..75: mol_type = other DNA
gttgaaggcctgcgccgtctgcgtgagattttgcagactcaggggctgaatatcgaggcgctgttccgcgaataa

SEQ ID NO: 491407 - DNA, 75 bp, synthetic construct
  source 1..75: mol_type = other DNA
atgagaacggagttgaggttagaagaggaacccagtgataacgatttggccgaagaggaactgttatcgcaggga

SEQ ID NO: 491408 - DNA, 75 bp, synthetic construct
  source 1..75: mol_type = other DNA
ccatgaattcatgaataacgggcaatccggcccacatcaggctatggccgaagcgcaccgccgcatgatcaatgc

SEQ ID NO: 491409 - DNA, 75 bp, synthetic construct
  source 1..75: mol_type = other DNA
aggtcttacagcttcactggaggccggttatacctggaaagcgggtgagttcaacagcagtcatggcagcctgaa

SEQ ID NO: 491410 - DNA, 75 bp, synthetic construct
  source 1..75: mol_type = other DNA
agagaacggtccggaagataccacgcaagatgacgatatgaagcagagcactgagagatcccctcataatttccc

SEQ ID NO: 491411 - DNA, 75 bp, synthetic construct
  source 1..75: mol_type = other DNA
tgctggacatcctagccgatgaaaaagagaacggtccggaagataccacgcaagatgacgatatgaagcagagca

SEQ ID NO: 491412 - DNA, 75 bp, synthetic construct
  source 1..75: mol_type = other DNA
ctgggtggtgattccgaaaaagcgttgctggacattctggccgatgaaaaagagaacggtccggaagataccacg

SEQ ID NO: 491413 - DNA, 75 bp, synthetic construct
  source 1..75: mol_type = other DNA
atggcaatcgtggtctggctttgctggatcttatcgaagagggcaacctggggcttatccgcgcggttgagaagt

SEQ ID NO: 491414 - DNA, 75 bp, synthetic construct
  source 1..75: mol_type = other DNA
tgcgtggagatgttgcctcccgccgccggatgattgagagtaacttacgtctggtggtaaaaattgcccgccgtt

SEQ ID NO: 491415 - DNA, 75 bp, synthetic construct
  source 1..75: mol_type = other DNA
tcagccgtatgcttcgtcttaacgagcgcattccctcggtagacaccccgctgggtggtgattccgaaaaagcgt

SEQ ID NO: 491416 - DNA, 75 bp, synthetic construct
  source 1..75: mol_type = other DNA
tccacgtcttgtatgggcgtttgacggcgataaagccggcacaaagcacacactggcgttcgctgcccgtagtga

SEQ ID NO: 491417 - DNA, 75 bp, synthetic construct
  source 1..75: mol_type = other DNA
gagagctacgctcagaaaataacatcaattgaaaaattaaaatatatttatgaattaactactcaagaacaactt

SEQ ID NO: 491418 - DNA, 75 bp, synthetic construct
  source 1..75: mol_type = other DNA
aaaatgaattaacaaagaaggtattaatccttactcacaatctttatttctttcatgaacttattaagctatctc

SEQ ID NO: 491419 - DNA, 75 bp, synthetic construct
  source 1..75: mol_type = other DNA
ttatggttttagcataaaaaaacacactgagagcaatgataaatatattatatcacgttctgaaaacacaacaga

SEQ ID NO: 491420 - DNA, 75 bp, synthetic construct
  source 1..75: mol_type = other DNA
tgactactttcttggcagaataaacaaaaatgaatttagcaccattagtgctatagataaaaaaagtgtgcaaaa

SEQ ID NO: 491421 - DNA, 75 bp, synthetic construct
  source 1..75: mol_type = other DNA
gaagaaataaagagtaacattttatcatgtgaggtgataaaccaagacgaaaaagataaaagtctttcatatgtt

SEQ ID NO: 491422 - DNA, 75 bp, synthetic construct
  source 1..75: mol_type = other DNA
caccgaaatcgaaaaagagataagtaagaaaagagaaatagttaaagaattaaaaataaaactagaggcaacaaa

SEQ ID NO: 491423 - DNA, 75 bp, synthetic construct
  source 1..75: mol_type = other DNA
atggctaaaccccgtttcactgacgaacaaatcgctgaaattttacagcagtcaaaagagggggcgtctaataag

SEQ ID NO: 491424 - DNA, 75 bp, synthetic construct
  source 1..75: mol_type = other DNA
gatatcgacaggattaatcaccatattgttaatgtggaaaagattaactttagattgccagaacggagggagtag

SEQ ID NO: 491425 - DNA, 75 bp, synthetic construct
  source 1..75: mol_type = other DNA
tactaacggcaaaatcaactggggcatcggcataggccttgcgggaagcacttacgataataattacccggaaga

SEQ ID NO: 491426 - DNA, 75 bp, synthetic construct
  source 1..75: mol_type = other DNA
atggctaaatcccgtttcacagataagcaaattgctgaaattttacagcagtcaaaagagggggcatctaataag

SEQ ID NO: 491427 - DNA, 75 bp, synthetic construct
  source 1..75: mol_type = other DNA
tcgttctgtaaataataactacagcgccctttataatttgagctggacgtttatttgttttttatttttgcagta

SEQ ID NO: 491428 - DNA, 75 bp, synthetic construct
  source 1..75: mol_type = other DNA
tcgttcagtaaataacagctatagcgccctttataatttgagctggacgtttatttgtttttttatttttgcagt

SEQ ID NO: 491429 - DNA, 75 bp, synthetic construct
  source 1..75: mol_type = other DNA
aaggacggcgagattatcagaattgtgatgtttggtattgtgcgccattggttttctctgctggcgcagcaggtg

SEQ ID NO: 491430 - DNA, 75 bp, synthetic construct
  source 1..75: mol_type = other DNA
cttcgacaccccgttatggctggcagataacgaccgcctggtattgcgcgatatctctgcccgcaacacgctggc

SEQ ID NO: 491431 - DNA, 75 bp, synthetic construct
  source 1..75: mol_type = other DNA
gtcgagtttgccaatatgatccgcgatctcgatcaggagtgtggctcgacctgcgcggcggatttccgcgatcgc

SEQ ID NO: 491432 - DNA, 75 bp, synthetic construct
  source 1..75: mol_type = other DNA
gcttgttgaatgcgccagttgccgcccgctggcagcggaaaattctcgatacattagcgacttatcatgagcaac

SEQ ID NO: 491433 - DNA, 75 bp, synthetic construct
  source 1..75: mol_type = other DNA
attcatacccgccacgcagctgaacgccttgagcaaataccggttagccaggtttcaggctttactctgcagtcc

SEQ ID NO: 491434 - DNA, 75 bp, synthetic construct
  source 1..75: mol_type = other DNA
tgtggttcaacctgcgcggcggatttccgcgatcgcttaggcgtaggccgaaagctggcaattcagattctggaa

SEQ ID NO: 491435 - DNA, 75 bp, synthetic construct
  source 1..75: mol_type = other DNA
aagccggattcagcgaagagcagcaggctatctggcaaaaagtggaatcgcggtttggcgacgagccgtggtggg

SEQ ID NO: 491436 - DNA, 75 bp, synthetic construct
  source 1..75: mol_type = other DNA
cgtcacgggacgcgtttcactgctggaagataaccttgccgagctggtgttcgacacgccgctgtggctggcgga

SEQ ID NO: 491437 - DNA, 75 bp, synthetic construct
  source 1..75: mol_type = other DNA
agtcgagactaagggctttcttaacctcgtatccgcgcctgcggtaacactgaattgtccattcagcctgctctt

SEQ ID NO: 491438 - DNA, 75 bp, synthetic construct
  source 1..75: mol_type = other DNA
caactttgcataaaaggtaatagtgaaaatttaacgaggctaaaaagcaggcttgcagaaataagcaatcttata

SEQ ID NO: 491439 - DNA, 75 bp, synthetic construct
  source 1..75: mol_type = other DNA
atgtgccgccagagccgttcacgcgggtgattgtcgagctacaaactcacgtaccgttgacccagtggcagccgc

SEQ ID NO: 491440 - DNA, 75 bp, synthetic construct
  source 1..75: mol_type = other DNA
gcttgttgaatgcgccacagcctaattctatatcgtcaggatgcgcgaactgctgcaacagcctggctatattca

SEQ ID NO: 491441 - DNA, 75 bp, synthetic construct
  source 1..75: mol_type = other DNA
tgcctactggccgcagtcagatggtcgcgtgcctggttttatcgacgttcccggccatgaaaaatttctttccaa

SEQ ID NO: 491442 - DNA, 75 bp, synthetic construct
  source 1..75: mol_type = other DNA
gtcagtcttggcgcatacccgcttgtctcactggcggaagccaggcagcagcgcgacggtatccgtaagctgctt

SEQ ID NO: 491443 - DNA, 75 bp, synthetic construct
  source 1..75: mol_type = other DNA
cgtagcgactttcgtcttattcgccaccgcatgctggcacctgaaaaaatgggctggaaatacaaagacgcctag

SEQ ID NO: 491444 - DNA, 75 bp, synthetic construct
  source 1..75: mol_type = other DNA
cttgctgcaaatcgataccatcaatattgttgcccgtagtccatatctggtgcttttcagtcgtctgggaaatta

SEQ ID NO: 491445 - DNA, 75 bp, synthetic construct
  source 1..75: mol_type = other DNA
ttgctgcatcggctgcaaccattattgcaatggcaggtgataaagttgttatcccatctaatgctatgatgatga

SEQ ID NO: 491446 - DNA, 75 bp, synthetic construct
  source 1..75: mol_type = other DNA
catccagccctgccgctggaacggctgccagaactgcttgcgcggatcggtgattatcagcagggccgggagtta

SEQ ID NO: 491447 - DNA, 75 bp, synthetic construct
  source 1..75: mol_type = other DNA
tgcacctgttcatccgttccagcgaactgcgtttcgcccgctggagcgagatcgatttcaggcacaaaatctgga

SEQ ID NO: 491448 - DNA, 75 bp, synthetic construct
  source 1..75: mol_type = other DNA
tactgaaggtccggtgaaatatgttcgcccggatgtcagccattttgaagcgaagaaactgcggcgcggtgatta

SEQ ID NO: 491449 - DNA, 75 bp, synthetic construct
  source 1..75: mol_type = other DNA
gccgctgtggctggcgcaacatccacatgtgatggcatttcaccaggcgccgaaagagtacggtggtgatgcggc

SEQ ID NO: 491450 - DNA, 75 bp, synthetic construct
  source 1..75: mol_type = other DNA
aaagagtacggtggtgatgcggcgttgctggtgttgattgaagtggaagagtggctgccgccggagttgccctga

SEQ ID NO: 491451 - DNA, 75 bp, synthetic construct
  source 1..75: mol_type = other DNA
acttatgacattaaaagtaattttttgaaattagagataatattggcacagaaaatatattcagttcgtttagtg

SEQ ID NO: 491452 - DNA, 75 bp, synthetic construct
  source 1..75: mol_type = other DNA
agtgtatgttgtttttctggaatgatttatccacatatccggaggcccgatccagtaaacagatccatgaatgat

SEQ ID NO: 491453 - DNA, 75 bp, synthetic construct
  source 1..75: mol_type = other DNA
gtttttctggaatgatttatccacatatccggaggctcgatccagtaaacagatccatgaatgatcaacaaagga

SEQ ID NO: 491454 - DNA, 75 bp, synthetic construct
  source 1..75: mol_type = other DNA
gtgcctccactggtctttaattatttagaagcgcttagcttggcaagtaatcaagggagccagttcctcaaactc

SEQ ID NO: 491455 - DNA, 75 bp, synthetic construct
  source 1..75: mol_type = other DNA
gcctttgtcaccagcttacaggccaaacgcggttggatgcgcattgtgcaaataatcctactggcagcggcgttg

SEQ ID NO: 491456 - DNA, 75 bp, synthetic construct
  source 1..75: mol_type = other DNA
acgcttcctgtaaccatcaaccaggctacggctggcgcgacattaactgtcacttaccagggctgcgctgacgct

SEQ ID NO: 491457 - DNA, 75 bp, synthetic construct
  source 1..75: mol_type = other DNA
cacctaccagggctgtgctgatgccggtttctgttatccgccagaaaccaaaaccgttccgttaagcgaagtggt

SEQ ID NO: 491458 - DNA, 75 bp, synthetic construct
  source 1..75: mol_type = other DNA
aagtcgttcaaatcaagggcagcgactcggtgaacaactgctggttgatgcgatctatagaacggtactggttgc

SEQ ID NO: 491459 - DNA, 75 bp, synthetic construct
  source 1..75: mol_type = other DNA
cctgatgtggcatgcgtcagaaaatgaggactatgacgaaaaggccatgcgcattgatatggggaatatcggttt

SEQ ID NO: 491460 - DNA, 75 bp, synthetic construct
  source 1..75: mol_type = other DNA
ggtatcgccttcacgccatgtgtactgccgatgtaccctctaatttccggtattgtgctgggtggtaaacagcgg

SEQ ID NO: 491461 - DNA, 75 bp, synthetic construct
  source 1..75: mol_type = other DNA
atgctgacgaaatatgcccttgtggcagtcatagtgctgtgttttacggtgctgggatttacgcttctggtcggt

SEQ ID NO: 491462 - DNA, 75 bp, synthetic construct
  source 1..75: mol_type = other DNA
atgctgacgaaatatgcccttgtggcagtcatagtgctgtgttttacggttctgggatttacgcttctggtcggg

SEQ ID NO: 491463 - DNA, 75 bp, synthetic construct
  source 1..75: mol_type = other DNA
gagtcgctgtgtgagttcaccgtaaaggaacgtaatattgagtttaaggctgttctcgcttacgaaccgaagaag

SEQ ID NO: 491464 - DNA, 75 bp, synthetic construct
  source 1..75: mol_type = other DNA
gactcgctgtgtgagtttacggtaaaggaacgtaatattgagttcagggctgttctcgcttacgaaccgaagaag

SEQ ID NO: 491465 - DNA, 75 bp, synthetic construct
  source 1..75: mol_type = other DNA
atgctgacgaaatatgcccttgtggcagtcatagtgctgtgtttgacggtcctgggatttacgcttctggtcggc

SEQ ID NO: 491466 - DNA, 75 bp, synthetic construct
  source 1..75: mol_type = other DNA
atgctgacgaaatatgcccttgtggcagtcatagtgctgtgtttcacggtactgggatttacgcttctggtcgga

SEQ ID NO: 491467 - DNA, 75 bp, synthetic construct
  source 1..75: mol_type = other DNA
ttcaccggagttgtttcttgatttgcacggtctgacgcagctacaagccaaacaggaactgggggcgttgattgc

SEQ ID NO: 491468 - DNA, 75 bp, synthetic construct
  source 1..75: mol_type = other DNA
gctaatatggaagtggaattgcttggcgctgaactggcggcagaatacaaaatcactgaagcagaaagtggaggg

SEQ ID NO: 491469 - DNA, 75 bp, synthetic construct
  source 1..75: mol_type = other DNA
acccgccttatccaagattatctgggacaccggaatattcagcatacggtactgtatacagccagtaatgtttca

SEQ ID NO: 491470 - DNA, 75 bp, synthetic construct
  source 1..75: mol_type = other DNA
tttctgtcaagccatgggaaaaaaatttccagacaatggatttataaactctgcgcacgatatagtcaacgtgcg

SEQ ID NO: 491471 - DNA, 75 bp, synthetic construct
  source 1..75: mol_type = other DNA
attcgatgatccagaaaacatcgggtatgccggtgccgggattcgcgttgaaggtaccagcccgacgctgtttgt

SEQ ID NO: 491472 - DNA, 75 bp, synthetic construct
  source 1..75: mol_type = other DNA
gtgcggaagttggttgccagggcgaagtgggtgttgcctgttcaatggctgctgcgggtcttgcagaactgctgg

SEQ ID NO: 491473 - DNA, 75 bp, synthetic construct
  source 1..75: mol_type = other DNA
ttttccgtggatcttttccagaagataaagaaattggacaattcgcaggtaaacgcggcgcatgtttccgtgtgg

SEQ ID NO: 491474 - DNA, 75 bp, synthetic construct
  source 1..75: mol_type = other DNA
tgcacctgccggatgatattcgtctggggatgctgatgcttatcagccatttttacgaaaatcgctcgtcggtta

SEQ ID NO: 491475 - DNA, 75 bp, synthetic construct
  source 1..75: mol_type = other DNA
tgagcttgtcgcaatcaatcagtattttctccatgcccggatgtttaaaaactggggcctgatgcgtcttaatga

SEQ ID NO: 491476 - DNA, 75 bp, synthetic construct
  source 1..75: mol_type = other DNA
atgagcatgaaagagctgcagttgcccatgaatttatgaataacggtcagtctggcccacatcaggccatggccg

SEQ ID NO: 491477 - DNA, 75 bp, synthetic construct
  source 1..75: mol_type = other DNA
gtataggctggcatctacttttagctgtggcagtaacttatattagttactgctttaggctagatattactttta

SEQ ID NO: 491478 - DNA, 75 bp, synthetic construct
  source 1..75: mol_type = other DNA
acatgttgaaggtgatgaaaaattcgagattctcaaaagagctaaagtctctttatcgttgagtaagttcgaaaa

SEQ ID NO: 491479 - DNA, 75 bp, synthetic construct
  source 1..75: mol_type = other DNA
aagactataagcgcccagaataaaattgaaaacatacaagatgaaattatttccgtattaaatcaatcaagttat

SEQ ID NO: 491480 - DNA, 75 bp, synthetic construct
  source 1..75: mol_type = other DNA
cggcggtcaggaacaaaccatcacatccacctggacgacccttgcgcatcacggcatggtgattgtccccattgg

SEQ ID NO: 491481 - DNA, 75 bp, synthetic construct
  source 1..75: mol_type = other DNA
gtaggtcaggtcactccgaatcctgacggctcttacaatgttgcttatcagctggttgataccggcggtgcgccg

SEQ ID NO: 491482 - DNA, 75 bp, synthetic construct
  source 1..75: mol_type = other DNA
ccaaacaagatctggcaacgggaggcgtacaagttctgtcgtccacgttcctagatgaaacgccaagtctggcac

SEQ ID NO: 491483 - DNA, 75 bp, synthetic construct
  source 1..75: mol_type = other DNA
gtcggccaggtcactccgaatccggatggttcttacaatgttgcttatcaacttgttgacactggcggcgcaccg

SEQ ID NO: 491484 - DNA, 75 bp, synthetic construct
  source 1..75: mol_type = other DNA
catggtctgacgcagcttcaggccaaacaagagttaggcgcgttgattgccgcctgccgccgtgagcatgtattt

SEQ ID NO: 491485 - DNA, 75 bp, synthetic construct
  source 1..75: mol_type = other DNA
cgaaagagtacggcggcgatgcggcgctgttagtgttgattgaagtggaagagtggctgccgccagaattgccct

SEQ ID NO: 491486 - DNA, 75 bp, synthetic construct
  source 1..75: mol_type = other DNA
acagctacggcttgatatacctcatactctgccgctgatcaatgctgatgtatcaatgatcgagcgcgtggtcac

SEQ ID NO: 491487 - DNA, 75 bp, synthetic construct
  source 1..75: mol_type = other DNA
gcgttgcagtattacctgaatcggccgcacgttcgttatgtgccgcagttaacggttggatgtcacgtattacca

SEQ ID NO: 491488 - DNA, 75 bp, synthetic construct
  source 1..75: mol_type = other DNA
tcttgtcggaactcaggattgcccagggcaaagcgttgatgttaatgcgatagcgcaaatgaacctcttccttcc

SEQ ID NO: 491489 - DNA, 75 bp, synthetic construct
  source 1..75: mol_type = other DNA
tgatatggcggtgatttacgagcattcccctgtgtcaggcgtatccagccaggccttgttaaaagaagatctgtt

SEQ ID NO: 491490 - DNA, 75 bp, synthetic construct
  source 1..75: mol_type = other DNA
ctgctgacttgcgtaacagcggtaaatttaatccgttagatcgcgctcgtctgccacagcagccgggtagtgcgc

SEQ ID NO: 491491 - DNA, 75 bp, synthetic construct
  source 1..75: mol_type = other DNA
gccgcgcgttatgcagaccgtgttgtattaatgcaaaaaggaaaggttatcgcaaatggtaaaccgcaggacgta

SEQ ID NO: 491492 - DNA, 75 bp, synthetic construct
  source 1..75: mol_type = other DNA
atgctctacggcgcggatattaccgtacttaaagatcctgccaaccattcaccactgatcgtcctcgatcattaa

SEQ ID NO: 491493 - DNA, 75 bp, synthetic construct
  source 1..75: mol_type = other DNA
tctcaacggtgatgttctgaatgattatctgtcccgcacagttctgactccagaacaggctgataacataagaaa

SEQ ID NO: 491494 - DNA, 75 bp, synthetic construct
  source 1..75: mol_type = other DNA
cgcccatgcggcattacccgttaccgccgtacaaagtgagtactccatgctctggcgcggccctgaaaagcaggt

SEQ ID NO: 491495 - DNA, 75 bp, synthetic construct
  source 1..75: mol_type = other DNA
gccggggtatccagccggaagcccgggcgccatttgcagaaggaagaaagggtttattccagcatcccgaactaa

SEQ ID NO: 491496 - DNA, 75 bp, synthetic construct
  source 1..75: mol_type = other DNA
gaagcatcggcagtagtaaaaactgtgacgccatctgcgccgcgcaaagtggcagtggcagatagcggagagaac

SEQ ID NO: 491497 - DNA, 75 bp, synthetic construct
  source 1..75: mol_type = other DNA
ggcgaatacacaagtgttctccagtcaatccaagacttcggcagaatcgccaaagactgaagcaattcatagcga

SEQ ID NO: 491498 - DNA, 75 bp, synthetic construct
  source 1..75: mol_type = other DNA
agtacaattcattgtgactacacattctccgtttgttgttacatccgtcacaaatgccatcatttatgatctgtc

SEQ ID NO: 491499 - DNA, 75 bp, synthetic construct
  source 1..75: mol_type = other DNA
caactgaacgcacgtcgcaaagaattgggcattgatttatacacacttgaactacaaacggggatctcaacgtcc

SEQ ID NO: 491500 - DNA, 75 bp, synthetic construct
  source 1..75: mol_type = other DNA
tctgtattaacagttgacgccctttttggtgctttcacagcccttaatattactccagtgaatttcatgtcattg

SEQ ID NO: 491501 - DNA, 75 bp, synthetic construct
  source 1..75: mol_type = other DNA
ttggtgcttgctctgcccttaatattagcccaatgaatttcatgttgttggtagaaaaactgattcccgaattta

SEQ ID NO: 491502 - DNA, 75 bp, synthetic construct
  source 1..75: mol_type = other DNA
tgctgatgtgatggaatggttgaagcgaccaggtaaaggctatcaaactcgcctgaacgcaattttacgtgaagc

SEQ ID NO: 491503 - DNA, 75 bp, synthetic construct
  source 1..75: mol_type = other DNA
cgacctggtaaaggctatcaaactcgcctgaacgcaattttacgtgaagcgatgctgcgcgatcagaacaaaaaa

SEQ ID NO: 491504 - DNA, 75 bp, synthetic construct
  source 1..75: mol_type = other DNA
acagtgagcgtgaggcctttaattcagcagcagaccaccgtcttgctgaattaacaatgaacaggttatatgaca

SEQ ID NO: 491505 - DNA, 75 bp, synthetic construct
  source 1..75: mol_type = other DNA
caactggcagagagtttgcgccatatgcaaagtgaactggtacgtaccgtgggtgatgtgcgtaatggtgcaaat

SEQ ID NO: 491506 - DNA, 75 bp, synthetic construct
  source 1..75: mol_type = other DNA
cttgcttggttttgacccgataagccgccgtaaaaatccaccggaaacagaagaagaggacgagcttgaccacct

SEQ ID NO: 491507 - DNA, 75 bp, synthetic construct
  source 1..75: mol_type = other DNA
agctattgctgtagccaaaagaatccacaggccagctttgccattcgaacgattttcagaactcttagaacgaat

SEQ ID NO: 491508 - DNA, 75 bp, synthetic construct
  source 1..75: mol_type = other DNA
caatgggccgataatattgaggctccttcttctccactcccggtgggaatcgctcagcaggaatccgcagcggca

SEQ ID NO: 491509 - DNA, 75 bp, synthetic construct
  source 1..75: mol_type = other DNA
accgacattcagcgggcggcccggttctactacctgcagaaacaggcatttggcggcaaggtcgccgatcacaca

SEQ ID NO: 491510 - DNA, 75 bp, synthetic construct
  source 1..75: mol_type = other DNA
gtactgttcgctaatttcgccgaggcgttggcagaaggccgcagtaaagcgcaggccaacagtctgaaaggggtg

SEQ ID NO: 491511 - DNA, 75 bp, synthetic construct
  source 1..75: mol_type = other DNA
gagggagtttatgatgttaacgtgtgggtttctggcggaggtgcaaactacgcgatttcattcctggtaatttat

SEQ ID NO: 491512 - DNA, 75 bp, synthetic construct
  source 1..75: mol_type = other DNA
ctggaagagcaggcaagccgcctgactgaagctgtggctgtatttcgtattcagcaagagcaacagcgtcagcgc

SEQ ID NO: 491513 - DNA, 75 bp, synthetic construct
  source 1..75: mol_type = other DNA
ttgcctccgcttctgatgagcagagtcgcggtatcgatcaggttggtttagcggttgttgagatggaccgggtaa

SEQ ID NO: 491514 - DNA, 75 bp, synthetic construct
  source 1..75: mol_type = other DNA
gttcaaccgttgctgagctgatgcagagtgccagtatttcgctgaaacaggcggaaaaaaactgggcggattacg

SEQ ID NO: 491515 - DNA, 75 bp, synthetic construct
  source 1..75: mol_type = other DNA
ccatcaccaaagagtgtggggcgtcaaaatcgggaatataaaacggttggctttgacgcaacgaaagagttacag

SEQ ID NO: 491516 - DNA, 75 bp, synthetic construct
  source 1..75: mol_type = other DNA
gatcggctctatgatatcgccgtcagcgataacaatgcctcctacagccaggcgatgtggattctggtgggcgtg

SEQ ID NO: 491517 - DNA, 75 bp, synthetic construct
  source 1..75: mol_type = other DNA
gaaacatcggctgtggtaaaaaccgtgatgccagctgcgccgcgtaaaatggccgtggcagatagcggtgagaac

SEQ ID NO: 491518 - DNA, 75 bp, synthetic construct
  source 1..75: mol_type = other DNA
gatgaagcatatagaaattgggtcgataacggcgctgatatgaataatcgagattatcagaagccattaacaggt

SEQ ID NO: 491519 - DNA, 75 bp, synthetic construct
  source 1..75: mol_type = other DNA
aaggtagtcgaagcgagtgggcggtatgaagtagctttgcgtcttcaacagcgaacgactgcaatcctgcgtttt

SEQ ID NO: 491520 - DNA, 75 bp, synthetic construct
  source 1..75: mol_type = other DNA
gcagccaatccggctaccgtcttggcgctgctggatgagctggaaagaaaccagcaatacataaaacgcctcgac

SEQ ID NO: 491521 - DNA, 75 bp, synthetic construct
  source 1..75: mol_type = other DNA
gagctggcagatgctgcagcttgctatgcgattaacgcacacaatcaaggcctctcaacgccagcgcattggccg

SEQ ID NO: 491522 - DNA, 75 bp, synthetic construct
  source 1..75: mol_type = other DNA
ttaccggcatacagaatatggaacaggagcaggaagttcttcagcaacagatgcttcatacactacaacagcgga

SEQ ID NO: 491523 - DNA, 75 bp, synthetic construct
  source 1..75: mol_type = other DNA
ttgaaggattgcgcaccgaaactggataccgtaacgcgaccttatcaggaacagacttcaaccgcatgtgggaac

SEQ ID NO: 491524 - DNA, 75 bp, synthetic construct
  source 1..75: mol_type = other DNA
caactcattaacgagcgtgaccatgctgagtctgctttagctgatatgtactttgcagcaaccggtgataggccg

SEQ ID NO: 491525 - DNA, 75 bp, synthetic construct
  source 1..75: mol_type = other DNA
atattatcgtactaaccatggatgatcttggttatggacaacttccttttgataagggatctttggtgatgctgc

SEQ ID NO: 491526 - DNA, 75 bp, synthetic construct
  source 1..75: mol_type = other DNA
gccatttatgaacaccttagaagaggaaaaccagccaatctcaacgggttttactcagtatgtctaaattttagt

SEQ ID NO: 491527 - DNA, 75 bp, synthetic construct
  source 1..75: mol_type = other DNA
cggcgtacagaatatggaacaggagcaggacgttcttcagcaacagatgctgtatacgttacaacagcggatgaa

SEQ ID NO: 491528 - DNA, 75 bp, synthetic construct
  source 1..75: mol_type = other DNA
tccacgaggattaccaaacggtaatggcatacaaagtttctgaagtcatcgctgcaatccgctccgctggcattc

SEQ ID NO: 491529 - DNA, 75 bp, synthetic construct
  source 1..75: mol_type = other DNA
ccgattacgcactgcaagctgccggaactgtagacgaattggttgcggcgctggaatccgcagagaatcgcatag

SEQ ID NO: 491530 - DNA, 75 bp, synthetic construct
  source 1..75: mol_type = other DNA
gaatacagtaccaaaggaaagccaaatattatcgtactaaccatggatgatcttggttatggacaacttcctttt

SEQ ID NO: 491531 - DNA, 75 bp, synthetic construct
  source 1..75: mol_type = other DNA
tgagcaggattttcaggttgccagccagcagtttcaggtcatgcaggaatcggaaaaacttatccaggataccat

SEQ ID NO: 491532 - DNA, 75 bp, synthetic construct
  source 1..75: mol_type = other DNA
ggatattgatgcgctcaacgccttcaaatttctggccggaccagaaaccgtgctggaactgctggatgaacggga

SEQ ID NO: 491533 - DNA, 75 bp, synthetic construct
  source 1..75: mol_type = other DNA
aaagaatgcattgacgtaattcgtgaagaagtaaagcgatggaatgattcccgcaccgctggcattcgcatcaaa

SEQ ID NO: 491534 - DNA, 75 bp, synthetic construct
  source 1..75: mol_type = other DNA
ttgcgtgcgttattgcgccaggatcctgacgtcatcatgatcggagagatccgcgatggcgaaacagcagagatc

SEQ ID NO: 491535 - DNA, 75 bp, synthetic construct
  source 1..75: mol_type = other DNA
tttccagtgacgaactggcgttagtcgaaccattagccgttggtcttcacgctgcgcgccgggcgcaaatcaatg

SEQ ID NO: 491536 - DNA, 75 bp, synthetic construct
  source 1..75: mol_type = other DNA
tggtcgaggagtgcgaaattcctgctggcggatctctggtcgagtacgttgacgatatgcgcgagaagttggaag

SEQ ID NO: 491537 - DNA, 75 bp, synthetic construct
  source 1..75: mol_type = other DNA
caaacggtaatggcatacaaagtttctgaagtcatcgttgcaatccgcgccgctggcattcgcatcaaaggagag

SEQ ID NO: 491538 - DNA, 75 bp, synthetic construct
  source 1..75: mol_type = other DNA
gtgaggcggcagaacgtgcaactccagcaatggaacgcctgttaatgttgccagttgatgatgatttgttaagtg

SEQ ID NO: 491539 - DNA, 75 bp, synthetic construct
  source 1..75: mol_type = other DNA
tgattaatcgcgatgatcgccagcgtcgccagaccattgtcctcaatgctgaaggtgataatggtgaactgacca

SEQ ID NO: 491540 - DNA, 75 bp, synthetic construct
  source 1..75: mol_type = other DNA
ggttctaaaatgcgtagccctcatctcgttcctttaagccgtcaggcactgatagttttagaggagataaaacag

SEQ ID NO: 491541 - DNA, 75 bp, synthetic construct
  source 1..75: mol_type = other DNA
gcgcgatgccgcaaagaaactggtatctgatggtatcgatccctctcaaaagaaaaaagaggacaagattgaaga

SEQ ID NO: 491542 - DNA, 75 bp, synthetic construct
  source 1..75: mol_type = other DNA
tgcgcaacacgttctgaaaaacaacgctgaatttattgctgcctttaatccaaaggttgctttggcactactgga

SEQ ID NO: 491543 - DNA, 75 bp, synthetic construct
  source 1..75: mol_type = other DNA
atgaatatgatgcgtattttttatatcggattgtcaggtgtggggatgatgttctcatcaatggcgtctggaaat

SEQ ID NO: 491544 - DNA, 75 bp, synthetic construct
  source 1..75: mol_type = other DNA
attctcgcagccagcgccgtatcgctgaataacgcagtggatcaggcagtgattcagagtggcgaaaaacctcaa

SEQ ID NO: 491545 - DNA, 75 bp, synthetic construct
  source 1..75: mol_type = other DNA
ttatcaaaattgctcagcgtattggtattcctctcgcgaccattggtgaagcgtttggtgtgttgcccgaagggc

SEQ ID NO: 491546 - DNA, 75 bp, synthetic construct
  source 1..75: mol_type = other DNA
cgtgtggcgttgtttgcgacccgtatatttgtgttgacttagatggcatttcccctgagttaacaaggaaatatc

SEQ ID NO: 491547 - DNA, 75 bp, synthetic construct
  source 1..75: mol_type = other DNA
agcgaatttacattctctaacggtgtattttgcgatgttaaagaaaaattatgtcgtgatgatcgttattttggt

SEQ ID NO: 491548 - DNA, 75 bp, synthetic construct
  source 1..75: mol_type = other DNA
acaatccagcacaagatatgtctggggcaattacagttgcgaaacgaacccacagaccagccttaccatttgata

SEQ ID NO: 491549 - DNA, 75 bp, synthetic construct
  source 1..75: mol_type = other DNA
acgaagttagccgtaaagctgacattgctcattttcattcgttccagtgaactcagattcgcaagatggtcggag

SEQ ID NO: 491550 - DNA, 75 bp, synthetic construct
  source 1..75: mol_type = other DNA
accaggggtcaaacattcccatcgaggctcaaaaatgaagaccccacacctcgtgccgttaagtcgtcaggcttt

SEQ ID NO: 491551 - DNA, 75 bp, synthetic construct
  source 1..75: mol_type = other DNA
tacccgtccggcgttgacgaaacatacgccgatggcgacccagcgtcagacgcctgctacggcaaaaaagcgtcg

SEQ ID NO: 491552 - DNA, 75 bp, synthetic construct
  source 1..75: mol_type = other DNA
taccagagatcttcttgcccctatcaaggctgttgaagcttctgggcgactggaagttgcttcccgattacagca

SEQ ID NO: 491553 - DNA, 75 bp, synthetic construct
  source 1..75: mol_type = other DNA
catagtttttgcgccaaaataccgaagacaggtgttctacagagagaagcgtagagcagtaggcagtattttgag

SEQ ID NO: 491554 - DNA, 75 bp, synthetic construct
  source 1..75: mol_type = other DNA
acaactttcgtcgcaatggcgagaagagctggatcgccgcatacacaccctggtggcgctgcgtgatgaactgga

SEQ ID NO: 491555 - DNA, 75 bp, synthetic construct
  source 1..75: mol_type = other DNA
ggacaattaataagaagaaaccgacagcaccggaagcagcaaaaactgagaaagcagataccgcagagcagaaat

SEQ ID NO: 491556 - DNA, 75 bp, synthetic construct
  source 1..75: mol_type = other DNA
ggacaattaataagaagaaaccgacaacagcggaagcagaaaaagctgtgaaagctgatacggcagagcagaaat

SEQ ID NO: 491557 - DNA, 75 bp, synthetic construct
  source 1..75: mol_type = other DNA
accacgccgtacatttttgcgattggcagtctgctggacggaaacggaaagaaaattgccacggataacgacacg

SEQ ID NO: 491558 - DNA, 75 bp, synthetic construct
  source 1..75: mol_type = other DNA
gcactgaccattacgatcaccaacaatgacaaggcgcggacttttggtggccaagcttgggtggacaatatcgtg

SEQ ID NO: 491559 - DNA, 75 bp, synthetic construct
  source 1..75: mol_type = other DNA
ggaccatcaaccagaaaaaatcggcaaccccggatgccgcaaaagctgagaaagcagataccacagaacagaagt

SEQ ID NO: 491560 - DNA, 75 bp, synthetic construct
  source 1..75: mol_type = other DNA
cctccctggcagcagaccagacccgttatatttttcgcggggacaaagatgcgttgaccattacggtaaccaaca

SEQ ID NO: 491561 - DNA, 75 bp, synthetic construct
  source 1..75: mol_type = other DNA
gcatttggtgtgttgcctgaagggcatacgttaagcgccaaagagtggaagcagctttcttcacaatggcgagaa

SEQ ID NO: 491562 - DNA, 75 bp, synthetic construct
  source 1..75: mol_type = other DNA
tcgcgtagcgactgcccgttgcgtaacccaggcgatcgcttaggcgaagaaggtactggtgcgcgtttgctggaa

SEQ ID NO: 491563 - DNA, 75 bp, synthetic construct
  source 1..75: mol_type = other DNA
gcgctgcgtgacgaactggacggatgtattggttgtggctgcctttcgcgcagtgattgcccgttgcgtaacccg

SEQ ID NO: 491564 - DNA, 75 bp, synthetic construct
  source 1..75: mol_type = other DNA
ctggttgaacctgcaggatattccgcctgctctggagggaagcggtattgcagtggcgctgcgcacgaagctgaa

SEQ ID NO: 491565 - DNA, 75 bp, synthetic construct
  source 1..75: mol_type = other DNA
gattcgtcggataatttgcctgataaagcagataaagcagataaagcagataaagcagataaagcagataaaaaa

SEQ ID NO: 491566 - DNA, 75 bp, synthetic construct
  source 1..75: mol_type = other DNA
ctacaccaggcgattgtcgatgcaataatccaaagtgatggcgacgctgcatttaaagcttgtcaggcgctgcta

SEQ ID NO: 491567 - DNA, 75 bp, synthetic construct
  source 1..75: mol_type = other DNA
caaggcggttcctgggagttcgtcgaactgtcttgcggtagcggcttcatgtacccactgagcgcagagcgcttc

SEQ ID NO: 491568 - DNA, 75 bp, synthetic construct
  source 1..75: mol_type = other DNA
gtggggactgtacttattgtggtatctggcgatgatgttttgcgccatgctattagcggtcaatgtggtgcatga

SEQ ID NO: 491569 - DNA, 75 bp, synthetic construct
  source 1..75: mol_type = other DNA
atgaacctgtttaatcccgacaggttaatcatttttcctgccgatgatccgcagctggtgaaacagctgcaaaac

SEQ ID NO: 491570 - DNA, 75 bp, synthetic construct
  source 1..75: mol_type = other DNA
tcaaagggggaacctggtttttcacggttaacctacgaaatcgtcgaagccaccttctgaccgctcagttccaga

SEQ ID NO: 491571 - DNA, 75 bp, synthetic construct
  source 1..75: mol_type = other DNA
cgcgtggtcatcgccactaagtttggttttacttttggcgacgacaacaagcagcagattttaaacagccgtccg

SEQ ID NO: 491572 - DNA, 75 bp, synthetic construct
  source 1..75: mol_type = other DNA
cgaagccttaaaaccgtttcgtgaccgcgtggtaattgccactaaattcggttttaccttcggcgatgataataa

SEQ ID NO: 491573 - DNA, 75 bp, synthetic construct
  source 1..75: mol_type = other DNA
atgaacctgtttaatcccgacaggttaatcacttttcctgctgatgatccgcaactggtgaagcagctgcaaagc

SEQ ID NO: 491574 - DNA, 75 bp, synthetic construct
  source 1..75: mol_type = other DNA
aagttaatcgaggcttcctgtcagagctggctgcattgcgcatgaatccattactgatacaaccggagttcacct

SEQ ID NO: 491575 - DNA, 75 bp, synthetic construct
  source 1..75: mol_type = other DNA
tcaaggggggaacatggtttttcacggtaaatttacggaatcgtcgaagccaacttttgaccacccagtaccaga

SEQ ID NO: 491576 - DNA, 75 bp, synthetic construct
  source 1..75: mol_type = other DNA
tcctgaagggaactactcgcggctggcagagctggcccggtgcatcagaggaaaaatgataatttcggtgaacga

SEQ ID NO: 491577 - DNA, 75 bp, synthetic construct
  source 1..75: mol_type = other DNA
cttttggctgacgcatcaaatgggcagtttacggctgaatggctccgtcaagcagctaaccctgaccgaattaaa

SEQ ID NO: 491578 - DNA, 75 bp, synthetic construct
  source 1..75: mol_type = other DNA
tgggtgaggttgatcggagcctcctgctggaactggctgcatcgcgcatgaatccattactgatacaaccggagt

SEQ ID NO: 491579 - DNA, 75 bp, synthetic construct
  source 1..75: mol_type = other DNA
ggcgaaacccgaaaaattccggggatgggtgaggttgatcggagcctcctgctggaactggctgcatcgcgcatg

SEQ ID NO: 491580 - DNA, 75 bp, synthetic construct
  source 1..75: mol_type = other DNA
gtcgtttcactgcaggtagacctgcgatgttgattggcacggcagcaggattaacactggctggtctggtgcttt

SEQ ID NO: 491581 - DNA, 75 bp, synthetic construct
  source 1..75: mol_type = other DNA
atcaatggtctttacaaaacggaggtaatacaccgtaagagctggaaaaaaccggacagaagtgaaactggccac

SEQ ID NO: 491582 - DNA, 75 bp, synthetic construct
  source 1..75: mol_type = other DNA
cattttcacatctttctgctattggtagtgactatttcattacaagcaaagaaaatcatgttgaactaataccaa

SEQ ID NO: 491583 - DNA, 75 bp, synthetic construct
  source 1..75: mol_type = other DNA
tcattaagttttgcgccaacaatattgcacatgttagggattcagtattcaatgaactattttttgggatgttct

SEQ ID NO: 491584 - DNA, 75 bp, synthetic construct
  source 1..75: mol_type = other DNA
tgctcagtgggccatagcagcggatatgccagccagcccggcacccactatcccggtgaaacagtatgtgactta

SEQ ID NO: 491585 - DNA, 75 bp, synthetic construct
  source 1..75: mol_type = other DNA
atcgcccggcgatccgccgaattgcgctgtggtttatcgtactgattgtgctcaatgagatcgcgccggaggtgt

SEQ ID NO: 491586 - DNA, 75 bp, synthetic construct
  source 1..75: mol_type = other DNA
cgtctttacgatcgcttcccaccttatcgcccggcgatccgccgaattgcgctgtggtttatcgtactgattgtg

SEQ ID NO: 491587 - DNA, 75 bp, synthetic construct
  source 1..75: mol_type = other DNA
ataccgatgcatccgggcagggatcgctggtctatgggaaaacatcagatcacgtgcttggcgtacgcgcggtgt

SEQ ID NO: 491588 - DNA, 75 bp, synthetic construct
  source 1..75: mol_type = other DNA
ccgaacggtaaagcgcagcatatcaagggattcctcacacgctttgcgaaaacggcgaaaaaaacggcggatttc

SEQ ID NO: 491589 - DNA, 75 bp, synthetic construct
  source 1..75: mol_type = other DNA
gaaatgatttatggtcctcaagtgattttggtaaggttgaagatgatgaaattgggaaaagggaagtttattaca

SEQ ID NO: 491590 - DNA, 75 bp, synthetic construct
  source 1..75: mol_type = other DNA
ggatatgtgcgatccgcaacaagagattttgatgaagcaaatctctgatgacgtagtggcgcttaccgcgaaata

SEQ ID NO: 491591 - DNA, 75 bp, synthetic construct
  source 1..75: mol_type = other DNA
gtaaccgctgtctggcgaccggatattcctgccgtagccaggtaaaacgggttgaaggcacgggggtacgccatc

SEQ ID NO: 491592 - DNA, 75 bp, synthetic construct
  source 1..75: mol_type = other DNA
tgcgtaccgccggaacatctggccgattatattgctgaatttcgcgcgctgctcgacagccacggcttaagctac

SEQ ID NO: 491593 - DNA, 75 bp, synthetic construct
  source 1..75: mol_type = other DNA
tgggcacctcgtgttcatcgataggaatttaaatccccaaaagactaaaaaagcaccacaaagcggatgtttctt

SEQ ID NO: 491594 - DNA, 75 bp, synthetic construct
  source 1..75: mol_type = other DNA
tgggctggaagtattccggcaatcgccaccacccgacggaaaagcccgttaccagcctgcaaccgctgattgaga

SEQ ID NO: 491595 - DNA, 75 bp, synthetic construct
  source 1..75: mol_type = other DNA
gcattgatgttatggcccgtatccctgataacgccattgatctcatacttaccgacccgccttacctggtggggt

SEQ ID NO: 491596 - DNA, 75 bp, synthetic construct
  source 1..75: mol_type = other DNA
gttgcagtggtgggctgattttctggatgcgaaccgggagaaggggattacgccgtttgactatgcgaagatcaa

SEQ ID NO: 491597 - DNA, 75 bp, synthetic construct
  source 1..75: mol_type = other DNA
catcacccgacggaaaagcccgttaccagcctgcaaccgctgattgagagcttcacacacccgaacgcgattgtg

SEQ ID NO: 491598 - DNA, 75 bp, synthetic construct
  source 1..75: mol_type = other DNA
atgtcccgttttatcctgggtgactgcgtgcgtgttatggccacgtttccggacaatgctgtcgatttcatcctc

SEQ ID NO: 491599 - DNA, 75 bp, synthetic construct
  source 1..75: mol_type = other DNA
tacccgcgatctgttaattcctattaaagccgtagagacatctggacgtcttgaggtggcttcccgccttcaaca

SEQ ID NO: 491600 - DNA, 75 bp, synthetic construct
  source 1..75: mol_type = other DNA
tacacatcgaaggccgcatatgtgggctatcgccacgaatgcgcttacatcctggcaaaagggcgtccggcgctg

SEQ ID NO: 491601 - DNA, 75 bp, synthetic construct
  source 1..75: mol_type = other DNA
tcactgacccgccatatctcgtcggtttacgtgaccgttccgggcgcaccatcgccggcgataaaaccgatgaat

SEQ ID NO: 491602 - DNA, 75 bp, synthetic construct
  source 1..75: mol_type = other DNA
gaccgttccgggcgcaccatcgccggcgataaaaccgatgaatggctgcaaccggcctgtaatgaaatgtaccgc

SEQ ID NO: 491603 - DNA, 75 bp, synthetic construct
  source 1..75: mol_type = other DNA
tcatcacccgacggaaaggcactgttgcaaagttagcgatgaggcagccttttgtcttattcaaaggccttacat

SEQ ID NO: 491604 - DNA, 75 bp, synthetic construct
  source 1..75: mol_type = other DNA
tcccggtgtgaaacattctcagcgaggttcaaagatgcgtacaccgcatctggtgccgctttcaaagcaggcgct

SEQ ID NO: 491605 - DNA, 75 bp, synthetic construct
  source 1..75: mol_type = other DNA
tccgtgaccgtcaggggcgtaccatcgccggcgataaaaccgatgaatggctgcaaccggcctgtaatgaaatgt

SEQ ID NO: 491606 - DNA, 75 bp, synthetic construct
  source 1..75: mol_type = other DNA
acttcacacacccgaacgcaattgtgctggacccgtttgcaggcagcggctcaacctgcgtcgccgccctccagt

SEQ ID NO: 491607 - DNA, 75 bp, synthetic construct
  source 1..75: mol_type = other DNA
gaccgctttatggcggcctggatacgcgccggattcagcgtggcagggcacctcgtgttcatcgataggaattta

SEQ ID NO: 491608 - DNA, 75 bp, synthetic construct
  source 1..75: mol_type = other DNA
gctagacccgtttgcaggcagcggctcaacctgcgtggccgccctccagtccggacgccggtatatcggtatcga

SEQ ID NO: 491609 - DNA, 75 bp, synthetic construct
  source 1..75: mol_type = other DNA
ctgcaacccgcctgccatgagatgtatcgcgtgttgaaaaaagacacgctgatggtgagcttctacggctggaac

SEQ ID NO: 491610 - DNA, 75 bp, synthetic construct
  source 1..75: mol_type = other DNA
cgccttgccgccgtgcagcgggccatgcagcagggggccgcgaatgataactggtttgaaccggaggctgcgtaa

SEQ ID NO: 491611 - DNA, 75 bp, synthetic construct
  source 1..75: mol_type = other DNA
gctgcttgagcagtatcaccgtgccgggcagcaacgccttgccgccgtgcagcgggccatgcagcagggggccgc

SEQ ID NO: 491612 - DNA, 75 bp, synthetic construct
  source 1..75: mol_type = other DNA
atgtcccgttttatccagggtaactgcgtgcgtgttatggccacgtttccgggcaatgctgtcgatttcatcctt

SEQ ID NO: 491613 - DNA, 75 bp, synthetic construct
  source 1..75: mol_type = other DNA
accgcgtactcaaaaaagacgcgctgttggtcagcttctacggctggaaccgtattgaccgctttatggcggcct

SEQ ID NO: 491614 - DNA, 75 bp, synthetic construct
  source 1..75: mol_type = other DNA
ggaaacgcgccggattcagcgtggtagggcaccttgtgttcaccaaaaactacacatccaaatctgcgtatgtcg

SEQ ID NO: 491615 - DNA, 75 bp, synthetic construct
  source 1..75: mol_type = other DNA
gggcagcaacgccttgccgccgtgcaacggaccatgcagcagggggccgcgaatgataactggtttgaaccggag

SEQ ID NO: 491616 - DNA, 75 bp, synthetic construct
  source 1..75: mol_type = other DNA
tccgtgaccgttccgggcgcaccattgccggcgacgttaacgatgactggctgcaacctgccagtaatgagatgt

SEQ ID NO: 491617 - DNA, 75 bp, synthetic construct
  source 1..75: mol_type = other DNA
tgataacgccattgatttcatattaaccgacccgccttacctggtgggcttccgtgaccgttccggacgcaccat

SEQ ID NO: 491618 - DNA, 75 bp, synthetic construct
  source 1..75: mol_type = other DNA
tcacagacccgccatatctcgtcggttttcgtgaccgttccgggcgcaccatcgccggcgataaaaccgatgaat

SEQ ID NO: 491619 - DNA, 75 bp, synthetic construct
  source 1..75: mol_type = other DNA
gtgaaaacgggggctgaagccatccgggcgctggacacgcagcttccgtcgtttcgccaggaactgaatgagggc

SEQ ID NO: 491620 - DNA, 75 bp, synthetic construct
  source 1..75: mol_type = other DNA
attgccgggcgtgatgcaggtgaaaccgaattgtctgcccgtcttaatgagccgctggcaaatggtgccgtgatc

SEQ ID NO: 491621 - DNA, 75 bp, synthetic construct
  source 1..75: mol_type = other DNA
ctgcctttacggggatttccaacgatttggccgccgcatcgagcttcgtgtgaaaacgggggcagaagccatccg

SEQ ID NO: 491622 - DNA, 75 bp, synthetic construct
  source 1..75: mol_type = other DNA
gtgctaacgaagcggcgctgaaaatgctggaagaaatcagctccgttaaacacattccggaatttgttcgtcgtg

SEQ ID NO: 491623 - DNA, 75 bp, synthetic construct
  source 1..75: mol_type = other DNA
atgatgttctccaccccgtgcgaaccgtatgaagttaatccaattctggaacgtgcaatggatcgtattctgatc

SEQ ID NO: 491624 - DNA, 75 bp, synthetic construct
  source 1..75: mol_type = other DNA
ctgtatggtgaaatgcgcgtggggtcgcgggtggtttctcaggaagtcagtacagctgatgagggtgatggcggc

SEQ ID NO: 491625 - DNA, 75 bp, synthetic construct
  source 1..75: mol_type = other DNA
aactccccgcacacagacaacggataacggcaaacagaacacctatttttcttcactggataatatggttgccca

SEQ ID NO: 491626 - DNA, 75 bp, synthetic construct
  source 1..75: mol_type = other DNA
ggcgcagccctgagtgccggagggctgactgccaccacgatgctgttctcactgggtgccagcatgatactgggc

SEQ ID NO: 491627 - DNA, 75 bp, synthetic construct
  source 1..75: mol_type = other DNA
tggcgtcaccgggcatggcacgcatctgcctttacggggattttcaacgatttggccgccgcatcgaccttcgcg

SEQ ID NO: 491628 - DNA, 75 bp, synthetic construct
  source 1..75: mol_type = other DNA
ttaccgacccgccatatctcgtcggtttccgtgaccgttccgggcgcaccatcgccggcgataaaaccgatgaat

SEQ ID NO: 491629 - DNA, 75 bp, synthetic construct
  source 1..75: mol_type = other DNA
gccagtatgacgcttggcggtgtggcccagatgctggcccccagacccaaaactccccgaacacagacaacgaat

SEQ ID NO: 491630 - DNA, 75 bp, synthetic construct
  source 1..75: mol_type = other DNA
cgcacacagacaacggataacggcaaacagaacacctatttttcttcactggataatatggttgcccagggcaat

SEQ ID NO: 491631 - DNA, 75 bp, synthetic construct
  source 1..75: mol_type = other DNA
tcacgacggatatcccaggacatcagtacccgtgatgagggcggagacgggaaagtggtggttatcgggcgggga

SEQ ID NO: 491632 - DNA, 75 bp, synthetic construct
  source 1..75: mol_type = other DNA
gttgcagtggtgggcggattttttggatgccaatcgggagaaggggattagtccgtttgattttgctaagcaagc

SEQ ID NO: 491633 - DNA, 75 bp, synthetic construct
  source 1..75: mol_type = other DNA
cgtcagaaactgagcgacggctggtatcaggtacggattgccgggcgtgatacaggtgaaacggaattatcagcc

SEQ ID NO: 491634 - DNA, 75 bp, synthetic construct
  source 1..75: mol_type = other DNA
ggtgaactgcgcgtggggtcacgtgtggtctctcaggagatcagcacggcagatgaaggggatggtggtcaggtt

SEQ ID NO: 491635 - DNA, 75 bp, synthetic construct
  source 1..75: mol_type = other DNA
tgatcgacgaattcggtcgtaccaaagaaagctacaaagtaccttacggtgcggtactagcgaaaggcgatggcg

SEQ ID NO: 491636 - DNA, 75 bp, synthetic construct
  source 1..75: mol_type = other DNA
gggatatcctggacgaagtgatccgcgaacacccggtactgctgaaccgtgcaccgactctgcaccgtctgggta

SEQ ID NO: 491637 - DNA, 75 bp, synthetic construct
  source 1..75: mol_type = other DNA
acgtaacgaaaaacgtatgctgcaggaagcggtagacgccctgctggataatggtcgtcgcggtcgtgcaatcac

SEQ ID NO: 491638 - DNA, 75 bp, synthetic construct
  source 1..75: mol_type = other DNA
cggataccgcactgaaaacggcgaactccggttacttgactcgtcgtctggttgacgtggcgcaggacctggtgg

SEQ ID NO: 491639 - DNA, 75 bp, synthetic construct
  source 1..75: mol_type = other DNA
ctgccgggtaaagcgattgttcagctggaagatggtgtacagatcagctctggtgacaccctggcgcgtattccg

SEQ ID NO: 491640 - DNA, 75 bp, synthetic construct
  source 1..75: mol_type = other DNA
atcctatgtggttattgaaggcggtatgaccaacctggagcgtcagcagatcctgactgaagagcagtatctgga

SEQ ID NO: 491641 - DNA, 75 bp, synthetic construct
  source 1..75: mol_type = other DNA
gaaatcgctgccgtcccgtatcggtctgctgctcgatatgccgctgcgcgatatcgaacgcgtactgtactttga

SEQ ID NO: 491642 - DNA, 75 bp, synthetic construct
  source 1..75: mol_type = other DNA
tcctggacgctgatgtccacactcttatccatcagtgggctgatttttattctgctcgccagcttagttttataa

SEQ ID NO: 491643 - DNA, 75 bp, synthetic construct
  source 1..75: mol_type = other DNA
tggcgctgatgtaggattggtactgatatacggtatcattgtcggcattccaacctttattctttgcggcccggt

SEQ ID NO: 491644 - DNA, 75 bp, synthetic construct
  source 1..75: mol_type = other DNA
cgcgctggaagagttcggtgacgaattcgacgcgaagatgggggcggaagcaatccaggctctgctgaagagcat

SEQ ID NO: 491645 - DNA, 75 bp, synthetic construct
  source 1..75: mol_type = other DNA
gtggttctgcggcacagattcgtcagcttgctggtatgcgtggtctgatggcgaagccggatggctcgatcatcg

SEQ ID NO: 491646 - DNA, 75 bp, synthetic construct
  source 1..75: mol_type = other DNA
ctgttcaaacctttcatctacggcaagctggaactgcgtggtcttgctaccaccatcaaagctgcgaagaaaatg

SEQ ID NO: 491647 - DNA, 75 bp, synthetic construct
  source 1..75: mol_type = other DNA
aaactttacgctaaataataatggaagtgtttggggaggagatggatataatggtggaattgctgttagtggcaa

SEQ ID NO: 491648 - DNA, 75 bp, synthetic construct
  source 1..75: mol_type = other DNA
gaacgcagattcaccggtgatgctcggcagtaaccaggtcattgttgaagagcagggcaaactctccgggtttgg

SEQ ID NO: 491649 - DNA, 75 bp, synthetic construct
  source 1..75: mol_type = other DNA
actggcagaaatggacttattctcctccagacagaaacaggtggtgacaattcgaaaacagatcgtctggtgatt

SEQ ID NO: 491650 - DNA, 75 bp, synthetic construct
  source 1..75: mol_type = other DNA
gataatggtgaactgaccaatgatatttcaaggttaaatacacatattgcgctggctcctgttcagcagacaccg

SEQ ID NO: 491651 - DNA, 75 bp, synthetic construct
  source 1..75: mol_type = other DNA
gtcgcggaggtgaatgccgagctggaaaacgtggaggccagctggaaagcaaaaggccacacgctggcagcagat

SEQ ID NO: 491652 - DNA, 75 bp, synthetic construct
  source 1..75: mol_type = other DNA
gacggctgcaggctctgtgctgaacattcatggcggaagcctgatactgaataatggaggagaatctgcaggtac

SEQ ID NO: 491653 - DNA, 75 bp, synthetic construct
  source 1..75: mol_type = other DNA
cgttatttttgcggaccagatcatgtataccggctttgcctatgcagcgcgttctggtgcatctgttggtatcga

SEQ ID NO: 491654 - DNA, 75 bp, synthetic construct
  source 1..75: mol_type = other DNA
agcgtatttatcgcgctggcctggcctctctgcatgcgcgcgtcaaagtgcgtatcactgaatacgaaaaagatg

SEQ ID NO: 491655 - DNA, 75 bp, synthetic construct
  source 1..75: mol_type = other DNA
atcctatgtggttatcgaaggcggtatgaccaatctggagcgtcagcagatcctgactgaagaacagtatctgga

SEQ ID NO: 491656 - DNA, 75 bp, synthetic construct
  source 1..75: mol_type = other DNA
gtcgtcagacacaggtatctcgatcgctgataatagtcacattgtacaatacaatgtattactgacagaaggtgc

SEQ ID NO: 491657 - DNA, 75 bp, synthetic construct
  source 1..75: mol_type = other DNA
agtggcgagcgcgattttgttttcattggcgatcacgaccatcgtaaaccgatgagtgagaacacggtgaacaag

SEQ ID NO: 491658 - DNA, 75 bp, synthetic construct
  source 1..75: mol_type = other DNA
ggcgaaagagattattactttcgagaaggttgccagagagtggctcgtgaccaaccaaaaatggtcggaagatca

SEQ ID NO: 491659 - DNA, 75 bp, synthetic construct
  source 1..75: mol_type = other DNA
gaatccggacttggcggtacgctgggccatattggtttgatatttggcttcggtgttatgctcggtcgcttgctg

SEQ ID NO: 491660 - DNA, 75 bp, synthetic construct
  source 1..75: mol_type = other DNA
tccgtgaccgttccgggcgcaccattgccggtgatgttaatgatgactggctgcaacctgccagcaatgagatgt

SEQ ID NO: 491661 - DNA, 75 bp, synthetic construct
  source 1..75: mol_type = other DNA
ttgggtaacgatttcggatgtcaaagctaataatgtcaaagtcaattatgaaactattatgattgcccccttaga

SEQ ID NO: 491662 - DNA, 75 bp, synthetic construct
  source 1..75: mol_type = other DNA
acccgacggaaaagcccgttaccagcctgcaaccgctgattgagagcttcacacacccgaacgcgattgtgctgg

SEQ ID NO: 491663 - DNA, 75 bp, synthetic construct
  source 1..75: mol_type = other DNA
ggcggtggctactgcccggactgcggacctgtaacggaagatgcaacttacagcgcgatgttaatcaccgccagt

SEQ ID NO: 491664 - DNA, 75 bp, synthetic construct
  source 1..75: mol_type = other DNA
acagtgcaacgcctgcggtcactatggcggtggctactgcccggactgcggacctgtgacgggagatgcaactta

SEQ ID NO: 491665 - DNA, 75 bp, synthetic construct
  source 1..75: mol_type = other DNA
tgcggtatccttcttgtatctatgagacagcaggcaagtcaaggtcagatatatgtgaatagtggatctgctaaa

SEQ ID NO: 491666 - DNA, 75 bp, synthetic construct
  source 1..75: mol_type = other DNA
ctgcaaccgctgattgagagcttcacacacccgaacgcaattgtgctggacccgtttgcaggcagcggctcaacc

SEQ ID NO: 491667 - DNA, 75 bp, synthetic construct
  source 1..75: mol_type = other DNA
ttcaccaaaaactacacatcgaaggccgcatatgtgggctatcgccacgaatgtgcctacatcctggcaaaaggc

SEQ ID NO: 491668 - DNA, 75 bp, synthetic construct
  source 1..75: mol_type = other DNA
tccgtgaccgttccgggcgcaccatcgccggcgataaaaccgatgagtggctgcaaccggcctgtaatgaaatgt

SEQ ID NO: 491669 - DNA, 75 bp, synthetic construct
  source 1..75: mol_type = other DNA
gcaacgactggccgccgtgcaacgggccatgcagcagggggccgcgaatgataactggtttgaaccggaggctgc

SEQ ID NO: 491670 - DNA, 75 bp, synthetic construct
  source 1..75: mol_type = other DNA
cctggcaaaaggccgtccacgtctgccacaaaaaccgctgccggacgtgctgggctggaaatattcaggcaatcg

SEQ ID NO: 491671 - DNA, 75 bp, synthetic construct
  source 1..75: mol_type = other DNA
gcgtgcgtgttatggccacgattcctgataacgccattgatttcatcttaaccgacccaccatatctcgttggtt

SEQ ID NO: 491672 - DNA, 75 bp, synthetic construct
  source 1..75: mol_type = other DNA
gcggtttgttgttaccgtttagcgctaatgcgggtcgaataacgatgagcaacccggaacagtcaattacgaaga

SEQ ID NO: 491673 - DNA, 75 bp, synthetic construct
  source 1..75: mol_type = other DNA
ctcctgcgccgggtgggcgcatgtcaaaactacaggctttttttggtacactgtatagctatctacattacatgt

SEQ ID NO: 491674 - DNA, 75 bp, synthetic construct
  source 1..75: mol_type = other DNA
cgttcagacgtttttgtgcctgtttagcgccatcagtaccagggtatttactgataacctgctggtatacggctt

SEQ ID NO: 491675 - DNA, 75 bp, synthetic construct
  source 1..75: mol_type = other DNA
gcctcttttttattctaaaaaatatgatgcttatattatcgaaagctataacggaaaatttgtcttggggaactg

SEQ ID NO: 491676 - DNA, 75 bp, synthetic construct
  source 1..75: mol_type = other DNA
tggttaccgttaacggcacagtttgagggacaactgaacagcctgtcggcgtggcagccggggatgagtgcgccc

SEQ ID NO: 491677 - DNA, 75 bp, synthetic construct
  source 1..75: mol_type = other DNA
cgatataacaccaattcaattaaatgataattttcacattgttcccggaagccttgggctatataaaattgaaat

SEQ ID NO: 491678 - DNA, 75 bp, synthetic construct
  source 1..75: mol_type = other DNA
tgttcatatgctcaggggaaaatcagaagagtatctattaaattgatggccataacgcttttttcttttttttaa

SEQ ID NO: 491679 - DNA, 75 bp, synthetic construct
  source 1..75: mol_type = other DNA
ctttttccagctctgccagttgctgcgtatggagtgcggtaaagacggacgttctgtccagcctatcaaccccac

SEQ ID NO: 491680 - DNA, 75 bp, synthetic construct
  source 1..75: mol_type = other DNA
ttcccctgtcagcgcgcctgaacatctttttccagctctgccagttgctgcgtatggagtgcggtaaagacggac

SEQ ID NO: 491681 - DNA, 75 bp, synthetic construct
  source 1..75: mol_type = other DNA
atctatctgttcacctacgtcaccaaaggaaaatgtccatataccaaaacctttcaaaccgatgatgcagagtaa

SEQ ID NO: 491682 - DNA, 75 bp, synthetic construct
  source 1..75: mol_type = other DNA
cacaggcgaaagcgtttgtaaacgacttaagaacgaaaggaagcgcccgcgtcccggccctgaagctggagcact

SEQ ID NO: 491683 - DNA, 75 bp, synthetic construct
  source 1..75: mol_type = other DNA
atggcttatcaatctcaagatatcattcgtcgttccgcgactaacggtctgaccccccccccccccccccccccc

SEQ ID NO: 491684 - DNA, 75 bp, synthetic construct
  source 1..75: mol_type = other DNA
acctgggccaggacatgattgtatccctgatgaatccgcagcccagtccggtgatctgtaataccctggacagcg

SEQ ID NO: 491685 - DNA, 75 bp, synthetic construct
  source 1..75: mol_type = other DNA
tgccgaaagacaaggagtcggtgtactggctgaacctgcaggatattccgccggctctggagggaagtggtattg

SEQ ID NO: 491686 - DNA, 75 bp, synthetic construct
  source 1..75: mol_type = other DNA
actggcgtgcagcaacaaatccgccaggctttgtcggcgctgccgttgccggtaaaccgactggaagagtttgat

SEQ ID NO: 491687 - DNA, 75 bp, synthetic construct
  source 1..75: mol_type = other DNA
gcgtctgcacggcaccgaatggggcgagacgcagcgtttttaccatcatcttgatgctcactggcggcggtggag

SEQ ID NO: 491688 - DNA, 75 bp, synthetic construct
  source 1..75: mol_type = other DNA
cgatatatactcgcctgttggatcgcgcggtacgtattctggcggtacgtgatcacagtgagcaggaactgcgcc

SEQ ID NO: 491689 - DNA, 75 bp, synthetic construct
  source 1..75: mol_type = other DNA
cgcctcgatcgctgggtaagtctgatgcggatgcacggtggtgcacaggcagaaatgattgccagtgcacccgaa

SEQ ID NO: 491690 - DNA, 75 bp, synthetic construct
  source 1..75: mol_type = other DNA
agtggtcggtaccagaaggtaatttctgggacgatgaaaaattgcaacgtcgtctcgcatctcgtcttgatcgtt

SEQ ID NO: 491691 - DNA, 75 bp, synthetic construct
  source 1..75: mol_type = other DNA
agtcagcaaactggagaatgagaccgcagctcgccatgaactctttattaatgagtggcgcaagcaatgtagtga

SEQ ID NO: 491692 - DNA, 75 bp, synthetic construct
  source 1..75: mol_type = other DNA
atgacatttgttcatacgatgctgctttatttctgcacggcggtatgtgcgttatatctggtgagcagtggatat

SEQ ID NO: 491693 - DNA, 75 bp, synthetic construct
  source 1..75: mol_type = other DNA
gcaaaattgatgacgcagcaactgaaaaactcagtaaaacagcgcaggcagctccgctcccaaaagacccgaccc

SEQ ID NO: 491694 - DNA, 75 bp, synthetic construct
  source 1..75: mol_type = other DNA
ccgccgtaacattgatgatgaggcagccgacaaactcagtaaaaccgcacaggccccgacatcgccacacgaccc

SEQ ID NO: 491695 - DNA, 75 bp, synthetic construct
  source 1..75: mol_type = other DNA
cgcggtacgcattctggcggtacgcgatcacagtgagcaagaattgcgacgtaaactcgcagcaccgattatggg

SEQ ID NO: 491696 - DNA, 75 bp, synthetic construct
  source 1..75: mol_type = other DNA
atggctctgagtgatgtgaaggttcgttcggctaagcctgaagaaaaagcctataagcttactgatggcgatggc

SEQ ID NO: 491697 - DNA, 75 bp, synthetic construct
  source 1..75: mol_type = other DNA
cgattccgggggagcgtgagccattggacggtgttaaacattcgcagcgtggttcaaagatgcggacgccccatc

SEQ ID NO: 491698 - DNA, 75 bp, synthetic construct
  source 1..75: mol_type = other DNA
tggcgcgtggtgaagcgtcccctgagcaaattttattgctggcgtttggtcgcaaagccgctgaagagatggacg

SEQ ID NO: 491699 - DNA, 75 bp, synthetic construct
  source 1..75: mol_type = other DNA
atacccactctatatttttgctgttttagctgaaatgttgatccaatactataatggtggaaacattccacctct

SEQ ID NO: 491700 - DNA, 75 bp, synthetic construct
  source 1..75: mol_type = other DNA
gacgagttgaatattgactgtcgtattcgttccgtcccctacccaatgctggatatgatcgcccgcagcatggag

SEQ ID NO: 491701 - DNA, 75 bp, synthetic construct
  source 1..75: mol_type = other DNA
tggttgatattgtggcgcatggtgagttgggcggcgacttttcgttagtgcctgacagctacgtgacgatggggc

SEQ ID NO: 491702 - DNA, 75 bp, synthetic construct
  source 1..75: mol_type = other DNA
aggcggctaattcagatattcgcgtatctgatgttacgcccctgacaaaatcccttcaagcaccaaagcgcacac

SEQ ID NO: 491703 - DNA, 75 bp, synthetic construct
  source 1..75: mol_type = other DNA
aggtgaaagaattagcggctaagagaaccgatgaagaacggttaaaattattagtggacgctaagatactgacta

SEQ ID NO: 491704 - DNA, 75 bp, synthetic construct
  source 1..75: mol_type = other DNA
cgctgttcaacaaaaacaatccttcaccctttgtggaaatattgaaaaatctggatgtgccggtggcgagaaaac

SEQ ID NO: 491705 - DNA, 75 bp, synthetic construct
  source 1..75: mol_type = other DNA
tgactggcaggcgatttatcgcttcagcggtgcacaaatgtcgctcaccaccgctttccatgaaaactttggtga

SEQ ID NO: 491706 - DNA, 75 bp, synthetic construct
  source 1..75: mol_type = other DNA
ctggataagctctctggttatgccaaaccggaagagcgcattctgatcctggcgcgttaccatcacatgaggcct

SEQ ID NO: 491707 - DNA, 75 bp, synthetic construct
  source 1..75: mol_type = other DNA
atttaggtattacaattgcgccaacgccttggtttgagagagaagaacttaatagttttgatccatgcccagaga

SEQ ID NO: 491708 - DNA, 75 bp, synthetic construct
  source 1..75: mol_type = other DNA
gcggagattatgtatcgaacgtcgatgcgttaaaagtacatgggttgtgtactgaaagatattatattgacagca

SEQ ID NO: 491709 - DNA, 75 bp, synthetic construct
  source 1..75: mol_type = other DNA
gtcagagcaatactcaaagaagataaatggcagcatgaaaggaagtgtggagtttataggtttttggcaaaatga

SEQ ID NO: 491710 - DNA, 75 bp, synthetic construct
  source 1..75: mol_type = other DNA
gttatatctggtgagtggtggttataaggccatcagaaattatgttcgccgcaaaattgaggacgcagcagctga

SEQ ID NO: 491711 - DNA, 75 bp, synthetic construct
  source 1..75: mol_type = other DNA
caaagacttctctcctgatgaaatagataaatcctcaaatgttaataacggctggttggccaggacattatttgg

SEQ ID NO: 491712 - DNA, 75 bp, synthetic construct
  source 1..75: mol_type = other DNA
ttggccaaaatatttcaagagtcacaacggggaaaaaaccgtatgatttattattcctgaataatgctacaaaac

SEQ ID NO: 491713 - DNA, 75 bp, synthetic construct
  source 1..75: mol_type = other DNA
gaagtggcaaccgggctttttgggcatctggttggggcgatagcgggtggatcggtttaccgtaaatccaccttc

SEQ ID NO: 491714 - DNA, 75 bp, synthetic construct
  source 1..75: mol_type = other DNA
aagatccatgcggcgctgagcagggtttctccggtcgtgaagtgatggctgagtttcgacgggcgaccggcctgc

SEQ ID NO: 491715 - DNA, 75 bp, synthetic construct
  source 1..75: mol_type = other DNA
tggcggtgcgcgtaacgacgcgggcccgatgcagtacctgatccccggctggacctttgaccgtaaacgtcccgt

SEQ ID NO: 491716 - DNA, 75 bp, synthetic construct
  source 1..75: mol_type = other DNA
tagttgtatgtgacagtcatacggtcaagcgatatcaggggtacgcagtattaaccgctccattcagacaagtat

SEQ ID NO: 491717 - DNA, 75 bp, synthetic construct
  source 1..75: mol_type = other DNA
atgtaccagagcatggtaaaccaacaacgcatctacgctccacaactgtgcctgcaacacctgaacatactgtaa

SEQ ID NO: 491718 - DNA, 75 bp, synthetic construct
  source 1..75: mol_type = other DNA
ttggccaaaatgtttcaagagtcacaacggggaaaaaaccgtatgatttattattcctgaatgatgctacaaaac

SEQ ID NO: 491719 - DNA, 75 bp, synthetic construct
  source 1..75: mol_type = other DNA
atgacgctgccggggaagcgtttgataagaccgcgaagctgctggggctggattatccaggcgggccgttactgt

SEQ ID NO: 491720 - DNA, 75 bp, synthetic construct
  source 1..75: mol_type = other DNA
agagcatccgcatttgctgaaagggctggcctccacgccattcgatagcgaaggtgtgcgcaccgagcgccgcga

SEQ ID NO: 491721 - DNA, 75 bp, synthetic construct
  source 1..75: mol_type = other DNA
acggtgcggaagttgccgtcagcaagaccaccggcattagcgttagcacgcgctatggtgaagtggagaatgtcg

SEQ ID NO: 491722 - DNA, 75 bp, synthetic construct
  source 1..75: mol_type = other DNA
ttttaccgttatggagatgaaaagtatgctaccaaaggatttaacaccaggaagatatgacaaaatttatctgat

SEQ ID NO: 491723 - DNA, 75 bp, synthetic construct
  source 1..75: mol_type = other DNA
gtcagttgctcgatgagattgataacgtcgacctgcaggtgaccaatctggcagccagttctggcggttcagagc

SEQ ID NO: 491724 - DNA, 75 bp, synthetic construct
  source 1..75: mol_type = other DNA
ccagcgccgagcaacacaataacagcattaatcatatctacccgcgcatcgcccgtgtgcgcagtgtggaagaga

SEQ ID NO: 491725 - DNA, 75 bp, synthetic construct
  source 1..75: mol_type = other DNA
gtgttgagtccaccgcccgtaacgcgtgggagttagggtttaatctggtgatcgctgaagacgcctgtagcgccg

SEQ ID NO: 491726 - DNA, 75 bp, synthetic construct
  source 1..75: mol_type = other DNA
aataacagcatcaaccatatctacccacgcatcgcccgtgtgcgtagcgtggaagagatccttcacgcgttatga

SEQ ID NO: 491727 - DNA, 75 bp, synthetic construct
  source 1..75: mol_type = other DNA
attgccgaagacgcctgtagtgcagccagcaccgaacagcacaataacagcatcaaccatatctacccgcgcatt

SEQ ID NO: 491728 - DNA, 75 bp, synthetic construct
  source 1..75: mol_type = other DNA
gactgacagcgatatcgaaataataaaacgccaatggggagcgttttatggtacggatctggagttgcaattacg

SEQ ID NO: 491729 - DNA, 75 bp, synthetic construct
  source 1..75: mol_type = other DNA
atgcttgaacttaatgctaaaaccaccgcgctggtggtgatcgatttacaagaaggcatcttaccttttgccggt

SEQ ID NO: 491730 - DNA, 75 bp, synthetic construct
  source 1..75: mol_type = other DNA
caggtggattacaccatagatgcccagatcaccatctaccgcaatcaggatgccaactcggtaaaagacgaggca

SEQ ID NO: 491731 - DNA, 75 bp, synthetic construct
  source 1..75: mol_type = other DNA
tgcaactggtcaatgcccctgccacctgtactgagccgggtacctctggcaacggctggcaaccggctcaggtca

SEQ ID NO: 491732 - DNA, 75 bp, synthetic construct
  source 1..75: mol_type = other DNA
atcaggtcgaactggtgacaccagtgctgaaggtagtggcagaaaacgaatggtcaaactgtacggcgatcactc

SEQ ID NO: 491733 - DNA, 75 bp, synthetic construct
  source 1..75: mol_type = other DNA
atgacatttatacagcttattttattatatttctgcacggtagtctgtgcgttatatctggtgagcggcgggtat

SEQ ID NO: 491734 - DNA, 75 bp, synthetic construct
  source 1..75: mol_type = other DNA
gcggccagttctggcggttctgagcaggaagacaatgacaggctccgcgagcgtatcaaactggccccggagtca

SEQ ID NO: 491735 - DNA, 75 bp, synthetic construct
  source 1..75: mol_type = other DNA
tcgagctgtatccgctgctcagcactggtctgccggacagcggtatcctcactctggtagagagtttctgttctg

SEQ ID NO: 491736 - DNA, 75 bp, synthetic construct
  source 1..75: mol_type = other DNA
aactctatatgacgcaggacgaaaaggaacgccgggagcaccagccttgggtaatggcgcgtcaacttttcaata

SEQ ID NO: 491737 - DNA, 75 bp, synthetic construct
  source 1..75: mol_type = other DNA
gcagtagagtttggtgacgtcgttatcagccaaattgatggtacgaattaccggttgcccgcaaaattcaccctg

SEQ ID NO: 491738 - DNA, 75 bp, synthetic construct
  source 1..75: mol_type = other DNA
atgggtaattaacggtgaaacggtactgcgcaccgatatcacagcattgggtatccggatagaaaatgctgccga

SEQ ID NO: 491739 - DNA, 75 bp, synthetic construct
  source 1..75: mol_type = other DNA
atcctacgtaactgcgccacccaattcatctcctgccaggacagcgttgccgcattaggtatgcgcgtgctgggt

SEQ ID NO: 491740 - DNA, 75 bp, synthetic construct
  source 1..75: mol_type = other DNA
gggaagtcgtacaagataccgcctgggaaggctataccaaaatcccaacctggatcatgcagggctacgccacat

SEQ ID NO: 491741 - DNA, 75 bp, synthetic construct
  source 1..75: mol_type = other DNA
aatcccaacctggatcatgcaaggctacgcaaccctggcagatgaagccgtcgagcaaatgcgtgaaatgggcgt

SEQ ID NO: 491742 - DNA, 75 bp, synthetic construct
  source 1..75: mol_type = other DNA
agagtgggtgaaggtaactggactcctttcaacttttaccagtcgcccaatctcaaagcagtgccggttaaacag

SEQ ID NO: 491743 - DNA, 75 bp, synthetic construct
  source 1..75: mol_type = other DNA
aactgaaggctgtgccggtaaaacagaagggcgtgcagctcgcgccaacggaatttaacgccagtatgaccatgg

SEQ ID NO: 491744 - DNA, 75 bp, synthetic construct
  source 1..75: mol_type = other DNA
gcaacaattaccgccagaacgcgggctataccctcgattgttcggggcgtctggcagacgatctgcggatgcaac

SEQ ID NO: 491745 - DNA, 75 bp, synthetic construct
  source 1..75: mol_type = other DNA
cccggtgaagcagagcggggtggaactgatggcatcggagtttaacgcgaccatgactatggtggtggactacca

SEQ ID NO: 491746 - DNA, 75 bp, synthetic construct
  source 1..75: mol_type = other DNA
cgctggaagcggttccggtgaaacagagcggcacgtcgttaacggcggcggaatttagcgccagcgccaccattg

SEQ ID NO: 491747 - DNA, 75 bp, synthetic construct
  source 1..75: mol_type = other DNA
gttgagtttggtaatgtattcattaataagatcgatggggtgagttataaccgtcccattgactactcgcttgtt

SEQ ID NO: 491748 - DNA, 75 bp, synthetic construct
  source 1..75: mol_type = other DNA
taaagaaaattctcgttaaggacgaatcaaaacgcttcggtctgaacgccttcaaaatgctcggcggcgcatacg

SEQ ID NO: 491749 - DNA, 75 bp, synthetic construct
  source 1..75: mol_type = other DNA
cggtgatgattgcatcgccaagcgatgtagccgaagaaaggaatgttattcgtgaattgattcacgaatggaacg

SEQ ID NO: 491750 - DNA, 75 bp, synthetic construct
  source 1..75: mol_type = other DNA
cgaatacaagtcaatctttgccagaaagtaatttgtccgccgatgcactcagtttgctgaaattagcatgtgtcg

SEQ ID NO: 491751 - DNA, 75 bp, synthetic construct
  source 1..75: mol_type = other DNA
ctacgtcctcgttcagatggtgatgaacgacgcgagctggcacttggtgcgcagcgtaccgcgtgtgatgggctt

SEQ ID NO: 491752 - DNA, 75 bp, synthetic construct
  source 1..75: mol_type = other DNA
tcgcctgaactgcgggagcatttacagtatcagattgacagtatgggcatgcatgatgatgtttttattgctgac

SEQ ID NO: 491753 - DNA, 75 bp, synthetic construct
  source 1..75: mol_type = other DNA
cgtgaatggctggaagcgagagcacctcatccggtcattgttcagatcggaatgttacgtccggagaaaggcctg

SEQ ID NO: 491754 - DNA, 75 bp, synthetic construct
  source 1..75: mol_type = other DNA
cacgcctgggctgcatcagcagacaatgttccgcttatcgttcaggtggggatgctacgtcccgaaaaaggacat

SEQ ID NO: 491755 - DNA, 75 bp, synthetic construct
  source 1..75: mol_type = other DNA
tggcggatgaagccgttgagcaaatgcgtgaaatggatgtaacgccgactcatgttctgctgcaagccggcgtcg

SEQ ID NO: 491756 - DNA, 75 bp, synthetic construct
  source 1..75: mol_type = other DNA
ccatcgcccagttactgtgcgaaaaatatcatcttgatatcgaaacgctatcatttgagcatttgaaaaatgcta

SEQ ID NO: 491757 - DNA, 75 bp, synthetic construct
  source 1..75: mol_type = other DNA
ttatctggtcgacgtctacagcccgcaaaatctgcacagcattattgttgaacctgacaaagctgactgtattta

SEQ ID NO: 491758 - DNA, 75 bp, synthetic construct
  source 1..75: mol_type = other DNA
tgcgcttaaaggctatcgctgtgtctaagtattcgtctgttttgattgatgacagtacacgcccacgtagatttc

SEQ ID NO: 491759 - DNA, 75 bp, synthetic construct
  source 1..75: mol_type = other DNA
atatcatcttgatatcgaaacactgtcatttgaacacctgaaaaaggctatcggcgaaaaaatgaccttcgccac

SEQ ID NO: 491760 - DNA, 75 bp, synthetic construct
  source 1..75: mol_type = other DNA
cggtttgggcgttctcgcagcggttcattatcacccgcaacgtcaaagcctgatggaaaaactggcgctgaacaa

SEQ ID NO: 491761 - DNA, 75 bp, synthetic construct
  source 1..75: mol_type = other DNA
cgggtattgcgctgctggcctggaatgttgccagtgcggaaacaaaacccgtcgacctggaactcagggtcaggg

SEQ ID NO: 491762 - DNA, 75 bp, synthetic construct
  source 1..75: mol_type = other DNA
aaattgcacattcagtgcatgaaaaaatccctgagaatacagtttggcgagcgggtaaaagaactgcgcattgcc

SEQ ID NO: 491763 - DNA, 75 bp, synthetic construct
  source 1..75: mol_type = other DNA
ttgcacattcagggcatgaagaaatctttaagaatcctgtttggacaacgagtaaaagagttacgcatcgccacc

SEQ ID NO: 491764 - DNA, 75 bp, synthetic construct
  source 1..75: mol_type = other DNA
gttagtattcgactcatccgaagaaaacgacccagaactactggttccctatgcggcggatgggacgtgctttaa

SEQ ID NO: 491765 - DNA, 75 bp, synthetic construct
  source 1..75: mol_type = other DNA
aagaagatagctggaaagtgattcgcattggtgatgtcgtgtttgatgtggttaagccttgtagccgctgtattt

SEQ ID NO: 491766 - DNA, 75 bp, synthetic construct
  source 1..75: mol_type = other DNA
cgttgagccgtggcagttgttagcgcctggcccatctgaaccgccccgggtttcctggagagtgttttatctgtg

SEQ ID NO: 491767 - DNA, 75 bp, synthetic construct
  source 1..75: mol_type = other DNA
gcggtggaatttggcgacgtgtacatcagtaagattaatggcacgaattaccgacaggatgcgaaatacaccctc

SEQ ID NO: 491768 - DNA, 75 bp, synthetic construct
  source 1..75: mol_type = other DNA
atgtatcccgcctttatcccgttggttttaccattgtggaagtggatgaactaccggaaggattttgtattgaag

SEQ ID NO: 491769 - DNA, 75 bp, synthetic construct
  source 1..75: mol_type = other DNA
gtatgttctgcttccccagatagccagtttaaagttgtctgatgtctctggtatttttacctcgggttatcacta

SEQ ID NO: 491770 - DNA, 75 bp, synthetic construct
  source 1..75: mol_type = other DNA
tacttaaagttgaaacagatagtatttttcatatagatacaaaagcagcacatgagaattatctccttgatctga

SEQ ID NO: 491771 - DNA, 75 bp, synthetic construct
  source 1..75: mol_type = other DNA
ccttgagaatacagtttggcgagcgggtaaaagagctgcgaatagccaccggaatgagccaggaagcgtttgctg

SEQ ID NO: 491772 - DNA, 75 bp, synthetic construct
  source 1..75: mol_type = other DNA
gcgctggatttaagcaccgttactgacgaagcctcctttaatgccatcaactggccggagcgtcccgatgccgca

SEQ ID NO: 491773 - DNA, 75 bp, synthetic construct
  source 1..75: mol_type = other DNA
agtgctgccggttcctgttgattattcgcaactggcagaaaaacaacgccagcatctgctgactgaagcaaagga

SEQ ID NO: 491774 - DNA, 75 bp, synthetic construct
  source 1..75: mol_type = other DNA
gttaagccttgtagccgctgtattttcaccaccgtcagcccagaaaaagggcaaaacatccggcaggcgaaccat

SEQ ID NO: 491775 - DNA, 75 bp, synthetic construct
  source 1..75: mol_type = other DNA
gtgaaggcaagcggggcgcaacttgctgcgggcgagtttaacgccagtttgaccatggtggtggactatcaatga

SEQ ID NO: 491776 - DNA, 75 bp, synthetic construct
  source 1..75: mol_type = other DNA
aatgggacgtcatggatgccgatgtccgcttcaaaggtcggcgcattgaacatggtagtagcttgccgattagcg

SEQ ID NO: 491777 - DNA, 75 bp, synthetic construct
  source 1..75: mol_type = other DNA
taaggcgctgccgttcagcgaagttaccggatcgaaaggtaaaacggataaagagaaggtgggcgattacgtttt

SEQ ID NO: 491778 - DNA, 75 bp, synthetic construct
  source 1..75: mol_type = other DNA
cccggtaaaacaaagtggtgcacaactttcaggggccgattttagtgggagtttaacaatggtggtggattatca

SEQ ID NO: 491779 - DNA, 75 bp, synthetic construct
  source 1..75: mol_type = other DNA
tggacacctttcaactttaatactcagccacagttgaaagcggtgccggtaaagcagagcggagtgcagttaacg

SEQ ID NO: 491780 - DNA, 75 bp, synthetic construct
  source 1..75: mol_type = other DNA
ttaatactcagccacagctgaaagcggtgccggtaaagcagagcggagtgcagttaacgccatcggaatttaacg

SEQ ID NO: 491781 - DNA, 75 bp, synthetic construct
  source 1..75: mol_type = other DNA
cggcggcggcgttactggcgctgatctcaccttccgaaggggaggctaatcagtgcaggacaattttgtcgcaga

SEQ ID NO: 491782 - DNA, 75 bp, synthetic construct
  source 1..75: mol_type = other DNA
ctgagtaccggaatcgatggcttcggcattcgcattcagaatgccaccgaccattcgctggtggccgtgggcaac

SEQ ID NO: 491783 - DNA, 75 bp, synthetic construct
  source 1..75: mol_type = other DNA
atgaacgcgttctttctggccggatctgccgcgctattgctggcctgtggcgtgaccgtttcaccggcaatggcg

SEQ ID NO: 491784 - DNA, 75 bp, synthetic construct
  source 1..75: mol_type = other DNA
ttactggcgctgatctcaccttccgaaggggaggctaatcagtgccggacgattttgtcgcagatgaagaagtga

SEQ ID NO: 491785 - DNA, 75 bp, synthetic construct
  source 1..75: mol_type = other DNA
caacgctggtaacaccggcggcggcgttactggcgctgatctcaccttccgaaggggaggctaatcagtgtcgga

SEQ ID NO: 491786 - DNA, 75 bp, synthetic construct
  source 1..75: mol_type = other DNA
atctttctacccatatcatcctcaaaaacgccgacctgcgcctgcaaccgctgaaatttggcatggcgggcggca

SEQ ID NO: 491787 - DNA, 75 bp, synthetic construct
  source 1..75: mol_type = other DNA
cattccttatacaaaaaatggtcgcagtcggacggtatatctaaggaaggtgcgaataagcaggtcatttcttcc

SEQ ID NO: 491788 - DNA, 75 bp, synthetic construct
  source 1..75: mol_type = other DNA
atatgaaaaaatactggcacagtgcggtatagacaagaatgaagtctgttttcacaccacacgtcattctgttgc

SEQ ID NO: 491789 - DNA, 75 bp, synthetic construct
  source 1..75: mol_type = other DNA
ccggatatcaagtccagcaacggtgcgcgtcgtgctgcggctgaacgtgcagcaattaacgcgccgatgcaggga

SEQ ID NO: 491790 - DNA, 75 bp, synthetic construct
  source 1..75: mol_type = other DNA
cgattgcgctgggaaatgaccctaaagcggagcgagataactaccgcgcgatgccaacacttggtgagtttttcc

SEQ ID NO: 491791 - DNA, 75 bp, synthetic construct
  source 1..75: mol_type = other DNA
cccacgagttggcagtaatccgtatctgttcgccattaaggataatggaaaaccgatatcggaaccccgatgggc

SEQ ID NO: 491792 - DNA, 75 bp, synthetic construct
  source 1..75: mol_type = other DNA
ttggcctcaaatgtctctcaggtcgaacgggtaacaaacgtttcctcctgcgctacacattccacggtaccaaaa

SEQ ID NO: 491793 - DNA, 75 bp, synthetic construct
  source 1..75: mol_type = other DNA
acgtttatcgtcaaccgatcctaacctgcaaacattccggtgcgtaacgaagaaggtcgtcgtatccgccaggcg

SEQ ID NO: 491794 - DNA, 75 bp, synthetic construct
  source 1..75: mol_type = other DNA
aaaaccgggcgtgtgcatacctcttatcaccaggcagtaactgcaacgggacgtttatcgtcaaccgatcctaac

SEQ ID NO: 491795 - DNA, 75 bp, synthetic construct
  source 1..75: mol_type = other DNA
ttcgagaatatcgaaatgccgctggtgccggtgctttcacgcattgaacgtaacggtgtgaagatcgatccgaaa

SEQ ID NO: 491796 - DNA, 75 bp, synthetic construct
  source 1..75: mol_type = other DNA
tgggcaaaatctgaaatacgatcgcggcattctggcgaactacggtattgagctgcgtggaattgcctttgatac

SEQ ID NO: 491797 - DNA, 75 bp, synthetic construct
  source 1..75: mol_type = other DNA
gagccaggtgtggcggcgtatgtaccggttgctcatgattatctcgatgctcccgaccagatctctcgcgagcgc

SEQ ID NO: 491798 - DNA, 75 bp, synthetic construct
  source 1..75: mol_type = other DNA
acgattaaaaccgatgttgagctggaactgacctgtgaacaactggaagtgcagcaaccggcggctgaagagttg

SEQ ID NO: 491799 - DNA, 75 bp, synthetic construct
  source 1..75: mol_type = other DNA
ggcgttatgcgctacgacaggatgtcctggagaagaatgaagccgataagatccctttgctgaaggagaataatc

SEQ ID NO: 491800 - DNA, 75 bp, synthetic construct
  source 1..75: mol_type = other DNA
actcaagaagaaaggccaaaagtgttaggatattacactttgtcaggtagttgttttgaaaaggagtccttacct

SEQ ID NO: 491801 - DNA, 75 bp, synthetic construct
  source 1..75: mol_type = other DNA
actaaagaagaaataccaaaggtattaggttattacactttgtcaggcagctgctttgagaaagaaaacttacct

SEQ ID NO: 491802 - DNA, 75 bp, synthetic construct
  source 1..75: mol_type = other DNA
atctgaaacggcagcataacagtaagatcttacgtggttatttgctcgtgacgagagaggataaaccgcgtgtga

SEQ ID NO: 491803 - DNA, 75 bp, synthetic construct
  source 1..75: mol_type = other DNA
acggtaactctctgcgtgcgctggtgaaatatcttgataacatgagcgaagaagagattcttgagctgaatatcc

SEQ ID NO: 491804 - DNA, 75 bp, synthetic construct
  source 1..75: mol_type = other DNA
gttcgacgagaacttcaaaccgctgaaacgctattatctgggtaatgctgacgagatcgcggcgaaagcagcagc

SEQ ID NO: 491805 - DNA, 75 bp, synthetic construct
  source 1..75: mol_type = other DNA
tggatttgccgtgactccgccggaactgactaaagatgatgagcggtatccgggtcacgatccccgttacgcgaa

SEQ ID NO: 491806 - DNA, 75 bp, synthetic construct
  source 1..75: mol_type = other DNA
aattagcgctaaaaaaaccatctgcactcgttgcactggcgcttttactgtctagttgtaagagcactccaccaa

SEQ ID NO: 491807 - DNA, 75 bp, synthetic construct
  source 1..75: mol_type = other DNA
attacattgctccccaaatttactggccgttctcacggagtgccgcacgttatgacgttttggcaaaatggtggg

SEQ ID NO: 491808 - DNA, 75 bp, synthetic construct
  source 1..75: mol_type = other DNA
cgaccaaaacccgtctatatatcggtattgccttctataaagtgggtgaaccctcaaagatagaacctgactgga

SEQ ID NO: 491809 - DNA, 75 bp, synthetic construct
  source 1..75: mol_type = other DNA
agcaaaacacaacaaaagcgtgtgccctacaaaaatgtgccgagcgtgactttgggccgtctggcaattgataaa

SEQ ID NO: 491810 - DNA, 75 bp, synthetic construct
  source 1..75: mol_type = other DNA
cctataaaaatgttcctagtgtgactttgggccgtctggcaattgataaaaatcttcatcgccagggatatggag

SEQ ID NO: 491811 - DNA, 75 bp, synthetic construct
  source 1..75: mol_type = other DNA
taaaaatcaaacacaaactctcatatgttcgcccgactaaccgcgggaaaatttccgaagaagacaccaccgaaa

SEQ ID NO: 491812 - DNA, 75 bp, synthetic construct
  source 1..75: mol_type = other DNA
aaaacagggcattaaaccgctgaagaaaacgccgggtggtgcgccgtcaacgtcggaagaggtactggaagaact

SEQ ID NO: 491813 - DNA, 75 bp, synthetic construct
  source 1..75: mol_type = other DNA
ggaacaacgagcaaccactttcggggaagatgcacggatcgtaattgcttctactccaacgtcgcgagatggggc

SEQ ID NO: 491814 - DNA, 75 bp, synthetic construct
  source 1..75: mol_type = other DNA
cgtaacgatctgaaaccgttgttgtctgtggccaaaaagtcccgcaggtatgcctgctcaaagagtttgattcaa

SEQ ID NO: 491815 - DNA, 75 bp, synthetic construct
  source 1..75: mol_type = other DNA
cgtaacgatctgaaaccgttgttgtctgtggccaaaaagtcccgtaaatatgcctggctcaaagaatttgactca

SEQ ID NO: 491816 - DNA, 75 bp, synthetic construct
  source 1..75: mol_type = other DNA
gcgtactgccaagttagggattgtagacgaatgcgacgcagcaacaatcaccgaagaaggttgtccggtggcact

SEQ ID NO: 491817 - DNA, 75 bp, synthetic construct
  source 1..75: mol_type = other DNA
tatcaaaggtagttcatctggtaatgctccagtgattccggttaaacctacccgcacaggtggtcatgaattgct

SEQ ID NO: 491818 - DNA, 75 bp, synthetic construct
  source 1..75: mol_type = other DNA
atacgacgatcaggacacggcagtagaagcaaatgaactggaacaactcaaaacagatgtttctatcgagaatat

SEQ ID NO: 491819 - DNA, 75 bp, synthetic construct
  source 1..75: mol_type = other DNA
ggatggcaggaccatgctggtgaacaccacgccgtacatttttgcgattggcagcctgctggacggaaacggaaa

SEQ ID NO: 491820 - DNA, 75 bp, synthetic construct
  source 1..75: mol_type = other DNA
attttagtattaatcgtttagcaacaacctttggtctgacattagcagttttaatgagctctcagagtgctctgg

SEQ ID NO: 491821 - DNA, 75 bp, synthetic construct
  source 1..75: mol_type = other DNA
tgcgatctaaacttaaattgttttaccgtcctaaagcattaattgaagggcgcaagggggcagagcaagggcttt

SEQ ID NO: 491822 - DNA, 75 bp, synthetic construct
  source 1..75: mol_type = other DNA
acaaactaatatacgcctataataaaagcacatcccggacagatacagaatctaccaagatgaaagaatgttatt

SEQ ID NO: 491823 - DNA, 75 bp, synthetic construct
  source 1..75: mol_type = other DNA
gatacttcgccataccttgcataattctttttatgctctcgtgtttatcagcggtatggtccgcactaacggaaa

SEQ ID NO: 491824 - DNA, 75 bp, synthetic construct
  source 1..75: mol_type = other DNA
aaatgtggtgaaagtggactccctgaatgactggggaagcctgcagacctggacaattaacaagaagaaaccgac

SEQ ID NO: 491825 - DNA, 75 bp, synthetic construct
  source 1..75: mol_type = other DNA
ttcgaaatcgtaggaactcatcttggttacaacgttgccgctatcagaacacagatggcgacggcgtgtaggatg

SEQ ID NO: 491826 - DNA, 75 bp, synthetic construct
  source 1..75: mol_type = other DNA
ttatcgcctctatgctccatcttggttcaccgatgcgcgcttttaactcgctcaaccgggtaggggcttcagcac

SEQ ID NO: 491827 - DNA, 75 bp, synthetic construct
  source 1..75: mol_type = other DNA
tgcgtgtctataacagcattgataccgttccgacctggtacagcatctggacgccgatgggcttcttcctgacga

SEQ ID NO: 491828 - DNA, 75 bp, synthetic construct
  source 1..75: mol_type = other DNA
ttcagcaaaagcttctattgattctggcgaatatcctatattgcggatgggtaatataacgtatcaaggtgggtg

SEQ ID NO: 491829 - DNA, 75 bp, synthetic construct
  source 1..75: mol_type = other DNA
gattttccagttgtcagccccgtgctgattcgtaagcgtcgtctcagcaccgtctggcagatcctgaaattcctg

SEQ ID NO: 491830 - DNA, 75 bp, synthetic construct
  source 1..75: mol_type = other DNA
tgctacaacgtgcccggattacctccgggaagcctcagctactctatcgcgtatactggctgcatcagggactat

SEQ ID NO: 491831 - DNA, 75 bp, synthetic construct
  source 1..75: mol_type = other DNA
acgtactatcatcaaacagaagggatatgagcaggcgatgctggatgcaggcctggtgccgtatagcgtgatggt

SEQ ID NO: 491832 - DNA, 75 bp, synthetic construct
  source 1..75: mol_type = other DNA
ggtgccgctggcctggtaaaccttcgacgtggacgccctggtaatcacagactccctgagtcactgaagctgcgt

SEQ ID NO: 491833 - DNA, 75 bp, synthetic construct
  source 1..75: mol_type = other DNA
agctatatttaaacaaacatcctgatgttgatgtaatcggttcatattgtactgaatttgggagtgattgttcgc

SEQ ID NO: 491834 - DNA, 75 bp, synthetic construct
  source 1..75: mol_type = other DNA
caattaattttgcagcagaaacagattatctatattcggttgaagaatataacccagatttgggtggtctggtaa

SEQ ID NO: 491835 - DNA, 75 bp, synthetic construct
  source 1..75: mol_type = other DNA
atgaactgcacccgattgatggcctgtccggtgaatatgcggagaaatcccttgaagaatgggcggaacagattc

SEQ ID NO: 491836 - DNA, 75 bp, synthetic construct
  source 1..75: mol_type = other DNA
aatattttaaaatcatccgttcatatgatgctatataatcaagttgaaaatactgccagaggttgcatcgagtca

SEQ ID NO: 491837 - DNA, 75 bp, synthetic construct
  source 1..75: mol_type = other DNA
tcagaaaatggatgactgccgatggactctgggttccatacacacgtcacagaccccgtgttcatcaacccagat

SEQ ID NO: 491838 - DNA, 75 bp, synthetic construct
  source 1..75: mol_type = other DNA
aaagagattcaggcttttttcctgaaaagaggttatgagattaataatcttcaggaattggctgatgtatctaat

SEQ ID NO: 491839 - DNA, 75 bp, synthetic construct
  source 1..75: mol_type = other DNA
ccgttagaaaagcgaggatagataccgactgcacattgcttacgatggcccaagaactgggagtaacttcagctt

SEQ ID NO: 491840 - DNA, 75 bp, synthetic construct
  source 1..75: mol_type = other DNA
gggattcgctaagtcgcagtttacgccggaacagctaaagagttttgcagatttattgcaaaagattaataacaa

SEQ ID NO: 491841 - DNA, 75 bp, synthetic construct
  source 1..75: mol_type = other DNA
aaggtaaattaatcgtctcctgtcaggcgctggaaaatgagcctctacacagtccgtttattatgtcacgtatgg

SEQ ID NO: 491842 - DNA, 75 bp, synthetic construct
  source 1..75: mol_type = other DNA
gcatacctgaattacttcaccgcattgatcattactccggcaggccgttaactcgactggctgtcgaactcactt

SEQ ID NO: 491843 - DNA, 75 bp, synthetic construct
  source 1..75: mol_type = other DNA
gtcaacgtattaccactgtcagcaacagcgacatcatcctgataaacgcagtgcccgtgcgcagcgcgatgactg

SEQ ID NO: 491844 - DNA, 75 bp, synthetic construct
  source 1..75: mol_type = other DNA
ttctgattatttcggtggactgcgccattgggattatgcgaattattaattcagtgaaaaagatcgagcgttttt

SEQ ID NO: 491845 - DNA, 75 bp, synthetic construct
  source 1..75: mol_type = other DNA
cgacggggtgaaataaaagtgggagtcacgggcaatatcagtcagcgagtgtccctgcgcggcagcgtggcgtgg

SEQ ID NO: 491846 - DNA, 75 bp, synthetic construct
  source 1..75: mol_type = other DNA
ctggatagctggctgcaatacgcgtggtttaacaatgatgtttccgaacaagacgatggcacagatcattaccac

SEQ ID NO: 491847 - DNA, 75 bp, synthetic construct
  source 1..75: mol_type = other DNA
gctggatgaatgatccgcgcgttgagtatttctgggagcaaagtggctcactggaggtacagaccgcctatctgg

SEQ ID NO: 491848 - DNA, 75 bp, synthetic construct
  source 1..75: mol_type = other DNA
ctcgctctgggggtctatcctgaagtctcgttatcagaagcaagggaaaaacgcgatacggcgaggaagctgata

SEQ ID NO: 491849 - DNA, 75 bp, synthetic construct
  source 1..75: mol_type = other DNA
ttcgcggccggggattcggatccatcattgcctgcgccgttggtcctaaagcaggccatgagcacttaaaacagc

SEQ ID NO: 491850 - DNA, 75 bp, synthetic construct
  source 1..75: mol_type = other DNA
aagatcctcgggcaaaaacctgcttatttctgggtctggctggttatgctgatactggtgttatttacgatctga

SEQ ID NO: 491851 - DNA, 75 bp, synthetic construct
  source 1..75: mol_type = other DNA
tctggtgaaactgctgggtgaacgctgcaagacgctgaaagagatggcacagagctgccgttatttctacgaaga

SEQ ID NO: 491852 - DNA, 75 bp, synthetic construct
  source 1..75: mol_type = other DNA
gccagatcaacattcttaaggccctgaaagcgccggtgccggtttacgcgcacgtttctatgatcaatggcgatg

SEQ ID NO: 491853 - DNA, 75 bp, synthetic construct
  source 1..75: mol_type = other DNA
tgttactgttcacgcgatcggcaaagcacgtagcatcgagcgcatcaataaagctctggcttttattgctgaacg

SEQ ID NO: 491854 - DNA, 75 bp, synthetic construct
  source 1..75: mol_type = other DNA
cggcgtgagtgctaaccgcacgctgcgggcgaaactggcggaaatgatgaaaaagcgtcgcggcgaagtgttcta

SEQ ID NO: 491855 - DNA, 75 bp, synthetic construct
  source 1..75: mol_type = other DNA
atgaccgatcgcccggggctggatttcagcttctctggtctgaaaacttttgccgcgaacaccattcgtgataac

SEQ ID NO: 491856 - DNA, 75 bp, synthetic construct
  source 1..75: mol_type = other DNA
gcctataccgcaggccctggattagtcggcgcactgctggttggcgcaaccgtggggcgttctctggcgtttgcc

SEQ ID NO: 491857 - DNA, 75 bp, synthetic construct
  source 1..75: mol_type = other DNA
tgttaccgttcacgcaatcggtaagacccgcagtatcgagcgtatcaacaaagcgctggcttttattgcggaacg

SEQ ID NO: 491858 - DNA, 75 bp, synthetic construct
  source 1..75: mol_type = other DNA
atggcatgaactggctgagcctggagtgggatgaaggtccgtactaccagaccaaacgttttgatcgctacaacg

SEQ ID NO: 491859 - DNA, 75 bp, synthetic construct
  source 1..75: mol_type = other DNA
ttctgattatttcggtggcctgcgctattgggattatgcgaattattcattcagtgaaaaagattgagcgttttt

SEQ ID NO: 491860 - DNA, 75 bp, synthetic construct
  source 1..75: mol_type = other DNA
tgaaaaatctgatcgccgcactggaggataacgacgatcccattatttcaccggctggctcttgcacctatgccg

SEQ ID NO: 491861 - DNA, 75 bp, synthetic construct
  source 1..75: mol_type = other DNA
ggtgattcaaaaatgtggcttgaagcaaataaagcgatgaaatcagctatcaaccttccgtgttatcgcaggaaa

SEQ ID NO: 491862 - DNA, 75 bp, synthetic construct
  source 1..75: mol_type = other DNA
accagatgcttcgtgcagcacaaaacaaagcagtaatagccagatttattggtgattccaaaatgtggcttgaag

SEQ ID NO: 491863 - DNA, 75 bp, synthetic construct
  source 1..75: mol_type = other DNA
gcaagactcaatgggcgtgcagtattccatccctcctgcagcctttcccgtaagctgggtataaccagagaaccg

SEQ ID NO: 491864 - DNA, 75 bp, synthetic construct
  source 1..75: mol_type = other DNA
cggtctcaccctccaactcccgccagccgtgtgcgtcaggctgcggcttcccttgcgccctgtgcatccccgcct

SEQ ID NO: 491865 - DNA, 75 bp, synthetic construct
  source 1..75: mol_type = other DNA
atgagcgtatccggctttatgggatatctgaaagggaaaagcagtctgatgctttacgagcagtttggttatttg

SEQ ID NO: 491866 - DNA, 75 bp, synthetic construct
  source 1..75: mol_type = other DNA
ctggagccgctgctggcgaaaataggaattcatcagcaaaccacgctgttacgtcacggtttttatcctgccgga

SEQ ID NO: 491867 - DNA, 75 bp, synthetic construct
  source 1..75: mol_type = other DNA
tggcagcctgctctatttttccggttatcaactggcctcgccctgcggcgaattgttagtggaatggctggaaga

SEQ ID NO: 491868 - DNA, 75 bp, synthetic construct
  source 1..75: mol_type = other DNA
tatcactgcaatcatgcgctatgctgcccagtcaggcattatcacctataaccctgccgtggatatggctggcgc

SEQ ID NO: 491869 - DNA, 75 bp, synthetic construct
  source 1..75: mol_type = other DNA
atatcttggccagtggcttggtctgtgatgtgctgcgtataccgggtgaaccgccccgccgcttgtttgaccgct

SEQ ID NO: 491870 - DNA, 75 bp, synthetic construct
  source 1..75: mol_type = other DNA
tcctttttcagctttatctgcctgatggcgatgatgtcagcgttttcgatcgggctgatgcactggcaggttggg

SEQ ID NO: 491871 - DNA, 75 bp, synthetic construct
  source 1..75: mol_type = other DNA
tcctgcttggtcttggcgttacgcaaccgaagctggataaagtgaccggcgaaaccggtgaagctatcgacgatc

SEQ ID NO: 491872 - DNA, 75 bp, synthetic construct
  source 1..75: mol_type = other DNA
aaacgttattacctgggtaatgctgacgagatcgcggcgaaagcagcggccgttgcgaaccagggtaaagcaaag

SEQ ID NO: 491873 - DNA, 75 bp, synthetic construct
  source 1..75: mol_type = other DNA
gaaagaggttaaacgctacctgtcaagttcggctgcggtaggggaatatctcgcagaccagttagtgttgccgat

SEQ ID NO: 491874 - DNA, 75 bp, synthetic construct
  source 1..75: mol_type = other DNA
tggatgatggtgcgtgtgtataacagcattgataccgttccgacctggtacagcatctggacgccgatgggcttc

SEQ ID NO: 491875 - DNA, 75 bp, synthetic construct
  source 1..75: mol_type = other DNA
tctggtgcagagggtattacgtcgatacggtgggtaagaacacggcgaagatacaggattacataaagcaccagc

SEQ ID NO: 491876 - DNA, 75 bp, synthetic construct
  source 1..75: mol_type = other DNA
acgccctgccctggcgcgggtgcgatatcgaactgaaacagcagagcgtaaatgttggcggctgtgcgttgaaca

SEQ ID NO: 491877 - DNA, 75 bp, synthetic construct
  source 1..75: mol_type = other DNA
gaaattagcgacaaaaacctttatctgacgcgcccggatctgggacgtcgtctgtgtgcggaagccgtcgaggct

SEQ ID NO: 491878 - DNA, 75 bp, synthetic construct
  source 1..75: mol_type = other DNA
attggtgatgtggtgcgcgagctggaacccttatcgctggtgaattgcagcagtgagttttgccacattacacct

SEQ ID NO: 491879 - DNA, 75 bp, synthetic construct
  source 1..75: mol_type = other DNA
acggattgcgtgcgctgatctatatggcgtcattgccggaagggcggatgaccagtatttctgaagtaactgatg

SEQ ID NO: 491880 - DNA, 75 bp, synthetic construct
  source 1..75: mol_type = other DNA
taaaaaattatgctcattatctcagtgatgagcctgaatgggctgctcgggctgaaaaagtggctgaacgtctgc

SEQ ID NO: 491881 - DNA, 75 bp, synthetic construct
  source 1..75: mol_type = other DNA
acaccttggcatccgtgttgtccgtgaagggcatcctgtgaaagtgatgcatattgctgaagtcctgatgcacag

SEQ ID NO: 491882 - DNA, 75 bp, synthetic construct
  source 1..75: mol_type = other DNA
cgactaaccgcgggaaaatttccgaagaagacaccaccgaaacgccgatgtatgtcaatcgcggtggtcgcctga

SEQ ID NO: 491883 - DNA, 75 bp, synthetic construct
  source 1..75: mol_type = other DNA
aggtaaggtctcactcaacctggaaatcgaaccatttgatgagaaccgtgtgaaaatcaaacacaaactctcata

SEQ ID NO: 491884 - DNA, 75 bp, synthetic construct
  source 1..75: mol_type = other DNA
attaaccgttgcgcctggcagcctgctctatttttccggttatcaactggcctcgccctgcggcgaattgttagt

SEQ ID NO: 491885 - DNA, 75 bp, synthetic construct
  source 1..75: mol_type = other DNA
tcccggatgcattacttgcgcgcatcatggcttgtcgaccgctggtgtcgcttaatcgccaggaggctgagattg

SEQ ID NO: 491886 - DNA, 75 bp, synthetic construct
  source 1..75: mol_type = other DNA
gtgaaaatcaaacacaaactctcatatgttcgcccgactaaccgcgggaaaatttccgaagaagacaccaccgaa

SEQ ID NO: 491887 - DNA, 75 bp, synthetic construct
  source 1..75: mol_type = other DNA
tgcaggcatttatcggggagctggacggcggcgtatttagaaaaccaaaatcggcgcagttctcaagtgaggtcg

SEQ ID NO: 491888 - DNA, 75 bp, synthetic construct
  source 1..75: mol_type = other DNA
tcgtctgactattctgcaggaagaccagggacaattactgactcttgccggtgaacctgacggaaaactacgcgc

SEQ ID NO: 491889 - DNA, 75 bp, synthetic construct
  source 1..75: mol_type = other DNA
gttatatattatgttttctattatgtttcattttgagctacttagttttactcaaatctgactactttcctgctg

SEQ ID NO: 491890 - DNA, 75 bp, synthetic construct
  source 1..75: mol_type = other DNA
tgcaggaaaatttagctcgtcgtacctatacaatgtcgttgatggcaatggtctttttacccagtacgtttctga

SEQ ID NO: 491891 - DNA, 75 bp, synthetic construct
  source 1..75: mol_type = other DNA
cggatgcaggatattgccgatcgccttgggcgcggtcttgacgaaatcgacgcctgtatagcacggactggcgtg

SEQ ID NO: 491892 - DNA, 75 bp, synthetic construct
  source 1..75: mol_type = other DNA
ttatactggattatttagggtttgaacgtcatattgttgaatacaaaaattcagtatcaggtagttgcgccacca

SEQ ID NO: 491893 - DNA, 75 bp, synthetic construct
  source 1..75: mol_type = other DNA
atcggtagtgctggagcgagtctgacagaagtaatattgcttaaatcaatgttcagaatgcccatgataatcgca

SEQ ID NO: 491894 - DNA, 75 bp, synthetic construct
  source 1..75: mol_type = other DNA
caggaatattagccttttgtattttctttctggctagtggagtcccggtcattgcttatcgaactgcagagttgc

SEQ ID NO: 491895 - DNA, 75 bp, synthetic construct
  source 1..75: mol_type = other DNA
aatccgcgactgatgcgtaaccccagctatgacgacatcaaggaatcgatccgtcgtcgcgggctggacacgcca

SEQ ID NO: 491896 - DNA, 75 bp, synthetic construct
  source 1..75: mol_type = other DNA
actatgacgatataaaggcatcaattcgcaatcgtgggctggacacgccgccgccaatcacccgtcgtcccgatc

SEQ ID NO: 491897 - DNA, 75 bp, synthetic construct
  source 1..75: mol_type = other DNA
aggtgatgccatttgcatcaggtcaccccatgtttacccggccacagtcacgcgcctgctgggcgctgctggcgg

SEQ ID NO: 491898 - DNA, 75 bp, synthetic construct
  source 1..75: mol_type = other DNA
gcgctcccggttgctcagcttttcctgcagggcgtggatcagcgcttcctgttcggccaggcgctgtttcagcag

SEQ ID NO: 491899 - DNA, 75 bp, synthetic construct
  source 1..75: mol_type = other DNA
aagattatcgattccaactcgccatttcttgaatgtgaactccctattgacggttcccgttttgctggtcaactg

SEQ ID NO: 491900 - DNA, 75 bp, synthetic construct
  source 1..75: mol_type = other DNA
gtgaacggaacagccttcgatcttacatattcagaatataatggtgccgccgctcgcgatgctgatgggatctat

SEQ ID NO: 491901 - DNA, 75 bp, synthetic construct
  source 1..75: mol_type = other DNA
ctgtaaaaacgaattgctgtacttcatcagcaaaaaccataattaacttaaagacagtaaagaaagagcaaaata

SEQ ID NO: 491902 - DNA, 75 bp, synthetic construct
  source 1..75: mol_type = other DNA
gctatccagtggatgcacggtcactcatttgatttttctaaaacacaggtgcaaacccatcgtgccaggcttaga

SEQ ID NO: 491903 - DNA, 75 bp, synthetic construct
  source 1..75: mol_type = other DNA
aacaggattttggctaccaattacccatcctttcagatgtggcttatcagcgtattcatcttgatagcggtgaag

SEQ ID NO: 491904 - DNA, 75 bp, synthetic construct
  source 1..75: mol_type = other DNA
aacaggatttcggctttcaacttcctattctctcggatgttgcttaccagcgtattcatcttgaaagtggtgagg

SEQ ID NO: 491905 - DNA, 75 bp, synthetic construct
  source 1..75: mol_type = other DNA
ctatataattcattttttactgataaagtggttatctgggatgaatcagtaaaaaaaattaagtggatttatgag

SEQ ID NO: 491906 - DNA, 75 bp, synthetic construct
  source 1..75: mol_type = other DNA
ttatccagaaaacggaatcccgttgatattgcagccgatatcgagcgaaaaattctggtaaatgcttcgcaggag

SEQ ID NO: 491907 - DNA, 75 bp, synthetic construct
  source 1..75: mol_type = other DNA
agatgaaagaacatcgcgatggagtacagatcgaagataatggtattatcgtaggtctgcgacaaagaacgaacc

SEQ ID NO: 491908 - DNA, 75 bp, synthetic construct
  source 1..75: mol_type = other DNA
cctggtgccggtgggggaagaccagaaacagcacctggaactgagccgcgatatcgctcagcgtttcaacgcgct

SEQ ID NO: 491909 - DNA, 75 bp, synthetic construct
  source 1..75: mol_type = other DNA
gaaaaagccagtgtacacgcttcccgtacgctgaaagcggtgtacgaagcgattggttttgtggcgaagccgtaa

SEQ ID NO: 491910 - DNA, 75 bp, synthetic construct
  source 1..75: mol_type = other DNA
gactccgacgagccgccggtagttcgctacgatgtgcagaacaaagcgggcgtttccaacctgctggatatcctt

SEQ ID NO: 491911 - DNA, 75 bp, synthetic construct
  source 1..75: mol_type = other DNA
aacgtcatattgttgatcacaaaaactcagcatcaagtggttgcaccacgaaatgcgatgattccgaagcttcgg

SEQ ID NO: 491912 - DNA, 75 bp, synthetic construct
  source 1..75: mol_type = other DNA
cacctttttgtttgtttcaccattactcaacccgattatcgtcgggctaatgtgggcaacatttggctggaaggt

SEQ ID NO: 491913 - DNA, 75 bp, synthetic construct
  source 1..75: mol_type = other DNA
tcaccgtttccgcaacgatgaagccttcctgcaacaggtgatgaaagatggcgcggaaaagccagcgcgcacgct

SEQ ID NO: 491914 - DNA, 75 bp, synthetic construct
  source 1..75: mol_type = other DNA
agaaaacgatctgcacggcaaactcagcttcatcgaacgtgcgctggggatcaataaagcacgggaactgtacca

SEQ ID NO: 491915 - DNA, 75 bp, synthetic construct
  source 1..75: mol_type = other DNA
tggaagacacgatgtgggacatcatgcggatggctatcatcctgtcctttgtggctaatttgggtggttatctcg

SEQ ID NO: 491916 - DNA, 75 bp, synthetic construct
  source 1..75: mol_type = other DNA
tggaagacacgatgtgggacatcatgcggatggcaatcatcctgtcttttgtggctaacgtcagtggttatctcg

SEQ ID NO: 491917 - DNA, 75 bp, synthetic construct
  source 1..75: mol_type = other DNA
gctggacagctcagttttatgtctggcttggcatatttgttttaatgaccattacagcctttgtttcgatgatcg

SEQ ID NO: 491918 - DNA, 75 bp, synthetic construct
  source 1..75: mol_type = other DNA
gacctgctggttgccctcaacaagtcatgcgacaccccaatgacccccgagactcttacaagcgtcatgaacagt

SEQ ID NO: 491919 - DNA, 75 bp, synthetic construct
  source 1..75: mol_type = other DNA
atgatcaagattacaactaaattgggatgccttctggcggggctgcttgtcctgtcggcttgctcaagcgtccct

SEQ ID NO: 491920 - DNA, 75 bp, synthetic construct
  source 1..75: mol_type = other DNA
ctgcgccgcaatactggtgtatatctccgctaaagtagctgctgcactggccggggcgagtgctaccgtatccat

SEQ ID NO: 491921 - DNA, 75 bp, synthetic construct
  source 1..75: mol_type = other DNA
ggttggggctattattgccgcgttgattattatctggaccggctggacacctgctgaccccattctctcgatact

SEQ ID NO: 491922 - DNA, 75 bp, synthetic construct
  source 1..75: mol_type = other DNA
ctgctgaccccattctctcgatactggtgtcgcttctggttctgcgtagcgcgtggcgactgttgaaagatagcg

SEQ ID NO: 491923 - DNA, 75 bp, synthetic construct
  source 1..75: mol_type = other DNA
atggcgcactcacactcacacacgtcctcacacctgccagaagataataatgctcgtcgcttgttgtatgctttc

SEQ ID NO: 491924 - DNA, 75 bp, synthetic construct
  source 1..75: mol_type = other DNA
agaaaaatttaattggtgggataaccaatgctaccagcggtctaatgatgtcttattcttctatgatgatgggac

SEQ ID NO: 491925 - DNA, 75 bp, synthetic construct
  source 1..75: mol_type = other DNA
ttctttctggttctctggcattgctggccgatgcgggtcatatgttgaccgatactgccgccctgcttttcgccc

SEQ ID NO: 491926 - DNA, 75 bp, synthetic construct
  source 1..75: mol_type = other DNA
tgccattgcattagtggtaattacaattttgattgtctgggaggcaatagagcgttttcgtacgccgcgcccggt

SEQ ID NO: 491927 - DNA, 75 bp, synthetic construct
  source 1..75: mol_type = other DNA
cctttatcaggtttaccgtgatgcggctatcgacaccctgcgatgcaatgagatggacacttggcctgaacggac

SEQ ID NO: 491928 - DNA, 75 bp, synthetic construct
  source 1..75: mol_type = other DNA
gggatattatttttggtgcccctgatggagatctccctgaagattttgagtttgtgaaaccggaagaccaggggg

SEQ ID NO: 491929 - DNA, 75 bp, synthetic construct
  source 1..75: mol_type = other DNA
ggacgatcttcaggccatcgcccgtaaactggcttcagtcaactgcactaacagcagtaaggctatttgtattta

SEQ ID NO: 491930 - DNA, 75 bp, synthetic construct
  source 1..75: mol_type = other DNA
gtgggttcactaccgcttgtccccacatattccttcctgggccgctcaggtgattgagcaggcctggttaagcca

SEQ ID NO: 491931 - DNA, 75 bp, synthetic construct
  source 1..75: mol_type = other DNA
attcgctacctgcagggcatcgagaagaacggggagccgttcactatccgggactggatgcgcggtgtccgtgag

SEQ ID NO: 491932 - DNA, 75 bp, synthetic construct
  source 1..75: mol_type = other DNA
agctggaagatatctatggcgtcaagcctgccgccacgctctttgacgtgatgaacacccgggccttcttccgct

SEQ ID NO: 491933 - DNA, 75 bp, synthetic construct
  source 1..75: mol_type = other DNA
tggcccgccagatgaagcgtgatggagtggcctccgatattaagattggcgacctgcctattcttaaaaactccg

SEQ ID NO: 491934 - DNA, 75 bp, synthetic construct
  source 1..75: mol_type = other DNA
gaatacatgaagttggtgtgcccgtcgcgccgttattaagtgtggctgaggccattaatttgccacaaactcagg

SEQ ID NO: 491935 - DNA, 75 bp, synthetic construct
  source 1..75: mol_type = other DNA
tagtgagtgcactttatggccgcgaaaagagccagagaggggcgcatgtcgatatagcgatgtttgatgccacgc

SEQ ID NO: 491936 - DNA, 75 bp, synthetic construct
  source 1..75: mol_type = other DNA
agaaatcaacccgcgcctcatatatgcttcatcgtcaggtttcggacataccggtccgctaaaagatgctcctgc

SEQ ID NO: 491937 - DNA, 75 bp, synthetic construct
  source 1..75: mol_type = other DNA
actcctctccatctttgatgaccctgataagtcagggaggactgccagcactgaatgatcgggccagaatgttac

SEQ ID NO: 491938 - DNA, 75 bp, synthetic construct
  source 1..75: mol_type = other DNA
caatagcaggtctaacctttatttgttttattatcggcttatatgcgggaggatgggcgtggtatgccttaacag

SEQ ID NO: 491939 - DNA, 75 bp, synthetic construct
  source 1..75: mol_type = other DNA
aactgggcttttagagggctctctgggtaatataaatttcatttgtggaattgtttcccccttaatatccgcctg

SEQ ID NO: 491940 - DNA, 75 bp, synthetic construct
  source 1..75: mol_type = other DNA
ctggcgcgccagttgatgacgctgctcggcagttgtgcgtttgactggtcgattttgccggaaagcccgcgcaaa

SEQ ID NO: 491941 - DNA, 75 bp, synthetic construct
  source 1..75: mol_type = other DNA
ttcgccagagcctggcattgaccgatattgccagttgcaaagcagtgctcaacaatgccagggcctttgaattac

SEQ ID NO: 491942 - DNA, 75 bp, synthetic construct
  source 1..75: mol_type = other DNA
aacagcattttgccaccgcgccctggatgatgcgtaactggctgatttaccgcgtttaccatgaggtgattgggc

SEQ ID NO: 491943 - DNA, 75 bp, synthetic construct
  source 1..75: mol_type = other DNA
gtgtgtggggccggagaatatgccgatctggagagatgcggggcaacgataagcgggggaatgatggtaaatatt

SEQ ID NO: 491944 - DNA, 75 bp, synthetic construct
  source 1..75: mol_type = other DNA
ttatgatagagcgatcagacgggtatctgaaactcttacacctctaattcaggcttcaagtgagaaagcccagca

SEQ ID NO: 491945 - DNA, 75 bp, synthetic construct
  source 1..75: mol_type = other DNA
ccaaagggaagtacagcctatgatcgagctatcagaaatgtatctgagaaactagctccaataatgcaggcctct

SEQ ID NO: 491946 - DNA, 75 bp, synthetic construct
  source 1..75: mol_type = other DNA
ccagcgcaagcagcgatcgatgctgaatttatcatcactatgttgccgaatggcgatctggtacgcagcgtgcta

SEQ ID NO: 491947 - DNA, 75 bp, synthetic construct
  source 1..75: mol_type = other DNA
cccaccgttcgttgtttgcacagcaccctgaattacgtccgacaggaaataatcttcatcgctggtctgagctgg

SEQ ID NO: 491948 - DNA, 75 bp, synthetic construct
  source 1..75: mol_type = other DNA
ccgggctgcgtttcgagctgaccccgccaaacacccaacttggcaatgatgtgctggagctggtggagcgtggag

SEQ ID NO: 491949 - DNA, 75 bp, synthetic construct
  source 1..75: mol_type = other DNA
gtaaaatgccgggcagagacggagatattcttgcccgtttgacgacgctgccgcaggcgctggccgatcatgcga

SEQ ID NO: 491950 - DNA, 75 bp, synthetic construct
  source 1..75: mol_type = other DNA
gatgcgatactaaaccaggtcattttgagcacccttacgctccccaatttaccccccgaactatcactgtacgcc

SEQ ID NO: 491951 - DNA, 75 bp, synthetic construct
  source 1..75: mol_type = other DNA
acggcgtatatcaatcgttgattacacgcgcttattatcgccttgagggtgaacacgttttgacgcgactttata

SEQ ID NO: 491952 - DNA, 75 bp, synthetic construct
  source 1..75: mol_type = other DNA
aagcagggagagaatattgatgagagtaagcttatcgagctggccgaattggaggggagaatactctctggagat

SEQ ID NO: 491953 - DNA, 75 bp, synthetic construct
  source 1..75: mol_type = other DNA
agcaacagccgcactcttcgtcggtgggaagtagcgcggtggcgcaaaacagcacggtggatgacacgacggata

SEQ ID NO: 491954 - DNA, 75 bp, synthetic construct
  source 1..75: mol_type = other DNA
acgttgcaggtgtgggcgaagtgccgttcaccatgattagccagtttggcgtacccgatgccgacagtgatgtgg

SEQ ID NO: 491955 - DNA, 75 bp, synthetic construct
  source 1..75: mol_type = other DNA
accaccgccgatctccactttaccgatgccgcaggcgatgactacaccgtctcgctgatcccgcagggcagttcg

SEQ ID NO: 491956 - DNA, 75 bp, synthetic construct
  source 1..75: mol_type = other DNA
actttaccgatgccgcaggcgatgactacaccgtctcgctgatcccagaaggcagttcgtccgtcggaccaggcc

SEQ ID NO: 491957 - DNA, 75 bp, synthetic construct
  source 1..75: mol_type = other DNA
cgattacggcatcccgccgggcgattacgacgtctcggtggtcaccaacaccggggaagaagaggtgccgattga

SEQ ID NO: 491958 - DNA, 75 bp, synthetic construct
  source 1..75: mol_type = other DNA
gacgcctgtaccaccgccgatctccactttaccgatgccgcaggcgatgactacaccgtctcgctgatcccgcaa

SEQ ID NO: 491959 - DNA, 75 bp, synthetic construct
  source 1..75: mol_type = other DNA
ttccttcagatggtaatggattctaatagggcatggaacaaagcagatacaccttcaaaggcaattcatgcagaa

SEQ ID NO: 491960 - DNA, 75 bp, synthetic construct
  source 1..75: mol_type = other DNA
gtccaggaggtggctctccgctggttccaccatgggctgatgatcagccacagcaaccgttaccctcgccgcaag

SEQ ID NO: 491961 - DNA, 75 bp, synthetic construct
  source 1..75: mol_type = other DNA
cgatgcgctggcgggggaaagcacgcggcccagggtcagccgtcttggggaagggacgttgattactttacgctg

SEQ ID NO: 491962 - DNA, 75 bp, synthetic construct
  source 1..75: mol_type = other DNA
ctgcaggtactgttggccgagatcagtctctacgaacaatcgatgcgcgagtgcgaggagcagctggcgcgctgg

SEQ ID NO: 491963 - DNA, 75 bp, synthetic construct
  source 1..75: mol_type = other DNA
gaggcctgcggcacggctcaccactggggccggttgatgcaggcggcggggcatcgcgtggtgctgctgcatccg

SEQ ID NO: 491964 - DNA, 75 bp, synthetic construct
  source 1..75: mol_type = other DNA
gaggcctgtggcacggcccactactggggacgtgtagcgcaagccctggggcatcaggtgaggctgctgcatccg

SEQ ID NO: 491965 - DNA, 75 bp, synthetic construct
  source 1..75: mol_type = other DNA
tccgcgagatgaagagtttgataagaaaactatcccggaatttgactgtgaacgtggttggaataagcacggata

SEQ ID NO: 491966 - DNA, 75 bp, synthetic construct
  source 1..75: mol_type = other DNA
cgatcaaactgcatgaaggctgggaaaacgagctggtgattggcgtggacgacacgttccctttttctctgcttg

SEQ ID NO: 491967 - DNA, 75 bp, synthetic construct
  source 1..75: mol_type = other DNA
ggaacaagtctttgcggtcgcgcctcatcatccgttagccctggaagaagagccgttaaatcgtcgtattattaa

SEQ ID NO: 491968 - DNA, 75 bp, synthetic construct
  source 1..75: mol_type = other DNA
atgacattgcctgtttttataacggtaattgcagaccatgacaagccgcagccgtcaggctgcctactcgacaag

SEQ ID NO: 491969 - DNA, 75 bp, synthetic construct
  source 1..75: mol_type = other DNA
gttatgctcgcggaaagcagagactttgctgaacttgtggcaatgaaagccagagcgctcatgaaagatatgaac

SEQ ID NO: 491970 - DNA, 75 bp, synthetic construct
  source 1..75: mol_type = other DNA
tcgaatacaaggagcacgttatccataaaaacgctgatgaaacagtgcacatgggggtaagtctggacatacgtt

SEQ ID NO: 491971 - DNA, 75 bp, synthetic construct
  source 1..75: mol_type = other DNA
gttatgctggcagaaagcagaaacttcgcagagcttgtggcaatgaaagccagtgcattcatgaaagacaggggc

SEQ ID NO: 491972 - DNA, 75 bp, synthetic construct
  source 1..75: mol_type = other DNA
ggggggcggtcatgaagtggcgtggggaacatttcaggggattatgcagtcgcgtccggatattcagcggttact

SEQ ID NO: 491973 - DNA, 75 bp, synthetic construct
  source 1..75: mol_type = other DNA
taattgtttcattaaataagttaactgtccaaaaaatgataaattggatggcaattgatgcgcctgaaaaccttg

SEQ ID NO: 491974 - DNA, 75 bp, synthetic construct
  source 1..75: mol_type = other DNA
ctatataattcattttttactgataaagtggttatctgggatgaatcagtaaaaaagttaagtggatttatgaga

SEQ ID NO: 491975 - DNA, 75 bp, synthetic construct
  source 1..75: mol_type = other DNA
gacactgcgcaggccggcgcttctacggcctcacaacttctcgacgaacaagaagccattaccgttttcgatttt

SEQ ID NO: 491976 - DNA, 75 bp, synthetic construct
  source 1..75: mol_type = other DNA
tgcataccgtgcgagaactggaaaagcaggcgatcaaactgcatgaaggctgggaaaacgagctggtgattggcg

SEQ ID NO: 491977 - DNA, 75 bp, synthetic construct
  source 1..75: mol_type = other DNA
atgagtaaagttgtacgcattattttcgaatacaaggagggcgttatccgtaaaaacgctgatggaagcacgcac

SEQ ID NO: 491978 - DNA, 75 bp, synthetic construct
  source 1..75: mol_type = other DNA
gtgacagcgggttacctgagactattgcacagcgttatcagcgagccggatgtcagttgtttttacctcattcaa

SEQ ID NO: 491979 - DNA, 75 bp, synthetic construct
  source 1..75: mol_type = other DNA
gctggcgataagcgcgatgtatgagttaatcgagtggtgggcagcgctggcaatgggccagggcgcagatgattt

SEQ ID NO: 491980 - DNA, 75 bp, synthetic construct
  source 1..75: mol_type = other DNA
ggataaatagcaaaaaaatgaaagcaaatgcactatttattgaggcgattgagtattatgttttaagaaaacttg

SEQ ID NO: 491981 - DNA, 75 bp, synthetic construct
  source 1..75: mol_type = other DNA
acgtccaaaaaaaatgctatagccgaagtgcgaccacctgtagggagttatgtagcagttgcagagttcgctttg

SEQ ID NO: 491982 - DNA, 75 bp, synthetic construct
  source 1..75: mol_type = other DNA
ttgtttgcacagcaccctgaattacgtccgacaggaaataatcgtcatcgctggtctgagctggcggggttgtga

SEQ ID NO: 491983 - DNA, 75 bp, synthetic construct
  source 1..75: mol_type = other DNA
gtgcttacgctggtggagcgtggcgacattacaggaatgagctttggctttcgcgcattatgcgaggagtggaat

SEQ ID NO: 491984 - DNA, 75 bp, synthetic construct
  source 1..75: mol_type = other DNA
gttggaagtatgccagtcgcatacagatggatagcggggtgattgaaatgtataaatttgatccaaagaatgcat

SEQ ID NO: 491985 - DNA, 75 bp, synthetic construct
  source 1..75: mol_type = other DNA
gctgcccaacatgaccgtcgcggaaaacatgttccttgggcgcgagccgcgcaagcggaacctgatcgtcgatga

SEQ ID NO: 491986 - DNA, 75 bp, synthetic construct
  source 1..75: mol_type = other DNA
gctggcgctggtgccggaagatcgcaaaaaagagggggcggtgctgggtctgtcgattcgcgacaacctgtcgct

SEQ ID NO: 491987 - DNA, 75 bp, synthetic construct
  source 1..75: mol_type = other DNA
tcgcagagcttgtggcaatgaaagccagtgcattcatgaaagacaggggtatggcttccggggttattaacggta

SEQ ID NO: 491988 - DNA, 75 bp, synthetic construct
  source 1..75: mol_type = other DNA
ttatggtttgattggagctcacatgaaagaaaatatggtgatgagccgcattttgttgaagctgtaaccatctca

SEQ ID NO: 491989 - DNA, 75 bp, synthetic construct
  source 1..75: mol_type = other DNA
gtacgggatgcccgtaaagaagcgaaaagccaggcagaacatctcagcgatgtgcttgtgaagaacagggcgcag

SEQ ID NO: 491990 - DNA, 75 bp, synthetic construct
  source 1..75: mol_type = other DNA
gcatcttctcttgctcttcaggatgaaataaaagaaaaagcggatgaaacagttcaggtttcccgggcttataca

SEQ ID NO: 491991 - DNA, 75 bp, synthetic construct
  source 1..75: mol_type = other DNA
tcgaactggcgcatatgtacatcgacaacgccaccatgcagctgattaaagatccatcacagtttgacgttctgc

SEQ ID NO: 491992 - DNA, 75 bp, synthetic construct
  source 1..75: mol_type = other DNA
atgaaaaaacaaaagaaaatgcgatgcgtattacgctgtattcgtatcccgcacgaaatcgaccataaaataaat

SEQ ID NO: 491993 - DNA, 75 bp, synthetic construct
  source 1..75: mol_type = other DNA
atagctggggatgtgtcggcttcttttgcttctgagtatgaaggcaaaaagattgagtcttacattccggaggtg

SEQ ID NO: 491994 - DNA, 75 bp, synthetic construct
  source 1..75: mol_type = other DNA
atcgacaacgccaccatgcagctgattaaagatccatcacagtttgacgttctgctgtgctccaacctgtttggc

SEQ ID NO: 491995 - DNA, 75 bp, synthetic construct
  source 1..75: mol_type = other DNA
ctgcgacggttgaaggttgtgagcaagccgatgccgtgctgtttggctcggtaggcggtccgaagtgggaacatt

SEQ ID NO: 491996 - DNA, 75 bp, synthetic construct
  source 1..75: mol_type = other DNA
ggccgcgaaggtagcggacaatatgaaaaagcgtttgataccgaggtgtatcaccgttttgagatcgagcgtatt

SEQ ID NO: 491997 - DNA, 75 bp, synthetic construct
  source 1..75: mol_type = other DNA
gaagccatcatcatgctggaagttgaaggctatgtcgaagtgcgtaaaggttcaggtattcacgtggtttccaac

SEQ ID NO: 491998 - DNA, 75 bp, synthetic construct
  source 1..75: mol_type = other DNA
attcccgtaccgtcgataactggtgtgatgaccacgatcaaatcctcaaggcgctgattcgcaaagatcctcatg

SEQ ID NO: 491999 - DNA, 75 bp, synthetic construct
  source 1..75: mol_type = other DNA
gccatccaggagcaggctcgcggcgaacaatgcttccgcgattccgagtgggatttgcagttccatattcaggtt

SEQ ID NO: 492000 - DNA, 75 bp, synthetic construct
  source 1..75: mol_type = other DNA
ggggcaggagctaatgcaggtgttagctatctgacggatggaactatagatcctacaacagcgattatcggtggt

SEQ ID NO: 492001 - DNA, 75 bp, synthetic construct
  source 1..75: mol_type = other DNA
gcgttaattcgcaaagatccccatgccgctaagctggcaatgtggcagcatctggaaaacaccaagatcatgtta

SEQ ID NO: 492002 - DNA, 75 bp, synthetic construct
  source 1..75: mol_type = other DNA
agttcaatgccgaccgctatctgttcgccgaaaacccggtagtgcatctcgatacggccaccagtggcagtaaat

SEQ ID NO: 492003 - DNA, 75 bp, synthetic construct
  source 1..75: mol_type = other DNA
gcggctcagcaccagatatcgcaggcaaaaacatcgccaacccgattgcacaaatcctgtcgctggcactgctgc

SEQ ID NO: 492004 - DNA, 75 bp, synthetic construct
  source 1..75: mol_type = other DNA
gaagaagcccagcatgaaatggctactgaagcggggattcatccctctcgcattgatgagatcgcagagtttttg

SEQ ID NO: 492005 - DNA, 75 bp, synthetic construct
  source 1..75: mol_type = other DNA
atgaaccacgatatcccactgaaatattttgatattgccgatgagtacgcgactgaatgcgcagaacctgtcgca

SEQ ID NO: 492006 - DNA, 75 bp, synthetic construct
  source 1..75: mol_type = other DNA
acacacctgcagaacggtgtactgctggatgaacaaaactgcctgatgctgcatgaactctggctgcagatcggt

SEQ ID NO: 492007 - DNA, 75 bp, synthetic construct
  source 1..75: mol_type = other DNA
ttattgcagtattaagccgccgtttcagttgcacgctggagcactggtacgccgagcagggctgcaatttctggg

SEQ ID NO: 492008 - DNA, 75 bp, synthetic construct
  source 1..75: mol_type = other DNA
tgtggggggaactggaatggtcttccccgacagatgatgatgagctgccggaagtcaccgcgccggagtggatag

SEQ ID NO: 492009 - DNA, 75 bp, synthetic construct
  source 1..75: mol_type = other DNA
atgaaccacgatatcccactgaaatatttcgatattgtcgatgaatacgcgagcgaatgcgcaaaatctgtcgca

SEQ ID NO: 492010 - DNA, 75 bp, synthetic construct
  source 1..75: mol_type = other DNA
atacacaggcgagatactggtatgagcaatcagcggaacaggaaaatccacgcgcgcaaagtaaactggggtgga

SEQ ID NO: 492011 - DNA, 75 bp, synthetic construct
  source 1..75: mol_type = other DNA
gcaagcgtcgccacaaagtgacgtcgatcgataaagccaacgtgctgcaatcctctattttatggcgggagatcg

SEQ ID NO: 492012 - DNA, 75 bp, synthetic construct
  source 1..75: mol_type = other DNA
atgtcgaagaattaccatattgccgttttacccggagatgggatcgggccggaagtgatgacccaggcactgaaa

SEQ ID NO: 492013 - DNA, 75 bp, synthetic construct
  source 1..75: mol_type = other DNA
ttatttagcatggaaaatatcgacaaggctgtgctctctatcgtggcgtggtttgtctatattgtgctgctgtgg

SEQ ID NO: 492014 - DNA, 75 bp, synthetic construct
  source 1..75: mol_type = other DNA
attgattaccaactgaagaacaagaagctggcgtttaaccaggaaatgccgccattgatgagtatcgagcgtaaa

SEQ ID NO: 492015 - DNA, 75 bp, synthetic construct
  source 1..75: mol_type = other DNA
tcgcaatatttatagttgctttcatcacctgtattagtcagccaaagaaaacaacgttgcgtgataaaaccatgg

SEQ ID NO: 492016 - DNA, 75 bp, synthetic construct
  source 1..75: mol_type = other DNA
aaggttatgtcgaagtgcgcaaaggctccggcattcatgtgatttcaaaccagcctcgccatcagcaagcggctg

SEQ ID NO: 492017 - DNA, 75 bp, synthetic construct
  source 1..75: mol_type = other DNA
gttctaccgtattctgaaaacccaaaataaatcacagctaagcagttggttcactcgagtccacgaaagcggttc

SEQ ID NO: 492018 - DNA, 75 bp, synthetic construct
  source 1..75: mol_type = other DNA
aaatagcacagcaactggtactcgagttctaccgtattctgaaaacctataataaatcacagctaagcagctggt

SEQ ID NO: 492019 - DNA, 75 bp, synthetic construct
  source 1..75: mol_type = other DNA
ctgaaaattgggaagggagagtcatgttacaaagatatcttgaattaacaatgaaagatcatcttggcttactat

SEQ ID NO: 492020 - DNA, 75 bp, synthetic construct
  source 1..75: mol_type = other DNA
gtttcagggaaatatcccgtattacaggcctgtcgcgtgtgacagtcagtcgctgggtgcgttcaggaacattcc

SEQ ID NO: 492021 - DNA, 75 bp, synthetic construct
  source 1..75: mol_type = other DNA
cactcgagtccacgaaagcggttcagcagaatttcggcgcgtggcggcggggatggaagctgatgctgcagctat

SEQ ID NO: 492022 - DNA, 75 bp, synthetic construct
  source 1..75: mol_type = other DNA
gtgaaaccatcgtcagggatgctgttgccaaatggcgtaatggctggatcccaccggttactactaccgccagac

SEQ ID NO: 492023 - DNA, 75 bp, synthetic construct
  source 1..75: mol_type = other DNA
gataaaaaattttctttaaaactgatgtgccatcaggggatggtccgcatcgaccgcagatcattatcggtcaga

SEQ ID NO: 492024 - DNA, 75 bp, synthetic construct
  source 1..75: mol_type = other DNA
tactgggtgacgtactccggatcttaccagataatggtaactgggtggggattttccggagtggtcatacaccaa

SEQ ID NO: 492025 - DNA, 75 bp, synthetic construct
  source 1..75: mol_type = other DNA
ggtggcgcgggatattatgatattgatgcaaatcctgtggcaaaagaaaatacgctctcttttcgcgggctaccg

SEQ ID NO: 492026 - DNA, 75 bp, synthetic construct
  source 1..75: mol_type = other DNA
gaggtggttgatgctgttatcgcaggccagaatcaggcttacagggaactaaggaaaataagagataatgtccag

SEQ ID NO: 492027 - DNA, 75 bp, synthetic construct
  source 1..75: mol_type = other DNA
taagctatctgaggatgatattaatagcttttacaaaactattaatatcaataaaggaacagtaaaaaaaatcat

SEQ ID NO: 492028 - DNA, 75 bp, synthetic construct
  source 1..75: mol_type = other DNA
tccagttaggagatggcgttctgaatctggcagacattgttgcggaatacgcccgtattcaaaaggaagaaacat

SEQ ID NO: 492029 - DNA, 75 bp, synthetic construct
  source 1..75: mol_type = other DNA
atggtggcccggggatttacaggcagtgaaaccatcgtcagggatgcggttgccaaatggcgtaaaggctggaac

SEQ ID NO: 492030 - DNA, 75 bp, synthetic construct
  source 1..75: mol_type = other DNA
aactaaaccacggccgtaaagtatatgactttatgcgctgggactactgggctttcggcatctctggtctgctgt

SEQ ID NO: 492031 - DNA, 75 bp, synthetic construct
  source 1..75: mol_type = other DNA
tatgcagccgcattagcaacaggcagcgttgccctgttaccggggagtgcccaggctatgtggttacttggtgcc

SEQ ID NO: 492032 - DNA, 75 bp, synthetic construct
  source 1..75: mol_type = other DNA
acatctggtactaccttgatggttatcctgatgttgtacctcttcggtggcccggtgctggaagggttctcattg

SEQ ID NO: 492033 - DNA, 75 bp, synthetic construct
  source 1..75: mol_type = other DNA
gcgactggctgcaggggtcgttattgcgctggcgcacgacgtgatcattacgttgggtattttgtcgttattcca

SEQ ID NO: 492034 - DNA, 75 bp, synthetic construct
  source 1..75: mol_type = other DNA
caagaccttactgtacgttataatgagctaattgactcgtcgactatcgactttaaaaatctatatgaaatagat

SEQ ID NO: 492035 - DNA, 75 bp, synthetic construct
  source 1..75: mol_type = other DNA
acaaactcagagagctttatgctacttatcaaaaaatatctacccctctgaaacacatgtttaattcattttttc

SEQ ID NO: 492036 - DNA, 75 bp, synthetic construct
  source 1..75: mol_type = other DNA
gaagatgctgaaacgccagatgtatggtcgagcaggatttgaactactcagtcagagggtaatgagtccactggc

SEQ ID NO: 492037 - DNA, 75 bp, synthetic construct
  source 1..75: mol_type = other DNA
ctatcgcgctgctgtctacgctttacccttcatggcgcgctgccgccacacaacccgctgaggctttacgttatg

SEQ ID NO: 492038 - DNA, 75 bp, synthetic construct
  source 1..75: mol_type = other DNA
tgatatgggctggagtctgacaccagaagtccggttccaaggaggagaaacacaagtcagctatgatcccctgac

SEQ ID NO: 492039 - DNA, 75 bp, synthetic construct
  source 1..75: mol_type = other DNA
ataccacttctgtggaagtaccggaagttgtgtcccgttttcagaaactttctaccatgctttcagccctgcctg

SEQ ID NO: 492040 - DNA, 75 bp, synthetic construct
  source 1..75: mol_type = other DNA
tgcagcactggaaaacaaagtaataccagtgtcagctgaactgccgccagcaaatgaaagtgttctgttatttga

SEQ ID NO: 492041 - DNA, 75 bp, synthetic construct
  source 1..75: mol_type = other DNA
accccggagaaccggaaaattgacctgagcgggcgctggggttttgacggggagaaaatcacggacctgctgacc

SEQ ID NO: 492042 - DNA, 75 bp, synthetic construct
  source 1..75: mol_type = other DNA
gctgccctgatgttgattatcggctgggagaaacgcttcttccgccgcgcggcgctgcaaactgctaaggagatt

SEQ ID NO: 492043 - DNA, 75 bp, synthetic construct
  source 1..75: mol_type = other DNA
tggcgctgggccaatcggtctggctaccgcggccatcgccagggctaaaggggcgcatgttgttgttgctgatat

SEQ ID NO: 492044 - DNA, 75 bp, synthetic construct
  source 1..75: mol_type = other DNA
caatcaggccagcgctattccgtcatcccatgcattccgtgtggcgagtgcgcagcctgtcgggaagagaaaacg

SEQ ID NO: 492045 - DNA, 75 bp, synthetic construct
  source 1..75: mol_type = other DNA
tgcggcactggaaaacaaaataataccagtgtcagctgaactgccgccagcaaatgaaagtgttctgttatttga

SEQ ID NO: 492046 - DNA, 75 bp, synthetic construct
  source 1..75: mol_type = other DNA
atgaccacctttacccaaaaagaactgattaaagaaatgaaagaccgcatcagcagcctcgacgtgcgagacgat

SEQ ID NO: 492047 - DNA, 75 bp, synthetic construct
  source 1..75: mol_type = other DNA
atgaccacctttacccaaaaagaactgattaaagaaattaaagatcgcatcagcagcctcgacgtccgagacgat

SEQ ID NO: 492048 - DNA, 75 bp, synthetic construct
  source 1..75: mol_type = other DNA
atgaccacctttacccaaaaagaactgattaaagaaataaaagagcgcatcagcagcctcgacgtacgagacgat

SEQ ID NO: 492049 - DNA, 75 bp, synthetic construct
  source 1..75: mol_type = other DNA
aaaatgcaaaaagtctctgccgcctcaccgctaacacaaaaaccagatcaggcacggcgtcgtttccgcctcggg

SEQ ID NO: 492050 - DNA, 75 bp, synthetic construct
  source 1..75: mol_type = other DNA
gtatccgcattatgcaggccatcattggcggcattatcgccggttttggcgcacgtctggcaatgggctgtaacc

SEQ ID NO: 492051 - DNA, 75 bp, synthetic construct
  source 1..75: mol_type = other DNA
taattcatcagttcgttgagccagatgtactgattttttgtgttattgcggcctttacaattacgctttttatca

SEQ ID NO: 492052 - DNA, 75 bp, synthetic construct
  source 1..75: mol_type = other DNA
tttagtgttggcgaagattaccaacgtaacgttgtagaaaataaaaatatggtcaagggtgtgatcactttttaa

SEQ ID NO: 492053 - DNA, 75 bp, synthetic construct
  source 1..75: mol_type = other DNA
acgcacggctgacgctcctttccatagtctttcctggggacagcagcgtctggcgctgatcgtccgcgcgctggt

SEQ ID NO: 492054 - DNA, 75 bp, synthetic construct
  source 1..75: mol_type = other DNA
gcctgtatttcccatcgtcttgagttcgtgccggacggtgacctctatcgttatgcgctgacaaaaataaactga

SEQ ID NO: 492055 - DNA, 75 bp, synthetic construct
  source 1..75: mol_type = other DNA
ctggcaaattgtcgggccaaatggcgcgggaaaatcgacgttattaagcctgattactggcgatcatccgcaagg

SEQ ID NO: 492056 - DNA, 75 bp, synthetic construct
  source 1..75: mol_type = other DNA
taggagcacaagtctgtcttgcgggtatctgtgcggcaatattggtttatctctccgcaaaactggccgcagcac

SEQ ID NO: 492057 - DNA, 75 bp, synthetic construct
  source 1..75: mol_type = other DNA
agggaatgactgctcaattttgtgtatggcttggaatattcgcacttatgattctagcgggctttgtttcaatgg

SEQ ID NO: 492058 - DNA, 75 bp, synthetic construct
  source 1..75: mol_type = other DNA
gcaatcaggacgttatggtcatgagtccggacagcgatttcttccgctacatgaagacgccgacttccgcgacgc

SEQ ID NO: 492059 - DNA, 75 bp, synthetic construct
  source 1..75: mol_type = other DNA
tttgtccagtttgctggcgtgctggcggattgcacgttagcggaaactggcgctaaagaggaactgctccaacaa

SEQ ID NO: 492060 - DNA, 75 bp, synthetic construct
  source 1..75: mol_type = other DNA
aagggtttcttcgcgggaaatgtgtaccacgagatctgaaagtgaatgaaacaaatgctgagtacctggtacgta

SEQ ID NO: 492061 - DNA, 75 bp, synthetic construct
  source 1..75: mol_type = other DNA
tgcggcactggaaaacaaagtaataccagtgtcagttgaacttccaccagcaaatgaaagtgttctgttatttga

SEQ ID NO: 492062 - DNA, 75 bp, synthetic construct
  source 1..75: mol_type = other DNA
gcacgtttcgtcttggcgacacaaaaacgctgcaattgcctcagctaacgttaaacgcgggtgatagttgggcgt

SEQ ID NO: 492063 - DNA, 75 bp, synthetic construct
  source 1..75: mol_type = other DNA
atttgttgatgtgctgattagcgaaggtgaaacgcagttgttgtttgtttcacaccacgccgaagatgcgccagc

SEQ ID NO: 492064 - DNA, 75 bp, synthetic construct
  source 1..75: mol_type = other DNA
agcggaataataccgatatgctgagtcctggcgaagctgacaccgggcgtaccacggctgagatcattcaggatg

SEQ ID NO: 492065 - DNA, 75 bp, synthetic construct
  source 1..75: mol_type = other DNA
tttactatggatttccatggtgggttgttggggctggcgttgatgatgtggcccgcagtttgttttatgctctta

SEQ ID NO: 492066 - DNA, 75 bp, synthetic construct
  source 1..75: mol_type = other DNA
cagctaaaaaaattcaatcgttgatcatcgagctgcgcacgagacttttgtcgattgaagggcaatctaacgtat

SEQ ID NO: 492067 - DNA, 75 bp, synthetic construct
  source 1..75: mol_type = other DNA
tagaaaccaaaggattaactgccgccatagaggccgcagacgccatggtgaagtcggcaaatgtattgctggtcg

SEQ ID NO: 492068 - DNA, 75 bp, synthetic construct
  source 1..75: mol_type = other DNA
gccgaccgctttgtgaccaaagagaagaaagacctgatcgtcgactcttacatcaaatggcgcatcagcgatttc

SEQ ID NO: 492069 - DNA, 75 bp, synthetic construct
  source 1..75: mol_type = other DNA
atcagggaacgcatttccggctggttatccgcaatgctgaagggcagctacgctggcggtgctggaattttgaac

SEQ ID NO: 492070 - DNA, 75 bp, synthetic construct
  source 1..75: mol_type = other DNA
gaataatagtttggatatgcgcgttattttgaatcaaacagtatttttaccattggaattattaatagataagtc

SEQ ID NO: 492071 - DNA, 75 bp, synthetic construct
  source 1..75: mol_type = other DNA
acatgtattacattataggatttaagtattttaagctgaatttttataattctctattagataaaattagaagaa

SEQ ID NO: 492072 - DNA, 75 bp, synthetic construct
  source 1..75: mol_type = other DNA
cgctgccttacatgaccagttcggcatcaacgccgcagaatcggcacaagaagtggcgcaaatcgccgacatcgt

SEQ ID NO: 492073 - DNA, 75 bp, synthetic construct
  source 1..75: mol_type = other DNA
cgccaaacgcgctggtaaccccagaagataccgctgatgtactgaatattttccgctgctttggcgaagcggaag

SEQ ID NO: 492074 - DNA, 75 bp, synthetic construct
  source 1..75: mol_type = other DNA
aggtgggatgccacgcgcgcaggcgtataaatttgccgcccaggcggtaatgggatctgcaaaaatggtgctgga

SEQ ID NO: 492075 - DNA, 75 bp, synthetic construct
  source 1..75: mol_type = other DNA
agtgcgcagttgtataccctgctgaaacctgaaagtctgtcactgcaggtggaaggacgcctcatcaaactggac

SEQ ID NO: 492076 - DNA, 75 bp, synthetic construct
  source 1..75: mol_type = other DNA
acagagcacaaaggatgtcgccgcaggctccgctttacccggccatgcggggcatgggcttgtgggttttcaggt

SEQ ID NO: 492077 - DNA, 75 bp, synthetic construct
  source 1..75: mol_type = other DNA
tgggttctgcaaaaatggtgctggaaaccggagaacatccgggcgcgttgaaagatatggtttgctcaccaggag

SEQ ID NO: 492078 - DNA, 75 bp, synthetic construct
  source 1..75: mol_type = other DNA
ccccggcatttctgctgcgaccattattgtctcgcttcctgcgccgcagcttgccgcagttagtggtcctgtcga

SEQ ID NO: 492079 - DNA, 75 bp, synthetic construct
  source 1..75: mol_type = other DNA
gtccgcacaacgtataacggacacactcatatatgtccggacggggaaactcaacaaccgaaccaaccaatggcg

SEQ ID NO: 492080 - DNA, 75 bp, synthetic construct
  source 1..75: mol_type = other DNA
ctgcagcggagaacgcgcgcaggctgcgtgacgcagttaaacgcggcacgatagctgcagttaaaatgaatcctc

SEQ ID NO: 492081 - DNA, 75 bp, synthetic construct
  source 1..75: mol_type = other DNA
ataaagagtacgatttttatcaaatcggacaccgctataaagaagatgttgttgaaaataaatcattagttaaag

SEQ ID NO: 492082 - DNA, 75 bp, synthetic construct
  source 1..75: mol_type = other DNA
gacatttcaggtcggggaccttgaaaacgtcaatatcactcactgggcagtaatgccaaaagcgccggaggctga

SEQ ID NO: 492083 - DNA, 75 bp, synthetic construct
  source 1..75: mol_type = other DNA
gcacgaagtttgttttatgctgtgacagttatcgttatattccttattggatggggagttggtattgttttcttt

SEQ ID NO: 492084 - DNA, 75 bp, synthetic construct
  source 1..75: mol_type = other DNA
caatggtttactcacgcaacgtccgagcgaatcgactggagcgcaccatcagtaggtgaccccgttactgttgtt

SEQ ID NO: 492085 - DNA, 75 bp, synthetic construct
  source 1..75: mol_type = other DNA
ggcacgttgatctggcgctcctggaattttgaggactgtgccgggtactggatgaaccagtacatcagggatttc

SEQ ID NO: 492086 - DNA, 75 bp, synthetic construct
  source 1..75: mol_type = other DNA
atggtctggcgtacttggaattttgaggacggtgccgggtactggatgaaccatgtcatccgtgattttgggatt

SEQ ID NO: 492087 - DNA, 75 bp, synthetic construct
  source 1..75: mol_type = other DNA
gagcgggaaaaaacgacgcgcagcagtgaatccaccagcattcgtgtggcggtagaaaaggttgatcaattgatt

SEQ ID NO: 492088 - DNA, 75 bp, synthetic construct
  source 1..75: mol_type = other DNA
cgttacaaaaagaagtcgatcctgagcagtacttggcgctaaagaatttagatgacagctcggttcatgctattg

SEQ ID NO: 492089 - DNA, 75 bp, synthetic construct
  source 1..75: mol_type = other DNA
aggggctgccggacggcgcctttacccgcgaacaggcggaagccgttgccgcacagtaccggaacgtctttatcg

SEQ ID NO: 492090 - DNA, 75 bp, synthetic construct
  source 1..75: mol_type = other DNA
cgtaataacggaacaatggtctggcgtacctggaattttgaggacggtgccgggtactggatgaaccatgtcatc

SEQ ID NO: 492091 - DNA, 75 bp, synthetic construct
  source 1..75: mol_type = other DNA
ggattacggcatcccgccgggcgattacgacgtctcggtggtgaccaacaccggggaagaagaggtgccgattga

SEQ ID NO: 492092 - DNA, 75 bp, synthetic construct
  source 1..75: mol_type = other DNA
ccgtgttttttaaccaggtcatgaccaatgccccgttactgctgggtattgtgacctgtctgggctacatcctgc

SEQ ID NO: 492093 - DNA, 75 bp, synthetic construct
  source 1..75: mol_type = other DNA
atgcctatagctgggtggggtacgcggtgctgttggctctggcgttgaacatctgttatgtgctgctgcgtcgta

SEQ ID NO: 492094 - DNA, 75 bp, synthetic construct
  source 1..75: mol_type = other DNA
gtctacggcattaacggcgcaatttccgatacctacgcttcaatgatggcgaccatcgaccgcatgggcgatgcc

SEQ ID NO: 492095 - DNA, 75 bp, synthetic construct
  source 1..75: mol_type = other DNA
tatatatatactgctaagatttgatgtcgttgctccgtatatatttgttgttgctatgctaactaatactttaaa

SEQ ID NO: 492096 - DNA, 75 bp, synthetic construct
  source 1..75: mol_type = other DNA
ccatcggtcagctgattgcggttggcatcttggtcgcctgcggttcctcaatcctgattattcctggctttatcc

SEQ ID NO: 492097 - DNA, 75 bp, synthetic construct
  source 1..75: mol_type = other DNA
aactattgagcgtatgggcgatgcctatagctgggtgggttatgcggtgttgttggcactggcgctaaacatctg

SEQ ID NO: 492098 - DNA, 75 bp, synthetic construct
  source 1..75: mol_type = other DNA
tcacatgtggttgtacctgcaatacataaagatcgccatcaaatccgcagagttttgcatgaacatctcgggtat

SEQ ID NO: 492099 - DNA, 75 bp, synthetic construct
  source 1..75: mol_type = other DNA
ctcaaactggtctggctctgctggcttgacttaatgaccggaaacagccttgacgactggacgaaaaacctgaaa

SEQ ID NO: 492100 - DNA, 75 bp, synthetic construct
  source 1..75: mol_type = other DNA
tctgctggtgcatcatccgatgctggaaggcattctgctgtctgaatgtgagcgcctgggacagcatcctctggc

SEQ ID NO: 492101 - DNA, 75 bp, synthetic construct
  source 1..75: mol_type = other DNA
cggtcagtttacgcttaccaacagtatcagacccgttacgagctgctccatgaaaactaccagaaatggctgacc

SEQ ID NO: 492102 - DNA, 75 bp, synthetic construct
  source 1..75: mol_type = other DNA
tcgttccccagagtctgcaccggctgatttatggtccggacaaacggagttccccgtctctggatgatgatctgg

SEQ ID NO: 492103 - DNA, 75 bp, synthetic construct
  source 1..75: mol_type = other DNA
ccatcgtgtgctaaaaagcttggaagataatctcttcgcggcacttggtgagcgtaatatcgctgagctaaaaac

SEQ ID NO: 492104 - DNA, 75 bp, synthetic construct
  source 1..75: mol_type = other DNA
aagtggcttcccgccttcaacagcgcaccacggccatcatgcgttatgcagtgcaaagcgggttaattgattaca

SEQ ID NO: 492105 - DNA, 75 bp, synthetic construct
  source 1..75: mol_type = other DNA
tatgccgtacagaacgattacatcgactcaaatccagctagtgatatggccggtgcgctatcgacaaccaaagcg

SEQ ID NO: 492106 - DNA, 75 bp, synthetic construct
  source 1..75: mol_type = other DNA
ggtggcggcagcggacacgagccgatgcattgtggttatatcggtcaggggatgctttctggggcctgtccgggc

SEQ ID NO: 492107 - DNA, 75 bp, synthetic construct
  source 1..75: mol_type = other DNA
tgggggatcttactggcgttaggtcgccgctcccatatgccgattgtgcgtatcttatcggtcatttttatcgag

SEQ ID NO: 492108 - DNA, 75 bp, synthetic construct
  source 1..75: mol_type = other DNA
ttccgctggcaatcggtaagagcgaagttcgcggcggtgtgccgcacgagctcgttcttaacgcaattgccgatt

SEQ ID NO: 492109 - DNA, 75 bp, synthetic construct
  source 1..75: mol_type = other DNA
tagcggtaaaagatagcctgtatacagccggacgtcgcggtgttgcgggtacagtttttgttgaaaagattgtcg

SEQ ID NO: 492110 - DNA, 75 bp, synthetic construct
  source 1..75: mol_type = other DNA
aagggcaatatgaagcggcagagtcgctggcgttgggttactggaaaactcagggctggttattctgccacaggc

SEQ ID NO: 492111 - DNA, 75 bp, synthetic construct
  source 1..75: mol_type = other DNA
aggtcgccgctcccatatgccgattgtgcgtatcttatcggtcatttttatcgagttctggcgcggcgtaccgct

SEQ ID NO: 492112 - DNA, 75 bp, synthetic construct
  source 1..75: mol_type = other DNA
tggcggtttttttggtcttgagcgggttgaaacccggcaatggggcgggctgacgctaactttaattattgcatc

SEQ ID NO: 492113 - DNA, 75 bp, synthetic construct
  source 1..75: mol_type = other DNA
atggatcatcaaccgtcagaggcagagcgcagcactgacggatctgatggatcagtacgtgctcctggcataccg

SEQ ID NO: 492114 - DNA, 75 bp, synthetic construct
  source 1..75: mol_type = other DNA
gaaacatcggctgtggtaaaaaacgtgacgccagctacgccgcgtaaaatggcagtggcagatagcggggagaac

SEQ ID NO: 492115 - DNA, 75 bp, synthetic construct
  source 1..75: mol_type = other DNA
gtgtggagcagaaactggataaggggattggcttcgcccgctttgccaaatcgctggctgcggctaaaggcgtcc

SEQ ID NO: 492116 - DNA, 75 bp, synthetic construct
  source 1..75: mol_type = other DNA
agttttgaaaacaagcgtgcggctctggcagcctcccttgaggagatcatgaacaaagccgcagaggaaggccgc

SEQ ID NO: 492117 - DNA, 75 bp, synthetic construct
  source 1..75: mol_type = other DNA
ctgctgcacagtctcggcatccgtttggtggtggtctatggcgcgcgtccgcaaatcgatgcaaatctggcagca

SEQ ID NO: 492118 - DNA, 75 bp, synthetic construct
  source 1..75: mol_type = other DNA
atctcgacagcaaagggcgcttatcagtgcctacccgttaccgggaacagctgcttgagaacgctgccggtcaaa

SEQ ID NO: 492119 - DNA, 75 bp, synthetic construct
  source 1..75: mol_type = other DNA
tcagcaacagcagcaacagcagcgtgaaacatcggctgtggtaaaaaccgtgacaccagctacgccgcgtaaaat

SEQ ID NO: 492120 - DNA, 75 bp, synthetic construct
  source 1..75: mol_type = other DNA
ttgtgtgtaacccatgagatggggtttgcgcgaaccgtcgctgaccgggtgatttttatggatcgtggcgaaata

SEQ ID NO: 492121 - DNA, 75 bp, synthetic construct
  source 1..75: mol_type = other DNA
atccctgcacttcgtcaggtgccgttcaatatccgtgtgcacgcccaggtgtccggcggtgctgccggctgggtg

SEQ ID NO: 492122 - DNA, 75 bp, synthetic construct
  source 1..75: mol_type = other DNA
aggccgccacggcgcagccggtgaaacaggccggtaacgggaatgtggccgcggtggcttctgcgccggtgatcc

SEQ ID NO: 492123 - DNA, 75 bp, synthetic construct
  source 1..75: mol_type = other DNA
ttcttgaccgtgatggcaccattaatgtcgatcacggctatgtccacgagatcgacaactttgaatttatcgacg

SEQ ID NO: 492124 - DNA, 75 bp, synthetic construct
  source 1..75: mol_type = other DNA
aacgcggcggattgggtgttaaatagcctggcagacctgccgcaagcgataaaaaagcagcaaaaaccggcgtaa

SEQ ID NO: 492125 - DNA, 75 bp, synthetic construct
  source 1..75: mol_type = other DNA
cctcatctgaccgttctacagaactgtaccctggcaccgatttgggtacgcaagatgcctaaaaaagaggctgaa

SEQ ID NO: 492126 - DNA, 75 bp, synthetic construct
  source 1..75: mol_type = other DNA
agaatatacgcgtgactgacggcaaaacgctggagctggtgaagcaggctgcggggacattgcaactggacatca

SEQ ID NO: 492127 - DNA, 75 bp, synthetic construct
  source 1..75: mol_type = other DNA
cagtttggcggcacggagttacgtctcaaactggtctggctctgctggcttgacttaatgaccggaaacaacctt

SEQ ID NO: 492128 - DNA, 75 bp, synthetic construct
  source 1..75: mol_type = other DNA
taatcaatttatgaccattctgttggtatcgttgctatgtgcatttatcacagtggtgttagggcatgttttctc

SEQ ID NO: 492129 - DNA, 75 bp, synthetic construct
  source 1..75: mol_type = other DNA
cgtccactttttcaggattaatcggtaacgccattctcgccggaggcgtaatattaattatccagctggtgtctg

SEQ ID NO: 492130 - DNA, 75 bp, synthetic construct
  source 1..75: mol_type = other DNA
ggccacaccgcccctggatgatgatctgatagtgaatttatgcaccagtgaacatctgctggttcatcatccgat

SEQ ID NO: 492131 - DNA, 75 bp, synthetic construct
  source 1..75: mol_type = other DNA
acgagctgctccatgaaaactaccagaaatggctgaccggcttcacccggcacgccgtatcctggggcgtgtgtc

SEQ ID NO: 492132 - DNA, 75 bp, synthetic construct
  source 1..75: mol_type = other DNA
atttatggtccggacaaacggagctccccgtccctggatgatgatctggtggtgaatttatgcaccagcgaacac

SEQ ID NO: 492133 - DNA, 75 bp, synthetic construct
  source 1..75: mol_type = other DNA
acaaatagatgcgaatctggcagcgcatcgccacgaaccgctgtatcacaaaaatatacgtgtaaccgacggcaa

SEQ ID NO: 492134 - DNA, 75 bp, synthetic construct
  source 1..75: mol_type = other DNA
gcgctctatccgttcccggaagagaagattggggaaatggcctgtgtggcagttcacccggattaccgcagctca

SEQ ID NO: 492135 - DNA, 75 bp, synthetic construct
  source 1..75: mol_type = other DNA
ggacgcatccggcggattgacgaagaagcaattcatcgccaactggatagcggtgccattgtgctgatgggcccg

SEQ ID NO: 492136 - DNA, 75 bp, synthetic construct
  source 1..75: mol_type = other DNA
aaggccacgagatggagatctggatcaataaccggcaggaagaaaaccctgcgctgactcgtctgatggacgagt

SEQ ID NO: 492137 - DNA, 75 bp, synthetic construct
  source 1..75: mol_type = other DNA
cgataacacaactattgcctgcgctgcgctctatccgttcccggaagagaaaattggcgaaatggcctgcgtggc

SEQ ID NO: 492138 - DNA, 75 bp, synthetic construct
  source 1..75: mol_type = other DNA
ttgttgcacagcctcggcatccgtctggtggtggtctatggcgcacgtccgcagatcgacgcaaatctggctgcg

SEQ ID NO: 492139 - DNA, 75 bp, synthetic construct
  source 1..75: mol_type = other DNA
gcagcccaccggtgcggtctggctgatgtccagcacgaatgccctggcgctgtccatgcgtaaaaatgcgctggg

SEQ ID NO: 492140 - DNA, 75 bp, synthetic construct
  source 1..75: mol_type = other DNA
gggcactggccacgcagatccccgcatttcgtcagaaactgaatgagggctggtatcaggtgcgcattgccgggc

SEQ ID NO: 492141 - DNA, 75 bp, synthetic construct
  source 1..75: mol_type = other DNA
tggtatcaggtgcgcattgccgggcgtgatgcaggcgaaaatgaattatctgcccgtcttaatgaaccgctggca

SEQ ID NO: 492142 - DNA, 75 bp, synthetic construct
  source 1..75: mol_type = other DNA
ggcggtggcagatgtctcccctgcgtccatcacccatgatgtgaagggcacggcgtcaagcggtaatccggatgc

SEQ ID NO: 492143 - DNA, 75 bp, synthetic construct
  source 1..75: mol_type = other DNA
ggtgaatgccccggatatttatctggcggatgacggcggcgtggcagtggatatgtcccgagaagcatcactgga

SEQ ID NO: 492144 - DNA, 75 bp, synthetic construct
  source 1..75: mol_type = other DNA
ttcataaggaaaagtcagcaatgaatactggtgaacagattaaaagttttgaaaacaagcgtgcggcgctggcag

SEQ ID NO: 492145 - DNA, 75 bp, synthetic construct
  source 1..75: mol_type = other DNA
ggggtcacgggtgatttcacaggaaatcagcacggcagatgaaggaaacggcggtcaggttgtggtgattggacg

SEQ ID NO: 492146 - DNA, 75 bp, synthetic construct
  source 1..75: mol_type = other DNA
aatggtgccgtgatccacatcgtgccgcgtctggcgggggctaaaagtggcggtgtatttcaggcggtgctgggt

SEQ ID NO: 492147 - DNA, 75 bp, synthetic construct
  source 1..75: mol_type = other DNA
tggtatcaggtacgcattgccgggcgtgatgcaggtgaaactgaattatcagcccgtcttaatgaaccgctggca

SEQ ID NO: 492148 - DNA, 75 bp, synthetic construct
  source 1..75: mol_type = other DNA
tggtgtattccagattgtcctgggagcagccgccattgccggatcattctttactgccggagccacccttgcagc

SEQ ID NO: 492149 - DNA, 75 bp, synthetic construct
  source 1..75: mol_type = other DNA
tcgcgggtgatttcacaggaaatcagcacggctgatgaggggggcggcggtcaggtagtggtgattggtcgctga

SEQ ID NO: 492150 - DNA, 75 bp, synthetic construct
  source 1..75: mol_type = other DNA
acggcaacgctggtgaagcccgtaccggatatgccgtcgcaactggcagcccgactggatgaggcatgggcagcc

SEQ ID NO: 492151 - DNA, 75 bp, synthetic construct
  source 1..75: mol_type = other DNA
ctcatgttctctcttggggcaggtatggttttaggcggtgttgcgcagatgctggcaccgaaagccaaaacgcct

SEQ ID NO: 492152 - DNA, 75 bp, synthetic construct
  source 1..75: mol_type = other DNA
atttttcttcgctagataatatggttgcacagggtaattcgctgccggtgctgtatggcgaaatgcgcgtggggt

SEQ ID NO: 492153 - DNA, 75 bp, synthetic construct
  source 1..75: mol_type = other DNA
cgtcgcgactcacatccaatggcagtcatgtgtggtattaccggcgcgctggcggcgttctatcacgactcgctg

SEQ ID NO: 492154 - DNA, 75 bp, synthetic construct
  source 1..75: mol_type = other DNA
gtgatgcaggcgaaaacgaattatcagcccgtcttaatgagccgctggaaaatggtgccgtgatccacatcgtac

SEQ ID NO: 492155 - DNA, 75 bp, synthetic construct
  source 1..75: mol_type = other DNA
tccagtgaactcagatatgcccgctggtctgaaattgatattgacaatgccatgtggactattccagccgaacgc

SEQ ID NO: 492156 - DNA, 75 bp, synthetic construct
  source 1..75: mol_type = other DNA
ctgtacggtgaaatgcgcgtggggtcgcgggtggtctctcaggagatcagaacggcagacgaaggggatggtggt

SEQ ID NO: 492157 - DNA, 75 bp, synthetic construct
  source 1..75: mol_type = other DNA
ggtgaaatgcgcgtgggctcccgagtggtatctcaggagatcagcactgcagatgaaggcgatggtggtcaggtt

SEQ ID NO: 492158 - DNA, 75 bp, synthetic construct
  source 1..75: mol_type = other DNA
gttttatattcattattagtcgtatttgtttttattcccgatctcatcatcctccctttgaaatggattaattaa

SEQ ID NO: 492159 - DNA, 75 bp, synthetic construct
  source 1..75: mol_type = other DNA
tgcaaccgttggtcgattcaccgcgtctgctgtttatcgtcattatggtggctatcctgattgtcggcatggtca

SEQ ID NO: 492160 - DNA, 75 bp, synthetic construct
  source 1..75: mol_type = other DNA
ggccagtcgtcttaatttaccccgtcagcaaaaagcaacgaaacgagaaatctggcaatcttttgtttccggtat

SEQ ID NO: 492161 - DNA, 75 bp, synthetic construct
  source 1..75: mol_type = other DNA
aaacgcattgttgccctgccgatgaaactggtggggcataaaccaggcgggctgggctacgtcggcgtgctggca

SEQ ID NO: 492162 - DNA, 75 bp, synthetic construct
  source 1..75: mol_type = other DNA
gctgggctacgtcggcgtgctggcggcaatgattatggcgagcctttccggttctgccgttgcagataccgccgc

SEQ ID NO: 492163 - DNA, 75 bp, synthetic construct
  source 1..75: mol_type = other DNA
tcgattcaccgcgtctgctgtttatcgtcattatggtggctatcctgattgtcggcatggtcggtaatgctgcca

SEQ ID NO: 492164 - DNA, 75 bp, synthetic construct
  source 1..75: mol_type = other DNA
tctttgtgctggcgggtgaaatcatgaatgcgggcggcttgtcaaaacgcattgttgacctgccgatgaaactgg

SEQ ID NO: 492165 - DNA, 75 bp, synthetic construct
  source 1..75: mol_type = other DNA
caggggccagtatgatcctgggcggagtggcgcagatgctggcaccgaaagccaggacgcccacggcagccagta

SEQ ID NO: 492166 - DNA, 75 bp, synthetic construct
  source 1..75: mol_type = other DNA
actttggcatgtactcattggcgcggcgaaaaccacctcagtggttatgtttctggtggcctcggcacaagtttc

SEQ ID NO: 492167 - DNA, 75 bp, synthetic construct
  source 1..75: mol_type = other DNA
gcctgttgggtggcattgccatcggtttgcctattgcctggtcgctactgttgtgcggggcggcgcttatgttct

SEQ ID NO: 492168 - DNA, 75 bp, synthetic construct
  source 1..75: mol_type = other DNA
ggtaagaggcgttttcccttacgtactggttttatattcactattggttgtttttatatttattccggaactcat

SEQ ID NO: 492169 - DNA, 75 bp, synthetic construct
  source 1..75: mol_type = other DNA
gttgcgctggttgcagctgctatctggatgccgggtatcggtattgcagccagcaatattatgttttccatgggg

SEQ ID NO: 492170 - DNA, 75 bp, synthetic construct
  source 1..75: mol_type = other DNA
ggtgaaatgcgcgtgggttcccgagtggtatctcaggagatcagcactgcagacgaaggcgatggtggtcaggtt

SEQ ID NO: 492171 - DNA, 75 bp, synthetic construct
  source 1..75: mol_type = other DNA
ggtgaaatgcgcgtgggatcccgtgtggtatctcaggagatcagcactgcagaagaaggcgatggtggtcaggtt

SEQ ID NO: 492172 - DNA, 75 bp, synthetic construct
  source 1..75: mol_type = other DNA
gtattccgaaaaatggcaacgacgaacgcattcggtctggcgtcaccgccactggcacgcatctgccttcacggg

SEQ ID NO: 492173 - DNA, 75 bp, synthetic construct
  source 1..75: mol_type = other DNA
atttttcctcgctggataatctgctggcgcagggaaatccggtaccggtggtgtatggcgagatgctgacgggct

SEQ ID NO: 492174 - DNA, 75 bp, synthetic construct
  source 1..75: mol_type = other DNA
gcggcgctgattgcggttgcatggtggaaccctgtgggctggctgggggccgcggctgtatcgggtatgtatgca

SEQ ID NO: 492175 - DNA, 75 bp, synthetic construct
  source 1..75: mol_type = other DNA
tcttacggcgcaagtattgatgccgatttcagttttagccgcttgagtttgttagatcgtggctttgtctacgcc

SEQ ID NO: 492176 - DNA, 75 bp, synthetic construct
  source 1..75: mol_type = other DNA
cttaagtttattggatcgtggttttgtctacgccattgtgcatgttcgtggtggcggtgagctggggcaacagtg

SEQ ID NO: 492177 - DNA, 75 bp, synthetic construct
  source 1..75: mol_type = other DNA
gcaacaatggtacgaagacggtaaatttctgaagaagaaaaatacgtttaatgattatcttgatgcctgcgatgc

SEQ ID NO: 492178 - DNA, 75 bp, synthetic construct
  source 1..75: mol_type = other DNA
gatgctgatgtgctctccgacagttacaccgagtggaaacacgacgctgaaaaattgattaagcgtgtcgaaaga

SEQ ID NO: 492179 - DNA, 75 bp, synthetic construct
  source 1..75: mol_type = other DNA
gcgtaaagatcacgaatacagtctcgatcattatcagcaccgcttttatctacgctctaaccgtaacggcaaaaa

SEQ ID NO: 492180 - DNA, 75 bp, synthetic construct
  source 1..75: mol_type = other DNA
taattccgccacgcgataacatcatgctggaagggtttacgctgtttaccgactggctggtggttgaagagcgtc

SEQ ID NO: 492181 - DNA, 75 bp, synthetic construct
  source 1..75: mol_type = other DNA
tatggaccatatattaaactttcgtgggatgttacaaaagatttgaaccttgggatccgttaccggtatgactgg

SEQ ID NO: 492182 - DNA, 75 bp, synthetic construct
  source 1..75: mol_type = other DNA
taataaaaaggaaaatgccgcattaaatgatgttcaggttgaagttaattacgcgattaaacttgatgatcaatg

SEQ ID NO: 492183 - DNA, 75 bp, synthetic construct
  source 1..75: mol_type = other DNA
agtcgttattttcagcagagacgctgaaggtggtttataacagtgccggggtcattaccggcatcggcagggtgg

SEQ ID NO: 492184 - DNA, 75 bp, synthetic construct
  source 1..75: mol_type = other DNA
ctgtaattcttcttggtttacctttgtgctctcaggcattaactcttaatctacgtgggggatacagaagcgcca

SEQ ID NO: 492185 - DNA, 75 bp, synthetic construct
  source 1..75: mol_type = other DNA
tcgtacgcacactgctgccaacgatggcgggcatctccgggctgccaaatcgtcgattccagttttttaactggt

SEQ ID NO: 492186 - DNA, 75 bp, synthetic construct
  source 1..75: mol_type = other DNA
gcatcgttgggatggatatttaacgtataaaataaataaagactttacctttgcatggcaaacaactgtttatag

SEQ ID NO: 492187 - DNA, 75 bp, synthetic construct
  source 1..75: mol_type = other DNA
ttccagtatgagtaacaccttcaccttcctcaacgccggcattttaatctctatcttcctcaacgcctggctgat

SEQ ID NO: 492188 - DNA, 75 bp, synthetic construct
  source 1..75: mol_type = other DNA
gcagttagtggtgctgtcgaatctggaactatctgataaccgacatatccgcatgacggcgacaattggcggtaa

SEQ ID NO: 492189 - DNA, 75 bp, synthetic construct
  source 1..75: mol_type = other DNA
gaagcgacgtggaacgatgtgcaactggaagactcgctgggaatggaggtggggtatcggctgatcccgatggtc

SEQ ID NO: 492190 - DNA, 75 bp, synthetic construct
  source 1..75: mol_type = other DNA
tgatcatcaactttatggttatcaccaaaggtgccgggcgtattgcggaagtgggcgcgcgctttgttctcgatg

SEQ ID NO: 492191 - DNA, 75 bp, synthetic construct
  source 1..75: mol_type = other DNA
gggaggactggagccagggctggcggatcgtttactggcgcaaactcaggaagcgctatcccgtcaggagatgtt

SEQ ID NO: 492192 - DNA, 75 bp, synthetic construct
  source 1..75: mol_type = other DNA
ggggggactggagccagggctggcggatcgcttgttggcgcaaactcaggaagcgctatcccgtcaggagatgtt

SEQ ID NO: 492193 - DNA, 75 bp, synthetic construct
  source 1..75: mol_type = other DNA
aatggcagaaaataatgctgtagtcgaagcaacgtggaatgatgtgcagctggaagattccctgggaatggaagt

SEQ ID NO: 492194 - DNA, 75 bp, synthetic construct
  source 1..75: mol_type = other DNA
tgtgagaaaatactgacgccgacagagtggaaactgctgtgggttaagctggaaggaaaaccgcttccgtcacag

SEQ ID NO: 492195 - DNA, 75 bp, synthetic construct
  source 1..75: mol_type = other DNA
cttatgcctgttcattgtgcactgcctgcaatggggtatgtccggtaaaaatacctctggcacaactaatacaaa

SEQ ID NO: 492196 - DNA, 75 bp, synthetic construct
  source 1..75: mol_type = other DNA
tggatgtcatacatggtcggcatgtgggcgttcagctttattcttcgcttctttgatttgcaacgtatcctgacc

SEQ ID NO: 492197 - DNA, 75 bp, synthetic construct
  source 1..75: mol_type = other DNA
ggcctcgatacaccgctggaacgtttgttactacaggcgctgcagggcgggggaggactggagccagggctggcg

SEQ ID NO: 492198 - DNA, 75 bp, synthetic construct
  source 1..75: mol_type = other DNA
ccggaagtcctggcaaccgcgggaagccacacgctgaatgtgatgcaaaaaggcgggcgggcagcccgccaggcc

SEQ ID NO: 492199 - DNA, 75 bp, synthetic construct
  source 1..75: mol_type = other DNA
tttgcttcagaagtgatgcttgccgagtgtgtgcttgtatcacccgatgaagctccatcaaaagcattagatctc

SEQ ID NO: 492200 - DNA, 75 bp, synthetic construct
  source 1..75: mol_type = other DNA
ttccctgcgcttatcgccgtccgtcagcacatacacagaaaaacgcgaagacccgtatttcaaatccagttacga

SEQ ID NO: 492201 - DNA, 75 bp, synthetic construct
  source 1..75: mol_type = other DNA
taccgcattttgcaccgcagcaacgacatcaccgccttgcgcccttatctgagcgacaaactggcgacactgctt

SEQ ID NO: 492202 - DNA, 75 bp, synthetic construct
  source 1..75: mol_type = other DNA
ctgcgcgtgacaaccatggtggcattatcatttactgtaaaattaagaaatctggcgagagacttgatgactggc

SEQ ID NO: 492203 - DNA, 75 bp, synthetic construct
  source 1..75: mol_type = other DNA
taaagccggggctaaatcggttcgccgggcggtctcttttgcggccaacaacggtattgaggcgttaacgctgta

SEQ ID NO: 492204 - DNA, 75 bp, synthetic construct
  source 1..75: mol_type = other DNA
gttcttgcgtccagggcggccctgacagcgtggctcagcaattctatgactaccgtattcagcatcgcagtaacg

SEQ ID NO: 492205 - DNA, 75 bp, synthetic construct
  source 1..75: mol_type = other DNA
gcaatgttgggttatcgatgatgtgcgctatttaggtggcagcgttcacgccaaagcgggaacattacgtcagtc

SEQ ID NO: 492206 - DNA, 75 bp, synthetic construct
  source 1..75: mol_type = other DNA
tgcctgtaccaccgtcacgccagcttataaagataacggcccccgcaccggttcctgtgtccagggggggcctga

SEQ ID NO: 492207 - DNA, 75 bp, synthetic construct
  source 1..75: mol_type = other DNA
ctggaaaggcgctgaccggaccgacgctatatttatttctcgccgtgggagtcggctttctcgccagcaggccta

SEQ ID NO: 492208 - DNA, 75 bp, synthetic construct
  source 1..75: mol_type = other DNA
gccaaccgagaagtgaaaataaacgaagagtttcaggactacgcgtgggtaaaacctgaagatctggtgcactat

SEQ ID NO: 492209 - DNA, 75 bp, synthetic construct
  source 1..75: mol_type = other DNA
cggtgagcgcattgaagaagcattacgtcgtgaaatcagagaagagctgggcgagcaactgattcttactgacat

SEQ ID NO: 492210 - DNA, 75 bp, synthetic construct
  source 1..75: mol_type = other DNA
gaactacggtggacgttgggatatagtccagggagtcaggcaactggctgaaaaggtgcagcaaggaaacctgca

SEQ ID NO: 492211 - DNA, 75 bp, synthetic construct
  source 1..75: mol_type = other DNA
aaatcagctataaccagcaatttggcgagaatatctggaaggcgcaatcaggcctgagccggatgacggcgacaa

SEQ ID NO: 492212 - DNA, 75 bp, synthetic construct
  source 1..75: mol_type = other DNA
tgaagagtcacgataaaggcaatacgttccgcatcatcatgaatgcgcttgatgagctcggctacgatgttgccg

SEQ ID NO: 492213 - DNA, 75 bp, synthetic construct
  source 1..75: mol_type = other DNA
cagcgtggctcagcaattctatgactaccgtattcagcatcgcagtaacgacattaccgctctgcgtccgtactt

SEQ ID NO: 492214 - DNA, 75 bp, synthetic construct
  source 1..75: mol_type = other DNA
cgtcattaacagcggtgaccgatcaaaacggaatcgcgacaacaagcgtgaaaggtgagataacggggagcgtca

SEQ ID NO: 492215 - DNA, 75 bp, synthetic construct
  source 1..75: mol_type = other DNA
cggcacctaccccgtgacagttagcgtgaacaattatggtgtcagtgatacgaaacaggtgactttgattgccga

SEQ ID NO: 492216 - DNA, 75 bp, synthetic construct
  source 1..75: mol_type = other DNA
actacggcaagttaacgcagacccgtcttgagccgtcggtggcggcagcgaaagcgggaaaattgccggaaggat

SEQ ID NO: 492217 - DNA, 75 bp, synthetic construct
  source 1..75: mol_type = other DNA
cggcggagagggtatcgcaacgctgatccctgtattgaatggtgttcatcaagctggtctgagtaccacaataca

SEQ ID NO: 492218 - DNA, 75 bp, synthetic construct
  source 1..75: mol_type = other DNA
acctgcaaattggcattcgggcgatcgatttgctgcgcgcagaaggcgaccgactgcattcacgtaaattacgaa

SEQ ID NO: 492219 - DNA, 75 bp, synthetic construct
  source 1..75: mol_type = other DNA
tggtggctggcccggcagacacctcgcagtccgtccttaagagcaatcggtcatcactgaaaggggactataccg

SEQ ID NO: 492220 - DNA, 75 bp, synthetic construct
  source 1..75: mol_type = other DNA
ttaaaattaccggatttgcgcggtgagtttattcgcgggtgggatgatgggcgaggtgttgattccgcgagactg

SEQ ID NO: 492221 - DNA, 75 bp, synthetic construct
  source 1..75: mol_type = other DNA
tacccggaactggcaaaggcttatccggcaaataaattgcctgatttacgtggtgagtttattcgtggctgggat

SEQ ID NO: 492222 - DNA, 75 bp, synthetic construct
  source 1..75: mol_type = other DNA
aaacaaggcgaccagagctggcaggatgaggtgctgatgattcaggaaggccagtgttgggtcatcgacgatgtg

SEQ ID NO: 492223 - DNA, 75 bp, synthetic construct
  source 1..75: mol_type = other DNA
atgcacttcatgaatccctagcctatttcaatcgatattgccgctattcgctaaaaaggcttgctgcggattatc

SEQ ID NO: 492224 - DNA, 75 bp, synthetic construct
  source 1..75: mol_type = other DNA
ttggtaacagatgtgaaaacttagacttattatctacgataaattgtcaaaatgatgtgtttggaatggttatta

SEQ ID NO: 492225 - DNA, 75 bp, synthetic construct
  source 1..75: mol_type = other DNA
tatgactcaaaagaggaatgggaactggcggcaatcttcagaagagcatatacacagggcaagggattggatggt

SEQ ID NO: 492226 - DNA, 75 bp, synthetic construct
  source 1..75: mol_type = other DNA
atggcaaacagacacaggcgcgtcttgaaccgtcagtggctgccgcgaaagcaggaatactgccggagggctttt

SEQ ID NO: 492227 - DNA, 75 bp, synthetic construct
  source 1..75: mol_type = other DNA
tgcatcatgctggaacctggtacacgggtttcgcatgcagctgtacgcctggctgcgcaagttggaacattgttg

SEQ ID NO: 492228 - DNA, 75 bp, synthetic construct
  source 1..75: mol_type = other DNA
cgctggttggcgtgatcctgtttcagtcagcatatgttgcggaagtcgtgcgaggcggattacaggcgctgccta

SEQ ID NO: 492229 - DNA, 75 bp, synthetic construct
  source 1..75: mol_type = other DNA
tgcttatttgtatcaattgtccgaaaaggttactgcgaatggcgggcatgtatattttgcccgtaccagagagga

SEQ ID NO: 492230 - DNA, 75 bp, synthetic construct
  source 1..75: mol_type = other DNA
gatttttatggatcgtggggaaatagtggagcaagctgcacctaatgaattttttgcgcatcctaaatcagagcg

SEQ ID NO: 492231 - DNA, 75 bp, synthetic construct
  source 1..75: mol_type = other DNA
ggatacgaagactttaaggaattaccttatgcctgttcattgtgcactgcctgtaatggggtatgtccggtaaaa

SEQ ID NO: 492232 - DNA, 75 bp, synthetic construct
  source 1..75: mol_type = other DNA
tgccactcaactggccatcaaactgaaagctgaaaaaatgattggtttttgctcttcccagggcgtcactaatga

SEQ ID NO: 492233 - DNA, 75 bp, synthetic construct
  source 1..75: mol_type = other DNA
gagacaaagtgttaattatttgccgactttctgcaacgcgatatttggcggaaaacaatccctggccccagatat

SEQ ID NO: 492234 - DNA, 75 bp, synthetic construct
  source 1..75: mol_type = other DNA
tggtgttcgcttcttcgataacgcgttgaccctgggcactatcataaaatacacaggcaaggctcgtcgcctgtc

SEQ ID NO: 492235 - DNA, 75 bp, synthetic construct
  source 1..75: mol_type = other DNA
gtgagcaggattgactaccaggaattggctgctgctaacgctttcctagctgatgtacgggcggtggcgtttaac

SEQ ID NO: 492236 - DNA, 75 bp, synthetic construct
  source 1..75: mol_type = other DNA
tgcccttgaacgtaccggcagcgatgagccgctgacgctggtgaaagatttaaaagctaacggtgcaaacaccgt

SEQ ID NO: 492237 - DNA, 75 bp, synthetic construct
  source 1..75: mol_type = other DNA
atgctgcgccaggcccgttccgttggcctgaaaactcagtttatggggccggaaggtgtgggtaacgcatcattg

SEQ ID NO: 492238 - DNA, 75 bp, synthetic construct
  source 1..75: mol_type = other DNA
acgttggaacctggcgaaagtataacggtggcagtattgccggccgctggtttgatctgacttcatttgatgatg

SEQ ID NO: 492239 - DNA, 75 bp, synthetic construct
  source 1..75: mol_type = other DNA
attgaactgctggtgcattactttttacatctgcatacccgtcgtctggggtcggtttatcctggcattgctcct

SEQ ID NO: 492240 - DNA, 75 bp, synthetic construct
  source 1..75: mol_type = other DNA
gatcaggggccaggagataatataagtaaaatattcgctaccatgatcgataatatggatcagggagtgttagtt

SEQ ID NO: 492241 - DNA, 75 bp, synthetic construct
  source 1..75: mol_type = other DNA
ctaatttctttctttcccgacattgccgatgaaattgcttttgtggcagaaaatggcggctgggtagtgagcgaa

SEQ ID NO: 492242 - DNA, 75 bp, synthetic construct
  source 1..75: mol_type = other DNA
tgccctggcgctgtccatgcgtaaaaatgcgctgggtcagaaggaatatccggacatgaccctgctgggcgggac

SEQ ID NO: 492243 - DNA, 75 bp, synthetic construct
  source 1..75: mol_type = other DNA
attgtctcccagtacgtgggtgaccagctgatactggtgaatgccccggatatttatctggcggatgatggaggc

SEQ ID NO: 492244 - DNA, 75 bp, synthetic construct
  source 1..75: mol_type = other DNA
aaatctgctgaataatggcacaacggagcaaagtgatgtaacagaggtcactgaggcgcacctgtcactcgatga

SEQ ID NO: 492245 - DNA, 75 bp, synthetic construct
  source 1..75: mol_type = other DNA
cagtgtcgatacctttgttggtatgccgttcaacatcgccggttacggcattctcacccacttcctcgcgaagat

SEQ ID NO: 492246 - DNA, 75 bp, synthetic construct
  source 1..75: mol_type = other DNA
atcgggtgaacgcggaaggaaagctgacgcttgacgacaagcaggttgaaacgaccctcagagtgaagccactgg

SEQ ID NO: 492247 - DNA, 75 bp, synthetic construct
  source 1..75: mol_type = other DNA
gggcatccggaaaacgaacgttgcgatgaactggctcgcacagcagcgatgaatcccacgctggaagatacgggc

SEQ ID NO: 492248 - DNA, 75 bp, synthetic construct
  source 1..75: mol_type = other DNA
aaattatggggaatagacgacagcgaagtggtggtctttggcgatggcggtaacgatattgagatgctgcgtcag

SEQ ID NO: 492249 - DNA, 75 bp, synthetic construct
  source 1..75: mol_type = other DNA
aagtggtggtctttggcgatggcggtaacgatatcgaaatgctgcgccaggctggctttagctttgcgatggaaa

SEQ ID NO: 492250 - DNA, 75 bp, synthetic construct
  source 1..75: mol_type = other DNA
gatgaacttggaatccccaaacgcatcctcaactcctgcctcgtacagcgtagcgtagacacttttgttggtatg

SEQ ID NO: 492251 - DNA, 75 bp, synthetic construct
  source 1..75: mol_type = other DNA
atgagcggatttggtcgtgtaaacactatggtcgatggtattacccagagtttttacggaacctctacctccgga

SEQ ID NO: 492252 - DNA, 75 bp, synthetic construct
  source 1..75: mol_type = other DNA
cgctctgcaacagttgctacaaatctaccaggctaccagtgagtggcagaaagcaattgatgttgccgaacgcct

SEQ ID NO: 492253 - DNA, 75 bp, synthetic construct
  source 1..75: mol_type = other DNA
agtgtggttttactgcatacacgctttactggcattgtccgtcctgccgtgcctggtcaaccattaaaccgattc

SEQ ID NO: 492254 - DNA, 75 bp, synthetic construct
  source 1..75: mol_type = other DNA
ggaagcgcgccagcaatccccggctggctgcgtgatggtattcgccgcccgtattcgccaggaggtgcatcatga

SEQ ID NO: 492255 - DNA, 75 bp, synthetic construct
  source 1..75: mol_type = other DNA
gcacaggtctatattacgcgtcagcttcagcgtcatccgaccatgcgtgtgttccataagctaatggattaccac

SEQ ID NO: 492256 - DNA, 75 bp, synthetic construct
  source 1..75: mol_type = other DNA
agtgtggttttaccgcttacacgctctactggcattgtccatcttgtcgggcatggtcaaccattaaaccaattc

SEQ ID NO: 492257 - DNA, 75 bp, synthetic construct
  source 1..75: mol_type = other DNA
cgacatggtgggcgagaaggtgcgtagtaagccgcgttatcactgccagaagtgtggttttaccgcttacacgct

SEQ ID NO: 492258 - DNA, 75 bp, synthetic construct
  source 1..75: mol_type = other DNA
gtgcaaaaattgcctacatcaacggactgaaatcaccatcagagcagcagagattacttgtgttactggcagaga

SEQ ID NO: 492259 - DNA, 75 bp, synthetic construct
  source 1..75: mol_type = other DNA
ttggttttcctcattatgccgcatggaaaatcgccgatcagatggcaaaaacacctgaagcagcacttaacttta

SEQ ID NO: 492260 - DNA, 75 bp, synthetic construct
  source 1..75: mol_type = other DNA
gcgatcgtgcgacgcgtgaaaaactgtttattgcgggctggacgcgagcggaaaaaatgatgccaatgatacccg

SEQ ID NO: 492261 - DNA, 75 bp, synthetic construct
  source 1..75: mol_type = other DNA
ttcacatcgaggccaccagcgaacaggaagcacgccagcaatctcctgatggctgcgtgatggtattcgctgccc

SEQ ID NO: 492262 - DNA, 75 bp, synthetic construct
  source 1..75: mol_type = other DNA
ggaagcccgccaacaatccccaactggctgcgtgatgatatttgccgcccgtattcgtcaggaggtatgccgtgc

SEQ ID NO: 492263 - DNA, 75 bp, synthetic construct
  source 1..75: mol_type = other DNA
aggcctcatgattgtggcaggactggtggacagcaaaaccggaaagccaaagtttagtgctgccgaactggtagg

SEQ ID NO: 492264 - DNA, 75 bp, synthetic construct
  source 1..75: mol_type = other DNA
gtgaattagcccttcagcacatggccagtgacgatctcgatcgcgctatggccttgttgaaaaaaggggcggcag

SEQ ID NO: 492265 - DNA, 75 bp, synthetic construct
  source 1..75: mol_type = other DNA
agagttttatgttgaagaaatggttcgaggtcgtgagacccctaaaatcgattcaagatatcgtcatttaagggc

SEQ ID NO: 492266 - DNA, 75 bp, synthetic construct
  source 1..75: mol_type = other DNA
aggaaaacgtagaggtcataggtacacttgccacttcacttgcatttttcgccacagcatgggccgcttacgagg

SEQ ID NO: 492267 - DNA, 75 bp, synthetic construct
  source 1..75: mol_type = other DNA
atggctaaatcagcaaaacgaatcaggaacgccgcagcggcttatgttccgcaatcccgcgatgctgtggtatgt

SEQ ID NO: 492268 - DNA, 75 bp, synthetic construct
  source 1..75: mol_type = other DNA
gagcaggaagctctcgagaaaacaggcgcgaccagttcccggacaacggacaaaaacctgcaatcacttgacgca

SEQ ID NO: 492269 - DNA, 75 bp, synthetic construct
  source 1..75: mol_type = other DNA
tgtgggtgcgaaaaaatctgttctccagctggagcaatagcctgctgactattggctgcatatggttgatgtggg

SEQ ID NO: 492270 - DNA, 75 bp, synthetic construct
  source 1..75: mol_type = other DNA
tcgggttgaaacccggcaatggggcgggttgacgctaactttaattattgcatcagttgggattgcgggggcgct

SEQ ID NO: 492271 - DNA, 75 bp, synthetic construct
  source 1..75: mol_type = other DNA
aagggcgggactcgcacaacctgaataaatacatctggcgttttatcgccctgagcacggctaagccgcgcgtga

SEQ ID NO: 492272 - DNA, 75 bp, synthetic construct
  source 1..75: mol_type = other DNA
ggaagcacgccagcaatctcctgatggctgtgtgatggtattcgcctcccgtattcgtcaggaggtgcaccatga

SEQ ID NO: 492273 - DNA, 75 bp, synthetic construct
  source 1..75: mol_type = other DNA
cgtataaccggaatattcaattacgtaaacagtcatccggcattgtggaaagttggcatgattgctggcgcgaaa

SEQ ID NO: 492274 - DNA, 75 bp, synthetic construct
  source 1..75: mol_type = other DNA
tctccagcaatgggtttctttctggtttgttgaagttaaacgacttgccgccgcgaaacgttttcagttaatccg

SEQ ID NO: 492275 - DNA, 75 bp, synthetic construct
  source 1..75: mol_type = other DNA
atggttttattcatgttgttagcattatttatttttataccggagcttattaccgctcctcttaaatggatgagt

SEQ ID NO: 492276 - DNA, 75 bp, synthetic construct
  source 1..75: mol_type = other DNA
aagggcgggactcgcacaacctgaataaattcatctggcgttttatcgccctgagcacggcacaaccgcgcgtga

SEQ ID NO: 492277 - DNA, 75 bp, synthetic construct
  source 1..75: mol_type = other DNA
cgcccgtcatgtttccattaataccttctcgcagatgacgctgcacagcatgcagcgcggcaaaattatgacctg

SEQ ID NO: 492278 - DNA, 75 bp, synthetic construct
  source 1..75: mol_type = other DNA
ggcggagattgttatcctgctgaaccgcctgccgccggactggctgatccaccagacaaatgcggcacagttcag

SEQ ID NO: 492279 - DNA, 75 bp, synthetic construct
  source 1..75: mol_type = other DNA
cgtcgtctgccaggttccggtttgctggtctatggtcgaggcgtcagttgtgaactgaccgtggatgaagaaggc

SEQ ID NO: 492280 - DNA, 75 bp, synthetic construct
  source 1..75: mol_type = other DNA
tggccggcggtctaaccggaaacagcaccgcatcagcagcagtgggagcacagagcgggaagaatgctgtcgaga

SEQ ID NO: 492281 - DNA, 75 bp, synthetic construct
  source 1..75: mol_type = other DNA
ggcgggcgacctctccctccggggcaaaacactgaataccgcagggaccacgcagggacagaatctcaccgtgca

SEQ ID NO: 492282 - DNA, 75 bp, synthetic construct
  source 1..75: mol_type = other DNA
ggcgcagcttcatcccgatccggaagaaggcgatctggcgaagggattcaccgtcccgcgcaacacggccttttt

SEQ ID NO: 492283 - DNA, 75 bp, synthetic construct
  source 1..75: mol_type = other DNA
ccctgatttacacgattattccgaggtcagagttaatcagggtgttggtatcacctgcctgaactaccatggtcg

SEQ ID NO: 492284 - DNA, 75 bp, synthetic construct
  source 1..75: mol_type = other DNA
acgaagagttccaccgttttctactggattgtggcgtatcgacagacagcattgtttttgttatcaaccaggctg

SEQ ID NO: 492285 - DNA, 75 bp, synthetic construct
  source 1..75: mol_type = other DNA
aattactattcatttaataaactcgacgaagttttttttaatagtgatggagtaactgctattgcctcttgtatt

SEQ ID NO: 492286 - DNA, 75 bp, synthetic construct
  source 1..75: mol_type = other DNA
tgagctggatgagtttttagctgcactcgcgccattacacgttagatttgatcgtcagtgcgttaatccgggtga

SEQ ID NO: 492287 - DNA, 75 bp, synthetic construct
  source 1..75: mol_type = other DNA
tgtattctttaaagaagcgctctttgagcgttattcagagatttggcatctgcataaaaactataccgcagatcc

SEQ ID NO: 492288 - DNA, 75 bp, synthetic construct
  source 1..75: mol_type = other DNA
ccctgatttacacgattattccgaggtcaggattaatcagggcgttgggatcacctgcctgaactaccatggtcg

SEQ ID NO: 492289 - DNA, 75 bp, synthetic construct
  source 1..75: mol_type = other DNA
gttcagttgaagggatactagttgcttcgaaaagcgacagaaacacttatcagcaatgcaaggccgggaaatgtg

SEQ ID NO: 492290 - DNA, 75 bp, synthetic construct
  source 1..75: mol_type = other DNA
tggccggaggtcttaccggaaacagcaccgcatcagcagcagtgggcgcacagagcgggaagaatgctgttgaga

SEQ ID NO: 492291 - DNA, 75 bp, synthetic construct
  source 1..75: mol_type = other DNA
ctcagtggcagccgcctgactgttaatacccacgaatttaaccagagcggccgcactggcgcgaagggcaaagtg

SEQ ID NO: 492292 - DNA, 75 bp, synthetic construct
  source 1..75: mol_type = other DNA
cggggctgaatgtaaacgcggtgaggctgtaaacaaagcgattgcagcagcgcttgttgggggggctacaggtgg

SEQ ID NO: 492293 - DNA, 75 bp, synthetic construct
  source 1..75: mol_type = other DNA
agtgaaaagctcacccacagcgggaaaagcagtgccccgtcgctcagcctcagtgcgccggaactgaccagcagc

SEQ ID NO: 492294 - DNA, 75 bp, synthetic construct
  source 1..75: mol_type = other DNA
cggtgctgtgagcggtgaacttatcgcaggtgcaatcgcgaaggttttatatccggatgagaaagacctgtcgaa

SEQ ID NO: 492295 - DNA, 75 bp, synthetic construct
  source 1..75: mol_type = other DNA
gatgtgggccacgacctgctgataagcagccagcaggacaccagtaagtacgacagtaaacagaccagcgtggct

SEQ ID NO: 492296 - DNA, 75 bp, synthetic construct
  source 1..75: mol_type = other DNA
tgaccgctggcaacggcaccacggcactgagcggcagcgggattgcgatgaatgccagcggcagcctgcaggcag

SEQ ID NO: 492297 - DNA, 75 bp, synthetic construct
  source 1..75: mol_type = other DNA
ccaacagtaacctggaatgcagcaggtggatattatcaggctaaaatcgaaggtgatgacccatttaaggcaggt

SEQ ID NO: 492298 - DNA, 75 bp, synthetic construct
  source 1..75: mol_type = other DNA
gcacagcgagcaccggggtattccttggctgttccggctacgctctgccaccgaaagagcgttgcaaaaccacca

SEQ ID NO: 492299 - DNA, 75 bp, synthetic construct
  source 1..75: mol_type = other DNA
gattacggacaggccgtagcctcgtggaatcagtatgctcaggacaataatctgacaccggagcaggttcaagaa

SEQ ID NO: 492300 - DNA, 75 bp, synthetic construct
  source 1..75: mol_type = other DNA
tcacaactgaataatcagtccttctttggctatacacaggatgaatacaatgtgtatcgctattacggcaaactg

SEQ ID NO: 492301 - DNA, 75 bp, synthetic construct
  source 1..75: mol_type = other DNA
aatgccagcggcagcctgcaggcaggcggggacgtcagcctgaccagcaggggagatatcactctcgacggtttt

SEQ ID NO: 492302 - DNA, 75 bp, synthetic construct
  source 1..75: mol_type = other DNA
tacagaaagaaaattcgctcagcatttgatcatgctcttaaagaacaggataacagtcaattaacgattaacaaa

SEQ ID NO: 492303 - DNA, 75 bp, synthetic construct
  source 1..75: mol_type = other DNA
gtcattgattgcttgtatgctgtctcgttggtacttagagaactacaccggaaaagttctaatcattgtccctac

SEQ ID NO: 492304 - DNA, 75 bp, synthetic construct
  source 1..75: mol_type = other DNA
gtttcttctttgataataaattcaaggaaaataaataacaaccacagttggcttcctgatagccaatctagaatt

SEQ ID NO: 492305 - DNA, 75 bp, synthetic construct
  source 1..75: mol_type = other DNA
cgtttgggaaacacggtcctgtcagccagcggaaaaaatgtcactctgcttccggacaacagcggtatacaaaaa

SEQ ID NO: 492306 - DNA, 75 bp, synthetic construct
  source 1..75: mol_type = other DNA
cgtcaaccgtatgggggttgatccgtggcacaattgggaggcgcactatgaagtgttgcctggtaaagagaaggt

SEQ ID NO: 492307 - DNA, 75 bp, synthetic construct
  source 1..75: mol_type = other DNA
ggtgagatgatttaccatggcgaaatgatgctgcttgacgcgaagttaatacctgttgatatcaaatttgaaaag

SEQ ID NO: 492308 - DNA, 75 bp, synthetic construct
  source 1..75: mol_type = other DNA
ccgcagtcatggcgtaccactacgggcgttgttcggcccaatttgtggcgcaattttacttgtggttggcgcctg

SEQ ID NO: 492309 - DNA, 75 bp, synthetic construct
  source 1..75: mol_type = other DNA
aatcgccttatcgcggttataatgaaaatacaaaggcaattccgctgattagttatgaaggtgattctttttatg

SEQ ID NO: 492310 - DNA, 75 bp, synthetic construct
  source 1..75: mol_type = other DNA
aataaattttttaagggagaaaaagacgatgtcgaaactgtcaatgtcatcttacgcccaaaagtttatttccgg

SEQ ID NO: 492311 - DNA, 75 bp, synthetic construct
  source 1..75: mol_type = other DNA
cctcatactggcgcaactcgcttgcagatgctgagtcaggaaagggctgttttgaacggaaagacgcccaaaatt

SEQ ID NO: 492312 - DNA, 75 bp, synthetic construct
  source 1..75: mol_type = other DNA
ttcccgtaccatcagaagaattacccattgttgctgtatttgacactggggtaagccccatcgcggcaacaatta

SEQ ID NO: 492313 - DNA, 75 bp, synthetic construct
  source 1..75: mol_type = other DNA
caaagattaaataaaataagtcgtggagatgtagaatttaataaagttaatgatgaagctaatagatttttggta

SEQ ID NO: 492314 - DNA, 75 bp, synthetic construct
  source 1..75: mol_type = other DNA
cagtgactattactatggcatttcagagagtgagtcccgtcgtagcggtctggcaagttattccgcgcaggatgc

SEQ ID NO: 492315 - DNA, 75 bp, synthetic construct
  source 1..75: mol_type = other DNA
ggacaaaagtgatgcctgcactgcgtaaaggcgatgaagatcgtatcttaccggcagtccataaagaccatgctc

SEQ ID NO: 492316 - DNA, 75 bp, synthetic construct
  source 1..75: mol_type = other DNA
atgtacacgcatgaacagatagatggatatcatgccctgaggcttcatgtaattgtcaagggaacgaaccctggt

SEQ ID NO: 492317 - DNA, 75 bp, synthetic construct
  source 1..75: mol_type = other DNA
atcaaccgatttacaccacatccacctgtgctacaggaaataaaatatattcctgtgaacattattctggtgctg

SEQ ID NO: 492318 - DNA, 75 bp, synthetic construct
  source 1..75: mol_type = other DNA
tcctgtgagcattattccggtggtgcaacatgggatatccgaaagccgtatatagataaagttctggttattaat

SEQ ID NO: 492319 - DNA, 75 bp, synthetic construct
  source 1..75: mol_type = other DNA
tacaggcaaaagaggggcgtgatgtaacacctggtgattttaccgcccagttaaccgcaacgtttgagtatattt

SEQ ID NO: 492320 - DNA, 75 bp, synthetic construct
  source 1..75: mol_type = other DNA
tacaggcgaaaagcggccgtgatgtgacgatcggtgaatttaccgcctctttaactgcgacatttgagtatattt

SEQ ID NO: 492321 - DNA, 75 bp, synthetic construct
  source 1..75: mol_type = other DNA
atggtattcgagtaatgtcacctgggatgtgcgtaaatcctataccagacaggttcttgttattgatacatcaaa

SEQ ID NO: 492322 - DNA, 75 bp, synthetic construct
  source 1..75: mol_type = other DNA
ggcaggttgcacaactgaccagaagcatactgtggtgggagtccgtcaccatcaacggacagacagtcatggttc

SEQ ID NO: 492323 - DNA, 75 bp, synthetic construct
  source 1..75: mol_type = other DNA
attaaaagtggtagcacactcgatatcagcgcccgcaatgccacactgtccggtgatgccggagcaaaagacaga

SEQ ID NO: 492324 - DNA, 75 bp, synthetic construct
  source 1..75: mol_type = other DNA
aaccgttccggtggtgttctgatgagccggaatgcactgaatgtcagtactgcgaccctgagtaaccagagcacg

SEQ ID NO: 492325 - DNA, 75 bp, synthetic construct
  source 1..75: mol_type = other DNA
gcacagttgcgggagaccccggaatacagagaggtcatgaaaggctacggtacgggcagtacgccgcagatggtg

SEQ ID NO: 492326 - DNA, 75 bp, synthetic construct
  source 1..75: mol_type = other DNA
tatctacgccggaaaagacgggtttgatgtcactgttgggaatcacactcagctcaatggtgcggtaattgcgtc

SEQ ID NO: 492327 - DNA, 75 bp, synthetic construct
  source 1..75: mol_type = other DNA
agcggaggcctcagtatcttcgccggtatcaatggttcagaaggcagggagaaaggcaacggtaccacctggacc

SEQ ID NO: 492328 - DNA, 75 bp, synthetic construct
  source 1..75: mol_type = other DNA
aacgtaccgttgggtattatcgccctgcttctggcaatgcgttttctgccacccaatggttctcgcgccagtaaa

SEQ ID NO: 492329 - DNA, 75 bp, synthetic construct
  source 1..75: mol_type = other DNA
tatttgattgaacgcgtacatgcaggattgctgggtgctttagggttgttcatcatggctgcggggcttttttcc

SEQ ID NO: 492330 - DNA, 75 bp, synthetic construct
  source 1..75: mol_type = other DNA
tgctgcgcctgaagcaaattaacggcctgcaagagttgtttgccgaccgtcaatattcccgcgcctggacggtta

SEQ ID NO: 492331 - DNA, 75 bp, synthetic construct
  source 1..75: mol_type = other DNA
attacccgtcgtgatatcaaaaacttactcgagatggctgcgggtcttcctcaacaaaacaaaaaaccgtacaac

SEQ ID NO: 492332 - DNA, 75 bp, synthetic construct
  source 1..75: mol_type = other DNA
gatttacggctatgttgaagatcttcccgcagccccgcgccagcgaaaacttagtggaagtacgattccagtgct

SEQ ID NO: 492333 - DNA, 75 bp, synthetic construct
  source 1..75: mol_type = other DNA
gtgaatttccacaccgaagaggtgatgctggacaaaattaccggaaaaacgccggtggcggcctatgtctccccg

SEQ ID NO: 492334 - DNA, 75 bp, synthetic construct
  source 1..75: mol_type = other DNA
gaggttaagcgcctgaagttgcttgaggaagagaacgccagactcaagaagctgcttgccgaagccatgctggat

SEQ ID NO: 492335 - DNA, 75 bp, synthetic construct
  source 1..75: mol_type = other DNA
agatcatcagtattctccgcgagtctgaagccggggtttctgcccgtgagctctgccgcaagcacgccatttccg

SEQ ID NO: 492336 - DNA, 75 bp, synthetic construct
  source 1..75: mol_type = other DNA
tacggtttaggccgtaactgcaccctcttcgataaaacccgcaagtgggcttaccgcgctatccgccaaggctgg

SEQ ID NO: 492337 - DNA, 75 bp, synthetic construct
  source 1..75: mol_type = other DNA
aaagcttactctatcgcctcgaccatcaggcataacagggccagaggaaagcaccagatagacgcgctctccgat

SEQ ID NO: 492338 - DNA, 75 bp, synthetic construct
  source 1..75: mol_type = other DNA
gaagtgaagcggctcaagtcacttgaagaggagaacgctcgtctcaagaagctactcgctgaagccatgctggat

SEQ ID NO: 492339 - DNA, 75 bp, synthetic construct
  source 1..75: mol_type = other DNA
aagaggagaacgcccgcctcaagaagctacttgccgaagccatgctggataaggaggcacttcaggtggctctgg

SEQ ID NO: 492340 - DNA, 75 bp, synthetic construct
  source 1..75: mol_type = other DNA
tgtggcttttatggatcaacggcattctgattatcgccagatcgttaactctatgcgaccagaaagtgattatgc

SEQ ID NO: 492341 - DNA, 75 bp, synthetic construct
  source 1..75: mol_type = other DNA
aactggttaagtgtggatacccggatgatctgacgattgagtacagtctcggatactgccagggggatggcgtag

SEQ ID NO: 492342 - DNA, 75 bp, synthetic construct
  source 1..75: mol_type = other DNA
agggcgaagcagatacggaagaggtggattttattacctggctgaaatcggggttgtcatcggggatgattgaaa

SEQ ID NO: 492343 - DNA, 75 bp, synthetic construct
  source 1..75: mol_type = other DNA
ctatctggaacagtatggcagaagcagtatttgaatcttatattctgtacatgctggatatggaagaaacgataa

SEQ ID NO: 492344 - DNA, 75 bp, synthetic construct
  source 1..75: mol_type = other DNA
atcaaccctacatccgcagtgaacgccgcgtggaatggattgactggcagacaaagggactcgagttttcgcccc

SEQ ID NO: 492345 - DNA, 75 bp, synthetic construct
  source 1..75: mol_type = other DNA
gtctgcgagaaatgtcacttccatctccctatttacacgccggaagtattgacgttatgcccgaaatgcgggcat

SEQ ID NO: 492346 - DNA, 75 bp, synthetic construct
  source 1..75: mol_type = other DNA
gctacgctggctacagacgagaactcctccggggcgctatccagcaaaccagagattttttctctcgccacctca

SEQ ID NO: 492347 - DNA, 75 bp, synthetic construct
  source 1..75: mol_type = other DNA
gcctggcttgtgacggcgccgggcgcactgcagaatctggccggggcgctctggcatcagcatcccgggatggcg

SEQ ID NO: 492348 - DNA, 75 bp, synthetic construct
  source 1..75: mol_type = other DNA
acccagaacgtcccggcaacacgggaaggacggtggtcccgtgccggtggatttggtgatctgacggtactgtac

SEQ ID NO: 492349 - DNA, 69 bp, synthetic construct
  source 1..69: mol_type = other DNA
atgcccggaaaagttcaagacttctttctgtgctcgctccttctgcgcattgtaagtgcaggatggtgt

SEQ ID NO: 492350 - DNA, 75 bp, synthetic construct
  source 1..75: mol_type = other DNA
acgtctatggggcgtgtgggtattatcgaaaaatctatagctttcactgcgggttataatattcgttatatgatt

SEQ ID NO: 492351 - DNA, 75 bp, synthetic construct
  source 1..75: mol_type = other DNA
ccagaactagtaacggcggcaaaatcagtaacggcacgaacgagcaatacgtaggccgtgacctttatatgccgc

SEQ ID NO: 492352 - DNA, 75 bp, synthetic construct
  source 1..75: mol_type = other DNA
acgtctatggggcgtgtgggtattatagagaaatctatagcattcacggcaggttataatattcgttatatgatt

SEQ ID NO: 492353 - DNA, 75 bp, synthetic construct
  source 1..75: mol_type = other DNA
ggtggtggaaggccgtccacaacgggaaagaaatggatcgaagaaggtattagccgaagctcatggtatagaaaa

SEQ ID NO: 492354 - DNA, 75 bp, synthetic construct
  source 1..75: mol_type = other DNA
ggtttatacccaacgttgtaaagaggcatggaaagatgtgccggtgatcctcggtggtattgaagccagcctgcg

SEQ ID NO: 492355 - DNA, 75 bp, synthetic construct
  source 1..75: mol_type = other DNA
gccgtggaagatccgcgctatatcaaagagctggcaacccatcacgttggtggttatctgaagattgccccggaa

SEQ ID NO: 492356 - DNA, 75 bp, synthetic construct
  source 1..75: mol_type = other DNA
gaagggcgcattattcagagccgttcggaagattcgatcattaatgagatcgaagcgatccgcgacaccgttcca

SEQ ID NO: 492357 - DNA, 75 bp, synthetic construct
  source 1..75: mol_type = other DNA
tcgatagtggatcttgctttagcagactggcaaaaagttattgatgtaaatctcaccagtgtttttctggtttca

SEQ ID NO: 492358 - DNA, 75 bp, synthetic construct
  source 1..75: mol_type = other DNA
gacaatcaccgactcaagcaaggggagcgtactggtctgtcgcaaagggcagctctgtcaacacactgaactttg

SEQ ID NO: 492359 - DNA, 75 bp, synthetic construct
  source 1..75: mol_type = other DNA
atccgtttctcggtcaacattatgcgtggctgctttggcggctgctctttctgctctattaccgagcatgaaggt

SEQ ID NO: 492360 - DNA, 75 bp, synthetic construct
  source 1..75: mol_type = other DNA
cgcattattcagagccgttccgaagattcgatcattaatgagatcgaagcgatccgcgacaccgttccaggtttt

SEQ ID NO: 492361 - DNA, 75 bp, synthetic construct
  source 1..75: mol_type = other DNA
ctggtggaggtggcgcaccgtctggcgatgggcgagccgattagtgaaatccgcgatgtgcgtaataccgcgatt

SEQ ID NO: 492362 - DNA, 75 bp, synthetic construct
  source 1..75: mol_type = other DNA
cgcgcccgaaaccgtgggaaaaaacctacgtattgctgccttctttcgagaaagtgaagggcgataaagtcctgt

SEQ ID NO: 492363 - DNA, 75 bp, synthetic construct
  source 1..75: mol_type = other DNA
aaaaaagcgtcgtctacgcaatctcgtccggtgaatgctggtgcgaagaaacgccctaaagcggcggttggacgt

SEQ ID NO: 492364 - DNA, 75 bp, synthetic construct
  source 1..75: mol_type = other DNA
gcgtgccacatccggcctatggcaatgcccgtattccggcttacgaaatgatccgtttctcggtcaacattatgc

SEQ ID NO: 492365 - DNA, 75 bp, synthetic construct
  source 1..75: mol_type = other DNA
aaagcgtcgtctacgcaatctcgcctgcagaatgctggtgcgaagaaacgccctaaagcggcggttggacgttaa

SEQ ID NO: 492366 - DNA, 75 bp, synthetic construct
  source 1..75: mol_type = other DNA
tgagccaacccgcggcattgatgtgggtgcccacgccgagatcatccgcctgattgaaacgctatgcgccgatgg

SEQ ID NO: 492367 - DNA, 75 bp, synthetic construct
  source 1..75: mol_type = other DNA
atgtacttgctttatcgtattcgtaattcaattgacggaaagcgccgtgttattcagtgtttcgatgaatttcat

SEQ ID NO: 492368 - DNA, 75 bp, synthetic construct
  source 1..75: mol_type = other DNA
tgctgtcatgggcgaacactctttaatccctgttgaggccagagatattacccgactgaaagggtacatcacgca

SEQ ID NO: 492369 - DNA, 75 bp, synthetic construct
  source 1..75: mol_type = other DNA
tgactctgagtttactcaattcttcccacgctacctggatgaatacaaccgccgcctgcaaacggggtctaacca

SEQ ID NO: 492370 - DNA, 75 bp, synthetic construct
  source 1..75: mol_type = other DNA
ctcctgatattcaagcaaaaagagggcgtttaggaggagaaaaaagtaaaggtggtggaaggccgtccacaacgg

SEQ ID NO: 492371 - DNA, 75 bp, synthetic construct
  source 1..75: mol_type = other DNA
ggcaaagtttgataagccatcggccagcgagctgcgcgaaatgcaggctgatgctattagtgcgctggaagatat

SEQ ID NO: 492372 - DNA, 75 bp, synthetic construct
  source 1..75: mol_type = other DNA
gagccgcaaaatgccgagttggccgaggaattgataggtaaatatggtccagaacccgaaaactggatcgaagaa

SEQ ID NO: 492373 - DNA, 75 bp, synthetic construct
  source 1..75: mol_type = other DNA
tccggatatagatttaagtgtgtgtcttaaaggtgagtccggttctggcaagactgaaatggtaatgtacattag

SEQ ID NO: 492374 - DNA, 75 bp, synthetic construct
  source 1..75: mol_type = other DNA
atgaaacatcttctgatgcttatgaaaaattagaagctcttctttccccggatgttataaagttaaaacattatg

SEQ ID NO: 492375 - DNA, 75 bp, synthetic construct
  source 1..75: mol_type = other DNA
gtggtgaaatccagcgtcggtcacatccgcgatttgccgaccagtggctcaactgccaaaaagagtgccgactct

SEQ ID NO: 492376 - DNA, 75 bp, synthetic construct
  source 1..75: mol_type = other DNA
aaagacagcctggatctcagcgcgaatgatatttttggcttcgatttatccgagtttatcgcagccaaagaggaa

SEQ ID NO: 492377 - DNA, 75 bp, synthetic construct
  source 1..75: mol_type = other DNA
tgcttaaagaagccgattttgaataccttctgacgcagagtttttcttgcctctctgaatcttcagctaaaacgt

SEQ ID NO: 492378 - DNA, 75 bp, synthetic construct
  source 1..75: mol_type = other DNA
tatgaccagttctttcctgcgtatgttgataaatataaccgtaagctgcacggtgattctaaacagctgattaac

SEQ ID NO: 492379 - DNA, 75 bp, synthetic construct
  source 1..75: mol_type = other DNA
attgaggcgttataccgggaaggtgaaagtgcgctggatgagtggatggcggattgtgaagaggacggcattgcc

SEQ ID NO: 492380 - DNA, 75 bp, synthetic construct
  source 1..75: mol_type = other DNA
tcacatcgattcacggctgaccattgtcgccaaacaacattccatttcaaaaaatcagcttattgttgatgtctt

SEQ ID NO: 492381 - DNA, 75 bp, synthetic construct
  source 1..75: mol_type = other DNA
ctggaatgtttactggagaaatataaacccgcgcatcagatttataaatttgtttaccatgacggagataactaa

SEQ ID NO: 492382 - DNA, 75 bp, synthetic construct
  source 1..75: mol_type = other DNA
tgattcagcctaccttgattacggaatatccggcagaagtttccccgctggcgcgccgtaaggatgttaacccgg

SEQ ID NO: 492383 - DNA, 75 bp, synthetic construct
  source 1..75: mol_type = other DNA
tgattcagcctaccttgattacggaatatccggcagaagtatccccgctggcgcgccgtaatgatgttaacccgg

SEQ ID NO: 492384 - DNA, 75 bp, synthetic construct
  source 1..75: mol_type = other DNA
ctgactggagtaaacgcgatgatattaaagcgaaactgaaagttgaacttattctgcttctacacaagcataaat

SEQ ID NO: 492385 - DNA, 75 bp, synthetic construct
  source 1..75: mol_type = other DNA
ggcaaaatccggcaaagagacgaaccgcctgtaccgacagaattatggcattacgcataatggtatctgggactg

SEQ ID NO: 492386 - DNA, 75 bp, synthetic construct
  source 1..75: mol_type = other DNA
gcagggagagtttgatttttacaggcaaatttatcctgtgacagggggagagcacaaggttgaagccttgatgtg

SEQ ID NO: 492387 - DNA, 75 bp, synthetic construct
  source 1..75: mol_type = other DNA
cattttgcctaaaagagagtcagcgtggcgttcgtgtctgcaccggatgtcaggcgtccgtgctatatggaacat

SEQ ID NO: 492388 - DNA, 75 bp, synthetic construct
  source 1..75: mol_type = other DNA
actcatgcggaaacccgcagtgaagatactggcggtctgtcaggtaaagagctgggcgcttattcactggtgggg

SEQ ID NO: 492389 - DNA, 75 bp, synthetic construct
  source 1..75: mol_type = other DNA
atgcttactggggagatggcggtaatggtcagggcaagaatcgcctggggtaccttttaatggcgttgcgcggac

SEQ ID NO: 492390 - DNA, 75 bp, synthetic construct
  source 1..75: mol_type = other DNA
tgattcagcctaccttgattacggaatatccggcagaagtctccccgctggcgcgacgtaatgatgttaacccgg

SEQ ID NO: 492391 - DNA, 75 bp, synthetic construct
  source 1..75: mol_type = other DNA
tgcccgtgagccgatgattgattatctcggtgaactggtcggtgtatatcgcctggccgcgcagcctgccaccac

SEQ ID NO: 492392 - DNA, 75 bp, synthetic construct
  source 1..75: mol_type = other DNA
aacctgtccggaaggctggcgataaagattattgcagagccatcggataagcgccgtcgtgacctggacaatatc

SEQ ID NO: 492393 - DNA, 75 bp, synthetic construct
  source 1..75: mol_type = other DNA
gcctgccagcgaattactggaccaactttcacacatcgacatgaataacgcaccgttgctgattgcgcacgtttg

SEQ ID NO: 492394 - DNA, 75 bp, synthetic construct
  source 1..75: mol_type = other DNA
gtgctctccccggttcccggcaccgtagaactgtatccgctgctcagtaccggcctgccggaggacagcatcctt

SEQ ID NO: 492395 - DNA, 75 bp, synthetic construct
  source 1..75: mol_type = other DNA
cataccgttttcatgccatgggggcgcatcccagtattgtcgacgtcgctgttctttctcccgttcccggtactg

SEQ ID NO: 492396 - DNA, 75 bp, synthetic construct
  source 1..75: mol_type = other DNA
aacggctggcaaccggctcaggtcagtcagctgcttgatgagattgataacgttgacctgctggtgaccaatctg

SEQ ID NO: 492397 - DNA, 75 bp, synthetic construct
  source 1..75: mol_type = other DNA
accgtaacttccgtaatgaaggtatttctgttcgtcataatcctgagttcacgatgatggaactctacatggcgt

SEQ ID NO: 492398 - DNA, 75 bp, synthetic construct
  source 1..75: mol_type = other DNA
aatggttttagcgaattaaacgacgcagaagatcaggctgaacgtttccaggaacaggttaacgctaaagctgca

SEQ ID NO: 492399 - DNA, 75 bp, synthetic construct
  source 1..75: mol_type = other DNA
tgattcagcctaccttgattacggaatatccggcagaagtgtccccgctggcgcgtcgtaacgatgttaacccgg

SEQ ID NO: 492400 - DNA, 75 bp, synthetic construct
  source 1..75: mol_type = other DNA
accgcgtccggcggcggctgcgccgatgaaagcgacgacgccctgcgcgagcgtatccggctggctcctgaaagt

SEQ ID NO: 492401 - DNA, 75 bp, synthetic construct
  source 1..75: mol_type = other DNA
tttaaaaaaatgcatattaatgggagttggttggtggcaatatcaagataaaccagacagagttacaaaatttat

SEQ ID NO: 492402 - DNA, 75 bp, synthetic construct
  source 1..75: mol_type = other DNA
ggtattggtatcgaccgaatgattatgctgtttactaacagtcatactattcgcgacgttattctcttcccggcg

SEQ ID NO: 492403 - DNA, 75 bp, synthetic construct
  source 1..75: mol_type = other DNA
cgttttgcttcaaagagagtcagcgtggggttcacgtttgcacaggttgtttagcaacggtgttatatggcacct

SEQ ID NO: 492404 - DNA, 75 bp, synthetic construct
  source 1..75: mol_type = other DNA
accttattgatagtgaatgccatgttgctgaactggaagaagcgctacgcgataagcaggtgttacttgaagcct

SEQ ID NO: 492405 - DNA, 75 bp, synthetic construct
  source 1..75: mol_type = other DNA
aggatattgcgctaacggtagggaagctgcgtgttgagctggaagccgcagagaagcgcaacgcaaaattacaaa

SEQ ID NO: 492406 - DNA, 75 bp, synthetic construct
  source 1..75: mol_type = other DNA
agattattgcagagccatcggataagcgccgtcgtgacctggacaatatcctgaaagcaccactggatgcgctga

SEQ ID NO: 492407 - DNA, 75 bp, synthetic construct
  source 1..75: mol_type = other DNA
atgagcactgataataagcaatcattgcccgcgattaccctcgcggcgattggagttgtctacggcgatattggt

SEQ ID NO: 492408 - DNA, 75 bp, synthetic construct
  source 1..75: mol_type = other DNA
tgatttttgtcgcggcattgttggtgaatatccaacaagtgcatgcttcagcagctattgtagcctctaccgccg

SEQ ID NO: 492409 - DNA, 75 bp, synthetic construct
  source 1..75: mol_type = other DNA
ctattaatcgggaaaaacattctggtcatgcaggctgccattatcgaatggcaggcaactggcgacgctaagagc

SEQ ID NO: 492410 - DNA, 75 bp, synthetic construct
  source 1..75: mol_type = other DNA
gcgaagttcttgtcgttgtatctggttttactggttgcgggaaaagcgccattgccggggaaatagaaattgcga

SEQ ID NO: 492411 - DNA, 75 bp, synthetic construct
  source 1..75: mol_type = other DNA
tccggaaggctggcaataaaaattattacagagccaccggataagctccgaagggacctggacaacattctgaaa

SEQ ID NO: 492412 - DNA, 75 bp, synthetic construct
  source 1..75: mol_type = other DNA
cacatctgattcagcctaccttgattactgaatatccggcagaagtatctccgctggcccgccgtaatgaggtta

SEQ ID NO: 492413 - DNA, 75 bp, synthetic construct
  source 1..75: mol_type = other DNA
gtgagcaagattgattatcaggcactgcgtgctaaggcagaaaaagcaacgtgtggtgtatggtcgctcgaatat

SEQ ID NO: 492414 - DNA, 75 bp, synthetic construct
  source 1..75: mol_type = other DNA
ctggcgaattgccggacgaatctgagaaagatgctcaggcctactttaatcgcaaatatgcaccgattgacgaaa

SEQ ID NO: 492415 - DNA, 75 bp, synthetic construct
  source 1..75: mol_type = other DNA
cagcgattgagatgtacaaaccaactgtgcgcatcgtggaagttaatgtgtcacgcgccgcaggcattcgcatca

SEQ ID NO: 492416 - DNA, 75 bp, synthetic construct
  source 1..75: mol_type = other DNA
ggctttttatcgctgatcttctggctgctaatctttgtggtttccattaaatatctcaccttcgtgatgcgggca

SEQ ID NO: 492417 - DNA, 75 bp, synthetic construct
  source 1..75: mol_type = other DNA
cttgctgctgcaacgtaatgctctgcgtgcaccggatcaatttgaaattccaccaaaccgggttattgaactggg

SEQ ID NO: 492418 - DNA, 75 bp, synthetic construct
  source 1..75: mol_type = other DNA
cttgctgttgcaacgtaatgcgctgcgtgcgccggatcaatttgaaatcccgccaaacagggttatcgaactggg

SEQ ID NO: 492419 - DNA, 75 bp, synthetic construct
  source 1..75: mol_type = other DNA
tccctctgtttaccgctaacctcgataaactgctttccggcggctggttgcctctgagcctcggcacggtgatgt

SEQ ID NO: 492420 - DNA, 75 bp, synthetic construct
  source 1..75: mol_type = other DNA
cgttctgtttcaaagagagccagcgtggggttcacgtttgcacaggttgcttagcgactgtgttatatggcactt

SEQ ID NO: 492421 - DNA, 75 bp, synthetic construct
  source 1..75: mol_type = other DNA
ccgtgacttggacaatattctgaaagcgccgctggatgcgctgacgcatgcggggttgctaatggacgatgagta

SEQ ID NO: 492422 - DNA, 75 bp, synthetic construct
  source 1..75: mol_type = other DNA
atggaaaacaataccatcaagtgtccattttgcctgaaagaaagccaaaggggtgtccatgtctgcaccggctgc

SEQ ID NO: 492423 - DNA, 75 bp, synthetic construct
  source 1..75: mol_type = other DNA
aacatggcaccgccatggttggtaagctgtttgcgccgatcatgctgacctggtttttgattctggcagggctgg

SEQ ID NO: 492424 - DNA, 75 bp, synthetic construct
  source 1..75: mol_type = other DNA
accggtgtcgaggcgctgtacgctgatatggggcactttggtaagttcccgattcgcctggcgtggttcaccgtc

SEQ ID NO: 492425 - DNA, 75 bp, synthetic construct
  source 1..75: mol_type = other DNA
gataacgccggtgaaggggggatcctgacgttgatgtcgcttgccgggcgtaatacgtcggcgcgaacgacatca

SEQ ID NO: 492426 - DNA, 75 bp, synthetic construct
  source 1..75: mol_type = other DNA
atgtgggcggtgcatttcttccttgaatataaaaccgtttcctttattgcgttaggcgcggtggtgctgtcgatt

SEQ ID NO: 492427 - DNA, 75 bp, synthetic construct
  source 1..75: mol_type = other DNA
attattcacacttcagagagagagtccgggcaaatctatattccgtttattaactggttgctttatgccgctgtc

SEQ ID NO: 492428 - DNA, 75 bp, synthetic construct
  source 1..75: mol_type = other DNA
gattaagttgccggatgatggaaacctccttctttatgtcgcatgagtcgttgatcctcggcaaacgcccgtggt

SEQ ID NO: 492429 - DNA, 75 bp, synthetic construct
  source 1..75: mol_type = other DNA
atggtggcgaaaacaacgtatgttgatgaaagcggggatgagcagcgctatctgccggaaggcacactgattctt

SEQ ID NO: 492430 - DNA, 75 bp, synthetic construct
  source 1..75: mol_type = other DNA
cgaatataccatgacgcagtctgcgccgttgatggtgctgccggatccggatgcgtttgtggtggttcaggtgaa

SEQ ID NO: 492431 - DNA, 75 bp, synthetic construct
  source 1..75: mol_type = other DNA
aactcgaagatcaaaattgtccgtttgctatggcgcaaattgtggatagccgaggctctactccccgccattctg

SEQ ID NO: 492432 - DNA, 75 bp, synthetic construct
  source 1..75: mol_type = other DNA
aggatcgtgacacgttcgatcctacacatgatcttgacctctactgcgaccaggccagcggtcttgtgaatattg

SEQ ID NO: 492433 - DNA, 75 bp, synthetic construct
  source 1..75: mol_type = other DNA
tgaattcaccatgacgcagtcctcgccgttgatggtgttaccggatccggatgagtttgtggtggtgcaggttaa

SEQ ID NO: 492434 - DNA, 75 bp, synthetic construct
  source 1..75: mol_type = other DNA
ctgtttttccgccgcacggtgaatttccacaccgaagaggtgatgctggacaaaattaccggaaaaacgccggtg

SEQ ID NO: 492435 - DNA, 75 bp, synthetic construct
  source 1..75: mol_type = other DNA
tccctccatcaaccacgcttctccatgctgagtcgtttggtgcggcagtggaagcactggatattcgccctgata

SEQ ID NO: 492436 - DNA, 75 bp, synthetic construct
  source 1..75: mol_type = other DNA
ttctatcgtcggtacaattggtggcggaatggttgagcggaaggtgattgaagagtcgcttcaggcattgcagga

SEQ ID NO: 492437 - DNA, 75 bp, synthetic construct
  source 1..75: mol_type = other DNA
aaacgccgcaggagatcgccatcagcgtgttggcagaaatattacaggtgaaaaataacgcgccgggtgggctga

SEQ ID NO: 492438 - DNA, 75 bp, synthetic construct
  source 1..75: mol_type = other DNA
caaagtgatcatgctggaagtggaaaagccaacggtgattcgttgtaccgtggcgtttgcccaggccgtgttcga

SEQ ID NO: 492439 - DNA, 75 bp, synthetic construct
  source 1..75: mol_type = other DNA
cggcgtacttgaggcgttaatgatgttgatgcatcagggcgttaaagcgacagaagaagtgctggaagtggctta

SEQ ID NO: 492440 - DNA, 75 bp, synthetic construct
  source 1..75: mol_type = other DNA
gtggacgctattctggcgaaacagaatttgggaacgcgggcagatatggcaccagtaacaatcgcgcttgggccg

SEQ ID NO: 492441 - DNA, 75 bp, synthetic construct
  source 1..75: mol_type = other DNA
cgatccggcccgtgaatttaccatgacgcagtccgcaccgctgatggtgctgccggatccggatgagtttgtggt

SEQ ID NO: 492442 - DNA, 75 bp, synthetic construct
  source 1..75: mol_type = other DNA
caccgataacccggctgaactggacgaagacgcggggacagtttcggctaacttcatcggcgtcaagtgtgtgaa

SEQ ID NO: 492443 - DNA, 75 bp, synthetic construct
  source 1..75: mol_type = other DNA
aatcagtaactgggaggacgtgaccgtcatgttctacggtgacaacggtctcaattacatgatgaccggcgcggc

SEQ ID NO: 492444 - DNA, 75 bp, synthetic construct
  source 1..75: mol_type = other DNA
cgattcgtattaatggccgtgaaatcaaaactgaaggcaaatccaccctgaatccgggaggctatgcccgccagc

SEQ ID NO: 492445 - DNA, 75 bp, synthetic construct
  source 1..75: mol_type = other DNA
agctttttctgcttctgccggaggaatatggcccagcctttccagcaatcgtcgattgttataccagtccaccca

SEQ ID NO: 492446 - DNA, 75 bp, synthetic construct
  source 1..75: mol_type = other DNA
ttcgtacctataaatccgtttttgacttaggtccggcggcagagaaatacacagtaaaaatgagtggcttgaacc

SEQ ID NO: 492447 - DNA, 75 bp, synthetic construct
  source 1..75: mol_type = other DNA
acagtaaaaatgagtggctgccactcttgcccgatccgttgtatgacccaaatgaatattcctcgggtgaaagag

SEQ ID NO: 492448 - DNA, 75 bp, synthetic construct
  source 1..75: mol_type = other DNA
tgcgtattctgacggacaacctgaaacaggaagagcaggcgattgtgcaggtggaagaaatgcaggcggtcagcg

SEQ ID NO: 492449 - DNA, 75 bp, synthetic construct
  source 1..75: mol_type = other DNA
ctgttctgcagggtaagtacaccatgagcggtgaacagtttgagacggtggaagtggattttgggcgttctgccg

SEQ ID NO: 492450 - DNA, 75 bp, synthetic construct
  source 1..75: mol_type = other DNA
tgaattcaccatgacgcagtccgcgccgctgatggtactccctgatccagatgagttcgtggtggtacaggtgaa

SEQ ID NO: 492451 - DNA, 75 bp, synthetic construct
  source 1..75: mol_type = other DNA
cagaagacggtaccgaaaaacgttatctgccggagggtacactggtcctggggaatacggcagcagagggcattc

SEQ ID NO: 492452 - DNA, 75 bp, synthetic construct
  source 1..75: mol_type = other DNA
tatccgaaacactggttagaggtgggggacccggggtgcgaatataccatgacgcagtctgcgccgttgatggtg

SEQ ID NO: 492453 - DNA, 75 bp, synthetic construct
  source 1..75: mol_type = other DNA
taaaattaccggcaaaacaccggttgcggcgtatgtgtctccggtggtgtcaggcaaagtgctgcgcagccgtgg

SEQ ID NO: 492454 - DNA, 75 bp, synthetic construct
  source 1..75: mol_type = other DNA
tatggtgccattaaggatgcacaggcgttgtctgaaggagtggtggcttcttcccgttacccgaaacactggctg

SEQ ID NO: 492455 - DNA, 75 bp, synthetic construct
  source 1..75: mol_type = other DNA
tctgcgcttttcacaaaatgcgccactggatatgtataccgaagtcaatacgcaaaccaatctcccggcgcagat

SEQ ID NO: 492456 - DNA, 75 bp, synthetic construct
  source 1..75: mol_type = other DNA
tgtctattacgctggcccggcgaaaacaccggagaacatggcctgcggttcactgggtccaaccacgggcggtcg

SEQ ID NO: 492457 - DNA, 75 bp, synthetic construct
  source 1..75: mol_type = other DNA
agcagcggctgaaattaagcctgtccggaaggctggcgataaaggtgattgcagagccaccggataagcgccgcc

SEQ ID NO: 492458 - DNA, 75 bp, synthetic construct
  source 1..75: mol_type = other DNA
tcaggccagtggtcttgtgaatattgccattatggacggtaccgtctggcgtctgctgaatggctttaagctttt

SEQ ID NO: 492459 - DNA, 75 bp, synthetic construct
  source 1..75: mol_type = other DNA
gatcgacgaagaataacatcatacaaggtagcggtaaggagtggtcaaaacaggatcgtgacacgttcgacccga

SEQ ID NO: 492460 - DNA, 75 bp, synthetic construct
  source 1..75: mol_type = other DNA
tgaatttaccatgacgcagtccgcaccgctgatggtgctgccggacccggatgagtttgtggtggtgcaggtgaa

SEQ ID NO: 492461 - DNA, 75 bp, synthetic construct
  source 1..75: mol_type = other DNA
tttaccatgacgcagtccgcgccgctgatggtgttgccggatccggatgagtttgtggtggtacaggtgaaataa

SEQ ID NO: 492462 - DNA, 75 bp, synthetic construct
  source 1..75: mol_type = other DNA
atggcaaatacaccatggaaggagaccagttcgagaaaattgaggtcgattttggcaggtcgacgaagaataaca

SEQ ID NO: 492463 - DNA, 75 bp, synthetic construct
  source 1..75: mol_type = other DNA
cacaccaccatgaaacgattcgatgaagatcaggctcgccgtgcacgcattacccgcctgcccggtgagcataat

SEQ ID NO: 492464 - DNA, 75 bp, synthetic construct
  source 1..75: mol_type = other DNA
gccgggctgtggcgcttattgttcgccagcagcgactgaaattaagcctgtccggacggctggcaataaaaatta

SEQ ID NO: 492465 - DNA, 75 bp, synthetic construct
  source 1..75: mol_type = other DNA
ttcacaactgaccgaacaacatcaggctgtcattgacgccatttttgctggtgatgccgacggggcgcgtaaagc

SEQ ID NO: 492466 - DNA, 75 bp, synthetic construct
  source 1..75: mol_type = other DNA
aaaacgccggtggcggcctatgtctccccggttgttgaaggaaaagtgctgcgtcatcgtggtggtgaaacccgc

SEQ ID NO: 492467 - DNA, 75 bp, synthetic construct
  source 1..75: mol_type = other DNA
cggccttgtgaatatcgccattatggacggtacggtctggcgtctgctgaatggctatgtcggggagtgctgcgg

SEQ ID NO: 492468 - DNA, 75 bp, synthetic construct
  source 1..75: mol_type = other DNA
gctgcccgctccatcgcgccagtgttgaaaaaaggcgcgttggtgatccttgaatccacctcgccggtggggtca

SEQ ID NO: 492469 - DNA, 75 bp, synthetic construct
  source 1..75: mol_type = other DNA
cggtggggtcaaccgagaagatggcagaatggttagcagagatgcgtccggatctcactttcccacagcaggtgg

SEQ ID NO: 492470 - DNA, 75 bp, synthetic construct
  source 1..75: mol_type = other DNA
gcggatgcctggctgattgctgtacccacgccgtttaaaggcgatcatgagccagatatgacctacgttgaatcg

SEQ ID NO: 492471 - DNA, 75 bp, synthetic construct
  source 1..75: mol_type = other DNA
tacgccagcaaagaaaactcacaggaagcgcacgaagcgattcgtccttctgacgtcaatgtgatggcggaatcg

SEQ ID NO: 492472 - DNA, 75 bp, synthetic construct
  source 1..75: mol_type = other DNA
gacgtgaatattgcctattgcccggaacgcgtgttaccggggcaggtgatggtcgagctgattaaaaatgaccgt

SEQ ID NO: 492473 - DNA, 75 bp, synthetic construct
  source 1..75: mol_type = other DNA
cgacgccgtttaaaggcgatcatgagccggatatggcctatgtcgaatcggctgcccgttccatcgcgccagtac

SEQ ID NO: 492474 - DNA, 75 bp, synthetic construct
  source 1..75: mol_type = other DNA
cagacgacggtaccgaaaaacgttatctgccggtgggcacactggtcctggggaatacggcagcagagggcattc

SEQ ID NO: 492475 - DNA, 75 bp, synthetic construct
  source 1..75: mol_type = other DNA
tgtcagatgaccccggcgaaatatgactccaccacgctgaccgttggcgcgggtgacttccgcctgaaagcgcgc

SEQ ID NO: 492476 - DNA, 75 bp, synthetic construct
  source 1..75: mol_type = other DNA
acgttgcgttgcagttattacgtaatgctgaagtctcagcaaaaggggtattacccaactgtcaggataccggca

SEQ ID NO: 492477 - DNA, 75 bp, synthetic construct
  source 1..75: mol_type = other DNA
gccgaaaaaactggccgggctttgcacgctggcgcagcttgacgaagcgctggcgacggcagacgtgctggtgat

SEQ ID NO: 492478 - DNA, 75 bp, synthetic construct
  source 1..75: mol_type = other DNA
accgataaacgcgccagtgaactgaaaatcgcctgctttggtctggcgtttaaaccgaatattgatgacctgcgc

SEQ ID NO: 492479 - DNA, 75 bp, synthetic construct
  source 1..75: mol_type = other DNA
acgagcgagcacgacgccagttgaagcggatgcctggctgattgctgtacccacgccgtttaaaggcgatcatga

SEQ ID NO: 492480 - DNA, 75 bp, synthetic construct
  source 1..75: mol_type = other DNA
cgacgcgtcgccccgctggattatcgcgagcctgccgctgcgggctcgggctaccccaaaatggctcctgagaaa

SEQ ID NO: 492481 - DNA, 75 bp, synthetic construct
  source 1..75: mol_type = other DNA
acaggaacgccggtgagagtgatcaatgagccggtgaaatattccgtagaaccgaatggtatgcgttatgtggaa

SEQ ID NO: 492482 - DNA, 75 bp, synthetic construct
  source 1..75: mol_type = other DNA
aatcttgctgaactgcgcctttattattatccgccgggagaaaatattgtgcaggtctacccgataggaattggc

SEQ ID NO: 492483 - DNA, 75 bp, synthetic construct
  source 1..75: mol_type = other DNA
cgcacggcaatggcgaatatctcattcatggcaccagtgcgccggacagcgtcggtttgcgcgtcagttcgggct

SEQ ID NO: 492484 - DNA, 75 bp, synthetic construct
  source 1..75: mol_type = other DNA
atcggggaagaagtggccgatctcagccacctggagaatgacatccagaacgccatcaacctgatgttccggggg

SEQ ID NO: 492485 - DNA, 75 bp, synthetic construct
  source 1..75: mol_type = other DNA
gtgccaaaacctggtacgacgataactattccttcacaactgttattacctgatgcaccgcgtcaggggattatc

SEQ ID NO: 492486 - DNA, 75 bp, synthetic construct
  source 1..75: mol_type = other DNA
gtataaactgcccattggttttacgcaattcaaagataatcaggctgttgatcagaagctggtggataaagcctt

SEQ ID NO: 492487 - DNA, 75 bp, synthetic construct
  source 1..75: mol_type = other DNA
tggacggcaaaccgatttatacgctctacatcgcgctttcgatcgattttcatcttcattacataaatgatttga

SEQ ID NO: 492488 - DNA, 75 bp, synthetic construct
  source 1..75: mol_type = other DNA
agtttgcacgagatgccatacccgataaagacgcccagggcggcgaggtgtatctcctctccggcccgacgatta

SEQ ID NO: 492489 - DNA, 75 bp, synthetic construct
  source 1..75: mol_type = other DNA
gacgcaaggccgacgcttaatgacgctggaagacattgtcagtggttattccaacgtcttgatttctctggcaga

SEQ ID NO: 492490 - DNA, 75 bp, synthetic construct
  source 1..75: mol_type = other DNA
atactgcggcaatgttgatccttgaagccaataacactatcgccccggtgccaaaacccggtacgacgataacga

SEQ ID NO: 492491 - DNA, 75 bp, synthetic construct
  source 1..75: mol_type = other DNA
aagtttccgtcgaaaaccccggtacgcccattgcgcccgagcacttaccgcgattgtttgaccgtttctaccgcg

SEQ ID NO: 492492 - DNA, 75 bp, synthetic construct
  source 1..75: mol_type = other DNA
cgcaaactgtgccaattgagctggaacaactggtactgtcgttcaaccatatgattgagcgcattgaagatgtct

SEQ ID NO: 492493 - DNA, 75 bp, synthetic construct
  source 1..75: mol_type = other DNA
ccaatgtgttgatttccctggcagatagccacggtaaaacggtgtatcactcccccggtgcgcctgatatccgcg

SEQ ID NO: 492494 - DNA, 75 bp, synthetic construct
  source 1..75: mol_type = other DNA
cagcaaaacctgcacctgctggtagcatgttccagagcaaatccttctggctggcaacagggctgcgttttggtc

SEQ ID NO: 492495 - DNA, 75 bp, synthetic construct
  source 1..75: mol_type = other DNA
tgaaagaaagcccggtctttgagaaggttaatgacagcaaccaacccacagcaaaacctgcacctgctggtagca

SEQ ID NO: 492496 - DNA, 75 bp, synthetic construct
  source 1..75: mol_type = other DNA
ttgcagcaatcgtattctccggtagcgctctggcaggtgttgttcctcagtacggcggcggcggtggcaaccacg

SEQ ID NO: 492497 - DNA, 75 bp, synthetic construct
  source 1..75: mol_type = other DNA
atgttaacgttaaatcagatatcttatcgctggcctggcgcggcaacggattgtctttgcgacatttctctgcaa

SEQ ID NO: 492498 - DNA, 75 bp, synthetic construct
  source 1..75: mol_type = other DNA
cgaatacgccctgcaatgttgtcagttagcagacgttgccagcgcacatccattggatctgcatagcgcacagcg

SEQ ID NO: 492499 - DNA, 75 bp, synthetic construct
  source 1..75: mol_type = other DNA
tgaccggcgacaatggcgcgggaaaatcgacgctgttacgagtaatggcaggtcttcttacgcccacagccggta

SEQ ID NO: 492500 - DNA, 75 bp, synthetic construct
  source 1..75: mol_type = other DNA
cggcaccctggtttgagtggatgactaaactcgaatgggcgataggtgcggtagtgctggtgatcatcagcctgc

SEQ ID NO: 492501 - DNA, 75 bp, synthetic construct
  source 1..75: mol_type = other DNA
gtattttcgccaaacatttggctggctgttttgcaaacgcagtttggtggcgtctggttatggcaaattgttctc

SEQ ID NO: 492502 - DNA, 75 bp, synthetic construct
  source 1..75: mol_type = other DNA
ttattatttctgcatttgttcttactgcatgtagcagtgagccttcccaagatgatatttttaaagctatgcgaa

SEQ ID NO: 492503 - DNA, 75 bp, synthetic construct
  source 1..75: mol_type = other DNA
tgggtgtcgaatatgattatcggcgcgaccttcctgacactgcttgatagcattggcgctgccggtacgttctgg

SEQ ID NO: 492504 - DNA, 75 bp, synthetic construct
  source 1..75: mol_type = other DNA
tttataaagatgaaacctatctctatcagagcggtaaaggccacaccattcaggaagtccgcattgttaaagggc

SEQ ID NO: 492505 - DNA, 75 bp, synthetic construct
  source 1..75: mol_type = other DNA
cattatttctcacccggacgccggtaagactaccatcaccgagaaggtgctgctgttcggacaggccattcagac

SEQ ID NO: 492506 - DNA, 75 bp, synthetic construct
  source 1..75: mol_type = other DNA
gtggaatcagacgtacgctccacgcgttttatcttatccgtgcccagactggagaaaatgatcccggaaacccaa

SEQ ID NO: 492507 - DNA, 75 bp, synthetic construct
  source 1..75: mol_type = other DNA
atcaatactggctataacagaatctgggctcaaaccagtattggtggaacctgatcccataacaaataatataac

SEQ ID NO: 492508 - DNA, 75 bp, synthetic construct
  source 1..75: mol_type = other DNA
tggttctcatgaaaaatataaaaacaaatatcaaggcttaaatagtcgattggatgaaatgcaggcggcattttt

SEQ ID NO: 492509 - DNA, 75 bp, synthetic construct
  source 1..75: mol_type = other DNA
acaccttcatcagagcctattaatcaatttgcgcgccaactcatcaccctacttgatacctctgacttaagttcg

SEQ ID NO: 492510 - DNA, 75 bp, synthetic construct
  source 1..75: mol_type = other DNA
ttgcacatcattacctggagaatataaaaaataataatatacaattacctgttgtattaacagaagaaggtcatg

SEQ ID NO: 492511 - DNA, 75 bp, synthetic construct
  source 1..75: mol_type = other DNA
tagcttctagatatatttcagaaataaaaaataaacatatcacgttgcctatttctaagaatgttgaagaacatg

SEQ ID NO: 492512 - DNA, 75 bp, synthetic construct
  source 1..75: mol_type = other DNA
tatttgaataataatgatatcatgactatgattcactatcctattccaccgcataaacaagttgcatataaagag

SEQ ID NO: 492513 - DNA, 75 bp, synthetic construct
  source 1..75: mol_type = other DNA
cttatcgctgccaatggatccgacaatgagcatcgacgatattaatatggtaattgaagcgattaatagatggaa

SEQ ID NO: 492514 - DNA, 75 bp, synthetic construct
  source 1..75: mol_type = other DNA
ctggctgttatcgacccggcagcagtgcatctgttgagttgggcaggagcggcatatattgtctggctggcgtgg

SEQ ID NO: 492515 - DNA, 75 bp, synthetic construct
  source 1..75: mol_type = other DNA
ctgattaccgccatgacgccaggaccgaacaatattctcgcccttagctcagctacaacgcacggatttcgtcag

SEQ ID NO: 492516 - DNA, 75 bp, synthetic construct
  source 1..75: mol_type = other DNA
ggaacggcttgccggtatcagtctgcgacgtctcagcgtcctgatggatgaggcgttcaatattgcactgatgct

SEQ ID NO: 492517 - DNA, 75 bp, synthetic construct
  source 1..75: mol_type = other DNA
attgtgaaatcgattgttgtcgcgcataaaggcacggttgcggtaacgtcagatgcgcgtgggacaaggtttgtg

SEQ ID NO: 492518 - DNA, 75 bp, synthetic construct
  source 1..75: mol_type = other DNA
gcggcgtttttcgcctttgcatggatcatgatccactcggtaaaagtgcattttgccgagcaggatattaatgat

SEQ ID NO: 492519 - DNA, 75 bp, synthetic construct
  source 1..75: mol_type = other DNA
tatctcctttccggcccgacaatgatgatgccaggccacggtcacggacatatggaacacagcaactggcggatg

SEQ ID NO: 492520 - DNA, 75 bp, synthetic construct
  source 1..75: mol_type = other DNA
tacgcttctgatcttaacttcctgccggtagctctacagccgcacggcatcggttttctcgaaccggggattcag

SEQ ID NO: 492521 - DNA, 75 bp, synthetic construct
  source 1..75: mol_type = other DNA
tatctcctttccggcccgacgatgatgatgccagggcacggtcacgggcatatggaacacagcaactggcggatg

SEQ ID NO: 492522 - DNA, 75 bp, synthetic construct
  source 1..75: mol_type = other DNA
ctgcgtcgggcgttaagcaacctgctttctaatgccctgcgttatacgccaaccggagagacaattgtcgtgcgc

SEQ ID NO: 492523 - DNA, 75 bp, synthetic construct
  source 1..75: mol_type = other DNA
aacaaccagctaatccccgaaaagaaaatgctcaacctggcggatgaaatcggcaaagtgttcgattttttcgag

SEQ ID NO: 492524 - DNA, 75 bp, synthetic construct
  source 1..75: mol_type = other DNA
atagtgaaatcgattgttgtcgcgcataaaggcacagttgcggtaacgtcagatgcgcgaggaacaaggtttgtg

SEQ ID NO: 492525 - DNA, 75 bp, synthetic construct
  source 1..75: mol_type = other DNA
aacgcaagcccgacgcttaatgacgctggaagatatcgtcagtggttattccaatgtgttgatttccctggcaga

SEQ ID NO: 492526 - DNA, 75 bp, synthetic construct
  source 1..75: mol_type = other DNA
ttttgccgagcaggatattaatgatttaaaagagattagcaccacgctaaagcgcgttcttaatcatcccgaaga

SEQ ID NO: 492527 - DNA, 75 bp, synthetic construct
  source 1..75: mol_type = other DNA
tatccggtggtgcacatcggggacgacagctatcgcctgatgaccacggacatggccagcgtcacggcctctgtc

SEQ ID NO: 492528 - DNA, 75 bp, synthetic construct
  source 1..75: mol_type = other DNA
tggcacgatggcggatgtgaccttcaacagcatctttattaccgactggaaaaattacggcgcgattctgcattc

SEQ ID NO: 492529 - DNA, 75 bp, synthetic construct
  source 1..75: mol_type = other DNA
caccctaaaaagcgcctactatcctttcctgcaagaactggctctgccgcgccctttccgctttatcgctccgtc

SEQ ID NO: 492530 - DNA, 75 bp, synthetic construct
  source 1..75: mol_type = other DNA
gaagttaaagaccgtgatttaagtgcgctggaagatgcagcggaggatcaaccaaacatcataaatgcagtgcag

SEQ ID NO: 492531 - DNA, 75 bp, synthetic construct
  source 1..75: mol_type = other DNA
tggcaatgggtactaactgcggtaccttgagtgcaacggcaatctgggcctttatgttctttatcctcagcaaag

SEQ ID NO: 492532 - DNA, 75 bp, synthetic construct
  source 1..75: mol_type = other DNA
ccgcatatgcagagtcactaccagatttcaacatagcgaatcgtcgccatacttatttcgccaaccatttatcca

SEQ ID NO: 492533 - DNA, 75 bp, synthetic construct
  source 1..75: mol_type = other DNA
ggcctgaaaccgcgccagtacgatccgcagaaagcgaaagagttgctggaaaaagccggttggacgctgcctgcg

SEQ ID NO: 492534 - DNA, 75 bp, synthetic construct
  source 1..75: mol_type = other DNA
ttttaacgtgatcccggacccgaccacccgcgcggtggcgtttgaaactggcgatatcgatctgctatacggtaa

SEQ ID NO: 492535 - DNA, 75 bp, synthetic construct
  source 1..75: mol_type = other DNA
gaagtgagagaccgtgatttaagtgcactggaagatgccgcggaagatcaaccgcgtgttgtaacagctgcgcaa

SEQ ID NO: 492536 - DNA, 75 bp, synthetic construct
  source 1..75: mol_type = other DNA
cgattctcggctttatgaccattccgttccttggttggttatccgataaaataggtcgccggatcccgtatatta

SEQ ID NO: 492537 - DNA, 75 bp, synthetic construct
  source 1..75: mol_type = other DNA
ggcattattccgcgaactgaaccgccccgggtttcctggagagtattttatctgtgaactcaggctgccagatca

SEQ ID NO: 492538 - DNA, 75 bp, synthetic construct
  source 1..75: mol_type = other DNA
cgtatcaggatggttaggcactgcacttgagttcatggatttccagttatattcactcggcgctgcgttagtgtt

SEQ ID NO: 492539 - DNA, 75 bp, synthetic construct
  source 1..75: mol_type = other DNA
gattgtgattcataactgtgcggtgctgggattatttgctctggaaaacattaccatggcagaaatgttcggctg

SEQ ID NO: 492540 - DNA, 75 bp, synthetic construct
  source 1..75: mol_type = other DNA
attttcggcaaaatgggcgacagaatagggcgtaaaaaagtgctctttattaccatcaccatgatggggatctgt

SEQ ID NO: 492541 - DNA, 75 bp, synthetic construct
  source 1..75: mol_type = other DNA
ccgctgattgataaagagatcggcgaagtgctggcgacccatgacgaaacgcaacgtcaggcgctgtatcgcgac

SEQ ID NO: 492542 - DNA, 75 bp, synthetic construct
  source 1..75: mol_type = other DNA
atccgccgacggtgaacacctactggcgacgtcgtggcagcacatattttgtatcaaaagccggtgagcgttatc

SEQ ID NO: 492543 - DNA, 75 bp, synthetic construct
  source 1..75: mol_type = other DNA
atgaaacagccattaccgcccgtattacgcgccgcgctgtatcgtcgcgccgtggcctgtgcatggctgacggtg

SEQ ID NO: 492544 - DNA, 75 bp, synthetic construct
  source 1..75: mol_type = other DNA
tgtcgcctgtgcctggctgaccgtgtgcgaacgtcagcaccgctacccgcatctcacccttgagtcactggaggc

SEQ ID NO: 492545 - DNA, 75 bp, synthetic construct
  source 1..75: mol_type = other DNA
atctgtttcgcccacattatggcggggtggaatccgacaatgatattcacatcgaggcttatgaccgggatgtcc

SEQ ID NO: 492546 - DNA, 75 bp, synthetic construct
  source 1..75: mol_type = other DNA
aataccgcattgatcgcctgagtggtgatcttgaggtgaagggcagaaccgcagggcaatcgctggagcctaccg

SEQ ID NO: 492547 - DNA, 75 bp, synthetic construct
  source 1..75: mol_type = other DNA
agacccgccttgaggcaaagagcgtgtttctcgccgaggggctgagcacatacaagccgctgaaaaacagtaatc

SEQ ID NO: 492548 - DNA, 75 bp, synthetic construct
  source 1..75: mol_type = other DNA
cctggttatttgcgctggcgatgccgatgttgatttatggctctaacacgctgttcttctttatctacacctggc

SEQ ID NO: 492549 - DNA, 75 bp, synthetic construct
  source 1..75: mol_type = other DNA
cgaatggcaacgtaccggatgatctgcgcgttcatcagtatttgctcggttacgcttctgatctgaacttcctgc

SEQ ID NO: 492550 - DNA, 75 bp, synthetic construct
  source 1..75: mol_type = other DNA
ggcaaagacatccgcgagaaaaacggtcagccgctgcgcattgaactgtcgtttatcggcaccgatgcgttaagc

SEQ ID NO: 492551 - DNA, 75 bp, synthetic construct
  source 1..75: mol_type = other DNA
actgctggaagatttaatggaatccggaccactgaaagccgcgccgtcgctgtcctttctcgggctcgccgtgat

SEQ ID NO: 492552 - DNA, 75 bp, synthetic construct
  source 1..75: mol_type = other DNA
ttctacctgcgccagcacggcgaggaaaaaggccgccagattgcctgtgcactgctggaagatttaatggaagcc

SEQ ID NO: 492553 - DNA, 75 bp, synthetic construct
  source 1..75: mol_type = other DNA
atgaaaaatccattaccgcccgtattacgcgccgcgctgtatcgtcgtgccgtggcctgtgcatggctgaccctg

SEQ ID NO: 492554 - DNA, 75 bp, synthetic construct
  source 1..75: mol_type = other DNA
atgcagtaaacatgctggtaggaaagaaaggacttcgctatgacgatgcatacaatatgaaccgccccgggtttc

SEQ ID NO: 492555 - DNA, 75 bp, synthetic construct
  source 1..75: mol_type = other DNA
gatggcggcagcgtcaagtttggtcgattcgatggggcggaaccgcactgcgtcggtttaacggatttggtcacc

SEQ ID NO: 492556 - DNA, 75 bp, synthetic construct
  source 1..75: mol_type = other DNA
tgcagccgagtttcaaatcggttaccggcaaaggcggcatcaaagttattgatggcagcagcgtcaagtttggtc

SEQ ID NO: 492557 - DNA, 75 bp, synthetic construct
  source 1..75: mol_type = other DNA
gaagcgggcaatgagattcttgccgctctgaataacgagcagcaggcgtggtgtcggaatctggctggcgagaca

SEQ ID NO: 492558 - DNA, 75 bp, synthetic construct
  source 1..75: mol_type = other DNA
ggcgtgctgagccagcgctttggactgacggcagtacccgcgcggatcaccccggccccctcgggagaacgactg

SEQ ID NO: 492559 - DNA, 75 bp, synthetic construct
  source 1..75: mol_type = other DNA
cgcgccagcattattaccccggaagcccgtgaagtggcggatctgttgggttttaccatcaccgaatgtgatgaa

SEQ ID NO: 492560 - DNA, 75 bp, synthetic construct
  source 1..75: mol_type = other DNA
aagcagtcgctggagcagggcgcaatgcagtcgagttttaaatcggtgaccggcaaaggcggcatcaaagttatc

SEQ ID NO: 492561 - DNA, 75 bp, synthetic construct
  source 1..75: mol_type = other DNA
cgggggaaacacagcttgatcaagcggttatcctgattgcagcctgtaaagccattgtcactaacgattctggcc

SEQ ID NO: 492562 - DNA, 75 bp, synthetic construct
  source 1..75: mol_type = other DNA
ggactttacgccgccgctatcccataaagcgcgagtcattcgtctgattaccggctaccacaaagtgcgtaaagg

SEQ ID NO: 492563 - DNA, 75 bp, synthetic construct
  source 1..75: mol_type = other DNA
agcgaggcacgagcgtcatagcaatcagtcatgacgccgcatttacccggcgtcatttctctcgggtggtgcgac

SEQ ID NO: 492564 - DNA, 75 bp, synthetic construct
  source 1..75: mol_type = other DNA
gtgtcgtaatctggcgggagaaacacagcttgatcaagccgttattctgattgcggcctgtaaagccattgtcac

SEQ ID NO: 492565 - DNA, 75 bp, synthetic construct
  source 1..75: mol_type = other DNA
ggacttcacaccgccgctatcccataaagcgcgcgtgatccgcctgattaccggctatcacaaagtgcgtaaagg

SEQ ID NO: 492566 - DNA, 75 bp, synthetic construct
  source 1..75: mol_type = other DNA
gaagcctggccgctaatggtggaacgctatgtcgcgctggcctatgacaaaggcattatgcgcacagcacaagat

SEQ ID NO: 492567 - DNA, 75 bp, synthetic construct
  source 1..75: mol_type = other DNA
atctgcactgaagcataatgctgctgcggtaattctggcgcacaaccatccctctggtacgacagaaatcagcca

SEQ ID NO: 492568 - DNA, 75 bp, synthetic construct
  source 1..75: mol_type = other DNA
gtggcggtaataatagcggcccaaattcagagctgaatatttaccagtacggtggtggtaactctgcacttgctc

SEQ ID NO: 492569 - DNA, 75 bp, synthetic construct
  source 1..75: mol_type = other DNA
gtggtggcggtaataacagcggcccgaattcagagctgaacatttaccagtacggtggcggtaactctgctcttg

SEQ ID NO: 492570 - DNA, 75 bp, synthetic construct
  source 1..75: mol_type = other DNA
gtttggtggcggcaacggtgcagcggttgaccaaactgcatctaactccagcgtcaacgtaactcaggttggctt

SEQ ID NO: 492571 - DNA, 75 bp, synthetic construct
  source 1..75: mol_type = other DNA
gcgctaaaacaaattcaatcgaactattccggcagatgtcatgactgcggttatgagttctcccgtattatcgat

SEQ ID NO: 492572 - DNA, 75 bp, synthetic construct
  source 1..75: mol_type = other DNA
aggcaccagaagcgggtttcgaacatcaaaaaacaatgccgtccgcgccagcgcctgatggcctgccttcggaaa

SEQ ID NO: 492573 - DNA, 75 bp, synthetic construct
  source 1..75: mol_type = other DNA
ggaggcacccggcaccatgcaaaattgtctacactaccactgtaaaaagcccctctccggaggggcttttctatg

SEQ ID NO: 492574 - DNA, 75 bp, synthetic construct
  source 1..75: mol_type = other DNA
tccctgacaaaatgatagtgatgtccgtgactcatttcgaagaccgcttccgttttgtcagccgtgcacagttag

SEQ ID NO: 492575 - DNA, 75 bp, synthetic construct
  source 1..75: mol_type = other DNA
ccgtagtttcctctcttgcccctggtctgaaggtaaatgctgactcattcagaaaaacatccacataccacctaa

SEQ ID NO: 492576 - DNA, 75 bp, synthetic construct
  source 1..75: mol_type = other DNA
aaaaagtaaatcgcacagcctttaaggatcgtgttggtgaactaaaaaaagacagaaatttgtttttctggattg

SEQ ID NO: 492577 - DNA, 75 bp, synthetic construct
  source 1..75: mol_type = other DNA
tactcacaaataagaaagagtggtggaatagcattttccaatgatgaatttaaaacaagagcgaaactgtaccct

SEQ ID NO: 492578 - DNA, 75 bp, synthetic construct
  source 1..75: mol_type = other DNA
ccacttatcgaaaattttataaaaggaatattctcaacaaacactgttgtgtttttaggatactcttatagtgat

SEQ ID NO: 492579 - DNA, 75 bp, synthetic construct
  source 1..75: mol_type = other DNA
cttatgctcatggtcagggattcaacggcttacgtggtcaataagctgggggtgaaatttgggacaatactgaca

SEQ ID NO: 492580 - DNA, 75 bp, synthetic construct
  source 1..75: mol_type = other DNA
gcaacattcgtaagctacgctgggtgtttataaccggtagtgcgatccccctggtggcatatattttctggcagg

SEQ ID NO: 492581 - DNA, 75 bp, synthetic construct
  source 1..75: mol_type = other DNA
tttgattgcggcagggttgttaccagaagtggggggatcagatagcctcaaattccttattgggtgccagaatta

SEQ ID NO: 492582 - DNA, 75 bp, synthetic construct
  source 1..75: mol_type = other DNA
tgccctgacggcagcgtacatcagcggcgctggtgaattgttggcctccagcatcagcgactggacaggcatttc

SEQ ID NO: 492583 - DNA, 75 bp, synthetic construct
  source 1..75: mol_type = other DNA
accacgaaagcgtcagaagctgccacctcagcccgggatgcgtcggcctcaaaagaggcagcgaaatcatcagaa

SEQ ID NO: 492584 - DNA, 75 bp, synthetic construct
  source 1..75: mol_type = other DNA
actaatgctaaatccagtgaaacaaacgcggcgaaatctgcagcggacgcacttaattatcgcaaccaggcacaa

SEQ ID NO: 492585 - DNA, 75 bp, synthetic construct
  source 1..75: mol_type = other DNA
acgccaaacgtatgcaaatagaggaaacctttcgtgacctcaaaagcccggcatacggctttggcttacgccaaa

SEQ ID NO: 492586 - DNA, 75 bp, synthetic construct
  source 1..75: mol_type = other DNA
caggagtgctgtttctcttcgcggcggtggctgcggtgccgttggcatcgcggctgggtattggcgctgtgttgg

SEQ ID NO: 492587 - DNA, 75 bp, synthetic construct
  source 1..75: mol_type = other DNA
taatcccgatgcatgctgataccgtacaaatttctcgcgccagggaagcccgacgcgaactggaagagattttcc

SEQ ID NO: 492588 - DNA, 75 bp, synthetic construct
  source 1..75: mol_type = other DNA
atggaaggttccgattttttactcgcgggagtgttgtttctcttcgcggcggtggttgcggtgccattggcatcg

SEQ ID NO: 492589 - DNA, 75 bp, synthetic construct
  source 1..75: mol_type = other DNA
aacaacctttatgggattgctggctaatcatgctggattaaacgggctgttacaggcgttacgcgaaatggtggc

SEQ ID NO: 492590 - DNA, 75 bp, synthetic construct
  source 1..75: mol_type = other DNA
gcgctggtgttagtgtttctctgcggcattggcgtgattggtgtgcaatttttgattgcggcaggattgttaccc

SEQ ID NO: 492591 - DNA, 75 bp, synthetic construct
  source 1..75: mol_type = other DNA
ttgtttcagcgttcaaataccgttggagggcgactgcaaactggtgcaattacttttctgccgccgctggcgttt

SEQ ID NO: 492592 - DNA, 75 bp, synthetic construct
  source 1..75: mol_type = other DNA
aatcaacggggagcaggtcactgccccgaattacacttaaaacgactcaacagcttaacgttggcttgccacgca

SEQ ID NO: 492593 - DNA, 75 bp, synthetic construct
  source 1..75: mol_type = other DNA
gcctataaaggatatgacagaatatttaaactttttgaaagtgaggattatatagctttagaaaagaagtttaac

SEQ ID NO: 492594 - DNA, 75 bp, synthetic construct
  source 1..75: mol_type = other DNA
atgagtcagggaatggacaaggccgctgccaccgcgcaggcgcgaagcattcttgagacacaaattaacgaagcc

SEQ ID NO: 492595 - DNA, 75 bp, synthetic construct
  source 1..75: mol_type = other DNA
attaagtgcaaaagactttaacaaggtcttcgatcttatccgtaaacagcagcgtcagaatcggcgaaacgcgcg

SEQ ID NO: 492596 - DNA, 75 bp, synthetic construct
  source 1..75: mol_type = other DNA
ccctctctgatggcggattttactggtgaactgcatagactcatttctgaatatttgcagtgtaagcgacgtaaa

SEQ ID NO: 492597 - DNA, 75 bp, synthetic construct
  source 1..75: mol_type = other DNA
ataaaaaagattttagaagagctttacttacagatacatctccttctgatgctcctattattttttctaatgatg

SEQ ID NO: 492598 - DNA, 75 bp, synthetic construct
  source 1..75: mol_type = other DNA
ctatcggagctgaatttagcagagtatttgcagagttgatattccaaagcattgatagaaatataataataaaac

SEQ ID NO: 492599 - DNA, 75 bp, synthetic construct
  source 1..75: mol_type = other DNA
taaaacgtattgagcaagggaacaccttcaacgacgtaagaaagcaagtttataagaataatgaagaagcaggtg

SEQ ID NO: 492600 - DNA, 75 bp, synthetic construct
  source 1..75: mol_type = other DNA
gaactggttagcgatgtactgccttatgaagagatgaagttgcgcatgctcaacggcagtcattcattcctggcg

SEQ ID NO: 492601 - DNA, 75 bp, synthetic construct
  source 1..75: mol_type = other DNA
gtgctggcactgcgacaaccagctgcgggaccagacatccgaatcactgagcaacttgctcaacagaatctggcc

SEQ ID NO: 492602 - DNA, 75 bp, synthetic construct
  source 1..75: mol_type = other DNA
gaagatatccaggatggctcatatattaataccgactggcatttcgacaatctccgggcctgtatggggattacc

SEQ ID NO: 492603 - DNA, 75 bp, synthetic construct
  source 1..75: mol_type = other DNA
cgccgttcccttgtccgtgactatgtgctctcccttgctgcccgtctgccggtgatgggggtgtcccgtgcgtaa

SEQ ID NO: 492604 - DNA, 75 bp, synthetic construct
  source 1..75: mol_type = other DNA
ggccctgcttatatccaataccaggctgaagatagcaaagcaagaaatcaacgcgtaaattatctgttgggtgat

SEQ ID NO: 492605 - DNA, 75 bp, synthetic construct
  source 1..75: mol_type = other DNA
gctaaggtagtgataacaaatagtggtgctccaaacatccgtgagctatatgaaggaaacgggtttaaagtacat

SEQ ID NO: 492606 - DNA, 75 bp, synthetic construct
  source 1..75: mol_type = other DNA
aaacgccagcagatatgagccggtatattctgatgttggcggaagtgcgtcaggctcatggagtattcctgccgg

SEQ ID NO: 492607 - DNA, 75 bp, synthetic construct
  source 1..75: mol_type = other DNA
gttcagacgtgcaagtggtgaatgcctgaagaaccggactgtacttatgctgacgcatgacgtggagcctgtgat

SEQ ID NO: 492608 - DNA, 75 bp, synthetic construct
  source 1..75: mol_type = other DNA
ccacattgaaaatgagttcatctgtcagttggatccgtccagatttgatcttatcccggagtacgttattttgga

SEQ ID NO: 492609 - DNA, 75 bp, synthetic construct
  source 1..75: mol_type = other DNA
ccctcacaccctgaatttgtctttgtgtttgcggctgtccgtcgcgcagaccgtcatccccgtatctgcatgctt

SEQ ID NO: 492610 - DNA, 75 bp, synthetic construct
  source 1..75: mol_type = other DNA
cgaaggaggctgccttatggctacaacccttaccccctcacaccctgaatttgtctttgtgtttgcggctgtccg

SEQ ID NO: 492611 - DNA, 75 bp, synthetic construct
  source 1..75: mol_type = other DNA
agagccggtattctcacccccgtctgggctatcgccatcgagcgtgagaactccggcgatagcgtaacctgctat

SEQ ID NO: 492612 - DNA, 75 bp, synthetic construct
  source 1..75: mol_type = other DNA
tacgttccagccggacgagcttatcaatgacagctttaatatcctcatccgcaatgaagcccatgcggagaggga

SEQ ID NO: 492613 - DNA, 75 bp, synthetic construct
  source 1..75: mol_type = other DNA
cctgacgatagatttaaacagttactaactacaccccatgcggaagttatttggatctctgtcgaggatgtttta

SEQ ID NO: 492614 - DNA, 75 bp, synthetic construct
  source 1..75: mol_type = other DNA
acgaagaccgcaaccactggtaagggggcaacatacagagaccctgatcttaattcaacaagatctacaggcgtc

SEQ ID NO: 492615 - DNA, 75 bp, synthetic construct
  source 1..75: mol_type = other DNA
gcacatatacaatgacatatacagactcttcttcgtctgcattgcccaaaaatatttatgtggcaataaatgtat

SEQ ID NO: 492616 - DNA, 75 bp, synthetic construct
  source 1..75: mol_type = other DNA
gttttcaaaagccctgtcttcggctgaaacgcctgttttgaacggcgtctggactattacagaaccagacctcga

SEQ ID NO: 492617 - DNA, 75 bp, synthetic construct
  source 1..75: mol_type = other DNA
tgcaacatgggaaggaaaatctccagagtattggatcagttggcgacgttctgatgaaaacaatgtatcgaactg

SEQ ID NO: 492618 - DNA, 75 bp, synthetic construct
  source 1..75: mol_type = other DNA
atgaatggtgcgtatatcaaggatggcacaatcaccaatgcaaaagtaggcgatctgcaatctaccaattttgtt

SEQ ID NO: 492619 - DNA, 75 bp, synthetic construct
  source 1..75: mol_type = other DNA
gaattgagatgtttcagggagatctgtttgctaaagctaaattgaatggtatcccttccatagcgtggccagaga

SEQ ID NO: 492620 - DNA, 75 bp, synthetic construct
  source 1..75: mol_type = other DNA
gaaaccgttctgattcagaacaaatatcgtgcaggcaaacgtaactccggtcgaattgtggagtttaccaaaaat

SEQ ID NO: 492621 - DNA, 75 bp, synthetic construct
  source 1..75: mol_type = other DNA
ctcggccaactgtaccagatcggtcgatattgtgacgaagaggttgatgatggctttggtggtaaagagaaacgc

SEQ ID NO: 492622 - DNA, 75 bp, synthetic construct
  source 1..75: mol_type = other DNA
tcaagttcggggattagcatttacttgcctatctgatttcaccgagcctcaacctttctggcggatcaccaacaa

SEQ ID NO: 492623 - DNA, 75 bp, synthetic construct
  source 1..75: mol_type = other DNA
tggcaaattcacaggagaaatacaggctaccagcggaacattcagaggcacggtacaagcagatcacttcgtagg

SEQ ID NO: 492624 - DNA, 75 bp, synthetic construct
  source 1..75: mol_type = other DNA
ccaatgctcgatatggccttggtcagtatgtgtcggaatctatgattgaccttggccagttgtaccagattggtc

SEQ ID NO: 492625 - DNA, 75 bp, synthetic construct
  source 1..75: mol_type = other DNA
acggctcgtgtagatgcggataatgctattggaagcagaatcaccaaacttgaatcaaagattaacgatgacatt

SEQ ID NO: 492626 - DNA, 75 bp, synthetic construct
  source 1..75: mol_type = other DNA
tggtggcaggttcgctgtataccgaattgcagactgtgttccgatgcgtgagaaacgccctctgacgagtaaaca

SEQ ID NO: 492627 - DNA, 75 bp, synthetic construct
  source 1..75: mol_type = other DNA
tgagcataaacataaaatcggcttccagggcacgttgcttatcgaaccgaaaccgcaagaaccgaccaaacatca

SEQ ID NO: 492628 - DNA, 75 bp, synthetic construct
  source 1..75: mol_type = other DNA
atgcaagcctattttgaccagctcgatcgcgttcgttatgaaggctcaaaatcctctaacccgttagcattccat

SEQ ID NO: 492629 - DNA, 75 bp, synthetic construct
  source 1..75: mol_type = other DNA
tgccaaaacagcaattggtcttggcctgccgtttagtttgttaatgcagtacgtcattctgttcttctattccgc

SEQ ID NO: 492630 - DNA, 75 bp, synthetic construct
  source 1..75: mol_type = other DNA
taaaagcgataactgctgacgtaaaatcggctatttgcattctagggttggaattcatccattctaaccctagaa

SEQ ID NO: 492631 - DNA, 75 bp, synthetic construct
  source 1..75: mol_type = other DNA
tgaccgatgcgtccggtcaggtggtatttgaaaccaggctgaagcccacggtcgccatcggggcgcaggccgccg

SEQ ID NO: 492632 - DNA, 75 bp, synthetic construct
  source 1..75: mol_type = other DNA
agtaaaaatttgcgcaggcattatttgcccgacgttatattggtcgaaacatccggaggtagccacccactgcca

SEQ ID NO: 492633 - DNA, 75 bp, synthetic construct
  source 1..75: mol_type = other DNA
cgcggaagcgctggaaatcggcctgaccgatgcggccggccgggtgatatttgaaacccgcctgaagcctacggt

SEQ ID NO: 492634 - DNA, 75 bp, synthetic construct
  source 1..75: mol_type = other DNA
cctttacacaaaataatatagagacgaatcttacctttattaaaagtaagagctctgccttttattcatattttg

SEQ ID NO: 492635 - DNA, 75 bp, synthetic construct
  source 1..75: mol_type = other DNA
gaacgcgctggtaatgtatgaaatccttaaagcaggcggtttcacgaccggcggtctgaactttgatgccaaagt

SEQ ID NO: 492636 - DNA, 75 bp, synthetic construct
  source 1..75: mol_type = other DNA
gcgttttgccgcctgctactggcataccttctgctggaacggagcggatatgtttggtgtaggcgcgtttaaccg

SEQ ID NO: 492637 - DNA, 75 bp, synthetic construct
  source 1..75: mol_type = other DNA
atagggcgttctgatgaagtccatgattttacctccgccttaattaactgttttctttctgaagaagaaattgtc

SEQ ID NO: 492638 - DNA, 75 bp, synthetic construct
  source 1..75: mol_type = other DNA
ttgctacatccaggtcagcaacctgttgccgtactgggcgcaggctttgcggtgtatgagtttttcaatgcgaaa

SEQ ID NO: 492639 - DNA, 75 bp, synthetic construct
  source 1..75: mol_type = other DNA
aagcatgccataggtgttgctaatggacttgatgctctgacgttgactcttaaagcatggcaagagctaggtaaa

SEQ ID NO: 492640 - DNA, 75 bp, synthetic construct
  source 1..75: mol_type = other DNA
ggctgcaccgttgattgccattgcgggctgggcttacgacagacatgcgacgaaagctcttgaaaatgcccatca

SEQ ID NO: 492641 - DNA, 75 bp, synthetic construct
  source 1..75: mol_type = other DNA
attattacaacgccactgtttaaaccgcggaaacaggaaaatggtgaggctgtgataaaagataacgttattgaa

SEQ ID NO: 492642 - DNA, 75 bp, synthetic construct
  source 1..75: mol_type = other DNA
cacattccgttcctcggtacggttggctccatcagcccgtatattggtctgtttggtacggtctgggggatcatg

SEQ ID NO: 492643 - DNA, 75 bp, synthetic construct
  source 1..75: mol_type = other DNA
taaacttatcatgttgattttgattggtttttcaatcgcatcctgggccattattatccagcggacccgtattct

SEQ ID NO: 492644 - DNA, 75 bp, synthetic construct
  source 1..75: mol_type = other DNA
ggagttaagtattgcattggtgtagcaaatggccttgatgcgttgatactagtattgagggcatggaaagaactc

SEQ ID NO: 492645 - DNA, 75 bp, synthetic construct
  source 1..75: mol_type = other DNA
gatatggctggtagtgattatattctgtttacagctatgcgtgatactgatagtccggagcgctttgatgcacct

SEQ ID NO: 492646 - DNA, 75 bp, synthetic construct
  source 1..75: mol_type = other DNA
atgtatatttattggattttattaggcctggctattgctacagaaattaccggtacgctgtcaatgaaatgggcg

SEQ ID NO: 492647 - DNA, 75 bp, synthetic construct
  source 1..75: mol_type = other DNA
gggatattcagcgcacacttgctaacacctttcccaatgaacatccggaggcctttattttgattccttcggagg

SEQ ID NO: 492648 - DNA, 75 bp, synthetic construct
  source 1..75: mol_type = other DNA
gtgtggctgccggcgctgcggcattcggcggaaaaaaggcttacgatggatatcaaaaaaagtcagaagcagagg

SEQ ID NO: 492649 - DNA, 75 bp, synthetic construct
  source 1..75: mol_type = other DNA
tgtctcgctgattggcgaagaagagagcagtatctatgctcgtcagcgcgacggtcgttttggcatgattttcca

SEQ ID NO: 492650 - DNA, 75 bp, synthetic construct
  source 1..75: mol_type = other DNA
gcagttgtaagcttgagtaatcagtggatttgcccctatatttccagacacctgttatcacttaccccatcactg

SEQ ID NO: 492651 - DNA, 75 bp, synthetic construct
  source 1..75: mol_type = other DNA
tgatatacattctcttataagagaaaaagcatttccttttaaaagtatattaaaagcaattttaaagagggaaag

SEQ ID NO: 492652 - DNA, 75 bp, synthetic construct
  source 1..75: mol_type = other DNA
gtgctggataatgacacctcgcgtaaagagttgatcgaccagttgcgcaccgttgccgctacgccccctgctgaa

SEQ ID NO: 492653 - DNA, 75 bp, synthetic construct
  source 1..75: mol_type = other DNA
gtgaactgcatagactcatttctgaatatttgcagtgtaagagacgtaaagataaatctgttgagcccacccctt

SEQ ID NO: 492654 - DNA, 75 bp, synthetic construct
  source 1..75: mol_type = other DNA
gcagatgaactgccatataatattttgttaattaacaatggtaaaaatgaatggtaccaagatagtattccaggg

SEQ ID NO: 492655 - DNA, 75 bp, synthetic construct
  source 1..75: mol_type = other DNA
tcaatattgtgcgcggtcagcctgtgccaggtggacggctgggcgtgaagatttacgaaatcagaggtggtaacg

SEQ ID NO: 492656 - DNA, 75 bp, synthetic construct
  source 1..75: mol_type = other DNA
gtgctttcaaccaactgctttctaaaagccccttatttaaaaaagtattttaatgttgctattgctaatgataag

SEQ ID NO: 492657 - DNA, 75 bp, synthetic construct
  source 1..75: mol_type = other DNA
tactttcccttagaaggcgaattctcgcgcttcccccccactttgtattgccgattgagctaggccagttgccgc

SEQ ID NO: 492658 - DNA, 75 bp, synthetic construct
  source 1..75: mol_type = other DNA
tcaattcggccgcgcccagccagtcggcggtttaaatgagaaaattgaaggtttcttcgctatctgccaacagcg

SEQ ID NO: 492659 - DNA, 75 bp, synthetic construct
  source 1..75: mol_type = other DNA
agcgaatttgaagatactctgcagattgtcgatgcggagtcagtaagccagtggtgtcgctgggtgacatttacc

SEQ ID NO: 492660 - DNA, 75 bp, synthetic construct
  source 1..75: mol_type = other DNA
cgtttgatgagtcgcgccccctccctgtctctgttccttcaataccgctgaagcttaaagtcattctggtcggtg

SEQ ID NO: 492661 - DNA, 75 bp, synthetic construct
  source 1..75: mol_type = other DNA
gtgaactgcatagactcatttctgaatatttgcagtgtaagcgacgtaaagataaatctgttgagcccccccctt

SEQ ID NO: 492662 - DNA, 75 bp, synthetic construct
  source 1..75: mol_type = other DNA
ttaattaaagcaataaaaggttttttatttatatcattagcactcgcaatgtgtgggccattgtattatggcgaa

SEQ ID NO: 492663 - DNA, 75 bp, synthetic construct
  source 1..75: mol_type = other DNA
atgtctggtgtaagagtcgtgaggtggtggttctcagaaatctgattgagcaggcgtggggaaaagtattggacg

SEQ ID NO: 492664 - DNA, 75 bp, synthetic construct
  source 1..75: mol_type = other DNA
tcgcagaaccgcatcgtcaggtgtggatccgcgcaaatggtagcgtgccggatgatctgcgcgttcatcagtatc

SEQ ID NO: 492665 - DNA, 75 bp, synthetic construct
  source 1..75: mol_type = other DNA
gggttgaatggcataccgcatgtgggcaaaaaagcggtactggttatgtgtgccgatcacggcgtctgggaggaa

SEQ ID NO: 492666 - DNA, 75 bp, synthetic construct
  source 1..75: mol_type = other DNA
tgaggggagtggcgcggcactggcgatgcccatcgttgaagcagcttgtgcgatatacagcagcatgggcgaact

SEQ ID NO: 492667 - DNA, 75 bp, synthetic construct
  source 1..75: mol_type = other DNA
tgcaatgaaccgctgtcaggttgaagagttgcttctggaagtcattcgttatacgcgtgaactggcgaaaaatgg

SEQ ID NO: 492668 - DNA, 75 bp, synthetic construct
  source 1..75: mol_type = other DNA
atgcccatcattgacgctgcttgcacgatatacaacaacatgggcgaacttgctgccagtaatattattctaccg

SEQ ID NO: 492669 - DNA, 75 bp, synthetic construct
  source 1..75: mol_type = other DNA
tgatactgctgagcctatccccgggcttatcaacatgcgtgtcgcacgaggtagtggcaatattgcttcagctcc

SEQ ID NO: 492670 - DNA, 75 bp, synthetic construct
  source 1..75: mol_type = other DNA
attgacgggttactcaaacctgttggtagcctgggaaggctggaggcgcttgccatacaactggcaggaatgccg

SEQ ID NO: 492671 - DNA, 75 bp, synthetic construct
  source 1..75: mol_type = other DNA
ctgcgtagaagtgtgcccggcgggcgcggtaatttttggtacgcgtgaagagctgatggcggaggcgaaaaaacg

SEQ ID NO: 492672 - DNA, 75 bp, synthetic construct
  source 1..75: mol_type = other DNA
tctcaacagttcgcttaggcatggaagttttgcggcatgaaccgccccgggtttcctggagagtgttttatctgt

SEQ ID NO: 492673 - DNA, 75 bp, synthetic construct
  source 1..75: mol_type = other DNA
cacaataacaagggaagactcactcgtggctgcaaccctgcttactcaaaatctattcacacatggttacgtttt

SEQ ID NO: 492674 - DNA, 75 bp, synthetic construct
  source 1..75: mol_type = other DNA
tattgatgccaccaactcgttaattggtaatgacgattacaactgtcttatcgaagggaataaaaataacaaacg

SEQ ID NO: 492675 - DNA, 75 bp, synthetic construct
  source 1..75: mol_type = other DNA
aactctgtaggtgatggtataaattttgttgctgtcaggccgcgaaatatcgcatttaattacatcgtaagggca

SEQ ID NO: 492676 - DNA, 75 bp, synthetic construct
  source 1..75: mol_type = other DNA
ggctggctgaaatgcaacggtgcagctttttctgccgaagagtatccggaactggcaaaagtttatccgacaaat

SEQ ID NO: 492677 - DNA, 75 bp, synthetic construct
  source 1..75: mol_type = other DNA
ttgtttcgtgaaaaatacagagttggtataggtagggataaaaacgaaaacgttggtttgggagaaggttcggca

SEQ ID NO: 492678 - DNA, 75 bp, synthetic construct
  source 1..75: mol_type = other DNA
ctgcccgttggtgtgcctgttccgtggccctcagccactccaccaacgggctggctgaaatgcaacggcgcagca

SEQ ID NO: 492679 - DNA, 75 bp, synthetic construct
  source 1..75: mol_type = other DNA
caggatgactcttttgaagcgcacaggcatgagtcctttttttatgcgggtatttcacgtaatgaaaccccatta

SEQ ID NO: 492680 - DNA, 75 bp, synthetic construct
  source 1..75: mol_type = other DNA
gcaagcctgacgccgggtgctgatagcccacttgattttgatgattattctgtatcttctaatccaaatgatatt

SEQ ID NO: 492681 - DNA, 75 bp, synthetic construct
  source 1..75: mol_type = other DNA
gaagagactgctgccagcatggaacaactcaccgccacggtgaaacagaacgccgataatgcccgccaggcctcg

SEQ ID NO: 492682 - DNA, 75 bp, synthetic construct
  source 1..75: mol_type = other DNA
ggcgagttaacttcaacctgggatctcatgctgcaaacgcgcattaacctgagtcgttcagcggtgcggatgatg

SEQ ID NO: 492683 - DNA, 75 bp, synthetic construct
  source 1..75: mol_type = other DNA
aggaattgattcaggacggactctcctgtctgctcaggacgggagcattgaggcacacggccatgattacaatgg

SEQ ID NO: 492684 - DNA, 75 bp, synthetic construct
  source 1..75: mol_type = other DNA
gacaccgggcatattcgggatttacatcatcatatggcgggagcgaaacccgtccacgaaatattgcatttaact

SEQ ID NO: 492685 - DNA, 75 bp, synthetic construct
  source 1..75: mol_type = other DNA
ggtttgggagaaggttctgcattacctgttggggtgcctgttccgtggccttcagccactccgccaacaggctgg

SEQ ID NO: 492686 - DNA, 75 bp, synthetic construct
  source 1..75: mol_type = other DNA
ttggtgtgcctgttccgtggccttcagccacaccgcctactggctggctgaaatgcaacggtgcggctttttctg

SEQ ID NO: 492687 - DNA, 75 bp, synthetic construct
  source 1..75: mol_type = other DNA
ggtgaatttattcgtggctgggatgacggacgtggagtggatgccgggcgacaattattatcttcacagggggat

SEQ ID NO: 492688 - DNA, 75 bp, synthetic construct
  source 1..75: mol_type = other DNA
ctgttccgtggccttcagccacaccgcctactggctggctgaaatgcaacggtgcggctttttctgctgaagaat

SEQ ID NO: 492689 - DNA, 75 bp, synthetic construct
  source 1..75: mol_type = other DNA
ctgaaatgcaacggggctgctttttcggctgaagaatacccggaactggcaaaggcttacccgacaaataaattg

SEQ ID NO: 492690 - DNA, 75 bp, synthetic construct
  source 1..75: mol_type = other DNA
cgacaaataaattgcctgatttacgcggtgagtttattcgtggctgggatgacgggagaggcattgacccaggaa

SEQ ID NO: 492691 - DNA, 75 bp, synthetic construct
  source 1..75: mol_type = other DNA
tcacagggcgatgccattcgaaatataattggtgcattagtggatgtcaggtttaatacctatccttctgattct

SEQ ID NO: 492692 - DNA, 75 bp, synthetic construct
  source 1..75: mol_type = other DNA
cggtgaatttattcgtggctgggatgatgggcgtagtgcggatgcggggagaacaatattatcagctcagggcga

SEQ ID NO: 492693 - DNA, 75 bp, synthetic construct
  source 1..75: mol_type = other DNA
gggcgaatttatccgtggctgggatgacggacgaggtattgatgcaggacgagagatactttcatttcaggaagg

SEQ ID NO: 492694 - DNA, 75 bp, synthetic construct
  source 1..75: mol_type = other DNA
ttttgcagagaaaattaaaaacgatatcctgcggagaacataaacacccacggatccagtcgtaccgagtctttc

SEQ ID NO: 492695 - DNA, 75 bp, synthetic construct
  source 1..75: mol_type = other DNA
ggatgggacgacgggcgcaaagttgatacaggacgtaagttgctgtccgcacaaggggcaacgctgttaagaaca

SEQ ID NO: 492696 - DNA, 75 bp, synthetic construct
  source 1..75: mol_type = other DNA
cgttcttctggccctccgctgcaatgccaaatactgtaatcgacagctggtccggtatggtgtttttgaagttca

SEQ ID NO: 492697 - DNA, 75 bp, synthetic construct
  source 1..75: mol_type = other DNA
agataactctataacgggtattcaaaggacagcggaggataattttaccggggcatggatatcaatgcgcccccg

SEQ ID NO: 492698 - DNA, 75 bp, synthetic construct
  source 1..75: mol_type = other DNA
ttttcataaacgttggtttgggggaaggctctgcattgcctgttggtgtaccggttccgtggcccaccgccacac

SEQ ID NO: 492699 - DNA, 75 bp, synthetic construct
  source 1..75: mol_type = other DNA
cgctaccagtcgtaatattgatgaaaaatataaaaactatcacacagcgttaactgaactgattgattatcttga

SEQ ID NO: 492700 - DNA, 75 bp, synthetic construct
  source 1..75: mol_type = other DNA
cccggttttgttgaattgctgggatcggggtttgctgttgaatacctgagccgcaataatccgtttggtgatatc

SEQ ID NO: 492701 - DNA, 75 bp, synthetic construct
  source 1..75: mol_type = other DNA
gcatctcgctcagttcgcacagcatctgaaacccgctcccgtaacatcgcctttaattatattgtgagggctgca

SEQ ID NO: 492702 - DNA, 75 bp, synthetic construct
  source 1..75: mol_type = other DNA
gctgcaacgactaaacctgcaggtgcgaatgaaacgcgcccacgaaatatcgcttttaactatattgtgagggcc

SEQ ID NO: 492703 - DNA, 75 bp, synthetic construct
  source 1..75: mol_type = other DNA
ttttcataaacgaaaaaaaaaaacaaccctcagcattacctgttggggtgcctgttccatggccttcagccacac

SEQ ID NO: 492704 - DNA, 75 bp, synthetic construct
  source 1..75: mol_type = other DNA
gaaaactatagcgaccaacgcgccaggtggttcagaaacccgtccgcgcaacattgcattcaactacattgtaag

SEQ ID NO: 492705 - DNA, 75 bp, synthetic construct
  source 1..75: mol_type = other DNA
atgtgtctatgacatacgctaatgaccgaaaaatccgacaagatgttcacttctcggcggcaaatgttgttccaa

SEQ ID NO: 492706 - DNA, 75 bp, synthetic construct
  source 1..75: mol_type = other DNA
ggctctcgaaaaccttggtttgggagaagcggcaaaacgaaatgtgggaacaggggaaaatcagatacctgatat

SEQ ID NO: 492707 - DNA, 75 bp, synthetic construct
  source 1..75: mol_type = other DNA
ggctggctgaaatgcaacggtgcggctttttctcctgaagaatacccggaactggcaaaggcttacccgacaaat

SEQ ID NO: 492708 - DNA, 75 bp, synthetic construct
  source 1..75: mol_type = other DNA
ctgaaatgcaacggtgccgctttttctgctgaagaatacccggaactggcaaaggcttatccgacaaataaattg

SEQ ID NO: 492709 - DNA, 75 bp, synthetic construct
  source 1..75: mol_type = other DNA
gttgcaggaggagctttgcagcgttgtggaggcatccggtgccagcctggagaaggggcggcatgaccagctgct

SEQ ID NO: 492710 - DNA, 75 bp, synthetic construct
  source 1..75: mol_type = other DNA
gttgcaggaagagctttgtggcgtggtggaggcatccggtgccagcctggagaaggggcgaaacgaccagttgct

SEQ ID NO: 492711 - DNA, 75 bp, synthetic construct
  source 1..75: mol_type = other DNA
tacccgacaaataaattgcctgatttacgaggtgaatttattcgtggctgggatgatgggcgcggtattgatgca

SEQ ID NO: 492712 - DNA, 75 bp, synthetic construct
  source 1..75: mol_type = other DNA
ttcactcagagaccactcacataaccagcagatctggacaggttcaaatacaacatcgtcaactattggtcaggc

SEQ ID NO: 492713 - DNA, 75 bp, synthetic construct
  source 1..75: mol_type = other DNA
gcgaaaaatccgcaggtgacgttgcgcagtgcggtaggcaaagtgctgtggcgaatccttattttctacgtaggc

SEQ ID NO: 492714 - DNA, 75 bp, synthetic construct
  source 1..75: mol_type = other DNA
gcgattttcgttatcgtcaccatcttcccgtggaatgaaataggcagtaacggcagcccgttcgtactgactttc

SEQ ID NO: 492715 - DNA, 75 bp, synthetic construct
  source 1..75: mol_type = other DNA
gattgccggtcatccgttccgctccattctgttcccgtgggccaactacgtaacaatggtgttcctgatttgcgt

SEQ ID NO: 492716 - DNA, 75 bp, synthetic construct
  source 1..75: mol_type = other DNA
ttttcataaacgttggtttgggagaaggctctgctttgcctgttggcgttccggtgccgtggcctcttgccgtcc

SEQ ID NO: 492717 - DNA, 75 bp, synthetic construct
  source 1..75: mol_type = other DNA
gatatcgaaccacagaatattgcactaacaaacggcagccagagcgcgtttttctacttatttaatctgtttgcc

SEQ ID NO: 492718 - DNA, 75 bp, synthetic construct
  source 1..75: mol_type = other DNA
gggtgtggcagtatctattgctattctgctaattggctcatgcctgaactacatcattcccaatccgcagcgtgt

SEQ ID NO: 492719 - DNA, 75 bp, synthetic construct
  source 1..75: mol_type = other DNA
gaaggctctgcattacctgttggtgtgcctgttccgtggccttcagctacaccaccaacaggctggttgaaatgc

SEQ ID NO: 492720 - DNA, 75 bp, synthetic construct
  source 1..75: mol_type = other DNA
ccccggacagtattgatgccactaattcgttaattggtaatgatgattacaactgtctgattgaaggaaataaaa

SEQ ID NO: 492721 - DNA, 75 bp, synthetic construct
  source 1..75: mol_type = other DNA
ctgaccgggagcctcaaagcctaccttcagcagtaagagctgtcagcactcgtggggttgcttctgacaatgcag

SEQ ID NO: 492722 - DNA, 75 bp, synthetic construct
  source 1..75: mol_type = other DNA
gagcattgaggcacacggccatgattacaatggggccatctatacttctagcggtccttcctgggctaatacgac

SEQ ID NO: 492723 - DNA, 75 bp, synthetic construct
  source 1..75: mol_type = other DNA
gtgcgctgctgttaagccgcaagaatccgtttggcgatatcaaatcggatggcacggtgaaaacggctctcgaaa

SEQ ID NO: 492724 - DNA, 75 bp, synthetic construct
  source 1..75: mol_type = other DNA
cctgttccgtggccttctgcaacaccgcctactggctggctgaaatgtaacggtgcggctttttctgccgttgaa

SEQ ID NO: 492725 - DNA, 75 bp, synthetic construct
  source 1..75: mol_type = other DNA
gatattcacggtaatccacacatggggccgtgaccagcaatggcatccacatattcatctgtcgaccactgccgg

SEQ ID NO: 492726 - DNA, 75 bp, synthetic construct
  source 1..75: mol_type = other DNA
taccagaaaaagcccccggtgccgatgagccgcctggagcactatgccggtcaggatgaaattggtctgcgttac

SEQ ID NO: 492727 - DNA, 75 bp, synthetic construct
  source 1..75: mol_type = other DNA
gatgtgatgcaggaaatctgccgtcaggcagatgtggagccggggatattcacggtaatccacacatggggccgg

SEQ ID NO: 492728 - DNA, 75 bp, synthetic construct
  source 1..75: mol_type = other DNA
atcttcatttttacgcccgtaaggtgatgagcatgtggcgttaccggataacgcggctactgtcccggaaatacc

SEQ ID NO: 492729 - DNA, 75 bp, synthetic construct
  source 1..75: mol_type = other DNA
gcgttttacggggctgaagcggggataccgtctggcagagctggtcgggatgcatgagccactggcccggatgcg

SEQ ID NO: 492730 - DNA, 75 bp, synthetic construct
  source 1..75: mol_type = other DNA
tatcctgacctggtgataccggatgcgctggcagcagaaggaagcagtaaacgggactggaatcgcttcctggac

SEQ ID NO: 492731 - DNA, 75 bp, synthetic construct
  source 1..75: mol_type = other DNA
cccggagagggatgtatcagcggttactgaaggttgacccgctgaagtgcatcctgtgcggagttcagatgcgtt

SEQ ID NO: 492732 - DNA, 75 bp, synthetic construct
  source 1..75: mol_type = other DNA
ttacggggctgaagcggggctaccgtctgacagagcaggtcctgatgcatgatccactggcgcaacagcgggtgt

SEQ ID NO: 492733 - DNA, 75 bp, synthetic construct
  source 1..75: mol_type = other DNA
agtgaaggttgacccgctgaagtgcattctgtgcggaagtcagatgcgttttacggggctgaagcggggttaccg

SEQ ID NO: 492734 - DNA, 75 bp, synthetic construct
  source 1..75: mol_type = other DNA
cggcgtgacaccagaccacacctggaaaaaccttcatttttacgcccgtaaggtgatgagcatgtggcgttaccg

SEQ ID NO: 492735 - DNA, 75 bp, synthetic construct
  source 1..75: mol_type = other DNA
ggctggaatgtcaacgtatcccgggtgatggataacgccccccatgtgtcggtgtactttgactcttacctgaaa

SEQ ID NO: 492736 - DNA, 75 bp, synthetic construct
  source 1..75: mol_type = other DNA
ggctcttacctgaaaaagccgccggtgccaatgagccgtctggaacactatgccggtcaggatgaaattggtctg

SEQ ID NO: 492737 - DNA, 75 bp, synthetic construct
  source 1..75: mol_type = other DNA
aaaaaccttcatttttacgcccgtaaggtgatgagcatgtggcgttacaggataacgtggttactgtcacgaaaa

SEQ ID NO: 492738 - DNA, 75 bp, synthetic construct
  source 1..75: mol_type = other DNA
cgactgccggaaatgcccaaaccgcagcaactggatactgaaatggcgcagttgcgcgtgcaacggttacgttat

SEQ ID NO: 492739 - DNA, 75 bp, synthetic construct
  source 1..75: mol_type = other DNA
gatcgccctgctttcggtcattgtgctgtggtcagaaatccattccgctttcggcttcctcgaaaatatttcgct

SEQ ID NO: 492740 - DNA, 75 bp, synthetic construct
  source 1..75: mol_type = other DNA
gaagtgaagaaacactcagggcggttatcaacaccgactggggattgccttatcttcctcgtgccagcatggagc

SEQ ID NO: 492741 - DNA, 75 bp, synthetic construct
  source 1..75: mol_type = other DNA
aggcaaaagcggcgaaacccgcgcagccagaagtcgtagaggcgctccagtctgccttaaatgcgcttgaggaac

SEQ ID NO: 492742 - DNA, 75 bp, synthetic construct
  source 1..75: mol_type = other DNA
gaagatctcctcaataaacagccacaactgcgacagatccttcaggccgacggccagccgctgactgccgagcaa

SEQ ID NO: 492743 - DNA, 75 bp, synthetic construct
  source 1..75: mol_type = other DNA
ttggaacgcttaccggcaataccccgcttaatcaggcgcaaaattttgctttgcagtctgactctgcgcgactga

SEQ ID NO: 492744 - DNA, 75 bp, synthetic construct
  source 1..75: mol_type = other DNA
taccgtctggcagagcaggtcctgatgcatgagccgctgggcccggatgcggtggtgcggctgagagccgcagag

SEQ ID NO: 492745 - DNA, 75 bp, synthetic construct
  source 1..75: mol_type = other DNA
gtgcgtccggtggtgattgagtcggtgaccaaaatcatggcgtgcgggactacgctgatggggtacacgcagtgg

SEQ ID NO: 492746 - DNA, 75 bp, synthetic construct
  source 1..75: mol_type = other DNA
tcgcagccgacgtgatcgccagacagatgtggagccggggatattcacggtaatccacacctggggacgtgacca

SEQ ID NO: 492747 - DNA, 75 bp, synthetic construct
  source 1..75: mol_type = other DNA
actggtttacaaattactgacggcggaacaggactatgaagccaccggcagcgaagaaacgctcaaaacggtaat

SEQ ID NO: 492748 - DNA, 75 bp, synthetic construct
  source 1..75: mol_type = other DNA
aaaacgtaccaccacatttatgtctgcaggtatgacgctggtggagagttcccctggacgtgagatcacaaacag

SEQ ID NO: 492749 - DNA, 75 bp, synthetic construct
  source 1..75: mol_type = other DNA
gtatggtgaggtactacggttttttgagtccggcgaaacggcggttactggaagaagtggtgtacatcataacgg

SEQ ID NO: 492750 - DNA, 75 bp, synthetic construct
  source 1..75: mol_type = other DNA
agtatctgctgagtctggttcccgactgcccgtggcagcatattgtgttcacacttccctgccagtactggtccc

SEQ ID NO: 492751 - DNA, 75 bp, synthetic construct
  source 1..75: mol_type = other DNA
gccgccaggcggatgtggaaccggggagattcacggtaatccacacatggggccgtgaccagcaatggcatccac

SEQ ID NO: 492752 - DNA, 75 bp, synthetic construct
  source 1..75: mol_type = other DNA
gtacgtcataacggagacggtgagaaaaacggcgatgcaaatcacccggagagggatgtatcagaggttactgaa

SEQ ID NO: 492753 - DNA, 75 bp, synthetic construct
  source 1..75: mol_type = other DNA
gagctggtaataccggatgaactggcagtggaaggaaacagcaaacgggactggaatcgcttcctggacacgcat

SEQ ID NO: 492754 - DNA, 75 bp, synthetic construct
  source 1..75: mol_type = other DNA
atgtggcgctaccggataacgcggttactgtcacggaaatacccggagctggtgataccggatgggctggcagca

SEQ ID NO: 492755 - DNA, 75 bp, synthetic construct
  source 1..75: mol_type = other DNA
aatcaggtggagagggatgtatcagaggttactgaaggttgacccgctgaagtgcattctgtgcggaagtcagat

SEQ ID NO: 492756 - DNA, 75 bp, synthetic construct
  source 1..75: mol_type = other DNA
gccacacaaaaaaggtccgcttccggtgtaaaagtcgctcctgcccgcactgcggagtgaaggctggcgcacagt

SEQ ID NO: 492757 - DNA, 75 bp, synthetic construct
  source 1..75: mol_type = other DNA
gacgtgctttattgagccttcaggctgggatgctggaaaaacaccgccatattgttgttgccaatgatggttacg

SEQ ID NO: 492758 - DNA, 75 bp, synthetic construct
  source 1..75: mol_type = other DNA
ggtacctcagtccggaataacatcaacgtatctatgacatacgctaatgaccgaaaaatccgacaagatgttcac

SEQ ID NO: 492759 - DNA, 75 bp, synthetic construct
  source 1..75: mol_type = other DNA
ccgttggcgtgcctgttccgtggccttccgccactccgccaacaggctggctgaaatgcaacggggcggcttttt

SEQ ID NO: 492760 - DNA, 75 bp, synthetic construct
  source 1..75: mol_type = other DNA
agccgcaagaatccgtttggcgatatcaaatcggatggcaccgtgaaaacggctctcgaaaaccttggtttggga

SEQ ID NO: 492761 - DNA, 75 bp, synthetic construct
  source 1..75: mol_type = other DNA
aaccttggtttgggagaaggctcagcattacctgttggggtgcctgttccgtggccttcagccacaccgccaaca

SEQ ID NO: 492762 - DNA, 75 bp, synthetic construct
  source 1..75: mol_type = other DNA
accgacacttcattcacgagggagtatcggtaatactggcgggagtgaaacccgtccacgaaatatcgcatttaa

SEQ ID NO: 492763 - DNA, 75 bp, synthetic construct
  source 1..75: mol_type = other DNA
atgcaaaaagacgcgctgaataacgtacacattaccgatgaacaggttctgatgaccccggaacaattgaaggcc

SEQ ID NO: 492764 - DNA, 75 bp, synthetic construct
  source 1..75: mol_type = other DNA
ttctacgggttcctgagtccggcgaaacgccggttgctggaagaagtggtgtacgtcataacagaaacagtgaga

SEQ ID NO: 492765 - DNA, 75 bp, synthetic construct
  source 1..75: mol_type = other DNA
ctggaatgtcaacgtatcccgggtgatggataacgccacacatgtggcggtgtacttcggctcttacctgaaaaa

SEQ ID NO: 492766 - DNA, 75 bp, synthetic construct
  source 1..75: mol_type = other DNA
agaaggaagcagtaaacgggaatggaatcgcttcctggacacgcattaccgccgtggctggaatgtcaacgtatc

SEQ ID NO: 492767 - DNA, 75 bp, synthetic construct
  source 1..75: mol_type = other DNA
aaacttcatttttacgcccgtaaggtgatgcgcatgtggcgttaccggataacgcgattactgtcccggaaatac

SEQ ID NO: 492768 - DNA, 75 bp, synthetic construct
  source 1..75: mol_type = other DNA
agaggttactgaaggttgacccgctgaagtgcattctgtgcggaagtcagatgcgttttacggggctgaagcggg

SEQ ID NO: 492769 - DNA, 75 bp, synthetic construct
  source 1..75: mol_type = other DNA
aacgccggttgctggaagaagtggtgtacgtcataacagaaacagtgagaaaaacggcgaggcaaatcaccttga

SEQ ID NO: 492770 - DNA, 75 bp, synthetic construct
  source 1..75: mol_type = other DNA
agggtgatggataacgccacacatgtggcggtgtacttcggctcttacctgaaaaagccaccggtgccgatgagt

SEQ ID NO: 492771 - DNA, 75 bp, synthetic construct
  source 1..75: mol_type = other DNA
tgccggtcaggatgaaattggtctgcgttacaacagccaccgcacaaaacgggaagaatacctggcgatgagttc

SEQ ID NO: 492772 - DNA, 75 bp, synthetic construct
  source 1..75: mol_type = other DNA
gacggaagcgttagatccaaatagcccgcaatatctgggcgatctgtttagctggtcggcaattggcgcccgtac

SEQ ID NO: 492773 - DNA, 75 bp, synthetic construct
  source 1..75: mol_type = other DNA
cgtcgggccacacctggaaaaatcttcatttttacgcccgtaaggtgatgagcatgtggcgttaccggataacgc

SEQ ID NO: 492774 - DNA, 75 bp, synthetic construct
  source 1..75: mol_type = other DNA
gtatggtgaggtactacggttttttgagtccggcgaaacggcggttactggaagaggtggtgtacgtcataacgg

SEQ ID NO: 492775 - DNA, 75 bp, synthetic construct
  source 1..75: mol_type = other DNA
gttgctggcagagatgagccgtatcgcagcgaatgtgatactggaaatctgccgtcaggcggacgtggagccggg

SEQ ID NO: 492776 - DNA, 75 bp, synthetic construct
  source 1..75: mol_type = other DNA
tatccatgacgcagaatgtatccgtgaaatccacgaagcgcccctgcaggctatcggcatcctggaaaaatacaa

SEQ ID NO: 492777 - DNA, 75 bp, synthetic construct
  source 1..75: mol_type = other DNA
actggctgaagctatcgccgcttcttttggcagctttgccgatttcaaagctcagtttactgatgctgcgatcaa

SEQ ID NO: 492778 - DNA, 75 bp, synthetic construct
  source 1..75: mol_type = other DNA
aaagataacgccaacgttaccatcgacgcagtctgttttattcaggtgattgacgcgccacgcgcggcttatgaa

SEQ ID NO: 492779 - DNA, 75 bp, synthetic construct
  source 1..75: mol_type = other DNA
ctagcaaaagcaggaatgatgccatttgctcgttatttctgcattttcataaatgttggtttgggagaaggctct

SEQ ID NO: 492780 - DNA, 75 bp, synthetic construct
  source 1..75: mol_type = other DNA
gaagcggcaaaacggaatgtgggcacaggagataatcagataccggatatgggagcattcgcttctggttcggga

SEQ ID NO: 492781 - DNA, 75 bp, synthetic construct
  source 1..75: mol_type = other DNA
agctctcgaaaaccttggtttgggagaaggctcagcattacccgttggtgtgcctgttccgtggccttcagccac

SEQ ID NO: 492782 - DNA, 75 bp, synthetic construct
  source 1..75: mol_type = other DNA
tattaccaccactctatatctgaccagcatttgcagaaacggaaaatatgatcagtatgcaaaaaaaggccgcag

SEQ ID NO: 492783 - DNA, 75 bp, synthetic construct
  source 1..75: mol_type = other DNA
ctagggccagtaatcattgcatggattattgccgggatcggtatttattttatcgcaaactcctttcgcgtacta

SEQ ID NO: 492784 - DNA, 75 bp, synthetic construct
  source 1..75: mol_type = other DNA
accaccaacgcgattaagtctgcacagacggcattcaacggctggcgtcagctggcggccaaagaacgcactgca

SEQ ID NO: 492785 - DNA, 75 bp, synthetic construct
  source 1..75: mol_type = other DNA
tcaccgatgcccgttgtatccgtgaaatgcatgaagctccattacaggcgctcaatattctggccagatacccgc

SEQ ID NO: 492786 - DNA, 75 bp, synthetic construct
  source 1..75: mol_type = other DNA
actttatcaatacgcttctcggggaaggggaagtgtcagtgcgcattcagcaggctgacgacagtgaaagtgaaa

SEQ ID NO: 492787 - DNA, 75 bp, synthetic construct
  source 1..75: mol_type = other DNA
tgaagatatgcattggaatggtaaaaatgattataaaactttactcagagctgtctcagaatttaatgagataat

SEQ ID NO: 492788 - DNA, 75 bp, synthetic construct
  source 1..75: mol_type = other DNA
cgatgaccttggattcgacgcctctcgtgtcgtgccaacagctaatgaaaaccgtccacgtaacatcgcctttaa

SEQ ID NO: 492789 - DNA, 75 bp, synthetic construct
  source 1..75: mol_type = other DNA
ttttcataaatgttggtttgggagaaggttcggcattacccgttggtgtgcctgttccgtggccttccgccactc

SEQ ID NO: 492790 - DNA, 75 bp, synthetic construct
  source 1..75: mol_type = other DNA
atgccatttgctcgttatttctgcattttcataaatgttggtttgggagaaggttcggcattacccgttggtgtg

SEQ ID NO: 492791 - DNA, 75 bp, synthetic construct
  source 1..75: mol_type = other DNA
tattgatgcaggacgtgttttattgagcattcagacagggatgctggaaaaacaccgccatattgttgttgccaa

SEQ ID NO: 492792 - DNA, 75 bp, synthetic construct
  source 1..75: mol_type = other DNA
atgaaagaaaacgcatacgaaatgccctggcgtacgaactatgaggccatggcagcagcaggttggctagttggg

SEQ ID NO: 492793 - DNA, 75 bp, synthetic construct
  source 1..75: mol_type = other DNA
cagcttcccaatctggagtacatcgccaagctttcaggtggccgggtgatcaaaggccgcattcctattttaacc

SEQ ID NO: 492794 - DNA, 75 bp, synthetic construct
  source 1..75: mol_type = other DNA
taccgaaaaggccaataccttggctaaacaagccatggcgatgctgcttttctactacgaacgcattcagcccgt

SEQ ID NO: 492795 - DNA, 75 bp, synthetic construct
  source 1..75: mol_type = other DNA
ccaactggagcaggcgcaggggctggttttagggttcgaccaaggaatattgcatttaactatattgtgagggct

SEQ ID NO: 492796 - DNA, 75 bp, synthetic construct
  source 1..75: mol_type = other DNA
cggcccggcgctggcggcaggctgcaccatggtgctgaagccagccagtcagacgccgttctctgcgctggcgct

SEQ ID NO: 492797 - DNA, 75 bp, synthetic construct
  source 1..75: mol_type = other DNA
cccgctattccgctttaaagatgaagccgatgtgattgcgcaggccaatgacaccgagtttggccttgccgccta

SEQ ID NO: 492798 - DNA, 75 bp, synthetic construct
  source 1..75: mol_type = other DNA
ctctcgaaaatcttggtttgggagaaggctctgcattacctgttggtgtgcctgttccgtggccctccgcaaccc

SEQ ID NO: 492799 - DNA, 75 bp, synthetic construct
  source 1..75: mol_type = other DNA
aacgttggtttgggagaaggctctgcattacctgttggtgtgcctgttccatggccttcagccacaccgccaaca

SEQ ID NO: 492800 - DNA, 75 bp, synthetic construct
  source 1..75: mol_type = other DNA
ttgcccgcgcttttatccggatttacagcagggaaagcctccagtgcgcaagtcaataaggttattcggcaggcc

SEQ ID NO: 492801 - DNA, 75 bp, synthetic construct
  source 1..75: mol_type = other DNA
ggaatctacgaggcgtttgccagccgatttgcagaacgggtggcggccctgaaagtgggcgacggacaacagcct

SEQ ID NO: 492802 - DNA, 75 bp, synthetic construct
  source 1..75: mol_type = other DNA
tactcaatacggcttaggcaaatataaaacctttacgcatatcgattccagatcgaaaaaatcacgatggaatgg

SEQ ID NO: 492803 - DNA, 75 bp, synthetic construct
  source 1..75: mol_type = other DNA
caatacggcttaggaaaatataaaacctttacgcatattgattccagatcaaaaaaatcacggtggaatggataa

SEQ ID NO: 492804 - DNA, 75 bp, synthetic construct
  source 1..75: mol_type = other DNA
aagggtgtctcccctgatattgtccatgcttatcttgatgggaaatatcctactcaatacggcttaggaaaatat

SEQ ID NO: 492805 - DNA, 75 bp, synthetic construct
  source 1..75: mol_type = other DNA
gggattattcgctatgatcaggtcaccgaccatttctggactggcttgttgctggtgcaactctccaatatcact

SEQ ID NO: 492806 - DNA, 75 bp, synthetic construct
  source 1..75: mol_type = other DNA
cggtgattgcatggttcttgctgggcaatacgcagaaaatgccggaaacaacgctgcaatggagcattctggtat

SEQ ID NO: 492807 - DNA, 75 bp, synthetic construct
  source 1..75: mol_type = other DNA
taccaagtatggcttaggaaagtataaaaccttcacgcacattgatagtcgttcaacgaaatcacgctggcatgg

SEQ ID NO: 492808 - DNA, 75 bp, synthetic construct
  source 1..75: mol_type = other DNA
atagcagtgaggacatcggaaaattcaaaagcattctcgacgacttgcctgatgtgacgtcggaaaggcttgaga

SEQ ID NO: 492809 - DNA, 75 bp, synthetic construct
  source 1..75: mol_type = other DNA
caaagaggcctgctgtgctgtcattctgggtaaagccgacaatccattagcatccagtaaccaagttggcgaatt

SEQ ID NO: 492810 - DNA, 75 bp, synthetic construct
  source 1..75: mol_type = other DNA
aaaccggagcatggaaagacgctgttgactgggtactcgaagaagcttgccaggctgtaaacattggcatcaaag

SEQ ID NO: 492811 - DNA, 75 bp, synthetic construct
  source 1..75: mol_type = other DNA
atgacaaacagcagtttaaagccctcctgtcatctcttggctgggaggaaaatgaagacctccagaacaaactgt

SEQ ID NO: 492812 - DNA, 75 bp, synthetic construct
  source 1..75: mol_type = other DNA
aaccgtgtctatcaatttcaggacgaagatcgtcgacgttttgtcgtcaaattttatcgtcctgaacgttggaca

SEQ ID NO: 492813 - DNA, 75 bp, synthetic construct
  source 1..75: mol_type = other DNA
atgatgccactgctggataagctgcgtgagcagtacggggtcggtggatttgcccctatatttccagacacctgt

SEQ ID NO: 492814 - DNA, 75 bp, synthetic construct
  source 1..75: mol_type = other DNA
actgacgccgctctacatcacgttgatttatgacatcatgagtcagcgccgtctgcgctggggctatgcttttag

SEQ ID NO: 492815 - DNA, 75 bp, synthetic construct
  source 1..75: mol_type = other DNA
agaattaatcgttacattttgtgatattattaattttgagtttgaaaataatgatgagtataaacataaagttaa

SEQ ID NO: 492816 - DNA, 75 bp, synthetic construct
  source 1..75: mol_type = other DNA
aagacagggccgacttttcggcctttatggagagtattggctattatgatgacgagtcgatgcaggatgatattc

SEQ ID NO: 492817 - DNA, 75 bp, synthetic construct
  source 1..75: mol_type = other DNA
atgaaagatttaactttgaagtttcatgacaaactgcagtttaaggccttcctgtcatctcttggctgggaggaa

SEQ ID NO: 492818 - DNA, 75 bp, synthetic construct
  source 1..75: mol_type = other DNA
attggcacgacgggttttgatgacgcaggcaagcaggcgattcgtgatgccgccggggatattgcgattgtcttt

SEQ ID NO: 492819 - DNA, 75 bp, synthetic construct
  source 1..75: mol_type = other DNA
gtcaggcactgcgctggcgatgggggaggcgattgcccatgcgttggataaagatctgaaagattgtgccgttta

SEQ ID NO: 492820 - DNA, 75 bp, synthetic construct
  source 1..75: mol_type = other DNA
ttttaagaatggcaagatctacgaagtcggcgcggcattggttgacgcaaaggatcaggaatatattcacgccat

SEQ ID NO: 492821 - DNA, 75 bp, synthetic construct
  source 1..75: mol_type = other DNA
cgccttgctggcggtgattggtgccgggattattcgctacgatcaggtcaccgaccatttctggaccggcctgct

SEQ ID NO: 492822 - DNA, 75 bp, synthetic construct
  source 1..75: mol_type = other DNA
atgcttcgctacaatggatacccgttaatcaaagagttttccattgtggcgctacttatcatcaccacgattctg

SEQ ID NO: 492823 - DNA, 75 bp, synthetic construct
  source 1..75: mol_type = other DNA
cgccttgctggcagttattggtgccgggattattcgttacgatcaggtcactgaccatttctggactggcctgct

SEQ ID NO: 492824 - DNA, 75 bp, synthetic construct
  source 1..75: mol_type = other DNA
atgaaagatttaactttgaagtttcatgacaaactgcagtttaaggccttcctgtcatctcttgcctggggggag

SEQ ID NO: 492825 - DNA, 75 bp, synthetic construct
  source 1..75: mol_type = other DNA
atgaaagatttaactttgaagtttcatgacaaactgcagtttaaggccttcctgtcatctcttgtctgggcggat

SEQ ID NO: 492826 - DNA, 75 bp, synthetic construct
  source 1..75: mol_type = other DNA
atgaaagatttaactttgaagtttcatgacaaactgcagtttaaggccttcctgtcatctcttgtctgggtggac

SEQ ID NO: 492827 - DNA, 75 bp, synthetic construct
  source 1..75: mol_type = other DNA
ccgcaagaatccgtttggcgatatcaaatcggacggcacggtgaaaacggctcttcaaaaccttggtttgggaga

SEQ ID NO: 492828 - DNA, 75 bp, synthetic construct
  source 1..75: mol_type = other DNA
cccgacaaataaattgcctgatttacgtggtgagttcattcgtggctgggatgatgaacgtggtgtggatagtgg

SEQ ID NO: 492829 - DNA, 75 bp, synthetic construct
  source 1..75: mol_type = other DNA
tcgtagtgttaaacgttatggtgaaattagtggaaatgtagatacagaaacccgtccacgaaatattgcatttaa

SEQ ID NO: 492830 - DNA, 75 bp, synthetic construct
  source 1..75: mol_type = other DNA
tgctgctggaaaccggttttgactacgaaaacggtgtggcggtgcagacccgcacggcgcgccagaccgtggaga

SEQ ID NO: 492831 - DNA, 75 bp, synthetic construct
  source 1..75: mol_type = other DNA
ataccgtaatcgatagctggtccagcatggtgtttttgaagttcaacggcgcgaaattctctgccactgattacc

SEQ ID NO: 492832 - DNA, 75 bp, synthetic construct
  source 1..75: mol_type = other DNA
tgaacgaactggctgcggcgctgggcaatgacccgaattttgcgaccaccatgactaacgcgcttgcgggtaagc

SEQ ID NO: 492833 - DNA, 75 bp, synthetic construct
  source 1..75: mol_type = other DNA
gtagtgttaaacgttatggtgaaattagtggaaatgtagatacagaaacccgtccacgaaatattgcatttaact

SEQ ID NO: 492834 - DNA, 75 bp, synthetic construct
  source 1..75: mol_type = other DNA
attttcacgatttaatttcaccagtaactctgtgggtgatggtgtgaattttgttgctgtcagaccgcgaaatat

SEQ ID NO: 492835 - DNA, 75 bp, synthetic construct
  source 1..75: mol_type = other DNA
cggctcaagtggcggcggatttagcggcgggggcggttcttctggcgggggcggttcttctggcggtggcggcgc

SEQ ID NO: 492836 - DNA, 75 bp, synthetic construct
  source 1..75: mol_type = other DNA
gcggtgaatttatccgtggctgggatgatgggcgcgggattgatgcgggacgtaccctgctttcagggcaggatg

SEQ ID NO: 492837 - DNA, 75 bp, synthetic construct
  source 1..75: mol_type = other DNA
tcaaatcggatggcacggtgaaaacggctctcgaaaaccttggtttgggagaaggttcggcattacccgttggtg

SEQ ID NO: 492838 - DNA, 75 bp, synthetic construct
  source 1..75: mol_type = other DNA
ggtttgggagaaggagctccagctattggcgttccgttcttctggccgtccgctgcaatgccagataccgtaatc

SEQ ID NO: 492839 - DNA, 75 bp, synthetic construct
  source 1..75: mol_type = other DNA
gacccgcattactatctcgacaacgtgctgctggaaaccggttttgactacgaaaatggcgtggcggtgcagacc

SEQ ID NO: 492840 - DNA, 75 bp, synthetic construct
  source 1..75: mol_type = other DNA
ttttcataaacgttggtttgggagaaggctcagcattacccgttggtgtgcctgttccgtggccttcagccactc

SEQ ID NO: 492841 - DNA, 75 bp, synthetic construct
  source 1..75: mol_type = other DNA
cggtatggtgtttttgaagttcaacggcgcgaaattctctgccactgattaccctgtgctggcgaaagtgtttcc

SEQ ID NO: 492842 - DNA, 75 bp, synthetic construct
  source 1..75: mol_type = other DNA
gcaacaggtagatgaactggcgcaccggatggcggcgcagcaaatttctattgcctcgacggtaccgattggcac

SEQ ID NO: 492843 - DNA, 75 bp, synthetic construct
  source 1..75: mol_type = other DNA
tgtcgcgattgcgttcttagtccgtggttattacatcatcatcacgctaaagggacaggtaaacgtggcgggatg

SEQ ID NO: 492844 - DNA, 75 bp, synthetic construct
  source 1..75: mol_type = other DNA
ttaccagccccggattatggaacctttaaaacatataaacaatcagtggctggtttaggtgccgcagcctcagaa

SEQ ID NO: 492845 - DNA, 75 bp, synthetic construct
  source 1..75: mol_type = other DNA
aaattgcctgatttacgtggtgagtttattcgtggctgggatgacgggcgggggattgatacaggtcgctctatt

SEQ ID NO: 492846 - DNA, 75 bp, synthetic construct
  source 1..75: mol_type = other DNA
caccatccaggatatgattaagctcgagcaaaaaatgctgccggagctgcaaccctacacccaggaacgggcgga

SEQ ID NO: 492847 - DNA, 75 bp, synthetic construct
  source 1..75: mol_type = other DNA
aaccgtacactcaggagcgggcggaaaaactgatcgatttattgcagtcgaaaggcaccaccattgcccgcagcc

SEQ ID NO: 492848 - DNA, 75 bp, synthetic construct
  source 1..75: mol_type = other DNA
aacgctcaacgaacaacaggtagatgaactggcgcaccggatggcggcgcagcaaatttctatcgcctcgacggt

SEQ ID NO: 492849 - DNA, 75 bp, synthetic construct
  source 1..75: mol_type = other DNA
ctggcaccgacagcgttatcgaccactggtcgccttacggcctgggcgacatgctggaaaaagccaatctgtacg

SEQ ID NO: 492850 - DNA, 75 bp, synthetic construct
  source 1..75: mol_type = other DNA
cggcgggccgtggcgctcgctcaatcgtccggcaggcaccaccatccaggacatgatcaaactcgagcagaaaat

SEQ ID NO: 492851 - DNA, 75 bp, synthetic construct
  source 1..75: mol_type = other DNA
cgcgaataacaccatgaaaatcactgacccgcattactatctcgataacgtgctgctggaaaccggttttgacta

SEQ ID NO: 492852 - DNA, 75 bp, synthetic construct
  source 1..75: mol_type = other DNA
ttctggtggcggctcaagtggcggcggatttaacggaggtggcggttcttctggcggtggcggcgcgtctggccg

SEQ ID NO: 492853 - DNA, 75 bp, synthetic construct
  source 1..75: mol_type = other DNA
tgacgcttcaaaagtagttccaactgctaatgaaaaccgtcctcgtaacattgcctttaattatatcgtgagggc

SEQ ID NO: 492854 - DNA, 75 bp, synthetic construct
  source 1..75: mol_type = other DNA
ccgttggtgtccctgttccctggccttctgtcacaccaccgacaggctggctgaaatgcaatggtgcgccttttt

SEQ ID NO: 492855 - DNA, 75 bp, synthetic construct
  source 1..75: mol_type = other DNA
atctgccctataccggaagttgtgctggcagcgccggaagatttggctgattctgcgcagcggttgggcgaggtg

SEQ ID NO: 492856 - DNA, 75 bp, synthetic construct
  source 1..75: mol_type = other DNA
aatacccggaactggcaaaggcttatccaacaaatagattgcctgatttacgcggagaatttatccgtggctggg

SEQ ID NO: 492857 - DNA, 75 bp, synthetic construct
  source 1..75: mol_type = other DNA
aatggtgcgcctttttctgcagaagaatacccggaactagcaaaggcttatccgacaaataaattgcctgattta

SEQ ID NO: 492858 - DNA, 75 bp, synthetic construct
  source 1..75: mol_type = other DNA
cggttggggtgcctgttccgtggccttcagccactccgccgacaggctggctgaaatgcaatggtgcggcttttt

SEQ ID NO: 492859 - DNA, 75 bp, synthetic construct
  source 1..75: mol_type = other DNA
ctgggatgatgggcgaggaattgatgcagcacgcgctttattgagcattcaaaccgggatgttggaaaaacaccg

SEQ ID NO: 492860 - DNA, 75 bp, synthetic construct
  source 1..75: mol_type = other DNA
gtgcctgttccatggccttcagccacaccgccaacaggctggctgaaatgcaacggtgcggctttttctgctgaa

SEQ ID NO: 492861 - DNA, 75 bp, synthetic construct
  source 1..75: mol_type = other DNA
ggctctcgaaaaccttggtttgggagaaggctcagcattacctgttggggtgcctgttccgtggccttcagccac

SEQ ID NO: 492862 - DNA, 75 bp, synthetic construct
  source 1..75: mol_type = other DNA
atggctgaaggtaaatattacgaagccaatctcgctctgaaaggcgctgaagatggcacgattatggatacggtc

SEQ ID NO: 492863 - DNA, 75 bp, synthetic construct
  source 1..75: mol_type = other DNA
attcaatatgggaaacagcaggctcgtttaagggggccatagtgccattgagtccctctacaaacaatagttatt

SEQ ID NO: 492864 - DNA, 75 bp, synthetic construct
  source 1..75: mol_type = other DNA
cccgacaaataaattgcctgatttacgtggtgagttcattcgtggctgggatgacggaagaggaattgatactaa

SEQ ID NO: 492865 - DNA, 75 bp, synthetic construct
  source 1..75: mol_type = other DNA
caaaagataagtggttctgttgcagataactctatgggggcatcagcatccggtagtggtgccatgacaattact

SEQ ID NO: 492866 - DNA, 75 bp, synthetic construct
  source 1..75: mol_type = other DNA
agttattcagtatgtaggcccgagtcacacaacaggggcgctttataatggaggggcgcaatggaagactgtaac

SEQ ID NO: 492867 - DNA, 75 bp, synthetic construct
  source 1..75: mol_type = other DNA
tgtatgcgaattttaatgcttcagccgttgtcccaaccgcaaatgagaaccgcccacgtaacattgcctttaatt

SEQ ID NO: 492868 - DNA, 75 bp, synthetic construct
  source 1..75: mol_type = other DNA
tgcggcagcaatcgcggcggctctcacaaaccttggtttaggagaaggctcagcattgcctgttggcgtacctgt

SEQ ID NO: 492869 - DNA, 75 bp, synthetic construct
  source 1..75: mol_type = other DNA
ttatggtctttacctgtttatgtgtacttcagaaaagagcatctggtagaagttatcattcagacaacagcggtt

SEQ ID NO: 492870 - DNA, 75 bp, synthetic construct
  source 1..75: mol_type = other DNA
atccgtagcaacatgatacccgcatttaaacaacaaaaattagctaagggattagagctagctataaacgctttg

SEQ ID NO: 492871 - DNA, 75 bp, synthetic construct
  source 1..75: mol_type = other DNA
caaagtgttttttttgatgcatccagatcggcacggacatcaaatgagacacgctctcgaaatatcgcattcaac

SEQ ID NO: 492872 - DNA, 75 bp, synthetic construct
  source 1..75: mol_type = other DNA
gctttgcccgcttttcaaaacccaggcggtactgaaacgcgtccccgtaacatcgcattcaactttttagtaagg

SEQ ID NO: 492873 - DNA, 75 bp, synthetic construct
  source 1..75: mol_type = other DNA
ctacaaacaatagttatttctccttaaccagaagtatggtgacagaaaggtccgagggcggtgtttacccaaaag

SEQ ID NO: 492874 - DNA, 75 bp, synthetic construct
  source 1..75: mol_type = other DNA
cattacctgttggtgtccctgttccgtggccttcagccactccgccaacaggctggctgaaatgcaacggtgcgg

SEQ ID NO: 492875 - DNA, 75 bp, synthetic construct
  source 1..75: mol_type = other DNA
ggattacaactggcgtgctaatggcacccctccctctttccatgagcagagatctttatcagagcgattgttaag

SEQ ID NO: 492876 - DNA, 75 bp, synthetic construct
  source 1..75: mol_type = other DNA
tcaacctgaccatgactaacatccgtaccgtgctgggttcaatggaacttgatgaaatgctctctcagcgcgaca

SEQ ID NO: 492877 - DNA, 75 bp, synthetic construct
  source 1..75: mol_type = other DNA
gcgttccggtgccgtggcctcttgccgtcccgccagcgggatggctcaagtgtaatggagctgctttcacggcct

SEQ ID NO: 492878 - DNA, 75 bp, synthetic construct
  source 1..75: mol_type = other DNA
aagtgactcaggatcacttctggctgacgttacggacgcttttctggtcgatactcgttgcttcaccgctgccgg

SEQ ID NO: 492879 - DNA, 75 bp, synthetic construct
  source 1..75: mol_type = other DNA
atgtgcaacattgctgaaaccagtctctgccgagcatcacgaaaataagggaggattcttcggctggtttaacac

SEQ ID NO: 492880 - DNA, 75 bp, synthetic construct
  source 1..75: mol_type = other DNA
catacccgccgtcggtgaacacctactggcgaagacggggaagccaatattacatcagcgataaaggccagaaat

SEQ ID NO: 492881 - DNA, 75 bp, synthetic construct
  source 1..75: mol_type = other DNA
gcgcgtaatgatggaggataaactcccccccagagaagcgacggaaaaatcgatgtcgcaaatccagggcgcgct

SEQ ID NO: 492882 - DNA, 75 bp, synthetic construct
  source 1..75: mol_type = other DNA
gggtgataacaccattgtcttcaccaacttcgttgacttcgattcttcctggggccaccgtcgcgacgtcgcagg

SEQ ID NO: 492883 - DNA, 75 bp, synthetic construct
  source 1..75: mol_type = other DNA
agcacatgaaaaccggcaagccgattttctatacctccgctgactcagtgttccagattgcctgccacgaagaaa

SEQ ID NO: 492884 - DNA, 75 bp, synthetic construct
  source 1..75: mol_type = other DNA
gagaaagcgaacgttgaaagtgtctttacggttaacggctttagcttcagcggccaggcacaaaacgccggtatg

SEQ ID NO: 492885 - DNA, 75 bp, synthetic construct
  source 1..75: mol_type = other DNA
actggtttaaatcgctgctgtcaccgatggagtccagcaaggaaacgctggataaatgtaccagtgctggcgaga

SEQ ID NO: 492886 - DNA, 75 bp, synthetic construct
  source 1..75: mol_type = other DNA
tggggaatggtgacgggttccgtttctttactgggaggcgctatcggggcgctgttcagtccggttggtcttatc

SEQ ID NO: 492887 - DNA, 75 bp, synthetic construct
  source 1..75: mol_type = other DNA
gcagcagttaagcacccggcttgaacgcctgaatgaatcgcgcacacgggaaattcagaaaatgcgggaacttgg

SEQ ID NO: 492888 - DNA, 75 bp, synthetic construct
  source 1..75: mol_type = other DNA
aactggcggaattacagccattcttcccgcagggaatgaaggttctctacccttatgacaccacgccattcgtcc

SEQ ID NO: 492889 - DNA, 75 bp, synthetic construct
  source 1..75: mol_type = other DNA
aacgttatcgctcgcatcaacggaaaaccggcggcgggcctggggattaagctggcaaccggcgcgaatgctctc

SEQ ID NO: 492890 - DNA, 75 bp, synthetic construct
  source 1..75: mol_type = other DNA
attggctcgttgtcgctggttattggggtgctttacggaaagctggccaccctgcgtcttggttttgacattctt

SEQ ID NO: 492891 - DNA, 75 bp, synthetic construct
  source 1..75: mol_type = other DNA
tggggctggcgaaagcacatgaaggttctaccggtttcattccggcaggaatggacggcaacgctgaagttatcg

SEQ ID NO: 492892 - DNA, 75 bp, synthetic construct
  source 1..75: mol_type = other DNA
ggacgagctgaaaagccagcttgctgactaccagcaggcgctggacgtccagcaaacgcgcgcgatccagtataa

SEQ ID NO: 492893 - DNA, 75 bp, synthetic construct
  source 1..75: mol_type = other DNA
gcgtgttcagcgttgatgagctggaaaaagcggtagtggtgaaaatcgccgatcgtcagtggcgttattcacgtt

SEQ ID NO: 492894 - DNA, 75 bp, synthetic construct
  source 1..75: mol_type = other DNA
gtttgatgaaattaatattgtgcgagctctacctgttcctggtggtcggttggggataaaaatcacagaactgga

SEQ ID NO: 492895 - DNA, 75 bp, synthetic construct
  source 1..75: mol_type = other DNA
cgcgttttgttcagcagttcggtaatcaacttgcaaaactggagccgatggtttcggtgttgcagagcgacccgg

SEQ ID NO: 492896 - DNA, 75 bp, synthetic construct
  source 1..75: mol_type = other DNA
gcgtcttaatccgcagattgatatggggcagcgcacgccgcagaccattggcgaagaactgctggattaccgcaa

SEQ ID NO: 492897 - DNA, 75 bp, synthetic construct
  source 1..75: mol_type = other DNA
ccattcagcgcgagcagaaccgtatccgtatgctcaaccaggggttgcagaacgtatcgtttggtcaggtgaaca

SEQ ID NO: 492898 - DNA, 75 bp, synthetic construct
  source 1..75: mol_type = other DNA
cgtgcggtaagtacgcgcatccgggcttttatcgatttccttagcggacatgtaaaaacagctcccggaggagct

SEQ ID NO: 492899 - DNA, 75 bp, synthetic construct
  source 1..75: mol_type = other DNA
caggatgaaacgcccggatttgccgatgacatgacctgggattttatcagcaacgtcaatagcataacccgcaat

SEQ ID NO: 492900 - DNA, 75 bp, synthetic construct
  source 1..75: mol_type = other DNA
ccgccaaaagaagcgacggaaaaatcaatgtcgcaaatacagggcgcactggtgggtatcgcgatggtgctgtca

SEQ ID NO: 492901 - DNA, 75 bp, synthetic construct
  source 1..75: mol_type = other DNA
acctggccgatagcctgtagcgatgggcaattacatgaggtgaagtacggtttgtcatccaatagcggggaaacg

SEQ ID NO: 492902 - DNA, 75 bp, synthetic construct
  source 1..75: mol_type = other DNA
taagccgggcggtgaaaaagctggagatgaaacttggcgttagcctgcttaatcggaccacgcggcaacttagcc

SEQ ID NO: 492903 - DNA, 75 bp, synthetic construct
  source 1..75: mol_type = other DNA
tatttaatagttatcgaaaaattatcgcctcccccgattatatttcccgctacgggaagccagaaacgatcgacg

SEQ ID NO: 492904 - DNA, 75 bp, synthetic construct
  source 1..75: mol_type = other DNA
ctgacgcggtagtcgatcttaacaatgaactgaaaacgcgtcgtgagaagctggcgaacctgcgcgagcagggga

SEQ ID NO: 492905 - DNA, 75 bp, synthetic construct
  source 1..75: mol_type = other DNA
aaacgtgacaatattaccaggtgcgtgtataggtaatggtgtagttattggcgcaaatagtgttgttcgtggtga

SEQ ID NO: 492906 - DNA, 75 bp, synthetic construct
  source 1..75: mol_type = other DNA
aacgcgaagacccgtacttcaaatccagttacgacaacgtggactacagccagatcccggcaggattcagggggt

SEQ ID NO: 492907 - DNA, 75 bp, synthetic construct
  source 1..75: mol_type = other DNA
attttctcaactgtcagattctgacccgtcaaaatctgacgcatcaaaatctgacccgtcaaaatttgatgcgtc

SEQ ID NO: 492908 - DNA, 75 bp, synthetic construct
  source 1..75: mol_type = other DNA
cacaggccattcaggctgcgcttcccggtgtgctgagcatggcaacggctggcggtatggatctcggcgagacgg

SEQ ID NO: 492909 - DNA, 75 bp, synthetic construct
  source 1..75: mol_type = other DNA
tttcttgcaatggctggcttcacaccacaggccattcaggctgcgctccctggcgtactgagcatggcaacggct

SEQ ID NO: 492910 - DNA, 75 bp, synthetic construct
  source 1..75: mol_type = other DNA
gcgaatatgggcatcagagggagtgatgccgggacggcaatgcgtgccagcctggctcgtctggcatcaccgcca

SEQ ID NO: 492911 - DNA, 75 bp, synthetic construct
  source 1..75: mol_type = other DNA
gtgaaggtgccggaatggggtaatgtcagcgtggtgctgcgggagccttcggcagaggcctggtatctgtggcag

SEQ ID NO: 492912 - DNA, 75 bp, synthetic construct
  source 1..75: mol_type = other DNA
cgctggccagactgtcagggtttcgtcataaaacggtgaaggtgccggaatggagaaatgtcagcgtggtgctgc

SEQ ID NO: 492913 - DNA, 75 bp, synthetic construct
  source 1..75: mol_type = other DNA
gatgttctgtgtgataccggactgcaacctgtattttcagaggatgatcgtgaacaggtgattgccgtgtatggt

SEQ ID NO: 492914 - DNA, 75 bp, synthetic construct
  source 1..75: mol_type = other DNA
agcagtttgatgaaatcaatattgtacgtggtcagcttgttcttggtggtcggctgggtgtgaagatttacaaaa

SEQ ID NO: 492915 - DNA, 75 bp, synthetic construct
  source 1..75: mol_type = other DNA
cgcaaccggacccgcagacggctgaacagaattttttaacccgacaccctgacgcggttgtgttcagtgcgaaaa

SEQ ID NO: 492916 - DNA, 75 bp, synthetic construct
  source 1..75: mol_type = other DNA
aagagcacaaaaaatcgcctaaaggaatgcttaaggccactattctgggtgaagtaaatggagaaaaatgcgaac

SEQ ID NO: 492917 - DNA, 75 bp, synthetic construct
  source 1..75: mol_type = other DNA
ttttctttattgggataatgaggcttcgctacccagaggcatcttttgatttaattttatattatttatataatt

SEQ ID NO: 492918 - DNA, 75 bp, synthetic construct
  source 1..75: mol_type = other DNA
ggctcgctctctctgaccggtaaaggccaccacacagatatcgccattattatgggcctggcgggtaacctgccg

SEQ ID NO: 492919 - DNA, 75 bp, synthetic construct
  source 1..75: mol_type = other DNA
gcgcaagcccggcgcaggtttgcatcgcagcggaaatcgcgatggagcacaacctcggtctgacttgtgacccgg

SEQ ID NO: 492920 - DNA, 75 bp, synthetic construct
  source 1..75: mol_type = other DNA
ccgggctgtcactctctggtctgatgatgaaaaacgagctggcgctgcacagcaaagaagaactggaacagcacc

SEQ ID NO: 492921 - DNA, 75 bp, synthetic construct
  source 1..75: mol_type = other DNA
aacctcggcctgacgtgtgacccagtcgccggacaagtacaggtgccgtgcatcgagcgtaacgccattgcggca

SEQ ID NO: 492922 - DNA, 75 bp, synthetic construct
  source 1..75: mol_type = other DNA
ttgcaggccaggttcaggtgccgtgtatcgagcgtaacgcgattgcttctgtcaaagcggtcaacgctgcccgta

SEQ ID NO: 492923 - DNA, 75 bp, synthetic construct
  source 1..75: mol_type = other DNA
gcgcaagcccggcacaggtatgcatcgcggcagaaatcgcaatggagcataacctcggcctgacgtgtgacccgg

SEQ ID NO: 492924 - DNA, 75 bp, synthetic construct
  source 1..75: mol_type = other DNA
ctggcgaaagtggcggaagaaacctgccgtgaacactttggcgaggccgatctggtgtatgtcattggaactgaa

SEQ ID NO: 492925 - DNA, 75 bp, synthetic construct
  source 1..75: mol_type = other DNA
ggcatctgctcgcccgtttattacccatcataacgctctggatttagatatgtacctgcgtatcgcgccggagct

SEQ ID NO: 492926 - DNA, 75 bp, synthetic construct
  source 1..75: mol_type = other DNA
cattcctataattattatactaagtgcaaaaaccttagttctattgtatttaataacgatactaattttaactcc

SEQ ID NO: 492927 - DNA, 75 bp, synthetic construct
  source 1..75: mol_type = other DNA
gcgcaagcccggcgcaggtgtgcatcgcggcggaaatcgccatggagcacaacctcggtctgacgtgtgacccgg

SEQ ID NO: 492928 - DNA, 75 bp, synthetic construct
  source 1..75: mol_type = other DNA
tgtttgtcagctcgccgactcattgaatttcccacaagacgcgttgattctgggtggtgatcatctggggccaaa

SEQ ID NO: 492929 - DNA, 75 bp, synthetic construct
  source 1..75: mol_type = other DNA
tcagccagtatctgccgctgcaatacgtcaaagttcgctccggcgagctacaaccaacgccgagggcgctcatta

SEQ ID NO: 492930 - DNA, 75 bp, synthetic construct
  source 1..75: mol_type = other DNA
accgcaggcgtggctggacgcatacaaacccgcttacgacgcgctccagggacaggtgaaactgctgctgaccac

SEQ ID NO: 492931 - DNA, 75 bp, synthetic construct
  source 1..75: mol_type = other DNA
ttgatgcagaagtgaaaagctggtttgccttcgctctacaaaaatgccatgaactggcactgctgcgcgatgcgc

SEQ ID NO: 492932 - DNA, 75 bp, synthetic construct
  source 1..75: mol_type = other DNA
ggcaaaacggtggcgttggcggcacgcgaactgtggaccggtatgacgccgccgctgctgtcatcgtttgagatt

SEQ ID NO: 492933 - DNA, 75 bp, synthetic construct
  source 1..75: mol_type = other DNA
aatctcgacgccaacaactaccgcacgggcattgcggaacatatcaagcaggccattgttgagcaggaacgtttg

SEQ ID NO: 492934 - DNA, 75 bp, synthetic construct
  source 1..75: mol_type = other DNA
gaacagtttgaccgcctgagcctgctgaacgacattctgccggtttatcagcaagtgctggcagaactggcgaaa

SEQ ID NO: 492935 - DNA, 75 bp, synthetic construct
  source 1..75: mol_type = other DNA
ggcaggtgaaactgctgctgaccacctattttgaaggcgtaacgccaaacctcgacacgattactgcgctgcctg

SEQ ID NO: 492936 - DNA, 75 bp, synthetic construct
  source 1..75: mol_type = other DNA
ttactgcgcgtggatgcaggcagttggtacggcaaagcgtttaaaggcgagccgctgccgttgctttcgcaagta

SEQ ID NO: 492937 - DNA, 75 bp, synthetic construct
  source 1..75: mol_type = other DNA
gcagagttgctgcgctggggcgtggattgcatctgtaccgatgcgattgacgtgattggtccgaactttacggcc

SEQ ID NO: 492938 - DNA, 75 bp, synthetic construct
  source 1..75: mol_type = other DNA
tgaaatatatcgcccgcaccactcatgaacatgcgaaagcaggcaacatcaacaatgcgctgaaatatgccaaag

SEQ ID NO: 492939 - DNA, 75 bp, synthetic construct
  source 1..75: mol_type = other DNA
gctgcgtctctattcatctcaatcataagttgctcgataaagcgcgagtgatgcagttgaaagacgccggattac

SEQ ID NO: 492940 - DNA, 75 bp, synthetic construct
  source 1..75: mol_type = other DNA
gttgctttcgcaggtggcggaacgctgtcgcgaacacgggatgatggcgaatatcgaaatcaaacccaccactgg

SEQ ID NO: 492941 - DNA, 75 bp, synthetic construct
  source 1..75: mol_type = other DNA
gccgctgctgtcatcgtttgagattgatgctttagaagccgcacaattggcggcaccggaactgccgcgtggttt

SEQ ID NO: 492942 - DNA, 75 bp, synthetic construct
  source 1..75: mol_type = other DNA
aagtggccgatctggaagccgctggaattggcatcatccagattgacgaaccggcgctgcgcgaaggtttaccgc

SEQ ID NO: 492943 - DNA, 75 bp, synthetic construct
  source 1..75: mol_type = other DNA
acccgtcgtattatgggtaaagcttccttcgttactttgcaggacgttggcggtcgcattcagttgtacgttgct

SEQ ID NO: 492944 - DNA, 75 bp, synthetic construct
  source 1..75: mol_type = other DNA
ctttcgttaccctgcaggatgtggggggccgcattcagctgtacgttgcccgtgacgatctgccggaaggcgttt

SEQ ID NO: 492945 - DNA, 75 bp, synthetic construct
  source 1..75: mol_type = other DNA
agtcgccgttgctgggcgcatgatgacccgccgtattatgggtaaagcgtctttcgttaccctgcaggatgtggg

SEQ ID NO: 492946 - DNA, 75 bp, synthetic construct
  source 1..75: mol_type = other DNA
cacatctgattcagcctacctttattactgaatatccggcagaagtttctccgctggcccgccgtaatgaggtta

SEQ ID NO: 492947 - DNA, 75 bp, synthetic construct
  source 1..75: mol_type = other DNA
cacatctgattcagcctaccttaattactgaatatccggcagaagtgtctccgctggcccgccgtaatgaggtta

SEQ ID NO: 492948 - DNA, 75 bp, synthetic construct
  source 1..75: mol_type = other DNA
cgatgatgcaggtgattccaggcggtgcggcagcacgtccgtttattacccaccataacgcgctggatctcgaca

SEQ ID NO: 492949 - DNA, 75 bp, synthetic construct
  source 1..75: mol_type = other DNA
tggcttaccgccgacagcaggtctggggattggtatcgaccgtatggtaatgctgttcaccaacagccataccat

SEQ ID NO: 492950 - DNA, 75 bp, synthetic construct
  source 1..75: mol_type = other DNA
ctgcacagccctatcgacctgagtgtggaaacgcgtcttgatgcggaagtgaaaagctggtttgccttcgccctg

SEQ ID NO: 492951 - DNA, 75 bp, synthetic construct
  source 1..75: mol_type = other DNA
gcgggttctggcagaactggcaaaacgcggtattgagtgggtacagatcgacgaaccggcgctggtgctggaact

SEQ ID NO: 492952 - DNA, 75 bp, synthetic construct
  source 1..75: mol_type = other DNA
tgcggcagcgcgtccgtttattacccatcacaatgcgttggatctcgacatgtacctgcgtattgcgccggaact

SEQ ID NO: 492953 - DNA, 75 bp, synthetic construct
  source 1..75: mol_type = other DNA
accgtaacttccgtaacgaaggtatttccgtacgtcataacccagagttcactatgatggaactctatatggctt

SEQ ID NO: 492954 - DNA, 75 bp, synthetic construct
  source 1..75: mol_type = other DNA
aagagctggaggagttgaacatcgaagtggctgttgctggtcgcatgatgactcgtcgaatcatgggtaaagcct

SEQ ID NO: 492955 - DNA, 75 bp, synthetic construct
  source 1..75: mol_type = other DNA
gattgtgctggtgctcggctacttccaggtcgtatggccgctgaatcgtcagccggtgccattgccgaaagatat

SEQ ID NO: 492956 - DNA, 75 bp, synthetic construct
  source 1..75: mol_type = other DNA
tatgcatgcttgacagggacggttttatttatggtcaaaatttaagactctgtacagaagccagatatatttgtc

SEQ ID NO: 492957 - DNA, 75 bp, synthetic construct
  source 1..75: mol_type = other DNA
gttgttgcgttaccacgatccggcaaactggccgttaatccgccaggcgctggaagcgatgggtaaaaagcatct

SEQ ID NO: 492958 - DNA, 75 bp, synthetic construct
  source 1..75: mol_type = other DNA
gctggcgaagattggttataagagtgaagacgtcttcgtaccgaagggcgacaaacagcgtcgtttgcataaagc

SEQ ID NO: 492959 - DNA, 75 bp, synthetic construct
  source 1..75: mol_type = other DNA
atcgtggctgcgcttgccggagctgccgttcttatctggaaatactgggatcccatcagggcattttttgccggg

SEQ ID NO: 492960 - DNA, 75 bp, synthetic construct
  source 1..75: mol_type = other DNA
gtgcggccattcttcaggacaaggttgccttgcttcagggggacctggcgaaaatcaatccgccgaagcctgtgg

SEQ ID NO: 492961 - DNA, 75 bp, synthetic construct
  source 1..75: mol_type = other DNA
aaaaatctcgacagcgcatgggaaggtcttcgtattcgcatcagtgatctggttgacggtccgctgcgttttgtc

SEQ ID NO: 492962 - DNA, 75 bp, synthetic construct
  source 1..75: mol_type = other DNA
ctgctgcgtgaaggggtcgatcagcgtcacctggctgagcaggttcagccgctgcagatgcgtttaagcgagctg

SEQ ID NO: 492963 - DNA, 75 bp, synthetic construct
  source 1..75: mol_type = other DNA
gtttcggtattgcagagcgacccggaacagttcgaacagttaaaagaagattacgcgtactctcagcagatgcag

SEQ ID NO: 492964 - DNA, 75 bp, synthetic construct
  source 1..75: mol_type = other DNA
aacgtgaattgcaggatatcggcgtgcgtgctgatagcggggcagaagagcgggcacgtattcgccgtgacgagt

SEQ ID NO: 492965 - DNA, 75 bp, synthetic construct
  source 1..75: mol_type = other DNA
actggcgacgcgtatgtcgatcacccaagcttcgggatggcgatttgcggtcgtatgctggaagcgcagggcttt

SEQ ID NO: 492966 - DNA, 75 bp, synthetic construct
  source 1..75: mol_type = other DNA
gcgctggcggagcgttttggcggcgtgctgctgtccgaaatttatgacgacgttagcctggaagatgcgccgtac

SEQ ID NO: 492967 - DNA, 75 bp, synthetic construct
  source 1..75: mol_type = other DNA
gaacagaaccgtatccgtatgcttaaccagggcttgcagaacgtgtcattcggccaggtgaacagcgtacgtctg

SEQ ID NO: 492968 - DNA, 75 bp, synthetic construct
  source 1..75: mol_type = other DNA
gccgcaaaacttggtatcagtcttgaagaagcggcggccatggccgggatgcttgccaataatggtcttcgcgga

SEQ ID NO: 492969 - DNA, 75 bp, synthetic construct
  source 1..75: mol_type = other DNA
ctcttgcaccgttcaggacttttctgacggtggactgggggtcaagatcaacggtcaggcgcagattctggaagg

SEQ ID NO: 492970 - DNA, 75 bp, synthetic construct
  source 1..75: mol_type = other DNA
gcggtcggtatctggcgttacttctacggcccgccaaccgagatgctcactgtcatcgtcagtatggtgtgggtg

SEQ ID NO: 492971 - DNA, 75 bp, synthetic construct
  source 1..75: mol_type = other DNA
tgccagcctgaccaactccaagatccagggcaaatatcgccactctttctggagtgaaatctacgaaacggtgct

SEQ ID NO: 492972 - DNA, 75 bp, synthetic construct
  source 1..75: mol_type = other DNA
cgtaaaacgccgaacgaaggcacgctgttttatggtctggtgcaggacggcaatgatatgtgggatgccactttc

SEQ ID NO: 492973 - DNA, 75 bp, synthetic construct
  source 1..75: mol_type = other DNA
tctcgcctgggtatttattccgctggaacatccgcgctggcagcgtattcgagcagaacataaaaacctttatcc

SEQ ID NO: 492974 - DNA, 75 bp, synthetic construct
  source 1..75: mol_type = other DNA
ttattctgctcttcgctgaaacgtacgcgtggattgtgctggtgctcggctatttccaggtcgtatggcctctga

SEQ ID NO: 492975 - DNA, 75 bp, synthetic construct
  source 1..75: mol_type = other DNA
ttgttctgacgcctgcaaaaatgttgctggatacgctggcgtggatacttgaaaaactcggtgtgcttccggatg

SEQ ID NO: 492976 - DNA, 75 bp, synthetic construct
  source 1..75: mol_type = other DNA
ggatcagccaggtgtttaactggtttaaatcgctgctgtcaccgatggagtccagcaaggaaacgctggataaat

SEQ ID NO: 492977 - DNA, 75 bp, synthetic construct
  source 1..75: mol_type = other DNA
actgaaaacaggtggtgcgctggcaattggtgcggcagcggcgggcggctatgctgccgggcgttttttgcagcc

SEQ ID NO: 492978 - DNA, 75 bp, synthetic construct
  source 1..75: mol_type = other DNA
cgtcgtcgtcagtatggtgtgggtgttctacaacctgattattctcggcggcgcggtagcggtatcggttgaaag

SEQ ID NO: 492979 - DNA, 75 bp, synthetic construct
  source 1..75: mol_type = other DNA
taacgtcaccgccaaaggtggcctggtggaggaagagtatgtcgattgggtgatctcgcgaccgtacatcttcct

SEQ ID NO: 492980 - DNA, 75 bp, synthetic construct
  source 1..75: mol_type = other DNA
gctggatacgctggcgtggatacttgaaaaactcggtgtgcttccggatgaagcggaaagggcgcgcaagaaaat

SEQ ID NO: 492981 - DNA, 75 bp, synthetic construct
  source 1..75: mol_type = other DNA
tgatcgatgttttccgggaggctcagcaaacgggcgatgtcccgccaggctttaaccctgcagaatcggcaaaaa

SEQ ID NO: 492982 - DNA, 75 bp, synthetic construct
  source 1..75: mol_type = other DNA
ccatattgtttccgctgacaagggatatgacggtattgtccggacactgcaggcgcgcgggattcgctgccgtcg

SEQ ID NO: 492983 - DNA, 75 bp, synthetic construct
  source 1..75: mol_type = other DNA
atgaactgattcgtcggagggtgataaaagttaaagaaagcaaaattacctggtcatctttgagtaatcggaagt

SEQ ID NO: 492984 - DNA, 75 bp, synthetic construct
  source 1..75: mol_type = other DNA
gatcagcaattcctagctgaaaaacttggagttagcagaagcacaattattcggtggctcaattacttagaatca

SEQ ID NO: 492985 - DNA, 75 bp, synthetic construct
  source 1..75: mol_type = other DNA
tgaaacaactttcagatgaggcaaagaaaaacaccgaggatctcgaagaagcaaagaaaaattcaaggtttacac

SEQ ID NO: 492986 - DNA, 75 bp, synthetic construct
  source 1..75: mol_type = other DNA
ctgcatccgtcgtgatgtaccggaaagtattgctgctgccggtgagtctggtgcagacaaaagtaactgcctgaa

SEQ ID NO: 492987 - DNA, 75 bp, synthetic construct
  source 1..75: mol_type = other DNA
aatattgatatatcaaatgtatgggcgagagactatcttgatcttgcacaaaataaaggtgttttccagcccgga

SEQ ID NO: 492988 - DNA, 75 bp, synthetic construct
  source 1..75: mol_type = other DNA
aaaatcgaagccgtcttggagcgggaacttcatcaccggaatatcgtgaagcctgagcagtcatactcagccaag

SEQ ID NO: 492989 - DNA, 75 bp, synthetic construct
  source 1..75: mol_type = other DNA
gccatacgaaggggaagccattgagattcgcggacaaaagcaatgggccctggtaaaagatggtctcgaacaaat

SEQ ID NO: 492990 - DNA, 75 bp, synthetic construct
  source 1..75: mol_type = other DNA
tgattatgagaactgcagtaatctgaaaaatatctcacttaaagaatatacagaattaatcatctttgccggccc

SEQ ID NO: 492991 - DNA, 75 bp, synthetic construct
  source 1..75: mol_type = other DNA
ttgggccatagcagtaaagtaatgactgatcactacaacgacacgcgtggcaaagaatggaaaaaactggtcatt

SEQ ID NO: 492992 - DNA, 75 bp, synthetic construct
  source 1..75: mol_type = other DNA
tgaccgtttccctgaaaacgtggacggggaaggggatgccttcaccctggcatcaaagcgtaccaccacctttat

SEQ ID NO: 492993 - DNA, 75 bp, synthetic construct
  source 1..75: mol_type = other DNA
aatccagctgaagctacaaaaaaaccgcaggtccgtgtctccagacaacgcctgacgttcgaagaatggctaatg

SEQ ID NO: 492994 - DNA, 75 bp, synthetic construct
  source 1..75: mol_type = other DNA
aggagcgcggcagtgacggaaaatggcgaaaaccgggcaggggcgctaacgaagcgtttgacctgctggtctacg

SEQ ID NO: 492995 - DNA, 75 bp, synthetic construct
  source 1..75: mol_type = other DNA
caacgtccacgataaaatgtttcttgacggctctttcctgaagattggctggccgtcaatcactgttttctcttc

SEQ ID NO: 492996 - DNA, 75 bp, synthetic construct
  source 1..75: mol_type = other DNA
ctcggattaccgtcgtgtggcgctgacggattatgaccgtttccctgaaaacgtggacggggaaggggatgcctt

SEQ ID NO: 492997 - DNA, 75 bp, synthetic construct
  source 1..75: mol_type = other DNA
aaaagcggtttttatctgaccggtaaagccggtgcctctgtgatgtcactttcagaccagcgtttcctgtcagga

SEQ ID NO: 492998 - DNA, 75 bp, synthetic construct
  source 1..75: mol_type = other DNA
aacaagctgttcaacctgttatagaaaaacataaaaaaccgtcggtgaagatactgttaagcatttttatgatgt

SEQ ID NO: 492999 - DNA, 75 bp, synthetic construct
  source 1..75: mol_type = other DNA
gccatgaaaaaatttgcggcagatgttgaaagtgcaacagatggtgaaattaagattactgtttatggtaatgct

SEQ ID NO: 493000 - DNA, 75 bp, synthetic construct
  source 1..75: mol_type = other DNA
tatgatttttatcaacattacaatgttcctgtgcgcacggaagtggaattctatggccgcggagctgcggactcc

SEQ ID NO: 493001 - DNA, 75 bp, synthetic construct
  source 1..75: mol_type = other DNA
tatgatttttatcaacattacaatgttccagtacgcacggaagtggaattctatggccgtggagctgcagactcc

SEQ ID NO: 493002 - DNA, 75 bp, synthetic construct
  source 1..75: mol_type = other DNA
tacatggtactctccgatggtcggtggtggtcgggaagacacacagaacaggctcagtgtgaatactctgatggt

SEQ ID NO: 493003 - DNA, 75 bp, synthetic construct
  source 1..75: mol_type = other DNA
ggcggagctggcgatccgcgcgggcattccggctggcgtgtttaacgtggtcaccggttcggcgggcgcggtggg

SEQ ID NO: 493004 - DNA, 75 bp, synthetic construct
  source 1..75: mol_type = other DNA
acagccaacgtcagcttgaggcggagcgggcgctggaaagtaccgaattactggcagaaaacagtgccgatttgc

SEQ ID NO: 493005 - DNA, 75 bp, synthetic construct
  source 1..75: mol_type = other DNA
agctggcggaaaaagagagccagcagctggatgcgtatttgcaggccttacgtaatcagttgaacagccaacgtc

SEQ ID NO: 493006 - DNA, 75 bp, synthetic construct
  source 1..75: mol_type = other DNA
cttaccggcaataccccgctcaatcaggcacaaaatttcgcgttgcagtctgactccgcacgtctgaaagcgctc

SEQ ID NO: 493007 - DNA, 75 bp, synthetic construct
  source 1..75: mol_type = other DNA
gacggctcattcctgaaaattggctggccgtcgatcaccgtattttcctcctcggattaccgtcgtgtggcgctg

SEQ ID NO: 493008 - DNA, 75 bp, synthetic construct
  source 1..75: mol_type = other DNA
atcgcgcgtaaattgctgcttgagctggtgaatatgggactgccactggcgacggaagcgttagatccgaatagc

SEQ ID NO: 493009 - DNA, 75 bp, synthetic construct
  source 1..75: mol_type = other DNA
cgcgatcctcgtctgttggtagtttgtgggccttgctccattcatgatcctgaaaccgctctggaatatgctcgt

SEQ ID NO: 493010 - DNA, 75 bp, synthetic construct
  source 1..75: mol_type = other DNA
ttcccgcccttccagatgcgtctggaaagtctgaacggcaagcaaacgggaagaacgctgacttctgcaggtaaa

SEQ ID NO: 493011 - DNA, 75 bp, synthetic construct
  source 1..75: mol_type = other DNA
catcactacgcaactggtgcgcaacctgcctgccctgctggaactggcgattttgcagcatctggatttaacacc

SEQ ID NO: 493012 - DNA, 75 bp, synthetic construct
  source 1..75: mol_type = other DNA
attcattccgctttcggcttcctcgaaaatatttcgctgtgggatgtcacttcaacagtacggggcgtggaaagc

SEQ ID NO: 493013 - DNA, 75 bp, synthetic construct
  source 1..75: mol_type = other DNA
ccggaagtcttcctggtggatctgcaacaggggattcagattttcgagctgcgtatttacgccgcagaaatgggt

SEQ ID NO: 493014 - DNA, 75 bp, synthetic construct
  source 1..75: mol_type = other DNA
ttctggtcggttgcagtatttactcgcgccgctatttcacccgttttcttgaacgttcggcggcgaaagtcggca

SEQ ID NO: 493015 - DNA, 75 bp, synthetic construct
  source 1..75: mol_type = other DNA
aaagcctcaacggtaaacaaacggggagaacgctgacgtctggcagcgggcaaaggtcgtcaggcgggaagtttg

SEQ ID NO: 493016 - DNA, 75 bp, synthetic construct
  source 1..75: mol_type = other DNA
gtggatacgggaggggaagccggggtgacagataatgcctatcgtttctggcgtcgttgccggagtgacggactg

SEQ ID NO: 493017 - DNA, 75 bp, synthetic construct
  source 1..75: mol_type = other DNA
ccccagaaacctggaaaatgcgttttctggccaacgggacatccggcacatggttttacactgacgacattgcag

SEQ ID NO: 493018 - DNA, 75 bp, synthetic construct
  source 1..75: mol_type = other DNA
gcctggcatcgcgtgaatacgatgcggtgatttttgttggtcctgcgcgaacagggaagaccattggtctgatcg

SEQ ID NO: 493019 - DNA, 75 bp, synthetic construct
  source 1..75: mol_type = other DNA
gtaaccattgggccactgatcgatgaaaaagcggtagcaaaagtggaagagcatatcgccgatgcgctggagaaa

SEQ ID NO: 493020 - DNA, 75 bp, synthetic construct
  source 1..75: mol_type = other DNA
gctacgccgcctcctttattgagtggtttgccgaagaaggcaaacgcatttatggcgacaccattcctggtcatc

SEQ ID NO: 493021 - DNA, 75 bp, synthetic construct
  source 1..75: mol_type = other DNA
taacgaactgaccagcaacccgctggtgcgcaaactgtcgtttaccggttcgaccgaaattggccgccagttaat

SEQ ID NO: 493022 - DNA, 75 bp, synthetic construct
  source 1..75: mol_type = other DNA
atggaccttcacacccgcccgaaacacgccgccctgaacggttttaccgcccgggcggatgatccggtctgggag

SEQ ID NO: 493023 - DNA, 75 bp, synthetic construct
  source 1..75: mol_type = other DNA
cctttccactgcgttccgcagtccatcccggcacacactgcaactccgtctgcttccttccaacaaccacaacag

SEQ ID NO: 493024 - DNA, 75 bp, synthetic construct
  source 1..75: mol_type = other DNA
cagcacgaaccgattcaggttatatccttcgcgcaccgagacgaatgcaggttgctgatgccgttgctcaatata

SEQ ID NO: 493025 - DNA, 75 bp, synthetic construct
  source 1..75: mol_type = other DNA
caacgttacctaaaaaaaagcgattgagtgaagtcaagttgactatcctgaagagattatggggctcggatgata

SEQ ID NO: 493026 - DNA, 75 bp, synthetic construct
  source 1..75: mol_type = other DNA
cagaatatacatcccttaaagctgaattagattcagaaatgaaaaacaacataaaaattataacacgactatctg

SEQ ID NO: 493027 - DNA, 75 bp, synthetic construct
  source 1..75: mol_type = other DNA
cgttacagtcaggcgaccgctggtcggtggtgacggttgaggatggcacgctgacagactgggtgatgcaggaca

SEQ ID NO: 493028 - DNA, 75 bp, synthetic construct
  source 1..75: mol_type = other DNA
gctggcctccgcaatatttcgtaaaggttaccagtggccgtttcacgcggaacgaatgctggaatatggctccag

SEQ ID NO: 493029 - DNA, 75 bp, synthetic construct
  source 1..75: mol_type = other DNA
ccggcgcaattgccagcgtgccaggaaaaatggaactggcaaataacggctccttattgctcgatgaaattggtg

SEQ ID NO: 493030 - DNA, 75 bp, synthetic construct
  source 1..75: mol_type = other DNA
aatgacgttgccgaccgcagcgaactgcaatggcctgctcagcccaccgcccacattgccgaaaccagcgattta

SEQ ID NO: 493031 - DNA, 75 bp, synthetic construct
  source 1..75: mol_type = other DNA
ctttctttaaggatgcatcaccatcgttctgaacattggatcgtgctttctggtacagcaaaagtaacccttggc

SEQ ID NO: 493032 - DNA, 75 bp, synthetic construct
  source 1..75: mol_type = other DNA
ggcgcgatgttttcctcgattttctgcaggaaccagcccccgcagcggacggaacgccattcaacctgcaggaac

SEQ ID NO: 493033 - DNA, 75 bp, synthetic construct
  source 1..75: mol_type = other DNA
tgaaatatctgggtctggacctgccagaagatctctttggcgcaacgttgcgttatcaaaccgatcacgatgagt

SEQ ID NO: 493034 - DNA, 75 bp, synthetic construct
  source 1..75: mol_type = other DNA
actgggatacctcattcgcgtgtctgagtggtgggagttcggcggagaaccgggaacatttaccgttgaagtcgg

SEQ ID NO: 493035 - DNA, 75 bp, synthetic construct
  source 1..75: mol_type = other DNA
ggctgattgccgatgcaaagccagccagccgccatcttattggcctgaatattatccaggacataccgggttatc

SEQ ID NO: 493036 - DNA, 75 bp, synthetic construct
  source 1..75: mol_type = other DNA
aactggacatcggctgcgagcatcgccttgaacaatgcatgaccgcactgcaagagacgctgacgccggagacgc

SEQ ID NO: 493037 - DNA, 75 bp, synthetic construct
  source 1..75: mol_type = other DNA
ctggcccggcaacgtgcgccagctggagaacgccattcagcggggaatgattttaaaccgcgacggcgtaattta

SEQ ID NO: 493038 - DNA, 75 bp, synthetic construct
  source 1..75: mol_type = other DNA
ccgcagcaaaatcgccgacctgttaggcattaccccgcgcgcactgcgctatcgactggcctccatgcgcaagca

SEQ ID NO: 493039 - DNA, 75 bp, synthetic construct
  source 1..75: mol_type = other DNA
atgagtaattcactgttaccaccatcagccagcaatttcatgcgttgcgccgaagctgtcggagcgcgcattaca

SEQ ID NO: 493040 - DNA, 75 bp, synthetic construct
  source 1..75: mol_type = other DNA
ggctggtaaattaggtatggcagactttggattattaggaggggttaatcattatgttcttattgtttctgtaga

SEQ ID NO: 493041 - DNA, 75 bp, synthetic construct
  source 1..75: mol_type = other DNA
aagctcgaaaatacgctgaattgtccggttgagttttcccgcgacgttaacctgcaactctcctgggacgtagta

SEQ ID NO: 493042 - DNA, 75 bp, synthetic construct
  source 1..75: mol_type = other DNA
accgtgcgcgatatcactctgaccagtacctgtgaacaccattttgttaccatcgatggcaaagcgacggtggct

SEQ ID NO: 493043 - DNA, 75 bp, synthetic construct
  source 1..75: mol_type = other DNA
ggcaggtgaaactgctgctgactacctattttgaaggcgtaacaccaaatctcgacacgattactgcgctgcctg

SEQ ID NO: 493044 - DNA, 75 bp, synthetic construct
  source 1..75: mol_type = other DNA
aaagatgatgagacaccgttatccgttgcggagcgcgcccgccgaaatctggaggcggacgttgaactgttcatt

SEQ ID NO: 493045 - DNA, 75 bp, synthetic construct
  source 1..75: mol_type = other DNA
acagtatcccgtttattggctttacgtgatgcttctccagaaattaaagagatcataaagacagggcgcacagaa

SEQ ID NO: 493046 - DNA, 75 bp, synthetic construct
  source 1..75: mol_type = other DNA
tggggaaatgtcagcgtggtgttgcgggagccttcggcagaggcctggtatctgtggcaggaagtgctcaatggt

SEQ ID NO: 493047 - DNA, 75 bp, synthetic construct
  source 1..75: mol_type = other DNA
tacctgtccctgtgtaaaccagacagaaaagtcacttgtgtgaataaaaccggctggcatggcggcgtgtatgtc

SEQ ID NO: 493048 - DNA, 75 bp, synthetic construct
  source 1..75: mol_type = other DNA
cagccttctggctgaagggtggatcgtggcggctgttgcggccaccaatttgctgaaagtgacggagcaagtacg

SEQ ID NO: 493049 - DNA, 75 bp, synthetic construct
  source 1..75: mol_type = other DNA
taatgaaattggcgtttcaggcggctcgctggcggcattgacttcccccttaacctcaacaactcccgtcgcaga

SEQ ID NO: 493050 - DNA, 75 bp, synthetic construct
  source 1..75: mol_type = other DNA
tggtcgtaacgtctggcgcgccgatcttaccgagaaatatgcgcaaattaaggacattgtcggcaaacgcgattt

SEQ ID NO: 493051 - DNA, 75 bp, synthetic construct
  source 1..75: mol_type = other DNA
gacgagcgcaaccgccccggcaatatggtgggctggcgaagggtggagaaaggcagtaccgcgcagggcacggaa

SEQ ID NO: 493052 - DNA, 75 bp, synthetic construct
  source 1..75: mol_type = other DNA
acgggcggacacaaaacagcatacgcctgccagaaataggggttaagcgagtgtatcagttcaatacgcaggtac

SEQ ID NO: 493053 - DNA, 75 bp, synthetic construct
  source 1..75: mol_type = other DNA
ggctttgagcaggggatgaccgaagggatcgaccagggatttcttgaaggtcatcaaaaagggtttgaagatggg

SEQ ID NO: 493054 - DNA, 75 bp, synthetic construct
  source 1..75: mol_type = other DNA
cgggtgatgtgattgttcaagccctacttaacaacatgtcaccgtctcaaaaacagatggcactggatttactga

SEQ ID NO: 493055 - DNA, 75 bp, synthetic construct
  source 1..75: mol_type = other DNA
gtcatccggtaaagataccccgtctggtcactgggaaatcgccggtgtcccggttctatttgagtggggatattt

SEQ ID NO: 493056 - DNA, 75 bp, synthetic construct
  source 1..75: mol_type = other DNA
tgattgatgttttccgggaggcccagcaaatgggcgatgtctcgccaggctttaaccctgcagaatcggcaaaaa

SEQ ID NO: 493057 - DNA, 75 bp, synthetic construct
  source 1..75: mol_type = other DNA
ataaaatagctaaatcccgcgatcttgatgctcgttttcaagaggtttatgccttcttacataacgaactggata

SEQ ID NO: 493058 - DNA, 75 bp, synthetic construct
  source 1..75: mol_type = other DNA
attgctgtggttcggtggccattattgaaaaaaccgtatggaaaacggaccattttgctgatgtatattaccgct

SEQ ID NO: 493059 - DNA, 75 bp, synthetic construct
  source 1..75: mol_type = other DNA
tcaagaggtttatgccttcttacataacgaactggatactgctgacgtagaggaaatagcagatcacgtcatgtg

SEQ ID NO: 493060 - DNA, 75 bp, synthetic construct
  source 1..75: mol_type = other DNA
aattttcggatatccgggatggttatcttcatgtcgaacagcaaaaacaggaacccggattgccatccctctggc

SEQ ID NO: 493061 - DNA, 75 bp, synthetic construct
  source 1..75: mol_type = other DNA
agcccaggctctggctgataggggtaaaacaggcttttatgtgaccggtaaagctggtgcttcggttgtgactca

SEQ ID NO: 493062 - DNA, 75 bp, synthetic construct
  source 1..75: mol_type = other DNA
agtgtgaataccctgatggtgaacacgtattatgattttagaaacagcagtgcattcactccatgggtatctgtt

SEQ ID NO: 493063 - DNA, 75 bp, synthetic construct
  source 1..75: mol_type = other DNA
atggatgcgttaagccgccgtgagagtagcgatgaagaacgttgcgccaggtttattctcgcccatgcgattttg

SEQ ID NO: 493064 - DNA, 75 bp, synthetic construct
  source 1..75: mol_type = other DNA
taaagagtttcatccggataataatttcaccattgatgcgattaattcatttgtaatgcgaattcaaagaagcaa

SEQ ID NO: 493065 - DNA, 75 bp, synthetic construct
  source 1..75: mol_type = other DNA
agcccaggctctggctgatgagaacaaaactggcttttatgtgactggtaaagccggtgcttcagttgtggctca

SEQ ID NO: 493066 - DNA, 75 bp, synthetic construct
  source 1..75: mol_type = other DNA
ttgtcgaagtcgtgcgccagcaaagcttcacccgcgcagcggagaagttgtttgtgacccagcccaccatcagca

SEQ ID NO: 493067 - DNA, 75 bp, synthetic construct
  source 1..75: mol_type = other DNA
ccgccacatgacagggctgaatatcattcaggagatcccgggagatattttcgcagcggcagcaacttacgacgg

SEQ ID NO: 493068 - DNA, 75 bp, synthetic construct
  source 1..75: mol_type = other DNA
ttgctaggccattcgaatcaaaaaatgaccgatatttacaacgatgtacgcggtaaggagtggaaaaaactggtc

SEQ ID NO: 493069 - DNA, 75 bp, synthetic construct
  source 1..75: mol_type = other DNA
ggtcattcgaatcaaaaaatgaccgatatttacaacgatgcacgcggtaaggagtggaaaaaactggtcatttga

SEQ ID NO: 493070 - DNA, 75 bp, synthetic construct
  source 1..75: mol_type = other DNA
tgccttacccgccgacggtgaatacctactggcgacgtcatggcaatacgtatttcatctcggaagctggaaagc

SEQ ID NO: 493071 - DNA, 75 bp, synthetic construct
  source 1..75: mol_type = other DNA
ttgcagagccaccggataagcgccgccgcgacctggacaatatcctgaaggcaccactggatgcgctgacgcatg

SEQ ID NO: 493072 - DNA, 75 bp, synthetic construct
  source 1..75: mol_type = other DNA
aaatgtaaatttaacactggcaataaaaatatatttattttatacaccgttccgagtctatctgtatatgttcct

SEQ ID NO: 493073 - DNA, 75 bp, synthetic construct
  source 1..75: mol_type = other DNA
gcgtcaatctcgacgaagagtacggcaatctgcaacgttttcagcagtattacctggccaatgcacaggttctgc

SEQ ID NO: 493074 - DNA, 75 bp, synthetic construct
  source 1..75: mol_type = other DNA
cagcgtgcaggacagcggcacttacaatatcactatggccaatggttactcgttggttcagggcagcacggctcg

SEQ ID NO: 493075 - DNA, 75 bp, synthetic construct
  source 1..75: mol_type = other DNA
ggaattccaaaagaacggctgaagttagcctctggtgtatttaatttaacacgtaatcttgggggcgcgattggt

SEQ ID NO: 493076 - DNA, 75 bp, synthetic construct
  source 1..75: mol_type = other DNA
cgcgtctgacaggcgtgggggcaggggcgtcacctaacaatctgctggatcaacgcgatcaactggtgagtgaat

SEQ ID NO: 493077 - DNA, 75 bp, synthetic construct
  source 1..75: mol_type = other DNA
ccagatcaacaatttcgctaaacaaatcgccagcctgaacgatcaaatttcacgcctgacaggtgtgggggcagg

SEQ ID NO: 493078 - DNA, 75 bp, synthetic construct
  source 1..75: mol_type = other DNA
tgacattccgttctcaggatctggaccagacgcgtaatacgctcggacaactggcgctggcatttgccgaggctt

SEQ ID NO: 493079 - DNA, 75 bp, synthetic construct
  source 1..75: mol_type = other DNA
gaacgcgaaatgacgatggtgatggactcatatcgcctgttcaacgttgggctgcgtcgtcctgactgcgttatc

SEQ ID NO: 493080 - DNA, 75 bp, synthetic construct
  source 1..75: mol_type = other DNA
cggggcgatacccttcagccccgacagtaactcaggctgtgaaaacagagaaaatccgccggaaccgattttcac

SEQ ID NO: 493081 - DNA, 75 bp, synthetic construct
  source 1..75: mol_type = other DNA
ttctgccggccggaactctcaggctgaaaggtgaactgacaccggcgttattacagacacttatccgcgaaatga

SEQ ID NO: 493082 - DNA, 75 bp, synthetic construct
  source 1..75: mol_type = other DNA
tttaaatggaggcttgttcagcaaactcttttacccggtgcctgtgtcgcacaaatagctcgcgagaacggaatc

SEQ ID NO: 493083 - DNA, 75 bp, synthetic construct
  source 1..75: mol_type = other DNA
aagtgattacgccggataagccggaaatattcaggcttgctgagattctgaatattgatccagatgccgcattag

SEQ ID NO: 493084 - DNA, 75 bp, synthetic construct
  source 1..75: mol_type = other DNA
gctggttctgccggccggaactctcaggctgaaaggtgaactgacgccagcgttattacagacacttatccgcga

SEQ ID NO: 493085 - DNA, 75 bp, synthetic construct
  source 1..75: mol_type = other DNA
atcgcacaaatagctcgtgagaacggaatcaacgataacctgctctttaactggcggcatctctggcgtaacggc

SEQ ID NO: 493086 - DNA, 75 bp, synthetic construct
  source 1..75: mol_type = other DNA
gacgaacttgagaacgtctggccgctggtgccgcctggtgccagtaattcagaaatgttggagaaattatcatga

SEQ ID NO: 493087 - DNA, 75 bp, synthetic construct
  source 1..75: mol_type = other DNA
ggtccggttttggtcgatattccaaaagatatccagttagccagcggcgatctggaaccgtggttcaccaccgtt

SEQ ID NO: 493088 - DNA, 75 bp, synthetic construct
  source 1..75: mol_type = other DNA
catggcaccaaagcggcgaacttcgcggtgcaggagtgcgacttgctgatcgccgtgggtgcacgttttgatgac

SEQ ID NO: 493089 - DNA, 75 bp, synthetic construct
  source 1..75: mol_type = other DNA
ttgttgttaaaacaactgtcggatcgtaaacctgcggattgcgtcgtgaccacagatgtggggcagcaccagatg

SEQ ID NO: 493090 - DNA, 75 bp, synthetic construct
  source 1..75: mol_type = other DNA
agcacatcgtccacactcgcccggaaaacttcatcacctccagcggcttaggcaccatgggtttcggtttaccgg

SEQ ID NO: 493091 - DNA, 75 bp, synthetic construct
  source 1..75: mol_type = other DNA
cggtgcaggaatgtgacctgctgatcgctgtgggtgcacgttttgatgatcgggtgacaggcaaactaaacacct

SEQ ID NO: 493092 - DNA, 75 bp, synthetic construct
  source 1..75: mol_type = other DNA
catcccaaacccttcccttccggaagggagttccgggattttgtggctggagtgcttgaggggagattatctggc

SEQ ID NO: 493093 - DNA, 75 bp, synthetic construct
  source 1..75: mol_type = other DNA
agggtttcatttactgaatatgccagccagtggacagaggcacagcgcgaacggagcgacggtaatcactcaaca

SEQ ID NO: 493094 - DNA, 75 bp, synthetic construct
  source 1..75: mol_type = other DNA
tcgaccctgtggtagccgcctccaccgtgctgctcggcgccgggatcggcacgctcggttccaccattaaccctt

SEQ ID NO: 493095 - DNA, 75 bp, synthetic construct
  source 1..75: mol_type = other DNA
ctggctgtgctggcggttatggcgcagtggtaaagcgactgaccgtttgagtcattatttgtcccgcggtcgttt

SEQ ID NO: 493096 - DNA, 75 bp, synthetic construct
  source 1..75: mol_type = other DNA
ccatctggtggcgggtttaacgccgattgaggccaacggttatctcgatttttttatcgaccgaccgctgggaat

SEQ ID NO: 493097 - DNA, 75 bp, synthetic construct
  source 1..75: mol_type = other DNA
gagtgtcgcctgctacctgcgacttctgcgcaacaaaaatacgacacactgtttggcgaggtagtatcagcagcg

SEQ ID NO: 493098 - DNA, 75 bp, synthetic construct
  source 1..75: mol_type = other DNA
gtgagccgattcatccctgtcgaattacaccatgccagccgtctgttaaatcatggccccacagttttgataacc

SEQ ID NO: 493099 - DNA, 75 bp, synthetic construct
  source 1..75: mol_type = other DNA
tggccacagatcccggagaacgactattttgcagtcagtttgcccgcagcgacgatcatgctcgcatcggctgtt

SEQ ID NO: 493100 - DNA, 75 bp, synthetic construct
  source 1..75: mol_type = other DNA
ctgcggtatttgcaatatttagggtgtcgaagtggtatgaccaatactctggacatataagaaaaagtaaaaaga

SEQ ID NO: 493101 - DNA, 75 bp, synthetic construct
  source 1..75: mol_type = other DNA
tctgttcgcgccgaaaggtgttcggcctgagacgttgctccgacaggttaacaccgtctcgttgccggacagtgc

SEQ ID NO: 493102 - DNA, 75 bp, synthetic construct
  source 1..75: mol_type = other DNA
atgaacgaatatcagtttgcgcttccatacccgccgtcggtgaatacctactggcgaagacgaggaagccaatac

SEQ ID NO: 493103 - DNA, 75 bp, synthetic construct
  source 1..75: mol_type = other DNA
taacagtcacattggcagctccggtgaacgcgcacgggttgctgtaaccggtaattcttcgcggataagcagcgc

SEQ ID NO: 493104 - DNA, 75 bp, synthetic construct
  source 1..75: mol_type = other DNA
tttgccgccagttctccagtgccgaggataacgcacgcgtcgggtgttgcgacgataacgccagaatagttacag

SEQ ID NO: 493105 - DNA, 75 bp, synthetic construct
  source 1..75: mol_type = other DNA
tggcctctttccggggaatattcctgcgtgcaactggcccgggctctgttcccggggcgatacccttcagccccg

SEQ ID NO: 493106 - DNA, 75 bp, synthetic construct
  source 1..75: mol_type = other DNA
agtgattttgctggtttcggtactggtggtgccaagcctgctcgttggcctgctggtgagcgtgttccaggcagt

SEQ ID NO: 493107 - DNA, 75 bp, synthetic construct
  source 1..75: mol_type = other DNA
aatggtatggtcactttcaggtgctggccgactgctcaaccgaagtgaaaaaaggcgaagtggtggtggtttgcg

SEQ ID NO: 493108 - DNA, 75 bp, synthetic construct
  source 1..75: mol_type = other DNA
gaacgcaggcagtcacgcggcgcggtgttcacgtcgtacccgtatgccagtgcgtttttccgtattctgaacggc

SEQ ID NO: 493109 - DNA, 75 bp, synthetic construct
  source 1..75: mol_type = other DNA
gaaataatatttgggggtgtccggatattcctgctgaaacgccgtatgcgccgggagaacgaattaagggagggc

SEQ ID NO: 493110 - DNA, 75 bp, synthetic construct
  source 1..75: mol_type = other DNA
atcggtattaccggctgtaatttcgcggtggcagaaaccggttcggtatgtctggtgactaatgaaggtaatgcg

SEQ ID NO: 493111 - DNA, 75 bp, synthetic construct
  source 1..75: mol_type = other DNA
tccgccgtacggaaaaactgctgtcactgcagccggtggaggaaatctggggggtaggccgcaggatctcaaaga

SEQ ID NO: 493112 - DNA, 75 bp, synthetic construct
  source 1..75: mol_type = other DNA
acctgatgaaaagcatgtcaaacggtattgatgatttaaccacgattagctaccgagtgcagggattctttgaca

SEQ ID NO: 493113 - DNA, 75 bp, synthetic construct
  source 1..75: mol_type = other DNA
gattgataaagctggtggatgggaaaagattattaactctactcagacgcagttaggccgcctttctaattcatg

SEQ ID NO: 493114 - DNA, 75 bp, synthetic construct
  source 1..75: mol_type = other DNA
gaccagattgaaacattaagcagttttgctaagttttccgctggtgctggtgatatgaatgcagaccagaaagaa

SEQ ID NO: 493115 - DNA, 75 bp, synthetic construct
  source 1..75: mol_type = other DNA
caagctgaaaggtcttaacccaattgtcgagaaatacattaagagtcagttttacgcattaagtagtaaatccaa

SEQ ID NO: 493116 - DNA, 75 bp, synthetic construct
  source 1..75: mol_type = other DNA
atggcacaatttaaagttgatgattttttgattgagctaagttttagctctcagcgagttttaaaaggcttggaa

SEQ ID NO: 493117 - DNA, 75 bp, synthetic construct
  source 1..75: mol_type = other DNA
acgcctttaaatgattctctcaaactaatggaaaagaatgtcgataaaactgtttccaagattgagcagcgtctt

SEQ ID NO: 493118 - DNA, 75 bp, synthetic construct
  source 1..75: mol_type = other DNA
aggaattcaaaatcagaaaaatcaaacgggatattgagtgcagttgtgataatgccataaaacacttctggcttt

SEQ ID NO: 493119 - DNA, 75 bp, synthetic construct
  source 1..75: mol_type = other DNA
acgccagatcaggtttacgccgcactgctggtagccgaccagtatggtcagcgtttcctgcaagagtgggaataa

SEQ ID NO: 493120 - DNA, 75 bp, synthetic construct
  source 1..75: mol_type = other DNA
ccctgctggaagaaggcgaaaaagcgatgcttgctgccgaacagcatgtggtaactccggcgctggagcgcgtga

SEQ ID NO: 493121 - DNA, 75 bp, synthetic construct
  source 1..75: mol_type = other DNA
ccactggatgcgctgacgcatgccggacttctcatagacgacgagcagtttgatgaaatcaatattgtgcgcggc

SEQ ID NO: 493122 - DNA, 75 bp, synthetic construct
  source 1..75: mol_type = other DNA
acaccgcccgacagtctgtgctgtgagctggttctgccggccggaactctcaggctgaaaggtgaactgacaccg

SEQ ID NO: 493123 - DNA, 75 bp, synthetic construct
  source 1..75: mol_type = other DNA
gcgttgtctgttatctacaccgacgacggcgagtttgaccgctatctgatgctgccaaacaacccgaatatggtt

SEQ ID NO: 493124 - DNA, 75 bp, synthetic construct
  source 1..75: mol_type = other DNA
gcattcggtacgctgacgcagctggttctggaaaacgcgccggtggaggaaatcgaaaccgtagctgcacttagc

SEQ ID NO: 493125 - DNA, 75 bp, synthetic construct
  source 1..75: mol_type = other DNA
aactctcaggcttaaaggtaaactgacgccggcgttattacagacacttatccgcgaaatgaaagggagcagcca

SEQ ID NO: 493126 - DNA, 75 bp, synthetic construct
  source 1..75: mol_type = other DNA
tttcttgctgcggcttctctgtcgccgttgtgcgaaataatatttgggggtgtccggatattcctgctgaaacgc

SEQ ID NO: 493127 - DNA, 75 bp, synthetic construct
  source 1..75: mol_type = other DNA
cgagcagtttgatgaaatcaatattgtgcgcggtcagcgcgttcctggtggacggctgggcgtgaagatttacaa

SEQ ID NO: 493128 - DNA, 75 bp, synthetic construct
  source 1..75: mol_type = other DNA
actggcccgggctctgttcccggggcgatacccttcagccccgacagtaactcagactgtgaaaacagagaaaac

SEQ ID NO: 493129 - DNA, 75 bp, synthetic construct
  source 1..75: mol_type = other DNA
gcgcgattgttgccagacaggacaattttcacaagacgtcgctgatggggcgcttacattgatcctgcgtgtgct

SEQ ID NO: 493130 - DNA, 75 bp, synthetic construct
  source 1..75: mol_type = other DNA
cgaataataaaatcccggcatcagtgcagatacctgaacagataaatacaccgcccgacagtctggtaagcggaa

SEQ ID NO: 493131 - DNA, 75 bp, synthetic construct
  source 1..75: mol_type = other DNA
ttgagcgtgatgtgcgcatgaagtccggcgatagcgtcgatattcatgaatatcgcttcaccttccgtgatgtca

SEQ ID NO: 493132 - DNA, 75 bp, synthetic construct
  source 1..75: mol_type = other DNA
atgaaatgctcatctgtttttacttcaaccactaatcatgttttcacattcgaacgagtaacgctttgcactatt

SEQ ID NO: 493133 - DNA, 75 bp, synthetic construct
  source 1..75: mol_type = other DNA
atgttttcacattcgaacgagtaactctttgcactattacccttatacataaggggacggagtatgttgtcatct

SEQ ID NO: 493134 - DNA, 75 bp, synthetic construct
  source 1..75: mol_type = other DNA
acagcgtgccagcttcaaagcgtggacattactgctggcaatcagtgccttctcgttgtgtctgctggggacttt

SEQ ID NO: 493135 - DNA, 75 bp, synthetic construct
  source 1..75: mol_type = other DNA
tgtcgctgctgttgccgtggctgttcgaaagcaaagttgtggcgatgacggtgctcggcctggcaatggcctgct

SEQ ID NO: 493136 - DNA, 75 bp, synthetic construct
  source 1..75: mol_type = other DNA
tctcgttgtgtctgctggggactttcctggtgcgttccggcgtgctggtatcggtacacgcgtttgcgtctgatc

SEQ ID NO: 493137 - DNA, 75 bp, synthetic construct
  source 1..75: mol_type = other DNA
gggtatgtttctgatgcgatgaaagtggtggattctgccgtatcggatgctgccaggctgttgcagggggatatc

SEQ ID NO: 493138 - DNA, 75 bp, synthetic construct
  source 1..75: mol_type = other DNA
tgcccgttgttctgtccggtgccattcacctgtttaagccccctgtcgtcgggggctgatacagccacaaccgtc

SEQ ID NO: 493139 - DNA, 75 bp, synthetic construct
  source 1..75: mol_type = other DNA
atgttattgcccgggcaaccgatatgctgggaaccgttcagacggctttcagaatggttaattctgctgtttctg

SEQ ID NO: 493140 - DNA, 75 bp, synthetic construct
  source 1..75: mol_type = other DNA
aagcaacgctgatttctcggcagggaaactacataaccagatttagttataataatcattctatagttgtagaaa

SEQ ID NO: 493141 - DNA, 75 bp, synthetic construct
  source 1..75: mol_type = other DNA
agcgaccggaacggtcgcgccacccttgtcgcgccgtggcctgcgctcccggcatcccggcaaaagacgccggga

SEQ ID NO: 493142 - DNA, 75 bp, synthetic construct
  source 1..75: mol_type = other DNA
gcccgttacccttcccgtttgtgatgtgtccggaatatttttttctgatgttatttttctgtggttaccgtgcct

SEQ ID NO: 493143 - DNA, 75 bp, synthetic construct
  source 1..75: mol_type = other DNA
accggaattgttcctcagtttggcgaaatgaagccgagtgatattgatttaatacttttctacagggccgaatat

SEQ ID NO: 493144 - DNA, 75 bp, synthetic construct
  source 1..75: mol_type = other DNA
acatattcaggtactgaacacgctgctggcgagcctggcgaaaattccctggcaggtgatgatcctcggtggcga

SEQ ID NO: 493145 - DNA, 75 bp, synthetic construct
  source 1..75: mol_type = other DNA
acgatgacgactactacccggcagataaaatctcttacaccatcgccatgatgcaaaaacaccgggcgctcatct

SEQ ID NO: 493146 - DNA, 75 bp, synthetic construct
  source 1..75: mol_type = other DNA
aaagccatcaacacatcatcgaccgcctgaccaatggcacgccggaagcctttaacatccgctacatccatcacc

SEQ ID NO: 493147 - DNA, 75 bp, synthetic construct
  source 1..75: mol_type = other DNA
gcgtcgtggcggcgtttagattttgcgccggggcgttgctgtgtctgcgggctgttttgtgcggtggtgagcgtg

SEQ ID NO: 493148 - DNA, 75 bp, synthetic construct
  source 1..75: mol_type = other DNA
gtcggatttgcgatgacgtttccggttgggcgacggcactacagctaatcgccctctccgcccggcagaatcacc

SEQ ID NO: 493149 - DNA, 75 bp, synthetic construct
  source 1..75: mol_type = other DNA
cgttacgacgatgattgcaatttaggcgaagagaaaagtttcaccgacaatttcagcgttaacccgctgcaactg

SEQ ID NO: 493150 - DNA, 75 bp, synthetic construct
  source 1..75: mol_type = other DNA
aggatagcgacaaaaggcgacctgatgatagtgatgttccgacaggagagagcagagaaaggggaatcagcatga

SEQ ID NO: 493151 - DNA, 75 bp, synthetic construct
  source 1..75: mol_type = other DNA
atggttgtgatcagactatggcgcggtaatagccgatttgatggtaaatatatccgcgtgattgaagatgttaat

SEQ ID NO: 493152 - DNA, 75 bp, synthetic construct
  source 1..75: mol_type = other DNA
tcgcaatgctctacgggttttatacagatcataacacgctaattgacgccgaactggtgacgactctttacgaag

SEQ ID NO: 493153 - DNA, 75 bp, synthetic construct
  source 1..75: mol_type = other DNA
gtgaatattgacccggcgataacgattgatatggccctgaacaccggcctggcgcttcttggttatttctacatc

SEQ ID NO: 493154 - DNA, 75 bp, synthetic construct
  source 1..75: mol_type = other DNA
gcgtcactgtgaaacggcggcggcgcgttatggcttaagcgcggtggatattctcgttgagctgggcaaacgccg

SEQ ID NO: 493155 - DNA, 75 bp, synthetic construct
  source 1..75: mol_type = other DNA
cgttatggcctgagcgcagtagatattctggtggaactgggcaaacgtcggatggtgggcggccaggaagatatg

SEQ ID NO: 493156 - DNA, 75 bp, synthetic construct
  source 1..75: mol_type = other DNA
tgtcctctttgttttcttcatcttccggaacgacctggcgcgataatctttacgatgcttcatttcgtggcgttc

SEQ ID NO: 493157 - DNA, 75 bp, synthetic construct
  source 1..75: mol_type = other DNA
aacagagaagtaataatcttatatatagtgaaatatatatgtataagttaaatatggagtttcatatgtctaaag

SEQ ID NO: 493158 - DNA, 75 bp, synthetic construct
  source 1..75: mol_type = other DNA
gaccgttggatcaacccaccatttgaaccgaccattcgtgatggtatgttattcgggcgcggcgcggcagatatg

SEQ ID NO: 493159 - DNA, 75 bp, synthetic construct
  source 1..75: mol_type = other DNA
agcactataatgaaattaaaccgcagctactgaccacaggcggaacgtccgacgggcgctttattgcccgcatgg

SEQ ID NO: 493160 - DNA, 75 bp, synthetic construct
  source 1..75: mol_type = other DNA
tggccgacatccacttcgactatcgcattgcgctgaaagtggcggaatatggcgttgattgcttgcgcattaacc

SEQ ID NO: 493161 - DNA, 75 bp, synthetic construct
  source 1..75: mol_type = other DNA
ttgctgttgtccgaaggtattggcgatacgttgcgtgtttcgctggctgccgatccggtcgaagagataaaagtc

SEQ ID NO: 493162 - DNA, 75 bp, synthetic construct
  source 1..75: mol_type = other DNA
atacacactgccagcaggctttacgcaatttaaagacaataaggctgtagatcagaagttagtcgataaagcgtt

SEQ ID NO: 493163 - DNA, 75 bp, synthetic construct
  source 1..75: mol_type = other DNA
gcagttagggattagcgtcttaagctggcgcgaggaccaacgcatcagccaggcgaagctgcttttgagcaccac

SEQ ID NO: 493164 - DNA, 75 bp, synthetic construct
  source 1..75: mol_type = other DNA
cagcaattttgatatcgccagcgtcgcacagcatgtttgcctgtcgccgtcgcgtctgtcacatcttttccgcca

SEQ ID NO: 493165 - DNA, 75 bp, synthetic construct
  source 1..75: mol_type = other DNA
gtcatccggaggctcgcgaatggtatcaccagtgggtttactttcgtccgcgcgcctactggcatgaatggctta

SEQ ID NO: 493166 - DNA, 75 bp, synthetic construct
  source 1..75: mol_type = other DNA
aagccagcgctcacaacggcacggtaaaagtggtcgaagcgttaatggcgcgcaacgagcgactggattattgcc

SEQ ID NO: 493167 - DNA, 75 bp, synthetic construct
  source 1..75: mol_type = other DNA
aggcgatcggttttaccatcgaacgcatggactttgcggatacgcagaatttttgggcgtggcgtggacagggag

SEQ ID NO: 493168 - DNA, 75 bp, synthetic construct
  source 1..75: mol_type = other DNA
ttttgggcatggcgtgggcaaggtgaaacgttagcctttgccgggcataccgacgtggtgccgcctggcgacgcc

SEQ ID NO: 493169 - DNA, 75 bp, synthetic construct
  source 1..75: mol_type = other DNA
atttcccggccggttgcagcgagctggccagccagacgctgactgattatctgacggaagacggcagcaacctgt

SEQ ID NO: 493170 - DNA, 75 bp, synthetic construct
  source 1..75: mol_type = other DNA
aaaattacactgacgacggcaggcagttgaacaacactgatattccggatgatgttaaagctgtccgggtgcgca

SEQ ID NO: 493171 - DNA, 75 bp, synthetic construct
  source 1..75: mol_type = other DNA
accaacactggcatcgctccagcttgaatcactcaatcccaaatggtcccagcaacaacaaaattctttcaagtg

SEQ ID NO: 493172 - DNA, 75 bp, synthetic construct
  source 1..75: mol_type = other DNA
atgcaaccaacactggcatcgcttctgcttgagtcacgcaaccccaaatggtcccaggaacaacaaaattctttc

SEQ ID NO: 493173 - DNA, 75 bp, synthetic construct
  source 1..75: mol_type = other DNA
catgaatatccaaaccgtgacaaaccgtacacggaggatctcgggcgtgccacgcgacggctgacgattaatgcg

SEQ ID NO: 493174 - DNA, 75 bp, synthetic construct
  source 1..75: mol_type = other DNA
atgagaaagaaaaaccaacgaaataaatggcaaacacttccgggtatagccgcattgctgtgcggtctggccggt

SEQ ID NO: 493175 - DNA, 75 bp, synthetic construct
  source 1..75: mol_type = other DNA
aacgtacaggccgcaccggtggcacagaaacccgtacaggttcctgtgtcgcctgatgcacaggctcgtattgca

SEQ ID NO: 493176 - DNA, 75 bp, synthetic construct
  source 1..75: mol_type = other DNA
aggagttgctcgactgcatttccaggcttcgggatgatgtaaatgccctcactgttgcattttcacatctggcct

SEQ ID NO: 493177 - DNA, 75 bp, synthetic construct
  source 1..75: mol_type = other DNA
catcaacgataagaagtcagatgcaggtgtgaatgttccggcaggggggatcgagcaggagctgaaaatgaaacc

SEQ ID NO: 493178 - DNA, 75 bp, synthetic construct
  source 1..75: mol_type = other DNA
accgtctgagtgccgtacttgccgcaagggaagcagaaggtcgtcagatggccagcctcttcgaaccggatgtcc

SEQ ID NO: 493179 - DNA, 75 bp, synthetic construct
  source 1..75: mol_type = other DNA
atgcaagcattgctggaacactttattacccaatctaccgtgtattcattgatggcggtggtggcctttctggag

SEQ ID NO: 493180 - DNA, 75 bp, synthetic construct
  source 1..75: mol_type = other DNA
agggaatgaccagaacggagcgcgaagaattaaaaagtttcgctacacagtgcgggaatgctggcgacatccaaa

SEQ ID NO: 493181 - DNA, 75 bp, synthetic construct
  source 1..75: mol_type = other DNA
gaatcacgcaaccccaaatggtcccaggaacaacaaaattctttcaagtggctggcggcattgctggaagaaaat

SEQ ID NO: 493182 - DNA, 75 bp, synthetic construct
  source 1..75: mol_type = other DNA
caactacgtggtgagaacgctgaactgtatgcggcgctggcgacggtgctttattaccaggccagccagcatatg

SEQ ID NO: 493183 - DNA, 75 bp, synthetic construct
  source 1..75: mol_type = other DNA
tgacggtttttcttataacgggtgaatcacagaatgtgattaccggaatttatgccagcaaagaatcctgcctcc

SEQ ID NO: 493184 - DNA, 75 bp, synthetic construct
  source 1..75: mol_type = other DNA
actaaactgcgcggccagtggaatgtgaatatcgttggcagccaggatggttatttcaaacccgagcagcgtcag

SEQ ID NO: 493185 - DNA, 75 bp, synthetic construct
  source 1..75: mol_type = other DNA
tgatgcaaatgcttggcggcattggcgacagcaaacaacaagcagccagcaggcaatcacagaagccacagcagc

SEQ ID NO: 493186 - DNA, 75 bp, synthetic construct
  source 1..75: mol_type = other DNA
agacagcaacctcagcagcaggggaatcacagcgaaccacctatgaacttcgacgattcggatattccgttctag

SEQ ID NO: 493187 - DNA, 75 bp, synthetic construct
  source 1..75: mol_type = other DNA
aaatgctgacaacactcacgatattgatggtatttctctgtatcggcagttatctgttaagcccaaaatggcagg

SEQ ID NO: 493188 - DNA, 75 bp, synthetic construct
  source 1..75: mol_type = other DNA
actgcgtcacttcaaagacacctccacgctgtatctggagattgtggattatcccggcgagtggctactcgatct

SEQ ID NO: 493189 - DNA, 75 bp, synthetic construct
  source 1..75: mol_type = other DNA
gggctggcgtctgttcaggcgaccaccagcggcattattgatgttaacggtgagaaaatcccggcgctgcgcggt

SEQ ID NO: 493190 - DNA, 75 bp, synthetic construct
  source 1..75: mol_type = other DNA
ggactggcttcggttcaggcaaccaccagcggtattatcgacgtcaacggcgagaaaatccctgctctgcgaggc

SEQ ID NO: 493191 - DNA, 75 bp, synthetic construct
  source 1..75: mol_type = other DNA
ggacggtttttctgataacaggtgagccacagaatgtgattaccggaatttatgccagtaaagaatcctgccatc

SEQ ID NO: 493192 - DNA, 75 bp, synthetic construct
  source 1..75: mol_type = other DNA
ttcctgcgttttgaccgccagattgtgctggtggactgcctgcaaccgctcaacagtggaccacaggcatttaat

SEQ ID NO: 493193 - DNA, 75 bp, synthetic construct
  source 1..75: mol_type = other DNA
tcaccgtttaccccggtgaagttcctgcgcgtttgcccggtcaggcgttctgggacaagcaagggttccagtttg

SEQ ID NO: 493194 - DNA, 75 bp, synthetic construct
  source 1..75: mol_type = other DNA
ctgtggatagtcaacagtgttagtaaatctgagcgtgaaagcattatcgccgcgctgcacgggcagtcgattttc

SEQ ID NO: 493195 - DNA, 75 bp, synthetic construct
  source 1..75: mol_type = other DNA
aaaattacaaatcccacgcctttaacgagatggggaattgtgaaaagtggggggtaaaagtgggtataggtgggg

SEQ ID NO: 493196 - DNA, 75 bp, synthetic construct
  source 1..75: mol_type = other DNA
agaacactggctgagggtggcgataaaaatcatcgaccgcaacgcgggagaaggatacgcgaaagcgcatcccga

SEQ ID NO: 493197 - DNA, 75 bp, synthetic construct
  source 1..75: mol_type = other DNA
atgaagttaaaccgcaaacaaccacactaccgcgccattgaccttacagagcactggctgagagtggcgataaaa

SEQ ID NO: 493198 - DNA, 75 bp, synthetic construct
  source 1..75: mol_type = other DNA
ttgccacgctgacagaacgggagattgccgaagcggaacaggtaacaaccatcaacgttaaaaccggagaggtgg

SEQ ID NO: 493199 - DNA, 75 bp, synthetic construct
  source 1..75: mol_type = other DNA
cgctgacagaacgggagattgccgaagcggaacaggtgacaaccatcaacgttaaaaccggagagcagacagcat

SEQ ID NO: 493200 - DNA, 75 bp, synthetic construct
  source 1..75: mol_type = other DNA
atgacccaaaaacgcagagacagaacagagccaaaatataaagcgttagacatgactgagcacaccttaaaggtg

SEQ ID NO: 493201 - DNA, 75 bp, synthetic construct
  source 1..75: mol_type = other DNA
catggaagatcaccggggtaaaaccgtctggcgtctggagtcggggagcgccttactgattactgagccgggccc

SEQ ID NO: 493202 - DNA, 75 bp, synthetic construct
  source 1..75: mol_type = other DNA
ccgaccatggcgatttacagttaagtggtgcatcggtttatttcaaagccgcccgtagcgccagtcagagcctga

SEQ ID NO: 493203 - DNA, 75 bp, synthetic construct
  source 1..75: mol_type = other DNA
gttgttaaacgtatacaactcaccgctgatcacggtgatttacagctgagcggtgcatcggtttatttcaaagcc

SEQ ID NO: 493204 - DNA, 75 bp, synthetic construct
  source 1..75: mol_type = other DNA
gtttgatgaaatcaatattgtgcatggtctgcctgtttgcggtgggcgactgggcgtgaatatattcgtaataag

SEQ ID NO: 493205 - DNA, 75 bp, synthetic construct
  source 1..75: mol_type = other DNA
tgccttacccgccaacggtgaatacttactggcgacgtcgtggcagcacatattttgtatcaaaagtcggtgaac

SEQ ID NO: 493206 - DNA, 75 bp, synthetic construct
  source 1..75: mol_type = other DNA
taccctctccttcagccctgcaaccctcgcgttgtgggtgccggatattagcgcggacattaagaataagatcga

SEQ ID NO: 493207 - DNA, 75 bp, synthetic construct
  source 1..75: mol_type = other DNA
tgggataagcaagggttccagtttgaagcgtttcgcccgcaggtgatggatgtcgacaaaccgctgccgcatatt

SEQ ID NO: 493208 - DNA, 75 bp, synthetic construct
  source 1..75: mol_type = other DNA
tcttactggctgtgatcgcgtagagcctggatacgttggcatcaaagtaaacaaattaggtgaagacaaagggat

SEQ ID NO: 493209 - DNA, 75 bp, synthetic construct
  source 1..75: mol_type = other DNA
agcgccaactggcgatgcaactcggcgtatcacgtaattcactgcgcgaggcgctggcaaaactggtgagtgaag

SEQ ID NO: 493210 - DNA, 75 bp, synthetic construct
  source 1..75: mol_type = other DNA
tggacgggatggaacactgaggtttacatcttcccgaccttcaaacaaatgaagacctacgatgagccattcagc

SEQ ID NO: 493211 - DNA, 75 bp, synthetic construct
  source 1..75: mol_type = other DNA
aaggcgtagacgatatcaccgaatcagatctgcgtcagaaaattgccgactctctaaaccgtttggccagccgta

SEQ ID NO: 493212 - DNA, 75 bp, synthetic construct
  source 1..75: mol_type = other DNA
tattattggctatgaccgcgtagaacctggatttgttggcatcaaagtaaacaaagtaggtgaagataaagggat

SEQ ID NO: 493213 - DNA, 75 bp, synthetic construct
  source 1..75: mol_type = other DNA
atgaagaaaggtttactggcagtgatcgtggccgctgtttgcacaatgggtcttactggctgcgatcgcgtggag

SEQ ID NO: 493214 - DNA, 75 bp, synthetic construct
  source 1..75: mol_type = other DNA
taatcttaccctgattggacaagctgcatgtggcaatggtgttactccagtattagatactgcagcatctcgccc

SEQ ID NO: 493215 - DNA, 75 bp, synthetic construct
  source 1..75: mol_type = other DNA
tcaggcacaaaacagttacaacgttgccgataacagagccagtggcggtgcggcagttaaaacgacggatggctc

SEQ ID NO: 493216 - DNA, 75 bp, synthetic construct
  source 1..75: mol_type = other DNA
gcgctgattatggttggctatgcctcatttacggagtttacccccgcttacttcgtatcagagcaacagcaaggt

SEQ ID NO: 493217 - DNA, 75 bp, synthetic construct
  source 1..75: mol_type = other DNA
gtctctacgactggacgggagcgataattgcgctttgcggcatgttgattattgttgctggctggggacgcacct

SEQ ID NO: 493218 - DNA, 75 bp, synthetic construct
  source 1..75: mol_type = other DNA
ttgctaccgctttgtgtgaaatcattggttgttttttgccctggctgtggctgaaacggaatgccagtgtctggt

SEQ ID NO: 493219 - DNA, 75 bp, synthetic construct
  source 1..75: mol_type = other DNA
aaacgaaacgccagtatctggctgttgcttccggcggggatttcactggcactgtttgtctggttgttaagttgc

SEQ ID NO: 493220 - DNA, 75 bp, synthetic construct
  source 1..75: mol_type = other DNA
gcgtggacgacattaccgacaccgacctgcgccagaagatagccgacgcactcaaccgactggccagcaaaatga

SEQ ID NO: 493221 - DNA, 75 bp, synthetic construct
  source 1..75: mol_type = other DNA
caaagttgatccatccaaagttaccacggtgtttcagacctaccgcaaaggcgtggatgacattaccgccactga

SEQ ID NO: 493222 - DNA, 75 bp, synthetic construct
  source 1..75: mol_type = other DNA
gaacgctatgggtgcggttatatatttatgtcgtcctctgtttgattgtgtcactggttctgtatgtttggcttt

SEQ ID NO: 493223 - DNA, 75 bp, synthetic construct
  source 1..75: mol_type = other DNA
ttccagatgagcgacggaacaaccattggttaccacatcggcgtagcctacaaggttgatccagcaaaagtcaca

SEQ ID NO: 493224 - DNA, 75 bp, synthetic construct
  source 1..75: mol_type = other DNA
tcgtcggttcccgctatgaccggtacaagagcttcaatccccgtgccggagaactgaaagccgaacgcctgtccc

SEQ ID NO: 493225 - DNA, 75 bp, synthetic construct
  source 1..75: mol_type = other DNA
gccatcaataaatggaacggcacgctgccgcaatacatgaccaacggtgccaatacaccatttatccaggttaaa

SEQ ID NO: 493226 - DNA, 75 bp, synthetic construct
  source 1..75: mol_type = other DNA
tgtcggttgcgatcgcgttgagcctggtaatgtgggcatcaaagtaaacaaactgggcgacgataaaggcgtcgg

SEQ ID NO: 493227 - DNA, 75 bp, synthetic construct
  source 1..75: mol_type = other DNA
acatcttcccaaccttcaaacaaatgaagacctacgatgagccgttcagcttccagatgagtgacggcacaacca

SEQ ID NO: 493228 - DNA, 75 bp, synthetic construct
  source 1..75: mol_type = other DNA
ctatcggcattcaggtcatgagcctctcttatgtcggtaaaccggaatatccgccaaccgttatcgacagcatta

SEQ ID NO: 493229 - DNA, 75 bp, synthetic construct
  source 1..75: mol_type = other DNA
ctcaaccgactggccagcaaaatgaccaccgacaaatttatcgatggcgggaagtctgaactactggatgcagct

SEQ ID NO: 493230 - DNA, 75 bp, synthetic construct
  source 1..75: mol_type = other DNA
gagcctctcttatgtcggtaaaccggaatacccgccaaccgtgatcgacagcattaatgccaaagtcacagcgaa

SEQ ID NO: 493231 - DNA, 75 bp, synthetic construct
  source 1..75: mol_type = other DNA
aaggcgtggatgacattaccgacaccgacctgcgccagaagatcgccgacgcactcaaccgactggccagcaaaa

SEQ ID NO: 493232 - DNA, 75 bp, synthetic construct
  source 1..75: mol_type = other DNA
cgactgcgcgaagttcacagccagaaactcagcaaagaagcgcagaaactgatgaagatgccgttccagcgtgca

SEQ ID NO: 493233 - DNA, 75 bp, synthetic construct
  source 1..75: mol_type = other DNA
ttttagctacggtatttttctacctttctggagcgtctggcttaaggggattggcttaacgccagaaactatcgg

SEQ ID NO: 493234 - DNA, 75 bp, synthetic construct
  source 1..75: mol_type = other DNA
tggcgctcggttatttcacatacttttttagctacggtatttttctacctttctggagcgtctggcttaagggga

SEQ ID NO: 493235 - DNA, 75 bp, synthetic construct
  source 1..75: mol_type = other DNA
attattaagtgatgactatcttgagtctcctctaacgaaaattctctacgactcactagctaaagatgaattaaa

SEQ ID NO: 493236 - DNA, 75 bp, synthetic construct
  source 1..75: mol_type = other DNA
tggccgccatgcgctatattgctgctcgccagggtagcgaagtcatccgtttacaggcggtttactctgccgtcg

SEQ ID NO: 493237 - DNA, 75 bp, synthetic construct
  source 1..75: mol_type = other DNA
tggccgccatgcgctatatcgccgctcgtcagggtagtgaggtgatccgtttgcaggcggtttactctgccgtcg

SEQ ID NO: 493238 - DNA, 75 bp, synthetic construct
  source 1..75: mol_type = other DNA
ccgcttgattacggcaaagtgcgactttggggctcagtggcgtttgtcattggttcggcgctgacgggcaaactg

SEQ ID NO: 493239 - DNA, 75 bp, synthetic construct
  source 1..75: mol_type = other DNA
ttcagttgctggtacatcagttactgaaagtgcattacgggattacgctgagtgataccggattgtctgatgatg

SEQ ID NO: 493240 - DNA, 75 bp, synthetic construct
  source 1..75: mol_type = other DNA
ctgcccacgcgcacgctggtaacggcgtcaacaccgggtgcagacatgacgcccggcaagatggattacacctcg

SEQ ID NO: 493241 - DNA, 75 bp, synthetic construct
  source 1..75: mol_type = other DNA
tgggagcagccagccagacgctgaatcagcaggcggtgaccgccagtaatctggcgaatgcctctacgcccggtt

SEQ ID NO: 493242 - DNA, 75 bp, synthetic construct
  source 1..75: mol_type = other DNA
attggcatcaagaacacatcattgagcttgttatgagaaatctaaagcaggataaaaatcaagatcctatttatt

SEQ ID NO: 493243 - DNA, 75 bp, synthetic construct
  source 1..75: mol_type = other DNA
gtacatccgccgcaggctggggctatcagaccaggatattgttactgacgctcatgtatttgaggcttttgagat

SEQ ID NO: 493244 - DNA, 75 bp, synthetic construct
  source 1..75: mol_type = other DNA
ggagtgaaagcattaggtatttatgccttatccgcaagtatgattcttgccgcaggctaccttcaatctgcatat

SEQ ID NO: 493245 - DNA, 75 bp, synthetic construct
  source 1..75: mol_type = other DNA
cttcatgacgactggtgtgctcttattaaatatggtcactcgtctcctaagctggcggacctgtcatccggcctt

SEQ ID NO: 493246 - DNA, 75 bp, synthetic construct
  source 1..75: mol_type = other DNA
ccgggaatttctcgccgatggatgcaacaatgtgaagaaggtagcagcccccctgaaggatacgatgaaatgtac

SEQ ID NO: 493247 - DNA, 75 bp, synthetic construct
  source 1..75: mol_type = other DNA
accagcattaatagtgacaaagcagctaatagtcttgataatttaagttcagcagcagttaaaacagcaggtgca

SEQ ID NO: 493248 - DNA, 75 bp, synthetic construct
  source 1..75: mol_type = other DNA
ccccccccccccccccccccccgccgcgacggcaatgtcattattcatgtggcaaacggaatcacgcatatcggt

SEQ ID NO: 493249 - DNA, 75 bp, synthetic construct
  source 1..75: mol_type = other DNA
gaccagattgaaacattaagcagttttgctaagttttccgctggtgctggtgatatggatgcaggccagaaagaa

SEQ ID NO: 493250 - DNA, 75 bp, synthetic construct
  source 1..75: mol_type = other DNA
cgggcgatcaaaatgtttgcttatgccaatagtcatccgggattgtggaaagtcggaatgatggctggcgcccat

SEQ ID NO: 493251 - DNA, 75 bp, synthetic construct
  source 1..75: mol_type = other DNA
cacattacgcaaatttggtattaaaggtgtaaataaatacgagacatacacagtcataataataactgtagcttt

SEQ ID NO: 493252 - DNA, 75 bp, synthetic construct
  source 1..75: mol_type = other DNA
cggacacgctgtatcaatattttggtcagcatggagataaggtggtgcagccgttggtgcaaaaactggataagc

SEQ ID NO: 493253 - DNA, 75 bp, synthetic construct
  source 1..75: mol_type = other DNA
gtgacgacgataaagttgattgtcaacagcgtcagtaaatccgagcgcgaaagtattattgccgcgctgcacggg

SEQ ID NO: 493254 - DNA, 75 bp, synthetic construct
  source 1..75: mol_type = other DNA
tgcctgatccaccacgggagcttccattctggtctgattcgtttattcatcttcatgacgactggtgtgctcggt

SEQ ID NO: 493255 - DNA, 75 bp, synthetic construct
  source 1..75: mol_type = other DNA
gctacgctaagtttgcagcaggtgctcagggttctatgtcacaggaacagacacaggagctatttggtaatgcaa

SEQ ID NO: 493256 - DNA, 75 bp, synthetic construct
  source 1..75: mol_type = other DNA
gctgtatcaatactttggtgagcatggagataaagtggtacagccgctggtgaaaaagctggataggcagaacgg

SEQ ID NO: 493257 - DNA, 75 bp, synthetic construct
  source 1..75: mol_type = other DNA
taaaagcaatatctataacaactggaacctttcgggtgaccgcgcgctttctgcccgtcgggtgctggaagatgc

SEQ ID NO: 493258 - DNA, 75 bp, synthetic construct
  source 1..75: mol_type = other DNA
tgcagtgccggtggaagggctttcactacccacgcgcacgctggttacggcgtcaacaccgggtgctgacatgac

SEQ ID NO: 493259 - DNA, 75 bp, synthetic construct
  source 1..75: mol_type = other DNA
atctcgatgatgaagatgcagactggaaaacgacaacccaggggcagaaatccgtcggtgatacttcggcgacgc

SEQ ID NO: 493260 - DNA, 75 bp, synthetic construct
  source 1..75: mol_type = other DNA
ttgtgacagcgtctgcccggtgcgtattccgttgtcaaaactgatcctgcgtcatcgccgggtgatggccgagga

SEQ ID NO: 493261 - DNA, 75 bp, synthetic construct
  source 1..75: mol_type = other DNA
acggctgaatctgaagatgacacctacatcgatgatgagaatgccgactggacatcaacgatgcaggggcagaaa

SEQ ID NO: 493262 - DNA, 75 bp, synthetic construct
  source 1..75: mol_type = other DNA
gtgggtgtggaatccgcagctgtaagtactggtatggttaaaaacccgaaacgtactgttccactggcaaccatg

SEQ ID NO: 493263 - DNA, 75 bp, synthetic construct
  source 1..75: mol_type = other DNA
gtactggtatggttaaaaacccgaaacgtaccgttccgctggcaaccatgctgggtactggtttagcaggtattg

SEQ ID NO: 493264 - DNA, 75 bp, synthetic construct
  source 1..75: mol_type = other DNA
ttccggtatgtatccgtcttctgtaatggcaggctccggtgctccgtttgcaatcagtgcttctactatcctggg

SEQ ID NO: 493265 - DNA, 75 bp, synthetic construct
  source 1..75: mol_type = other DNA
gtactggcctctgaatttcgtgatgtgttgcgttgtatccgctgcggagcctgtatgaatacctgcccggcatac

SEQ ID NO: 493266 - DNA, 75 bp, synthetic construct
  source 1..75: mol_type = other DNA
acggtattctggtgtttttaccgtggtgggcagttcagttccgcccctgcacgacaccgaccgctcggcgtggtg

SEQ ID NO: 493267 - DNA, 75 bp, synthetic construct
  source 1..75: mol_type = other DNA
gattgcggcgtgggctggttgcagaagtttcgaaatgaagcggcgggaagggttatcagcggcctttctgtttca

SEQ ID NO: 493268 - DNA, 75 bp, synthetic construct
  source 1..75: mol_type = other DNA
aacaaagaaccctacagacacttcaagcattaccgccggaaaaagcgagagagattttatctcagtatgaaaata

SEQ ID NO: 493269 - DNA, 75 bp, synthetic construct
  source 1..75: mol_type = other DNA
aaacgattaatttcctctgccaatgtgattgcgtcatgatcctctcttatgcgggagaatttctatccaagcagg

SEQ ID NO: 493270 - DNA, 75 bp, synthetic construct
  source 1..75: mol_type = other DNA
cacgacaccgaccgctcggcgtggtgggcactgctattcttaatcccgtttatcggctggcttattatcatcgtc

SEQ ID NO: 493271 - DNA, 75 bp, synthetic construct
  source 1..75: mol_type = other DNA
aagacgtgatgacccgcaccgtgaaaatcagcggtgtggggcgtccatatctggcagaggagggcactgaaactg

SEQ ID NO: 493272 - DNA, 75 bp, synthetic construct
  source 1..75: mol_type = other DNA
attggctacgtgattaaaacagaaaataaagaaacccaattcactgtggttgatatcgacggcccatcaggcaac

SEQ ID NO: 493273 - DNA, 75 bp, synthetic construct
  source 1..75: mol_type = other DNA
ttgttactactgatgacgttgttcacgaagttatcctggaaggaaaactcattggctacgtgattaaaacagaaa

SEQ ID NO: 493274 - DNA, 75 bp, synthetic construct
  source 1..75: mol_type = other DNA
cgaagttagcctggaaggaaaacgcattggctacgtgattaaaacagaaaataaagaaaccccattcaccgtggt

SEQ ID NO: 493275 - DNA, 75 bp, synthetic construct
  source 1..75: mol_type = other DNA
cgccgagggtagcgaggggtatacgcgtaacggcagcattcaggttgatcctggcggtcaactgacgattcaggg

SEQ ID NO: 493276 - DNA, 75 bp, synthetic construct
  source 1..75: mol_type = other DNA
cgaagttaccctggaaggaaagcgtattggctacgtgattaagacagaaaataaagaaaccccattcactgtggt

SEQ ID NO: 493277 - DNA, 75 bp, synthetic construct
  source 1..75: mol_type = other DNA
aaagaatctgcccgcagaaaaaaaagccggatttctggcaaccctgatcgcaatgaaattaaacggtgaaatctg

SEQ ID NO: 493278 - DNA, 75 bp, synthetic construct
  source 1..75: mol_type = other DNA
ccaatgcgttgatgaccgggacgtcagtggtggatgcactcaatatcccgaaagtattaagtattttcggttctc

SEQ ID NO: 493279 - DNA, 75 bp, synthetic construct
  source 1..75: mol_type = other DNA
tttccttcctccccggcagcgattttttgaactttttcctcacccgttgatcttctcttatatttcattttcttc

SEQ ID NO: 493280 - DNA, 75 bp, synthetic construct
  source 1..75: mol_type = other DNA
ggtgcgattatcggcatcggtttaaccaacgcgctgttaaccggctcatcggtgatggatgcgttaaacctgcgt

SEQ ID NO: 493281 - DNA, 75 bp, synthetic construct
  source 1..75: mol_type = other DNA
aaaaaatgtgcctggtacacatcataaagaatattccagcagagaaaaaagacaggattatggcaactctgattg

SEQ ID NO: 493282 - DNA, 75 bp, synthetic construct
  source 1..75: mol_type = other DNA
caaaagtgagtctggttcacatcggaaagaatctgcccgcagaaagaaaagccggatttctggcaactctgattg

SEQ ID NO: 493283 - DNA, 75 bp, synthetic construct
  source 1..75: mol_type = other DNA
cgcatgtgcaccacgctaccgaaaacgcacattgcggtgatgggcatggagcgtatcgcgccgacctttgccgag

SEQ ID NO: 493284 - DNA, 75 bp, synthetic construct
  source 1..75: mol_type = other DNA
ggccgttctccggctgaaaacagcacggaaaatgagcctcaacccgtagagcaaccagagccggttcagcccgga

SEQ ID NO: 493285 - DNA, 75 bp, synthetic construct
  source 1..75: mol_type = other DNA
gccgcagagaagcgcatagcagagttagaaagtgattctcaggcacaaaagttagttgaagcaatcattgttgcg

SEQ ID NO: 493286 - DNA, 75 bp, synthetic construct
  source 1..75: mol_type = other DNA
ggcgcggtatggtcggctccgttctcatgcaacgcatggttgaagagcgcgacttcgacgccattcgccctgtct

SEQ ID NO: 493287 - DNA, 75 bp, synthetic construct
  source 1..75: mol_type = other DNA
cagaattgctgatttagaagccaaacagccatcgccagtagtaccggaagaaaaaccaatgcctaaccctcttag

SEQ ID NO: 493288 - DNA, 75 bp, synthetic construct
  source 1..75: mol_type = other DNA
gcaatagggaggaggcgccagtacaggtggaagtaacgaaagaagagatcgcccgcatcgtccaggaagtagaag

SEQ ID NO: 493289 - DNA, 75 bp, synthetic construct
  source 1..75: mol_type = other DNA
gtggatattatctccgagctgttggatgagctggacgaaaaacagcaatacattaaatcccgcgaccaggagaat

SEQ ID NO: 493290 - DNA, 75 bp, synthetic construct
  source 1..75: mol_type = other DNA
tgtcgatgccgtggttgacagaattgctgatttagaagctaaacagccatcgccagtagtgccggaaggactggt

SEQ ID NO: 493291 - DNA, 75 bp, synthetic construct
  source 1..75: mol_type = other DNA
gccccaaacgatagcattaccacaattcaggcactgcgaatcgcgctggatggtatagagcggagcaacgccatg

SEQ ID NO: 493292 - DNA, 75 bp, synthetic construct
  source 1..75: mol_type = other DNA
tctgcggttgataaatacccactcgctggcggaagtatttatcaacagcgacggagtaccgactctgggcgaagg

SEQ ID NO: 493293 - DNA, 75 bp, synthetic construct
  source 1..75: mol_type = other DNA
tgcgtgaaaaagcagagaaagcaactaaaggaagctacatcgcagggcatacatctgttaaccagcacggcaatt

SEQ ID NO: 493294 - DNA, 75 bp, synthetic construct
  source 1..75: mol_type = other DNA
aaaactgcaaccgcgtaaatacggcgaacgcgtcacacaggagatcgtcggtaacaaggaagaagcacccgtcca

SEQ ID NO: 493295 - DNA, 75 bp, synthetic construct
  source 1..75: mol_type = other DNA
ctatggcggcgtctatttactgcacggtacaaacgccgatttcggtattggtatgcgagtaagttctggctgtat

SEQ ID NO: 493296 - DNA, 75 bp, synthetic construct
  source 1..75: mol_type = other DNA
tctgccgaaccaaacggtgcgcgtctggttgaagtacatcagccgctgtctgagaagattgatgacgatccgcag

SEQ ID NO: 493297 - DNA, 75 bp, synthetic construct
  source 1..75: mol_type = other DNA
atgatcaaagtgggcttacgcattgatgttgatacctttcgcggcacccgcgaaggcgtgccgcgtctgctggaa

SEQ ID NO: 493298 - DNA, 75 bp, synthetic construct
  source 1..75: mol_type = other DNA
gtgacacgctgacgccaacgatggtgactaccgtttcagacaaacgtgcaaacccaacctggacgccaacggcaa

SEQ ID NO: 493299 - DNA, 75 bp, synthetic construct
  source 1..75: mol_type = other DNA
aacccaacctggacgccaacggcaaacatccgcgcccgttataaagcacagggaattgagttgcctgcggtagtg

SEQ ID NO: 493300 - DNA, 75 bp, synthetic construct
  source 1..75: mol_type = other DNA
gtccgttccgggatgccggtggatgtccgttccgggatgccggtggatgtccgccgtcatcaagtgagcccacaa

SEQ ID NO: 493301 - DNA, 75 bp, synthetic construct
  source 1..75: mol_type = other DNA
agaacaacgctcgttatatcgcagctttcaaccctgaagtagcgcaggcgctgttggatgaacgagaagcccaaa

SEQ ID NO: 493302 - DNA, 75 bp, synthetic construct
  source 1..75: mol_type = other DNA
gttttccaccatgtacgcgcgcgcgaaggagatcggatttgaggtgttggctgatgagattatcgatatagccga

SEQ ID NO: 493303 - DNA, 75 bp, synthetic construct
  source 1..75: mol_type = other DNA
tgcgccagagaacatcaaaaaggaagagttaaacagacaccatttgatgattgaaacgcgcaaatggctattagc

SEQ ID NO: 493304 - DNA, 75 bp, synthetic construct
  source 1..75: mol_type = other DNA
ataaaggcacgccggtttataccattcatgcagaagttgaaggctgcgcttatcagcataattttgtggatctcc

SEQ ID NO: 493305 - DNA, 75 bp, synthetic construct
  source 1..75: mol_type = other DNA
aatcaggaaaacccggtactgcgcaaattccggtgaccttacccacctgggatgaagtgattggtcgggatgtga

SEQ ID NO: 493306 - DNA, 75 bp, synthetic construct
  source 1..75: mol_type = other DNA
gtgagcgaaattaattaccaggcactgcgtgaggcggcagaaaaggcaacacaaggcgaatgggtcgcatttatt

SEQ ID NO: 493307 - DNA, 75 bp, synthetic construct
  source 1..75: mol_type = other DNA
caccggtctggggctggtggcggtatgtgacgctcaacaacaggtacaaggcgtctttaccgacggcgatttacg

SEQ ID NO: 493308 - DNA, 75 bp, synthetic construct
  source 1..75: mol_type = other DNA
gtgccggagtggcagaattatcccgaaacagcgagtgtgcaacagcaaaactggagcgtgctggcgcgggccatt

SEQ ID NO: 493309 - DNA, 75 bp, synthetic construct
  source 1..75: mol_type = other DNA
agagtttacctgcgggcgatggcgggttgtctctggggcagggggttattgttgcggcgcgttggttggcagggg

SEQ ID NO: 493310 - DNA, 75 bp, synthetic construct
  source 1..75: mol_type = other DNA
gcccggacaggcattgaatgatttgcttctctccggcggttcctccgggcagttcgacgcgctgtacgagaagta

SEQ ID NO: 493311 - DNA, 75 bp, synthetic construct
  source 1..75: mol_type = other DNA
cgtctcgataaacttctctcagtggtgagtattatcctcggttcatctgtcattggtggatttattcctgaagtt

SEQ ID NO: 493312 - DNA, 75 bp, synthetic construct
  source 1..75: mol_type = other DNA
ggtatcactacgctggtatttagcggcggggttattcataaccgtttgctgcgtgcacgtctggcgcattatctc

SEQ ID NO: 493313 - DNA, 75 bp, synthetic construct
  source 1..75: mol_type = other DNA
agttatcccgaaacggtaagtgtgcaacagcaaaactggagcgtgctggcgcgggccattgagcgtggaatcaat

SEQ ID NO: 493314 - DNA, 75 bp, synthetic construct
  source 1..75: mol_type = other DNA
ttcgggctggtgaggctctgtgggatcgcattgcagaggttctgcgtcagccttcaccggacccggccgttttaa

SEQ ID NO: 493315 - DNA, 75 bp, synthetic construct
  source 1..75: mol_type = other DNA
ctggtgcagacggtaagggggtatatccgcgaatgcctgcaatggatgattgatgacggtgtggtgtcccgtatt

SEQ ID NO: 493316 - DNA, 75 bp, synthetic construct
  source 1..75: mol_type = other DNA
actctctggcgtcgtgacggaccggtaatgatttcttttgatgatctgtggagtgcgataacgcatggcggatag

SEQ ID NO: 493317 - DNA, 75 bp, synthetic construct
  source 1..75: mol_type = other DNA
gcgtgtcggcagttcgcgccgccagcgtgcttacatcgtgtaaattcagccatgcagacgcaattgaaatgacga

SEQ ID NO: 493318 - DNA, 75 bp, synthetic construct
  source 1..75: mol_type = other DNA
cgtgctggcatcgtgtaaatttagccatgctgacgctatagagatgacgaaaagaaatgatccggctgtctcgtt

SEQ ID NO: 493319 - DNA, 75 bp, synthetic construct
  source 1..75: mol_type = other DNA
ggcgttatctggtggggtggtcacctctggcttcagtctcttttgtcatcacaaataccggagttgcatggctga

SEQ ID NO: 493320 - DNA, 75 bp, synthetic construct
  source 1..75: mol_type = other DNA
gcgggagatgcttcaatggtatgccgactatatggattctctcgagcatggcggaaatgtggtgcatatggtgtt

SEQ ID NO: 493321 - DNA, 75 bp, synthetic construct
  source 1..75: mol_type = other DNA
tttaattttttctgtatagtattattgcttgtgtgttctttcataagcacgggaccggtatatgctttttatgaa

SEQ ID NO: 493322 - DNA, 75 bp, synthetic construct
  source 1..75: mol_type = other DNA
tgatgtttctctagttaataaactaatacgaaaaggcagtttaaagttttataatccatccttaataaaaaaaat

SEQ ID NO: 493323 - DNA, 75 bp, synthetic construct
  source 1..75: mol_type = other DNA
acagccacaataaagaaatataaaagcaatgagcttaaattcttactcccctataccacaaaaactagtggctgg

SEQ ID NO: 493324 - DNA, 75 bp, synthetic construct
  source 1..75: mol_type = other DNA
gcgcagggttgcagcagctgcttgcccgggcggaaaaagacgacattatcatttgtaccaaaatggaccggctag

SEQ ID NO: 493325 - DNA, 75 bp, synthetic construct
  source 1..75: mol_type = other DNA
tcgccttggacgtaataccgcagatatgattcgcatcgtggatacttgctataaaaaaggcatcgctattcgctt

SEQ ID NO: 493326 - DNA, 75 bp, synthetic construct
  source 1..75: mol_type = other DNA
attttgtttttacaccgttctcattcaggtatatatttaaacctttttttgtattctgtttatctgtagttccat

SEQ ID NO: 493327 - DNA, 75 bp, synthetic construct
  source 1..75: mol_type = other DNA
gcattggttatttcccctgatgttgccccccatggtatcaaagcatcgtggccgtatctttttaagagaagtatt

SEQ ID NO: 493328 - DNA, 75 bp, synthetic construct
  source 1..75: mol_type = other DNA
atggattgcttagatgtaacctattggactgagctagatgttttcgcacagtatcctgttggtgctcgctctaag

SEQ ID NO: 493329 - DNA, 75 bp, synthetic construct
  source 1..75: mol_type = other DNA
tattactctctggcgaccagttcgccgcaatctgcaagatccaggagcgcgaacgtcagcgctccgatattggcg

SEQ ID NO: 493330 - DNA, 75 bp, synthetic construct
  source 1..75: mol_type = other DNA
tataagtatattaaattcggcttttgttctctcaactcatttaagtatattagatccagtggagcaaaagctggt

SEQ ID NO: 493331 - DNA, 75 bp, synthetic construct
  source 1..75: mol_type = other DNA
gacgagcaacggagcattcctcttactctaaattcgaattacacgccctctggaataataacaattacatatgat

SEQ ID NO: 493332 - DNA, 75 bp, synthetic construct
  source 1..75: mol_type = other DNA
tccaaattttgatcgtgagaaaggagctaagcattccattgaagggctgaggattatcgcgaaagctcttaaagt

SEQ ID NO: 493333 - DNA, 75 bp, synthetic construct
  source 1..75: mol_type = other DNA
ttgtatcttgaggtttcggccaaaggttccaaatactggcgcatgaaatacagacgtccctctgacaaaaaagag

SEQ ID NO: 493334 - DNA, 75 bp, synthetic construct
  source 1..75: mol_type = other DNA
ttttcccgggggatcatgacgccactaaggttatgagtgaaaacacagtgaatagcgcattgcgtgcgatgggat

SEQ ID NO: 493335 - DNA, 75 bp, synthetic construct
  source 1..75: mol_type = other DNA
ccttactaacttttgtgcgttccagtgagttacgtttcgcgcgttgggatgagttcgacttcgataaatctctct

SEQ ID NO: 493336 - DNA, 75 bp, synthetic construct
  source 1..75: mol_type = other DNA
gctctaaatattggcgtatgaaatacagacgcccatctgacaggaaagaggatcgtcttgcttttggtgtttggc

SEQ ID NO: 493337 - DNA, 75 bp, synthetic construct
  source 1..75: mol_type = other DNA
tttgtttcaataatttattagcttttgacagttgtaatatgacattgcccttaaaagaatctggatattttttca

SEQ ID NO: 493338 - DNA, 75 bp, synthetic construct
  source 1..75: mol_type = other DNA
agcaaagcgcgatgaagccaaaaagctgttagcgcagggcattgatccaaaagccgaacagaaagaggctcaggc

SEQ ID NO: 493339 - DNA, 75 bp, synthetic construct
  source 1..75: mol_type = other DNA
aatgatgcagtggtgggcagattatatagatcataataagattatgtatacaactccgtttgattttgcaaaaaa

SEQ ID NO: 493340 - DNA, 75 bp, synthetic construct
  source 1..75: mol_type = other DNA
ggtgcgttgggggagtcggggctatggagcgatgatgctatagaacgtcagttgagccattctgagcgcaataat

SEQ ID NO: 493341 - DNA, 75 bp, synthetic construct
  source 1..75: mol_type = other DNA
cggtgcgttatcgacaaccaaagcgcgacattaccccgccttaccctccagcaggttgcctgagtttcttgctcg

SEQ ID NO: 493342 - DNA, 75 bp, synthetic construct
  source 1..75: mol_type = other DNA
cgtggcatgaagatgaaagaggagcatatagttcctcttagtcgacaggcgatgattttgttagagcagcttaag

SEQ ID NO: 493343 - DNA, 75 bp, synthetic construct
  source 1..75: mol_type = other DNA
attaaaaaagttgatgccagtggtaagcatgacgtggcgcagcgtcttcagcagcgcgttacggccattatgcgt

SEQ ID NO: 493344 - DNA, 75 bp, synthetic construct
  source 1..75: mol_type = other DNA
gatcgcctcgcttttggtgtttggccgaccgtgacgcttgctgaagctagaaagaggagggatgaagcgaaaaag

SEQ ID NO: 493345 - DNA, 75 bp, synthetic construct
  source 1..75: mol_type = other DNA
gagttcgacttcgataaatcgctttggcgtgtacctgcaaaacgagaagagattaaaggcgtgcgttattcgtac

SEQ ID NO: 493346 - DNA, 75 bp, synthetic construct
  source 1..75: mol_type = other DNA
agcatgacgtcgcgcagcgacttcagcagcgtgtcacggctatcatgcgttatgcagtacagaacgattacatcg

SEQ ID NO: 493347 - DNA, 75 bp, synthetic construct
  source 1..75: mol_type = other DNA
ggagcgatgatgctatagagcggcagttgagccattcagagcgaaataatgtgcgggcagcttacattcatactt

SEQ ID NO: 493348 - DNA, 75 bp, synthetic construct
  source 1..75: mol_type = other DNA
ccgaatatcttgaagaaagaagattaatgctgcagtggtgggctgattatattgatgctaataagaatggatctg

SEQ ID NO: 493349 - DNA, 75 bp, synthetic construct
  source 1..75: mol_type = other DNA
gcgaatggcgtcgatccgggagataaaaagaaaaatgataaggttgaacagagtaaagcacggacctttaaagaa

SEQ ID NO: 493350 - DNA, 75 bp, synthetic construct
  source 1..75: mol_type = other DNA
gatcgtcttgcttttggtgtttggccgactgtgacgcttgctgaagctagagctagaagggatgaagccaaaaag

SEQ ID NO: 493351 - DNA, 75 bp, synthetic construct
  source 1..75: mol_type = other DNA
caaggtttagttataccgccgtttgtggagccgcatattcacctggacaccacgcaaaccgccggacaaccgaac

SEQ ID NO: 493352 - DNA, 75 bp, synthetic construct
  source 1..75: mol_type = other DNA
gttccatgcggtgctggaatgggtagccgatccccgtggcgtattacaaacactgtggtcagtgttacgcccggg

SEQ ID NO: 493353 - DNA, 75 bp, synthetic construct
  source 1..75: mol_type = other DNA
ccctgtggtcagtgttgcgtccaggcggtgtgttgtcgttaatgttctacaatgcgcacggcttgctgatgcata

SEQ ID NO: 493354 - DNA, 75 bp, synthetic construct
  source 1..75: mol_type = other DNA
gtgtcgaataacgctttacaaaccattattaatgcccggttgcccggtaaagaggggctgtggcagattcatctg

SEQ ID NO: 493355 - DNA, 75 bp, synthetic construct
  source 1..75: mol_type = other DNA
ggaagtcgcgccgtggattgatctgcaaatcgtcgccttcccgcaggaagggattttgtcgtatcccaacggtga

SEQ ID NO: 493356 - DNA, 75 bp, synthetic construct
  source 1..75: mol_type = other DNA
tgaaatggcagattgccaacggcattcagcatgtgcgtacccatgtcgatgtttcggatgcaacgctaactgcgc

SEQ ID NO: 493357 - DNA, 75 bp, synthetic construct
  source 1..75: mol_type = other DNA
tggctggcgttcatgcttactacgatattctgagtgaagccggattcttccgtcttgagatattgagccagcact

SEQ ID NO: 493358 - DNA, 75 bp, synthetic construct
  source 1..75: mol_type = other DNA
aataggtcatgatgattgggataagttagagtattttattaattcatctgttaaaccaatggattatgatagttt

SEQ ID NO: 493359 - DNA, 75 bp, synthetic construct
  source 1..75: mol_type = other DNA
ttatttttgataacactaattattttgatattatctatgattttgagcatagatttatagggaatgaaaagatca

SEQ ID NO: 493360 - DNA, 75 bp, synthetic construct
  source 1..75: mol_type = other DNA
tctttattccattgcggaatatacgagtcaggaaaaacaggggaaaagtaaagtccgtagctacctctggttttt

SEQ ID NO: 493361 - DNA, 75 bp, synthetic construct
  source 1..75: mol_type = other DNA
ggctttattttattgaccataatggtttttctgctttgtaccggaagggacactggttttatcagaagtttcatt

SEQ ID NO: 493362 - DNA, 75 bp, synthetic construct
  source 1..75: mol_type = other DNA
atggttttgttcaggtatcggcaagccagatctcaggcaatatgcgcgcgaaaatggcatatgttcgaaagaaca

SEQ ID NO: 493363 - DNA, 75 bp, synthetic construct
  source 1..75: mol_type = other DNA
tttctaaatcaccagtgcgggtttcattttgtccgttctgtggtgaaagtctgaaaacatggaaaaaggagacaa

SEQ ID NO: 493364 - DNA, 75 bp, synthetic construct
  source 1..75: mol_type = other DNA
tttctaaatcaccgattcgagtttcattttgtccgttctgtggtaatagtctgaaaacatgggaaaaggagacaa

SEQ ID NO: 493365 - DNA, 75 bp, synthetic construct
  source 1..75: mol_type = other DNA
atgacacatcaggagctgaaagtgatgcttctcaaagacaaagatccagcattccgggctgcttatgaagctgag

SEQ ID NO: 493366 - DNA, 75 bp, synthetic construct
  source 1..75: mol_type = other DNA
atggataatgcatggctggggcgattattcatcaagcattacctcaatgatattaaaaaagatgacataattatc

SEQ ID NO: 493367 - DNA, 75 bp, synthetic construct
  source 1..75: mol_type = other DNA
atggcaataagatagaaccgtgcgcggcgttggcacaatcgctggagtatgacgctgaatacacgacgcgaaaag

SEQ ID NO: 493368 - DNA, 75 bp, synthetic construct
  source 1..75: mol_type = other DNA
tttctaaatcaccagttcgggtttcattttgcccgttctgtggtgaaagtctgaaaacgtgggaagcggaggcga

SEQ ID NO: 493369 - DNA, 75 bp, synthetic construct
  source 1..75: mol_type = other DNA
agtcaggaaaaattcggcaaaagtaaaatccatacctgcttctggttttttatctggttttttgttttcaactgt

SEQ ID NO: 493370 - DNA, 75 bp, synthetic construct
  source 1..75: mol_type = other DNA
gctgcagtggtgggctgattatttggatgcgaatatgcaagaagttatctctccctttgactatgccaaaattaa

SEQ ID NO: 493371 - DNA, 75 bp, synthetic construct
  source 1..75: mol_type = other DNA
caccaaatatcaacagactgttttaccgctacgcaacagtattcttcggacgttactgaaaaatacaggcgctgc

SEQ ID NO: 493372 - DNA, 75 bp, synthetic construct
  source 1..75: mol_type = other DNA
aaaatgtccgcgcatggctatatgccgcagaattcaaggctaaaactcgccatggtcgcgcctgtggtaaaggtg

SEQ ID NO: 493373 - DNA, 75 bp, synthetic construct
  source 1..75: mol_type = other DNA
aagtcgtacaaaaagaagcccaggccgagaattcgggggcatatacttttgaaactatcgcccgagaatggcatg

SEQ ID NO: 493374 - DNA, 75 bp, synthetic construct
  source 1..75: mol_type = other DNA
gcatgggtttagaactatggctcgtggagcattgggtgagtcaggactttggagcgatgatgctattgagcgaca

SEQ ID NO: 493375 - DNA, 75 bp, synthetic construct
  source 1..75: mol_type = other DNA
gcgaatggcgtcgatcccagtgagaacaagaaagccgtaaaggtagagcaggagcaagaggcgataacgtttgaa

SEQ ID NO: 493376 - DNA, 75 bp, synthetic construct
  source 1..75: mol_type = other DNA
gcactgtttacttagggaaaaactcccgtcgttggagcctgaaattttattcaaaatatgatgagcatatatctg

SEQ ID NO: 493377 - DNA, 75 bp, synthetic construct
  source 1..75: mol_type = other DNA
atcgggaagattattactgaaaacaaagccgaatgttcagactttaataagtgcactgaattattgcgaaatcgg

SEQ ID NO: 493378 - DNA, 75 bp, synthetic construct
  source 1..75: mol_type = other DNA
ttatggaatatgagcatcaacccagtggtgtccggcagccagggcaggatacagatgccactaaacgtcaggagt

SEQ ID NO: 493379 - DNA, 75 bp, synthetic construct
  source 1..75: mol_type = other DNA
ttgatgtacggtcatggttacatgctgctgagttcaaggctaagactcgtcacgggcgcccggcaacttcaaagg

SEQ ID NO: 493380 - DNA, 75 bp, synthetic construct
  source 1..75: mol_type = other DNA
gctggtttactggactggtcaaaagataaattacgcattgaattaacattaagaacaactgaattaattgatttg

SEQ ID NO: 493381 - DNA, 75 bp, synthetic construct
  source 1..75: mol_type = other DNA
attctaataacgttgttccgttggttcgtactcttgaagccaaaccagccaaaattccatcatgggtttatgaga

SEQ ID NO: 493382 - DNA, 75 bp, synthetic construct
  source 1..75: mol_type = other DNA
agtcattggcaccaaacgagcctcatgatttacagcgttataagcaggtctacagagagatgtgcaacagtgagg

SEQ ID NO: 493383 - DNA, 75 bp, synthetic construct
  source 1..75: mol_type = other DNA
atgagcaaaaataagctgattttaacaggagctttattgtctttgtttgctttagtggggtgtaagcctacagac

SEQ ID NO: 493384 - DNA, 75 bp, synthetic construct
  source 1..75: mol_type = other DNA
tgggtgagcgtgaaattgctcgtactatgctggaactgctggaaacgccaccggcgggtgaagtggtgacggggt

SEQ ID NO: 493385 - DNA, 75 bp, synthetic construct
  source 1..75: mol_type = other DNA
gttattctcgcggctattgtcgcgaaagccgtcgccaaacccgataccaaaacgcagacggcgatggagaatagt

SEQ ID NO: 493386 - DNA, 75 bp, synthetic construct
  source 1..75: mol_type = other DNA
agttttgctagtgttggtgttgacatgtttgattgggttgatgctgcaaagtaagcatcaagagattgtagccgc

SEQ ID NO: 493387 - DNA, 75 bp, synthetic construct
  source 1..75: mol_type = other DNA
ggttctgttagtgttggtgttgacatgcttaattgggctaatgctgcaaagcaaacatcaagagtttatagccgc

SEQ ID NO: 493388 - DNA, 75 bp, synthetic construct
  source 1..75: mol_type = other DNA
ccaccattgttggcggccttgtgctcgcctttatcctcggcatgctggccaataaactgcgtatttctcctctgg

SEQ ID NO: 493389 - DNA, 75 bp, synthetic construct
  source 1..75: mol_type = other DNA
gaagaccgaaacgctggaagagcagacgctggaagaggctatcgaagaagagaagcagatcccagtggatatttg

SEQ ID NO: 493390 - DNA, 75 bp, synthetic construct
  source 1..75: mol_type = other DNA
gtctggtgccgtggattatggcacgcagcgcggcaaccggttctcgcgagctgtttaccctgtcggtgctggcgc

SEQ ID NO: 493391 - DNA, 75 bp, synthetic construct
  source 1..75: mol_type = other DNA
tgggatatctgttagcgggtgtgctggcgggaccattcactcctggctttgttgccgataccaagctcgcgccgg

SEQ ID NO: 493392 - DNA, 75 bp, synthetic construct
  source 1..75: mol_type = other DNA
agaaacaaattccggtggatatttgcaaccacgcactgctggtcggctacggtcgggtgggcagtctgctgggag

SEQ ID NO: 493393 - DNA, 75 bp, synthetic construct
  source 1..75: mol_type = other DNA
cctggtgctggcaggcgcaattttgtcgattatgctcaacccggtactgtttgctttgctggagaaatatctggc

SEQ ID NO: 493394 - DNA, 75 bp, synthetic construct
  source 1..75: mol_type = other DNA
attggctatgactcaggtgcagaatcgcaatacgaaagcgatgtagaggctatctgcgccgctggaatcaaagtg

SEQ ID NO: 493395 - DNA, 75 bp, synthetic construct
  source 1..75: mol_type = other DNA
aaccggcttcaacatcctgcgtgaaatcatggtggaagggtatcgtccgtcgattgctcgtttgtatgatgctga

SEQ ID NO: 493396 - DNA, 75 bp, synthetic construct
  source 1..75: mol_type = other DNA
gctacccgcaatgccagcgcgtggacagcaagctgatcgaaacctggtttaacaacctgaactggggaccggata

SEQ ID NO: 493397 - DNA, 75 bp, synthetic construct
  source 1..75: mol_type = other DNA
gtagtatcgggcagttctccacactctacggcgcaatcgaggatatggtcgttggcctggaagcagtactggctg

SEQ ID NO: 493398 - DNA, 75 bp, synthetic construct
  source 1..75: mol_type = other DNA
aggtcttgcagcctgtgctcagcgcgtgtttcatacgcaagtgcgtatcggcgcgccgctgaacattaccggttt

SEQ ID NO: 493399 - DNA, 75 bp, synthetic construct
  source 1..75: mol_type = other DNA
gtgtttcatacgcaggtgcgtattggcgcgccgctgaatatcaccggtttaactgattatgctcaggagccgtat

SEQ ID NO: 493400 - DNA, 75 bp, synthetic construct
  source 1..75: mol_type = other DNA
atggacgaatcaagaaagcagtttgaagaatggtttgaaaattacaccggatgtgatcctaaaaataaaatatac

SEQ ID NO: 493401 - DNA, 75 bp, synthetic construct
  source 1..75: mol_type = other DNA
atctttaaattcaccccggaaaacaacctcttctacggctatatcctggaagacatgaaaaccggcttcaacatc

SEQ ID NO: 493402 - DNA, 75 bp, synthetic construct
  source 1..75: mol_type = other DNA
atgacgaaagcagatgccagtttgaagagagttggttacgacgtggggggcgaatcttcagaccttatccgttac

SEQ ID NO: 493403 - DNA, 75 bp, synthetic construct
  source 1..75: mol_type = other DNA
gtggtaatattggtggtcaatacgtgatggacgatgttcaaggccactggcaaacgtggcaggcatcgcgagcag

SEQ ID NO: 493404 - DNA, 75 bp, synthetic construct
  source 1..75: mol_type = other DNA
tcgaccagctaaaggaaattgttggtgcagatcgcgtaattaccgatgaaacagtattaaagaaaaacagtattg

SEQ ID NO: 493405 - DNA, 75 bp, synthetic construct
  source 1..75: mol_type = other DNA
agccacgcaagcaccttaaaatcaccatcatacactaaatcagtaagttggcagcattaccacattcgtcacatc

SEQ ID NO: 493406 - DNA, 75 bp, synthetic construct
  source 1..75: mol_type = other DNA
cattgcgaaggcgacgggcgaagggattgcggaaatcgttgcccgctacccgcaatgccagcgcgtggacagcaa

SEQ ID NO: 493407 - DNA, 75 bp, synthetic construct
  source 1..75: mol_type = other DNA
tatcgtgttcggtttatgtctttccaccgccagtaccgtggtgttactgcgcgcacttgaagaacggcaattaat

SEQ ID NO: 493408 - DNA, 75 bp, synthetic construct
  source 1..75: mol_type = other DNA
gcaccgcgcctggcggaggatttaagcgcggcgctcaattacagccagttgctgaaagtgtaccgggcgctgctg

SEQ ID NO: 493409 - DNA, 75 bp, synthetic construct
  source 1..75: mol_type = other DNA
cggcgcagcattacccatccgttcgttcgcaagcaggagctgacggtgtatacgctgaataatgagctggaaaat

SEQ ID NO: 493410 - DNA, 75 bp, synthetic construct
  source 1..75: mol_type = other DNA
atcatcctgatgatcatcaactttattgtcgtcaccaaaggggccgagcgtatttccgaggtttctgcccgcttt

SEQ ID NO: 493411 - DNA, 75 bp, synthetic construct
  source 1..75: mol_type = other DNA
ctataaaagagaaaaggatgaacgttataagaattatggaatgtatgaggacaatccgcaaattgctttacaaga

SEQ ID NO: 493412 - DNA, 75 bp, synthetic construct
  source 1..75: mol_type = other DNA
tcacttcctgttcgccgtagttttcggaattggatatctgaacgattgcttttagatgaccagtccataaagcct

SEQ ID NO: 493413 - DNA, 75 bp, synthetic construct
  source 1..75: mol_type = other DNA
gtatggaaagcgccggtttgcttctacttatgatctaagggattatccagaaagcaaatcctacccaggaatgtg

SEQ ID NO: 493414 - DNA, 75 bp, synthetic construct
  source 1..75: mol_type = other DNA
gttgggaaaccattccgctgatcgagcccatcagcttaagcctcggctacaagctggtggcgctggtggataaag

SEQ ID NO: 493415 - DNA, 75 bp, synthetic construct
  source 1..75: mol_type = other DNA
aaaggttgatgttaaaaaagacggaaaatatgtatctgtgtatattttatacaccctgtcagggaacgaatattt

SEQ ID NO: 493416 - DNA, 75 bp, synthetic construct
  source 1..75: mol_type = other DNA
acaccctgtcaggaaacgaatattttggcagaaatgaagatttcggtagcatgttatttacgcatgtaagcgctt

SEQ ID NO: 493417 - DNA, 75 bp, synthetic construct
  source 1..75: mol_type = other DNA
cctgttcccgaccattttgctgatcaccaccttaatgcgcctgacgctcaacgttgcttctacgcgcgtggtgct

SEQ ID NO: 493418 - DNA, 75 bp, synthetic construct
  source 1..75: mol_type = other DNA
atggcgaaaacaactaaatcgttcctcgcgctgctgcgcggcggcaatctcggcgtgccgctggtgatactttgt

SEQ ID NO: 493419 - DNA, 75 bp, synthetic construct
  source 1..75: mol_type = other DNA
catcaccgaaaccagcgagcaacaggtcagttgggagacgataccgctgatcgagcctatcagcttaagcctcgg

SEQ ID NO: 493420 - DNA, 75 bp, synthetic construct
  source 1..75: mol_type = other DNA
aagaaaaatcattcatgaaagttatcgtcaagtagactatgacattaaaaaaataaatattaataaggtgttttt

SEQ ID NO: 493421 - DNA, 75 bp, synthetic construct
  source 1..75: mol_type = other DNA
atgcggtagtggcgcagaaatttgctcgtgagctgcaaaaagagggcatttacgtcaccggtttcttctatccgg

SEQ ID NO: 493422 - DNA, 75 bp, synthetic construct
  source 1..75: mol_type = other DNA
gggatggaagatgcgattctctactcttcctgctttgatgctaacggtggcctgtttgaaacgctgctgggcgcg

SEQ ID NO: 493423 - DNA, 75 bp, synthetic construct
  source 1..75: mol_type = other DNA
ctgctcagcggacgattttaaaaatttatactgttcgtcctctgttgcactgtaaatggaacattatgaaccccg

SEQ ID NO: 493424 - DNA, 75 bp, synthetic construct
  source 1..75: mol_type = other DNA
ttttgcagcggatgctgcaccggcgggcatgaagcggggagtcggtacggaaaaaatgccggtctgggtgccggt

SEQ ID NO: 493425 - DNA, 75 bp, synthetic construct
  source 1..75: mol_type = other DNA
gggtaaagcgctgggcggtgcttccggcggttacaccgcggcgcgcaaagaagtggttgagtggctgcgccagcg

SEQ ID NO: 493426 - DNA, 75 bp, synthetic construct
  source 1..75: mol_type = other DNA
ggtggttataccgcggcgcgcaaagaagtggttgagtggctgcgccagcgttctcgtccgtacctgttctccaac

SEQ ID NO: 493427 - DNA, 75 bp, synthetic construct
  source 1..75: mol_type = other DNA
tggaaagttggcttctctatttgctgagaaataccaaatcagcctctatctcggcagtgattacgagtattgtac

SEQ ID NO: 493428 - DNA, 75 bp, synthetic construct
  source 1..75: mol_type = other DNA
atccattttatctaagcgaatatctgaggttctataccggtgaaagcatcgattatgtgaacttcaaagaaaagc

SEQ ID NO: 493429 - DNA, 75 bp, synthetic construct
  source 1..75: mol_type = other DNA
aaaaatttattctcgtcgaagatagattaaatacttacgccaaattttggaaggtttgggatttgttttttgata

SEQ ID NO: 493430 - DNA, 75 bp, synthetic construct
  source 1..75: mol_type = other DNA
ttttttgattgttgaacagttttcttcaaggttgttgtcccgtgatcgggaggataggattgattacgctgtcca

SEQ ID NO: 493431 - DNA, 75 bp, synthetic construct
  source 1..75: mol_type = other DNA
aaggagggttatcattaccagatacaagatggaacagcctcagcgatttcggctctacctgtagtttttcatcat

SEQ ID NO: 493432 - DNA, 75 bp, synthetic construct
  source 1..75: mol_type = other DNA
taaaatagacaaggatgaacgttataaaagttatgtaaagtacgatgataaacctcaagttgttttacaagagac

SEQ ID NO: 493433 - DNA, 75 bp, synthetic construct
  source 1..75: mol_type = other DNA
ccacaacgcttactttgaagcgggtgcggatatcatcgaaaccaacaccttcaactccacgactattgcgatggc

SEQ ID NO: 493434 - DNA, 75 bp, synthetic construct
  source 1..75: mol_type = other DNA
ggtctttgcggtgaaaacggagtttgaagcgctgggcgttgagctgccgattatgatctccggcaccatcaccga

SEQ ID NO: 493435 - DNA, 75 bp, synthetic construct
  source 1..75: mol_type = other DNA
aacgcgcacccatgtgatcaacgtcagccaccatctgcgtcaacagaccgaaaaaacgggattccctaactactg

SEQ ID NO: 493436 - DNA, 75 bp, synthetic construct
  source 1..75: mol_type = other DNA
gtggtgctgcaatgtaacaactacgaaattgtcgatctcggcgttatggtgcctgcggaaaaaattctccgtacc

SEQ ID NO: 493437 - DNA, 75 bp, synthetic construct
  source 1..75: mol_type = other DNA
ggcggcgctgctttccgatactcagcgcgatgatttcgttgctcgtacccgcaaggagtacgaaaccgtgcgtat

SEQ ID NO: 493438 - DNA, 75 bp, synthetic construct
  source 1..75: mol_type = other DNA
agtatccgcgcattctggaagatgaagtggtgggtgttgaggcgcagcggctgtttaaagacgccaacgacatgc

SEQ ID NO: 493439 - DNA, 75 bp, synthetic construct
  source 1..75: mol_type = other DNA
ctggcaggcgcattttgtcaaaaacatgtttattcgcccgagcgatgaagactggcaggtttcaaaccagacttt

SEQ ID NO: 493440 - DNA, 75 bp, synthetic construct
  source 1..75: mol_type = other DNA
gttgctgatccacgtaaaaccgcagttgaagccgctatcgcccgcgccaaagcacgcaagctggagcagcaacag

SEQ ID NO: 493441 - DNA, 75 bp, synthetic construct
  source 1..75: mol_type = other DNA
aggtcgatccgcgcaaagccgccgtcgaagccgctattgcccgtgccaaagcacgcaagctggaacagcaacagg

SEQ ID NO: 493442 - DNA, 75 bp, synthetic construct
  source 1..75: mol_type = other DNA
cgccaaagaagtgaatgctgatttgattggcctttcggggcttatcacaccgtcgctggacgagatggttaacgt

SEQ ID NO: 493443 - DNA, 75 bp, synthetic construct
  source 1..75: mol_type = other DNA
atgatccagaattatcgtctgaacgaagccgattttcgcggtgagcgttttgccgactggccgtgcgatctaaaa

SEQ ID NO: 493444 - DNA, 75 bp, synthetic construct
  source 1..75: mol_type = other DNA
agctggaacagcaacagactaacgcagaaccagaagaacaggttgatccgcgcaaagcggcagttgccgcggcta

SEQ ID NO: 493445 - DNA, 75 bp, synthetic construct
  source 1..75: mol_type = other DNA
ggatatggggatcgtcaacgccgggcaactggcgatttacgacgacctgcccgctgaactgcgcgacgcggtgga

SEQ ID NO: 493446 - DNA, 75 bp, synthetic construct
  source 1..75: mol_type = other DNA
acatcaattaccagaactatatggggcagcaaagcgaattaaagaagggctggaatatcgtctcggcgctatcat

SEQ ID NO: 493447 - DNA, 75 bp, synthetic construct
  source 1..75: mol_type = other DNA
agaggaagatatggtacacccaatatggcgatgaacagctaagtaatcttccaccattatatatgtatcgtgatg

SEQ ID NO: 493448 - DNA, 75 bp, synthetic construct
  source 1..75: mol_type = other DNA
gtcagatccatatgctatttatactttagactactggttatcgctcgatgaaaacctaacttttattcttgtcta

SEQ ID NO: 493449 - DNA, 75 bp, synthetic construct
  source 1..75: mol_type = other DNA
ccgtgtcgaccggggctttgctcgaccttctgacgcgtgctgtgattatttcgctttttacctggcggcgtgccg

SEQ ID NO: 493450 - DNA, 75 bp, synthetic construct
  source 1..75: mol_type = other DNA
cacggtcgatcaagatagttttgctattcctgtacaggtagaagcattacgtgccagtggtagttccatgaactc

SEQ ID NO: 493451 - DNA, 75 bp, synthetic construct
  source 1..75: mol_type = other DNA
ttacagttacaatgttaggtatgtcggcctccgcttttgcagcgcccggagatgtcattaatacgtccactcaaa

SEQ ID NO: 493452 - DNA, 75 bp, synthetic construct
  source 1..75: mol_type = other DNA
gggctgcctaacgcttttggtgaatacgatctcgacgctgacacaatggcgaaacagattcgtgaatgggcgcaa

SEQ ID NO: 493453 - DNA, 75 bp, synthetic construct
  source 1..75: mol_type = other DNA
gaagactatgcccgccgtaaaggtatgagcgtctccgatgttgagcgctggctggcaccgaatctggggtatgac

SEQ ID NO: 493454 - DNA, 75 bp, synthetic construct
  source 1..75: mol_type = other DNA
gatggcaccgagcgtttactggagcttgccgagaaatatcgcggcagcaaaaccgacgacaccgctaacgcccag

SEQ ID NO: 493455 - DNA, 75 bp, synthetic construct
  source 1..75: mol_type = other DNA
cgcgaagccattcacgcggtgttcctctactatgccatccgtaacggtatggatatggggatcgtcaacgctggg

SEQ ID NO: 493456 - DNA, 75 bp, synthetic construct
  source 1..75: mol_type = other DNA
atcgctcgcgtgccgattatgatcgactcctcaaaatgggacgtcattgaaaaaggtctgaagtgtatccagggc

SEQ ID NO: 493457 - DNA, 75 bp, synthetic construct
  source 1..75: mol_type = other DNA
gaagactatgctcgccgtaaaggaatgagcgtgtcagatgttgaacgctggctggcgccgaatctggggtatgac

SEQ ID NO: 493458 - DNA, 75 bp, synthetic construct
  source 1..75: mol_type = other DNA
tcgatactgaccccggcattgacgatgccgtcgccattgccgccgcgatttttgcccccgaactcgacctgcaac

SEQ ID NO: 493459 - DNA, 75 bp, synthetic construct
  source 1..75: mol_type = other DNA
cccgaacgggccgttaagccgtgcggtgcgtaatcagttgcgtctgaacggtgttgagttgcttgataaagaaac

SEQ ID NO: 493460 - DNA, 75 bp, synthetic construct
  source 1..75: mol_type = other DNA
tgatccccggccgtgatatctacccgattagcgccaaagtcttccgttcgttcttcgataacccgcaaatggcgt

SEQ ID NO: 493461 - DNA, 75 bp, synthetic construct
  source 1..75: mol_type = other DNA
aggtcatgatcctggactctggcgacccgaacgggccattaagccgtgcagtgcgtaatcagttacgcctgaatg

SEQ ID NO: 493462 - DNA, 75 bp, synthetic construct
  source 1..75: mol_type = other DNA
gaacaggctaaaaacacgcttgaattttcacaaatggacagcgtgaaaaagctggctgatgcgtccggtactgtg

SEQ ID NO: 493463 - DNA, 75 bp, synthetic construct
  source 1..75: mol_type = other DNA
aaaaaaaccggggttatcgccggtgattctctgccaacaccagaacaagtccgacagcaagccggaatggcagcg

SEQ ID NO: 493464 - DNA, 75 bp, synthetic construct
  source 1..75: mol_type = other DNA
gcgatccgaacgggccattaagccgtgcggtgcgtaaccagttacgtctgaatggtgtcgagttgcttgataaag

SEQ ID NO: 493465 - DNA, 75 bp, synthetic construct
  source 1..75: mol_type = other DNA
aaaaagagttttaatttttatgaggccgacgatgattacggcctcaggcgacaggcacaaatcggagagaaacta

SEQ ID NO: 493466 - DNA, 75 bp, synthetic construct
  source 1..75: mol_type = other DNA
atatcatcggcgtgggcagttgcccgtcgcgtggtatggataaaggcggtgtcaacgaccttgagtccgtagtca

SEQ ID NO: 493467 - DNA, 75 bp, synthetic construct
  source 1..75: mol_type = other DNA
gtgaacgacctcgaatccgtggtcaagtgcgtacaacgcgctattgaccaggcagaattgatggcagattgtcag

SEQ ID NO: 493468 - DNA, 75 bp, synthetic construct
  source 1..75: mol_type = other DNA
acccgattagcgccaaagtcttccgttcgttcttcgataacccgcaaatggcgttagcgaaagataacgaacaag

SEQ ID NO: 493469 - DNA, 75 bp, synthetic construct
  source 1..75: mol_type = other DNA
agcgttttcaccagcgactggaagtgaactcaatcacttcgccgaatatttttggcgtatggggaattactctgg

SEQ ID NO: 493470 - DNA, 75 bp, synthetic construct
  source 1..75: mol_type = other DNA
aacccttccgggcgaatctggacggcagacgagattcgccaggtttcggacttatgtaaacgttacggcgtagtt

SEQ ID NO: 493471 - DNA, 75 bp, synthetic construct
  source 1..75: mol_type = other DNA
agcccgggcactcaagcgtgaactggatggcgttactcaggctcagatgaagatggcgaaaacgcctgttatccc

SEQ ID NO: 493472 - DNA, 75 bp, synthetic construct
  source 1..75: mol_type = other DNA
atgccctgctgcgtgcgcctgagcctgttaccctggtagccatcggcccgttaaccaatattgcgctgttacttt

SEQ ID NO: 493473 - DNA, 75 bp, synthetic construct
  source 1..75: mol_type = other DNA
gactatctcgctactttgccggagttgaatcgcaccggaaaaatgctccacgcgctgtttagccactatcgcagc

SEQ ID NO: 493474 - DNA, 75 bp, synthetic construct
  source 1..75: mol_type = other DNA
caggtcgatccgcgcaaagccgccgtcgaagccgctatcgcccgcgccaaagcacgcaagctggaacagcaacag

SEQ ID NO: 493475 - DNA, 75 bp, synthetic construct
  source 1..75: mol_type = other DNA
ccgtgttttgtggcggtagaaacgcagggtgaatttactgcgggtacgacagtcgtcgatattgacggtcggctg

SEQ ID NO: 493476 - DNA, 75 bp, synthetic construct
  source 1..75: mol_type = other DNA
actaccgtagcggcagtatgcaaagtggactacgtatgcacgatctttgcgctattgcctggctggtgcgcccgg

SEQ ID NO: 493477 - DNA, 75 bp, synthetic construct
  source 1..75: mol_type = other DNA
tgccgatccagaagcggctgcctgtgtcttccgtagcggatcgaaattgtcatgtgcggtctggatgtcaccaat

SEQ ID NO: 493478 - DNA, 75 bp, synthetic construct
  source 1..75: mol_type = other DNA
aaagcagcatccgtaacgcagtgacctatggtggcggtacgaaagaggatgcagccgaaacactggatgccttgc

SEQ ID NO: 493479 - DNA, 75 bp, synthetic construct
  source 1..75: mol_type = other DNA
gctattccaccgaaaacgaagaatggttgaggcgctgggaggaagacaggaaaaaagccgcagctgatgccctgc

SEQ ID NO: 493480 - DNA, 75 bp, synthetic construct
  source 1..75: mol_type = other DNA
ttcgtcaagattctggcactgaatgaagctgccgccatcacggcgggaagcagtgatgaggccggaaataacgtg

SEQ ID NO: 493481 - DNA, 75 bp, synthetic construct
  source 1..75: mol_type = other DNA
agaacagattgatccgcgcaaagcggcagttgctgcggctattgcccgcgttcaggccaaaaaagccgctcagca

SEQ ID NO: 493482 - DNA, 75 bp, synthetic construct
  source 1..75: mol_type = other DNA
gatcacgttgacctacggcacggtatccacgctgcactacacgattcaggcgtactgcaaaccgggtgacagcgt

SEQ ID NO: 493483 - DNA, 75 bp, synthetic construct
  source 1..75: mol_type = other DNA
ggcggatgcatccggtactgtggccgatgccataagctgggcgggtgaaaaatttccggggctgaccacagcagt

SEQ ID NO: 493484 - DNA, 75 bp, synthetic construct
  source 1..75: mol_type = other DNA
agttatttttttttccaatgtcaccgcggtatcaaaacaagataaaggaatatcaattgatgcatcaaatatcga

SEQ ID NO: 493485 - DNA, 75 bp, synthetic construct
  source 1..75: mol_type = other DNA
cgggtggggcatattcagcgggacttttaagccaggttaatgattctgaaaagatggtaaataacacccgtcttg

SEQ ID NO: 493486 - DNA, 75 bp, synthetic construct
  source 1..75: mol_type = other DNA
gtggcagtccggttcattgatgacgggatcagtaccgacggtgatatggggcaaatggtggtcaccatcctgtcg

SEQ ID NO: 493487 - DNA, 75 bp, synthetic construct
  source 1..75: mol_type = other DNA
aaggttgatcgcgcttttagcgacaaggcatccggcagttcaacagaccgggaagggctggatttgctgaggatg

SEQ ID NO: 493488 - DNA, 75 bp, synthetic construct
  source 1..75: mol_type = other DNA
ggacagcggcaaaggtaaaattattgatggcagccggatctgtaatgaattgggatttgaataccagtatcccga

SEQ ID NO: 493489 - DNA, 75 bp, synthetic construct
  source 1..75: mol_type = other DNA
acagtggacgagtattaaaagaacttgaagactggctgcacaatttacccggtacttcagtcgatattctgcgtc

SEQ ID NO: 493490 - DNA, 75 bp, synthetic construct
  source 1..75: mol_type = other DNA
aacggcattctgcgtgagatgatctacgtaccgggcgatctcttctctgtgaaccatctcaccgctcagaacgtg

SEQ ID NO: 493491 - DNA, 75 bp, synthetic construct
  source 1..75: mol_type = other DNA
gtgaggaaaacttctggatagaccggatttcgacggatgatggcggaagctgtcatctctggcttgggcgtggcg

SEQ ID NO: 493492 - DNA, 75 bp, synthetic construct
  source 1..75: mol_type = other DNA
ctggtgcaacagatattgcccgccggctcagtattgcccgttccactgtttataaaattctggaagatgagagcc

SEQ ID NO: 493493 - DNA, 75 bp, synthetic construct
  source 1..75: mol_type = other DNA
atacccgcgctgaactgtggacggggatgcagtctgagtatggcctctggcaggcgtcacaaaaaccacgacccg

SEQ ID NO: 493494 - DNA, 75 bp, synthetic construct
  source 1..75: mol_type = other DNA
gccagaagctgaacctgccccgcttcctgctgaagagatccaggcagaacacgacgccagcccattggttgacga

SEQ ID NO: 493495 - DNA, 75 bp, synthetic construct
  source 1..75: mol_type = other DNA
acatcaacattcctgtgcgccacaatgatccccagagcatcgataatattcgcggtgccctgcattatctggcga

SEQ ID NO: 493496 - DNA, 75 bp, synthetic construct
  source 1..75: mol_type = other DNA
catgtgtcatgtattcagtgcgttgcgcgtgacaaaggatattgcacatcgcgatccattaaccaatatttttaa

SEQ ID NO: 493497 - DNA, 75 bp, synthetic construct
  source 1..75: mol_type = other DNA
gtcttatttattttattaaaactgtcattatcattcagcaacctattgatggccgtctgactagaagtgtcattc

SEQ ID NO: 493498 - DNA, 75 bp, synthetic construct
  source 1..75: mol_type = other DNA
tgctcgtcagcacggcgctggcggcactgcttaccaccgccagcctgacggcgcatgcatcggtcaccccggatc

SEQ ID NO: 493499 - DNA, 75 bp, synthetic construct
  source 1..75: mol_type = other DNA
ccataccacgtcatcatcagcgatgccagcacacagaagaaagggccgaccgcagccgggtttaaaccgctggtg

SEQ ID NO: 493500 - DNA, 75 bp, synthetic construct
  source 1..75: mol_type = other DNA
tcattaggggattcatcagccttacgcatggatttcttctacaggaaagatacgcctgatttcttacaacctgat

SEQ ID NO: 493501 - DNA, 75 bp, synthetic construct
  source 1..75: mol_type = other DNA
tgacgcattatggagaacggatgcggcagaaactgggcttcatgacggagcaaaaagaggataacgcgctactga

SEQ ID NO: 493502 - DNA, 75 bp, synthetic construct
  source 1..75: mol_type = other DNA
agacggtcggctttgctcacggggtaatgaataccgacaacatgtctcttctcgggctgacgctcgattacgggc

SEQ ID NO: 493503 - DNA, 75 bp, synthetic construct
  source 1..75: mol_type = other DNA
gtggaaaataacaccagtcttgaaaccacagataaaacgaacattgttacctatgggaaaaatgcagtaggagtt

SEQ ID NO: 493504 - DNA, 75 bp, synthetic construct
  source 1..75: mol_type = other DNA
ccaaacgatcttttagcacgcgttggcggagaagagtttggtgtcatgctgacggagatcgatcatgaaaatgcg

SEQ ID NO: 493505 - DNA, 75 bp, synthetic construct
  source 1..75: mol_type = other DNA
atcgtgctctgggtgaagatatcccgatcaaaatggtctacgatctgacggcgacttttgcgcagcaaatgcagg

SEQ ID NO: 493506 - DNA, 75 bp, synthetic construct
  source 1..75: mol_type = other DNA
caacaagacgaggttagcgatagtgagcgtcagcaactgatgcaaagcgttaacccggctctggtgttgcgcaac

SEQ ID NO: 493507 - DNA, 75 bp, synthetic construct
  source 1..75: mol_type = other DNA
ctttgatcgcaaaagcggcaaaggattcattatcccctccgacggtcgtaaagaagtccaggtccatatttccgc

SEQ ID NO: 493508 - DNA, 75 bp, synthetic construct
  source 1..75: mol_type = other DNA
tgggccagacctgtccgtaactggctttggggatatactccgtttgattcagtaagttttggagagaatcggaac

SEQ ID NO: 493509 - DNA, 75 bp, synthetic construct
  source 1..75: mol_type = other DNA
agaaacaacggtgttctgtcagtgtccaccggcaagtgcacgcagccagtaaagctgatgttcagcctcttccag

SEQ ID NO: 493510 - DNA, 75 bp, synthetic construct
  source 1..75: mol_type = other DNA
gaaacagaatttatgtcagaggctatgatgagttactgctcccacacctggttgaagcactgaacagtaatccgg

SEQ ID NO: 493511 - DNA, 75 bp, synthetic construct
  source 1..75: mol_type = other DNA
ttgatttttctgatatgagttctgggcaaattgctattctagctcaaattggcgccatctctgactctattacta

SEQ ID NO: 493512 - DNA, 75 bp, synthetic construct
  source 1..75: mol_type = other DNA
tgcaggcgaaaaaggcattgtcgagaaagagggatatcagcttgatacccgacgccaggcgcaggcggcgtatcc

SEQ ID NO: 493513 - DNA, 75 bp, synthetic construct
  source 1..75: mol_type = other DNA
tcaccgtttgcttttacaatcacccttgagaagtgtcctggtgcaaaagaagaaacgcaagaaatgctatgggca

SEQ ID NO: 493514 - DNA, 75 bp, synthetic construct
  source 1..75: mol_type = other DNA
ttgttgtttctgcgatgccgacgagttacctgaaaaaatcaggaaacagttggctgatgctcttcgagtgcgact

SEQ ID NO: 493515 - DNA, 75 bp, synthetic construct
  source 1..75: mol_type = other DNA
tggtagatggcggcggcttacagcgtaaaaccgtgaccagtattctgatggcctgggtgtttacccttccggctg

SEQ ID NO: 493516 - DNA, 75 bp, synthetic construct
  source 1..75: mol_type = other DNA
catctatacccgcgcgatgcgttctcagctcgcagtggttatggcggcagtgttcaacttcctgggtgttttgct

SEQ ID NO: 493517 - DNA, 75 bp, synthetic construct
  source 1..75: mol_type = other DNA
agagcacaagtgcgtaaactttttgacagctatcagcaaaaaacaaatatatcccgtaacgaggcaaacagatgg

SEQ ID NO: 493518 - DNA, 75 bp, synthetic construct
  source 1..75: mol_type = other DNA
gctaaagaacgtgaacagcgtgatgcacgtaaacgtgaactgcttgagatgatcgccagtgagggattttcagtt

SEQ ID NO: 493519 - DNA, 75 bp, synthetic construct
  source 1..75: mol_type = other DNA
aacatcgttgtatcagggtctaccggttcgggtaaatcaacgtttacccgctccctgcttcgggaagtgccttat

SEQ ID NO: 493520 - DNA, 75 bp, synthetic construct
  source 1..75: mol_type = other DNA
gaatcacggtctccttgatattttgtcattacgtgcaaaaattgatgataatatagataatgacgattcagacac

SEQ ID NO: 493521 - DNA, 75 bp, synthetic construct
  source 1..75: mol_type = other DNA
ctgcaaaaagagggattaatcaaaagcatcggcgtctgtaacttccagatccaccacctgcaacgcctgattgat

SEQ ID NO: 493522 - DNA, 75 bp, synthetic construct
  source 1..75: mol_type = other DNA
agtaatgaggaagtaatcaccgccattcaaaaagcgttagaagtgggttatcgctcgattgataccgccgcggcc

SEQ ID NO: 493523 - DNA, 75 bp, synthetic construct
  source 1..75: mol_type = other DNA
ccgcctggctggcattggcaatcgtgctggaaatcgttgctaacgtctttttgaaattttctgacggctttcgtc

SEQ ID NO: 493524 - DNA, 75 bp, synthetic construct
  source 1..75: mol_type = other DNA
atgttgggtggagcggacaatccaaatggtgaattactgtcttatatcattggcgctgacaatatcgcgttattg

SEQ ID NO: 493525 - DNA, 75 bp, synthetic construct
  source 1..75: mol_type = other DNA
ggcagcggcggccaggcacaacgggcggtaaattaccgtggaatgactggcgcaatgccacgacctggcgcaaag

SEQ ID NO: 493526 - DNA, 75 bp, synthetic construct
  source 1..75: mol_type = other DNA
tggggaccgcgacattaatcagcgtgaccgttttgctgattgccagcctgtttattcgccatgcctggtgtcgtt

SEQ ID NO: 493527 - DNA, 75 bp, synthetic construct
  source 1..75: mol_type = other DNA
caaccgggtatttttaatcggcagcgataacctctgcatggccaatttcggtctgcgtgatatgccagtggaacg

SEQ ID NO: 493528 - DNA, 75 bp, synthetic construct
  source 1..75: mol_type = other DNA
aaggaagctgcccgtcattatttgtgcggacggatacggttcgtgccgtgcggcgtggtgacacgctgaccatta

SEQ ID NO: 493529 - DNA, 75 bp, synthetic construct
  source 1..75: mol_type = other DNA
taaatactacaaggtcgacatgaaagaggcgcagaaaccggacaccgccagttaccgcacctttaacgaattttt

SEQ ID NO: 493530 - DNA, 75 bp, synthetic construct
  source 1..75: mol_type = other DNA
ggaaaatatttctgaattatccacatcatcggaaccatcgcaacagggggtatttcctgtaatatgtactcgact

SEQ ID NO: 493531 - DNA, 75 bp, synthetic construct
  source 1..75: mol_type = other DNA
ctaacgctctgccgtcgacggacaaagcggtcagcgataatgacgatatgatgattctggtcgtggatgatcatc

SEQ ID NO: 493532 - DNA, 75 bp, synthetic construct
  source 1..75: mol_type = other DNA
cgaatgttatcgaatcttattgttaacgccattcgatattcaccagaaaaatcgtgcattcatataaccagtttt

SEQ ID NO: 493533 - DNA, 75 bp, synthetic construct
  source 1..75: mol_type = other DNA
gcgcattaccgagagaactaaaacctcttgggcaggcgttgaataaaatgcaccaagctttagtcaaagattttg

SEQ ID NO: 493534 - DNA, 75 bp, synthetic construct
  source 1..75: mol_type = other DNA
cagatcaagcagttgttaattgatggggtaaatccagatacgttacctgtgtactttaaccggatgatggatgtt

SEQ ID NO: 493535 - DNA, 75 bp, synthetic construct
  source 1..75: mol_type = other DNA
ctatctggatgggcaacgtcacaagaactcttatcagatatccaggcaactgggagatatctggaggcggatcac

SEQ ID NO: 493536 - DNA, 75 bp, synthetic construct
  source 1..75: mol_type = other DNA
tgggtaatggaatatacaccagacaaagggcttcatattcattttatcggctatctggatgggcaacgtcacaag

SEQ ID NO: 493537 - DNA, 75 bp, synthetic construct
  source 1..75: mol_type = other DNA
aagagctggaaaatatttcgcggttaacagagaacatactgtttcttgccagggcagataaaaacaatgttttgg

SEQ ID NO: 493538 - DNA, 75 bp, synthetic construct
  source 1..75: mol_type = other DNA
ggcagcgggattttccccgctggtgatatcgccaaaaacctccgtaccgttaaaggtcaaaatggatagcgtccc

SEQ ID NO: 493539 - DNA, 75 bp, synthetic construct
  source 1..75: mol_type = other DNA
cccaacacgttacagattgcgctgcaaacgcgcatcaagctgttctggcgaccaaaggcgctggaaaacgtcagc

SEQ ID NO: 493540 - DNA, 75 bp, synthetic construct
  source 1..75: mol_type = other DNA
ctgacggtcctgccgccggtgcagcgcatcgattccatgatgaacggccaggtgaaggtacagggtatgccagat

SEQ ID NO: 493541 - DNA, 75 bp, synthetic construct
  source 1..75: mol_type = other DNA
atgaaaagattatctataaccgtccgtttaaccttgctttttatattgctgctgtctgttgctggcgctggaatt

SEQ ID NO: 493542 - DNA, 75 bp, synthetic construct
  source 1..75: mol_type = other DNA
cgggcttcctgaaaaaagtaaccggggtcgaccacgactggacagccccctgccggggatatgtgctctggtgta

SEQ ID NO: 493543 - DNA, 75 bp, synthetic construct
  source 1..75: mol_type = other DNA
acaataaaggaattaacgttactggcttccttacacctattttttttcttgatcgatttacggcgtcatcaggct

SEQ ID NO: 493544 - DNA, 75 bp, synthetic construct
  source 1..75: mol_type = other DNA
atgaaagataattggcttaaggaacgattaactaaagtaaaacaggattcacatctctggagtgcatttatagac

SEQ ID NO: 493545 - DNA, 75 bp, synthetic construct
  source 1..75: mol_type = other DNA
cccccttctttcgtgctcaaattgaaaaaaataatcaatacaattcagtttggggcaaacactaccgcaagcttg

SEQ ID NO: 493546 - DNA, 75 bp, synthetic construct
  source 1..75: mol_type = other DNA
caaaaatttttggtgaactaattacccttattgagccatctaaacgggctggtgagccagaatcgcttagcgtat

SEQ ID NO: 493547 - DNA, 75 bp, synthetic construct
  source 1..75: mol_type = other DNA
caaatttgtgatccgatcgcttactccctgcaggagggtaaggatgagagtgaaaaacgtcgcgagttgaaaaag

SEQ ID NO: 493548 - DNA, 75 bp, synthetic construct
  source 1..75: mol_type = other DNA
aataaaggcaggtatttttaaacagatatgcgaggatgccgcctttggtcatgctggtgcgcaggaaatgttgga

SEQ ID NO: 493549 - DNA, 75 bp, synthetic construct
  source 1..75: mol_type = other DNA
gacccggatacagggaaaggctgggaagcgtggagcgattcgtggcaggcatggcgtcaggatcatggttttgtt

SEQ ID NO: 493550 - DNA, 75 bp, synthetic construct
  source 1..75: mol_type = other DNA
tagtgtaccgaataacctttatttaattggtaccatgaacactgctgatcattcgcttactgcacttgatactgc

SEQ ID NO: 493551 - DNA, 75 bp, synthetic construct
  source 1..75: mol_type = other DNA
aacagtaaggccgatagagcaaacgttctggcgtgaatttggcacaatccccgtctcatgggaacctttgtatgc

SEQ ID NO: 493552 - DNA, 75 bp, synthetic construct
  source 1..75: mol_type = other DNA
ccgaggaacaaaaagagaactgcctgcaactggtgatgctgtggcaagcccgccataataccgaagcacagcata

SEQ ID NO: 493553 - DNA, 75 bp, synthetic construct
  source 1..75: mol_type = other DNA
ctgtagaaccaatattaacaagaataagtaacagaaaatccttcttcactatggacagtgaggatatggatgccc

SEQ ID NO: 493554 - DNA, 75 bp, synthetic construct
  source 1..75: mol_type = other DNA
aaacttttctgaagccacgattcggcaggtatggtatgaacgtgacaatggtgtctcaagcctgatgcaaggagg

SEQ ID NO: 493555 - DNA, 75 bp, synthetic construct
  source 1..75: mol_type = other DNA
attgaaggtttaagagctgagactactgatgacggtaatgtaaaatacgaaataaaggcaggtatttttaaacag

SEQ ID NO: 493556 - DNA, 75 bp, synthetic construct
  source 1..75: mol_type = other DNA
tattattctgggccgtagcaggcttcccgaaaaaagtaaccgcggccgaccgcgactggacagcaccctgccggg

SEQ ID NO: 493557 - DNA, 75 bp, synthetic construct
  source 1..75: mol_type = other DNA
tgcagacgcgcattaagttgttctggcgaccaaaggcgctggaaaacgtcagcatgaaaaatccgtggcagcata

SEQ ID NO: 493558 - DNA, 75 bp, synthetic construct
  source 1..75: mol_type = other DNA
tcattgggaaaagcatacgaccagatgaccttttagcgcgcgttggcggcgaagagtttggcgtcttgctgacgg

SEQ ID NO: 493559 - DNA, 75 bp, synthetic construct
  source 1..75: mol_type = other DNA
atggaaaaagactatttgggaattagtagtactgtattagtgagcttattgtttgggcttgcattggttttggtg

SEQ ID NO: 493560 - DNA, 75 bp, synthetic construct
  source 1..75: mol_type = other DNA
atgcttaaatcttacacaccaaactggttttttaccgctttacttgaccatcacatcgatcagttggtcgcacgc

SEQ ID NO: 493561 - DNA, 75 bp, synthetic construct
  source 1..75: mol_type = other DNA
tgacatcacggctaaagatgccgttaaccgcgccaccgaaacccgcgccctgcttcagtccgcttatggccgttt

SEQ ID NO: 493562 - DNA, 75 bp, synthetic construct
  source 1..75: mol_type = other DNA
ggtcaggtcgttcctggtggtcggctgggcgtgaagatttacgaaataatgcatgacgggcaggtccaaaaatga

SEQ ID NO: 493563 - DNA, 75 bp, synthetic construct
  source 1..75: mol_type = other DNA
tgtgttgatgtcgttggagtccgggccgctcatgacgatgattattctgggcactgccggaattgccgcttccag

SEQ ID NO: 493564 - DNA, 75 bp, synthetic construct
  source 1..75: mol_type = other DNA
ggactgtgcgcatacggttgcagtgaagttcctgaacgacctgctgcagggcgtcctcgtaagcctcacttctga

SEQ ID NO: 493565 - DNA, 75 bp, synthetic construct
  source 1..75: mol_type = other DNA
ccgctggcggtactgccgccggtgcagcgtattgacgctatgatgaacggccaggtgaagattcaggcgctgccg

SEQ ID NO: 493566 - DNA, 75 bp, synthetic construct
  source 1..75: mol_type = other DNA
ccgctggcggtactgccgccggtgcagcgtattgacgccatgatgaacggtcaggtgaagattcaggcgctgccg

SEQ ID NO: 493567 - DNA, 75 bp, synthetic construct
  source 1..75: mol_type = other DNA
ttctatttcaacgtgcgcgaaattccgccgaaatcaaataaaccgaacacactgcagattgcgctgcagacgcgt

SEQ ID NO: 493568 - DNA, 75 bp, synthetic construct
  source 1..75: mol_type = other DNA
atgtttaatctgactaacactgcaaaaatcgttgtcccggcactggcgctgctggcgacagcggtcagtttctcc

SEQ ID NO: 493569 - DNA, 75 bp, synthetic construct
  source 1..75: mol_type = other DNA
cggaatgctggcggtctattacgcataactgtggttcggcgcaccgttgtacatatcagccgcattatgcgtaca

SEQ ID NO: 493570 - DNA, 75 bp, synthetic construct
  source 1..75: mol_type = other DNA
tggcaaccggtgctctggtggcgatgggtaacgatgagatcccgcaggacggcaagaaacagccccttgagctgg

SEQ ID NO: 493571 - DNA, 75 bp, synthetic construct
  source 1..75: mol_type = other DNA
gtggtgcgcacgtgggaagtgcctctgcaaatcacgatcagcctgttactggatgccagcctggaggccgcagca

SEQ ID NO: 493572 - DNA, 75 bp, synthetic construct
  source 1..75: mol_type = other DNA
tggggaaatgaaccgggcgtgctggctggtcgcctttgtagccgtgcggtaaccattgctgacagtccggcgcgg

SEQ ID NO: 493573 - DNA, 75 bp, synthetic construct
  source 1..75: mol_type = other DNA
accaggtaaaccagctgctgggtgaaaccagtgaagtggaacgcacgctgctgtttatcggtacgggtaccaaaa

SEQ ID NO: 493574 - DNA, 75 bp, synthetic construct
  source 1..75: mol_type = other DNA
atccataaattgcctgccgatcgtgaatcgatattttatttcaatgtgcgtgaaattccgccgaaatcgaacaaa

SEQ ID NO: 493575 - DNA, 75 bp, synthetic construct
  source 1..75: mol_type = other DNA
attgcgtgtttgccatgcggtgcgcaaagagccggatattcttacccgccaacggatgattgccgagatatttac

SEQ ID NO: 493576 - DNA, 75 bp, synthetic construct
  source 1..75: mol_type = other DNA
agtctattcctaccgatcgtatccgttcaacaggcgtattaactggcccggattggttgcggatggggctttctt

SEQ ID NO: 493577 - DNA, 75 bp, synthetic construct
  source 1..75: mol_type = other DNA
attacgttgctgaactgaccacgctacaggaaggcatcgccgccccacaaatcatgctggttccggaaatttttg

SEQ ID NO: 493578 - DNA, 75 bp, synthetic construct
  source 1..75: mol_type = other DNA
ccgtctgtgtaacagcgccgtcaccattgctgacagtccggcgcgtgtggcaaccgggagcctgtccgcactgaa

SEQ ID NO: 493579 - DNA, 75 bp, synthetic construct
  source 1..75: mol_type = other DNA
atgaatcttgatgacattatcaacagcatgacgcctgaggtataccagcgtttgtcaacagccgttgaactgggt

SEQ ID NO: 493580 - DNA, 75 bp, synthetic construct
  source 1..75: mol_type = other DNA
tgatgtggttatggatgcacaggccaccctctcggtggaaggcgttgtcgttgttcgcgctaacgcctcaggtaa

SEQ ID NO: 493581 - DNA, 75 bp, synthetic construct
  source 1..75: mol_type = other DNA
agaatttccttcagtccgcactgaccaatgccgggcagaacgcctttttctatgttgccgttctgccggaagcag

SEQ ID NO: 493582 - DNA, 75 bp, synthetic construct
  source 1..75: mol_type = other DNA
tcgtctgtgtaacagcgccgtcaccattgctgacagcccggcacgtgtggcaaccggggcgctgtccgcactgaa

SEQ ID NO: 493583 - DNA, 75 bp, synthetic construct
  source 1..75: mol_type = other DNA
atgagcaccatcttgaaatgggcgggaaataaaaccgccgtaatgtccgaactgaaaaaacatcttcctgctggt

SEQ ID NO: 493584 - DNA, 75 bp, synthetic construct
  source 1..75: mol_type = other DNA
tgaatcgtttatatctcgcgccagagctttatttgaggaagcaaacagggaggtgacttattacaacataaggca

SEQ ID NO: 493585 - DNA, 75 bp, synthetic construct
  source 1..75: mol_type = other DNA
agcaatccagaacgaagcgcaggagatccactaccccagctatcttgttgcggatattaatcctgatttaatcaa

SEQ ID NO: 493586 - DNA, 75 bp, synthetic construct
  source 1..75: mol_type = other DNA
tgaaaaagaaattcgcgcatttgcagaaaaagcccagcgagcaacgtttatctgcgccagctttgatgaaacgct

SEQ ID NO: 493587 - DNA, 75 bp, synthetic construct
  source 1..75: mol_type = other DNA
gtaataaaaccgccattatgtccgaactgaaaaaacaccttcctgcaggcccgcgactggttgaacctttcgcgg

SEQ ID NO: 493588 - DNA, 75 bp, synthetic construct
  source 1..75: mol_type = other DNA
tgaggcgtttatatctcgtgccagagctttatttgaggaagcaaacagagaggtggcttattacaacataaggca

SEQ ID NO: 493589 - DNA, 75 bp, synthetic construct
  source 1..75: mol_type = other DNA
ggcgatgttgaaggcgggagatgtggtgtattgcgatccgccatatgacggtaagttttccggctatcacactga

SEQ ID NO: 493590 - DNA, 75 bp, synthetic construct
  source 1..75: mol_type = other DNA
tggtttcactgaagatgatcagtatcacctggcatctattcttgaacatcggtcatcagaaggacatccggtcat

SEQ ID NO: 493591 - DNA, 75 bp, synthetic construct
  source 1..75: mol_type = other DNA
acccgccgacggtgaacacctactggcgtcgtcgtggcagtacatattttatctcggaggagggaaagcgttatc

SEQ ID NO: 493592 - DNA, 75 bp, synthetic construct
  source 1..75: mol_type = other DNA
ccgtggattatgtcgctataacaagagcgggcatttcaacattccgtacggtaattataaaaatccgtatttccc

SEQ ID NO: 493593 - DNA, 75 bp, synthetic construct
  source 1..75: mol_type = other DNA
tatgccgctataaccgtcgtggcatgttcaacgtgccatttggcaaatataaaaagccatatttcccggcagatg

SEQ ID NO: 493594 - DNA, 75 bp, synthetic construct
  source 1..75: mol_type = other DNA
gatattaacccagacctgataaatctttttaagcatattgcatttgactgcgagaaatttatttcaaattcaaaa

SEQ ID NO: 493595 - DNA, 75 bp, synthetic construct
  source 1..75: mol_type = other DNA
tctataaaaagattgccgctgattgcgaatcatttatatctcgtgccagagtcttatttggggaagcaaacaggg

SEQ ID NO: 493596 - DNA, 75 bp, synthetic construct
  source 1..75: mol_type = other DNA
gcaactgatcgcgcaatgaaagctctgggcgttcagcattctctgcaggacgttaaagcattgggtattgccgga

SEQ ID NO: 493597 - DNA, 75 bp, synthetic construct
  source 1..75: mol_type = other DNA
atgctcagcaacgggtattacgccctgccattttgtggaacgacgggcgctgtgcgcaagagtgcactttgctgg

SEQ ID NO: 493598 - DNA, 75 bp, synthetic construct
  source 1..75: mol_type = other DNA
cagcagcttctgggcggcgcaccgtttatcatcagcggtgcctgcgggatgttccgtactgatgtattgcgtaag

SEQ ID NO: 493599 - DNA, 75 bp, synthetic construct
  source 1..75: mol_type = other DNA
atccacggattttttcagttaggtggtatcagcgaggccgcgcgatcggcactacgggatgttgcctggagagcg

SEQ ID NO: 493600 - DNA, 75 bp, synthetic construct
  source 1..75: mol_type = other DNA
ctggattggtgagcaaaggaaggggtatgagcttcatgctgataagcttttctggcatatcaagaagcttggttg

SEQ ID NO: 493601 - DNA, 75 bp, synthetic construct
  source 1..75: mol_type = other DNA
ctaacctgcagcaggatctacgccgagctggcatcgagccgtgggcatgggtcgttaataacagcctggcagctg

SEQ ID NO: 493602 - DNA, 75 bp, synthetic construct
  source 1..75: mol_type = other DNA
aatgcccgagaagaaggaatggttctggaaactgaattgtttaccttcattctgcaacgtgtagcacaggaaatt

SEQ ID NO: 493603 - DNA, 75 bp, synthetic construct
  source 1..75: mol_type = other DNA
ggaacaggaactggcctggcatgcggggatcagcgcctggcgcggagcaacacgaattaacgacacctctattgg

SEQ ID NO: 493604 - DNA, 75 bp, synthetic construct
  source 1..75: mol_type = other DNA
atgaacgtcaataagaaaaaattggccgatatttttggcgttgatgtcaggaccatcaccgcctggcagagtcag

SEQ ID NO: 493605 - DNA, 75 bp, synthetic construct
  source 1..75: mol_type = other DNA
gtgctttatggcgttggtatttatctcactacctggtttaatgaattcatcaccaccgggccacatggtgtggtg

SEQ ID NO: 493606 - DNA, 75 bp, synthetic construct
  source 1..75: mol_type = other DNA
cggtagatgcgggtacgcgtgctgcgcgctttatgttgcaggatctgctgggcgtggtgtctcctggcctgaagc

SEQ ID NO: 493607 - DNA, 75 bp, synthetic construct
  source 1..75: mol_type = other DNA
tcgagacggagttatttacctacatctttcagcgagtggcacagaatatatcagggatccttgtccgtgtccctc

SEQ ID NO: 493608 - DNA, 75 bp, synthetic construct
  source 1..75: mol_type = other DNA
atagtttctgaaccagaggagttgcacatcccgcttccttatggccctcagggactgatttataaccgttatgtt

SEQ ID NO: 493609 - DNA, 75 bp, synthetic construct
  source 1..75: mol_type = other DNA
taatactccagaagctgttaaagggtatgaagatgctgacaaagaactggagatggtagaaatgttatacgaaat

SEQ ID NO: 493610 - DNA, 75 bp, synthetic construct
  source 1..75: mol_type = other DNA
gggaaaacctgcagcacaggccggtgatattcctcccccgaccactttctggcccgccggtggcggacaggctcc

SEQ ID NO: 493611 - DNA, 75 bp, synthetic construct
  source 1..75: mol_type = other DNA
atgtttccagtgaacgtgccatcgttcggacccgctcaatcagctgcaagctgggtgatgacaacatcgaccaga

SEQ ID NO: 493612 - DNA, 75 bp, synthetic construct
  source 1..75: mol_type = other DNA
gaaccgttgatccgattgatcatcgccgggccgatcctgatgggctgtatgtttttgatgcgcacccatcggttg

SEQ ID NO: 493613 - DNA, 75 bp, synthetic construct
  source 1..75: mol_type = other DNA
atggcggtagcactggcgctcggcattggcaccatgattggctggcgtcgtgtagcgatgaccatcggtgagaag

SEQ ID NO: 493614 - DNA, 75 bp, synthetic construct
  source 1..75: mol_type = other DNA
tttattaaaagataagggaaccatacctgatgggtatttcattatatttaatgaaattgcaggtatgatggtaga

SEQ ID NO: 493615 - DNA, 75 bp, synthetic construct
  source 1..75: mol_type = other DNA
ggcagcctgagttcacagataaaacactctccaggaaacccggggcggttcatgttgtatctggagtaaaacctg

SEQ ID NO: 493616 - DNA, 75 bp, synthetic construct
  source 1..75: mol_type = other DNA
atgctggcggaatatgcgccaaaaggtaagcgcggaattatctcctcatttgtagctatgggaactaactgcgga

SEQ ID NO: 493617 - DNA, 75 bp, synthetic construct
  source 1..75: mol_type = other DNA
ctggctggttcaatttggaaagatcctcaggactggatgagggggctaaacaaaaaagaacgcttcttatctgcc

SEQ ID NO: 493618 - DNA, 75 bp, synthetic construct
  source 1..75: mol_type = other DNA
ggcccgccggtggcggacaggctcctgccgccccggtgatgaccccggttcagcgtccgggaatgatggacagcc

SEQ ID NO: 493619 - DNA, 75 bp, synthetic construct
  source 1..75: mol_type = other DNA
tgttaagttaacatgtaccgcacctacagatgtaaaaattaaattatcaacaccaaaaacacctaattataataa

SEQ ID NO: 493620 - DNA, 75 bp, synthetic construct
  source 1..75: mol_type = other DNA
atggcgccgttcgtctccccgctggtggaaggtaagctggtcgaatcccgtaaataccagaccaataccttcaaa

SEQ ID NO: 493621 - DNA, 75 bp, synthetic construct
  source 1..75: mol_type = other DNA
taccggtggtcaggctgctggcgttctttcatgaagagctaagcgagcaacggccaggtcgcgtgccgcagaccg

SEQ ID NO: 493622 - DNA, 75 bp, synthetic construct
  source 1..75: mol_type = other DNA
aacttccagcttgatggcaaaacgatcgagcaacgcccgctggttgtgttgcaagaaatcccggaaggtaacttc

SEQ ID NO: 493623 - DNA, 75 bp, synthetic construct
  source 1..75: mol_type = other DNA
atgaataccattttttccgctcgtatcatgaagcgcctggcgctcaccacggctctttgcacagcctttatctct

SEQ ID NO: 493624 - DNA, 75 bp, synthetic construct
  source 1..75: mol_type = other DNA
tacgtgacggctgccgggctgtgcgtactggagaagcagggagttcgggccggtgaggtcgatattatctactct

SEQ ID NO: 493625 - DNA, 75 bp, synthetic construct
  source 1..75: mol_type = other DNA
ctaaaattggcgaacgtcagaccaggaactgtataaagagatgcagaaacgtggctgggatgtcaaagaaagcgc

SEQ ID NO: 493626 - DNA, 75 bp, synthetic construct
  source 1..75: mol_type = other DNA
ctctttgcacagcctttatctctgctgcacatgccgatgacctgaatatcaaaaccatgatcccgggtgtaccgc

SEQ ID NO: 493627 - DNA, 75 bp, synthetic construct
  source 1..75: mol_type = other DNA
gtactattaacttccagcttgacggtaaaaccattgagcaacgtccgctggtggtgttgcaggaaatcccggaag

SEQ ID NO: 493628 - DNA, 75 bp, synthetic construct
  source 1..75: mol_type = other DNA
acatttactctacgctaaatcgctaccatcccgccgattttgctgaatcacaggccacgaaagagctgcgacaaa

SEQ ID NO: 493629 - DNA, 75 bp, synthetic construct
  source 1..75: mol_type = other DNA
caattctggcgctgctaatgaccattttagtcatcccctggctggacaatattgtcgaattgctgtttgtgctgg

SEQ ID NO: 493630 - DNA, 75 bp, synthetic construct
  source 1..75: mol_type = other DNA
aagctgcgtggcaacggtaacctacatttactcgacgctgaatcgctacgatcccaccgcgtttgctgactcgct

SEQ ID NO: 493631 - DNA, 75 bp, synthetic construct
  source 1..75: mol_type = other DNA
cagatggtcttccccggcgtaaagcgggcagaggatgaagaagtggtctgtgaatcactggttatgtcggcgctt

SEQ ID NO: 493632 - DNA, 75 bp, synthetic construct
  source 1..75: mol_type = other DNA
gtggcgatcttgtttgtggtcgccacgatgctggaaatcgccagcctgtttttgatctacaaatggtcatatggc

SEQ ID NO: 493633 - DNA, 75 bp, synthetic construct
  source 1..75: mol_type = other DNA
gatccgcacacgccgccaacgcccgccgccaaaccgccgtcaatggtcgccgatgcctttactaatccggactat

SEQ ID NO: 493634 - DNA, 75 bp, synthetic construct
  source 1..75: mol_type = other DNA
atgccatacccgaccaatgttgttgcgctcgtagagagcgattttctggctaaggctcgtgatgaaatgatgaaa

SEQ ID NO: 493635 - DNA, 75 bp, synthetic construct
  source 1..75: mol_type = other DNA
tcaggaagtggtttatatcgataacaacgttccccaatgttcgtctctggagcatgaaagcccgcccgatacctt

SEQ ID NO: 493636 - DNA, 75 bp, synthetic construct
  source 1..75: mol_type = other DNA
tctgtaaaagaatcggtgagcgcctatgtcactaacctaaatacgcatccggcttacgcttctttccgcaaatca

SEQ ID NO: 493637 - DNA, 75 bp, synthetic construct
  source 1..75: mol_type = other DNA
cggtcagccttacgacagcatgcgttatgaactgggtgtagatgcaggttataccttcacctacagcgaagatca

SEQ ID NO: 493638 - DNA, 75 bp, synthetic construct
  source 1..75: mol_type = other DNA
cagtaacccggtggccgttgattacggcaccaaagcaccgccaccaaaatattcgtgggaatcgtcagcaaaaca

SEQ ID NO: 493639 - DNA, 75 bp, synthetic construct
  source 1..75: mol_type = other DNA
ctgggagggtactggttgtttggctcatcagatgagccggcaacgggcgggtcgcaggtgaaggcccaggggctg

SEQ ID NO: 493640 - DNA, 75 bp, synthetic construct
  source 1..75: mol_type = other DNA
atgttgataagaaatatagagtcgggacgatcttttgatgattatagtgttttggactgggatatggacataaat

SEQ ID NO: 493641 - DNA, 75 bp, synthetic construct
  source 1..75: mol_type = other DNA
atgacgattgcagaacgtcttatacagaaaggtttcgacgaaggttttaaagaaggttttaaagaaggttttaaa

SEQ ID NO: 493642 - DNA, 75 bp, synthetic construct
  source 1..75: mol_type = other DNA
cctgcggcaaataaaaaagcctttgcgttgtctggctggttaatgacgctactggttctggggattatgtttgcg

SEQ ID NO: 493643 - DNA, 75 bp, synthetic construct
  source 1..75: mol_type = other DNA
accagtatggtggcgacgatggctgcggcagaaagtggttggggtacgtctaagctggcacgtaacaacaacaat

SEQ ID NO: 493644 - DNA, 75 bp, synthetic construct
  source 1..75: mol_type = other DNA
taaacaaagatgatgcaatgatttatgtaaatgatgaagatgttgttgagtttgcactacgaatccacatgaagg

SEQ ID NO: 493645 - DNA, 75 bp, synthetic construct
  source 1..75: mol_type = other DNA
ttcagcaacgctaatgttgtatgtggacaggatatacagcatggcaagtgtaaacaaagatgatgcagtgattta

SEQ ID NO: 493646 - DNA, 75 bp, synthetic construct
  source 1..75: mol_type = other DNA
atcaagacagccagactgcctacatctactcttctgctcacttcgcgaacaacgtctttgttgatggtagcttga

SEQ ID NO: 493647 - DNA, 75 bp, synthetic construct
  source 1..75: mol_type = other DNA
tggcaacgggaaagtcagtgctggactgcgaaagttaattgaaatggcagatattccagagttaaaaaacgcatg

SEQ ID NO: 493648 - DNA, 75 bp, synthetic construct
  source 1..75: mol_type = other DNA
aaactgggtgatgctggttacgtgactccttacggcagcatttctggtctgttccagtctggtgatgactatcag

SEQ ID NO: 493649 - DNA, 75 bp, synthetic construct
  source 1..75: mol_type = other DNA
gcgtcagtaaagaagaccagaacctgctgaaaaaactgcgcagcgatatgttaagcaccattgagtacgcaccgg

SEQ ID NO: 493650 - DNA, 75 bp, synthetic construct
  source 1..75: mol_type = other DNA
gtgaacatgaatgccactggctacgaaatcacccgtacccgtgatgccatcaacaacgtggaagcttactttgag

SEQ ID NO: 493651 - DNA, 75 bp, synthetic construct
  source 1..75: mol_type = other DNA
ttgatcaacgtagccagatgcgccgcattatgctgtgcgtttctgacaccatcgacaaagtggtgaaattgcctg

SEQ ID NO: 493652 - DNA, 75 bp, synthetic construct
  source 1..75: mol_type = other DNA
ggacgcgtatcgcgctgatcctttccgctgtcggcgtggcgttttcccacggcgcgaacgatggtcagaaaggca

SEQ ID NO: 493653 - DNA, 75 bp, synthetic construct
  source 1..75: mol_type = other DNA
ggcctccagttcgcacaccttgattggtgcgattatcggcatcggtttaaccaacgcgctgttaaccggctcatc

SEQ ID NO: 493654 - DNA, 75 bp, synthetic construct
  source 1..75: mol_type = other DNA
taaaacggtaaccagcatcctgatggcgtgggtgtttactttaccggcggcgatttttctttctggtgggttgta

SEQ ID NO: 493655 - DNA, 75 bp, synthetic construct
  source 1..75: mol_type = other DNA
cggttacgacttcaaactgggtgatgctggttacgtgactccttacggcagcgtttctggtctgttccagtctgg

SEQ ID NO: 493656 - DNA, 75 bp, synthetic construct
  source 1..75: mol_type = other DNA
gaagtcaccaagattttctcttcactcattgtctctcccatcgtggggctggtgattgcgggggggctaattttt

SEQ ID NO: 493657 - DNA, 75 bp, synthetic construct
  source 1..75: mol_type = other DNA
aagaagaccagaacctgctgaaaaaactgcgcagcgatatgttaagcaccattgagtacgctccggtgtggatca

SEQ ID NO: 493658 - DNA, 75 bp, synthetic construct
  source 1..75: mol_type = other DNA
catgacgtatgcgcaaggcatggcggcgcagatgacggcggcggtatctattggccttgccagttatattgggat

SEQ ID NO: 493659 - DNA, 75 bp, synthetic construct
  source 1..75: mol_type = other DNA
gcgtggtttcgctattatcgccgtttaagattcgtcgcaatgccgaaagttgtatcgactgtggcaaatgcgcaa

SEQ ID NO: 493660 - DNA, 75 bp, synthetic construct
  source 1..75: mol_type = other DNA
ggagttgctgacgccgcacgctctacgggttcttccatgcaggcgcttggcaatatgggcagccacggcatgttt

SEQ ID NO: 493661 - DNA, 75 bp, synthetic construct
  source 1..75: mol_type = other DNA
ttttcgcaaaagtagacggggcgattacgtcaatggtgagcgccaatgttgccaccattatctctgatgtaacgc

SEQ ID NO: 493662 - DNA, 75 bp, synthetic construct
  source 1..75: mol_type = other DNA
ggctttaaccctgcctgataattttgcttcaatattggtgactcaaaataaaacctcaagcacagggatggcagc

SEQ ID NO: 493663 - DNA, 75 bp, synthetic construct
  source 1..75: mol_type = other DNA
gcggcgctcaacccgcacaagccatcatggctgtgatgcgaaaaatgatgattgagtcgcagccagacgaatcag

SEQ ID NO: 493664 - DNA, 75 bp, synthetic construct
  source 1..75: mol_type = other DNA
atgacagaacaaagtaccaaatcactacgtctcggggttgttgccgccattcttttggggctcgtaggaaccggg

SEQ ID NO: 493665 - DNA, 75 bp, synthetic construct
  source 1..75: mol_type = other DNA
gtccggtgtatgcaccccactttggacacatgacgctccttcttcatttttaaaaaatgtaagtgaaatcaatat

SEQ ID NO: 493666 - DNA, 75 bp, synthetic construct
  source 1..75: mol_type = other DNA
tccagtatcggctggcaccggaacatactttccccgccgcccatgatgatgcgcaacgaggtgcagaattagtct

SEQ ID NO: 493667 - DNA, 75 bp, synthetic construct
  source 1..75: mol_type = other DNA
atgatcggggaagacccacattcatacagcaaaatgagttctactatggcactggaaaaaggaattgcagagtta

SEQ ID NO: 493668 - DNA, 75 bp, synthetic construct
  source 1..75: mol_type = other DNA
atggcactggaaaaaggaattgcagagttagtcgaagagtttatcgctgcgggtcgcccctcatcgcgtcaacaa

SEQ ID NO: 493669 - DNA, 75 bp, synthetic construct
  source 1..75: mol_type = other DNA
ttcacgctgataaattgttctggcacatcaggagagcctgtttaagattctgtgtaaatgccttttctcagaagt

SEQ ID NO: 493670 - DNA, 75 bp, synthetic construct
  source 1..75: mol_type = other DNA
ttggatagaggctcagcgcaaagcgtatgagcttcacgctgataaattgttctggcacatcaggagcatttctga

SEQ ID NO: 493671 - DNA, 75 bp, synthetic construct
  source 1..75: mol_type = other DNA
attaccatcgtttccagcacccagatcccgcacattgttcgccgcgtggttggtcaggcgctggatattccctag

SEQ ID NO: 493672 - DNA, 75 bp, synthetic construct
  source 1..75: mol_type = other DNA
ttggtgcccgattcacgctggtggagttctctgatatggagtgccccttctgtaagcaattccacgacacgccca

SEQ ID NO: 493673 - DNA, 75 bp, synthetic construct
  source 1..75: mol_type = other DNA
tgacggggcgcgatgttctccgttatcgccgtaaaaacttcgatttgatgaccggtctggccgttgccactgcgc

SEQ ID NO: 493674 - DNA, 75 bp, synthetic construct
  source 1..75: mol_type = other DNA
cagttcaaaacaaaagggcaaatggcttatcaatgtttgaacaagccactattgactgaaattgtagaaagtaca

SEQ ID NO: 493675 - DNA, 75 bp, synthetic construct
  source 1..75: mol_type = other DNA
ggagtcaaaattccagctcaggtcatggattttttgagcatcgcactagcggttacagcggctgataccttcgtt

SEQ ID NO: 493676 - DNA, 75 bp, synthetic construct
  source 1..75: mol_type = other DNA
cggctgtgtcggacagggcttacatattgccaaaaaactgcttccgtatatccctaataatgcggggatcctgct

SEQ ID NO: 493677 - DNA, 75 bp, synthetic construct
  source 1..75: mol_type = other DNA
ggtactggaaggaatcttatcaaaaagaatatgattttatatatggacattacagacaacgggtaatgactccaa

SEQ ID NO: 493678 - DNA, 75 bp, synthetic construct
  source 1..75: mol_type = other DNA
aacttatgcctgtatatacggaaattacaggaatcaattagaaaggtatgtgtactttattaaatttcaggacga

SEQ ID NO: 493679 - DNA, 75 bp, synthetic construct
  source 1..75: mol_type = other DNA
tatcgctgaatatcaaaaaacaattgccggaaacattgaagagctggaaaatatttcgcggttaacagagaatat

SEQ ID NO: 493680 - DNA, 75 bp, synthetic construct
  source 1..75: mol_type = other DNA
gttttattgccagtggtcagaactgctacgtgatcccgtggatgggggataaaattgtcaatacaattacgtccc

SEQ ID NO: 493681 - DNA, 75 bp, synthetic construct
  source 1..75: mol_type = other DNA
tttaccagagtctttgcttgcgaaagggttcggggcaaaggcgtatgatatagaaggaacgagcatctggctgca

SEQ ID NO: 493682 - DNA, 75 bp, synthetic construct
  source 1..75: mol_type = other DNA
ttttcttagtggagacatatgggatttcgaattttgtgacgatggttatgcaccgccagagccttatagccagca

SEQ ID NO: 493683 - DNA, 75 bp, synthetic construct
  source 1..75: mol_type = other DNA
ctgagaatggttttatctcattgaatgcaccattgacaaatcgaagaattggctctcttagcacaagaactactc

SEQ ID NO: 493684 - DNA, 75 bp, synthetic construct
  source 1..75: mol_type = other DNA
gccgaattacatggaggaagtgctacgtatcactatctcagtaagcataacgtgtttcgaattacgttaccgcaa

SEQ ID NO: 493685 - DNA, 75 bp, synthetic construct
  source 1..75: mol_type = other DNA
agataagacagtaccttttgacaactatagcaccaattatccagcagacagaagtaaaccatcaagttgggcctc

SEQ ID NO: 493686 - DNA, 75 bp, synthetic construct
  source 1..75: mol_type = other DNA
cgcttattctgcgtcacggcgaccggatgctgcgccaggctggctggcccgacactgttgatatggcgcccgtcg

SEQ ID NO: 493687 - DNA, 75 bp, synthetic construct
  source 1..75: mol_type = other DNA
gtcatcagctaatacaaacaacaaacaagttttattcacttaaaacctatcctttagaactcgattcgattgaaa

SEQ ID NO: 493688 - DNA, 75 bp, synthetic construct
  source 1..75: mol_type = other DNA
gccaccaaatgatcctgaataaaaacggtatttacacacaaaacactgcaccacttaacctggattcaaatgata

SEQ ID NO: 493689 - DNA, 75 bp, synthetic construct
  source 1..75: mol_type = other DNA
ttttatgccgcattcttgtcatcgcgcgctggcgataaccggagctattgccatatccagtagctgtgcgctgga

SEQ ID NO: 493690 - DNA, 75 bp, synthetic construct
  source 1..75: mol_type = other DNA
ggagaaagcagtcagtgaactcagtcaggaaagctatttttcgcactgtcttgatattgctatcagggccaatga

SEQ ID NO: 493691 - DNA, 75 bp, synthetic construct
  source 1..75: mol_type = other DNA
tgattatgcgccacggtgacaatcttttacgccggtccggctggcctgaaaccgtcggcgtgacgcaggtggccc

SEQ ID NO: 493692 - DNA, 75 bp, synthetic construct
  source 1..75: mol_type = other DNA
gccacttatccagtcttcgttgaaattattggtcaaagaacttcgtgagcaggataacattgccatcgtgaccta

SEQ ID NO: 493693 - DNA, 75 bp, synthetic construct
  source 1..75: mol_type = other DNA
gcatacgcgaaagagccttataaggacgagttaatggcaggtgttagaatttattgccgaggtaagtttgctgcg

SEQ ID NO: 493694 - DNA, 75 bp, synthetic construct
  source 1..75: mol_type = other DNA
ccctgaagatgaacgtgacaccatattaaaatcatcacgtcaggagtttgtcagaacaacgactttcgattcatt

SEQ ID NO: 493695 - DNA, 75 bp, synthetic construct
  source 1..75: mol_type = other DNA
gtttaaccctgcgtgggtgacggaataccgtcagattggttatgaaaagcgccaactgcaggcagaggattttaa

SEQ ID NO: 493696 - DNA, 75 bp, synthetic construct
  source 1..75: mol_type = other DNA
acagctacattgatactctctctgaagcgcagaaagtgttaaacagcgaaatgcatcagacgttagttaccgtgg

SEQ ID NO: 493697 - DNA, 75 bp, synthetic construct
  source 1..75: mol_type = other DNA
agcagatcaaacagtgggctcagcaggcaaaaggggaagatccacagggttacagggcggaatttattcgcctga

SEQ ID NO: 493698 - DNA, 75 bp, synthetic construct
  source 1..75: mol_type = other DNA
cgatccgcgtgctgatgttgattatctgtttgctcaggtcattgtccatgagcagcgtgtcgatactacgcctaa

SEQ ID NO: 493699 - DNA, 75 bp, synthetic construct
  source 1..75: mol_type = other DNA
tcacctggtggcgacatctttgaagggctggctatctataacgctctgaaaaatcatccggcaaataaaattgta

SEQ ID NO: 493700 - DNA, 75 bp, synthetic construct
  source 1..75: mol_type = other DNA
cggcattcaaccacagcagcagcgattttacttatatccttgctggtggcgctgaaaaatcagtgcttgccggat

SEQ ID NO: 493701 - DNA, 75 bp, synthetic construct
  source 1..75: mol_type = other DNA
ggctggcgaccgtatcgttatgcccgaaaacgcactcatgatgattcacaaaccgtggggaatctctggtgggaa

SEQ ID NO: 493702 - DNA, 75 bp, synthetic construct
  source 1..75: mol_type = other DNA
ttttgttctggtccctgctgcgctggagtctgccgcacatcgcgccattctgtcatcgtcatcactctttccggt

SEQ ID NO: 493703 - DNA, 75 bp, synthetic construct
  source 1..75: mol_type = other DNA
ccatccgtcagagcaatggcgcgaattgaatcgaaacgcacaggagatttttcacacatgccggaaaccattaaa

SEQ ID NO: 493704 - DNA, 75 bp, synthetic construct
  source 1..75: mol_type = other DNA
gctgaaaaatccgtgaacacagcggcgaaacgttccgccagtggacgaaaaaaggttcattgtcaaacttccatg

SEQ ID NO: 493705 - DNA, 75 bp, synthetic construct
  source 1..75: mol_type = other DNA
ccgactgataatcagattgattattttgacgatgttccagtgacttgtatcgatatggcgatgccagtcgtcatt

SEQ ID NO: 493706 - DNA, 75 bp, synthetic construct
  source 1..75: mol_type = other DNA
aagtcgccattattagccgttccagcgattctcgtgctgatgtcgattatttgtttgcgcaggtaatcgtccatg

SEQ ID NO: 493707 - DNA, 75 bp, synthetic construct
  source 1..75: mol_type = other DNA
taatcgccgcaatatcaccagtcactcgcgtgcgtatccgtaacgtcaacaccgggacctatattgaagcggatg

SEQ ID NO: 493708 - DNA, 75 bp, synthetic construct
  source 1..75: mol_type = other DNA
aaagcaatgggcttaggcgatgtcagtaatatggttatccctaaacctgtacttatttctccagcgcagaaaggc

SEQ ID NO: 493709 - DNA, 75 bp, synthetic construct
  source 1..75: mol_type = other DNA
tgctgaatatctgggaaaaacaggctatgaattaccggcagagctggatgccgacaaagcattattagcccgcat

SEQ ID NO: 493710 - DNA, 75 bp, synthetic construct
  source 1..75: mol_type = other DNA
tcaggatgccacgacgttacgcgcatctgttattcggacgaccagaaaaatattttccggtgaagtttatcttcc

SEQ ID NO: 493711 - DNA, 75 bp, synthetic construct
  source 1..75: mol_type = other DNA
ttgttattaagtttgcaaccggtagccgaccgcctgctgcgtcccatcgaaagcacttatccgacatggaataat

SEQ ID NO: 493712 - DNA, 75 bp, synthetic construct
  source 1..75: mol_type = other DNA
ttgtgttggcctggacgtttgcaattggatgcaaaagtggaaaatcccgaggctggacaatatatgggtaatatt

SEQ ID NO: 493713 - DNA, 75 bp, synthetic construct
  source 1..75: mol_type = other DNA
cgaatcttcccccaaacataatatattaaatgactatattacagcatacagtgaaagtcatactctgtatgatag

SEQ ID NO: 493714 - DNA, 75 bp, synthetic construct
  source 1..75: mol_type = other DNA
tgatgcaatttgttcattgttgttagttgatcatgggtattttaggtttgatgatgatcctaaaaatgcgaagga

SEQ ID NO: 493715 - DNA, 75 bp, synthetic construct
  source 1..75: mol_type = other DNA
gctctacagccataatcagctttacggcgtctggcgcgtggttgataccggcgaagagccgcagaccacgcgagt

SEQ ID NO: 493716 - DNA, 75 bp, synthetic construct
  source 1..75: mol_type = other DNA
atggcgaaccgtgcgaacgttgtggcagcatcattgagaaaaccacgctgtcatctcgcccgttttactggtgcc

SEQ ID NO: 493717 - DNA, 75 bp, synthetic construct
  source 1..75: mol_type = other DNA
aagtcagtagcacccattacggcaattataccgtaaatattacggttgatttaactgataaaggtaatattcagg

SEQ ID NO: 493718 - DNA, 75 bp, synthetic construct
  source 1..75: mol_type = other DNA
acacagtttgtcagccggtatcaccagttccaccatcaacgcccctggctcgcttaccgcgatacgcttgacgac

SEQ ID NO: 493719 - DNA, 75 bp, synthetic construct
  source 1..75: mol_type = other DNA
tggaccttacatccagccgccgctgtcgttgaatggtattcagcttaccgcagcgatttgctacgagatcattct

SEQ ID NO: 493720 - DNA, 75 bp, synthetic construct
  source 1..75: mol_type = other DNA
ttggcttttgctggggatttggtctctttggcagcggtattaactgggtctatgtcagcattgcgacctttggcg

SEQ ID NO: 493721 - DNA, 75 bp, synthetic construct
  source 1..75: mol_type = other DNA
tacctacagtgtaccttgaaaagttctgcgctgtaagagatgcattttccaatctggaaaatcttcttattgctg

SEQ ID NO: 493722 - DNA, 75 bp, synthetic construct
  source 1..75: mol_type = other DNA
atgaaattggtgatatcgtctttacatgtataggtgctaccttatttggtcaaatatcagctgcatcaaattgct

SEQ ID NO: 493723 - DNA, 75 bp, synthetic construct
  source 1..75: mol_type = other DNA
aacttgaaagggaactgtctcccgatgaatttcaatacatactgactcccggtgctgcgctggaaaaagccgtat

SEQ ID NO: 493724 - DNA, 75 bp, synthetic construct
  source 1..75: mol_type = other DNA
gtttgatgaaatcaatatcgttcgtggtcagccgatcccgaatggacggctgggaataaaaatttatgaagccag

SEQ ID NO: 493725 - DNA, 75 bp, synthetic construct
  source 1..75: mol_type = other DNA
ttttgacgatccggagtcgctgggatttgccggtagcggggtccgtattgaaggaagcagcccgtcattatttgt

SEQ ID NO: 493726 - DNA, 75 bp, synthetic construct
  source 1..75: mol_type = other DNA
atttcagtctatgaggatatgcttttttcttgccagagcctaactgtagctaatacgatatctatactggcaaga

SEQ ID NO: 493727 - DNA, 75 bp, synthetic construct
  source 1..75: mol_type = other DNA
ttccggttcacaaccgagaaacccttattctcgaatgcattaaatctttaaacaatcagactatagataaaaatt

SEQ ID NO: 493728 - DNA, 75 bp, synthetic construct
  source 1..75: mol_type = other DNA
ttggcggtatgctgctgccgcttccgctaatgttgttgattatcggtgtgggtctggtgctactgtggtttagcc

SEQ ID NO: 493729 - DNA, 75 bp, synthetic construct
  source 1..75: mol_type = other DNA
agtggactatatcgtggtgctcggaggtggttatacctggaacccgcagtgggcaccaagctcgaatttaatcaa

SEQ ID NO: 493730 - DNA, 75 bp, synthetic construct
  source 1..75: mol_type = other DNA
agtgtggcagcgaagttcagggggtttttgacgatccggagtcgctggggtttgccggtggcggggtccgtattg

SEQ ID NO: 493731 - DNA, 75 bp, synthetic construct
  source 1..75: mol_type = other DNA
aggcgataatcctgaatacgccataccgctaaaagtgacgattagcattggcgctgtgggtgatgctgccaactt

SEQ ID NO: 493732 - DNA, 75 bp, synthetic construct
  source 1..75: mol_type = other DNA
atcgactggctgataacgcactttacgaggcgaaagagaccgggcgtaataaggtggttgtgagggatgtggtga

SEQ ID NO: 493733 - DNA, 75 bp, synthetic construct
  source 1..75: mol_type = other DNA
aaccggctcagcgatggtgcgccactcaccgtttatcccggtgaagttcctgcgcgtttgcccggtcaggcgttc

SEQ ID NO: 493734 - DNA, 75 bp, synthetic construct
  source 1..75: mol_type = other DNA
acttggcatccatattatccaaaaaaagtttaacaactaatgagaagtctcacgtttttaacttgatacataaat

SEQ ID NO: 493735 - DNA, 75 bp, synthetic construct
  source 1..75: mol_type = other DNA
tcagatgagtttgtgcatattaatatttctggcattggtgaataaagttagtgaaaacacaaaacagcgcaattt

SEQ ID NO: 493736 - DNA, 75 bp, synthetic construct
  source 1..75: mol_type = other DNA
gggggccgatagttgctcacatactttctagtcattatgagagctacaatttacacattgccgagttaaccaatg

SEQ ID NO: 493737 - DNA, 75 bp, synthetic construct
  source 1..75: mol_type = other DNA
gttttattagaaacaatgctcacggcgatggcgacaggaagttgctttcagatgcccggacccaagcgttcagta

SEQ ID NO: 493738 - DNA, 75 bp, synthetic construct
  source 1..75: mol_type = other DNA
accgaaaagacgttcagcaaatcatccaccaactcaagttagatattttcaccaaatcacgactccgcatcaaag

SEQ ID NO: 493739 - DNA, 75 bp, synthetic construct
  source 1..75: mol_type = other DNA
attgcaccgcgccactggcggatgcggcgtgaacgccttatccgccctacatgtgcaatcccgtaggccggataa

SEQ ID NO: 493740 - DNA, 75 bp, synthetic construct
  source 1..75: mol_type = other DNA
attacgctgaagataactatctggattatgacaaggcgatgcagggggggtatggaatcccacaaatgaatacgc

SEQ ID NO: 493741 - DNA, 75 bp, synthetic construct
  source 1..75: mol_type = other DNA
catcgtaggttctaggtttataaaagaactgaaagaaagcaggtctttctctcgtgtagagataagcgagtcaga

SEQ ID NO: 493742 - DNA, 75 bp, synthetic construct
  source 1..75: mol_type = other DNA
attgtacgctttcggcagacaatagaatattcatacctatacttggtcttgggctgattaatgcagtaaatgaaa

SEQ ID NO: 493743 - DNA, 75 bp, synthetic construct
  source 1..75: mol_type = other DNA
cgaaaacaggtatgtcagatgcgaaatgccgcaatctggtgaacgattatcaaattcctacagacacccatgagt

SEQ ID NO: 493744 - DNA, 75 bp, synthetic construct
  source 1..75: mol_type = other DNA
tcgctggcgcgaactggaagaacaaatccgtaaaccaatgagccagatcgaaatggttgctgcaatggcacttga

SEQ ID NO: 493745 - DNA, 75 bp, synthetic construct
  source 1..75: mol_type = other DNA
aattgttgcagtggaaccgtttatggctgctttccatcgtatgatgagcgaagcggaaccgagaggaactcgttg

SEQ ID NO: 493746 - DNA, 75 bp, synthetic construct
  source 1..75: mol_type = other DNA
ttgcagagccaccggataagcgccgtcgtgacctggacaatatcctgaaggcaccactggatgcgctgacgcatg

SEQ ID NO: 493747 - DNA, 75 bp, synthetic construct
  source 1..75: mol_type = other DNA
acacagtaagcaatggcctggtaaagcggcgattggtcgcctgaaaggtgaggaactggcgcaatataatttgtg

SEQ ID NO: 493748 - DNA, 75 bp, synthetic construct
  source 1..75: mol_type = other DNA
aacatcccgacagacactcatgaatttttgacgccagatggattactggcacgtcgtgaaattgttgctgtggaa

SEQ ID NO: 493749 - DNA, 75 bp, synthetic construct
  source 1..75: mol_type = other DNA
cgaacgggaagaacggtgttttatgctctggctgagaatgcgaaaagcctagacgaattacgacgtattttaacc

SEQ ID NO: 493750 - DNA, 75 bp, synthetic construct
  source 1..75: mol_type = other DNA
tacttatgaatggaatgaaacaaaaaaaagaattgatgccgttaaacgattttggttttcttcaataagatatgg

SEQ ID NO: 493751 - DNA, 75 bp, synthetic construct
  source 1..75: mol_type = other DNA
atgattaaaacaacgttactattttttgctactgcgctgtgtgaaattattgggtgctttttgccctggctgtgg

SEQ ID NO: 493752 - DNA, 75 bp, synthetic construct
  source 1..75: mol_type = other DNA
tacgaaatggcgggcgcacagcgcgaaagcccgtacccgatcgccagcgcgccgttgactggctttgatgtgccg

SEQ ID NO: 493753 - DNA, 75 bp, synthetic construct
  source 1..75: mol_type = other DNA
tgtctatgttagtttttaccagcccagcaaaagctgaatggactggtgataaaactgaaggaatgtattctgaag

SEQ ID NO: 493754 - DNA, 75 bp, synthetic construct
  source 1..75: mol_type = other DNA
tgattatcgacgccactacgcctgtcgctccggacaaccgtggtcactacagccaaccggtggtggatttaccgg

SEQ ID NO: 493755 - DNA, 75 bp, synthetic construct
  source 1..75: mol_type = other DNA
tggcgaagagattaacctgttcgatatcctgccgctgtttcgtttaaacgatggcgatggcggtttctatctcga

SEQ ID NO: 493756 - DNA, 75 bp, synthetic construct
  source 1..75: mol_type = other DNA
gccgctgaaatacgatcagtccgagtacgaaatggcgggcgcgctgcgcgaaagtccgtacccgatcgccaccgc

SEQ ID NO: 493757 - DNA, 75 bp, synthetic construct
  source 1..75: mol_type = other DNA
tgatttacagtctcacggaaagcgcggctcggcgtggtaaagacgctttgataaaactgtatccggaactgtcaa

SEQ ID NO: 493758 - DNA, 75 bp, synthetic construct
  source 1..75: mol_type = other DNA
ggcgccggttatcatgctgataagccttgaaaacgcgaccgatttattactcgaagcccttctggcggacgctga

SEQ ID NO: 493759 - DNA, 75 bp, synthetic construct
  source 1..75: mol_type = other DNA
cggtgccgatgcacgatatcgccctgcatctgcataaagcagaagagcgcggtgaagatctgccgattgcgatca

SEQ ID NO: 493760 - DNA, 75 bp, synthetic construct
  source 1..75: mol_type = other DNA
gccaaacaccccggttaaaaaacagattgatgagtttatccgccgctgggataacttcccgatcgccccggagcg

SEQ ID NO: 493761 - DNA, 75 bp, synthetic construct
  source 1..75: mol_type = other DNA
agccagccggtggtggatttgccggaaaccaaagcctgggctgaaaaactgaccgctatgctggccgcacgtaaa

SEQ ID NO: 493762 - DNA, 75 bp, synthetic construct
  source 1..75: mol_type = other DNA
tgctggactatctgggggacagcgagactcttaataaggagtggctacgggaaccggaagaggctcccgtagtga

SEQ ID NO: 493763 - DNA, 75 bp, synthetic construct
  source 1..75: mol_type = other DNA
ggcaagccgcagtctcaggaagcctacggttgcatgttgcgtaaagatgatccgcagttcaaaaagctgatggat

SEQ ID NO: 493764 - DNA, 75 bp, synthetic construct
  source 1..75: mol_type = other DNA
ggggaagatgtggagaaaaaaatccgccaacccctacaagcgcagctgacgcgcctcgaccttgtaagccgtgaa

SEQ ID NO: 493765 - DNA, 75 bp, synthetic construct
  source 1..75: mol_type = other DNA
atgattgacccgaaaaaaattgagcaaatcgctcgccaggttcacgaatcaatgcctaaaggaatcagggagttt

SEQ ID NO: 493766 - DNA, 75 bp, synthetic construct
  source 1..75: mol_type = other DNA
aaaaagagctgctgcgcgaacaaatcagcacgatgaacccgtacaaatttgaacaactggtcggtcaattactgg

SEQ ID NO: 493767 - DNA, 75 bp, synthetic construct
  source 1..75: mol_type = other DNA
atcaccaccgggaaatttgcggcgaaatgtgcagaagcggcgctctttccgggtgccgcgcccattacgcttatc

SEQ ID NO: 493768 - DNA, 75 bp, synthetic construct
  source 1..75: mol_type = other DNA
agcgcgcggatctccgctaccccagcctggaatcgtggcaaaaacaaaaataatgacgaacgtatgaagcgtctc

SEQ ID NO: 493769 - DNA, 75 bp, synthetic construct
  source 1..75: mol_type = other DNA
atgaatcgctggtacaccattaaggcggcggatgttcgcggagcggcggatatatctatctatgaggagattggc

SEQ ID NO: 493770 - DNA, 75 bp, synthetic construct
  source 1..75: mol_type = other DNA
cgaaacgttccagaaatggacgcgtaccggttcgctttcaaactttcatgaagcaaagcgcgttggtctgaatgg

SEQ ID NO: 493771 - DNA, 75 bp, synthetic construct
  source 1..75: mol_type = other DNA
gcctggaaagtgcgcatagatgcaggtgtcgcggccctcgattatcgcggattactgaaatcgagtggagcatga

SEQ ID NO: 493772 - DNA, 75 bp, synthetic construct
  source 1..75: mol_type = other DNA
catgattactccgccacgcaacagtgctccacgcgtacaggatgatggacctgcagcctcccggacgccagtgca

SEQ ID NO: 493773 - DNA, 75 bp, synthetic construct
  source 1..75: mol_type = other DNA
atgaccgaacgcatagaatttgttttgccttatccgccgacggtgaatacttactggcggcgtcgtggcagcaca

SEQ ID NO: 493774 - DNA, 75 bp, synthetic construct
  source 1..75: mol_type = other DNA
gcgactccctgaatattacccctgcttttgttctggtccctgccgcgctggaatctgccgcgcgtcgcgccattt

SEQ ID NO: 493775 - DNA, 75 bp, synthetic construct
  source 1..75: mol_type = other DNA
gtgaaaaactataaagttattaccccgctttttcctacctatgcacaggttaaagctatgatgaaagccgtctca

SEQ ID NO: 493776 - DNA, 75 bp, synthetic construct
  source 1..75: mol_type = other DNA
ggtggaagagaaagtcacccacgttactgaaaccgtcgagaaaatcaaaagaggcaccatacgcgatggttatgc

SEQ ID NO: 493777 - DNA, 75 bp, synthetic construct
  source 1..75: mol_type = other DNA
ggcgcgaactggaagaacaaatccgcaaaccaatgagccagatcgaaatggttgctgcaatggcgcttgaagctg

SEQ ID NO: 493778 - DNA, 75 bp, synthetic construct
  source 1..75: mol_type = other DNA
atgaataccgcaatttttaccgataaagcatccatgactagcgttgaaattgcagagctggtgggcagccgccat

SEQ ID NO: 493779 - DNA, 75 bp, synthetic construct
  source 1..75: mol_type = other DNA
ttgttgatgcggttgcgcgaaatggcagttttagcgctgcagcccaggagttgcatcgcgttccttccgctgtca

SEQ ID NO: 493780 - DNA, 75 bp, synthetic construct
  source 1..75: mol_type = other DNA
tgctggagtatctcggtgatagcgagacgctgaataaggaatggctgcgggagccggaagagactcccgcaacgg

SEQ ID NO: 493781 - DNA, 75 bp, synthetic construct
  source 1..75: mol_type = other DNA
ctggccgtcgttggtgcgcgaagacacctcgcgaacgctacctaaacgtattacctggttgctggataaccaaaa

SEQ ID NO: 493782 - DNA, 75 bp, synthetic construct
  source 1..75: mol_type = other DNA
ctgatggaaagcacgccagatgatacctggcagcccacctcgcgcgggcaaaaattcctgcaagatgacgaaaaa

SEQ ID NO: 493783 - DNA, 75 bp, synthetic construct
  source 1..75: mol_type = other DNA
tataaccttatcgaccgtgacatggttaaccgtgaaggcatgagctatcgcatcaccgataccgggcgcgcctga

SEQ ID NO: 493784 - DNA, 75 bp, synthetic construct
  source 1..75: mol_type = other DNA
cagcaccatgaacccgtacaaatttgagcaactggtcggtcaattactggaagcaatgggctacgagcaggtcga

SEQ ID NO: 493785 - DNA, 75 bp, synthetic construct
  source 1..75: mol_type = other DNA
gtttgatgaaatcaatattgtgcgcggtcaggtcgttcctggtggtcggttggggataaaaatcacagggctgga

SEQ ID NO: 493786 - DNA, 75 bp, synthetic construct
  source 1..75: mol_type = other DNA
aatatcaatgggttaggtttaactcaaaaaagtaagcattatcttttcgaaggtgaacgaggcaaacgcgacagc

SEQ ID NO: 493787 - DNA, 75 bp, synthetic construct
  source 1..75: mol_type = other DNA
tcagcgagcgcttaacgggtgaagatgccgacatcgcccgtcgcatctgggatactgacaatcacattctgaatc

SEQ ID NO: 493788 - DNA, 75 bp, synthetic construct
  source 1..75: mol_type = other DNA
actatgccagtttatcgaaaccagtttgcagcgcagtggtgtaatcgttacaacatacgaaggtcaggaaccctc

SEQ ID NO: 493789 - DNA, 75 bp, synthetic construct
  source 1..75: mol_type = other DNA
tatgcttacgcatgaggatcgccagcgcctgacgcagatcatttgtggtcagcaggtcaattttgttgatgttct

SEQ ID NO: 493790 - DNA, 75 bp, synthetic construct
  source 1..75: mol_type = other DNA
acgtgaaacgcaagtagatgtgccggtgtttgagccgctgtttgcggattctgattgttctgcaatgagtaacac

SEQ ID NO: 493791 - DNA, 75 bp, synthetic construct
  source 1..75: mol_type = other DNA
gggggttaccattcttgatgaaaatggtcataccctgatttcgcttaccggaccggaaagcaagattaagagcga

SEQ ID NO: 493792 - DNA, 75 bp, synthetic construct
  source 1..75: mol_type = other DNA
atgcgcttaatgtactaagcaagaatcatatcgatatcgtgcttagcgacgtcaacatgccgaatatggacggtt

SEQ ID NO: 493793 - DNA, 75 bp, synthetic construct
  source 1..75: mol_type = other DNA
tgatgtgatgaaagagctgaagtacatagctgaaaatcgcttatcggcagaaaacggtgtgctttcgccgcgtgg

SEQ ID NO: 493794 - DNA, 75 bp, synthetic construct
  source 1..75: mol_type = other DNA
acatgccgtggtactgccgtacggcgcaaccatgcgccaggtgctggcgcaaatccgcccgaacagcatgtctca

SEQ ID NO: 493795 - DNA, 75 bp, synthetic construct
  source 1..75: mol_type = other DNA
tggggagtaactccgcatgaattgcgccctgataaataccctaacccaaccgatggcctgccttgtggacgtaag

SEQ ID NO: 493796 - DNA, 75 bp, synthetic construct
  source 1..75: mol_type = other DNA
ttacgaaaatcatgaatcaatcagaaattgctaaacatctaggagttaagtctcaggctgtaagtggatggctca

SEQ ID NO: 493797 - DNA, 75 bp, synthetic construct
  source 1..75: mol_type = other DNA
gcgtggtttatgcgctactggcgcgataatttttctgcggcttacgatctcaaccgggtatttttaatcggcagt

SEQ ID NO: 493798 - DNA, 75 bp, synthetic construct
  source 1..75: mol_type = other DNA
ccgacttgggtttgtttgatttagatttaaacaccaggacgatcacttgtaatctggttgaggtgaagtgttatt

SEQ ID NO: 493799 - DNA, 75 bp, synthetic construct
  source 1..75: mol_type = other DNA
cgtactcaagatgcacagaaaggtcatagcggttcatggaagcgacgctgctaaacagcaacacatacaggcagt

SEQ ID NO: 493800 - DNA, 75 bp, synthetic construct
  source 1..75: mol_type = other DNA
agcggtcagcgataacgacgatatgatgattctggtcgtggatgatcatccgattaaccggcgtctgctggcaga

SEQ ID NO: 493801 - DNA, 75 bp, synthetic construct
  source 1..75: mol_type = other DNA
ccaagtatgatcagttttttgatgcttttggagatcctaaaggatggtggaaaggttacaaaagcggcttaagcc

SEQ ID NO: 493802 - DNA, 75 bp, synthetic construct
  source 1..75: mol_type = other DNA
ggcagtggttcgcgtcagggtaacggagggttttattatcaggggaaacagtatgatccaattctgaatgagtcg

SEQ ID NO: 493803 - DNA, 75 bp, synthetic construct
  source 1..75: mol_type = other DNA
atgaaattccgtgcattcctctcccgccgctggcggcacatcgtttacgccaccacaccggtactggttgccctg

SEQ ID NO: 493804 - DNA, 75 bp, synthetic construct
  source 1..75: mol_type = other DNA
tgaaaggtggttcgttcggtatctacggtgattttattttccaggaccatacgcaatatggctccagcatcggtg

SEQ ID NO: 493805 - DNA, 75 bp, synthetic construct
  source 1..75: mol_type = other DNA
cgataacgtaatcgccgacattatggcagaccgtattgcccggattcgtgccgggagtgaaaaggcactggcagc

SEQ ID NO: 493806 - DNA, 75 bp, synthetic construct
  source 1..75: mol_type = other DNA
gcagcaattacgttaatcctgacggcagcattatgaatgacgtcgagtaccgtcaggcactggaagcgatctttg

SEQ ID NO: 493807 - DNA, 75 bp, synthetic construct
  source 1..75: mol_type = other DNA
ccatcagtggctcagcgtcagaaagagatgctgaatctctcgctgcaaaagctggaggaagcctcactttctgcc

SEQ ID NO: 493808 - DNA, 75 bp, synthetic construct
  source 1..75: mol_type = other DNA
tctgatcaaggctggcggcgttgatccagagcgcggaagttacgttgatattgtggtcaagcgcggtaaccgcgt

SEQ ID NO: 493809 - DNA, 75 bp, synthetic construct
  source 1..75: mol_type = other DNA
taccagtccaacgtcaacgtctacgcctccttattacaggcgcagccagtaaaagtgtacgtgaccggatttgtg

SEQ ID NO: 493810 - DNA, 75 bp, synthetic construct
  source 1..75: mol_type = other DNA
ggaatacgagcaaaaggccaaacgccgtcgccgactgattaaagcaggactttacattgatgagtttgaaaaggc

SEQ ID NO: 493811 - DNA, 75 bp, synthetic construct
  source 1..75: mol_type = other DNA
tcaacacgttacccatgtggaaacgcgaggtaaggcgttgttaactcatttttccaacgggttaacgctctacag

SEQ ID NO: 493812 - DNA, 75 bp, synthetic construct
  source 1..75: mol_type = other DNA
gcagggctgcggatgcaattgaggcttctggactggaatatacaattcttcgccctgaagtggtcaacaaaaact

SEQ ID NO: 493813 - DNA, 75 bp, synthetic construct
  source 1..75: mol_type = other DNA
atcgtaaaggatttattgacgcagagcaggttaaggtattagccgaacctctgaagaaaaatgcttatggtcagt

SEQ ID NO: 493814 - DNA, 75 bp, synthetic construct
  source 1..75: mol_type = other DNA
tgacctgccgaagttaatggacgcagcagttaacaaagaaagtggcgcaacggtatttgcttatcacgttaatga

SEQ ID NO: 493815 - DNA, 75 bp, synthetic construct
  source 1..75: mol_type = other DNA
gcaggtgaaagtgttagccgaaccgctgaagaaaaatgcttatggtcagtatctgctcaaaatgattaaaggtga

SEQ ID NO: 493816 - DNA, 75 bp, synthetic construct
  source 1..75: mol_type = other DNA
gataccggcacccatgagagcctgattgaggccagcaacttcatccagaccattgaaacccgtcaggggctgaaa

SEQ ID NO: 493817 - DNA, 75 bp, synthetic construct
  source 1..75: mol_type = other DNA
aattgaagagcgtcaggggctgaaagtttcctgcccggaagaaattgcttaccgtaaagggtttgttgatgctga

SEQ ID NO: 493818 - DNA, 75 bp, synthetic construct
  source 1..75: mol_type = other DNA
gctgttaacaaagaaagcggtgcaacggtatttgcttatcacgttaatgatcctgaacgttatggtgtcgtggag

SEQ ID NO: 493819 - DNA, 75 bp, synthetic construct
  source 1..75: mol_type = other DNA
gatggggcgtggttatgcctggcttgataccggtacccacgaaagcctaattgaagcgagcaactttattcagac

SEQ ID NO: 493820 - DNA, 75 bp, synthetic construct
  source 1..75: mol_type = other DNA
atgagctatatgcatcatgctggaaagaacacatctccttctctttgtagtgagtatttaactcccggttgtatg

SEQ ID NO: 493821 - DNA, 75 bp, synthetic construct
  source 1..75: mol_type = other DNA
accattaaacaaactttatttgcccgtcagccagcaaaaatccacaaaccctatccaactaatagcaagattatt

SEQ ID NO: 493822 - DNA, 75 bp, synthetic construct
  source 1..75: mol_type = other DNA
ccgcatggacactgattcttactggcctggcgacatgcctcagtacggggggcagccctggctgccctgctgatg

SEQ ID NO: 493823 - DNA, 75 bp, synthetic construct
  source 1..75: mol_type = other DNA
gaagagcaactatgcggtaaccggtctctacttctatgacaaccgcgtggttgagattgccaaaagcctgaaacc

SEQ ID NO: 493824 - DNA, 75 bp, synthetic construct
  source 1..75: mol_type = other DNA
gcaggttaaactccttgcgaagccgctaaaaaaaaatacatatgggaaatatttattgaatatggttaaagaact

SEQ ID NO: 493825 - DNA, 75 bp, synthetic construct
  source 1..75: mol_type = other DNA
ttacaatattaataatggatatttgacggtaagcttgaatagagtgaataagatacatcagtgtatatctcaatt

SEQ ID NO: 493826 - DNA, 75 bp, synthetic construct
  source 1..75: mol_type = other DNA
atgaaaacgcgtaagggtattattttagcgggtggttctggtactcgtctttatcctgtgactatggcagtcagt

SEQ ID NO: 493827 - DNA, 75 bp, synthetic construct
  source 1..75: mol_type = other DNA
aattgaagaacgtcaggggctgaaagtttcctgcccggaagaaattgcttaccgtaaagggtttattgatgctga

SEQ ID NO: 493828 - DNA, 75 bp, synthetic construct
  source 1..75: mol_type = other DNA
gtcatggttcggaacaacggcaactgaaaaagcaaaaacagacatcattattgtacttcaggccagaaaaatcag

SEQ ID NO: 493829 - DNA, 75 bp, synthetic construct
  source 1..75: mol_type = other DNA
tttgacttccttttctgctgttaaacagaaaacgccggagcagatttcttctcgtgtcgatatgtcaatggataa

SEQ ID NO: 493830 - DNA, 75 bp, synthetic construct
  source 1..75: mol_type = other DNA
atgaaaacgcgtaaaggtattattttagcgggtggctctggtactcgtctttatcctgtgactatggctgtcagt

SEQ ID NO: 493831 - DNA, 75 bp, synthetic construct
  source 1..75: mol_type = other DNA
atcgtaaaggctttattgacgcagagcaggttaatgtattagccgaaccgctaaagaaaaatgcttatggtcagt

SEQ ID NO: 493832 - DNA, 75 bp, synthetic construct
  source 1..75: mol_type = other DNA
agaactttatgcacttgcgcagccattgctaaaaaacaattatggaaaatatctcactggaatattaaaaaataa

SEQ ID NO: 493833 - DNA, 75 bp, synthetic construct
  source 1..75: mol_type = other DNA
accgtaaaggatttattgattctgagcaggtgaaagtattagctgaacctctgaaaaaaaatgcttatggtcagt

SEQ ID NO: 493834 - DNA, 75 bp, synthetic construct
  source 1..75: mol_type = other DNA
tttgataataacggaacagccattagccttgaagaaaaaccgttagagccaaaaagcaattatgctgtaaccgga

SEQ ID NO: 493835 - DNA, 75 bp, synthetic construct
  source 1..75: mol_type = other DNA
ttggtgataatatcttttacggtcacgatctgccgaagttaatggatgccgctgttaacaaagaaagtggtgcaa

SEQ ID NO: 493836 - DNA, 75 bp, synthetic construct
  source 1..75: mol_type = other DNA
atgaaatttcgtatactgatattgatttctttcctgacatttatttttcctttgacttccttttctgctgttaaa

SEQ ID NO: 493837 - DNA, 75 bp, synthetic construct
  source 1..75: mol_type = other DNA
cttatcatgttaaagaccctatgagatacggcgttgtagagtttgataaacaaggtaaagccatttcacttgaag

SEQ ID NO: 493838 - DNA, 75 bp, synthetic construct
  source 1..75: mol_type = other DNA
gacacggggacacatcaaagccttattgaagcaagtaacttcattgctacaattgaagagcgtcagggattaaaa

SEQ ID NO: 493839 - DNA, 75 bp, synthetic construct
  source 1..75: mol_type = other DNA
tcagtaatagtcagctaaatgccctggtcacatccaaagtgaaggaagtataccagtccaacgtcaacgtctacg

SEQ ID NO: 493840 - DNA, 75 bp, synthetic construct
  source 1..75: mol_type = other DNA
tccactatgcgtgcggttctggaaaaagtccgtccgaacagcatgtcgcagatgaacgcggttcagctttatcgc

SEQ ID NO: 493841 - DNA, 75 bp, synthetic construct
  source 1..75: mol_type = other DNA
tccaccatgcgtgcggttctggaaaaagtccgcccgaacagcatgtcgcagatgaacgcggttcagctttatcgc

SEQ ID NO: 493842 - DNA, 75 bp, synthetic construct
  source 1..75: mol_type = other DNA
atggcaaaccaagattttctcaatgaaatcaataagcgaaggacctttgctatcatctctcacccggacgccggt

SEQ ID NO: 493843 - DNA, 75 bp, synthetic construct
  source 1..75: mol_type = other DNA
ggttaacctgctcgacaccccggggcacgaagacttctcggaagatacctatcgtaccctgacggcggtggactg

SEQ ID NO: 493844 - DNA, 75 bp, synthetic construct
  source 1..75: mol_type = other DNA
gcaactctaaagttcttcattggttcttagaaaacgaggttgattatcttaatgagttaaaaagaatttctagaa

SEQ ID NO: 493845 - DNA, 75 bp, synthetic construct
  source 1..75: mol_type = other DNA
catgaagtacactctcagatagttattccgggcgttgttatttctgtttttctgcagttcactgcaattatgata

SEQ ID NO: 493846 - DNA, 75 bp, synthetic construct
  source 1..75: mol_type = other DNA
atcatggatacatctcgaaaacagtaaaaatgagttggtaaaaatcttccagcaggatgattcactggaagattt

SEQ ID NO: 493847 - DNA, 75 bp, synthetic construct
  source 1..75: mol_type = other DNA
ccacgttggaagcggcttaactataagtatttacataaaaaagagttgcgaatgctatgggtcgaagatcatcgt

SEQ ID NO: 493848 - DNA, 75 bp, synthetic construct
  source 1..75: mol_type = other DNA
ttagcaatagtcagttgaacactctggttacatcaaaagtgaaggaagtgtaccagtccaacgtcaacgtctacg

SEQ ID NO: 493849 - DNA, 75 bp, synthetic construct
  source 1..75: mol_type = other DNA
cagtcatccaccaaagaagaagccagcctgcgaatgcaggaagcgcaactgatcagccgctttgtggcgaaagca

SEQ ID NO: 493850 - DNA, 75 bp, synthetic construct
  source 1..75: mol_type = other DNA
gctcaacaaactgaatgaagagcaaaaaatgaatatgcgcatcatcagcgccaaagatcacggtgactctttccg

SEQ ID NO: 493851 - DNA, 75 bp, synthetic construct
  source 1..75: mol_type = other DNA
aggtggcgaagcgccgcacctttgccataatttctcacccggacgccggtaaaaccaccatcaccgagaaggtgc

SEQ ID NO: 493852 - DNA, 75 bp, synthetic construct
  source 1..75: mol_type = other DNA
cgttaaaagggctggcaccaataatgggcgtggaagccattaacttcctgctgatgatggttagcggcctgctgg

SEQ ID NO: 493853 - DNA, 75 bp, synthetic construct
  source 1..75: mol_type = other DNA
tcttaatacgctgaagatttactacaacgcaacggcaccgctgatgggcaaatcatcgctgattatctggccgga

SEQ ID NO: 493854 - DNA, 75 bp, synthetic construct
  source 1..75: mol_type = other DNA
aacgaaacaattatttccggtggcaccgcgcatgaaggcggggcggtccatgttattgacacaatgagagtgaat

SEQ ID NO: 493855 - DNA, 75 bp, synthetic construct
  source 1..75: mol_type = other DNA
cactggcgttggtcaaacgcaactggcgtccgctggtggtggccgtcgtgctgtttgcccttcccttcccgctgc

SEQ ID NO: 493856 - DNA, 75 bp, synthetic construct
  source 1..75: mol_type = other DNA
ttccagatggcgcgaatgcgtgcgctggagctggcgcgcccactgttgcgcagcaccaacaacggcattacggcg

SEQ ID NO: 493857 - DNA, 75 bp, synthetic construct
  source 1..75: mol_type = other DNA
ctcgctggtaaccgggattgtcgacgcgcgtctcaataagcagaaccgctacgatacctacaacaccatcatcac

SEQ ID NO: 493858 - DNA, 75 bp, synthetic construct
  source 1..75: mol_type = other DNA
gatcgttggtgcggttggtgtgctgcagtttgatgtggtggtagcgcgcctgaagagcgaatacaacgttgaagc

SEQ ID NO: 493859 - DNA, 75 bp, synthetic construct
  source 1..75: mol_type = other DNA
aacttcgcaccagaactgttccgtcgtatccgcctgaaagatccgctgaagcaaaaacagctgctcaaagggctg

SEQ ID NO: 493860 - DNA, 75 bp, synthetic construct
  source 1..75: mol_type = other DNA
gtatccgcctgaaagatccgctgaagcaaaaacagctgctcaaagggctggtacagctttccgaagagggcgcgg

SEQ ID NO: 493861 - DNA, 75 bp, synthetic construct
  source 1..75: mol_type = other DNA
atgaatagtctgctgcctccgggttcaacaccactggagcgccgactggcgcaaacctgcagcgggatttctgat

SEQ ID NO: 493862 - DNA, 75 bp, synthetic construct
  source 1..75: mol_type = other DNA
tatcaaacgtgtgaaaaagatgtttgatacccgccatcagttgatggttgaacagttagacaacgaggcgtggga

SEQ ID NO: 493863 - DNA, 75 bp, synthetic construct
  source 1..75: mol_type = other DNA
ggttttgatctcgccagcgagcagcatactgtgcgcgacaccgcgttcctgatggaacagttggagctgcgcgaa

SEQ ID NO: 493864 - DNA, 75 bp, synthetic construct
  source 1..75: mol_type = other DNA
ggagctgacggtgtatacgctgaataatgagctggaaaatctactgaccaacgtagtgaatcaagcgcaacaggc

SEQ ID NO: 493865 - DNA, 75 bp, synthetic construct
  source 1..75: mol_type = other DNA
gccagccattgttgaactgggcacagcaacgggattcgactttgagttaatcgatcaggccggtctggggcacga

SEQ ID NO: 493866 - DNA, 75 bp, synthetic construct
  source 1..75: mol_type = other DNA
gatggaaaaccttgcgtcaaaattacctgcgggcattggttatgactggacgggtatgtcgtatcaggaacgctt

SEQ ID NO: 493867 - DNA, 75 bp, synthetic construct
  source 1..75: mol_type = other DNA
acaaactccaacttgccacgccattgctgccgcaggaagttcaacaacaggggattagcgttgaaaagtccagta

SEQ ID NO: 493868 - DNA, 75 bp, synthetic construct
  source 1..75: mol_type = other DNA
tacccatccgttcgttcgcaagcaggagctgacggtgtataccctgaataatgagctggaaaatctgctgactaa

SEQ ID NO: 493869 - DNA, 75 bp, synthetic construct
  source 1..75: mol_type = other DNA
aatcttcttcgtaccggtgttcggtaatgactccaacttattgatagtgttttatgttcagataatgcccgatga

SEQ ID NO: 493870 - DNA, 75 bp, synthetic construct
  source 1..75: mol_type = other DNA
cggtgccgggagcggcgctcagaacgcagtgggtatcggtgtaatgggtggcatggtctctgcaacattgctggc

SEQ ID NO: 493871 - DNA, 75 bp, synthetic construct
  source 1..75: mol_type = other DNA
ggtttgataagaaaaccgaagagtttaaaggtggtgaatactcaaaagacttcggtgatgatggttctgtcattg

SEQ ID NO: 493872 - DNA, 75 bp, synthetic construct
  source 1..75: mol_type = other DNA
gtgtgctggatatctgccgccttcctgtgtgggatttggccgatgaaaactgtctgttggccatgtggtgggtgc

SEQ ID NO: 493873 - DNA, 75 bp, synthetic construct
  source 1..75: mol_type = other DNA
gttcgacataacgagttggtgggaaccgggtgctattgcgccacgtagagcaccggattttggaaaggcggtagg

SEQ ID NO: 493874 - DNA, 75 bp, synthetic construct
  source 1..75: mol_type = other DNA
tgccgttagggattgtcggcgtgctactggcggcaacactctttaatcaaaaaaatgacgtctactttatggtgg

SEQ ID NO: 493875 - DNA, 75 bp, synthetic construct
  source 1..75: mol_type = other DNA
actgcgtgagcagttgcaatcccgctttgatcgttttgcagtcttggtcgtatggaatttcgcagacccatctca

SEQ ID NO: 493876 - DNA, 75 bp, synthetic construct
  source 1..75: mol_type = other DNA
tccacaggccaagctgttagcacatgctaaaaacgacaagctctttcaaaaggatgaggatatagaacacctcgc

SEQ ID NO: 493877 - DNA, 75 bp, synthetic construct
  source 1..75: mol_type = other DNA
tgtaaataagattgtgcgcagctatattcctgatttatttaactatgacgatattacgcagttgcataaccgttt

SEQ ID NO: 493878 - DNA, 75 bp, synthetic construct
  source 1..75: mol_type = other DNA
gtccggggtgtcatttcatgaaaccggcaggtgtttatgtctgtccgaaatgcggatttaaaccgctggctggtg

SEQ ID NO: 493879 - DNA, 75 bp, synthetic construct
  source 1..75: mol_type = other DNA
agtgatgtccggtgcatcatttacgcacgcccgacaaaatcagagattcgctggcttcaggcgattgggagagga

SEQ ID NO: 493880 - DNA, 75 bp, synthetic construct
  source 1..75: mol_type = other DNA
ctcaggaacgtgcgctgaatatgttgcgtcatgactggaaaacatatcagtccttcatgatgtacatgcctacag

SEQ ID NO: 493881 - DNA, 75 bp, synthetic construct
  source 1..75: mol_type = other DNA
gggacgccatcgccgggatgatgattctggcgatcaacctgatcggcggcgtctgtattgggatcttcaaataca

SEQ ID NO: 493882 - DNA, 75 bp, synthetic construct
  source 1..75: mol_type = other DNA
gaagcggatattccggcggataaactgatggccctgccctccagcgaaacctacggcgagatagacggcgtgctg

SEQ ID NO: 493883 - DNA, 75 bp, synthetic construct
  source 1..75: mol_type = other DNA
ggggtgccggaaggcagtgagtcgtggcagatcatgcaggcaaagcaacaacttcagaaaaacagaaacagtctg

SEQ ID NO: 493884 - DNA, 75 bp, synthetic construct
  source 1..75: mol_type = other DNA
ggctggcggatgagcaaacgcccgcaggcggcggaggcggaagagaaaagcctcgaaacgctgacccgcactatc

SEQ ID NO: 493885 - DNA, 75 bp, synthetic construct
  source 1..75: mol_type = other DNA
gtggcacagatcccttccctgctgctctccactgcggcggcgattatcgtcacccgcgtcagcgataacggcgat

SEQ ID NO: 493886 - DNA, 75 bp, synthetic construct
  source 1..75: mol_type = other DNA
cggggcttctcatagacgacgagcagtttgatgaaatcaatattgtgcgcggtcaggtcgttcccggtgggcggt

SEQ ID NO: 493887 - DNA, 75 bp, synthetic construct
  source 1..75: mol_type = other DNA
aacagatcgtcgcactcaacatgctgcgcggcgcatggaagcagaataattcgtttatgctctatgccccggttg

SEQ ID NO: 493888 - DNA, 75 bp, synthetic construct
  source 1..75: mol_type = other DNA
agttccagagtacgatgccgcaggtaaaagagcagatgaaagcggcggggaaagacccggtgctgctggtgccac

SEQ ID NO: 493889 - DNA, 75 bp, synthetic construct
  source 1..75: mol_type = other DNA
gttgcataaccgcctgtcgtcgatggctccgcgactggcggaagatttgagcgcggcgctgaactacagccagtt

SEQ ID NO: 493890 - DNA, 75 bp, synthetic construct
  source 1..75: mol_type = other DNA
ccctgacaaaaacagagcgtgagctggccctgtccagactgaaaggggaagaaaaagagcgtgtccgactggggt

SEQ ID NO: 493891 - DNA, 75 bp, synthetic construct
  source 1..75: mol_type = other DNA
acaatgctggcattctgcgtatttatcttttgcaattttctgccattgtggggtataaaacgcggcgcgcggctt

SEQ ID NO: 493892 - DNA, 75 bp, synthetic construct
  source 1..75: mol_type = other DNA
aacacagatagcaacagccagggcgcgtgcggcggtttatcgtgcgcaacaggcggttgcggctacccgtggtac

SEQ ID NO: 493893 - DNA, 75 bp, synthetic construct
  source 1..75: mol_type = other DNA
caggagggattcagtaactgggtggataatgcgtccgattacgcctcacaggcagcacagcttgcgacggagggt

SEQ ID NO: 493894 - DNA, 75 bp, synthetic construct
  source 1..75: mol_type = other DNA
tcaggaggcacgacagcgttacatcagtaatgccctggaagcctggcgtaataacgaggcgaataaacccaaatc

SEQ ID NO: 493895 - DNA, 75 bp, synthetic construct
  source 1..75: mol_type = other DNA
tcatcagtgctgcaggaaatatcaaaagttcttatgaatgccgcgattgtcaacgggatcaagacggcggcaaac

SEQ ID NO: 493896 - DNA, 75 bp, synthetic construct
  source 1..75: mol_type = other DNA
atgacgccgtggctactctttggcgcaggcggaaaaggtgtgggtgccagaacgcttgaactggcgctggcggaa

SEQ ID NO: 493897 - DNA, 75 bp, synthetic construct
  source 1..75: mol_type = other DNA
agggaagtaatgaaaaaaatatcccgtgctgctgttgaaaatgcgcctgaatattccggtgtctcgccggaaact

SEQ ID NO: 493898 - DNA, 75 bp, synthetic construct
  source 1..75: mol_type = other DNA
aacaatgcgctggaagcatggcgtaacaaccaggcgaataagccaaagatacgcggtggaaagtcggaagcagaa

SEQ ID NO: 493899 - DNA, 75 bp, synthetic construct
  source 1..75: mol_type = other DNA
cacaggcaaccctggatgataaacagcagaccgcactgaataacagcgagcgcgaactggctctgtcccgcctga

SEQ ID NO: 493900 - DNA, 75 bp, synthetic construct
  source 1..75: mol_type = other DNA
gtggcgacattacgtgaactgattattaaaatctcggcaaattcccggtcattccagtcagagatctcccgggct

SEQ ID NO: 493901 - DNA, 75 bp, synthetic construct
  source 1..75: mol_type = other DNA
catgaactggcaaacgcgccagcactcaacaagcagatctacagtctgattgaacctgacctgaaaccggcgtaa

SEQ ID NO: 493902 - DNA, 75 bp, synthetic construct
  source 1..75: mol_type = other DNA
ggcgtcactggagtacaaccgtgtagcgaggatacgtgaggaggcggcagagcagaacagggcataccaggcatt

SEQ ID NO: 493903 - DNA, 75 bp, synthetic construct
  source 1..75: mol_type = other DNA
gatatggcaggccagccgcgcagcaatgtggccgatgtactgaactttgccgaacaaaagctgtttgccattgcg

SEQ ID NO: 493904 - DNA, 75 bp, synthetic construct
  source 1..75: mol_type = other DNA
ccagacgatcgttgcgccagcacggaattccctcgctgatcgtggtcgattacctgcaactgatgcgctgcggcg

SEQ ID NO: 493905 - DNA, 75 bp, synthetic construct
  source 1..75: mol_type = other DNA
gctcgacgccctgacctgcggcttccagcctgccgacctgattatcgctgctgctcgtccctcggtcggcaaaac

SEQ ID NO: 493906 - DNA, 75 bp, synthetic construct
  source 1..75: mol_type = other DNA
tttgaaagatggcgcactgtatgacgaggcgctgaaatattgcatcaactgcaaacgttgtgaagtcgcctgccc

SEQ ID NO: 493907 - DNA, 75 bp, synthetic construct
  source 1..75: mol_type = other DNA
tgagtattattaatggtgtaatattgaatgatgtatcatgggatgtggtggttgaaagtacggaagtgaataact

SEQ ID NO: 493908 - DNA, 75 bp, synthetic construct
  source 1..75: mol_type = other DNA
ccgattggtacagtacgaacccgctttatcagcgatcaaacccgcttcgaatcgctcagccagcagggagtgggg

SEQ ID NO: 493909 - DNA, 75 bp, synthetic construct
  source 1..75: mol_type = other DNA
gacacagatagcaacagccagagcgcgggcggcattgtatcgtgcgcagcaggcggttgtggctgcccgtggtac

SEQ ID NO: 493910 - DNA, 75 bp, synthetic construct
  source 1..75: mol_type = other DNA
aagttgaaaacgcctttatggcctgggttggtggtgcgaatgatgccagcggtgcaacgaaaacgcttaccggaa

SEQ ID NO: 493911 - DNA, 75 bp, synthetic construct
  source 1..75: mol_type = other DNA
ggggcagcagcatggtatacgctgtaccagaatcaggagcaggccagggagtcagcgcgccagtatgcactgacg

SEQ ID NO: 493912 - DNA, 75 bp, synthetic construct
  source 1..75: mol_type = other DNA
ccaggcgatcgcttcgccagcatggaattccctcgctgatcgtagttgattacctgcaactgatgcgttgcggtg

SEQ ID NO: 493913 - DNA, 75 bp, synthetic construct
  source 1..75: mol_type = other DNA
gagtgaacgccttaaagaccaggaaacttttttatgccgaatcggatgcgcagcgtgcggactggcagaaagggc

SEQ ID NO: 493914 - DNA, 75 bp, synthetic construct
  source 1..75: mol_type = other DNA
ctgacagcggataaagtggtccccgcgttaatcagccagctggggatattacgtgatgaatatgcggccatgccg

SEQ ID NO: 493915 - DNA, 75 bp, synthetic construct
  source 1..75: mol_type = other DNA
cgagtttaaccgtctgcttgggctgggtaatgaattacttcagcagcgacaggggctggtgaatgtaccgttacg

SEQ ID NO: 493916 - DNA, 75 bp, synthetic construct
  source 1..75: mol_type = other DNA
actgaatggggaggaaaaagagcgggcccgtctggggtatgcggcggatgaccttggttttgtgggggatccgta

SEQ ID NO: 493917 - DNA, 75 bp, synthetic construct
  source 1..75: mol_type = other DNA
actgaatggggaggaaaaagagcgggcccgactggggtatgcggcggatgacctgggttttgtgggggatccgta

SEQ ID NO: 493918 - DNA, 75 bp, synthetic construct
  source 1..75: mol_type = other DNA
actgaaaggggaggaaaaagagcgggcccggctggggtatgcggcggatgaccttggttttgtgggggatccgta

SEQ ID NO: 493919 - DNA, 75 bp, synthetic construct
  source 1..75: mol_type = other DNA
actgaagggggaggaaaaagagcgggcccgtctggggtatgcggcggatgacctaggttttgtgggggatccgta

SEQ ID NO: 493920 - DNA, 75 bp, synthetic construct
  source 1..75: mol_type = other DNA
actgaagggggaggaaaaagagcgggcccgactggggtatgcggcggatgaccttggttttgtgggggatccgta

SEQ ID NO: 493921 - DNA, 75 bp, synthetic construct
  source 1..75: mol_type = other DNA
actgaatggggaggaaaaagagcgggcccggctggggtatgcggcggatgacctaggttttgtgggggatccgta

SEQ ID NO: 493922 - DNA, 75 bp, synthetic construct
  source 1..75: mol_type = other DNA
cagagcgtgagctggccctgtccagactgaaaggggacgaaaaagagcggggccgtctggggtatgcggcggatg

SEQ ID NO: 493923 - DNA, 75 bp, synthetic construct
  source 1..75: mol_type = other DNA
tgaagctgattgactgcatggcgaaggtcagggcgtggacgccggagatgcgtgccggaagtggcgtggtggtgt

SEQ ID NO: 493924 - DNA, 75 bp, synthetic construct
  source 1..75: mol_type = other DNA
tgaacagaaatattgctgccagaagcgcggcccagaatgggctgaacagtacaacggcggtgggctcacgtctga

SEQ ID NO: 493925 - DNA, 75 bp, synthetic construct
  source 1..75: mol_type = other DNA
actgaaaggggaggaaaaagagcgggcccgtctggggtatgcggcggatgacctgggttttgtgggggatccgta

SEQ ID NO: 493926 - DNA, 75 bp, synthetic construct
  source 1..75: mol_type = other DNA
cagagcgtgagctggccctgtcctgactgaaaggggacgaaaaagagcggggccgactggggtatgcggcggatg

SEQ ID NO: 493927 - DNA, 75 bp, synthetic construct
  source 1..75: mol_type = other DNA
cagagcgtgagctggccctgtccagactgaatggggacgaaaaagagcggggccgactggggtatgcggcggatg

SEQ ID NO: 493928 - DNA, 75 bp, synthetic construct
  source 1..75: mol_type = other DNA
gaaaatcagagacggaaaaagcggaagacagtttttcccggctgctgaagcagcagaaagagcaactggcactgg

SEQ ID NO: 493929 - DNA, 75 bp, synthetic construct
  source 1..75: mol_type = other DNA
gtgtggcccgtaaagatctgaaggcaatggcggatgacggaaaactgacagcggataaagtggtccctgcgttaa

SEQ ID NO: 493930 - DNA, 75 bp, synthetic construct
  source 1..75: mol_type = other DNA
tacagcagaagccagttcggtgatcacgcagttcagtcaggcactggcgcagggagtgctgcgcggtgaagaatt

SEQ ID NO: 493931 - DNA, 75 bp, synthetic construct
  source 1..75: mol_type = other DNA
cgctgggcgtacgcgcggtgggcagtatgaacggcagcgccggtctggtgtattccccggtctaccacatcgcca

SEQ ID NO: 493932 - DNA, 75 bp, synthetic construct
  source 1..75: mol_type = other DNA
gggcggcggatggctcgctgggtgtgcgcgcggtgggtagtatgaacggcagtgcgggtctggtgtattccccgg

SEQ ID NO: 493933 - DNA, 75 bp, synthetic construct
  source 1..75: mol_type = other DNA
ggtgggcggtgcgaatgaggccagcggggtgacgaaaacgctctccggcgtgctgaacggtgttgccggacagat

SEQ ID NO: 493934 - DNA, 75 bp, synthetic construct
  source 1..75: mol_type = other DNA
cactggcggaagcacagttcaggggaacgcagattgccacggcgcgggcaagggcagccgtgtaccgtgcacagc

SEQ ID NO: 493935 - DNA, 75 bp, synthetic construct
  source 1..75: mol_type = other DNA
ataacgaggcgaataaacccaaatcccggggtggaaaatcagagacggaaaaagcggaagacagtttttcccggc

SEQ ID NO: 493936 - DNA, 75 bp, synthetic construct
  source 1..75: mol_type = other DNA
aatcctgcaggaaatatcaaaagttcttatgaatgcggccattgtcaacggcattaagatggcggcaaacagtat

SEQ ID NO: 493937 - DNA, 75 bp, synthetic construct
  source 1..75: mol_type = other DNA
ggagattcagaagcaggagctgctgcgcaatgctgccctgattgaccagaagaaaatccgggagcagttacgggc

SEQ ID NO: 493938 - DNA, 75 bp, synthetic construct
  source 1..75: mol_type = other DNA
cggactgaaaaatcaaattgctgattatcaacgttggcttgatgaaagttcgcagagtggttctggtgctgaaat

SEQ ID NO: 493939 - DNA, 75 bp, synthetic construct
  source 1..75: mol_type = other DNA
ttgagcagaaaaataacgagcttctgagacagtatcaggccggagaaattgaagaagccctgtggaaacaggaga

SEQ ID NO: 493940 - DNA, 75 bp, synthetic construct
  source 1..75: mol_type = other DNA
atccttcctcattactggatgtattacatcctgttgttctgcgttagctatgtgcttaacggtgttgttaattcc

SEQ ID NO: 493941 - DNA, 75 bp, synthetic construct
  source 1..75: mol_type = other DNA
tatgtcgatgaaatcttctggatccccaactttcagagactgcgcaaagtcgcctcggggatggcgtcgcagtcc

SEQ ID NO: 493942 - DNA, 75 bp, synthetic construct
  source 1..75: mol_type = other DNA
tcgcctttgcgcgcatggtcgacgtcgacctgtcaggagacccgattgtcatcggcaacaacggcgcagagctga

SEQ ID NO: 493943 - DNA, 75 bp, synthetic construct
  source 1..75: mol_type = other DNA
tgttaaacgacccgcgacgccaggcggctttactgtactggcaggggttttccgtgccgcagattgccgaaatgt

SEQ ID NO: 493944 - DNA, 75 bp, synthetic construct
  source 1..75: mol_type = other DNA
tacagcgctgcatggtcgacagcctcgagaaatgggaggactacgcgccatttgccgaccggccattcggccacc

SEQ ID NO: 493945 - DNA, 75 bp, synthetic construct
  source 1..75: mol_type = other DNA
gcgcctcgcgcgggtgaaccgctacggccagactggcaacgaagcggatttaaacccgaacgtggccaaccgcaa

SEQ ID NO: 493946 - DNA, 75 bp, synthetic construct
  source 1..75: mol_type = other DNA
ccgatctcgcctgggcaaccatgcacgtattaatcaatgagccgctgaccgccgcaactggtgagcagtcatcca

SEQ ID NO: 493947 - DNA, 75 bp, synthetic construct
  source 1..75: mol_type = other DNA
ccgatctggcatgggcaacgatgcacgcactgtttaacgaaccgctgcagggcgaatccgccaataccagcaata

SEQ ID NO: 493948 - DNA, 75 bp, synthetic construct
  source 1..75: mol_type = other DNA
agcggtggagcatcttcgcgcactggagaaaaaaggcgtcatcacgataaagcgtggcgtggcacgggggataac

SEQ ID NO: 493949 - DNA, 75 bp, synthetic construct
  source 1..75: mol_type = other DNA
cagcctctcatcgtgtgggagcttttacatcaactctgaatatagagctacattcccgctatgccattatgttat

SEQ ID NO: 493950 - DNA, 75 bp, synthetic construct
  source 1..75: mol_type = other DNA
gacggtatcgcaccgatttcccgcgttgaaagcagccttgaggcgcgcctgattcagctcatcgccaagccgcaa

SEQ ID NO: 493951 - DNA, 75 bp, synthetic construct
  source 1..75: mol_type = other DNA
tccgcaagctgaccgagaaatacaacgtcgaatacatcggcattgacgcaaccggcctcggtctcggcgtgttcc

SEQ ID NO: 493952 - DNA, 75 bp, synthetic construct
  source 1..75: mol_type = other DNA
tcgcctttgcccgtctggttgacgttgacctgaccggtgacccgattgtcctgggcaataacggcgcaaaactaa

SEQ ID NO: 493953 - DNA, 75 bp, synthetic construct
  source 1..75: mol_type = other DNA
aataccagaacctgctgatgtgcgagttcgtggacgatctcgcgtccgtatttccgctcagcgagctgcaggcgt

SEQ ID NO: 493954 - DNA, 75 bp, synthetic construct
  source 1..75: mol_type = other DNA
acaatgcacgcactatttaacgaaccgctgcagggcgaatccgccaataccagcaatattgtggagattttttga

SEQ ID NO: 493955 - DNA, 75 bp, synthetic construct
  source 1..75: mol_type = other DNA
agaacgtgaaagcgttctttcctgccgtgcgggagtttgtctacaaccccaacgttaaaaacgccctggtactca

SEQ ID NO: 493956 - DNA, 75 bp, synthetic construct
  source 1..75: mol_type = other DNA
tccaggagctgcgcaaagttgcctccggtatggccattcacaagaaatggcgacaaacctacttttccacgccgt

SEQ ID NO: 493957 - DNA, 75 bp, synthetic construct
  source 1..75: mol_type = other DNA
aatcggggcaatgtcttttattatggaagatgtacctgataactgtacttatgtcaccaggaaggaatccagagt

SEQ ID NO: 493958 - DNA, 75 bp, synthetic construct
  source 1..75: mol_type = other DNA
gtgataaacaaatgacggtcaatatggggcaaatcagcagtaaccggtttcatgcggtaggggaagatagcgcac

SEQ ID NO: 493959 - DNA, 75 bp, synthetic construct
  source 1..75: mol_type = other DNA
cgaccagtctttcgagtaccagttgcagtggtaccgcgcaggactggagcaccgtattcgtgacattctcaaatc

SEQ ID NO: 493960 - DNA, 75 bp, synthetic construct
  source 1..75: mol_type = other DNA
tacaggatggcagcggcgtgaataaacttaccgctgaacagcgtgaacgttatctacaggccagcgccgattgcc

SEQ ID NO: 493961 - DNA, 75 bp, synthetic construct
  source 1..75: mol_type = other DNA
gaaaaaaccgcaccgttaaaccgggtcgagttcacgctcgaggctcggctgattcagctctatgcaaagcctgac

SEQ ID NO: 493962 - DNA, 75 bp, synthetic construct
  source 1..75: mol_type = other DNA
gactttcgcgcccaggctgacgccatcaaaaaactgaccgaacagtataacgtgacctatatcggcatcgactcg

SEQ ID NO: 493963 - DNA, 75 bp, synthetic construct
  source 1..75: mol_type = other DNA
cgacctgtcaggcgacccgattgtcatcggcaataacggcgcagagctgattttcctcgggacaaactccaacac

SEQ ID NO: 493964 - DNA, 75 bp, synthetic construct
  source 1..75: mol_type = other DNA
cggatattgcgtgggcgaccatgcacgccctgttaaatgagccactttccgccggtagcggcatgcaatcaacct

SEQ ID NO: 493965 - DNA, 75 bp, synthetic construct
  source 1..75: mol_type = other DNA
gctgttagcgaaacgttcctcttgcggtaaagacacgctctatttctctctgcgctatttgcccgtcgcgcacgg

SEQ ID NO: 493966 - DNA, 75 bp, synthetic construct
  source 1..75: mol_type = other DNA
tcagaaaatcagaacaagttggtgccctgcagtcatcgctgactattgcccttcatacccgatatgcgatccgtc

SEQ ID NO: 493967 - DNA, 75 bp, synthetic construct
  source 1..75: mol_type = other DNA
ggcgtcgatgcccgctggccggaagaggcgctttctcccctgaaaaactacctgcaggaactgcccggcttcgat

SEQ ID NO: 493968 - DNA, 75 bp, synthetic construct
  source 1..75: mol_type = other DNA
tattccccggtctaccacatcgccattcagaatgacggggctaacggacagatagggccggaggcggcaggcagt

SEQ ID NO: 493969 - DNA, 75 bp, synthetic construct
  source 1..75: mol_type = other DNA
agcactcatcgaccagaaaaagattcgtgagcagcttgctgcgtatgagagcagtctggcggacagtaatgccag

SEQ ID NO: 493970 - DNA, 75 bp, synthetic construct
  source 1..75: mol_type = other DNA
atgaaagtcgcagtcctcggcgctgctggcggtattggccaggcgcttgcattactgttaaaaacccaactgcct

SEQ ID NO: 493971 - DNA, 75 bp, synthetic construct
  source 1..75: mol_type = other DNA
cttcttatctggatttaatgtcgcatagtggaacctcactgacgcagtctgtggcaagagcgatgttacggtttg

SEQ ID NO: 493972 - DNA, 75 bp, synthetic construct
  source 1..75: mol_type = other DNA
gcacggctacctgaccggccagttctcagagacatactccactttcaccgaaacttacggtcacatttttgccca

SEQ ID NO: 493973 - DNA, 75 bp, synthetic construct
  source 1..75: mol_type = other DNA
tctgaaagatggcgcactgtatgacgaggcgctgaaatattgcatcaactgcaaacgttgcgaagtcgcctgccc

SEQ ID NO: 493974 - DNA, 75 bp, synthetic construct
  source 1..75: mol_type = other DNA
cccagggcttgagctaacagtgctggattcccagtgctgcggtattgcaggaacctacggtttcaagaaagagaa

SEQ ID NO: 493975 - DNA, 75 bp, synthetic construct
  source 1..75: mol_type = other DNA
ccctgggcttgaactgacagtgttggattctcagtgctgcggtattgctggtacttatggattcaaaaaagagaa

SEQ ID NO: 493976 - DNA, 75 bp, synthetic construct
  source 1..75: mol_type = other DNA
ttacccgtaatattgcggccagaacagcggcacagacaacgctgaataatgttacgtcagtggggagtcgtttat

SEQ ID NO: 493977 - DNA, 75 bp, synthetic construct
  source 1..75: mol_type = other DNA
ggctgatgggggaagccggacctgaagctatcatgccgcttacgcgggcagcggacggttctcttggggtcaggg

SEQ ID NO: 493978 - DNA, 75 bp, synthetic construct
  source 1..75: mol_type = other DNA
cgactgcgaaacctgcaaatggcagattgagatgtccacaagtcttcgctgcgaacatccgattacgctactggc

SEQ ID NO: 493979 - DNA, 75 bp, synthetic construct
  source 1..75: mol_type = other DNA
ggccgtcgacctgagccatatccctactgctgtgaaaatcaaaggtttttctggtgaagatgcgacccctgctct

SEQ ID NO: 493980 - DNA, 75 bp, synthetic construct
  source 1..75: mol_type = other DNA
cgtccgggagtttgtctacaaccccaatgttaaaaatgccctagtactcaaagcctacgacattatcagtcaccg

SEQ ID NO: 493981 - DNA, 75 bp, synthetic construct
  source 1..75: mol_type = other DNA
gccaggaggtgctgttatccctgctcagtttctgcaccgcgtgcagcatccacggcgttcagacccgcgagtgtg

SEQ ID NO: 493982 - DNA, 75 bp, synthetic construct
  source 1..75: mol_type = other DNA
gaatggcagtcacgggcgatagccatgaacaaggccctggtctttggcacaaaattctggtgcgtccgggaagga

SEQ ID NO: 493983 - DNA, 75 bp, synthetic construct
  source 1..75: mol_type = other DNA
ttgacgacaaggcatcggtgttcccgttcgaggagctgcaacgctgcatggtcgacacgctggaagaatgggaag

SEQ ID NO: 493984 - DNA, 75 bp, synthetic construct
  source 1..75: mol_type = other DNA
tacgcagaacggcgacagtgccggatgcgtggtggtggctccgccagccgtgccgggcggtaagttccgcattct

SEQ ID NO: 493985 - DNA, 75 bp, synthetic construct
  source 1..75: mol_type = other DNA
gcctggaatgtaaacattattcgctgaccagcgatgcgccgtcagggaaggaaggtgccgcgttcatggcgatga

SEQ ID NO: 493986 - DNA, 75 bp, synthetic construct
  source 1..75: mol_type = other DNA
gattcagctcatcgccaagccgcaaaagacagggggtgatttcaaagagattgacctgctcggacggcagattga

SEQ ID NO: 493987 - DNA, 75 bp, synthetic construct
  source 1..75: mol_type = other DNA
catatgaaagacaaccgctgggttccaggctggatgtgtgctccacatccacagacagatgccactgaacgcacc

SEQ ID NO: 493988 - DNA, 75 bp, synthetic construct
  source 1..75: mol_type = other DNA
gataaacaatactttatgggaaagtaataccgcagctgcttttctgaatcgcagggctcactctttaaatacatc

SEQ ID NO: 493989 - DNA, 75 bp, synthetic construct
  source 1..75: mol_type = other DNA
ttcggggagagggtggtgtcagagtggggcgaatatcctttaataatatatcagcgatactgggcacagtggcgg

SEQ ID NO: 493990 - DNA, 75 bp, synthetic construct
  source 1..75: mol_type = other DNA
aacgaccacacgggaagagcgacgaattcgctatatcacgctgaacagaccagaactacctgaaacaaaagagga

SEQ ID NO: 493991 - DNA, 75 bp, synthetic construct
  source 1..75: mol_type = other DNA
gatgcaccacgcctggaccgtctccgccgtctgttccccgtactctcaacgtcgaatccgtcaccggaaaatgtc

SEQ ID NO: 493992 - DNA, 75 bp, synthetic construct
  source 1..75: mol_type = other DNA
taccttccttatccgaaaaaacagatattatagaatctgcatttactgaacaggcagcagaatcagcccacactg

SEQ ID NO: 493993 - DNA, 75 bp, synthetic construct
  source 1..75: mol_type = other DNA
atccattgcctgccgtgcgtgccattgaatgaagtggcaaaagagaacctgccgcattacgtcatgagtgcaacc

SEQ ID NO: 493994 - DNA, 75 bp, synthetic construct
  source 1..75: mol_type = other DNA
ttaaccgcaccagaaatctggctacttaccgatctgacggaagattcaacgctggtagacggttttctggcacag

SEQ ID NO: 493995 - DNA, 75 bp, synthetic construct
  source 1..75: mol_type = other DNA
gagaatctactgatttttttgaagaaaattttatttatataattgctaaaaaattagggagtgctgatgataaga

SEQ ID NO: 493996 - DNA, 75 bp, synthetic construct
  source 1..75: mol_type = other DNA
ggtggccgccattctctgtgagcgccagccggagtcaccgcagggttaccgactgcgccgccatgctctgtggca

SEQ ID NO: 493997 - DNA, 75 bp, synthetic construct
  source 1..75: mol_type = other DNA
aaagaaaagacaccgtttcccacgtcccgcccactggacccgtgagtatactcacgagtgcgtggaaaaaataaa

SEQ ID NO: 493998 - DNA, 75 bp, synthetic construct
  source 1..75: mol_type = other DNA
tgctggttatggtgacgggcgtggcgctgtatctgacagggcgcggcatggcggagatggatacccgtctggcaa

SEQ ID NO: 493999 - DNA, 75 bp, synthetic construct
  source 1..75: mol_type = other DNA
tccccctctgcttccggcaccgggaaaaaggacgtatccggaacgaaagaaccctctccggtggtacagaaaact

SEQ ID NO: 494000 - DNA, 75 bp, synthetic construct
  source 1..75: mol_type = other DNA
gcaggcccgtttacaggctaaccctgcgatggcgagtgcagttgataccgtgactggcctcggtgcttcattcgg

SEQ ID NO: 494001 - DNA, 75 bp, synthetic construct
  source 1..75: mol_type = other DNA
gctggtagatggttttttggctcagattcattgtctgccatgtgtgccgattaatgaggtggcaaaagagaaact

SEQ ID NO: 494002 - DNA, 75 bp, synthetic construct
  source 1..75: mol_type = other DNA
ttacaggctaatcctgcgatggcgagtgcagttgataccatgactggccttggtgcttcattcggtttgctgtga

SEQ ID NO: 494003 - DNA, 75 bp, synthetic construct
  source 1..75: mol_type = other DNA
agaatcagtatccgccggaataaattcatctgccgtcgaaaaacatatccctgaagcgccagccaggaagaagaa

SEQ ID NO: 494004 - DNA, 75 bp, synthetic construct
  source 1..75: mol_type = other DNA
atgcttctctccatcgacagcaacgacgctaataccgcgctcttgcagaaaaaaacaatcagcggcctgagtggc

SEQ ID NO: 494005 - DNA, 75 bp, synthetic construct
  source 1..75: mol_type = other DNA
gggccgcagaaagaattggtctgacacttcaacgctgtcgctggctttcggctgatgtcattatggtgctggttg

SEQ ID NO: 494006 - DNA, 75 bp, synthetic construct
  source 1..75: mol_type = other DNA
cagatgaatttggtgttacagaacgtaccttacagcgcgattttcatcagcgtctggttcacctggatttagagt

SEQ ID NO: 494007 - DNA, 75 bp, synthetic construct
  source 1..75: mol_type = other DNA
gagtgtttctcgcaactcatcctggcaataagacagtgtaaccacatctctctgatgactgagcgatggtatccg

SEQ ID NO: 494008 - DNA, 75 bp, synthetic construct
  source 1..75: mol_type = other DNA
aaatcagaaaaaggctgagcttggtaaagggaaaaaagctgaacagtgggccaccggggtaaaatatgacgcaaa

SEQ ID NO: 494009 - DNA, 75 bp, synthetic construct
  source 1..75: mol_type = other DNA
atggatttagatattgagttagtaaattgcgatattacagcttttaaacaaggtcaagcactgatgaatccccta

SEQ ID NO: 494010 - DNA, 75 bp, synthetic construct
  source 1..75: mol_type = other DNA
cggtggcccacttttccttaaatttctggggcaacgactgccctttaaacctgtacccacagagtttgccgatct

SEQ ID NO: 494011 - DNA, 75 bp, synthetic construct
  source 1..75: mol_type = other DNA
aacgtactttacagcgcgattttcatcagcgtctggttcacctggatttagagtacagaaatggcaggtacagcc

SEQ ID NO: 494012 - DNA, 75 bp, synthetic construct
  source 1..75: mol_type = other DNA
aatgcgaaagggattttatttcataaatcctaactttgtatttaatggcgatagaatagcatttacaaccctgat

SEQ ID NO: 494013 - DNA, 75 bp, synthetic construct
  source 1..75: mol_type = other DNA
tagaagatattggtgtactggtagcgcgcattttaatgccgattctgtttattaccgcaggctggggaaaaatta

SEQ ID NO: 494014 - DNA, 75 bp, synthetic construct
  source 1..75: mol_type = other DNA
cagaaagctggcgtgacaaacagacgggggagatgcgggagcagacagaatggcaccgcgtggtgctgttcggca

SEQ ID NO: 494015 - DNA, 75 bp, synthetic construct
  source 1..75: mol_type = other DNA
gataacctgtcttaccgacaaccaggagccctctccctgccttatctggctaccggcgccggatatcactgcaac

SEQ ID NO: 494016 - DNA, 75 bp, synthetic construct
  source 1..75: mol_type = other DNA
ccaaaaaagcgaccaaacgtaaacgtcacctgcgtccaaaagccatggtttccaaaggagatctgggcctggtaa

SEQ ID NO: 494017 - DNA, 75 bp, synthetic construct
  source 1..75: mol_type = other DNA
gcaagcccgtttacaggctaatcctgcgatggcgagtgcagttgataccatgactggccttggtgcttcattcgg

SEQ ID NO: 494018 - DNA, 75 bp, synthetic construct
  source 1..75: mol_type = other DNA
ctggtggataatgtgtatcaccggattgccggtatcagcaaggatgacgggctgataaccctgcaggatgcggaa

SEQ ID NO: 494019 - DNA, 75 bp, synthetic construct
  source 1..75: mol_type = other DNA
ccggtatcgatgaggccatcagccgtgagcagctgattcccctcgaccgtgagaaggggctgttcacgtccggga

SEQ ID NO: 494020 - DNA, 75 bp, synthetic construct
  source 1..75: mol_type = other DNA
gggaaatcgatgcgcagataaaacggggtgatttactgcatgtggatgtggcaaaaggttatggcacagacctgc

SEQ ID NO: 494021 - DNA, 75 bp, synthetic construct
  source 1..75: mol_type = other DNA
gttatgcaatttgccgttctgcagattttaactcatgggaatatgtgccagaccatcgcggtgaaatcgtctata

SEQ ID NO: 494022 - DNA, 75 bp, synthetic construct
  source 1..75: mol_type = other DNA
ccgggcggaagctgacgcaggcagaaacaacccgatttaacgccgtgctggattacattgacgcggtgacggtaa

SEQ ID NO: 494023 - DNA, 75 bp, synthetic construct
  source 1..75: mol_type = other DNA
ttggccgtttttcgccatttttaatgtccgctattggtcattaatgttgtccgctttccgccatttcatcatcac

SEQ ID NO: 494024 - DNA, 75 bp, synthetic construct
  source 1..75: mol_type = other DNA
aggggcgggaagtgcagattatcgccgctgaccgtcgctcgcagatgaacctgaagcaggatgaacggctgtccg

SEQ ID NO: 494025 - DNA, 75 bp, synthetic construct
  source 1..75: mol_type = other DNA
aggcgctgggctatgaaacggaagtggttggtaagcacggtatgtgggaaatgccgggcgtaccggtggaggcct

SEQ ID NO: 494026 - DNA, 75 bp, synthetic construct
  source 1..75: mol_type = other DNA
accgtttcacggtggtgcagggctatgccggtgtgggtaagaccacacagttccgggcggtgatgtcagccgtga

SEQ ID NO: 494027 - DNA, 75 bp, synthetic construct
  source 1..75: mol_type = other DNA
cttcacacgccggcacagcaggccattcatctggcccttcctgtgctggaaagtaaaaacctggccttcagcatg

SEQ ID NO: 494028 - DNA, 75 bp, synthetic construct
  source 1..75: mol_type = other DNA
gcctgcaggtggcatccgtcagcgaggacgcgatgacggttgttgtgccgggacgggctgaaccggccaccctgc

SEQ ID NO: 494029 - DNA, 75 bp, synthetic construct
  source 1..75: mol_type = other DNA
ttgccctgtcgcgtatgaagcagcatgtacaggtgtacaccgatgaccgtcagggctggacggatgccattaaca

SEQ ID NO: 494030 - DNA, 75 bp, synthetic construct
  source 1..75: mol_type = other DNA
gaccatcgtggtgaaatcgtctttagcacagaaacaggagaatcaaaagaaatcaaagctccgggggattaccct

SEQ ID NO: 494031 - DNA, 75 bp, synthetic construct
  source 1..75: mol_type = other DNA
gtgcaactggcagaacgtgctggcatgaatgtgcagattctgcgaaacaagctgaacccagctcaacctcattta

SEQ ID NO: 494032 - DNA, 75 bp, synthetic construct
  source 1..75: mol_type = other DNA
acagtcttacgtcatgcgtgctatgcgggaactcggcgaactggcgagcggcgcggtctctgatgagcgtctgac

SEQ ID NO: 494033 - DNA, 75 bp, synthetic construct
  source 1..75: mol_type = other DNA
gcatgcgcgtctgcagactaatcccgctatgtcgagcgtcgtcgataccatgagcggtattggcgcatccttcgg

SEQ ID NO: 494034 - DNA, 75 bp, synthetic construct
  source 1..75: mol_type = other DNA
gtgcggtgtctggcgatgtaaaaacctgtgccggtcgtcgtgatgctattagcagcattaactctgtaacacgac

SEQ ID NO: 494035 - DNA, 75 bp, synthetic construct
  source 1..75: mol_type = other DNA
gccgcattacgtcatgagcgcaactgcagagatcgggcgtgttgcagcaggtgcggtatctggtgatgtaaaaac

SEQ ID NO: 494036 - DNA, 75 bp, synthetic construct
  source 1..75: mol_type = other DNA
gcaggcccgtttacaggctaatcctgcgatggcgagtgcagttgataccgtgactggcctcggtgcttcatttgg

SEQ ID NO: 494037 - DNA, 75 bp, synthetic construct
  source 1..75: mol_type = other DNA
cgccccgatcactgcaacgccgggcggcactattgtgaaagcaacgcctacgtttgatcgcacccgcgcagatga

SEQ ID NO: 494038 - DNA, 75 bp, synthetic construct
  source 1..75: mol_type = other DNA
cttacgctctatttgtcggttgttgtaaatgaacaggccgacatgatcactttgaacgagatttctgataccgaa

SEQ ID NO: 494039 - DNA, 75 bp, synthetic construct
  source 1..75: mol_type = other DNA
gcagaaacaacccgacttaacgccgtgctggattacattgacgcggtgacggcaacagataccagcaccgcgccg

SEQ ID NO: 494040 - DNA, 75 bp, synthetic construct
  source 1..75: mol_type = other DNA
gctggttgatggtttcctggcacaaatccattgcctgccgtgcgtgccgctgaatgaagtggcaaaagagaaaat

SEQ ID NO: 494041 - DNA, 75 bp, synthetic construct
  source 1..75: mol_type = other DNA
taccatcgacaaccacgatgataaagcctggcgcgatacactgctgaaagtggcgaccattttatgcgagcgcca

SEQ ID NO: 494042 - DNA, 75 bp, synthetic construct
  source 1..75: mol_type = other DNA
aaagcgtactgctggtttgaaacttcggatacaacttcgcttactggagttacgtcgattagcgccccgatcacc

SEQ ID NO: 494043 - DNA, 75 bp, synthetic construct
  source 1..75: mol_type = other DNA
cgttaatcagccagctgggggtattgcgtgatgaatatgccgccatgccggaaacggtctctgacgggatcacaa

SEQ ID NO: 494044 - DNA, 75 bp, synthetic construct
  source 1..75: mol_type = other DNA
agctgccggaacggcgggggcatttgcaggtgcctttgccaccggacacctgatttctctggccgatgaatggag

SEQ ID NO: 494045 - DNA, 75 bp, synthetic construct
  source 1..75: mol_type = other DNA
acgattgttttggctgtcatatagcccctcactatctcctgcaactcctgagaagccaaaagcaatatccactgc

SEQ ID NO: 494046 - DNA, 75 bp, synthetic construct
  source 1..75: mol_type = other DNA
gctaccacaggcaaccctggatgataaacagcagaccgcactgaataacagcaagcgcgaactggctctgtcccg

SEQ ID NO: 494047 - DNA, 75 bp, synthetic construct
  source 1..75: mol_type = other DNA
ccgggaagagaccctgaagaatgataatgtggctgcgcgtgcatcaaatgaagccgaactgctggggtacgggca

SEQ ID NO: 494048 - DNA, 75 bp, synthetic construct
  source 1..75: mol_type = other DNA
ctggcgaagctgaaataccagactgcgcagggcgagctgaaaaccctgtcggagatacagaagcaggaactgctg

SEQ ID NO: 494049 - DNA, 75 bp, synthetic construct
  source 1..75: mol_type = other DNA
aaagagaatggcgaccctctaatgagcgataatgccgttcgtaaatatatgcgaattctcttcgaggctttccag

SEQ ID NO: 494050 - DNA, 75 bp, synthetic construct
  source 1..75: mol_type = other DNA
cttattctgcatgcggcagtgggctccgctaccgtggcaatgatgggggcaacggcaattgttgcacccatgctg

SEQ ID NO: 494051 - DNA, 75 bp, synthetic construct
  source 1..75: mol_type = other DNA
ttctctccaatatgcatatgcacccgattcttctggcctggttagtggctcttattctgcatgcggcagtgggct

SEQ ID NO: 494052 - DNA, 75 bp, synthetic construct
  source 1..75: mol_type = other DNA
tgctccatttgtttgcgaagatggtgtcgatgcggtagctgatgcgctacggattaagcagagcaataaatcgcg

SEQ ID NO: 494053 - DNA, 75 bp, synthetic construct
  source 1..75: mol_type = other DNA
ccaacattgatcaaacttggattagtccgctattgcgaagcattgaagaaagcaggccatgaacgtttatttccc

SEQ ID NO: 494054 - DNA, 75 bp, synthetic construct
  source 1..75: mol_type = other DNA
taaagcaaaagagaatggcgaccctctaatgagtgataacaccgttcgtaaatatatgcgggttatcttcgaagc

SEQ ID NO: 494055 - DNA, 75 bp, synthetic construct
  source 1..75: mol_type = other DNA
ggactggtggatctgatcgacagcagggttgtgtcaattatgcagtcatcgcgtcgggatggaggattgtacagt

SEQ ID NO: 494056 - DNA, 75 bp, synthetic construct
  source 1..75: mol_type = other DNA
gacgcagattgccacggcgcgggcaagagcagccgtgtaccgtgcccagcaggcagtggcggcagcccgcgggac

SEQ ID NO: 494057 - DNA, 75 bp, synthetic construct
  source 1..75: mol_type = other DNA
cacgcagattgccacggcgcgggcaagcgcagccgtgtaccgtgcacagcaggcagtggcggcagcccgcgggac

SEQ ID NO: 494058 - DNA, 75 bp, synthetic construct
  source 1..75: mol_type = other DNA
aacgcagattgccacggcgcgggcaagggcagccgtgtaccgtgcccagcaggcagtggcggcagcccgcgggac

SEQ ID NO: 494059 - DNA, 75 bp, synthetic construct
  source 1..75: mol_type = other DNA
tgaacagaaatattgctgccagaaccgcagcccagaatgagctgaacagtacaacggcggtgggctcacgtctga

SEQ ID NO: 494060 - DNA, 75 bp, synthetic construct
  source 1..75: mol_type = other DNA
tgaacagaaatattgctgccagaaacgccgcccagaatgagctgaacagtacaacggcggtgggctcacgtctga

SEQ ID NO: 494061 - DNA, 75 bp, synthetic construct
  source 1..75: mol_type = other DNA
tgaacagaaatattgctgccagaaacgcagcccagaatgcgctgaacagtacaacggcggtgggctcacgtctga

SEQ ID NO: 494062 - DNA, 75 bp, synthetic construct
  source 1..75: mol_type = other DNA
gcggtgacaaaactaccgttgatgggaaaatccctgcataaaaccattgaaaaaaatgaagtgaaaacggcaaaa

SEQ ID NO: 494063 - DNA, 75 bp, synthetic construct
  source 1..75: mol_type = other DNA
ccaaattcctggcgcttacgatggtacggtgttcccacctaacgttgaaggcggccggtttgtctcatggctggc

SEQ ID NO: 494064 - DNA, 75 bp, synthetic construct
  source 1..75: mol_type = other DNA
agcagcacagacaacgctgaatactgtcacgtcagtgggaagtcgtctgttaagtggagcactgggactggttgg

SEQ ID NO: 494065 - DNA, 75 bp, synthetic construct
  source 1..75: mol_type = other DNA
agcgcaaaaacgaaaggccgtggacgtaaggccgcgcagcccgagcctcagccgccgtctgaacccgagtataac

SEQ ID NO: 494066 - DNA, 75 bp, synthetic construct
  source 1..75: mol_type = other DNA
ttgctgtcattggtagcgatggttcaggcaagtcaacggtgtgtgaacatctcattaacgttgttggaaaatatg

SEQ ID NO: 494067 - DNA, 75 bp, synthetic construct
  source 1..75: mol_type = other DNA
ttgccgttatcggtagcgatggttcaggtaaatctacagtttgtgaacatcttatttctgttgtagaaaaatatg

SEQ ID NO: 494068 - DNA, 75 bp, synthetic construct
  source 1..75: mol_type = other DNA
atggtaaatgctattgaaagtggaattggcggaacgctggggttcctcgctgcggttatcggccttggcacgata

SEQ ID NO: 494069 - DNA, 75 bp, synthetic construct
  source 1..75: mol_type = other DNA
cggcttttgccgactcaactctttctctgccggtgtttaacatcggcctaaacgagcagtacagatactggacgc

SEQ ID NO: 494070 - DNA, 75 bp, synthetic construct
  source 1..75: mol_type = other DNA
acaatgacgtacggtgtgatcttgtaaaaaagaatgcccgtatgcttggttgttatcttttgccttatttcgtcg

SEQ ID NO: 494071 - DNA, 75 bp, synthetic construct
  source 1..75: mol_type = other DNA
ttccagtggtatgtcagaacaagatgtaaattattttctggataatgttgtataccagcactttgagcaggccag

SEQ ID NO: 494072 - DNA, 75 bp, synthetic construct
  source 1..75: mol_type = other DNA
aacttgaagaggttgattagcatatgtgagaagacaaacacaaaacttgtggttgctggtgtaaaaggtgaggga

SEQ ID NO: 494073 - DNA, 75 bp, synthetic construct
  source 1..75: mol_type = other DNA
cctgttcatgccgatggtgtggttggaggcaagaaagaattcaccctgctgaacaagtcagagatggagttactg

SEQ ID NO: 494074 - DNA, 75 bp, synthetic construct
  source 1..75: mol_type = other DNA
atggatatcagcctgaataaccagttcctgcaatccttcaacctgagcagcaaacaggaggcgaaccgcctgctg

SEQ ID NO: 494075 - DNA, 75 bp, synthetic construct
  source 1..75: mol_type = other DNA
tctgctgcaggcaaaccgtgacgtgaatctggtatcagcagaaaacacgtcaaagctggaaggaaagaacacatc

SEQ ID NO: 494076 - DNA, 75 bp, synthetic construct
  source 1..75: mol_type = other DNA
gggagactcgggggcttcagcggtagccggcgcacagtcgggtaagacgacagttgagaataatttacttggcgg

SEQ ID NO: 494077 - DNA, 75 bp, synthetic construct
  source 1..75: mol_type = other DNA
ccataagcaaatgaccgaagagagaatggctcaatggccggaagatactctgtttgtggtgtattgcgcggggcc

SEQ ID NO: 494078 - DNA, 75 bp, synthetic construct
  source 1..75: mol_type = other DNA
atacggtgaccatgaaacgagttactggaccgtagcacaaggcccatgtgatgaatgggtccagtctctgctggc

SEQ ID NO: 494079 - DNA, 75 bp, synthetic construct
  source 1..75: mol_type = other DNA
gcagcctccggttttggaacgggaggcaaataccagcaggcgatacaggctgcaacggcagcggtacagggactg

SEQ ID NO: 494080 - DNA, 75 bp, synthetic construct
  source 1..75: mol_type = other DNA
cagcgggcttacaataacggtatggcggcctccggttttggaacgggaggcaaataccagcaggcgatacaggcc

SEQ ID NO: 494081 - DNA, 75 bp, synthetic construct
  source 1..75: mol_type = other DNA
gcgatctggtgagcatgtttctgcgctccaacctgcaacaggcgtcctttaactttgaacgtattcatgggctgg

SEQ ID NO: 494082 - DNA, 75 bp, synthetic construct
  source 1..75: mol_type = other DNA
agaaacttaaagatatcactggtataagcatagtaattcccagcggccagaaaatatcgaatttttcatatttcc

SEQ ID NO: 494083 - DNA, 75 bp, synthetic construct
  source 1..75: mol_type = other DNA
atccttgcgatacacaagctattgctgatattgcgcaaaaatataatttaaaggtcatttatgatgctgcgcatg

SEQ ID NO: 494084 - DNA, 75 bp, synthetic construct
  source 1..75: mol_type = other DNA
tctccgccgatatggttgcagattaccatgctcagctcggtagtgccgatatggcgctgtggcagcaggtggaaa

SEQ ID NO: 494085 - DNA, 75 bp, synthetic construct
  source 1..75: mol_type = other DNA
aaatatatatccatatttaacaatgctacgattgcacttattacagcattacaagctttaagaatttcaggcgaa

SEQ ID NO: 494086 - DNA, 75 bp, synthetic construct
  source 1..75: mol_type = other DNA
catttacttcaaaaaaataatatatttgctaggaaatatttttatcctttaataagcgatatggatttatataaa

SEQ ID NO: 494087 - DNA, 75 bp, synthetic construct
  source 1..75: mol_type = other DNA
atgatcttagtaatattgaagaaatcataattcctgctaaaagtactgagagcaatagtaatttttcgtacttcc

SEQ ID NO: 494088 - DNA, 75 bp, synthetic construct
  source 1..75: mol_type = other DNA
aaacctgccggaagagaaactggcatcggcgctgaaagatgacaacccgaactgggagtatatcgacggcgaaat

SEQ ID NO: 494089 - DNA, 75 bp, synthetic construct
  source 1..75: mol_type = other DNA
caagcagctggcacagcacaacgcgcaatttttagtcgagtttatggcgaagctcggtgccgaactggcggggga

SEQ ID NO: 494090 - DNA, 75 bp, synthetic construct
  source 1..75: mol_type = other DNA
tgttcttctttattttcaacgcggtgcgtctggcgatgaagtggtatggcctacagctcggctttcgcaaagggg

SEQ ID NO: 494091 - DNA, 75 bp, synthetic construct
  source 1..75: mol_type = other DNA
tacaaacaggtggcagacgccatccgcgatgaggtcatccgcttccttgagcgtctgccccagcttaccgggttg

SEQ ID NO: 494092 - DNA, 75 bp, synthetic construct
  source 1..75: mol_type = other DNA
ggaggcggcgctgcgatatctggacatgctacccgaaggcgatccccgcgatcagtttcaccgccagtaccttgc

SEQ ID NO: 494093 - DNA, 75 bp, synthetic construct
  source 1..75: mol_type = other DNA
aacgcagggggctacagcttctggcttctgaaagcaaagacttcaggctactggcacacctgctcagaaccctgc

SEQ ID NO: 494094 - DNA, 75 bp, synthetic construct
  source 1..75: mol_type = other DNA
actaacttattaaagcacaacgatctcacttacacagtattcgatggcgttgaagcgaatccaacaatagaaaat

SEQ ID NO: 494095 - DNA, 75 bp, synthetic construct
  source 1..75: mol_type = other DNA
ctacgtcgctgagtattacgaggtcgaagagaagaaggagaaagtcttcatctaccgcgacccgctgacaggtga

SEQ ID NO: 494096 - DNA, 75 bp, synthetic construct
  source 1..75: mol_type = other DNA
ctggatggcgagcgatgaagccagaaccgaggcgacaaatgacctgtattttagccgagtgtcgcaatgggatga

SEQ ID NO: 494097 - DNA, 75 bp, synthetic construct
  source 1..75: mol_type = other DNA
ttacttaatcggcagcaagagcttaatatagcaaaatcaagcgctatcgggaatgtaagaataatcgataatgca

SEQ ID NO: 494098 - DNA, 75 bp, synthetic construct
  source 1..75: mol_type = other DNA
ggaaaaccctgaagtgccgcaagccaacgcttacatgcttgaggcagccaccaacgcagtgaaagaggtggctag

SEQ ID NO: 494099 - DNA, 75 bp, synthetic construct
  source 1..75: mol_type = other DNA
tgtgctgatgggcatgtaccgcaccgacatgcggcataacacggcaaaaatcgcggtgaacatcgctgttcgcga

SEQ ID NO: 494100 - DNA, 75 bp, synthetic construct
  source 1..75: mol_type = other DNA
gtttatcgaagcgcagcaggctaaacaaggtcagcaagacccggcaatggttcaggctcagggtgtgcttcttca

SEQ ID NO: 494101 - DNA, 75 bp, synthetic construct
  source 1..75: mol_type = other DNA
gaaatgcagaaatattaacggtgaatatgtctggccctggatattgccgttttcagcggcaggaatgaaacacac

SEQ ID NO: 494102 - DNA, 75 bp, synthetic construct
  source 1..75: mol_type = other DNA
gcgagccttcagtgtactgaaagagcatgctgatgaattttcaccttactggtatgaacttggtcttctgcattt

SEQ ID NO: 494103 - DNA, 75 bp, synthetic construct
  source 1..75: mol_type = other DNA
gaagctgttgcgggaaagaattgatgagacactttctgaggaaattgtacagaaatgcagaaatattaacggtga

SEQ ID NO: 494104 - DNA, 75 bp, synthetic construct
  source 1..75: mol_type = other DNA
cgacttcattcctaaaaatggggttaaagttactgaagattcagagcagaaaacggaaggccaggaaggcactgc

SEQ ID NO: 494105 - DNA, 75 bp, synthetic construct
  source 1..75: mol_type = other DNA
gtagggctcaccatcactccgcaagagttattaacacgcccggcggacacaccttacatcctggtggtgtcatcg

SEQ ID NO: 494106 - DNA, 75 bp, synthetic construct
  source 1..75: mol_type = other DNA
caggaggcgctcgcacaggcaacgaaaaaagtcggcatcaatgttagcgatatttcgcttattcgtatcaacgaa

SEQ ID NO: 494107 - DNA, 75 bp, synthetic construct
  source 1..75: mol_type = other DNA
tcgttcaccgaagaagaaaccgaccttcttccctgagcaaatcgaaggctacgaatacatgtacggaggaaatga

SEQ ID NO: 494108 - DNA, 75 bp, synthetic construct
  source 1..75: mol_type = other DNA
atgccgttgatggaaccgttacgtcaggcggcagaaaaactggctcaggcgcaggcagatttaagccgctgctga

SEQ ID NO: 494109 - DNA, 75 bp, synthetic construct
  source 1..75: mol_type = other DNA
gaccatctgacccaggcggttatcgactggaaagcgagctgtgaacgccgttttgtgttcaggccgaatgaagcg

SEQ ID NO: 494110 - DNA, 75 bp, synthetic construct
  source 1..75: mol_type = other DNA
cacgccgccacccgccttaaaacaggacaaacttgcctttatggctgcgacagctgacgcgcagttgttgaatta

SEQ ID NO: 494111 - DNA, 75 bp, synthetic construct
  source 1..75: mol_type = other DNA
tgttgcctctattcccggcgttggccctgcgcgtaaagcggcgttacggtcctttggtattgaaacagcagcgga

SEQ ID NO: 494112 - DNA, 75 bp, synthetic construct
  source 1..75: mol_type = other DNA
tgtcgtcatttgtcggctttgaacgcacagaaaatcacgataattttggccttgcgttgctgatttttcacgtct

SEQ ID NO: 494113 - DNA, 75 bp, synthetic construct
  source 1..75: mol_type = other DNA
gccagatccaacagttgggcgggctggaaggttttatcgccaaacggacgatgctcgaaaaaatgaaggacgaaa

SEQ ID NO: 494114 - DNA, 75 bp, synthetic construct
  source 1..75: mol_type = other DNA
gctggcggtacctcaacaatgcctttcagagaggccatcgtgaaaaagctgggtagccagcattcggcagaactg

SEQ ID NO: 494115 - DNA, 75 bp, synthetic construct
  source 1..75: mol_type = other DNA
aggtatcccgtcgtgaccaggagagcgcgctggcgtgctggggtatcgacagataagcagaatattttgctgaaa

SEQ ID NO: 494116 - DNA, 75 bp, synthetic construct
  source 1..75: mol_type = other DNA
agtagctgctcaggcgggatcgtggcgcgatctgccgccaatggattttgtgttttacgccaacacgggcactga

SEQ ID NO: 494117 - DNA, 75 bp, synthetic construct
  source 1..75: mol_type = other DNA
cgcctgcagacagacaagcggtaatggcaaaaatggccgccaaacgacatcggctggaatcggcgctgactgtcg

SEQ ID NO: 494118 - DNA, 75 bp, synthetic construct
  source 1..75: mol_type = other DNA
agcaaagcgtacaaagcagaaatccagcaacgccgtgaggcatttaatcgtgcgaaaatggactatgaccattta

SEQ ID NO: 494119 - DNA, 75 bp, synthetic construct
  source 1..75: mol_type = other DNA
tgtcacccgctggaaccgggagtaccagaacctcctggggatctcgacggaagaggaactgcgccgtatgttgct

SEQ ID NO: 494120 - DNA, 75 bp, synthetic construct
  source 1..75: mol_type = other DNA
gaaaagttgctggaaagaatcgacgaacggagttctgaagagattgtacagaaatgcagaacatggcggggagaa

SEQ ID NO: 494121 - DNA, 75 bp, synthetic construct
  source 1..75: mol_type = other DNA
ttaggcgaactggttaataaccaggaagtgctggatgtgtctggtcgtcagcatactcacgacgcgccacgcacc

SEQ ID NO: 494122 - DNA, 75 bp, synthetic construct
  source 1..75: mol_type = other DNA
tgtggcgtgatttgagcgaccgtctcaccggttttctcaacaacattactttaggcgaactggttaataaccagg

SEQ ID NO: 494123 - DNA, 75 bp, synthetic construct
  source 1..75: mol_type = other DNA
cagcattgacgcggaaaccgaggccgagcgtcttatggaaacccgaaatggcggcccggttctgatagcctcgcc

SEQ ID NO: 494124 - DNA, 75 bp, synthetic construct
  source 1..75: mol_type = other DNA
tcttcataccgcggtgaaggacgacgacagcgaggcggtcgggattatccgcgccctgcttgccggtgaggcaaa

SEQ ID NO: 494125 - DNA, 75 bp, synthetic construct
  source 1..75: mol_type = other DNA
tcatgtattctggcgtccatggaccgagaatattattcagttctgggcggggaattatcaaaaaatgcctacccg

SEQ ID NO: 494126 - DNA, 75 bp, synthetic construct
  source 1..75: mol_type = other DNA
atggattcctacagtaatggtccctatagctcaaaaggcgatagcccgattaaaaaaactgtccaaccatgcaag

SEQ ID NO: 494127 - DNA, 75 bp, synthetic construct
  source 1..75: mol_type = other DNA
ctggcgcaggcagatgtcgcggtggcgatgaactccggtactcaggcggcgaaagaagcgggcaatatggtcgat

SEQ ID NO: 494128 - DNA, 75 bp, synthetic construct
  source 1..75: mol_type = other DNA
gcctgctggatacagcgcttgccggaaagctggcggctgatcgggggcgagcaggcgcagtgtcgggcgcagatt

SEQ ID NO: 494129 - DNA, 75 bp, synthetic construct
  source 1..75: mol_type = other DNA
tacgcatcacgcccgatatggagatggcaattgtggggactccggaacattttcgtcgctatggttttccgcaaa

SEQ ID NO: 494130 - DNA, 75 bp, synthetic construct
  source 1..75: mol_type = other DNA
ccttccgcgaactgacggcaaaagacagcattgatgcggagagcgaggccgagcgtcttatggaaacccgaaacg

SEQ ID NO: 494131 - DNA, 75 bp, synthetic construct
  source 1..75: mol_type = other DNA
gattgggcagttaagcgagcgcgatctctcccgtctgatggcagcggtcagcctgctggataccgcgcttgccgg

SEQ ID NO: 494132 - DNA, 75 bp, synthetic construct
  source 1..75: mol_type = other DNA
tgtccgtcgatgacttccagcgtctgtcgctggcagtggagctgcgcgacatggcggtggcggcatcgctgacgc

SEQ ID NO: 494133 - DNA, 75 bp, synthetic construct
  source 1..75: mol_type = other DNA
tgtaagagtactatttctaataataatttaacaacttcatgggaaagcaataaatggaaaggtttatataggttt

SEQ ID NO: 494134 - DNA, 75 bp, synthetic construct
  source 1..75: mol_type = other DNA
cacggtgttgcaaacgccatcctgttaccgcatgtcatgcgctataacgctgactttaccggtgagaagtaccgc

SEQ ID NO: 494135 - DNA, 75 bp, synthetic construct
  source 1..75: mol_type = other DNA
tcagcaacaacccggagtttgccgatgtgcgtagcctggaaggactttccccgaccaataaacccagtgtaccga

SEQ ID NO: 494136 - DNA, 75 bp, synthetic construct
  source 1..75: mol_type = other DNA
agtggcagaatcatctggatacatcctgacaaccgaccttttcttcgtgccctctatgcggcaatcctggcaaat

SEQ ID NO: 494137 - DNA, 75 bp, synthetic construct
  source 1..75: mol_type = other DNA
gcaactgcatttcgtcgtggctttgcggcaaatacttacatcgcagaaatactgtgcggaaatctgcatccattt

SEQ ID NO: 494138 - DNA, 75 bp, synthetic construct
  source 1..75: mol_type = other DNA
tgaacaataaccagggtcgtttcgtatttccggatacctggtttggcccattactgggagagtttgaagaagtgc

SEQ ID NO: 494139 - DNA, 75 bp, synthetic construct
  source 1..75: mol_type = other DNA
atgaacgacagattacgctttgaagtgcacgataacctgggttattttgtatttccggaaacctggttcggccca

SEQ ID NO: 494140 - DNA, 75 bp, synthetic construct
  source 1..75: mol_type = other DNA
gcgcactgcttgctggtgaggaaaacgctaggctgcgtgcagcccactggttacatgagaggggcctgaaagtat

SEQ ID NO: 494141 - DNA, 75 bp, synthetic construct
  source 1..75: mol_type = other DNA
gcgccctgcttgccggtgaggcaaacgccaggctgcgtgcagcccactggttacatgagaggggcctgaaagtat

SEQ ID NO: 494142 - DNA, 75 bp, synthetic construct
  source 1..75: mol_type = other DNA
gcttgttaactgaaggacaattaaatcaaaagaaaaagagaatgttagataagttattcagacctacaatgagtt

SEQ ID NO: 494143 - DNA, 75 bp, synthetic construct
  source 1..75: mol_type = other DNA
ggtgaatatatctggccctggatattgccgttttcagcggcaggcatgaaacatactggcatacagtatcagtag

SEQ ID NO: 494144 - DNA, 75 bp, synthetic construct
  source 1..75: mol_type = other DNA
tgtttgtaaactggctctataaccattcctccgtgctgcatgaacgttcagaaatcattaaatgcgccgaaatgc

SEQ ID NO: 494145 - DNA, 75 bp, synthetic construct
  source 1..75: mol_type = other DNA
tgatgcaggaagatgatttcaaaatatgcgaaagcattttaagacagcagaagctgttgcgggaaagaattgatg

SEQ ID NO: 494146 - DNA, 75 bp, synthetic construct
  source 1..75: mol_type = other DNA
acgccatcgccgccggggcaatactggtgacgaataatgtgagagagtttgagcgggtaccgggactggtactcg

SEQ ID NO: 494147 - DNA, 75 bp, synthetic construct
  source 1..75: mol_type = other DNA
cggtgaacgtagaagccgtgcgtgaactggccgcatccggtgtgatgctgacgtcggacgaaaacgtggtgcgcg

SEQ ID NO: 494148 - DNA, 75 bp, synthetic construct
  source 1..75: mol_type = other DNA
gccaccggcccgaaggcctcaccccgccacgtgcagctggtcgatgaattctgcgcccgcctcgatgccatcctg

SEQ ID NO: 494149 - DNA, 75 bp, synthetic construct
  source 1..75: mol_type = other DNA
ttcctcgcgggtgtgctggtcagtttcgtcaaactgatggcctacggcagtattggtgtgggcagcagttttctc

SEQ ID NO: 494150 - DNA, 75 bp, synthetic construct
  source 1..75: mol_type = other DNA
cctgtatctgttcgttcatcatgcgcgaacagcctgaagccgtactgaaacgcctggagcaggcggtgctgcgcg

SEQ ID NO: 494151 - DNA, 75 bp, synthetic construct
  source 1..75: mol_type = other DNA
gcgcctagccgggacgccgatcggcccgaatgacacggccattgccgggcacgccatcgcggcgggcgccatcct

SEQ ID NO: 494152 - DNA, 75 bp, synthetic construct
  source 1..75: mol_type = other DNA
ctggataacctgatatcacaggtctgttctccggcgctgaatgaagggctgctcaaagccaatgaacggatgtat

SEQ ID NO: 494153 - DNA, 75 bp, synthetic construct
  source 1..75: mol_type = other DNA
gcaatcatccgctatctactgagcaaattgatgcgttgtttgcccatcgcccgcctgccgatcgcaactggtatc

SEQ ID NO: 494154 - DNA, 75 bp, synthetic construct
  source 1..75: mol_type = other DNA
aaaaaagacaaagccaatgcaatggcgacatccgggcagatgctggcgaaacagattggctccggtaaagaacgt

SEQ ID NO: 494155 - DNA, 75 bp, synthetic construct
  source 1..75: mol_type = other DNA
catctggagcaggcggtgctgcgcggtcaccgtatcgtcgtctcggccatcacctacgccgagatgcgcttcggt

SEQ ID NO: 494156 - DNA, 75 bp, synthetic construct
  source 1..75: mol_type = other DNA
gcgcaccggcttgatcagtatcttgagctttccgtgatcggcctcgatcacgttattgggcactgttgcaaatag

SEQ ID NO: 494157 - DNA, 75 bp, synthetic construct
  source 1..75: mol_type = other DNA
ttcctcgctggtgtgctggtcagtttcgttaaactgatggcttacggcagcattggggtaggcagcagctttctc

SEQ ID NO: 494158 - DNA, 75 bp, synthetic construct
  source 1..75: mol_type = other DNA
tgttcgccagcgtattcctgctgacactcagcggttgctccgggagtcgatcagcgaatttaacgccgacgctga

SEQ ID NO: 494159 - DNA, 75 bp, synthetic construct
  source 1..75: mol_type = other DNA
agaaaaacatagaaataataaaacgagaattcgatggttgtattttcatgaaagcaacactgcatggtataaaga

SEQ ID NO: 494160 - DNA, 75 bp, synthetic construct
  source 1..75: mol_type = other DNA
gtgactctcaagaatggaaagacacctccagcggaccaaatgatagtggccctaagggtaaatatccaaatgttt

SEQ ID NO: 494161 - DNA, 75 bp, synthetic construct
  source 1..75: mol_type = other DNA
tggaaaggttcttatatgacgaaaatctattacaatccagaagaaaaaaatgaagctgttatgcgtcttttaggc

SEQ ID NO: 494162 - DNA, 75 bp, synthetic construct
  source 1..75: mol_type = other DNA
aacaggaataacgaagattttgggttatgacggtttaacagaagttgctataaaccagcctggaagaatctggtt

SEQ ID NO: 494163 - DNA, 75 bp, synthetic construct
  source 1..75: mol_type = other DNA
ctttgtctttgaaggagaaacttgctgctactggtgttcttgttctgatttgcgcacttgttggtgctgggtttg

SEQ ID NO: 494164 - DNA, 75 bp, synthetic construct
  source 1..75: mol_type = other DNA
taccaaagggtacgttcggcgtagaaacagcctgcaatggacactcgcgctgcttgttacgtccatcatgctgta

SEQ ID NO: 494165 - DNA, 75 bp, synthetic construct
  source 1..75: mol_type = other DNA
tcgccgttggttatgggatgatattgctccgatgccagagcttcgccagacgctaaaacccggcattacaggaat

SEQ ID NO: 494166 - DNA, 75 bp, synthetic construct
  source 1..75: mol_type = other DNA
ccctggtgtttgttctgcgtgcttcagttgcgtgcctttcagtgtgtcgatcgccgttggttatgggatgatatt

SEQ ID NO: 494167 - DNA, 75 bp, synthetic construct
  source 1..75: mol_type = other DNA
atggtgatgacccaatagctgagttcacaggtggctggcatgggtttaatgggaaccagagtggctctcctacag

SEQ ID NO: 494168 - DNA, 75 bp, synthetic construct
  source 1..75: mol_type = other DNA
cctgtatctgctcgttcatcatgcgcgagcagccggaagccgtcctgaagcgcctggagcaggcggtgctgcgcg

SEQ ID NO: 494169 - DNA, 75 bp, synthetic construct
  source 1..75: mol_type = other DNA
gacaatgttttctgccatgacgtttgacccgcgtttgtcgtgggaccgccaacctgaaccagagcatgaggagtc

SEQ ID NO: 494170 - DNA, 75 bp, synthetic construct
  source 1..75: mol_type = other DNA
taccgctgctgtttacggcctgccgggagattggtgccggaatgaatcaggtaaaccgtatcgtggaaactatca

SEQ ID NO: 494171 - DNA, 75 bp, synthetic construct
  source 1..75: mol_type = other DNA
gccaaagtgtatgtctgtgataatcagaataagtgcctgtccccctccctgaataacgtgaccatttcggagtca

SEQ ID NO: 494172 - DNA, 75 bp, synthetic construct
  source 1..75: mol_type = other DNA
agaacaagtgtctgtcaccctccctgaataacgtgaccatttcggagtcaaaatctctgatccgcatggtgcggg

SEQ ID NO: 494173 - DNA, 75 bp, synthetic construct
  source 1..75: mol_type = other DNA
gagagggagaatgggctagaacgtgccttgatttggtacgtgagtatgaaagaaagttaaaagaatacgataaag

SEQ ID NO: 494174 - DNA, 75 bp, synthetic construct
  source 1..75: mol_type = other DNA
attatccgcgcactgcttgctggtgaggaaaacgccaggctgcgtgcagcccactggttacatgagagggggctg

SEQ ID NO: 494175 - DNA, 75 bp, synthetic construct
  source 1..75: mol_type = other DNA
cagcggttcggtgattttcggcagtaacggagaaatgcgtatcctgtcttcactggcgtcagaccgcagtctgct

SEQ ID NO: 494176 - DNA, 75 bp, synthetic construct
  source 1..75: mol_type = other DNA
ctaccaaagactatccgggggccaatatgaatgaactgaaaaatggcctggcagatgcgcgccaggcgctcaact

SEQ ID NO: 494177 - DNA, 75 bp, synthetic construct
  source 1..75: mol_type = other DNA
accagcgataaccggggtacgtgaattcgatggctatcagatcattccgaccgttagcggcggtctggcgcaaat

SEQ ID NO: 494178 - DNA, 75 bp, synthetic construct
  source 1..75: mol_type = other DNA
gggcgaaacaatgaaaaagtggctagtgacgattgcagcactgtggctggtcggatgcagctccggcgaaattaa

SEQ ID NO: 494179 - DNA, 75 bp, synthetic construct
  source 1..75: mol_type = other DNA
atcgcctaacggcaccctgattatgcagattggcgatggcggcgtggtggtcgatttggggcacggtctgcaact

SEQ ID NO: 494180 - DNA, 75 bp, synthetic construct
  source 1..75: mol_type = other DNA
cgaaaggcagcaaaatggataaatacgatttgctggactcgccaccgttggccccgcctgatgcaaaaggtatcc

SEQ ID NO: 494181 - DNA, 75 bp, synthetic construct
  source 1..75: mol_type = other DNA
gctcggtggaaaccagcacgtttgatacccaaaaacgtaatattagttaccagctctttgttaacgcgccttacg

SEQ ID NO: 494182 - DNA, 75 bp, synthetic construct
  source 1..75: mol_type = other DNA
ccagtcgatgcagcagttgccgacggatatgcagtcaacgttgcgtgaattgaatcgcagcatgcagggcttcca

SEQ ID NO: 494183 - DNA, 75 bp, synthetic construct
  source 1..75: mol_type = other DNA
ccgtatgacatgggtatcactctgctggacgtcaacttccaggctgctcgtccgccggaagaagtaaaagcggcg

SEQ ID NO: 494184 - DNA, 75 bp, synthetic construct
  source 1..75: mol_type = other DNA
aacacagcttaaggaaaatgaagcttatgtccgtcttttaatcaggatggatgcggtttcccgccaggttggtgt

SEQ ID NO: 494185 - DNA, 75 bp, synthetic construct
  source 1..75: mol_type = other DNA
attcctgagcgtcatggcttcagggaggagctggcatcgctgaaaaactgcataaacgatgatgagtattgctac

SEQ ID NO: 494186 - DNA, 75 bp, synthetic construct
  source 1..75: mol_type = other DNA
caggaagtggtaatactgtattcgcaaatacggcaacatcaggggccggcggtgtgggtgtacagttgtcggaca

SEQ ID NO: 494187 - DNA, 75 bp, synthetic construct
  source 1..75: mol_type = other DNA
tatgaagtcggtaaaatgggcaagagcgaaaagcccgaagagtgggacaacaataaaacccgcaatgaaaccgac

SEQ ID NO: 494188 - DNA, 75 bp, synthetic construct
  source 1..75: mol_type = other DNA
atcgtactgattgatgaaggacaccggagccaggatggcgaaaaccatgtgcgtatgaaactggccctgccgaat

SEQ ID NO: 494189 - DNA, 75 bp, synthetic construct
  source 1..75: mol_type = other DNA
tgcctgcgacagcaagatttccgccatcaaatataaaaagtatcttgatgaagccgggttgtttgagtcagcagt

SEQ ID NO: 494190 - DNA, 75 bp, synthetic construct
  source 1..75: mol_type = other DNA
tggtgtgccgggagtggagcgtcacggataacgcccggtacagtgatttcagttgtacgattgagcaggtggtga

SEQ ID NO: 494191 - DNA, 75 bp, synthetic construct
  source 1..75: mol_type = other DNA
gtaagatttggcgatggttatgaacaacgaagcccaaacggacttaatcattctctgcgtgtttttacctgtgat

SEQ ID NO: 494192 - DNA, 75 bp, synthetic construct
  source 1..75: mol_type = other DNA
gtttgcattacaactgcactacagtacaaaatgtcagacacagtaaaaaagactgggtaatcaacccaccagaga

SEQ ID NO: 494193 - DNA, 75 bp, synthetic construct
  source 1..75: mol_type = other DNA
catttacccaatgcggtcgagaaaatcgccttcgatcgcttccatgtggcgaagcaactgggcgaagtggttgat

SEQ ID NO: 494194 - DNA, 75 bp, synthetic construct
  source 1..75: mol_type = other DNA
ccgtatgacatgggcatcactctgttggacgtcaacttccaggcagctcgtccgccggaagaagttaaagccgcg

SEQ ID NO: 494195 - DNA, 75 bp, synthetic construct
  source 1..75: mol_type = other DNA
gcctatcccattaactatacgatgtaatgagcccaggcaggtcagttatactctgtcaggaaaaatcgataaaaa

SEQ ID NO: 494196 - DNA, 75 bp, synthetic construct
  source 1..75: mol_type = other DNA
gtattacctgcatcattccggtgttagcgccggtgctcggacatctgattatgcttaaattcccgtggcagagtc

SEQ ID NO: 494197 - DNA, 75 bp, synthetic construct
  source 1..75: mol_type = other DNA
tgtccgctttggggctgacgggaaggaaatcgttatggtcagtgatgacatgcggagcagtacagaggatgaagc

SEQ ID NO: 494198 - DNA, 75 bp, synthetic construct
  source 1..75: mol_type = other DNA
atgtgcagcctggcttttcaacagtgcgaggcttatcatattgaaataatggaactattggccaaactaatgaat

SEQ ID NO: 494199 - DNA, 75 bp, synthetic construct
  source 1..75: mol_type = other DNA
gacgctctatccggcgcgtgcgattggcgttgagaaacgtctcggcacactcgccgcaggtaaagtagccaacct

SEQ ID NO: 494200 - DNA, 75 bp, synthetic construct
  source 1..75: mol_type = other DNA
tactaactatctgccaacgcttatcaccaccagcgatgacctgatgaaacagggtgtgcgcgtaatgcgcgagta

SEQ ID NO: 494201 - DNA, 75 bp, synthetic construct
  source 1..75: mol_type = other DNA
ttgagaaacgtctcggcacactcgccgcaggtaaagtagccaacctgaccgcattcacacctgattttaaaatca

SEQ ID NO: 494202 - DNA, 75 bp, synthetic construct
  source 1..75: mol_type = other DNA
gttgctcagccactggtgctgaacgttgcaggtgacgcatctaaggctgagattcgtgatatgacagtgaaggtt

SEQ ID NO: 494203 - DNA, 75 bp, synthetic construct
  source 1..75: mol_type = other DNA
ggagtgagcgtccttcagcaggaaactggacagagaaaggtaatggggtctacgtggcgaccttaacgctgggat

SEQ ID NO: 494204 - DNA, 75 bp, synthetic construct
  source 1..75: mol_type = other DNA
ctcattgaaatgaaccgaatcaccattgccaatggcgatattggttttaacttcactgaggggtatgctatatat

SEQ ID NO: 494205 - DNA, 75 bp, synthetic construct
  source 1..75: mol_type = other DNA
tatctaccgtttattgctgattggcctcggaacgccaatggtgatttatggtctggttcgcccgctcaccatcga

SEQ ID NO: 494206 - DNA, 75 bp, synthetic construct
  source 1..75: mol_type = other DNA
agggccgttttcattacgcgcgggcgtagccagctcgaccttaggtattgcgcaggtttgcggttcgtcactgtg

SEQ ID NO: 494207 - DNA, 75 bp, synthetic construct
  source 1..75: mol_type = other DNA
tcttcataccgcggtgaaggacgacgacagcgaggcggtcgggattatccgcgcactgcttgccggtgaggaaaa

SEQ ID NO: 494208 - DNA, 75 bp, synthetic construct
  source 1..75: mol_type = other DNA
acactcgccgcaggtaaagtagccaacctgactgcattcacacctgattttaaaatcaccaagaccatcgttaac

SEQ ID NO: 494209 - DNA, 75 bp, synthetic construct
  source 1..75: mol_type = other DNA
aagtgatcgacaaaattgaccgtgcagaggcaacagcagaagaaaaggcagaagctaaatcacttttgacaaaat

SEQ ID NO: 494210 - DNA, 75 bp, synthetic construct
  source 1..75: mol_type = other DNA
caggaaggttttgctgctgtatttaatagcgatagccagtcctgggaccttgtaaaagattatcggggcaaaacg

SEQ ID NO: 494211 - DNA, 75 bp, synthetic construct
  source 1..75: mol_type = other DNA
aatacttttaatattggctccgtcagtggtgagcaagttcaaataggtgaaagtaatcatatgctggtgaatatc

SEQ ID NO: 494212 - DNA, 75 bp, synthetic construct
  source 1..75: mol_type = other DNA
ctggtgactatatttatctggccacccctcaggttgaggatggttcgtgtgtatcatcttttattatatcaggaa

SEQ ID NO: 494213 - DNA, 75 bp, synthetic construct
  source 1..75: mol_type = other DNA
tatttgtaccagcatatcaaaccaatgagccactgacagtagctcgggcagtactgcagtttgcggttttatctg

SEQ ID NO: 494214 - DNA, 75 bp, synthetic construct
  source 1..75: mol_type = other DNA
gaggagtttgtaaacgctccgattggcgattatttctacctgactcatggtaatcagggggtgtacctgcttggt

SEQ ID NO: 494215 - DNA, 75 bp, synthetic construct
  source 1..75: mol_type = other DNA
cgcgatattttatcgtctgcggatgtggcggatgtcatggtggatgatgccgcattaatgattgtcaacgacgga

SEQ ID NO: 494216 - DNA, 75 bp, synthetic construct
  source 1..75: mol_type = other DNA
cccccggcgtgaggaagcgcagacggagatgccggatgaggaaaaaatgctgatgcagaaagcggcaggacttgc

SEQ ID NO: 494217 - DNA, 75 bp, synthetic construct
  source 1..75: mol_type = other DNA
aattaaacggctgtggcggcgtgcagtttaacgataccgcagaggcggtcagcgtggaaacgctggaaatcatgc

SEQ ID NO: 494218 - DNA, 75 bp, synthetic construct
  source 1..75: mol_type = other DNA
gtaaggatttgagtaagacgacttgcaaagagtatcttgatctgcttggtttatcggagttcagtaaaattttgg

SEQ ID NO: 494219 - DNA, 75 bp, synthetic construct
  source 1..75: mol_type = other DNA
gatgctgcagctggaggcgctgctcgactgcaaaccggcgaagctctccggcggccaacgccagcgggtggcgat

SEQ ID NO: 494220 - DNA, 75 bp, synthetic construct
  source 1..75: mol_type = other DNA
atgcaaatacctcgcatgtcgcttcgccagctagcctggtccggcgctgttttacttctggtcggcacgctgttg

SEQ ID NO: 494221 - DNA, 75 bp, synthetic construct
  source 1..75: mol_type = other DNA
cttattgaaatgaaccgtatcaccattaccaatggcgatatcggttttaacttcaccgacggcaatctgattaag

SEQ ID NO: 494222 - DNA, 75 bp, synthetic construct
  source 1..75: mol_type = other DNA
aacacaacgggttatctacctccgtgaaggctatgagcatgagtgcttcagcccgctcgaacagtttcgtcgtaa

SEQ ID NO: 494223 - DNA, 75 bp, synthetic construct
  source 1..75: mol_type = other DNA
agtcagaccggcaacgaggcagaccttaatccgaacgtcgctaaccgcaacaaaggcgggcggcgcaaaccgaaa

SEQ ID NO: 494224 - DNA, 75 bp, synthetic construct
  source 1..75: mol_type = other DNA
agccgcaccgaggaagccagtcacgccgatatcgcatgggcgaccatgcacgccctgttaaacgaaccgctttct

SEQ ID NO: 494225 - DNA, 75 bp, synthetic construct
  source 1..75: mol_type = other DNA
aacttgaggttcttaatatgtgggttaattaccttaacacgatagccggatttaataataacgttattgaactga

SEQ ID NO: 494226 - DNA, 75 bp, synthetic construct
  source 1..75: mol_type = other DNA
cttgggaagaatgggatttaaaaaactggatttggacagttccaaaagagcacagcaagaacggcgaggttattg

SEQ ID NO: 494227 - DNA, 75 bp, synthetic construct
  source 1..75: mol_type = other DNA
tgggtgaaagaactggaccacaaaaaactggacgatgtgctgaataatcgtgcgctggatggcaaaacgcacgaa

SEQ ID NO: 494228 - DNA, 75 bp, synthetic construct
  source 1..75: mol_type = other DNA
caggtgacagggaaattgtaacccacagctttgcagagtgggctgtgggtgatttcaaccggcagaaggagacag

SEQ ID NO: 494229 - DNA, 75 bp, synthetic construct
  source 1..75: mol_type = other DNA
gctcactgcttgccggtgaggaaaacgccaggctgcgtgcaacccactggttacatgagaggggccttaaggtat

SEQ ID NO: 494230 - DNA, 75 bp, synthetic construct
  source 1..75: mol_type = other DNA
agtgcccaacccaacaattactgtcgtcaaagaagggctcggtgtattccagaatagcggcgcggattacctgat

SEQ ID NO: 494231 - DNA, 75 bp, synthetic construct
  source 1..75: mol_type = other DNA
cacctgcgctcgacctacttttcgacaccctcaacactggcgcacggggcttaccccttctggtctggtgagctg

SEQ ID NO: 494232 - DNA, 75 bp, synthetic construct
  source 1..75: mol_type = other DNA
atgaccatttccaccgatacaaccttgttgcatgacccgcgacggcaggcatcgctgctttactggcagggtttt

SEQ ID NO: 494233 - DNA, 75 bp, synthetic construct
  source 1..75: mol_type = other DNA
gcgcacgacgcctacccgttctggtcgggtgaactgttcaaccggggacgcgccagcgccgccgaacgcgtggaa

SEQ ID NO: 494234 - DNA, 75 bp, synthetic construct
  source 1..75: mol_type = other DNA
cgagatgcagcgtctggttaaaggggaagttgtcgcttctacctttgatgaaccggcatctcgccacgttcaggt

SEQ ID NO: 494235 - DNA, 75 bp, synthetic construct
  source 1..75: mol_type = other DNA
gcccggctggggtatgcggcggatgaccttggtctggtgggggatatgtatcaggaggcgaggcagcgttacatc

SEQ ID NO: 494236 - DNA, 75 bp, synthetic construct
  source 1..75: mol_type = other DNA
tacagcaacagtattgtggacacgcccacgtactttgcctttgcaaaaggggccgggctgatgggggaggccgga

SEQ ID NO: 494237 - DNA, 75 bp, synthetic construct
  source 1..75: mol_type = other DNA
tgaaaatctccggtgccagtacggcagaggcgggctcggtgatcacccagttcagccaggcgctggcacagggtg

SEQ ID NO: 494238 - DNA, 75 bp, synthetic construct
  source 1..75: mol_type = other DNA
gaggaatttaattcggtcaatgaaagtggtgaccggatcgtacgtgcactggctgcgggtatgggcgtggcccgt

SEQ ID NO: 494239 - DNA, 75 bp, synthetic construct
  source 1..75: mol_type = other DNA
cgggctggaagaccgtcgtgtggcgttaattcgtcagcagagcagaataaggtgtaccagtccatgctggttatg

SEQ ID NO: 494240 - DNA, 75 bp, synthetic construct
  source 1..75: mol_type = other DNA
ctgcaggcatgggcgtggcccgtaaagatctgaaggcgatggcggacgatggtcaactgacggcggataaagtcg

SEQ ID NO: 494241 - DNA, 75 bp, synthetic construct
  source 1..75: mol_type = other DNA
acggcaaagacgcctttacgctgacggcgaccgttgaggataaaaatggtaaccctgttccagggagcctggtga

SEQ ID NO: 494242 - DNA, 75 bp, synthetic construct
  source 1..75: mol_type = other DNA
taacgctgggatctgccgcgggtcagttgtctgtgatgccgcgagtgaacggccaaaatgccgttgctcagccac

SEQ ID NO: 494243 - DNA, 75 bp, synthetic construct
  source 1..75: mol_type = other DNA
cctgatgacatctacgtttcccccagccaaatccgccgttttaacctccgcactggtgataccatctctggtaag

SEQ ID NO: 494244 - DNA, 75 bp, synthetic construct
  source 1..75: mol_type = other DNA
cactggcggaagcacagctcagggggacgcagattgccacggcgcgggcaagggcagccgtgtaccgtgctcagc

SEQ ID NO: 494245 - DNA, 75 bp, synthetic construct
  source 1..75: mol_type = other DNA
ccgtcgcaaaacgccgggccatgattgtggccaatgctgaacttgtgcagtcgaatcaggcagtggcggcctcga

SEQ ID NO: 494246 - DNA, 75 bp, synthetic construct
  source 1..75: mol_type = other DNA
atgccgaatcggatgtgcagcgtgcggactggcagaaagggctgcaggagggattcagtaactgggtggataatg

SEQ ID NO: 494247 - DNA, 75 bp, synthetic construct
  source 1..75: mol_type = other DNA
cgctgattgcttccgccgttttattttcttttaatgcgatggcagcaacttcatattttgaagcacgcaatgatg

SEQ ID NO: 494248 - DNA, 75 bp, synthetic construct
  source 1..75: mol_type = other DNA
aacctgctcccccgcagtattgagacaaaggaagtgaacggtgtcactgaaactttcaggatccgcccgcaggtg

SEQ ID NO: 494249 - DNA, 75 bp, synthetic construct
  source 1..75: mol_type = other DNA
ttaaaaattacgacagcagcgctttcaaaggcgaccgttaccacaacaccagaaacggcattaacgctgatatcg

SEQ ID NO: 494250 - DNA, 75 bp, synthetic construct
  source 1..75: mol_type = other DNA
taacgccatcggaacttactttatcgatctggcgcaaaaagagatgcaggaccagcttgaaacgttgccgtcgcg

SEQ ID NO: 494251 - DNA, 75 bp, synthetic construct
  source 1..75: mol_type = other DNA
ctgggaaatgaagagtcgttctgttcgtgcagccacggtgccgggcgggtaatgagccgtactaaagcgaaaaaa

SEQ ID NO: 494252 - DNA, 75 bp, synthetic construct
  source 1..75: mol_type = other DNA
ttgcggcactgccgaatgacacgctgccggttgccctgatggtgaaatcctacggtacggtcagcgttgacggca

SEQ ID NO: 494253 - DNA, 75 bp, synthetic construct
  source 1..75: mol_type = other DNA
ttaactcaatgccagcagcaggtgctggatatgctgatttcttatcagaaagaacgtggcttcccgccaaccaat

SEQ ID NO: 494254 - DNA, 75 bp, synthetic construct
  source 1..75: mol_type = other DNA
gctcactgcttgccggtgaggaaaacgccaggctgcgtgcaactcactggttacatgagagaggcctgaaagtat

SEQ ID NO: 494255 - DNA, 75 bp, synthetic construct
  source 1..75: mol_type = other DNA
agatcgaagagaacagctatcaggtgatggctaagtggcaggaacatttgacgctgcttttccgtgtgttttgtg

SEQ ID NO: 494256 - DNA, 75 bp, synthetic construct
  source 1..75: mol_type = other DNA
acagctgctctgtctaaccctgctctgttaactacgtccggaccaaccgatgatttcagcctggtgctgccatcg

SEQ ID NO: 494257 - DNA, 75 bp, synthetic construct
  source 1..75: mol_type = other DNA
ccaaccaatcaggaggtggcaaccatgctgggatatcgttcagtgaatgcagcggtggagcatcttcgcgcactg

SEQ ID NO: 494258 - DNA, 75 bp, synthetic construct
  source 1..75: mol_type = other DNA
agcaggtgctggatatgctgatttcttatcagaaagaacgtggtttcccgccaaccaatcaggaggtggcagcca

SEQ ID NO: 494259 - DNA, 75 bp, synthetic construct
  source 1..75: mol_type = other DNA
tatcccggcggcggtaggtgtggatattggctgtggaatgaatgcgctgcgtaccgcgttaacggcggcggatct

SEQ ID NO: 494260 - DNA, 75 bp, synthetic construct
  source 1..75: mol_type = other DNA
atcaggacggtaaaaagatcacccatcagcctcagggacaatgggcctttgctgacagttatatggaagccaaag

SEQ ID NO: 494261 - DNA, 75 bp, synthetic construct
  source 1..75: mol_type = other DNA
ttctgcgcgaagtgagcaatcgtgatgacgttgaacaacgtctgatcgatatttgcgtaaaaggtgtaccgaact

SEQ ID NO: 494262 - DNA, 75 bp, synthetic construct
  source 1..75: mol_type = other DNA
tagttagttatgtagccatatttgttaattttggatttaatattagcgctgcgaaatctgcatctgaaaaaatta

SEQ ID NO: 494263 - DNA, 75 bp, synthetic construct
  source 1..75: mol_type = other DNA
tggcgaaatacttcgccattattccggcggcattcgcggcaacgtatccgcagttaaatgcgctgaacatcatgc

SEQ ID NO: 494264 - DNA, 75 bp, synthetic construct
  source 1..75: mol_type = other DNA
gtactgttcgctaatttcgccgaggcgctggcagaaggccgcagtaaagcgcaggccaacagcctgaaaggggtg

SEQ ID NO: 494265 - DNA, 75 bp, synthetic construct
  source 1..75: mol_type = other DNA
tcaaaaaggtaaagacatgctaagggcggcatatatcagcaaaatagctgacaaggtaggtgacagccctcagaa

SEQ ID NO: 494266 - DNA, 75 bp, synthetic construct
  source 1..75: mol_type = other DNA
aagactcaagactcaagactcaagactcaagactcaagactcaagactcaagactcaagactcaagactcgtttt

SEQ ID NO: 494267 - DNA, 75 bp, synthetic construct
  source 1..75: mol_type = other DNA
acagctgcaaacgctggcaatggaagagatcaactgccaccacaactatgtgcaaaaagagctgcactttggcga

SEQ ID NO: 494268 - DNA, 75 bp, synthetic construct
  source 1..75: mol_type = other DNA
acgggcgtaccactggccgttgtaaacgtgataaaggcgcatgggaaaacccgcctgttaacgtcgatgcgaaat

SEQ ID NO: 494269 - DNA, 75 bp, synthetic construct
  source 1..75: mol_type = other DNA
caggaaccgatgaggccgaagcagtcgtcccggatacgttgcagtctgtaacaggcgcagaggaaaagtcaccgg

SEQ ID NO: 494270 - DNA, 75 bp, synthetic construct
  source 1..75: mol_type = other DNA
agcggttacctggtgaaaagccgcagtctgttcagcggaaaagggctccccggagacagcccgtttatcacattt

SEQ ID NO: 494271 - DNA, 75 bp, synthetic construct
  source 1..75: mol_type = other DNA
aggatatatgtttccgcccggtgccacaccggaagagcaggccgcacagtccggtgtatggaatgcagtggtgtt

SEQ ID NO: 494272 - DNA, 75 bp, synthetic construct
  source 1..75: mol_type = other DNA
gaaaagagtgacgcccgcgagtgtgcagctccgggcgtcgtggcgttttgtgtctgtggagaaactaacgcatga

SEQ ID NO: 494273 - DNA, 75 bp, synthetic construct
  source 1..75: mol_type = other DNA
atcgcaataataaatctttagcagaaatagactgggcaaaattacaagcaatttttcatcaaccatatgaaatac

SEQ ID NO: 494274 - DNA, 75 bp, synthetic construct
  source 1..75: mol_type = other DNA
tgctgcatgtcaggcaaactatatccgtgatgttcagggcgggacagtatcaccgtcgtcaactgctgaactgac

SEQ ID NO: 494275 - DNA, 75 bp, synthetic construct
  source 1..75: mol_type = other DNA
atgaaaaaaataacagggattattttattgcttcttgcagtcattattctggctgcatgtcaggcaaactatatc

SEQ ID NO: 494276 - DNA, 75 bp, synthetic construct
  source 1..75: mol_type = other DNA
tgagggtaataaataatgatgaagcgcaatattctggcagtgatcgtccctgctctattctggcagtgatcgtcc

SEQ ID NO: 494277 - DNA, 75 bp, synthetic construct
  source 1..75: mol_type = other DNA
ttcgtgggtcgcgtaggcggcgttgcaacctaccgtaactccaacttctttggtctggttgatggtctgaacttc

SEQ ID NO: 494278 - DNA, 75 bp, synthetic construct
  source 1..75: mol_type = other DNA
cggcttcgccaacaaaacgcaagacgttctgttagttgcgcaataccagttcgatttcggtctgcgtccgtccat

SEQ ID NO: 494279 - DNA, 75 bp, synthetic construct
  source 1..75: mol_type = other DNA
tggaaggttctcgcgtgctgggcgttattgcgctgaaagatatcatcaaaggtggcattaaagagcgtttcgccc

SEQ ID NO: 494280 - DNA, 75 bp, synthetic construct
  source 1..75: mol_type = other DNA
agaatataaagctcaggtgaagcagcttattgaaatgaaccgaatcaccattgccaatggcgatattggttttaa

SEQ ID NO: 494281 - DNA, 75 bp, synthetic construct
  source 1..75: mol_type = other DNA
tgccgggctgaaaaaaatgcttattggtatgcgggtaaagtccgaacggtccacatgtgtagtcagtaacggtaa

SEQ ID NO: 494282 - DNA, 75 bp, synthetic construct
  source 1..75: mol_type = other DNA
agtttgggcagtactttgcggtagataacgttctgtatcatgaaaagaccgatcaccaggatctgatcatttttg

SEQ ID NO: 494283 - DNA, 75 bp, synthetic construct
  source 1..75: mol_type = other DNA
aaccgttttttcctcagccgggtgctcatcacgacgttaagtgtttcagtcattctcacctttgtgaacacatcg

SEQ ID NO: 494284 - DNA, 75 bp, synthetic construct
  source 1..75: mol_type = other DNA
gatccgtaaaggttctgtcgatgccattcgccgccatgttgaggctaacggtggtcacttccctgccgatgtcga

SEQ ID NO: 494285 - DNA, 75 bp, synthetic construct
  source 1..75: mol_type = other DNA
tgagggtaataaataatgatgaagcgcaatattctggcagtgatcgtccctgcctgttagtagcaggtactgcaa

SEQ ID NO: 494286 - DNA, 75 bp, synthetic construct
  source 1..75: mol_type = other DNA
cgacacgctggatgatcgacgtcgggctaaagtgctgtcattactcaacggtattacctgcatcattccggtgtt

SEQ ID NO: 494287 - DNA, 75 bp, synthetic construct
  source 1..75: mol_type = other DNA
gcgctatttattatcgcctcggtgttctgttcactggctgaaaccagcacgttatttcttgcaggccgatttcta

SEQ ID NO: 494288 - DNA, 75 bp, synthetic construct
  source 1..75: mol_type = other DNA
gcaggccaacagtctgaaaggggtgaaaaaaactgcctttgcccgcaagctgcgtgagccgaaatatggcgctgc

SEQ ID NO: 494289 - DNA, 75 bp, synthetic construct
  source 1..75: mol_type = other DNA
ggcagcctgagttcacagataaaacactctccaggaaacccggggcggttcagattttcccgctgggatgggcaa

SEQ ID NO: 494290 - DNA, 75 bp, synthetic construct
  source 1..75: mol_type = other DNA
gtaattgacgcagatgagcgtgctcagattgaggaaaacagctatcaggttatcgcgaagttccaggagcacgta

SEQ ID NO: 494291 - DNA, 75 bp, synthetic construct
  source 1..75: mol_type = other DNA
gtggagccacacgagcagacagcaattaatgatgagttgtatctgtcaatttcgaagctccaagagcatgcagca

SEQ ID NO: 494292 - DNA, 75 bp, synthetic construct
  source 1..75: mol_type = other DNA
ggtatcggtgatgttgatctggtgaactacattgaagtgggcgcaacctactacttcaacaaaaacatgtctacc

SEQ ID NO: 494293 - DNA, 75 bp, synthetic construct
  source 1..75: mol_type = other DNA
atgatgcactgggttacaccgatatgctgtcatgcatacagcgatgacttcttcgttggtcgtgttggcggcgtt

SEQ ID NO: 494294 - DNA, 75 bp, synthetic construct
  source 1..75: mol_type = other DNA
caatggcgatggcgtaggtggttctattagctacgaatacgaaggatttggcattgtcggtgcatacggtgcagc

SEQ ID NO: 494295 - DNA, 75 bp, synthetic construct
  source 1..75: mol_type = other DNA
atcgctcaagttaataacgatacaaaagtgtgggccgatatgtggatggaaactcaaatggcaatggggcaagta

SEQ ID NO: 494296 - DNA, 75 bp, synthetic construct
  source 1..75: mol_type = other DNA
ctgttataacgattcaatggcggcgggtgcgatgggcgttctcaatgataatggtattgatgtaccgggtgagat

SEQ ID NO: 494297 - DNA, 75 bp, synthetic construct
  source 1..75: mol_type = other DNA
ggctgaccaccgtacgttaccccattgtgacgatggcaacccaggctgccgaactggcattagcgctggcggata

SEQ ID NO: 494298 - DNA, 75 bp, synthetic construct
  source 1..75: mol_type = other DNA
gttggtaaaccgatgatccagcatgtttacgagcgtgcgttacaggtggcgggcgtcgcagaagtttgggtggca

SEQ ID NO: 494299 - DNA, 75 bp, synthetic construct
  source 1..75: mol_type = other DNA
ccgtatccgcgtaatgctgaaaaagcgcgctacctgaaacacgttggtatttacgcttatcgtcgcgatgtgctg

SEQ ID NO: 494300 - DNA, 75 bp, synthetic construct
  source 1..75: mol_type = other DNA
atttacgcttatcgtcgcgatgtgctgcaaaactacagccagttaccggagtccatgccggagcaggcagaatca

SEQ ID NO: 494301 - DNA, 75 bp, synthetic construct
  source 1..75: mol_type = other DNA
cagggacgtcctgttttttttctacatcgtcacgcactagaattgctcattaatcgaaaactggatgattgcgaa

SEQ ID NO: 494302 - DNA, 75 bp, synthetic construct
  source 1..75: mol_type = other DNA
gtgattaacgttgccggacatcggctgggtacgcgtgagattgaagagagtatctccagtcatccgggcgttgcc

SEQ ID NO: 494303 - DNA, 75 bp, synthetic construct
  source 1..75: mol_type = other DNA
atgtcgatttcgcgtcgttgcgccatcaacacatcggtgcgcgggtgccggtggcgtggctggaatccaacgaaa

SEQ ID NO: 494304 - DNA, 75 bp, synthetic construct
  source 1..75: mol_type = other DNA
agctgaacaggatgcagatcgttttgcttcggcatttttgatgcctgagcgtagtatcttagcctcggttccaag

SEQ ID NO: 494305 - DNA, 75 bp, synthetic construct
  source 1..75: mol_type = other DNA
tggatgaacgaaaaacccttcgttctactcaatacgatgaaaactccagaacgtagccgctttgacgctgctcat

SEQ ID NO: 494306 - DNA, 75 bp, synthetic construct
  source 1..75: mol_type = other DNA
agaatctcttctgttttggaatatccgatcgaatttttcttcgatcgggatgttccttcattgacgcccgaagct

SEQ ID NO: 494307 - DNA, 75 bp, synthetic construct
  source 1..75: mol_type = other DNA
ctatgccacgcgatttctgccgaagaagcgaccgagccaagcacggtaaaagtggtggtaaatacccgccaggat

SEQ ID NO: 494308 - DNA, 75 bp, synthetic construct
  source 1..75: mol_type = other DNA
tccggcaccgatcggctggtcgaggtaatgcatacggtggaagcagatatctacattaacttgcagggcgatgaa

SEQ ID NO: 494309 - DNA, 75 bp, synthetic construct
  source 1..75: mol_type = other DNA
ccgggcgtcgacacccctgcatgtcttgaaaaagtgcgcaccctgatggcacaggaactggctgaaaacgcatga

SEQ ID NO: 494310 - DNA, 75 bp, synthetic construct
  source 1..75: mol_type = other DNA
tattgccaaagaaagaaaaatatacagatgatgatccgttttccggacttatcggatacgaccgtagtctccgtg

SEQ ID NO: 494311 - DNA, 75 bp, synthetic construct
  source 1..75: mol_type = other DNA
atggcagaagatgctcttggaaaacaatttgtccaggccagagaagaacatctggaattgcagcaacagcgtgac

SEQ ID NO: 494312 - DNA, 75 bp, synthetic construct
  source 1..75: mol_type = other DNA
atcaacgccatttctgctgacgaacccgaactttcgcttcagaaagcggtggattcccagcgccgcttagaagag

SEQ ID NO: 494313 - DNA, 75 bp, synthetic construct
  source 1..75: mol_type = other DNA
gagcaggcgcaggccaccgagcaagcacaggccacagagcaggcgcaggccacagagcaggcgcaggccacagag

SEQ ID NO: 494314 - DNA, 75 bp, synthetic construct
  source 1..75: mol_type = other DNA
ttctcaacacgatcaggctaccgcgcaggagcataataaacaggaaatttactgtgtaaactttagtcacctcca

SEQ ID NO: 494315 - DNA, 75 bp, synthetic construct
  source 1..75: mol_type = other DNA
tttgggaaatggatttgaaggtgcgttgcttgtttccaagaccatagcggccagcgagctgtcctcttatccaga

SEQ ID NO: 494316 - DNA, 75 bp, synthetic construct
  source 1..75: mol_type = other DNA
gaaaatgaaaacagcatttctggggcggaaatagagctatcactggaaaaagctgttcaggcacaaaagcgattg

SEQ ID NO: 494317 - DNA, 75 bp, synthetic construct
  source 1..75: mol_type = other DNA
tggcttacgggcgcggccccggtagctttaccggcgtgcgcattggtattggcattgcgcaagggctggcgcttg

SEQ ID NO: 494318 - DNA, 75 bp, synthetic construct
  source 1..75: mol_type = other DNA
gaacggttgcaacagctttccggcgaatgggtaaccgtgggtacgggctggcaagcctggccggatctcggtaaa

SEQ ID NO: 494319 - DNA, 75 bp, synthetic construct
  source 1..75: mol_type = other DNA
gccgtgctgggccttgagctggatctgctccattaccgccatattgaccgccgcgatcccgccattccggtcgct

SEQ ID NO: 494320 - DNA, 75 bp, synthetic construct
  source 1..75: mol_type = other DNA
aagcgggcattgctcccacctctttttaccggcatttccgcgacgtagacgaactgggtctgaccatggttgatg

SEQ ID NO: 494321 - DNA, 75 bp, synthetic construct
  source 1..75: mol_type = other DNA
cggcagacggtgaagccgcgccggtggatgtgcaactggtttatctgagtgatgactctaaattccaggccgccg

SEQ ID NO: 494322 - DNA, 75 bp, synthetic construct
  source 1..75: mol_type = other DNA
ctgaccgagccggacagcaacctgacggcggacggcgaagccgcgccggtggatgtccagttggtttatctgagc

SEQ ID NO: 494323 - DNA, 75 bp, synthetic construct
  source 1..75: mol_type = other DNA
accggtgttggctatgactggacggggatgtcctatcaggaacgcctctccggcaaccaggcaccttcactgtac

SEQ ID NO: 494324 - DNA, 75 bp, synthetic construct
  source 1..75: mol_type = other DNA
atggtgaattaccgtcttatatcactggcgctgacaccggagactgtcatacgcgtaaaacagccagcgctggcg

SEQ ID NO: 494325 - DNA, 75 bp, synthetic construct
  source 1..75: mol_type = other DNA
atggtgaattaccgtcttatatcactggcgctgacacctgtagtttgtatacacaatccctggcattgaaacacg

SEQ ID NO: 494326 - DNA, 75 bp, synthetic construct
  source 1..75: mol_type = other DNA
gtcaggtaaagcaaaaactgcttaatactccagaagctgtcaaagggtatgaagatgccgataaggaactggaga

SEQ ID NO: 494327 - DNA, 75 bp, synthetic construct
  source 1..75: mol_type = other DNA
agcgtaaacagttcaagcggcggttattttctcatggcattgttcagcacttgtttgccacaatgctgacccaaa

SEQ ID NO: 494328 - DNA, 75 bp, synthetic construct
  source 1..75: mol_type = other DNA
tctcacggtaatttttcatatgtgtcgcgcatttcctatgacgcaggcacccaaaaataaaaacactaaaatgaa

SEQ ID NO: 494329 - DNA, 75 bp, synthetic construct
  source 1..75: mol_type = other DNA
tccacaggacaataaccacccgacagggcgtcctgtaaacgggtttcatcataaaaaaaccaaccgtccggactg

SEQ ID NO: 494330 - DNA, 75 bp, synthetic construct
  source 1..75: mol_type = other DNA
tgtcggtaacgctggtttccacactggtgggaattgaactgatatttagcgccgccagtctgttcagcttcgcca

SEQ ID NO: 494331 - DNA, 75 bp, synthetic construct
  source 1..75: mol_type = other DNA
tttctgtaacgctggtttcaactctggtagggatcgagctgatatttagtgctgccagtttgtttagcttcgcca

SEQ ID NO: 494332 - DNA, 75 bp, synthetic construct
  source 1..75: mol_type = other DNA
gtagctggctacaattcgtcattggtgtgctggatatcatcattgcctggatatttcttggcgcgacccccatgg

SEQ ID NO: 494333 - DNA, 75 bp, synthetic construct
  source 1..75: mol_type = other DNA
aagtaatcctttaggagccagtatgaaaactttaacaaaatatgctcaggcctgtggtgcaaccatcaatattca

SEQ ID NO: 494334 - DNA, 75 bp, synthetic construct
  source 1..75: mol_type = other DNA
cgctcttcgtcgagaaattctttccgcggtggtggcggttcttcaggaggcggcggttcatccggacgctggtga

SEQ ID NO: 494335 - DNA, 75 bp, synthetic construct
  source 1..75: mol_type = other DNA
atgatgaaagtaaaaggtgttccgttcagccaggtaaagcaaaaactgcttaatactccagaagctgtcaaaggg

SEQ ID NO: 494336 - DNA, 75 bp, synthetic construct
  source 1..75: mol_type = other DNA
atgacaacacagacggttacgcagatttcagccgcagcgcggggaaaatggcccgtcattctgcagatgctgcgt

SEQ ID NO: 494337 - DNA, 75 bp, synthetic construct
  source 1..75: mol_type = other DNA
ctgtcactggtagagcatgcggcaagcgccggggaacgtacgtatgccggggttgaggtcagaatgatccagatc

SEQ ID NO: 494338 - DNA, 75 bp, synthetic construct
  source 1..75: mol_type = other DNA
cgagagatgcctttcgtgaagaaatgacgctgcatggcaaagggcagacccgtttaccagaagggttccggctga

SEQ ID NO: 494339 - DNA, 75 bp, synthetic construct
  source 1..75: mol_type = other DNA
gcagccagtgcggcaatggtgacggtctggatctggttaagctcatgaccggttacggcgtcagaaaggccgcgc

SEQ ID NO: 494340 - DNA, 75 bp, synthetic construct
  source 1..75: mol_type = other DNA
atgctcattgacgatattgattttgcagacctttaccttcagcaactcaggctggcccaccgcacagaaaaaacg

SEQ ID NO: 494341 - DNA, 75 bp, synthetic construct
  source 1..75: mol_type = other DNA
cgggaggtgatcgaattacccaactatatctttgcgctcaacatcctgtatcagatgggaatttatgctcatgtt

SEQ ID NO: 494342 - DNA, 75 bp, synthetic construct
  source 1..75: mol_type = other DNA
ccggatcactgggatcaacgggcggaaaaaatggcggaaaattgcgcctcgcctacggacagctacctgcaacaa

SEQ ID NO: 494343 - DNA, 75 bp, synthetic construct
  source 1..75: mol_type = other DNA
cgcgatttccgtgtgtcaggtacaacggaggaatggcgggagcacgtttcccgttactgcaccggtaactcccgc

SEQ ID NO: 494344 - DNA, 75 bp, synthetic construct
  source 1..75: mol_type = other DNA
aaccggaacgccgcgtgacctgcgtcagccgcactggctggcatggtcaggtttacgtcctgcaggatgaggtca

SEQ ID NO: 494345 - DNA, 75 bp, synthetic construct
  source 1..75: mol_type = other DNA
cgcgctgaccccgaaagatgcgggtaatcaggtgggccgggccgtcaaccgatttgcactggtggcgatggcggg

SEQ ID NO: 494346 - DNA, 75 bp, synthetic construct
  source 1..75: mol_type = other DNA
cgtccggctggaaagaaatctgccggggatttgacccgcgcaaggtggcgcgtctgtgcgcggatcgtggatacc

SEQ ID NO: 494347 - DNA, 75 bp, synthetic construct
  source 1..75: mol_type = other DNA
ctccgtttgtggcgggcctgattactggcagacgtggcgggcaaccggcaacgcgctggagggatgcgccagccg

SEQ ID NO: 494348 - DNA, 75 bp, synthetic construct
  source 1..75: mol_type = other DNA
tgggatggacggcggcggctaccacctcaagggggaatcgactgacggtaagaccaccaccatgaaagcggcaac

SEQ ID NO: 494349 - DNA, 75 bp, synthetic construct
  source 1..75: mol_type = other DNA
ctgcaaacgcaggctgttttcaacgaaaacaccgacagatcccgatgagcttgcccgacgtttctgcacgccgga

SEQ ID NO: 494350 - DNA, 75 bp, synthetic construct
  source 1..75: mol_type = other DNA
gcgtcaaagcggtgatgcgtgggtgaatgtgcaagcaggctggctggacgaaggcaatggccccgttttgcagcc

SEQ ID NO: 494351 - DNA, 75 bp, synthetic construct
  source 1..75: mol_type = other DNA
tattggttctggtcatcaacacccattgtgagcggaaactatttacgtcaaaaaacagcaatgatcccgagaaaa

SEQ ID NO: 494352 - DNA, 75 bp, synthetic construct
  source 1..75: mol_type = other DNA
ggcgtatacaatatttgaaacattaaatgctagagggatgaatttaagttttgtagatttaatcaaaaataaatt

SEQ ID NO: 494353 - DNA, 75 bp, synthetic construct
  source 1..75: mol_type = other DNA
ggaacaacaattgaccagttatgtatgttgttgagtaatcgcaagccggaaatttctgtatttactgaacatttt

SEQ ID NO: 494354 - DNA, 75 bp, synthetic construct
  source 1..75: mol_type = other DNA
ttgtcaaactctaaaccacatccgcacaaacttattttatcaaaactcagaagtgaaattgaaagtaatggtagc

SEQ ID NO: 494355 - DNA, 75 bp, synthetic construct
  source 1..75: mol_type = other DNA
aatatcgcttcttccgtaagtcttgccagcactgcgatcatgcgccgtgcgttgacgtctgcccgaccggtgcgt

SEQ ID NO: 494356 - DNA, 75 bp, synthetic construct
  source 1..75: mol_type = other DNA
gcactgggatattccggaaaaatggaagatttgactccggggccgttcagtgcgggagcgacgttagaaatgcgt

SEQ ID NO: 494357 - DNA, 75 bp, synthetic construct
  source 1..75: mol_type = other DNA
atgacagtattagcggagccggtacggataaatttctgaccatgtatgccgcactgggatattccggaaaaatgg

SEQ ID NO: 494358 - DNA, 75 bp, synthetic construct
  source 1..75: mol_type = other DNA
aggctggattgatgaaggcagtggcccggtagagcagcctttaccctatggcgctatgccgcgactcacgttcgc

SEQ ID NO: 494359 - DNA, 75 bp, synthetic construct
  source 1..75: mol_type = other DNA
atgacctggtcacgtcgccagtttctcaccggcgtcggtgtgctggccgccgtcagcggcaccgcaggacgcgtg

SEQ ID NO: 494360 - DNA, 75 bp, synthetic construct
  source 1..75: mol_type = other DNA
gctgcgccagaagcccacttaccgctacaagctggcgctgggaaccaaaccgaagctgtaccgcgtaccgtttaa

SEQ ID NO: 494361 - DNA, 75 bp, synthetic construct
  source 1..75: mol_type = other DNA
atataatccccctgtcaaaagaacttaatgagcaagctggtgataaatcattggcacaaaagctttctatctatt

SEQ ID NO: 494362 - DNA, 75 bp, synthetic construct
  source 1..75: mol_type = other DNA
tctgaacgaatggcattatttccccggagagcagaatgccgattcaacaactccccatgatgaagggaatgggta

SEQ ID NO: 494363 - DNA, 75 bp, synthetic construct
  source 1..75: mol_type = other DNA
tccggattatgcgcttgaggctaccgccaaaattatcgcaaccgctaaatatgggaaggaacttctctataagca

SEQ ID NO: 494364 - DNA, 75 bp, synthetic construct
  source 1..75: mol_type = other DNA
aagaaaaacaatcacttccagctaaaccagttttatatcttggattatcgcgactattcccaattggtgaaacta

SEQ ID NO: 494365 - DNA, 75 bp, synthetic construct
  source 1..75: mol_type = other DNA
atcctgacctgtttgataccgccattaccggggcccgcctgagcgtcacgcagcctgcccatcccccccggatcc

SEQ ID NO: 494366 - DNA, 75 bp, synthetic construct
  source 1..75: mol_type = other DNA
attcgggtttgttcgacacctcaatcacagaggcaagattcggcgttcctgccgttccccatcctccacgtatcc

SEQ ID NO: 494367 - DNA, 75 bp, synthetic construct
  source 1..75: mol_type = other DNA
cggtaaccagttggcgaagtggaacggttggaattacttccaccggaaggaaccttgcgataacgggagcgaata

SEQ ID NO: 494368 - DNA, 75 bp, synthetic construct
  source 1..75: mol_type = other DNA
ttagttggtttatgaacggcgtggagacggcaaatgaatgccgattaatcacgcgcgggcggctggcgtttatta

SEQ ID NO: 494369 - DNA, 75 bp, synthetic construct
  source 1..75: mol_type = other DNA
gttattccggccatgccccgcattgaagactttgagcttcttggtcgtggatgtcctgaaaatgaaaaaacacgc

SEQ ID NO: 494370 - DNA, 75 bp, synthetic construct
  source 1..75: mol_type = other DNA
gtatcaaaggagtggcggcttgccggatatgtcaggggagcaagtccttattttgtgctgctgggtccggcgggt

SEQ ID NO: 494371 - DNA, 75 bp, synthetic construct
  source 1..75: mol_type = other DNA
gaatatgtctggatgaatccgccatactcaaacccagggccattcgttgataaagcggcgcttgaacatcaacga

SEQ ID NO: 494372 - DNA, 75 bp, synthetic construct
  source 1..75: mol_type = other DNA
atgggggtcatgatgaaaaatgattttggaggtagtcacactccaaaggaaattaaagatctatggcagacgcct

SEQ ID NO: 494373 - DNA, 75 bp, synthetic construct
  source 1..75: mol_type = other DNA
atggcagacgcctaaaccagttttcagaggaatggaccgcgagtttgaatttgtcgctgacgtggcggcaaacaa

SEQ ID NO: 494374 - DNA, 75 bp, synthetic construct
  source 1..75: mol_type = other DNA
cgcggtagacgtggctggaaaacagggattacagaccacaaaatataatgaggggctgctggtttttctgcgaac

SEQ ID NO: 494375 - DNA, 75 bp, synthetic construct
  source 1..75: mol_type = other DNA
aaagagcacccagaacaattactattagtggtgtggttgtggttggtgaatccggtagtatccttatctcaagag

SEQ ID NO: 494376 - DNA, 75 bp, synthetic construct
  source 1..75: mol_type = other DNA
gctttttttgagtctcagggcaacgggtttttacgtagcttttacgcggggttactgactacctgcggacttagc

SEQ ID NO: 494377 - DNA, 75 bp, synthetic construct
  source 1..75: mol_type = other DNA
ttggcgatctctcgcaggttgccggaattaaacactatgagttacgtagtggcagagcaaaggggacagaagcgt

SEQ ID NO: 494378 - DNA, 75 bp, synthetic construct
  source 1..75: mol_type = other DNA
atagtggcaaagatggcatctatttccacttaagagataatgtagatgccttcttaaccttatcagcaactgaga

SEQ ID NO: 494379 - DNA, 75 bp, synthetic construct
  source 1..75: mol_type = other DNA
gggcaaactgatatttcagcagccactggcaaaacggctaccacaaatgatggtggtgtgaccagtaagaagaat

SEQ ID NO: 494380 - DNA, 75 bp, synthetic construct
  source 1..75: mol_type = other DNA
tctaaagatgttactatctctaacggtcttcgtatccagctaacttttcaggaaattaactttaaagctattgta

SEQ ID NO: 494381 - DNA, 75 bp, synthetic construct
  source 1..75: mol_type = other DNA
ttctcagatgccgctaatgcgcaagcttcaaaagtgcttaagtcgggtaatgctttacggaagttttctgtgaat

SEQ ID NO: 494382 - DNA, 75 bp, synthetic construct
  source 1..75: mol_type = other DNA
taccagggcaaacaccctggattcacagatgcttagtaaaggcacaaatggtgaatttggctatttgaaatctct

SEQ ID NO: 494383 - DNA, 75 bp, synthetic construct
  source 1..75: mol_type = other DNA
ggctattcagtgttatgaggaaagcaaatcttctgcaatagaagaatatgaaagcaattgtttaaatggtgatgg

SEQ ID NO: 494384 - DNA, 75 bp, synthetic construct
  source 1..75: mol_type = other DNA
ggtcagactgattggatttgcccctatatttccagacatctgttatcacttaacccattacaagcccgctgccgc

SEQ ID NO: 494385 - DNA, 75 bp, synthetic construct
  source 1..75: mol_type = other DNA
ggtcagactgatatttctgctgctactggaaagacagctactacaaatgatggtggtgctaccagtaaaaagaac

SEQ ID NO: 494386 - DNA, 75 bp, synthetic construct
  source 1..75: mol_type = other DNA
ctccattattacaagctttaaagcctctaaagatgttggtatttcaaacggcctaagaatccagctaacttttca

SEQ ID NO: 494387 - DNA, 75 bp, synthetic construct
  source 1..75: mol_type = other DNA
ttccattattacaagctttaaagcctctaaagatgttggtatttcgaatggtctgagaatccagttaacttttca

SEQ ID NO: 494388 - DNA, 75 bp, synthetic construct
  source 1..75: mol_type = other DNA
accccgccactcatcgccccggtcagggaacgctggctttacccgctcccgcaaccggacacggtattcagcggt

SEQ ID NO: 494389 - DNA, 75 bp, synthetic construct
  source 1..75: mol_type = other DNA
acaccgccactcatcgccccggcccgggaacgctggcttttcccgctcccgcaaccggacacggtattcagcggt

SEQ ID NO: 494390 - DNA, 75 bp, synthetic construct
  source 1..75: mol_type = other DNA
atgtcctgtgagctaccccctttcaccctgctcagaacagagcacggcaacgtgattgcccgcgacaaccgggat

SEQ ID NO: 494391 - DNA, 75 bp, synthetic construct
  source 1..75: mol_type = other DNA
atcggtgcaggccacagataatcttcaatttagagggaatctgattattccaagttgtactatcaataatgacaa

SEQ ID NO: 494392 - DNA, 75 bp, synthetic construct
  source 1..75: mol_type = other DNA
gactatgtatgcctcacttggatattataaaagaatggaagatttgaaacccggtccatttactgcagcggcttc

SEQ ID NO: 494393 - DNA, 75 bp, synthetic construct
  source 1..75: mol_type = other DNA
atccgttccagaaggactacagacttcgaaatataatgaaggtctgctcatttatttgcgcattaaaaatgtggg

SEQ ID NO: 494394 - DNA, 75 bp, synthetic construct
  source 1..75: mol_type = other DNA
aggtgtagagtttcgttcaatcgtaggtcagactgatgtttcggctgctactggaaagaccgctaccacgaatga

SEQ ID NO: 494395 - DNA, 75 bp, synthetic construct
  source 1..75: mol_type = other DNA
cagaagcaaattatttcggtcatctgtaaagatggaattaaaattgacgattccattattacgagttttaaagcc

SEQ ID NO: 494396 - DNA, 75 bp, synthetic construct
  source 1..75: mol_type = other DNA
tcagatgccgctaatgagcaagcttcaaaggcgcttaataatgctggtacaggtaatgttttgaagaggctttct

SEQ ID NO: 494397 - DNA, 75 bp, synthetic construct
  source 1..75: mol_type = other DNA
ctgacgccgggactgatgattaatctggccccggtctcttccgatgcgctcatccgcctgcgccagggggatgag

SEQ ID NO: 494398 - DNA, 75 bp, synthetic construct
  source 1..75: mol_type = other DNA
aaaaagctcggccaggtgatcaagaatccggatattcaggtcgggaaactggcggatcaggcctcagaggtgacg

SEQ ID NO: 494399 - DNA, 75 bp, synthetic construct
  source 1..75: mol_type = other DNA
gggcaaactatcactgataatgttcagagagcacctaagaccatctctattagcggtgttgtagtggttgattcg

SEQ ID NO: 494400 - DNA, 75 bp, synthetic construct
  source 1..75: mol_type = other DNA
tggtgattacggtctgtggtcaatacctgatgatgctgactggaaacctcgcactgtgaatgaaaagtttgatgg

SEQ ID NO: 494401 - DNA, 75 bp, synthetic construct
  source 1..75: mol_type = other DNA
cgaaggaaggaagacgcagactcgccgacctgtaaaaaatgtcagggccgataactgcctggttatccgtaaacc

SEQ ID NO: 494402 - DNA, 75 bp, synthetic construct
  source 1..75: mol_type = other DNA
ccagccgggcgcaatgttcgggcaaaatcaggtttaaaccgttcgatactggatcagggctggtatgaaatgcgc

SEQ ID NO: 494403 - DNA, 75 bp, synthetic construct
  source 1..75: mol_type = other DNA
tgtcgatattgttgaaggacgttttgatgccgggatacgtctgggtgaaactgttgataatgatatgattgcagt

SEQ ID NO: 494404 - DNA, 75 bp, synthetic construct
  source 1..75: mol_type = other DNA
cgatatcagcgaatgcgatgcaagggctgagggcgcaccaacagaatcgaccctcattggcgataagcattaccc

SEQ ID NO: 494405 - DNA, 75 bp, synthetic construct
  source 1..75: mol_type = other DNA
gcttcgcgtattttgctggaaattaccgacgtgcgtgtggaacggctgcatgacatgagcgaggcagatgctaaa

SEQ ID NO: 494406 - DNA, 75 bp, synthetic construct
  source 1..75: mol_type = other DNA
tgatgcaggcaagttgcccttaagttgcccccatgttggggctaagttgggagcggtgaaatcgcctgtaagccg

SEQ ID NO: 494407 - DNA, 75 bp, synthetic construct
  source 1..75: mol_type = other DNA
gcgctcaagctgttgcagtcggacggagaactgaccatcgccagtacgggcaaggacgatgccagcggcaacctg

SEQ ID NO: 494408 - DNA, 75 bp, synthetic construct
  source 1..75: mol_type = other DNA
ttcgctgggtaaggtgctgctggcgctggagcactggcaggccgcaccgcagccggaaaacgccgccccggagat

SEQ ID NO: 494409 - DNA, 75 bp, synthetic construct
  source 1..75: mol_type = other DNA
agcgttgcgcgtgctgtggtcatacagcgaaagaaaatcgtctgtcacaaagtaaattcagatgccaggtatgtg

SEQ ID NO: 494410 - DNA, 75 bp, synthetic construct
  source 1..75: mol_type = other DNA
ggtggtggaatacatcgaggtggcgcgggaagacatcgccctggccaaccgtctggcacatgaaatactcgggcg

SEQ ID NO: 494411 - DNA, 75 bp, synthetic construct
  source 1..75: mol_type = other DNA
gcggaacgtctgaaagcggagctgggcgacaatcccgccgtggtgccgctggtcaccagggatgagccggaaatc

SEQ ID NO: 494412 - DNA, 75 bp, synthetic construct
  source 1..75: mol_type = other DNA
tgtcgatattgttgaaggtcgttttgatgccgggatacgtctgggtgaaactgtagataatgatatgattgcagt

SEQ ID NO: 494413 - DNA, 75 bp, synthetic construct
  source 1..75: mol_type = other DNA
ctctcgattcctcattcggttgaagacaaaaatgaatgatcgacgttatgccttcatgtatcaatctcccaagga

SEQ ID NO: 494414 - DNA, 75 bp, synthetic construct
  source 1..75: mol_type = other DNA
tggttaattggaattatcgaaagagtttggcgacatccagtagagttgccttcgtttccagaagtagatgaaaca

SEQ ID NO: 494415 - DNA, 75 bp, synthetic construct
  source 1..75: mol_type = other DNA
cggattaaaatgtctaagcccaagcatgagcctcgtagcgcaactattccgttctggacgcgctgggataagcca

SEQ ID NO: 494416 - DNA, 75 bp, synthetic construct
  source 1..75: mol_type = other DNA
gcgggcgtttagcagccgtcctgcctctgtcccttcaggggatcgataacctgctgggcgaggggttcaggaccg

SEQ ID NO: 494417 - DNA, 75 bp, synthetic construct
  source 1..75: mol_type = other DNA
gtggcccataccaaagcgacgttgcaggagttcccggcactgaaacgctgcatcgattttcattcacggatgcag

SEQ ID NO: 494418 - DNA, 75 bp, synthetic construct
  source 1..75: mol_type = other DNA
cgccaacgcggtatcagcccggcaggtcttgccaccagctttgaaaaactggcgaaactggaagaaggccgccaa

SEQ ID NO: 494419 - DNA, 75 bp, synthetic construct
  source 1..75: mol_type = other DNA
gcgcgaagtctggtctggccgaagctaaaaccttttctcagagagtatcccgaaatcaatgtcgaactggtggtg

SEQ ID NO: 494420 - DNA, 75 bp, synthetic construct
  source 1..75: mol_type = other DNA
tgtcgatattgttgaagggcgttttgatgccgggatacgtctgggtgaaactgtcgataaagatatgattgcagt

SEQ ID NO: 494421 - DNA, 75 bp, synthetic construct
  source 1..75: mol_type = other DNA
tgtcgatattgttgaaggccgttttgatgccgggatacgtctgggtgaaactgtggataaagatatgattgcagt

SEQ ID NO: 494422 - DNA, 75 bp, synthetic construct
  source 1..75: mol_type = other DNA
agccgtcgacgcccattaccccctatgaaggatgccgagtttgcgagttctgcgtggcgccgctcggtaaatggc

SEQ ID NO: 494423 - DNA, 75 bp, synthetic construct
  source 1..75: mol_type = other DNA
aaagcagctttcgtggaaatggacagcgtggcgttatgtgaaagcctggcgcggtacgaagagtatgaagaagcg

SEQ ID NO: 494424 - DNA, 75 bp, synthetic construct
  source 1..75: mol_type = other DNA
accaaccaacgctacacaggctggtatcaggagaggtgaaagatccgaaatacgcaacgttaaagcagatcgccg

SEQ ID NO: 494425 - DNA, 75 bp, synthetic construct
  source 1..75: mol_type = other DNA
gccgatgcggtggatatgatgagcgcccgcagtcgcggcggttatgcgcgggccgcagcggcagagcttggcctg

SEQ ID NO: 494426 - DNA, 75 bp, synthetic construct
  source 1..75: mol_type = other DNA
gttctttctggtgtgctttatcctgaaattacaggtggcgaagtgtcgctttcgttgctgaccacgcaggcatat

SEQ ID NO: 494427 - DNA, 75 bp, synthetic construct
  source 1..75: mol_type = other DNA
ctgggaaggccgtgcagatgggctgccctataaagataaaaaccaactggtgaccatggcgtcgattatcgaaaa

SEQ ID NO: 494428 - DNA, 75 bp, synthetic construct
  source 1..75: mol_type = other DNA
tgacgatggcatcaattatcgaaaaagaaaccgccgttgccagtgaacgcgatcaggttgcctcggtatttatca

SEQ ID NO: 494429 - DNA, 75 bp, synthetic construct
  source 1..75: mol_type = other DNA
tttatcgtaatgccattgccatctgatgttattctgatcagcaaagaatcgcatgcggattcggtcagttacttc

SEQ ID NO: 494430 - DNA, 75 bp, synthetic construct
  source 1..75: mol_type = other DNA
catcgttcagtgatatgctgtccggcttcaaagataaggtcacatcatcccttaacagcgcaaccagttcagtta

SEQ ID NO: 494431 - DNA, 75 bp, synthetic construct
  source 1..75: mol_type = other DNA
tcagcagttacagcaaaataaaagctggcggcatgtgaaaaatgaacgcgttaaccgttcagcaagctggcagta

SEQ ID NO: 494432 - DNA, 75 bp, synthetic construct
  source 1..75: mol_type = other DNA
cgcagcgaggatgatgcggctgacgacgctgaccgcacggaacaggtgccggacaaagcggcagtggaggaaatc

SEQ ID NO: 494433 - DNA, 75 bp, synthetic construct
  source 1..75: mol_type = other DNA
cgcagcgaggatgatgcggctgacgacgctgaccgcacggaacaggtgcgggataaagcggctgtggaggaaatc

SEQ ID NO: 494434 - DNA, 75 bp, synthetic construct
  source 1..75: mol_type = other DNA
cgcgatcgtgcgcatcagatccgccatgcgtttgatcgcgccaccttcggcgtttttcaaggtagttgtcgcctt

SEQ ID NO: 494435 - DNA, 75 bp, synthetic construct
  source 1..75: mol_type = other DNA
gtggtcacacgtttaataccaatcttgccagccataacaagtctgtgcaggattatctgaaagtgcttaaggaaa

SEQ ID NO: 494436 - DNA, 75 bp, synthetic construct
  source 1..75: mol_type = other DNA
acccgttccgagtttgatcgctacggtaaggcgaaaaagatagaattttcactgactcttgaacgctgtgatgag

SEQ ID NO: 494437 - DNA, 75 bp, synthetic construct
  source 1..75: mol_type = other DNA
gcaatcctcatcgttcagtgatatgctgtccggcttcaaagataaggtcacatcatcccttaacagcgcggccag

SEQ ID NO: 494438 - DNA, 75 bp, synthetic construct
  source 1..75: mol_type = other DNA
tgcgatcagtgcatgcccgacaagtgtatgcggctcactccaggcctgtatcagcccccatttcgctccggaggc

SEQ ID NO: 494439 - DNA, 75 bp, synthetic construct
  source 1..75: mol_type = other DNA
acccggcgcgaccacatgaaatacctgacgctgatccaggcgatcgcgctgctgcaccagtaccagcgggagatc

SEQ ID NO: 494440 - DNA, 75 bp, synthetic construct
  source 1..75: mol_type = other DNA
cagcggcagagctgggccttgcagaaggcgatctgcgccgctcgctgggtaaggtgctgctggcactcgaacggc

SEQ ID NO: 494441 - DNA, 75 bp, synthetic construct
  source 1..75: mol_type = other DNA
gcgcccgcagtcgcggcggttatgcgcgggccgccgccgcagagctgggccttgcagaaggcgagcttcgccgct

SEQ ID NO: 494442 - DNA, 75 bp, synthetic construct
  source 1..75: mol_type = other DNA
gcggtcaggtgcttgctgttccgccagcgtatacaagccagcgttgcgcgtactgtggtcatacagcgaaagaga

SEQ ID NO: 494443 - DNA, 75 bp, synthetic construct
  source 1..75: mol_type = other DNA
agtaccagcgggagatcaaacgcgtggagcatcgcgggcaggtggtggagtacatcgaggtgacgcgggaggata

SEQ ID NO: 494444 - DNA, 75 bp, synthetic construct
  source 1..75: mol_type = other DNA
tcgacggggacggcagcgcagacggcgcgcatctgtgcgggctgatcgacgtaccggaaaacgccggagaagtca

SEQ ID NO: 494445 - DNA, 75 bp, synthetic construct
  source 1..75: mol_type = other DNA
gcaatccacttatttccatccatgaaaccacacaatttgaaattcaatccgtgattgcccgttgccgttttcatc

SEQ ID NO: 494446 - DNA, 75 bp, synthetic construct
  source 1..75: mol_type = other DNA
ttaatcaggcaatcctaaatttcagtcctcctgaatatcaagccgccgtagcatgtggcgaagctgcaatgccca

SEQ ID NO: 494447 - DNA, 75 bp, synthetic construct
  source 1..75: mol_type = other DNA
caactggccaagctggcaacaaaagatttgcgcattgatacccgaaaccccgaaaccgggttaatacgttatagc

SEQ ID NO: 494448 - DNA, 75 bp, synthetic construct
  source 1..75: mol_type = other DNA
ctgttgctgctgatccagacaatggtcggtgaactggcagcggcgcagcactgcaaacccggcgaggtacgcttc

SEQ ID NO: 494449 - DNA, 75 bp, synthetic construct
  source 1..75: mol_type = other DNA
gcgctcaagctgttacagtcggacggggaactgaccatcgccagtacgggcaaggacgatgccagcggcaacctg

SEQ ID NO: 494450 - DNA, 75 bp, synthetic construct
  source 1..75: mol_type = other DNA
agattatcaggctgccgtagcgcgtggcgaagcggctttgccaaccattacgccgaccgacttgcgccacaacgt

SEQ ID NO: 494451 - DNA, 75 bp, synthetic construct
  source 1..75: mol_type = other DNA
cgcagcgaggatgatgcggctgacgacgctgaccgcacggaacaggtgccggaaaaagcggccgtggaggaaatc

SEQ ID NO: 494452 - DNA, 75 bp, synthetic construct
  source 1..75: mol_type = other DNA
cggcactgaagcgaaggaaatcatcctgcttaactctcatgatggcagcagcagctatcaaatgctggccggtgt

SEQ ID NO: 494453 - DNA, 75 bp, synthetic construct
  source 1..75: mol_type = other DNA
gctggcgtatggcgcctggctgatttatcccccggcggggtttgttgttgccggggcgttgtgcctgttctggtc

SEQ ID NO: 494454 - DNA, 75 bp, synthetic construct
  source 1..75: mol_type = other DNA
catatgagttcaaagacaattacaagtcgattgcaatctgttcaccgtagagttagtggtaataaaaattctaca

SEQ ID NO: 494455 - DNA, 75 bp, synthetic construct
  source 1..75: mol_type = other DNA
tctcggtattaaaagtaaaagatagcggatttgaattcaatgtaaaggataatgtttgggttcttagtaaagaca

SEQ ID NO: 494456 - DNA, 75 bp, synthetic construct
  source 1..75: mol_type = other DNA
cttcctgaatgctgccaacaaagcgcgcccggcggtcattgaccgcgaccgttcgccactcatccaggctgatgg

SEQ ID NO: 494457 - DNA, 75 bp, synthetic construct
  source 1..75: mol_type = other DNA
ctcctttagtaaggggtattcacaggtattattacagaacaatgttgtttctggcttgttcttttttttggcgac

SEQ ID NO: 494458 - DNA, 75 bp, synthetic construct
  source 1..75: mol_type = other DNA
gctgttttaaatgcattgaaatcagctgtaccaaatttcccaaatctaaaagaaataattgacaatcaaatagta

SEQ ID NO: 494459 - DNA, 75 bp, synthetic construct
  source 1..75: mol_type = other DNA
tagaattgccccaagcgagggagttgaaaagattcccgatcaactttttaacaaaaaatcatttacaattagtga

SEQ ID NO: 494460 - DNA, 75 bp, synthetic construct
  source 1..75: mol_type = other DNA
tatccccctgcgggttttgttgttgccggggggctgtgcctgttctggtcgtggctggtggcgcgatatctcgac

SEQ ID NO: 494461 - DNA, 75 bp, synthetic construct
  source 1..75: mol_type = other DNA
aggtgtctggactgagccggtcatgccgcataagtcagaggaagatatatgcgaggatgagcgcaaacgccagca

SEQ ID NO: 494462 - DNA, 75 bp, synthetic construct
  source 1..75: mol_type = other DNA
gatattgatgcgacatccaggggactcgaacctaattatgatttaataaaaaaactcgcagcggaatgccgtatg

SEQ ID NO: 494463 - DNA, 75 bp, synthetic construct
  source 1..75: mol_type = other DNA
tggtttgttgaaacggttctacaatacattcttaaaaataaactatacgcatgtagaaagtatgaaatactttct

SEQ ID NO: 494464 - DNA, 75 bp, synthetic construct
  source 1..75: mol_type = other DNA
cgcagcgaggatgatgcggctgacgacgctgaccgcacggaacaggtgctggagaaagcggctgtggaggaaatc

SEQ ID NO: 494465 - DNA, 75 bp, synthetic construct
  source 1..75: mol_type = other DNA
gtcttgccaccagctttgaaaaactggcgaaactggaagaaggccgccaaagctcaatgtttgacgaccatccgg

SEQ ID NO: 494466 - DNA, 75 bp, synthetic construct
  source 1..75: mol_type = other DNA
tgaatatgctaagcgtctgaccaccatagccaacgcgctaggcaacaatatcaacggtcagccggtgaattacaa

SEQ ID NO: 494467 - DNA, 75 bp, synthetic construct
  source 1..75: mol_type = other DNA
acagtagtgggtgcattattaatctgctcgggcattgcgcttattgtcgggttattcagcaaccgcagtcataat

SEQ ID NO: 494468 - DNA, 75 bp, synthetic construct
  source 1..75: mol_type = other DNA
tgatttggctgatttttttgtcactcttcgggcgctgtacaagagttttgtcaaacttgatgtaaacgtcaaagg

SEQ ID NO: 494469 - DNA, 75 bp, synthetic construct
  source 1..75: mol_type = other DNA
cctttgtgcagaaagcatcacgacgagctgcatgcggataccgtggcatttgaagagaagtatggctcccagctg

SEQ ID NO: 494470 - DNA, 75 bp, synthetic construct
  source 1..75: mol_type = other DNA
tgaagaagaattaaacaatttacccctctttattgatccttatttttttaactcgaattacaaacttgataaatt

SEQ ID NO: 494471 - DNA, 75 bp, synthetic construct
  source 1..75: mol_type = other DNA
actcgacttacaaacttgataaattatatgaaaataacttcttcaatttgcatatgagttctaagaggataaccg

SEQ ID NO: 494472 - DNA, 75 bp, synthetic construct
  source 1..75: mol_type = other DNA
caatgaagagttttcattcagaattgatcaggcgataaatgattcagtaagtccttatatcgcttcattttcaaa

SEQ ID NO: 494473 - DNA, 75 bp, synthetic construct
  source 1..75: mol_type = other DNA
aacttggaatataacattaaatagtgaacctccgtcagtaattaattttataatcccaaggaagtttcaagttcg

SEQ ID NO: 494474 - DNA, 75 bp, synthetic construct
  source 1..75: mol_type = other DNA
gaattcttagatcaagaaatgctggatttgatttccaaatggaaagtaactaagcccaataagacaactgcctat

SEQ ID NO: 494475 - DNA, 75 bp, synthetic construct
  source 1..75: mol_type = other DNA
agtgtttggtttctcagcaaagatgttaaattgaatttctcatattttgaaagaaacattaatgctaacttatta

SEQ ID NO: 494476 - DNA, 75 bp, synthetic construct
  source 1..75: mol_type = other DNA
aatgggacgataccgtcctctttagctcaaggtatgtgcgagtttcagaccgaactttataaagcgtttatgctt

SEQ ID NO: 494477 - DNA, 75 bp, synthetic construct
  source 1..75: mol_type = other DNA
aacgcgatgatcccggtagtcacgatgatgggcttacagtttggctttttgcttggcggtaccatcgtggtggag

SEQ ID NO: 494478 - DNA, 75 bp, synthetic construct
  source 1..75: mol_type = other DNA
atgcttaattacgttatcaaacgcttactggggttgattccgacgctgtttatcgtctcggtgctggtgttttta

SEQ ID NO: 494479 - DNA, 75 bp, synthetic construct
  source 1..75: mol_type = other DNA
tgcgtcctcaggccgtctttaccggaaatgacgctatggctgttggcgtttaccaggcgctatatcaggcagagt

SEQ ID NO: 494480 - DNA, 75 bp, synthetic construct
  source 1..75: mol_type = other DNA
aagagctatcacggtgaatggaaacgcaagccagggaacgatcgaggcgctaatcaatgtgatctacacctggca

SEQ ID NO: 494481 - DNA, 75 bp, synthetic construct
  source 1..75: mol_type = other DNA
aggttcctgttagctacgttttgcgcgttattcacagcaactctccaggccgccgatgtcactatcactgttaat

SEQ ID NO: 494482 - DNA, 75 bp, synthetic construct
  source 1..75: mol_type = other DNA
gcagaaattctgcttttctcgctggaatttattcttatcaacttagtggtggatgtgctttacgccgccattaac

SEQ ID NO: 494483 - DNA, 75 bp, synthetic construct
  source 1..75: mol_type = other DNA
atgaatgctatctggattgccgttgccgccgtgagcctgctgggcctggcgtttggcgccattctgggttatgcc

SEQ ID NO: 494484 - DNA, 75 bp, synthetic construct
  source 1..75: mol_type = other DNA
gatggttccggatgtgatggtataattaccattacctaccagtgcgataaaagtggaacacatgaggcatggtta

SEQ ID NO: 494485 - DNA, 75 bp, synthetic construct
  source 1..75: mol_type = other DNA
atgaagctaacagaagaaagtctgaatctagtcattgacatcctgaatgatttgatctgtgaaggaaaaatgctg

SEQ ID NO: 494486 - DNA, 75 bp, synthetic construct
  source 1..75: mol_type = other DNA
gggccagaaggtcaatgagatctcagaacagctcaatctcagtccgaaaacggtgaacagctaccgctatcgtat

SEQ ID NO: 494487 - DNA, 75 bp, synthetic construct
  source 1..75: mol_type = other DNA
atatgtatcttagcgccctgataactgtggcagcagccctcacagcctgtaccccaaaaaccagcctggaacaac

SEQ ID NO: 494488 - DNA, 75 bp, synthetic construct
  source 1..75: mol_type = other DNA
cggcattacgtatatgcttctgatgatggttttgatcccaacttttccacccagaaggccgacacaacacgaatg

SEQ ID NO: 494489 - DNA, 75 bp, synthetic construct
  source 1..75: mol_type = other DNA
tgacaatacgggttattacaaaaatgaaggtactgccgaaaatattcagatagagctaagggatgaccaggatgc

SEQ ID NO: 494490 - DNA, 75 bp, synthetic construct
  source 1..75: mol_type = other DNA
attgaagcggtgattggtttgggacctaatctgttttataactcgccgatggaatcttgtgtggtggtgcttaat

SEQ ID NO: 494491 - DNA, 75 bp, synthetic construct
  source 1..75: mol_type = other DNA
tggtcgtaatctttatggcgtaccgccgcagggctgcgctgattatgcgttttatacccatataatcaaaagctt

SEQ ID NO: 494492 - DNA, 75 bp, synthetic construct
  source 1..75: mol_type = other DNA
cagccgtgtacaattaaaaaaacagactaataaattattcgatagcctcacgcagttaggttatgaggtggaaaa

SEQ ID NO: 494493 - DNA, 75 bp, synthetic construct
  source 1..75: mol_type = other DNA
aaagacgaaacagaccttctttatgaaagcatgaaactttctgattcaatttctctttttggtgactataaagtc

SEQ ID NO: 494494 - DNA, 75 bp, synthetic construct
  source 1..75: mol_type = other DNA
gacgaaaccgttttttatcttttcactcgcccacaggatgccttagcgatggttcgccagggggtaaaaataggc

SEQ ID NO: 494495 - DNA, 75 bp, synthetic construct
  source 1..75: mol_type = other DNA
acaaagtgttatttatcaatggggttgagcatgttacccgtgaacgtgcccatagccgtttatctgatgatgact

SEQ ID NO: 494496 - DNA, 75 bp, synthetic construct
  source 1..75: mol_type = other DNA
ctttggttgtggctttattattggcgttaagatgtgccgcctatattgatttttctgaaaaagacatgctcaagt

SEQ ID NO: 494497 - DNA, 75 bp, synthetic construct
  source 1..75: mol_type = other DNA
cgtaattttgacaaactacttgatgagctaatggctgttaaagcatcaagaatgccgatcgacaaagacgaaaat

SEQ ID NO: 494498 - DNA, 75 bp, synthetic construct
  source 1..75: mol_type = other DNA
aatcgcccgctgacggacttcgggggaaaaacgagtatttttagtcatcctgtttacctctttctcagggagttt

SEQ ID NO: 494499 - DNA, 75 bp, synthetic construct
  source 1..75: mol_type = other DNA
gcggtgatcggtcacgaaatggggcatgtagcgttaggccatgtgaagaaagggatgcaggtagcactgggcact

SEQ ID NO: 494500 - DNA, 75 bp, synthetic construct
  source 1..75: mol_type = other DNA
tcaacggtcagccggtgaattacaaagtgtatatggcgaaggatgtgaacgcctttgcaatggctaacggctgta

SEQ ID NO: 494501 - DNA, 75 bp, synthetic construct
  source 1..75: mol_type = other DNA
gagcttgatcaaggctctcaagaggttttgaaaatatgtgaagccgcttttaaattggctacacaagaggttaat

SEQ ID NO: 494502 - DNA, 75 bp, synthetic construct
  source 1..75: mol_type = other DNA
aaccagatgcgcattcttggccgctggatgcggatgatcaccatcccgaatcagtcctctgtggcaaaagcctgg

SEQ ID NO: 494503 - DNA, 75 bp, synthetic construct
  source 1..75: mol_type = other DNA
gcgctggttagcggccaactgacgtggagcgcgccgtggggaagcgtgtttggtagcggtggttatctgcgtcat

SEQ ID NO: 494504 - DNA, 75 bp, synthetic construct
  source 1..75: mol_type = other DNA
ttaccgaccgtttctgaaggagcattaggttattgggctttaacgcccaatattgaactgtggggaatgtggcgc

SEQ ID NO: 494505 - DNA, 75 bp, synthetic construct
  source 1..75: mol_type = other DNA
taataccagccagcccaatgaaacggcgttggttagtggacaattgacctggaatgcgccgtggggaagcgtatt

SEQ ID NO: 494506 - DNA, 75 bp, synthetic construct
  source 1..75: mol_type = other DNA
atgaatgctattccttatttcgactatagcctggcacctttctggccatcttatcagaacaaagtcatcggcgtc

SEQ ID NO: 494507 - DNA, 75 bp, synthetic construct
  source 1..75: mol_type = other DNA
tcgccgactggctgcactcaacatgctggcagagcgcaacatccttccggctgactggcctgtacgcgtgaaggt

SEQ ID NO: 494508 - DNA, 75 bp, synthetic construct
  source 1..75: mol_type = other DNA
atgagcgcacgttcacaggcactggttccccttcccctcagcgcagagcaacagggcacatggcgggcggtggcg

SEQ ID NO: 494509 - DNA, 75 bp, synthetic construct
  source 1..75: mol_type = other DNA
tttggcggcggctatatcgcgttttccaaactatcagggagtaacagcgatatgcagtcagccgtgaacataaac

SEQ ID NO: 494510 - DNA, 75 bp, synthetic construct
  source 1..75: mol_type = other DNA
aacagcgggaagcgttacaaaaactgcttgcccgcatcaacacacagcatcctgacgcccgccccccggtagtgg

SEQ ID NO: 494511 - DNA, 75 bp, synthetic construct
  source 1..75: mol_type = other DNA
tcagtatggtcatgctgcgtttgagcaaggcggcatgggcggcggcggttttggcggcggcgcagacttcagcga

SEQ ID NO: 494512 - DNA, 75 bp, synthetic construct
  source 1..75: mol_type = other DNA
gcccagtgctggcgcgggaagagatatttacgcatgggtacagggaggattgctcgatttcaatagtggttatta

SEQ ID NO: 494513 - DNA, 75 bp, synthetic construct
  source 1..75: mol_type = other DNA
tgaaaatagtttgcttaaattaggccgcttcggaacagattatagttatggcagtttaccttatcgtattccgtt

SEQ ID NO: 494514 - DNA, 75 bp, synthetic construct
  source 1..75: mol_type = other DNA
gctgatattaaaaaaatcaaagaccttgaggacgagaatcgtcgtctgaaacagatgtttgccgacctgagtctg

SEQ ID NO: 494515 - DNA, 75 bp, synthetic construct
  source 1..75: mol_type = other DNA
cccggacgcgacctttgctggctcctgacccgtcatccggaaaagccggaataccacgtggtgctgtgcgtcaga

SEQ ID NO: 494516 - DNA, 75 bp, synthetic construct
  source 1..75: mol_type = other DNA
tgacccgtcatcctgaaaagccggaataccacgtggtgctgtgtgtcagacaggagtatttcgacggccctgaac

SEQ ID NO: 494517 - DNA, 75 bp, synthetic construct
  source 1..75: mol_type = other DNA
cgttcagtgatttcgcccgcgatcgccgtggtgtgtgcgatccggaagcccgttgcctcgccggtaatcccggct

SEQ ID NO: 494518 - DNA, 75 bp, synthetic construct
  source 1..75: mol_type = other DNA
cagaagcagatcacccgggatgtggtgctggacagtcgttcaccggactgcgaagacatcctcaaagacttgatc

SEQ ID NO: 494519 - DNA, 75 bp, synthetic construct
  source 1..75: mol_type = other DNA
gtggcaaaaccattgaccctcgatcacgatgatttaacccgtcgcttcccgctggaagagcgtatttatcgtatg

SEQ ID NO: 494520 - DNA, 75 bp, synthetic construct
  source 1..75: mol_type = other DNA
cactgggcatcagcgcagctgcactttctttgcctcacgctgcgcatgccgatctgcttagctggtttaaaggga

SEQ ID NO: 494521 - DNA, 75 bp, synthetic construct
  source 1..75: mol_type = other DNA
cccggacgcgacctctgctggctcctgacacgtcatcctgaaaaaccggaataccacgtggtgctgtgcgtcaga

SEQ ID NO: 494522 - DNA, 75 bp, synthetic construct
  source 1..75: mol_type = other DNA
atagccttgcccccttctggccatcttatcagagcaaagtcatcggcgttcttgagcgtgcgctgcgtgaacagt

SEQ ID NO: 494523 - DNA, 75 bp, synthetic construct
  source 1..75: mol_type = other DNA
ccaggtgaagcaaagccgtaccagaagcagatcacccgggatgtggtactggatcgccggtcaccggactgcgaa

SEQ ID NO: 494524 - DNA, 75 bp, synthetic construct
  source 1..75: mol_type = other DNA
ggtttggtatggattttatcgaaaccgtcagtgcgctgatgaatgcaacacccggacgtgacctctgctggctcc

SEQ ID NO: 494525 - DNA, 75 bp, synthetic construct
  source 1..75: mol_type = other DNA
atcgtcgtggtgtgtgcgatccggaagcccgttgcctcgccggtaatcccggctatcccggatctgcaggactgt

SEQ ID NO: 494526 - DNA, 75 bp, synthetic construct
  source 1..75: mol_type = other DNA
ctgcgctttgcccatgataacaatcaggattacatcacctgcccactggcgcgtctggtgcgggatgttcagggc

SEQ ID NO: 494527 - DNA, 75 bp, synthetic construct
  source 1..75: mol_type = other DNA
gaacgacagcgcgattgttctgctggcgctgccgcttgcgcatggtaacggcggtaatctcggtcagggtgagca

SEQ ID NO: 494528 - DNA, 75 bp, synthetic construct
  source 1..75: mol_type = other DNA
tgaatctctacatcgagggcaaccgtctaccattgtcagagtataacgctttgtttgctgatggtgagtggggtt

SEQ ID NO: 494529 - DNA, 75 bp, synthetic construct
  source 1..75: mol_type = other DNA
tcattggtgttgaacgctggcggcgttttcgtcgcgttatcgtgaacgtgaacggggtgtctgaattccgcgcgc

SEQ ID NO: 494530 - DNA, 75 bp, synthetic construct
  source 1..75: mol_type = other DNA
gatgggtgtgtcgccttatccatttgcgatggtcgtggcgatggcagcatccgccgcctttatgacaccggtttc

SEQ ID NO: 494531 - DNA, 75 bp, synthetic construct
  source 1..75: mol_type = other DNA
aacgtttcctgggatgcgctgaacacggcatacaaggacctctgtttttccttccccctccataaaccacaacac

SEQ ID NO: 494532 - DNA, 75 bp, synthetic construct
  source 1..75: mol_type = other DNA
aaatggcacagtggctacagccagtcttcgccagcctcgatgaaaaaacattgcagcaactgaatgccagcattg

SEQ ID NO: 494533 - DNA, 75 bp, synthetic construct
  source 1..75: mol_type = other DNA
gcgctgaacttaccggaagaggtgagtgaagcatcgcccgcgcacagccaggcaccccatgcgattttctgtctg

SEQ ID NO: 494534 - DNA, 75 bp, synthetic construct
  source 1..75: mol_type = other DNA
gcgtgaaattggctttcgtacccgctacggactaaatgtggtggggctgaaacgcaacggtgtggcgctggaagg

SEQ ID NO: 494535 - DNA, 75 bp, synthetic construct
  source 1..75: mol_type = other DNA
ccgcgccgtctcatccgtgagcgtatccgcctgcaacgggccagcgcagacagggtttatgcgaaggtcatcatc

SEQ ID NO: 494536 - DNA, 75 bp, synthetic construct
  source 1..75: mol_type = other DNA
gggaggcagagcagaaagcccgtgcgtaccaggcactggttgctcaggctgaaatcgaactggcgttccattcac

SEQ ID NO: 494537 - DNA, 75 bp, synthetic construct
  source 1..75: mol_type = other DNA
gtcgcggtcatttttatgagggccggggaatgacagtcatgactgatgctattcgcacgttcaagttgctgggct

SEQ ID NO: 494538 - DNA, 75 bp, synthetic construct
  source 1..75: mol_type = other DNA
acccggctggctaacggacgctggcatgtgatgcagcgtatgccgtgggcatcatcatccaccggcgcggacagc

SEQ ID NO: 494539 - DNA, 75 bp, synthetic construct
  source 1..75: mol_type = other DNA
gtttatcgaacgcgccgatgccttacccgcttttgaaaaagcctatggctttaagctcggtcaggatcagttgct

SEQ ID NO: 494540 - DNA, 75 bp, synthetic construct
  source 1..75: mol_type = other DNA
accatccgtaagctgaacgggatgctggttgtcggtactcaatccccggctgagattatcaaagatgatatcgcc

SEQ ID NO: 494541 - DNA, 75 bp, synthetic construct
  source 1..75: mol_type = other DNA
gtcacgcgaggaagcgaagaaagccattaagcgtacccgtcgccttttgatgagtgccgacgacgatgctgtttc

SEQ ID NO: 494542 - DNA, 75 bp, synthetic construct
  source 1..75: mol_type = other DNA
ttagcacaatagggatgcttaaaaatatttcaatttttagaggtaggtttaattcaaaggaaattacggaacatg

SEQ ID NO: 494543 - DNA, 75 bp, synthetic construct
  source 1..75: mol_type = other DNA
gaagtctttacaaagacgccaacacacaggtcattcagggaaactacggcagcattaccggcagggtgggaatgc

SEQ ID NO: 494544 - DNA, 75 bp, synthetic construct
  source 1..75: mol_type = other DNA
cacaaccacgtctgcaggaggccagtctggcaaccccggcagctcgtacagggatacagctgataccggcactga

SEQ ID NO: 494545 - DNA, 75 bp, synthetic construct
  source 1..75: mol_type = other DNA
ggcagcgagctgctgacccgccaggcagagagcgaaccttaccgtcaggtgacagtatcacggggcgaggtcgtc

SEQ ID NO: 494546 - DNA, 75 bp, synthetic construct
  source 1..75: mol_type = other DNA
atgaatttaggaatggagaatgtatcgttctttttcttttttgtcacagaaaatagcttggcaagtaacatggta

SEQ ID NO: 494547 - DNA, 75 bp, synthetic construct
  source 1..75: mol_type = other DNA
atggcaaggtccgattacgattttatcaatctgtctctggaacatgaactgaatgagtggctggcagaggtggtt

SEQ ID NO: 494548 - DNA, 75 bp, synthetic construct
  source 1..75: mol_type = other DNA
cccgcgtttgaaaaagcctatggctttaaactcggtcaggatcagttactgtcactggcgggcggcgacacggcg

SEQ ID NO: 494549 - DNA, 75 bp, synthetic construct
  source 1..75: mol_type = other DNA
caagggacggcaaaccgctcgacccgcgcgatgaagaacgcctcagcgaggcagtggacaccatcatgctggact

SEQ ID NO: 494550 - DNA, 75 bp, synthetic construct
  source 1..75: mol_type = other DNA
cgaccccgtccgggggatgtcagtacgtgaatctgcacaacagccaggccgatgttgacgagttcagcgagaagc

SEQ ID NO: 494551 - DNA, 75 bp, synthetic construct
  source 1..75: mol_type = other DNA
atgaaacataaagccagaaaagacatacattatttcagcctgatgctgcttgaattaaaaaccagaggccactcg

SEQ ID NO: 494552 - DNA, 75 bp, synthetic construct
  source 1..75: mol_type = other DNA
gattgatgctgcaatggtttccattagtctgattcaactgaaattgcaggccgggcggaagctgacgcaggcaga

SEQ ID NO: 494553 - DNA, 75 bp, synthetic construct
  source 1..75: mol_type = other DNA
atggaacaagctattttggggaaagacggctacgcaataaacaacggagaaatcaccgtatataactatgatggt

SEQ ID NO: 494554 - DNA, 75 bp, synthetic construct
  source 1..75: mol_type = other DNA
gcacagcatagcgccgcagtagacgcggcagaagcacagcgtcagtcactgattgatactgcaatggcttccatt

SEQ ID NO: 494555 - DNA, 75 bp, synthetic construct
  source 1..75: mol_type = other DNA
agtctgattcaactgaaattgcaggccggacgtaaactgacgcagacagaaacaacccgccttaacgctgtgctg

SEQ ID NO: 494556 - DNA, 75 bp, synthetic construct
  source 1..75: mol_type = other DNA
gattacattgatgcggtgacggcaacagataccagcacagcgccggacgtcatctggcctgaactgccggaggcg

SEQ ID NO: 494557 - DNA, 75 bp, synthetic construct
  source 1..75: mol_type = other DNA
cgggaagaaaattaactgcggaagaaacagtaaagctcgattccgttcttgactatatcgacgtggtagcagcaa

SEQ ID NO: 494558 - DNA, 75 bp, synthetic construct
  source 1..75: mol_type = other DNA
atggagccatgaagaagaccaccgcaataagactgtttactcaatcgaaaatggcgcagctgttacagtggatta

SEQ ID NO: 494559 - DNA, 75 bp, synthetic construct
  source 1..75: mol_type = other DNA
tttaaattcatgggaatatgtgccagaccatcgcggtgaaatcgtctataacaccgaaacgggagaatcaaaaca

SEQ ID NO: 494560 - DNA, 75 bp, synthetic construct
  source 1..75: mol_type = other DNA
cggtattccagcatattcctgtttagacgctcctggtacatctaaggctggttatacaatttgccgttctgtgga

SEQ ID NO: 494561 - DNA, 75 bp, synthetic construct
  source 1..75: mol_type = other DNA
cagcagaagcacagcgccagtcactgattgatgctgcaatggcttccattagtctgattcagctgaaattacagg

SEQ ID NO: 494562 - DNA, 75 bp, synthetic construct
  source 1..75: mol_type = other DNA
gctcaacatagtgcagctgtagaggcagcagaaacaaaacgtcagtcattgattgatactgcgatggattccatt

SEQ ID NO: 494563 - DNA, 75 bp, synthetic construct
  source 1..75: mol_type = other DNA
tgaaaaatgggtgacagatactgaggcacaacatcgtgccgcagtagaagcggcagaaaccaagcgccagtcact

SEQ ID NO: 494564 - DNA, 75 bp, synthetic construct
  source 1..75: mol_type = other DNA
attagtctgattcaactgaaattgcaggccgggcggaagctgacgcagacagaaaacacccgacttaacgctgtg

SEQ ID NO: 494565 - DNA, 75 bp, synthetic construct
  source 1..75: mol_type = other DNA
cggtattccggcatgttcttgtttggatgcaccaggtacacataaagctggttatgcaatctgtcgctctgtaga

SEQ ID NO: 494566 - DNA, 75 bp, synthetic construct
  source 1..75: mol_type = other DNA
gaccatcgcggtgaagttgtctatagtaccgaaacgggagataccaaagaaatcacagttccgggtgattaccct

SEQ ID NO: 494567 - DNA, 75 bp, synthetic construct
  source 1..75: mol_type = other DNA
gattgatgcagcaatgacttccatcagtctgattcaactgaaattgcaggccggacgtaaactgacgcaggcaga

SEQ ID NO: 494568 - DNA, 75 bp, synthetic construct
  source 1..75: mol_type = other DNA
ctgtggctgattcaccgttcacggcactgaagctggagaacggctgggtggaaacgcccgggcattccgtcagcg

SEQ ID NO: 494569 - DNA, 75 bp, synthetic construct
  source 1..75: mol_type = other DNA
catctggcctgaactgccggaggcgcaggccattcaatatctggcgcactggaggaatcaaccagttccagtgcg

SEQ ID NO: 494570 - DNA, 75 bp, synthetic construct
  source 1..75: mol_type = other DNA
gaaacacgggaatatatttccacgtcaactgaatatcttgctgttggtgtcggtattccggcatgttcctgtctt

SEQ ID NO: 494571 - DNA, 75 bp, synthetic construct
  source 1..75: mol_type = other DNA
gatgctcctggcacacataaggctggttatgcaatctgccgttctgcagattttaactcatgggaatatgtgcca

SEQ ID NO: 494572 - DNA, 75 bp, synthetic construct
  source 1..75: mol_type = other DNA
tatctgcgcaagggcgcgcaggtctacatcgaggggcaactccgtacccgtagctgggacgacaacggcatcacc

SEQ ID NO: 494573 - DNA, 75 bp, synthetic construct
  source 1..75: mol_type = other DNA
ccgggcggaagctgacgcagacagaaaacacccgacttaacgccgtgctggattacattgacgcggtgacggcaa

SEQ ID NO: 494574 - DNA, 75 bp, synthetic construct
  source 1..75: mol_type = other DNA
agtttattgctacaaaggcgggaaatattaccgtctataactatgatggcgaaacacgggaatatatttccactt

SEQ ID NO: 494575 - DNA, 75 bp, synthetic construct
  source 1..75: mol_type = other DNA
cggcattccggcatgttcctgtttagatgctcccggctcatataaagctggttatgcaatttgccgttctgcaga

SEQ ID NO: 494576 - DNA, 75 bp, synthetic construct
  source 1..75: mol_type = other DNA
tgagaaatgggtgacggatactgaggcacagcatagtgccgcagtagacgcggcagaagcacagcgccagtcact

SEQ ID NO: 494577 - DNA, 75 bp, synthetic construct
  source 1..75: mol_type = other DNA
gattaccgtttataactatgacagtgagacacgggagtatatttctgcatcaattgaatatcttgctgtgggtgt

SEQ ID NO: 494578 - DNA, 75 bp, synthetic construct
  source 1..75: mol_type = other DNA
tacgaaaagctgccgggcttcccggtaagtacggtacatggtcatgcgggggagttagtgctgggccatctccag

SEQ ID NO: 494579 - DNA, 75 bp, synthetic construct
  source 1..75: mol_type = other DNA
atgtctcaggttcaattttctcataacccgctgttttgcatagatattatcaagacttataaacctgatttcacg

SEQ ID NO: 494580 - DNA, 75 bp, synthetic construct
  source 1..75: mol_type = other DNA
tgttcatgtcctttatatatcgcactatgctatcacttttgtttattgtctttatgttgtcgttgctgagtgtat

SEQ ID NO: 494581 - DNA, 75 bp, synthetic construct
  source 1..75: mol_type = other DNA
gtcgcggacatttctacgaaggtcgtgggatgaccatcatgacggatgcaatccgtacctttaagttgctgggct

SEQ ID NO: 494582 - DNA, 75 bp, synthetic construct
  source 1..75: mol_type = other DNA
attcgtactttcaaattgctgggttgtgaactgctgttctgcaccaatgcggcgggatcactgcgtccggaggtg

SEQ ID NO: 494583 - DNA, 75 bp, synthetic construct
  source 1..75: mol_type = other DNA
gcgaaagaagagggtttccctctgacggagggcgtgttcgtctcgtatccggggccgaatttcgagactgcggcg

SEQ ID NO: 494584 - DNA, 75 bp, synthetic construct
  source 1..75: mol_type = other DNA
actacgatgttatcgttatagatagtgctccgaacctcggtacaggaaccattaacgttgtttgtgccgctgacg

SEQ ID NO: 494585 - DNA, 75 bp, synthetic construct
  source 1..75: mol_type = other DNA
aaagggaatgatcgcccgcccgctcccgccggaaagccactgaagttcagtaaacccgccacctggcaagtcagt

SEQ ID NO: 494586 - DNA, 75 bp, synthetic construct
  source 1..75: mol_type = other DNA
tcgatggtagtaccgtggattggtttcccgctgcacaaattactggcactggcggaaccaaccagtaacgcgaaa

SEQ ID NO: 494587 - DNA, 75 bp, synthetic construct
  source 1..75: mol_type = other DNA
caggtgcctggagaaatgccctttctatttgggaacctgtctgcaatgaaattttcgatcgtttgattaaaccac

SEQ ID NO: 494588 - DNA, 75 bp, synthetic construct
  source 1..75: mol_type = other DNA
catctttctcccctgggctgggaacatatcaatctgagtggagattacgtctggcgtaataatcttaagctggga

SEQ ID NO: 494589 - DNA, 75 bp, synthetic construct
  source 1..75: mol_type = other DNA
gcaaaacgctgtccgttaaaatcccggcaggggtggacactggagaccgcatccgtcttgcgggcgaaggtgaag

SEQ ID NO: 494590 - DNA, 75 bp, synthetic construct
  source 1..75: mol_type = other DNA
gcgagttgctgttctgcaccaatgcggctggctcactgcgtcctgaagtgggggccggcagtctggtcgcattga

SEQ ID NO: 494591 - DNA, 75 bp, synthetic construct
  source 1..75: mol_type = other DNA
atgggactcatgaatacacttaaccagtgcataaacgttggccatgaaatgacgaaggctattgctattgcgcag

SEQ ID NO: 494592 - DNA, 75 bp, synthetic construct
  source 1..75: mol_type = other DNA
cttaccaaatacagtaatagtaatggctctcagtccccgtggatggaggagcaaattcgggatgcctggggaagc

SEQ ID NO: 494593 - DNA, 75 bp, synthetic construct
  source 1..75: mol_type = other DNA
ccggtgcatggcgaaacgcactttcaatctgggaacctgtttgtaatgaaatatttgatcgtctgattaaaccgc

SEQ ID NO: 494594 - DNA, 75 bp, synthetic construct
  source 1..75: mol_type = other DNA
gtttcttctcaggcaatcagggatgcagagaaagctggtcgtttaccccatccggatatggaaactcgtggcaga

SEQ ID NO: 494595 - DNA, 75 bp, synthetic construct
  source 1..75: mol_type = other DNA
attgttcgactatacctctgcgctgcaatttttcgatatgcttcgtgatctgctcaaaaacgtagatcttaaagg

SEQ ID NO: 494596 - DNA, 75 bp, synthetic construct
  source 1..75: mol_type = other DNA
actatgatgtcattgttattgacagcgcacctaaccttggtatcggcactattaatgttgtatgtgccgctgatg

SEQ ID NO: 494597 - DNA, 75 bp, synthetic construct
  source 1..75: mol_type = other DNA
gacctcccgacttaacactgtgctggattacattgacgcggtgacggcaacagataccagcaccgcgccggatgt

SEQ ID NO: 494598 - DNA, 75 bp, synthetic construct
  source 1..75: mol_type = other DNA
gaaaaaaggaggcgcaaaaacgaaaggccgtggacgtaaggccacgcagccggagtcgcagccgcaaccgccgga

SEQ ID NO: 494599 - DNA, 75 bp, synthetic construct
  source 1..75: mol_type = other DNA
atggatccatgaagaagaccatcgcaatgagactgtttactcaacagaaaatggtgcagctgttacagtggatta

SEQ ID NO: 494600 - DNA, 75 bp, synthetic construct
  source 1..75: mol_type = other DNA
gaaatacgggaatatatttccacatcaactgaatatcttgctgtgggtgtcggtattccggcattttcctgtctg

SEQ ID NO: 494601 - DNA, 75 bp, synthetic construct
  source 1..75: mol_type = other DNA
gaccatcgcggtgaaacggtctatagcaccgaaacgggagaatcaaaagaaatcaccgctccgggtgattaccct

SEQ ID NO: 494602 - DNA, 75 bp, synthetic construct
  source 1..75: mol_type = other DNA
atccttgttaaaaccacgggcaccatgcagatgctggggagtgcaccacagcagaacgctcaggctcaaccgaag

SEQ ID NO: 494603 - DNA, 75 bp, synthetic construct
  source 1..75: mol_type = other DNA
ctctttccgttcctctcctgtttatggcttttccgggcgtccccctggcggggcgggctgtcgtgaacggagcca

SEQ ID NO: 494604 - DNA, 75 bp, synthetic construct
  source 1..75: mol_type = other DNA
catcccgcaaaagtttttgcccaaaagcaggcaaaaacttttgcggtctgcccccggacagtcgtttccgtccgt

SEQ ID NO: 494605 - DNA, 75 bp, synthetic construct
  source 1..75: mol_type = other DNA
ttgtgatgtgtccggaatgtttttttctgatgttatttttctgtggttaccgtgcctgttactgttcttcttctt

SEQ ID NO: 494606 - DNA, 75 bp, synthetic construct
  source 1..75: mol_type = other DNA
ccggaaggtctggtaacgggtaaaaaagccatcgttattaccagccgcggtggatccacaaagatggaccaacgg

SEQ ID NO: 494607 - DNA, 75 bp, synthetic construct
  source 1..75: mol_type = other DNA
gaggcgtggaattatgcacggcacttgcaggcgcctgtttctccgggcagtcattcttcgctttgtgggcaaaag

SEQ ID NO: 494608 - DNA, 75 bp, synthetic construct
  source 1..75: mol_type = other DNA
ggctcagcctgatcatccgtgacctggaaacagccgctgcagaatatggggtgaaccacacagatattgtccacg

SEQ ID NO: 494609 - DNA, 75 bp, synthetic construct
  source 1..75: mol_type = other DNA
gatgccgcgacaaccggaaccgccgggcaggttctttatgggttgttcgatatgggcgggcaggctgttgtcggt

SEQ ID NO: 494610 - DNA, 75 bp, synthetic construct
  source 1..75: mol_type = other DNA
caaaaggggttgataatacagctgtacgcattttcttacgagggtatggctctttgggggagttgccacgcattg

SEQ ID NO: 494611 - DNA, 75 bp, synthetic construct
  source 1..75: mol_type = other DNA
acaggccgcaataaaaggtctgctcgatttgcagcagcagcgtaacagcctctcagacaaacatttgcgcccgct

SEQ ID NO: 494612 - DNA, 75 bp, synthetic construct
  source 1..75: mol_type = other DNA
tgcggcaccgatgtataacttcaacatctcgactcagttgaaaaactattttgacctggttgcacgcgcaggcgt

SEQ ID NO: 494613 - DNA, 75 bp, synthetic construct
  source 1..75: mol_type = other DNA
ctggatggcgaactggttggagctctgcgtccgagcgatgcgccgctgaccccacgtcaacaggaagctctggct

SEQ ID NO: 494614 - DNA, 75 bp, synthetic construct
  source 1..75: mol_type = other DNA
ctggatggcgaactggttggtgcgctgcgtccgagcgatgcgccgctgactccgcgtcagcaggaagctctggca

SEQ ID NO: 494615 - DNA, 75 bp, synthetic construct
  source 1..75: mol_type = other DNA
tgcgtgcagtatccacggtgttcagacccgtgagtatggtcacacgtcacgcagtccgctggacacgctggagag

SEQ ID NO: 494616 - DNA, 75 bp, synthetic construct
  source 1..75: mol_type = other DNA
tatgagcgagttagttggtgtgaaaacgtatggggcgtcgaatacgaagaattacctgaaatgcatgacgaataa

SEQ ID NO: 494617 - DNA, 75 bp, synthetic construct
  source 1..75: mol_type = other DNA
tatgagcgagtcacttggtgtaaactcgtatggggcgtcgaatacgaagaattacctgaaatgcatgacgaataa

SEQ ID NO: 494618 - DNA, 75 bp, synthetic construct
  source 1..75: mol_type = other DNA
atggtcgggcacttccggcaaaagaaaacgagggatgtatcgtttctgtgaagactgcccagcgttactgtctcc

SEQ ID NO: 494619 - DNA, 75 bp, synthetic construct
  source 1..75: mol_type = other DNA
caacctcagggaaagcatctgagcgtaacgctggctccgggggaatttaatcacctgatgcaatggctcacacaa

SEQ ID NO: 494620 - DNA, 75 bp, synthetic construct
  source 1..75: mol_type = other DNA
tcgccacggcccacacataaccggttatgacattaaccgcgggggactcagaacattctaccgggctgacattga

SEQ ID NO: 494621 - DNA, 75 bp, synthetic construct
  source 1..75: mol_type = other DNA
atccggaatatgacattgaagaagccagagaagcgttaacttaccagcttcgggggcagcagtcagaacacttcg

SEQ ID NO: 494622 - DNA, 75 bp, synthetic construct
  source 1..75: mol_type = other DNA
atcctccttcatcactaccggatacaatctaccatctggatggtgttccggaaggtggtatcgatttcacacctc

SEQ ID NO: 494623 - DNA, 75 bp, synthetic construct
  source 1..75: mol_type = other DNA
actggaggacatgttacaagacgagaattgagacctaatgactgggagcttatatggcccgaatacactggaatc

SEQ ID NO: 494624 - DNA, 75 bp, synthetic construct
  source 1..75: mol_type = other DNA
aaaagaccggatgctctgtgctgcattcgtccagtgcgttatggattgttgccatctttttatctttaggcgggg

SEQ ID NO: 494625 - DNA, 75 bp, synthetic construct
  source 1..75: mol_type = other DNA
aatagccgcggtaattatgctaatggcatccaggttcatggtggctccggaggtgggggaattgttactttagat

SEQ ID NO: 494626 - DNA, 75 bp, synthetic construct
  source 1..75: mol_type = other DNA
gggtctgtgcatcgcagcgctgaccagatcaactcgacctggggttgggacagcgataaaaagcgtttcatgcct

SEQ ID NO: 494627 - DNA, 75 bp, synthetic construct
  source 1..75: mol_type = other DNA
tgtggctgcgcaactgaccgcacatacaaaccgcggtaactactccaatggagtacaggtgcacggtggttccgg

SEQ ID NO: 494628 - DNA, 75 bp, synthetic construct
  source 1..75: mol_type = other DNA
ctggtaaccaccgacgctccgctgtcaggcattgcgactgtccgtccctcggcgccactgtccgatccggcgggc

SEQ ID NO: 494629 - DNA, 75 bp, synthetic construct
  source 1..75: mol_type = other DNA
agtttctggggcggttttcgcgtaagtcttgaacaggttgagttctggcagggcggtgagcatcgtctgcatgac

SEQ ID NO: 494630 - DNA, 75 bp, synthetic construct
  source 1..75: mol_type = other DNA
ctgcttttcccgtggcatactcttgagcgccaggtaatggtgaccggtaaagcggagcgtctttcgactctcgaa

SEQ ID NO: 494631 - DNA, 75 bp, synthetic construct
  source 1..75: mol_type = other DNA
gttgaaggcgcaaaccatatggatctttatgacggcaaagcctatgtggctgaagcaatttcagtattagctccg

SEQ ID NO: 494632 - DNA, 75 bp, synthetic construct
  source 1..75: mol_type = other DNA
atgatgaagaaaatgaagaagggcggaatggcgaagatgatgagaagcatgaagggtatgatgcccccaggcttc

SEQ ID NO: 494633 - DNA, 75 bp, synthetic construct
  source 1..75: mol_type = other DNA
ggtgatacgcaacaattaagggcgtggatagcaagggatttaagaaaatacattgagccaggcggaccaggcgac

SEQ ID NO: 494634 - DNA, 75 bp, synthetic construct
  source 1..75: mol_type = other DNA
agtttgctgttatcttgttcgaggataaaacaggcggtgcatggtgtaagaaagtcactggtgctgaagcgcgtt

SEQ ID NO: 494635 - DNA, 75 bp, synthetic construct
  source 1..75: mol_type = other DNA
tattttaggctccccttgactgcgggggattactcttacgaatataacttaggctactttgcagaatatggtcat

SEQ ID NO: 494636 - DNA, 75 bp, synthetic construct
  source 1..75: mol_type = other DNA
ttgctcaaggggcaagccggttaccttgccgatcgctatagtgaacgaaaagagagccatcaagagctttcatcc

SEQ ID NO: 494637 - DNA, 75 bp, synthetic construct
  source 1..75: mol_type = other DNA
gaagaggccgcacggcttctgacagcgatgggagcagaagtccggatctttaatccttcaggtcttcccctgccg

SEQ ID NO: 494638 - DNA, 75 bp, synthetic construct
  source 1..75: mol_type = other DNA
acgaatacaaaaaagattttatttctttacgtgaatttcttgaggtcgtgcttaaggtcgctggtgatgattatg

SEQ ID NO: 494639 - DNA, 75 bp, synthetic construct
  source 1..75: mol_type = other DNA
atgagcaatttaacttcttgggactggtggttggtacactatttcttagcggccggagtcgcattcgccttttac

SEQ ID NO: 494640 - DNA, 75 bp, synthetic construct
  source 1..75: mol_type = other DNA
atgaagcggattgtggcggacagggaaagtgatttgattccggggaaggcgctgtgcagcagtcttatccggcag

SEQ ID NO: 494641 - DNA, 75 bp, synthetic construct
  source 1..75: mol_type = other DNA
atggaagccatcattaactcgatgacgatgaaagagcgcgctaagccagaaatcatcaaaggttcgcgtaagcgt

SEQ ID NO: 494642 - DNA, 75 bp, synthetic construct
  source 1..75: mol_type = other DNA
gacaggtgctctggttgcatttgctatcctgctgatgcgcagaaacgagcataatgcacagagcgtcattgtgat

SEQ ID NO: 494643 - DNA, 75 bp, synthetic construct
  source 1..75: mol_type = other DNA
atgaaaaagccagttttagaagttattaagcgttggagacgtttagcaacggaggccaagcagctgaagctcgcc

SEQ ID NO: 494644 - DNA, 75 bp, synthetic construct
  source 1..75: mol_type = other DNA
cgatgtgaaattcgtctttgcggaaggtattgcctacggtccggaaatggcggcgaaagcgcaggcagacgccaa

SEQ ID NO: 494645 - DNA, 75 bp, synthetic construct
  source 1..75: mol_type = other DNA
ctgattaccacaggcgatccgctttcaggcattgcggctgtccggccatcggcaccgctgtccgatccggcaagt

SEQ ID NO: 494646 - DNA, 75 bp, synthetic construct
  source 1..75: mol_type = other DNA
tttcattgcagatcatcaacagcagtgagctggaaagcgggcgcacggcgcgctgtctgttcacgcaacagggaa

SEQ ID NO: 494647 - DNA, 75 bp, synthetic construct
  source 1..75: mol_type = other DNA
taatgccatgagcggagtaactgatctcagagaattatccatccatattatcgagatggttatagaagaaactga

SEQ ID NO: 494648 - DNA, 75 bp, synthetic construct
  source 1..75: mol_type = other DNA
cgctccggtgactgcgcgcactccggcaccaaactggctgcaccgccgacggccttttacagcagagttagcaac

SEQ ID NO: 494649 - DNA, 75 bp, synthetic construct
  source 1..75: mol_type = other DNA
atgatgaagaaaatgaaaaagggcgggatggcgaagatgatgagaagcatgaaagggatgatgccgccgggattt

SEQ ID NO: 494650 - DNA, 75 bp, synthetic construct
  source 1..75: mol_type = other DNA
cgttccacccggatcgtatcgcttcacgcattctcggcatgggcgatgttctgtcgctgatcgaagatatcgaaa

SEQ ID NO: 494651 - DNA, 75 bp, synthetic construct
  source 1..75: mol_type = other DNA
cgcagcgaggatgatgcggctgacgacgctgaccgcacggaacaggtgcaggacaaagcggccgtggaggaaatc

SEQ ID NO: 494652 - DNA, 75 bp, synthetic construct
  source 1..75: mol_type = other DNA
atgatgaagaaaatgaagaagggcggaatggcgaagatgatgagaagcatgaaagggatgatgccgccgggattt

SEQ ID NO: 494653 - DNA, 75 bp, synthetic construct
  source 1..75: mol_type = other DNA
atgatggacgagatcaagcaggtccatgcatcgattaatccggttgaaactttgttcgtggttgacgccatgacc

SEQ ID NO: 494654 - DNA, 75 bp, synthetic construct
  source 1..75: mol_type = other DNA
atgaagcaacgacgtaattcttcacagcaacgcttccgcaacggggcggaactccacgctaaccgtttcgctacc

SEQ ID NO: 494655 - DNA, 75 bp, synthetic construct
  source 1..75: mol_type = other DNA
acatcccgtaaaacaaatcggcgagcacacctggctgattgagaaagctggaatcgtagtccacaaatgcccacg

SEQ ID NO: 494656 - DNA, 75 bp, synthetic construct
  source 1..75: mol_type = other DNA
cacattgtacgaagcactacgcacggttgatcgtctgcttcgcgggcaaaattttattaaacagactgatttata

SEQ ID NO: 494657 - DNA, 75 bp, synthetic construct
  source 1..75: mol_type = other DNA
cgatggtaatacctggcaatcgatcgtcggtgcatcggctttattgtggattgttcactttttgatcctgcgcgg

SEQ ID NO: 494658 - DNA, 75 bp, synthetic construct
  source 1..75: mol_type = other DNA
tcaccccgccttcaggcaaaccaactggcgaccgcgcccgcggcccaatgtccccggctgagttgaacaaaatca

SEQ ID NO: 494659 - DNA, 75 bp, synthetic construct
  source 1..75: mol_type = other DNA
ttcctcgccgccattaatggcctgatgggggataaacacgacgacatggtggcggatgatatggaaaaccgccag

SEQ ID NO: 494660 - DNA, 75 bp, synthetic construct
  source 1..75: mol_type = other DNA
gtgatccacagatgccaccgcaatccgtttaccggaaaccgcatttttgcactgagcagcggcgacaatcagttc

SEQ ID NO: 494661 - DNA, 75 bp, synthetic construct
  source 1..75: mol_type = other DNA
atacacacgcaacgccggatggctacccagtaaaacaaatcggcgagcacgcctggctgattgagaaagctggaa

SEQ ID NO: 494662 - DNA, 75 bp, synthetic construct
  source 1..75: mol_type = other DNA
acgccacgctaaccgtttcgccaccagtgcatcacgcagcagctctcgctacagcctgagcgaaacacacgccac

SEQ ID NO: 494663 - DNA, 75 bp, synthetic construct
  source 1..75: mol_type = other DNA
agcgctacgccagttgatcgtctgctgcgcggacagaatttcattaaacaggctgatttataacaggtgctttat

SEQ ID NO: 494664 - DNA, 75 bp, synthetic construct
  source 1..75: mol_type = other DNA
ggcaggatttcaccctgcacgaagcattaagaacggcagaccgattaatcagcggtcgcagttttcagcatccat

SEQ ID NO: 494665 - DNA, 75 bp, synthetic construct
  source 1..75: mol_type = other DNA
gcacaagctgcgccatccgcctcactgtggttgaccaacatctgcgtgcaaatttgtctggtgctcatctggctg

SEQ ID NO: 494666 - DNA, 75 bp, synthetic construct
  source 1..75: mol_type = other DNA
aagcgcaaactggtcatgcagcgcgccaaacttaaacgggcaagccctaaaaaaccaatggctaccatcagagta

SEQ ID NO: 494667 - DNA, 75 bp, synthetic construct
  source 1..75: mol_type = other DNA
gtgctttgaggctgaacttccggcgcttacgcgtgctatagatactatcgatttcgaacgattattcgcagctct

SEQ ID NO: 494668 - DNA, 75 bp, synthetic construct
  source 1..75: mol_type = other DNA
ccattgatgtggtgaaaatcccgatggcggccccactgaaacaggcgtttgatgaaaacgttgaccgtatccggc

SEQ ID NO: 494669 - DNA, 75 bp, synthetic construct
  source 1..75: mol_type = other DNA
acggcgattaatcagtcttcatcacaggttgcccgggaaaccagggtgagacggaaactggttaaggaacggtcc

SEQ ID NO: 494670 - DNA, 75 bp, synthetic construct
  source 1..75: mol_type = other DNA
aaatccgaatgccaaaattatcgttaaccgcggtgatctccctgtgattaagctggggatcaggatgctggggcg

SEQ ID NO: 494671 - DNA, 75 bp, synthetic construct
  source 1..75: mol_type = other DNA
tggcgtacccgtttgggaacaggtgaaaaacaccatgctgatcaccctgtgggttttcattggtgtggaaggtgc

SEQ ID NO: 494672 - DNA, 75 bp, synthetic construct
  source 1..75: mol_type = other DNA
tcctatctggtgatcgttttttccgcgttaagcttttttacggacacgccggaattgcgcctgtttggcgatggt

SEQ ID NO: 494673 - DNA, 75 bp, synthetic construct
  source 1..75: mol_type = other DNA
tcctatctggtgatcgtcttttccgcattgagtttcttcaccgatacgccggaattgcgcctgtttggcgatggc

SEQ ID NO: 494674 - DNA, 75 bp, synthetic construct
  source 1..75: mol_type = other DNA
ctgctttaccaacaatattccgcagcgtgacggcggtactcacctggcaggcttccgtgcggcgatgacccgtac

SEQ ID NO: 494675 - DNA, 75 bp, synthetic construct
  source 1..75: mol_type = other DNA
cccagaccaaagacaaactggtttcttctgaggtgaaatcggcggttgaacagcagatgaacgaactgctggcag

SEQ ID NO: 494676 - DNA, 75 bp, synthetic construct
  source 1..75: mol_type = other DNA
ttattgctggcctttgccatgctgatcctcacacgcattcgccccgagcttgacggcggcatctttacctatgcc

SEQ ID NO: 494677 - DNA, 75 bp, synthetic construct
  source 1..75: mol_type = other DNA
cgattgataatctgagccgggttcgtaaaaacgccattcctgctgcttcagcaatggccattaaccgcgtggcca

SEQ ID NO: 494678 - DNA, 75 bp, synthetic construct
  source 1..75: mol_type = other DNA
ccatgttcgtaaaactgcgcaccgcccgctacctgaaaacccgtgcagatgcttccggtgtgacggtgggttaca

SEQ ID NO: 494679 - DNA, 75 bp, synthetic construct
  source 1..75: mol_type = other DNA
agcggctatcgcggcgggaaaatcggatgtctcatcgttaggcgtgaaagcgacggatgaccgcacttttgaagt

SEQ ID NO: 494680 - DNA, 75 bp, synthetic construct
  source 1..75: mol_type = other DNA
ctgcgcacaatggagtggaaaacctatcttgatgcccgacgagccggtgatttcatgctgtctcggcagtcgtgg

SEQ ID NO: 494681 - DNA, 75 bp, synthetic construct
  source 1..75: mol_type = other DNA
atttgcgaaggacgtgatcctgggaacctgacgaccattgatgatccggcgtcgttggatcagatccgccaggcg

SEQ ID NO: 494682 - DNA, 75 bp, synthetic construct
  source 1..75: mol_type = other DNA
cacgaccggcaaacctaaaggcgtgcagcgtgacgtcggcggatatgcggtggcgctggcgacctcgatggacac

SEQ ID NO: 494683 - DNA, 75 bp, synthetic construct
  source 1..75: mol_type = other DNA
gaggcaggctctttcaagacatgcagtgattgcttatgcatatcagcagaaaaagaaaattaaaggtgaaactgt

SEQ ID NO: 494684 - DNA, 75 bp, synthetic construct
  source 1..75: mol_type = other DNA
ccgccatttaacgatgtgcgagtgcgtcgggcgctatatcttacggttgatcgacagcttattgcgcaaaaggta

SEQ ID NO: 494685 - DNA, 75 bp, synthetic construct
  source 1..75: mol_type = other DNA
gtgcaacccgctcaggccgaatcatgggaggtggcagatagcggcaaacgctatgttttccatttacgtcacggc

SEQ ID NO: 494686 - DNA, 75 bp, synthetic construct
  source 1..75: mol_type = other DNA
aacacaccgctcgccccgcaacaagtctttcgttacaacaatcatagcgacccaggcacgctcgacccgcaaaag

SEQ ID NO: 494687 - DNA, 75 bp, synthetic construct
  source 1..75: mol_type = other DNA
gatgctacaacgcgtaatgcgctgtatcagcaggctgaggtcatcattaatcaacaagcaccgctcattcctgtc

SEQ ID NO: 494688 - DNA, 75 bp, synthetic construct
  source 1..75: mol_type = other DNA
actaaaccaggccatgcagatcactgatgcgacaaagcgtaatgcgttgtatcagcaggcagaagtgatcgtcaa

SEQ ID NO: 494689 - DNA, 75 bp, synthetic construct
  source 1..75: mol_type = other DNA
cgcgatagcgttgtcttccgaatggaaaaaatggctgggtgcacaggtgacgctgcgcacaatggagtggaaaac

SEQ ID NO: 494690 - DNA, 75 bp, synthetic construct
  source 1..75: mol_type = other DNA
tcaacgagaaagggatgctggtggtggaagggccgctgccgccgggtgtattcagaccatctggggcgacgacgg

SEQ ID NO: 494691 - DNA, 75 bp, synthetic construct
  source 1..75: mol_type = other DNA
aggcttttgatgagaacgttaaccgtatccggcgcgaacgtctgcctaaagaactgagctatgcgctgaaacaac

SEQ ID NO: 494692 - DNA, 75 bp, synthetic construct
  source 1..75: mol_type = other DNA
tatgtcgctttcgaaacaatttatgcaccggaacagatgccaggccagcaggaccgctttatcggcggcgggctg

SEQ ID NO: 494693 - DNA, 75 bp, synthetic construct
  source 1..75: mol_type = other DNA
gtgacgacctgtacgatcgagcatcaagccaggataaacgctatcacattgttggtgatgctgccaacttactga

SEQ ID NO: 494694 - DNA, 75 bp, synthetic construct
  source 1..75: mol_type = other DNA
ctgctgggccattttggctggcgacttcaggtgctgctccggcgactggtttatctctggcacggaagccgggct

SEQ ID NO: 494695 - DNA, 75 bp, synthetic construct
  source 1..75: mol_type = other DNA
agctggggatcaggatgctgggccgtcgtccgaacagcatactcaaagccggtcagcatcgttatcagcgggcat

SEQ ID NO: 494696 - DNA, 75 bp, synthetic construct
  source 1..75: mol_type = other DNA
gatgtacaacgtcagccaacgctgttgtttaacggatacgccgatcaagtggcgtcgctttatcgtggactggat

SEQ ID NO: 494697 - DNA, 75 bp, synthetic construct
  source 1..75: mol_type = other DNA
tatccggcgagaacgtctgccaaaagaactgggctatgcgctgaaacaacaactgaggattgtgataaaacgatg

SEQ ID NO: 494698 - DNA, 75 bp, synthetic construct
  source 1..75: mol_type = other DNA
aatgctgcgccgcacgatccaggcgatttgcgaaggacgcgatccgggggatctgacgaccattgatgatcctgc

SEQ ID NO: 494699 - DNA, 75 bp, synthetic construct
  source 1..75: mol_type = other DNA
gtccggacgctctgccggcgtctgtacagcctggtgcagggtaaacaggcgtcaggccgtccctggtggtaccgg

SEQ ID NO: 494700 - DNA, 75 bp, synthetic construct
  source 1..75: mol_type = other DNA
gaatctggcagcgcctgacgaatacggtttttacgccaacgttaatccgcatgttgatcacccacgctggtcaca

SEQ ID NO: 494701 - DNA, 75 bp, synthetic construct
  source 1..75: mol_type = other DNA
gcttcccgctggaagagcgtatttatcgtatgcgctgcgtggaagcatggtcgatggtggtgccgtggattggtt

SEQ ID NO: 494702 - DNA, 75 bp, synthetic construct
  source 1..75: mol_type = other DNA
gattgaagatacccatgagcttgatttgcctaatcaccctaatcatgttcatttgttttttaaaagggaagggat

SEQ ID NO: 494703 - DNA, 75 bp, synthetic construct
  source 1..75: mol_type = other DNA
gatattttcacctatatgaaggcgcgtagtgaagttcacgcgcactataccttagatactaactggcgttccgct

SEQ ID NO: 494704 - DNA, 75 bp, synthetic construct
  source 1..75: mol_type = other DNA
ctatcacgatcgtcattcatttgaggctgtacttgatcttaacgctgcgccagaaagcgtcgatctcgccgaggc

SEQ ID NO: 494705 - DNA, 75 bp, synthetic construct
  source 1..75: mol_type = other DNA
gggggcgagacgccgcgtcatccgttgtttgaggcgatcgatcaattgcttgccgagccgctatcgatccgtgat

SEQ ID NO: 494706 - DNA, 75 bp, synthetic construct
  source 1..75: mol_type = other DNA
ctaccgcagagttgaatgtgaagacgctgcaacgactccccggcgataactggcgcgttaccagctattccggtt

SEQ ID NO: 494707 - DNA, 75 bp, synthetic construct
  source 1..75: mol_type = other DNA
ccgctcaatgaaactggcgtcactctgagtcagctttccgcccgcgataaacaggtggagatggagttttacctg

SEQ ID NO: 494708 - DNA, 75 bp, synthetic construct
  source 1..75: mol_type = other DNA
agcgcggcgaagcgttgctgatgaacggcgacgacgcgcgtccggtgcgtgcttcggacatcagtgtgctggtgc

SEQ ID NO: 494709 - DNA, 75 bp, synthetic construct
  source 1..75: mol_type = other DNA
cagttctgttctctgttggtgctgagaagttctcacaatgtgaatgggactggatgaagatgctcaaacccatgg

SEQ ID NO: 494710 - DNA, 75 bp, synthetic construct
  source 1..75: mol_type = other DNA
caatataaccagacaggtgttgaactgggctatttcacccagcaaaacaaagatgcgaatagtaataaatttaat

SEQ ID NO: 494711 - DNA, 75 bp, synthetic construct
  source 1..75: mol_type = other DNA
tcagccggggagcttcacgccactcatcagggttgaaaccgccaccggtgagcaggcgaaaacgcagcgccgcag

SEQ ID NO: 494712 - DNA, 75 bp, synthetic construct
  source 1..75: mol_type = other DNA
atgaattgcaaacgttaacgggctgcaaatatgcaagccaccagcgcaactggttaataaaaaatgggcttccgt

SEQ ID NO: 494713 - DNA, 75 bp, synthetic construct
  source 1..75: mol_type = other DNA
atgagcagcttatttttaaccgaagatgaattgcaaacgttaacgggctgcaaatatgcaagccaccagcgcaac

SEQ ID NO: 494714 - DNA, 75 bp, synthetic construct
  source 1..75: mol_type = other DNA
atctaaaaaataaatggaaaatgtttgttaagcatggttgggtcgcgacaaattcgactaatcatgtgatgctga

SEQ ID NO: 494715 - DNA, 75 bp, synthetic construct
  source 1..75: mol_type = other DNA
taaatcgaaagggctggaatatccgctggtctggttgccattttattaccaatttccgcgtccaggatcaggcgt

SEQ ID NO: 494716 - DNA, 75 bp, synthetic construct
  source 1..75: mol_type = other DNA
ataaagaaacagctgaaatattttttgaaagaatagaaggagagaaaagattagcaagtgaacgagatgctactg

SEQ ID NO: 494717 - DNA, 75 bp, synthetic construct
  source 1..75: mol_type = other DNA
cggagagtccgagattggtttgattttgacattaagcggttttacagaatcgacgatggtccgatctatcggttg

SEQ ID NO: 494718 - DNA, 75 bp, synthetic construct
  source 1..75: mol_type = other DNA
gtagcgaagttcacgctcactacaccttagataccaactggcgttctgcgccgggaatggtgaacagtgtgaaca

SEQ ID NO: 494719 - DNA, 75 bp, synthetic construct
  source 1..75: mol_type = other DNA
gtatagccgctttgatattgtggtggcagacccgatttgcaccttaacaacttacggcagtgaaactgttttgtg

SEQ ID NO: 494720 - DNA, 75 bp, synthetic construct
  source 1..75: mol_type = other DNA
ctttcggtaaagaaaccgttgttagtgaaagcgaaaaacgcacaacgaccactgatgacccgctacaggtgctcc

SEQ ID NO: 494721 - DNA, 75 bp, synthetic construct
  source 1..75: mol_type = other DNA
tgcatcatctggtcagcaccataacggcgcaactaccagaacagttacacgccagcgatctgctgcgcgcggctt

SEQ ID NO: 494722 - DNA, 75 bp, synthetic construct
  source 1..75: mol_type = other DNA
acgagtttcaggataccgaccctcagcagtaccggattttccgccacatctggcaccatcagccggaaaccgcat

SEQ ID NO: 494723 - DNA, 75 bp, synthetic construct
  source 1..75: mol_type = other DNA
gggggcgagacaccgcgccatccgctgtttgaggcgatcgatcaattacttgccgaaccattatcgatccgcgat

SEQ ID NO: 494724 - DNA, 75 bp, synthetic construct
  source 1..75: mol_type = other DNA
agcgaatgctcaacctgaatgcttttgaatccggtatgttgtttgagcagcaactgattgaagatgaatcgctac

SEQ ID NO: 494725 - DNA, 75 bp, synthetic construct
  source 1..75: mol_type = other DNA
gagaccaacagttatcagttgccggagtcgctggaaaaattctcccagcgtttcttagaagatcgcacgaaagcc

SEQ ID NO: 494726 - DNA, 75 bp, synthetic construct
  source 1..75: mol_type = other DNA
agcgcggggaagcgttgctgatgaacggcgatgatgcacgtccggtacgtgcttcggacatcagtgtgctggtgc

SEQ ID NO: 494727 - DNA, 75 bp, synthetic construct
  source 1..75: mol_type = other DNA
tgatcgacgcaagtttaaccgtagcaatcaggctaaatggatcgacaagatcagcgcctgggcagaagaagagac

SEQ ID NO: 494728 - DNA, 75 bp, synthetic construct
  source 1..75: mol_type = other DNA
cggcagcgtcacgcagagtcagtttgatgcggtgggcaggcttaaggcacagacggatgccgcaggccggacgac

SEQ ID NO: 494729 - DNA, 75 bp, synthetic construct
  source 1..75: mol_type = other DNA
acagcttgatgccgacccggacaccttttccgtcgtgcgctggatgcccggctcactcttgacctggcgtgataa

SEQ ID NO: 494730 - DNA, 75 bp, synthetic construct
  source 1..75: mol_type = other DNA
ctggtatcctcattactcctggcatagcgatggtcgctatatcctctacgcgggtgaagttgtgcaaaacccgcc

SEQ ID NO: 494731 - DNA, 75 bp, synthetic construct
  source 1..75: mol_type = other DNA
caggtggaattccggcctccctgggatcctgacttactggggctgatattacgtgacgctaatttcttgtatatc

SEQ ID NO: 494732 - DNA, 75 bp, synthetic construct
  source 1..75: mol_type = other DNA
tttccgcacacctggataatggatatcgatgccgaagcccatgtggtgaaaagccagaataatcagtggcaatac

SEQ ID NO: 494733 - DNA, 75 bp, synthetic construct
  source 1..75: mol_type = other DNA
aagtaagcagccgcttgcagcatcggttgacggagatgggcgttcatctgctgttgaaatctcagttgcagggac

SEQ ID NO: 494734 - DNA, 75 bp, synthetic construct
  source 1..75: mol_type = other DNA
aatagtcagcaagagtatcgcgcctgtgaaacgcaactgcgggatgcccgacgcgtgttgattgttggcggtggc

SEQ ID NO: 494735 - DNA, 75 bp, synthetic construct
  source 1..75: mol_type = other DNA
ccgcaccgctgatccgaaacaagttcgcttaatctggaaggaacaacattcgggatatggctacggggtaaatta

SEQ ID NO: 494736 - DNA, 75 bp, synthetic construct
  source 1..75: mol_type = other DNA
aaacttgatgatcccaatcttattatcaacaaacgtttcaacgccgggaaacgccacggctatttacttacgcgt

SEQ ID NO: 494737 - DNA, 75 bp, synthetic construct
  source 1..75: mol_type = other DNA
ctgtcactggagaaagtgtcagagcgttcgggttactccaaatggcacctgcaacgaatgtttaaaaaagaaacc

SEQ ID NO: 494738 - DNA, 75 bp, synthetic construct
  source 1..75: mol_type = other DNA
ggcacaaaagtcatgggatcagcgaggaaagttttctaccgcgtttaatccctgtgtggctatgccatttggccc

SEQ ID NO: 494739 - DNA, 75 bp, synthetic construct
  source 1..75: mol_type = other DNA
agcgcggtaaattctctacagcattcaatccctgccttcctgccccatttggcccctgggataccctggctcgta

SEQ ID NO: 494740 - DNA, 75 bp, synthetic construct
  source 1..75: mol_type = other DNA
gcactgtctggatttttctctgctggaaaagaaagtgttctggcgtaaaggacctgcttgtaaacaggaagaatt

SEQ ID NO: 494741 - DNA, 75 bp, synthetic construct
  source 1..75: mol_type = other DNA
gtgaaacgcaactgcgggaagcgcaacgtgtgttgattgtcggcggtggtttgattggtagcgaactggcgatgg

SEQ ID NO: 494742 - DNA, 75 bp, synthetic construct
  source 1..75: mol_type = other DNA
cctgccgctggcgcttgtcagcacggaaggggcaacagaatggtgcgcagaatacgatgaatggggcaacctgct

SEQ ID NO: 494743 - DNA, 75 bp, synthetic construct
  source 1..75: mol_type = other DNA
atagcaccgcatatgacgccttaaataaaataaatagccaatctatttgcgaagataaagagttcgctggtttaa

SEQ ID NO: 494744 - DNA, 75 bp, synthetic construct
  source 1..75: mol_type = other DNA
gcctgcaccgggaaacgctgcgcagcttcggccgttatgaactcaccaccgcttatacccctgccgggcagttac

SEQ ID NO: 494745 - DNA, 75 bp, synthetic construct
  source 1..75: mol_type = other DNA
cgctgtcacggaaaccgcaagtgacctggtacggctgggacggcgaccggctgaccacaatacagaacgacagaa

SEQ ID NO: 494746 - DNA, 75 bp, synthetic construct
  source 1..75: mol_type = other DNA
ctgcacacgcagggcgaagccgggctgaagcgggtggtgaaaaaggaacacgcggacggcagcgtcacgcagagt

SEQ ID NO: 494747 - DNA, 75 bp, synthetic construct
  source 1..75: mol_type = other DNA
gaaacccactctgttgagtgtggttcttgcgcatgaaatggggcatgcaaagggaatgaaagacgatggaactga

SEQ ID NO: 494748 - DNA, 75 bp, synthetic construct
  source 1..75: mol_type = other DNA
ttgatctggaaaaggagcaagaatactgggaaggcgtggctggctggcggttgaaaattgaagaagaaagtacac

SEQ ID NO: 494749 - DNA, 75 bp, synthetic construct
  source 1..75: mol_type = other DNA
ttaacctggcaattccgtattcagggctggaacgtggcaatgggcgcttccggtaccataaaagccgcccatgaa

SEQ ID NO: 494750 - DNA, 75 bp, synthetic construct
  source 1..75: mol_type = other DNA
gatgagtgctttctctgtgtttgcagaagcaagcctgacaggtgcaggtgcaaccttccctgcgccggtgtatgc

SEQ ID NO: 494751 - DNA, 75 bp, synthetic construct
  source 1..75: mol_type = other DNA
ctggggccagataatatgttgagtgaagaagcgatgacgcgtggcttaaactgcctgtcgctgtttgccgaacgc

SEQ ID NO: 494752 - DNA, 75 bp, synthetic construct
  source 1..75: mol_type = other DNA
tttatgggcgtggagcatacccagccggaaaaaggccgcaaactggttattgatattggtggcggctcaacagaa

SEQ ID NO: 494753 - DNA, 75 bp, synthetic construct
  source 1..75: mol_type = other DNA
gaatgcgctggtactgcttgatctggaaaaggagcaagaatactgggaaggcgtggctggctggcggttgaaaat

SEQ ID NO: 494754 - DNA, 75 bp, synthetic construct
  source 1..75: mol_type = other DNA
aaaaaactgccagagaatacaccggtcactgcacaaaccagcattggcgataatggtgagattgtagaaagcacg

SEQ ID NO: 494755 - DNA, 75 bp, synthetic construct
  source 1..75: mol_type = other DNA
aaccagtatgttcctgtttgggccgaaccaaccgtcgcctgcaaataactatcgtccggagttgcacgactctaa

SEQ ID NO: 494756 - DNA, 75 bp, synthetic construct
  source 1..75: mol_type = other DNA
cagcctgacggcactatcgcctttgtggtcgattttactggcgctgaaatgaaaaagctgccagaggatactcca

SEQ ID NO: 494757 - DNA, 75 bp, synthetic construct
  source 1..75: mol_type = other DNA
tcaacgaagtcaccgcaacggcagtaaaaagaatcaaatacagtccggattatttcactttcggtgatgttcagc

SEQ ID NO: 494758 - DNA, 75 bp, synthetic construct
  source 1..75: mol_type = other DNA
aaatgcgttggttgagtgctgcagtaatgttaaccctgtatacatcttcaagctgggctttcagtattgatgatg

SEQ ID NO: 494759 - DNA, 75 bp, synthetic construct
  source 1..75: mol_type = other DNA
gctggcgtctggtaatgcgtgtgaaagtgaaagatgccaagaaaaccactgaaatgcgtgctgccctggtgaatg

SEQ ID NO: 494760 - DNA, 75 bp, synthetic construct
  source 1..75: mol_type = other DNA
ggaagctacgcaacaaaatcatatgtagacaataaaacaacatggaatggttattgcaatgtaatctatgatcaa

SEQ ID NO: 494761 - DNA, 75 bp, synthetic construct
  source 1..75: mol_type = other DNA
gtcagacgacagaataacagcactggaagaagaaaacgcagaattaagacaaagattatctgtaattgaggcggc

SEQ ID NO: 494762 - DNA, 75 bp, synthetic construct
  source 1..75: mol_type = other DNA
cggtgcgcgaaacccagggcaagccgaaaatcgctgtggtggcgcatgacctgcgttacgacggcaagactaacc

SEQ ID NO: 494763 - DNA, 75 bp, synthetic construct
  source 1..75: mol_type = other DNA
atccagtttaatcatgacaaagcatactggaacaatctgaagaccccattcaaactcgagttctaccatcagggt

SEQ ID NO: 494764 - DNA, 75 bp, synthetic construct
  source 1..75: mol_type = other DNA
tagccagagagtcagacgacagaataacagcactggaagaagaaaacgcagaattaagacaaagattatctgcaa

SEQ ID NO: 494765 - DNA, 75 bp, synthetic construct
  source 1..75: mol_type = other DNA
gcaggaagacgacatgctggacaaagcctggggactggagccggaaagccgtttaagctgtcaggcgcgcgtcac

SEQ ID NO: 494766 - DNA, 75 bp, synthetic construct
  source 1..75: mol_type = other DNA
tatccatgccggtaatggcgaatggatctggcgtccgttgaataacccgaaacatttagcggttagcagcttctc

SEQ ID NO: 494767 - DNA, 75 bp, synthetic construct
  source 1..75: mol_type = other DNA
gccgtcctgttgtttatgaagtcggtgttgatggtggcgcttatatgttctatgcgcagaaaactaccagcaata

SEQ ID NO: 494768 - DNA, 75 bp, synthetic construct
  source 1..75: mol_type = other DNA
atgaagcgtctgattgaagcgacccagttttctatggcgcatcaggacgttcgctattacttaaacggtatgctg

SEQ ID NO: 494769 - DNA, 75 bp, synthetic construct
  source 1..75: mol_type = other DNA
cgtctggcggtctgttcaatgccaattggtcagtctttgccaagccattcggtgatcgtgccgcgtaaaggtgtg

SEQ ID NO: 494770 - DNA, 75 bp, synthetic construct
  source 1..75: mol_type = other DNA
ttgaaaatgggtaagtgcctcatgtcctatggggatcgtgtagataatgccctgattaaatttgattatacagac

SEQ ID NO: 494771 - DNA, 75 bp, synthetic construct
  source 1..75: mol_type = other DNA
tggggcaactccagccgtcctgttgtttatgaagtcggtgttgatggtggcgcttatatgttctatgcgcagaaa

SEQ ID NO: 494772 - DNA, 75 bp, synthetic construct
  source 1..75: mol_type = other DNA
gaagttgtaggttccgcaatgaaatatcaggacggtgcaagcggatcggaaggtgaagaaggtgaacgttattac

SEQ ID NO: 494773 - DNA, 75 bp, synthetic construct
  source 1..75: mol_type = other DNA
aaataagacaggagaaaccgaaaacgcttatagtgagatgtacaccagaaaaaatattgacggtacaaaagatac

SEQ ID NO: 494774 - DNA, 75 bp, synthetic construct
  source 1..75: mol_type = other DNA
acattacagatcaaatatgctaatcatgggtcaaccatgacattaaccacacagggatccgctcacgctggcgta

SEQ ID NO: 494775 - DNA, 75 bp, synthetic construct
  source 1..75: mol_type = other DNA
tcacaggacggcaggtgttgaggatgcgtattgcgaactatacctcaaaaaatggatagacagcccaggtaacgc

SEQ ID NO: 494776 - DNA, 75 bp, synthetic construct
  source 1..75: mol_type = other DNA
gaagcggaagagatcctcgacgtcacctacagcggcgcggagatggaaatcggctttaacgtcagctatgtgctg

SEQ ID NO: 494777 - DNA, 75 bp, synthetic construct
  source 1..75: mol_type = other DNA
gaagcggaagagatcctcgacgttacctatagcggtgcggagatggaaatcggcttcaacgtcagctatgtgctg

SEQ ID NO: 494778 - DNA, 75 bp, synthetic construct
  source 1..75: mol_type = other DNA
tttgatatctgccgtggcctgcctgaaggcgcggaaatcgccgtccaactggaaggtgaacggatgctggtgcgc

SEQ ID NO: 494779 - DNA, 75 bp, synthetic construct
  source 1..75: mol_type = other DNA
ttgccacccatagcgacgcggcgcgggaagtgctgcaaaaatccggcggtaaaaccgtcagtgaagaagacgtgc

SEQ ID NO: 494780 - DNA, 75 bp, synthetic construct
  source 1..75: mol_type = other DNA
caaacgcattgcgcagaaagtgggcgaagaaggggtggaaaccgcactggccgcgacggtacatgaccgctttga

SEQ ID NO: 494781 - DNA, 75 bp, synthetic construct
  source 1..75: mol_type = other DNA
cccgctacagagtcaagcatttatttttgctttctctgccggaattctcaggagaatcccgctgacccggcggcg

SEQ ID NO: 494782 - DNA, 75 bp, synthetic construct
  source 1..75: mol_type = other DNA
gcagttgtcatcctggtgacgggggcggggggcgtatttggtaaggttctggtggagtccggcgtgggtaaggcc

SEQ ID NO: 494783 - DNA, 75 bp, synthetic construct
  source 1..75: mol_type = other DNA
tgggctacatgaacccgcaagcgctggataaaaccatcgaaagcggcaaagtcacttttttctcacgcaccaaac

SEQ ID NO: 494784 - DNA, 75 bp, synthetic construct
  source 1..75: mol_type = other DNA
caccaagcgcatcgcacagaaagtgggtgaagaaggcgtggaaactgcgctggccgcgacggtcaatgaccgctt

SEQ ID NO: 494785 - DNA, 75 bp, synthetic construct
  source 1..75: mol_type = other DNA
ataaaaccgacggactgatgcccgccatcgtacaacacgcggtttccggcgaagtattaatgctgggctatatga

SEQ ID NO: 494786 - DNA, 75 bp, synthetic construct
  source 1..75: mol_type = other DNA
acgctcacttccgactggcaatccaatatgacccgcgagcagtacggcgaaaaatttcgccaggtacaggaatat

SEQ ID NO: 494787 - DNA, 75 bp, synthetic construct
  source 1..75: mol_type = other DNA
caccggggcaccgaaagttcgggcaatggaaattatcgatgaactggaaccgcagcgacgcaacgcctggtgcgg

SEQ ID NO: 494788 - DNA, 75 bp, synthetic construct
  source 1..75: mol_type = other DNA
tccctgcagtgcatcatctggtcagcaccataacggcacgccttcccgagcagttgcatgccagcgatctgctgc

SEQ ID NO: 494789 - DNA, 75 bp, synthetic construct
  source 1..75: mol_type = other DNA
ggtgcgctggctgttgttgctgttgtgggcgtttactgcctggttgtgtttttgatggatcgactagggaactga

SEQ ID NO: 494790 - DNA, 75 bp, synthetic construct
  source 1..75: mol_type = other DNA
ccttcacagaacatcgccgtggtgcgccgcgcagatggctccgggacttctttcgttttcaccagctacctggcg

SEQ ID NO: 494791 - DNA, 75 bp, synthetic construct
  source 1..75: mol_type = other DNA
atggcaaaagaagcaaaaaaacaagacccgcaacagcagctagaagcactgttcaataaactggtcaaacagcac

SEQ ID NO: 494792 - DNA, 75 bp, synthetic construct
  source 1..75: mol_type = other DNA
ttgatgtatcacctgctggtgctgttgcaggatcaggagctggacttaacgacagtaattgagaacctgcgtaaa

SEQ ID NO: 494793 - DNA, 75 bp, synthetic construct
  source 1..75: mol_type = other DNA
ggcttcaccgcaaattgcagatgtcgattttactgagccgggaagacataacgcctgtagttttattatcaatga

SEQ ID NO: 494794 - DNA, 75 bp, synthetic construct
  source 1..75: mol_type = other DNA
ctctcttaccgaatgccgcaggtgttgcagcgttttcggcaacgcgcaccaaaagtgcgtttatcgttgcagtcg

SEQ ID NO: 494795 - DNA, 75 bp, synthetic construct
  source 1..75: mol_type = other DNA
aatggctaagaacgctgtcagccaaacagctcatcgaagagcttgaaaaagaaactatgcagaattgcatagttt

SEQ ID NO: 494796 - DNA, 75 bp, synthetic construct
  source 1..75: mol_type = other DNA
atgaatattctgcaatttaatgtgcgactggcggaaggtggggcagcaggtgtggcgttagatctccaccagcgc

SEQ ID NO: 494797 - DNA, 75 bp, synthetic construct
  source 1..75: mol_type = other DNA
ctctcttaccgaatgccgcaggtgttgcagcgttttcggcaacgtgcaccaaaagtgcgtttatcactgcagtcg

SEQ ID NO: 494798 - DNA, 75 bp, synthetic construct
  source 1..75: mol_type = other DNA
cgcgcaccatgctggaaaagcggttagtccgtcaatgcaaacttttattcagtgtgttgaggagtgttttttgcc

SEQ ID NO: 494799 - DNA, 75 bp, synthetic construct
  source 1..75: mol_type = other DNA
cactggcacgggaaactggcgcaatcgtcgtggtcactggcgaggtggattatgttaccgatggtcgtcgcaccg

SEQ ID NO: 494800 - DNA, 75 bp, synthetic construct
  source 1..75: mol_type = other DNA
agcgaggggccaggcagttttgttccacatttccttgatgcgctctggcaattgacgcaggaggtgcaggcatga

SEQ ID NO: 494801 - DNA, 75 bp, synthetic construct
  source 1..75: mol_type = other DNA
ccgccgttgagcaagcaaaaagctctcaaacaccctggacgcttgatccagtagcggttggtgcgctcgattatc

SEQ ID NO: 494802 - DNA, 75 bp, synthetic construct
  source 1..75: mol_type = other DNA
acgatgtgaacgtgagacgttcggcagatgttacaagctaccccgtagagaatggggctactgtatcggatcacg

SEQ ID NO: 494803 - DNA, 75 bp, synthetic construct
  source 1..75: mol_type = other DNA
ggttgacgcctcaattaacgggtaaaggccagcagtggttgacgcgtaaactgctcgatgctggcttgttaaaac

SEQ ID NO: 494804 - DNA, 75 bp, synthetic construct
  source 1..75: mol_type = other DNA
ttggcattcacggcggcgatccgttaatgaccaaagtggtaggaactggctgtgcattatcggcggttgtcgctg

SEQ ID NO: 494805 - DNA, 75 bp, synthetic construct
  source 1..75: mol_type = other DNA
atattatgagaggcttgatttttcgccgtttgaattaagagatgatgtcttggtgtacatacgcaatgctattga

SEQ ID NO: 494806 - DNA, 75 bp, synthetic construct
  source 1..75: mol_type = other DNA
ggatctatcgacggcagccagatgttccacggcccggcctcactgtttggcggcgtggaataccagacgccctag

SEQ ID NO: 494807 - DNA, 75 bp, synthetic construct
  source 1..75: mol_type = other DNA
acgtataaagataaagccttcgatctcaaactgcgtttgtgggaagagagttattggctgccgcaagtggcggtt

SEQ ID NO: 494808 - DNA, 75 bp, synthetic construct
  source 1..75: mol_type = other DNA
atcgaagtgggtccagcgtaccgccgcagtcattgtgctcgcgggaggccttgccatcactatctatgcctactg

SEQ ID NO: 494809 - DNA, 75 bp, synthetic construct
  source 1..75: mol_type = other DNA
tagtaaacaaaatctggctaatcaaaccgttattgataacaaggattataatgtacttgtcggtcgtactggtgt

SEQ ID NO: 494810 - DNA, 75 bp, synthetic construct
  source 1..75: mol_type = other DNA
tacttttatggcattttttgatgttttgttttctattaaaggtttttttctttctttgcttgccattgttttttt

SEQ ID NO: 494811 - DNA, 75 bp, synthetic construct
  source 1..75: mol_type = other DNA
taatcttcttgacgatgctgtaaataaattcgaagattacgattcagctgtgcaaaatttcaatgggcaacttgg

SEQ ID NO: 494812 - DNA, 75 bp, synthetic construct
  source 1..75: mol_type = other DNA
agtataattcatatataaaagccttcaggtccatatctcaatatcatatagattttttaatagtcgacaaaacta

SEQ ID NO: 494813 - DNA, 75 bp, synthetic construct
  source 1..75: mol_type = other DNA
actcattgttatggcaatccccttttgctttatcagttttaatctttcttctgtttttaatattatatttatgta

SEQ ID NO: 494814 - DNA, 75 bp, synthetic construct
  source 1..75: mol_type = other DNA
aagtgatgaatatgtcagggatgtacttgatgtaaatattgccggagtaattccgggattgcgtgatgcgttcta

SEQ ID NO: 494815 - DNA, 75 bp, synthetic construct
  source 1..75: mol_type = other DNA
caccatcatcatgcagtggtttatgtatggcggcggcgtgctggggcttggcttgctgctcggtctggtactgcc

SEQ ID NO: 494816 - DNA, 75 bp, synthetic construct
  source 1..75: mol_type = other DNA
cctgggtccgcagtggcccgggagataattatcgcctcgtgggcacggttaacgccggtgaggaagtgacattat

SEQ ID NO: 494817 - DNA, 75 bp, synthetic construct
  source 1..75: mol_type = other DNA
aatacgaagtggcgttggagtggcattattgtgccagtgtgcacaaccattttcacggcggcggtcgcgtatttt

SEQ ID NO: 494818 - DNA, 75 bp, synthetic construct
  source 1..75: mol_type = other DNA
aagctttacatcagcaacttattgccttgtatcgcgccaatcgcttattcgactttgaaaaagttgtagaagata

SEQ ID NO: 494819 - DNA, 75 bp, synthetic construct
  source 1..75: mol_type = other DNA
ctacgatgaagcacgtttccagaaagaaggcttccgcgtcgtgccaccagcggcagtgcgtcagggcgcgttcat

SEQ ID NO: 494820 - DNA, 75 bp, synthetic construct
  source 1..75: mol_type = other DNA
ctacgacgaagcacgtttccagaaagaaggcttccgcgttgtgccaccagcggcggtacgtcagggtgcatttat

SEQ ID NO: 494821 - DNA, 75 bp, synthetic construct
  source 1..75: mol_type = other DNA
gcagttcgctttaactctctgactccggaacagcagcgcgacgttatcgctcgtacctttactgaaagcctgtaa

SEQ ID NO: 494822 - DNA, 75 bp, synthetic construct
  source 1..75: mol_type = other DNA
tccggttatgctgttcgcttcaactctctgactccagaacaacagcgcgacgttatcgctcgtacctttactgaa

SEQ ID NO: 494823 - DNA, 75 bp, synthetic construct
  source 1..75: mol_type = other DNA
caagtgctctgtgctgtgcattatttggccgaattaccagtaccaatatctcatggagatattaagccacataac

SEQ ID NO: 494824 - DNA, 75 bp, synthetic construct
  source 1..75: mol_type = other DNA
atgcagcagttacagaacattattgaaaccgcttttgaacgccgtgccgaaatcacgccagccaatgcagacacc

SEQ ID NO: 494825 - DNA, 75 bp, synthetic construct
  source 1..75: mol_type = other DNA
tcattatacctgtgtgtatagccatctttacttcgctttttacagcggcggctacgtatttcattgcaaaatttg

SEQ ID NO: 494826 - DNA, 75 bp, synthetic construct
  source 1..75: mol_type = other DNA
ttgcgacgcttgctgaacgcactacaaacctctcaactaaagccgatgttggtgaggtgaaaggtgaactcaaag

SEQ ID NO: 494827 - DNA, 75 bp, synthetic construct
  source 1..75: mol_type = other DNA
gggcgtgattgtcgaagaaggttccgttatttccatgggcgtatacatcggtcagagcacccgtatttacgaccg

SEQ ID NO: 494828 - DNA, 75 bp, synthetic construct
  source 1..75: mol_type = other DNA
ctggcggtgtaggcatcggcggcgtgctggagccgctgcaggctaacccgaccattattgaagataactgcttca

SEQ ID NO: 494829 - DNA, 75 bp, synthetic construct
  source 1..75: mol_type = other DNA
gtcatctctatgggcgtatacattggtcagagcacccgtatttacgaccgtgaaaccggcgaaatccactacggt

SEQ ID NO: 494830 - DNA, 75 bp, synthetic construct
  source 1..75: mol_type = other DNA
ctggccttggtcagatatggtttgctggtcgggggatcgcgcctcagtggaaaatgaaacgggaaatgctcagtc

SEQ ID NO: 494831 - DNA, 75 bp, synthetic construct
  source 1..75: mol_type = other DNA
gtgaacttcacaacagagacattattattccgttgacggatgactcatgccggaacgcagcaacagacgggcaaa

SEQ ID NO: 494832 - DNA, 75 bp, synthetic construct
  source 1..75: mol_type = other DNA
aggtattgaacctgaacaattcggtaatgactccaacttactgatagtgttttatgttcagataatgcccgatga

SEQ ID NO: 494833 - DNA, 75 bp, synthetic construct
  source 1..75: mol_type = other DNA
gtatgtaacaaaattatcgacttttggtgaagaccagcttgagataatcccgctggatacgccagacctggtcat

SEQ ID NO: 494834 - DNA, 75 bp, synthetic construct
  source 1..75: mol_type = other DNA
tgatttactccaccgcgacagctttatcctgcgtccgggcgaggagaaaaaattgcgccgctccctcaataagga

SEQ ID NO: 494835 - DNA, 75 bp, synthetic construct
  source 1..75: mol_type = other DNA
attcactgctggtttttcgcgacaataagggtctgtctgcatcgttatccctttggtcaattatctggcaaagcg

SEQ ID NO: 494836 - DNA, 75 bp, synthetic construct
  source 1..75: mol_type = other DNA
cataacagcgacattattattccggtgacggatgaatcatgccggaacgcagcagcagacgggcaaactttgaag

SEQ ID NO: 494837 - DNA, 75 bp, synthetic construct
  source 1..75: mol_type = other DNA
tctggctgcttgtgggatatgatcagatggccctgaaagcgtttcaggcatcccactttggcctgatttcccggc

SEQ ID NO: 494838 - DNA, 75 bp, synthetic construct
  source 1..75: mol_type = other DNA
attgaaaaaatatatagatgaagctatgaatactcaggtattgtcaagtaatttttgcaaattagtgtgtattta

SEQ ID NO: 494839 - DNA, 75 bp, synthetic construct
  source 1..75: mol_type = other DNA
agatatcggcagatttttagcacagactctcttcaatacgtctgacattggcatgtcagcagaacagaaaaaagc

SEQ ID NO: 494840 - DNA, 75 bp, synthetic construct
  source 1..75: mol_type = other DNA
aatgcagactcatttgagataattcgctggatacctcattcactgctggtttttcgcgacaataagggtctgcat

SEQ ID NO: 494841 - DNA, 75 bp, synthetic construct
  source 1..75: mol_type = other DNA
ggagtgcagctttgcattacctgccaggaaatcgcagagctgaaaggtaaacattacaacggaggtgctgtatga

SEQ ID NO: 494842 - DNA, 75 bp, synthetic construct
  source 1..75: mol_type = other DNA
agatgaacggcgacgcctggctgttcgtggatgcagagcttgcgccagttgccagcaggatattgaacttatcaa

SEQ ID NO: 494843 - DNA, 75 bp, synthetic construct
  source 1..75: mol_type = other DNA
ggacgctgggcaggacgtggagatgccggaacaggagaagaagaaacgagaaatgattcagttgtggggggagta

SEQ ID NO: 494844 - DNA, 75 bp, synthetic construct
  source 1..75: mol_type = other DNA
ggacaccagggacatcattgcagccgccacaatggctctggagcgtatctggagggatgggcaccggtatgccaa

SEQ ID NO: 494845 - DNA, 75 bp, synthetic construct
  source 1..75: mol_type = other DNA
tgcgcctacaaaaacgctggctaaaagtgcacagtgggcaacaaagcaatggccacagttttccggtgtggtcgc

SEQ ID NO: 494846 - DNA, 75 bp, synthetic construct
  source 1..75: mol_type = other DNA
cctgaatggcaaatgaaacgggaaatgctttctcctgcgtataccaccagatggacagatttgccagtagcccag

SEQ ID NO: 494847 - DNA, 75 bp, synthetic construct
  source 1..75: mol_type = other DNA
caacgtatgaagccctgcgtcaggcagtctgtcagtacgctgagcgtgctgcggaaaagctgcgcggcgaacggc

SEQ ID NO: 494848 - DNA, 75 bp, synthetic construct
  source 1..75: mol_type = other DNA
atggcggacatcattgattcagcatcagaaattgaagaattacagcgcaatacagcaataaaaatgcgtcgtctg

SEQ ID NO: 494849 - DNA, 75 bp, synthetic construct
  source 1..75: mol_type = other DNA
cgggcaaggggaaaatatggttcgccggacgggggattgcccccgagtggcagatgaaaagggaactactttcgc

SEQ ID NO: 494850 - DNA, 75 bp, synthetic construct
  source 1..75: mol_type = other DNA
gaagaagaaaaaatccgcgccattgagctttatttcaaatatggtaagaagctggctcccgtcgtacgcgaattg

SEQ ID NO: 494851 - DNA, 75 bp, synthetic construct
  source 1..75: mol_type = other DNA
ccacgccaccaacctgatcgccctcacctatgtacttgaaaacgacaccgcggtcttcactcgccaactgtggga

SEQ ID NO: 494852 - DNA, 75 bp, synthetic construct
  source 1..75: mol_type = other DNA
tcctaacctgacaatccgtgtctctggctacgccgtgcgcttcaacgcactgacccgtgaacagcaacaggatgt

SEQ ID NO: 494853 - DNA, 75 bp, synthetic construct
  source 1..75: mol_type = other DNA
ttcaggtgagacagatgcgcctggagaagaaaatacatgtattttccagcaattatgcgctgtaccacagcatga

SEQ ID NO: 494854 - DNA, 75 bp, synthetic construct
  source 1..75: mol_type = other DNA
gcagcggtgaaagcactggatcggatctgggtgaatgggcatcgatatgcaaaagcgggttgcatgctcaatgat

SEQ ID NO: 494855 - DNA, 75 bp, synthetic construct
  source 1..75: mol_type = other DNA
acggccgcacagcgatgcgctgatgaaggtactcgacggcattaatcattccggactcgggaaagtctggtttgc

SEQ ID NO: 494856 - DNA, 75 bp, synthetic construct
  source 1..75: mol_type = other DNA
gtatattccaccaatgagaaacctactgccgctgaactcgaagtagtttcgattcatgaccggatcgatttcggt

SEQ ID NO: 494857 - DNA, 75 bp, synthetic construct
  source 1..75: mol_type = other DNA
ggaaaccaacggtcaggtagccgtgaaagcctgggctgccctgagcgaatttaccggtcgtgaccatacgcatct

SEQ ID NO: 494858 - DNA, 75 bp, synthetic construct
  source 1..75: mol_type = other DNA
acaggaaaatactgactgtcacgacctctgcaacaccgccggtcgacgtcacggcaccgcagggttcacagaaag

SEQ ID NO: 494859 - DNA, 75 bp, synthetic construct
  source 1..75: mol_type = other DNA
gttaccgatcatcggaacccggcactgccgcaggcgtggcacacgcttgcgggaacgttgccctgttgcgccatc

SEQ ID NO: 494860 - DNA, 75 bp, synthetic construct
  source 1..75: mol_type = other DNA
cagaaaaagcttattatgcttccatcggaaacgatgatctggcagcctgagttcacagataaaatactctccagg

SEQ ID NO: 494861 - DNA, 75 bp, synthetic construct
  source 1..75: mol_type = other DNA
atgtcaccagagaaaccgacttcttccagcaaggctggcgatagcctgctggcgacccgtctgaccgggcaactt

SEQ ID NO: 494862 - DNA, 75 bp, synthetic construct
  source 1..75: mol_type = other DNA
cgtgcgctcgatgagcagtacaagcgcctgcataacgagcgcatggacagggttaaaaattacttttcgtggagc

SEQ ID NO: 494863 - DNA, 75 bp, synthetic construct
  source 1..75: mol_type = other DNA
tgggggagaagctcgaccccagcaataaatctatgcaaaaagccgccgacgccacgccaacggcgcaaagcttcc

SEQ ID NO: 494864 - DNA, 75 bp, synthetic construct
  source 1..75: mol_type = other DNA
cagtttgaagtattcaatgatgagctcggcaaaccacggctacggctatggggtgaggcattaaaactggcggaa

SEQ ID NO: 494865 - DNA, 75 bp, synthetic construct
  source 1..75: mol_type = other DNA
tttgcactctataccccggctgaaaaaccgctgtatgcccggaccagcacagcacagtgtctgctccgtgtgaca

SEQ ID NO: 494866 - DNA, 75 bp, synthetic construct
  source 1..75: mol_type = other DNA
gggaccaccctgaaagacggactggcccgctggacatcatccgaaaaatgcccgcacggcacatggacactgcgc

SEQ ID NO: 494867 - DNA, 75 bp, synthetic construct
  source 1..75: mol_type = other DNA
cgcaggcaacggtggtttgaactggccggacgttcgggcgcagattgaatctgcccttggcgaccttcaggacgt

SEQ ID NO: 494868 - DNA, 75 bp, synthetic construct
  source 1..75: mol_type = other DNA
tcgccagagatctccgcagaacaggtagccgatttccttcagcatcgcctgctaaaactgaagccgggtcacacc

SEQ ID NO: 494869 - DNA, 75 bp, synthetic construct
  source 1..75: mol_type = other DNA
aggaagacgagtattgcggaaacagcgaaactttgtgaatgtagcattagtcttgtaaaagctgtatggtctaaa

SEQ ID NO: 494870 - DNA, 75 bp, synthetic construct
  source 1..75: mol_type = other DNA
gtggatcttactgagctggctaacgcacaaaccggtgttgctaaggtcgttctggaatctgttcaggatatgctg

SEQ ID NO: 494871 - DNA, 75 bp, synthetic construct
  source 1..75: mol_type = other DNA
tggcaggcacttgttgcggcctgcctgtccgacgcgttatcttcaggcgaaataagttcaaatatgaataataca

SEQ ID NO: 494872 - DNA, 75 bp, synthetic construct
  source 1..75: mol_type = other DNA
ggtcattcattaggccaatacatccgcagccgtaggatgacggaaatcgcgcaaaagctgaaggaaagtaacgag

SEQ ID NO: 494873 - DNA, 75 bp, synthetic construct
  source 1..75: mol_type = other DNA
gatgttccgccgcataaataccggatggctaatattcagggcgaatcgcgctttttacatccattaaatcattac

SEQ ID NO: 494874 - DNA, 75 bp, synthetic construct
  source 1..75: mol_type = other DNA
tgcagccagacgaagtagttattgcagaacatatagatcgtatcagtcgtttaccgctcgatagtgcgctggcgt

SEQ ID NO: 494875 - DNA, 75 bp, synthetic construct
  source 1..75: mol_type = other DNA
cgactggccgggcaatattcgtgaactgcgcaatatgatggaacgactggcgctatttttaagtgtggaaccgac

SEQ ID NO: 494876 - DNA, 75 bp, synthetic construct
  source 1..75: mol_type = other DNA
tgctggctctaacggcgcgtacctgaaaagccgcctgtcagtaccggtgattctgattaaaccgagcggctacga

SEQ ID NO: 494877 - DNA, 75 bp, synthetic construct
  source 1..75: mol_type = other DNA
tctgcaattgccaccactgcgcgagcgggtgacggatattctgccgctggcggaaagctttttgaaagtgtctct

SEQ ID NO: 494878 - DNA, 75 bp, synthetic construct
  source 1..75: mol_type = other DNA
ggtgatctcacgctgcatcaggcgctgaagcgcgtggcagaagagggggactgtgcgcagaccgcgaaaagcctg

SEQ ID NO: 494879 - DNA, 75 bp, synthetic construct
  source 1..75: mol_type = other DNA
ttgtagcctgtggtaatcagggtgagaaagtcgatcgtctgcagggggatcttacgctgcatcaggccctgaagc

SEQ ID NO: 494880 - DNA, 75 bp, synthetic construct
  source 1..75: mol_type = other DNA
ccctggtgtttgtgtccttctcgatgccggcggaggagttgaagcagcgtgtaaaggatgcggcacaactcaata

SEQ ID NO: 494881 - DNA, 75 bp, synthetic construct
  source 1..75: mol_type = other DNA
cattcgcaatggtctggcatttaatcagtttgaggtgttcaatgatgaactcggcaagccacaattgcggctgtg

SEQ ID NO: 494882 - DNA, 75 bp, synthetic construct
  source 1..75: mol_type = other DNA
gtggtgaaagcgattgttgaagaagaacaccgtcgtaaagcggaaggcaaagaagacctgatcccgatgcgtccg

SEQ ID NO: 494883 - DNA, 75 bp, synthetic construct
  source 1..75: mol_type = other DNA
ttttatggcatcaagccaggcatttcgtgagtatctgaaaaaacttccccctgataacacaataccgccagctct

SEQ ID NO: 494884 - DNA, 75 bp, synthetic construct
  source 1..75: mol_type = other DNA
tggaactcataagttcatcgggcatcttttagaggattgctccataaaattaggaaataaggcaaacatgattta

SEQ ID NO: 494885 - DNA, 75 bp, synthetic construct
  source 1..75: mol_type = other DNA
agcaatgcggatacgatgcggggcattacaggacggtcgccgccgccggacaccttcgcttcaatgaagataacg

SEQ ID NO: 494886 - DNA, 75 bp, synthetic construct
  source 1..75: mol_type = other DNA
gacgccgttgcaaatgctgcggcgttttttttgagcctaaatatcacaaccagacgtggtgcagtgaagaatgtc

SEQ ID NO: 494887 - DNA, 75 bp, synthetic construct
  source 1..75: mol_type = other DNA
gttggcgtgcgtatggcggttcacccggacgatccgccgcgcccgatcctcggcctgccgcgcattgtttccacc

SEQ ID NO: 494888 - DNA, 75 bp, synthetic construct
  source 1..75: mol_type = other DNA
acagttttgtattgcattcatttttaccggaacttgaagaacgcggcatgactataaaaacgcgtaacgcaggcg

SEQ ID NO: 494889 - DNA, 75 bp, synthetic construct
  source 1..75: mol_type = other DNA
ctctttctggctgctggacagcgaaaaaggcgaagcgcgttgcatcgttgcgaaagcaggttttgcagaagacga

SEQ ID NO: 494890 - DNA, 75 bp, synthetic construct
  source 1..75: mol_type = other DNA
ctctttctggctgctggacagcgaaaaaggcgaagcacgttgcatcgttgcaaaagcaggttatgcagaagatga

SEQ ID NO: 494891 - DNA, 75 bp, synthetic construct
  source 1..75: mol_type = other DNA
cgcctgatacgataaagtatcagtaccatcaacttgtccgtaaacgaattatactgatttcaataataactctgg

SEQ ID NO: 494892 - DNA, 75 bp, synthetic construct
  source 1..75: mol_type = other DNA
ggaagcatccttatcggtgggctggtgctatcgctggcctcggtagcgtcgaagaacatcattcccggtgtcatt

SEQ ID NO: 494893 - DNA, 75 bp, synthetic construct
  source 1..75: mol_type = other DNA
atcgttgaagacgcaggcctggtatggtctgtcgtagaaagcgtgccaattcacgaagatatcaaaacccacact

SEQ ID NO: 494894 - DNA, 75 bp, synthetic construct
  source 1..75: mol_type = other DNA
accatgaatgcggttctgggtgatgaagatcgattaaaagccctcgcggaagattttgccaaacattatgaaaaa

SEQ ID NO: 494895 - DNA, 75 bp, synthetic construct
  source 1..75: mol_type = other DNA
cgccctaatgaagagacaaatctctcgctaccggaagtaaattaccagcgcctgcgtcgtttacctgatttattc

SEQ ID NO: 494896 - DNA, 75 bp, synthetic construct
  source 1..75: mol_type = other DNA
gttttttccctgcattgcctacccctttggcccgtgggatatgcttacccgcacacgaacaaagttgctgatcaa

SEQ ID NO: 494897 - DNA, 75 bp, synthetic construct
  source 1..75: mol_type = other DNA
ttgtccagggaatgatcaaagccaccaccgacgcctggctgaaaggctgggacgagcgcaacggcggtaacctga

SEQ ID NO: 494898 - DNA, 75 bp, synthetic construct
  source 1..75: mol_type = other DNA
acaccatcagccggtgcgttttctggcaaagcgttttgctgtgaaagaagcagcggcaaaagcgtttggcacagg

SEQ ID NO: 494899 - DNA, 75 bp, synthetic construct
  source 1..75: mol_type = other DNA
cgcagcgttcaatttacaggaacactttgtgtcatggcgcaaagggccagaatgccagcaagaagtcctggccgg

SEQ ID NO: 494900 - DNA, 75 bp, synthetic construct
  source 1..75: mol_type = other DNA
gacccagagacatttactgtcgtgcgctggatgcccagttcgttattaacctggcgtgataaaaacgggctgcag

SEQ ID NO: 494901 - DNA, 75 bp, synthetic construct
  source 1..75: mol_type = other DNA
tcccgccagtagcgaatgatgatgtttatatgggtgtgctggcacaggcagagaattttaaagaacatcatatga

SEQ ID NO: 494902 - DNA, 75 bp, synthetic construct
  source 1..75: mol_type = other DNA
cagccgtgaaattgcctgggatttctaccgtcagcttaaagctattcgccctgcctggtttgaagtgaagcaagc

SEQ ID NO: 494903 - DNA, 75 bp, synthetic construct
  source 1..75: mol_type = other DNA
acgcaggcaccaatgagtggcaaatcgacgaaagcaaaaaagccaccgcaaccatgaatgcggttctgggtgatg

SEQ ID NO: 494904 - DNA, 75 bp, synthetic construct
  source 1..75: mol_type = other DNA
gtcagccaatgcctttactggcaaatacaccgtttatcgtcaccggctccggcaaattctttcgtaacgtccagc

SEQ ID NO: 494905 - DNA, 75 bp, synthetic construct
  source 1..75: mol_type = other DNA
ccggttgtctacgtaggcggtggggcaatcacggcgggctgccatcagcagttgaaagaaacggtggaggcgttg

SEQ ID NO: 494906 - DNA, 75 bp, synthetic construct
  source 1..75: mol_type = other DNA
cccgtaacgcgattccgtccggaatacctgatgaaagcgtgccgttatatctacaacgtctggagtattatcgtc

SEQ ID NO: 494907 - DNA, 75 bp, synthetic construct
  source 1..75: mol_type = other DNA
aaataagactggtgaaacggaaaacgcttatagtgatatatataccagaaaaaatattgatggtactaaagatac

SEQ ID NO: 494908 - DNA, 75 bp, synthetic construct
  source 1..75: mol_type = other DNA
aaagaaatattgatgaaaatgtgtcatgacgatgggttaacacaggctgaagtactgtcccggttgatccaccgc

SEQ ID NO: 494909 - DNA, 75 bp, synthetic construct
  source 1..75: mol_type = other DNA
aacagcggcctgtggctggcggcgcgtagtgcaaagacggctcaccgtgagcaggaaatcaaaaataaagcgtga

SEQ ID NO: 494910 - DNA, 75 bp, synthetic construct
  source 1..75: mol_type = other DNA
ataacgtcaggcctcaccattacaacggtgggttgacgccggaagaatcagagaacagataccgtatttactgta

SEQ ID NO: 494911 - DNA, 75 bp, synthetic construct
  source 1..75: mol_type = other DNA
aagtgctatttttgtttgatttcatcaggaaatgatgttgcaataaaaaaagtaaatcgttattttgataattaa

SEQ ID NO: 494912 - DNA, 75 bp, synthetic construct
  source 1..75: mol_type = other DNA
atacctatatttataacagaattgaattcagttagaaacattatcaaaattaaatttacaaaaaatataggtccc

SEQ ID NO: 494913 - DNA, 75 bp, synthetic construct
  source 1..75: mol_type = other DNA
cagcgtcacgtttagaactatgttcatcaactttatggtcattattacatcaaacaattatacccgatgaaataa

SEQ ID NO: 494914 - DNA, 75 bp, synthetic construct
  source 1..75: mol_type = other DNA
gagcagatgggtatctggcctggcgatgactatttctcccgtcgttacgactatctcaccgaatatgttcaggtg

SEQ ID NO: 494915 - DNA, 75 bp, synthetic construct
  source 1..75: mol_type = other DNA
ttcgatcgccacatgaacggcagtacattgccattggtcattactgactctgtttctcccaccgccgctctggtg

SEQ ID NO: 494916 - DNA, 75 bp, synthetic construct
  source 1..75: mol_type = other DNA
ctatgaccgctcccttctctgctgctgctttatcttcctggttaacaagtgacggttcagagacaggctccaagg

SEQ ID NO: 494917 - DNA, 75 bp, synthetic construct
  source 1..75: mol_type = other DNA
ttcttccgcagtctgaaaacagaatgggtgccaaccgatggctacacaggcaaagacgtggcccggcagcaaatc

SEQ ID NO: 494918 - DNA, 75 bp, synthetic construct
  source 1..75: mol_type = other DNA
taccgggggtactgcggttgcgattcgtgaaatgtatccaaaagcgcactttgtcaccatcttcgcaaaaccggc

SEQ ID NO: 494919 - DNA, 75 bp, synthetic construct
  source 1..75: mol_type = other DNA
atcccgcaagatacctggatcgaacagccgtgggatatgggcgtcgtattcgtcccgccaatctccggtcgctaa

SEQ ID NO: 494920 - DNA, 75 bp, synthetic construct
  source 1..75: mol_type = other DNA
ttattgatcagctctaaatcgattaaaccggaatctctcgacgatatccttggcgatattctgaaaaaagataca

SEQ ID NO: 494921 - DNA, 75 bp, synthetic construct
  source 1..75: mol_type = other DNA
acgttatgccgcagcgaataatttatcggttattggcgcaacaaaagaagataaacagcgcattagcgaaattct

SEQ ID NO: 494922 - DNA, 75 bp, synthetic construct
  source 1..75: mol_type = other DNA
tcagttattggcgcggtaaaagaagataaacagcgcattagcgaaattctacaagaaacgtgggaaagcgccgat

SEQ ID NO: 494923 - DNA, 75 bp, synthetic construct
  source 1..75: mol_type = other DNA
gacattctgctctccgcgccgtcgattgtggttggtctgtttgtttacaccattgtggtggcgcagatggagcac

SEQ ID NO: 494924 - DNA, 75 bp, synthetic construct
  source 1..75: mol_type = other DNA
gttgttgatatcccgcaaaatacctggatcgaacagccgtgggatatgggcgtcgtattcgtcccgccaatctct

SEQ ID NO: 494925 - DNA, 75 bp, synthetic construct
  source 1..75: mol_type = other DNA
ccacaatgaatttaccgtgaagcggttattgctgaagcccagaccctgcctgatgccgatgaataaggatttccc

SEQ ID NO: 494926 - DNA, 75 bp, synthetic construct
  source 1..75: mol_type = other DNA
tattgacgctctggcaggtgaactttcccgccgtattcagtatgcgtttcctgataacgaaagccatgtgtctgt

SEQ ID NO: 494927 - DNA, 75 bp, synthetic construct
  source 1..75: mol_type = other DNA
gaaatcgtgcagcgtaaccgcctgcgccatccgtcattcatcctgccgacgcaacctgtggagatcaccgactga

SEQ ID NO: 494928 - DNA, 75 bp, synthetic construct
  source 1..75: mol_type = other DNA
aaggtcacccatcgcctcagtacggaggaagacggcattgcgtatgtcacatttgaagtgtttgaggctggtgaa

SEQ ID NO: 494929 - DNA, 75 bp, synthetic construct
  source 1..75: mol_type = other DNA
attactctgaaagcgtcggtctccgggattatgaccggtattctgctggcgattgctcgtattgcgggtgaaacc

SEQ ID NO: 494930 - DNA, 75 bp, synthetic construct
  source 1..75: mol_type = other DNA
atggctatggttgaaatgcaaaccactgcggcgctggcggaatcccgccgcaaaatgcaggcgcgtcgccgcctc

SEQ ID NO: 494931 - DNA, 75 bp, synthetic construct
  source 1..75: mol_type = other DNA
caaaatgcaggcgcgtcgccgcctcaaaaaccgtattgcgctgacgctctcaatggcgacgatggccttcggttt

SEQ ID NO: 494932 - DNA, 75 bp, synthetic construct
  source 1..75: mol_type = other DNA
gcgccagcggtgaatcgatgaaccaggctggcgtgcagaatggtgatctgctggtagtggacagggccgaaaaac

SEQ ID NO: 494933 - DNA, 75 bp, synthetic construct
  source 1..75: mol_type = other DNA
aggtgcaggcgttcagcagtgttaatattgccagtggccggccgaccgtggtactgactgataagcggcaggtaa

SEQ ID NO: 494934 - DNA, 75 bp, synthetic construct
  source 1..75: mol_type = other DNA
ggaggactgggagaaccggagctttacctttgacaatctgtcactgaagaacaccgattttggccttggccgtaa

SEQ ID NO: 494935 - DNA, 75 bp, synthetic construct
  source 1..75: mol_type = other DNA
ggtcggggacggaaaggttgtactgaaccagcaggcggacaataaaggacaggtgcaggcgttcagcagtgttaa

SEQ ID NO: 494936 - DNA, 75 bp, synthetic construct
  source 1..75: mol_type = other DNA
attgttgtggacaacggggtgtccgtaaactggcaggttaatggtgttaagggcgataacctgcataaaattgga

SEQ ID NO: 494937 - DNA, 75 bp, synthetic construct
  source 1..75: mol_type = other DNA
cgaaaagctccacgctggattcgttcagaagcaaaggcgggacgctctcctttgtgacagacaactggtcgccga

SEQ ID NO: 494938 - DNA, 75 bp, synthetic construct
  source 1..75: mol_type = other DNA
gctggacacaggtagtggacaacaatgatgcagacggcggtgcatgggccatgacagggtacagccatggtggat

SEQ ID NO: 494939 - DNA, 75 bp, synthetic construct
  source 1..75: mol_type = other DNA
ggtgggggatgggggcagagttttaccgggggcacagcagcacagatgactaccgggatgatttcagcctgtggg

SEQ ID NO: 494940 - DNA, 75 bp, synthetic construct
  source 1..75: mol_type = other DNA
aagccagacagatttgcacagcatcaaatgcacccgctgcacgtggcagacgatatgcacaaggggctgacgtat

SEQ ID NO: 494941 - DNA, 75 bp, synthetic construct
  source 1..75: mol_type = other DNA
cgaaacagaaacctaatcgacgcgctgatggttgccgaggcgtgcggagaggagcatttcacgtcaatcctgatg

SEQ ID NO: 494942 - DNA, 75 bp, synthetic construct
  source 1..75: mol_type = other DNA
agcgcatctaatccatttagtgctgatacttcactaattcacgttcaacctaatgaagatggtggatggcaatta

SEQ ID NO: 494943 - DNA, 75 bp, synthetic construct
  source 1..75: mol_type = other DNA
gaataaggcaacgggtggacataacacactggacctgtcttccctgtttgaccagactgtcacactgaaaaatga

SEQ ID NO: 494944 - DNA, 75 bp, synthetic construct
  source 1..75: mol_type = other DNA
agcaattttaaaggacaatttttcctttatgataattcaagtctcacaataaaagataattttgaaggaggtata

SEQ ID NO: 494945 - DNA, 75 bp, synthetic construct
  source 1..75: mol_type = other DNA
atcatggcggattatcttggcctgattgagaagccgaaagcagaccgcaacgacctcgcaattgctcacatctcc

SEQ ID NO: 494946 - DNA, 75 bp, synthetic construct
  source 1..75: mol_type = other DNA
taaggcaacgggcggacataacacactggacctgtcctccctgtttgaccagactgtcacactgaaaaatgatct

SEQ ID NO: 494947 - DNA, 75 bp, synthetic construct
  source 1..75: mol_type = other DNA
ttgtcgcgccggagtcactggaatatgacgaaaagctccacactggattcgttcagaagcaaaggcgggacgctc

SEQ ID NO: 494948 - DNA, 75 bp, synthetic construct
  source 1..75: mol_type = other DNA
ctattatggagcaggtattgagcagggaaaaatcatcaagatcacacttgatcaggttgtttccggcgatactcc

SEQ ID NO: 494949 - DNA, 75 bp, synthetic construct
  source 1..75: mol_type = other DNA
tttactcgattccgatattcatctgacgagctttgacgatcactatctttatgattcgctgtcgctgcgtatcga

SEQ ID NO: 494950 - DNA, 75 bp, synthetic construct
  source 1..75: mol_type = other DNA
agtgatggtgtgacagatacaacctctccggttgcaccggatacaggtaatacaggaagcactgaggctgatggt

SEQ ID NO: 494951 - DNA, 75 bp, synthetic construct
  source 1..75: mol_type = other DNA
acagctctgtggcccggggttttattgccgtctctgagtttgccagaaaatgtaatttaaaatcagtcgggcgtt

SEQ ID NO: 494952 - DNA, 75 bp, synthetic construct
  source 1..75: mol_type = other DNA
gttcagaagcaaaggcgggacgctctcccttgtgacagacaactggtcgccgaaaacgctgacggtaaacacact

SEQ ID NO: 494953 - DNA, 75 bp, synthetic construct
  source 1..75: mol_type = other DNA
accagaccgtcacactgaaaaatgacctggctctggcatctgcaccggtcggaacttctcacgggtatttctcct

SEQ ID NO: 494954 - DNA, 75 bp, synthetic construct
  source 1..75: mol_type = other DNA
taacagaagtacctggaccggagccggtattattgtggacagggaggcttccgtaaactggcaggttaacggcgt

SEQ ID NO: 494955 - DNA, 75 bp, synthetic construct
  source 1..75: mol_type = other DNA
tcatttataataagcggggagagcttgtcggtacactgaataaagctgccatgccggatttcagtgccgttaaca

SEQ ID NO: 494956 - DNA, 75 bp, synthetic construct
  source 1..75: mol_type = other DNA
aacgggaagacgacgctggatatcatgaacgcaacctttaatggtgatatcagcggtcatgccggctcgcatgtg

SEQ ID NO: 494957 - DNA, 75 bp, synthetic construct
  source 1..75: mol_type = other DNA
atgttaacgcttttgatgacactatggtcagtcgaccaacggcaggggacagtggttcaccagttttcgcctggg

SEQ ID NO: 494958 - DNA, 75 bp, synthetic construct
  source 1..75: mol_type = other DNA
ccagctacggttaccaccgcatcatataaagatatcgctgacccatcacggtttccactattttaccgggttggg

SEQ ID NO: 494959 - DNA, 75 bp, synthetic construct
  source 1..75: mol_type = other DNA
tccatgccagtgaaatgaatcttcgtcggccggacctgagtggaaaacggataactgtggttggtggaggacaga

SEQ ID NO: 494960 - DNA, 75 bp, synthetic construct
  source 1..75: mol_type = other DNA
cggccggaccttagtggaaaacggataaccgtggttggtggaggacagagtggtgcagacctgttccttaatgca

SEQ ID NO: 494961 - DNA, 75 bp, synthetic construct
  source 1..75: mol_type = other DNA
ctggcgatgctgctggaaggtatcgactggcgacagccaagcggctgctgacctccctgaccatgctgtaaatct

SEQ ID NO: 494962 - DNA, 75 bp, synthetic construct
  source 1..75: mol_type = other DNA
gttattagttcagcaggaaattctcgttccgtgtatccagtaatgacttctgccctgcataattcttcatggaaa

SEQ ID NO: 494963 - DNA, 75 bp, synthetic construct
  source 1..75: mol_type = other DNA
atataactggaactttgctggggcaggagcttcgtaaacgtaaaactcctcagaaaaaaattgccattactcagc

SEQ ID NO: 494964 - DNA, 75 bp, synthetic construct
  source 1..75: mol_type = other DNA
ctccgctgggctgctgaagatatgaataacctgtatttcagtcataccgttgaaaatattgatttcgacaaaaaa

SEQ ID NO: 494965 - DNA, 75 bp, synthetic construct
  source 1..75: mol_type = other DNA
gatacgcacgtgcgttccacgtcgttggcgcgataaagatcttattggactttatttttcttcgatgaatattgg

SEQ ID NO: 494966 - DNA, 75 bp, synthetic construct
  source 1..75: mol_type = other DNA
cctttacgctttcgtatgttctatgttgtgaactctggttacagtgctgctaacacaggttactacgtcattttt

SEQ ID NO: 494967 - DNA, 75 bp, synthetic construct
  source 1..75: mol_type = other DNA
attattgtttgccacatccagccctgtatatgcaggactggatgtggatatggttgccaatatcaagaacagtac

SEQ ID NO: 494968 - DNA, 75 bp, synthetic construct
  source 1..75: mol_type = other DNA
ttgattattaccctgtgcgtcctgctgctgaacattctggcgcgtgtggtatttgcgaagaataaacacggttaa

SEQ ID NO: 494969 - DNA, 75 bp, synthetic construct
  source 1..75: mol_type = other DNA
gcgccgctgctgtttaccgcgctctccaaccagttctggagcacggacatgatgcaaccgatcgccaacctgccg

SEQ ID NO: 494970 - DNA, 75 bp, synthetic construct
  source 1..75: mol_type = other DNA
tacaaatccctacagttttgttaactatctggtgaagcacaaaaagttctatcgcttccttacaagcagactacg

SEQ ID NO: 494971 - DNA, 75 bp, synthetic construct
  source 1..75: mol_type = other DNA
tgggatgttatccgcgcgcgcgtgctgaagcgtgacaaaggcctgtgtcagttgtgcctgcatgtcggtgtggtg

SEQ ID NO: 494972 - DNA, 75 bp, synthetic construct
  source 1..75: mol_type = other DNA
ttgatcagttctaaatcgattaaaccggaatctctcgacgatatccttggcgatattctgaaaaaagagacaacg

SEQ ID NO: 494973 - DNA, 75 bp, synthetic construct
  source 1..75: mol_type = other DNA
agcaatacaagccaggacaatcccgtcatcagcgcggttatggttcgaagtgggatgttatccgcgtgcgtgtgt

SEQ ID NO: 494974 - DNA, 75 bp, synthetic construct
  source 1..75: mol_type = other DNA
cacgactgacccgtcaggctattgcgaaagccacaaaagcgaaggctggaaacaatacaagccgggccagtcccg

SEQ ID NO: 494975 - DNA, 75 bp, synthetic construct
  source 1..75: mol_type = other DNA
ataataaacaggttatctaccatgtcgtccgactgacggataatgtgactaatggtatttttgtcaacatgcgct

SEQ ID NO: 494976 - DNA, 75 bp, synthetic construct
  source 1..75: mol_type = other DNA
atatgccgacgttatcattgagccgaaccgaatcgagtatgttgcgaatgtggatggcaggtcagggaaccattc

SEQ ID NO: 494977 - DNA, 75 bp, synthetic construct
  source 1..75: mol_type = other DNA
tttttatggcaattgccaatgttcattttgatgaatatctattggtcagaaaaaatttattgataagttctaaat

SEQ ID NO: 494978 - DNA, 75 bp, synthetic construct
  source 1..75: mol_type = other DNA
atgaatgttttttgtgaatatacttattttaaccctataaataatcaaggtaataaagtgcctcctcgtatcccg

SEQ ID NO: 494979 - DNA, 75 bp, synthetic construct
  source 1..75: mol_type = other DNA
cgatgcagacagtaatctgcagagcctgtgctggccgtgccataaggcgaagacggcccgtgaacggctaaagtg

SEQ ID NO: 494980 - DNA, 75 bp, synthetic construct
  source 1..75: mol_type = other DNA
gatgccgacagcaatctgcagagcctgtgctggccgtgtcataaggcgaagacggcccgtgaacggctgaagtga

SEQ ID NO: 494981 - DNA, 75 bp, synthetic construct
  source 1..75: mol_type = other DNA
gccgcgttcgcggctgccgccataccacgactgacccgtcaggctattgcgaaagccacaaaagcgaaggctgga

SEQ ID NO: 494982 - DNA, 75 bp, synthetic construct
  source 1..75: mol_type = other DNA
tcatccctaaagcgcatggcggcacagatgccgacagcaatctgcagagtttgtgctggccgtgccataaggcga

SEQ ID NO: 494983 - DNA, 75 bp, synthetic construct
  source 1..75: mol_type = other DNA
ggatgcagacagtaacctgcagagtctgtgctggccctgtcataaagcaaaaacagcgtgcgaacgcatcaattg

SEQ ID NO: 494984 - DNA, 75 bp, synthetic construct
  source 1..75: mol_type = other DNA
gaaattttatgcgcgaatgcaaaaaatcaatacttccgtgcctataacatccgggcaagtcaccagtaatgtctt

SEQ ID NO: 494985 - DNA, 75 bp, synthetic construct
  source 1..75: mol_type = other DNA
gtgatcccatcaagggaatcactgattttaaaaacccccgaatattttatgaatcgttttaaaatagatattcgc

SEQ ID NO: 494986 - DNA, 75 bp, synthetic construct
  source 1..75: mol_type = other DNA
ccgctttcactgatggtgcgtttaaaccagttattaccgagccacagccgcaaaatgccagccagattaagcgcg

SEQ ID NO: 494987 - DNA, 75 bp, synthetic construct
  source 1..75: mol_type = other DNA
ttggcgtgcgactggcgaaacaccttccggcgcgacatcatcatcgatatttgctgtttccgtaagcacgggcac

SEQ ID NO: 494988 - DNA, 75 bp, synthetic construct
  source 1..75: mol_type = other DNA
tcaggtataagtgacttcaaaatacatagctacattattaaaacaagtgaatatccggaggagtttttttccaat

SEQ ID NO: 494989 - DNA, 75 bp, synthetic construct
  source 1..75: mol_type = other DNA
aaaataatagaatgaaactcttgagacgtgttcagatctatcttgtcattccgttgtctattgctttactggtgc

SEQ ID NO: 494990 - DNA, 75 bp, synthetic construct
  source 1..75: mol_type = other DNA
tcataaaattactactgatgaagtctatctggaaaaatgggatcgtttgcttctcagtacaggtgcatctccggt

SEQ ID NO: 494991 - DNA, 75 bp, synthetic construct
  source 1..75: mol_type = other DNA
gttattgcaccgattacaacgggcactggaattaaaataaaaatattagaagctgtacaaaaaggtattcctgta

SEQ ID NO: 494992 - DNA, 75 bp, synthetic construct
  source 1..75: mol_type = other DNA
gaacatattactgcaagtataattccattcctgaatattacatatatagactccttaattgacaaccttacccga

SEQ ID NO: 494993 - DNA, 75 bp, synthetic construct
  source 1..75: mol_type = other DNA
gtgtttttaggcgcagagccaactttcgaaagactctctttgtctgttgagaaagaaccaccagaagaattttcc

SEQ ID NO: 494994 - DNA, 75 bp, synthetic construct
  source 1..75: mol_type = other DNA
caggatatgcgctcatcacgctactgcacggatattgccaaaatggtggcggctccggttatccatgttaatggt

SEQ ID NO: 494995 - DNA, 75 bp, synthetic construct
  source 1..75: mol_type = other DNA
gccacccgatgtggtcgcacatcctaccattaaacggcaactggcgttacgccaggatatggccgcaggtactca

SEQ ID NO: 494996 - DNA, 75 bp, synthetic construct
  source 1..75: mol_type = other DNA
agacaccttccggcgcgacatcatcatcgatatttgctgcttccgtaagcacggacacaacgaaagcgatgagcc

SEQ ID NO: 494997 - DNA, 75 bp, synthetic construct
  source 1..75: mol_type = other DNA
atccacagcataaactttctaaaagaattagttctgcatttgtcgcatccttgatgatattattagttatatcga

SEQ ID NO: 494998 - DNA, 75 bp, synthetic construct
  source 1..75: mol_type = other DNA
gcttatatggtggcatatatcggcttcggaattttatctatcggcatgattgtttatcttattttctatcgttaa

SEQ ID NO: 494999 - DNA, 75 bp, synthetic construct
  source 1..75: mol_type = other DNA
cgcctttgaccatcttgacgatatgcaccaagcctttttgcagcaaaacttcgatctgcccccaggcagcgtacc

SEQ ID NO: 495000 - DNA, 75 bp, synthetic construct
  source 1..75: mol_type = other DNA
ctactggcaccgctttgctcctgaaagccgcatgatgcgtaaagtcactgatgcgttgctcgattatggtcacaa

SEQ ID NO: 495001 - DNA, 75 bp, synthetic construct
  source 1..75: mol_type = other DNA
agaaaaaaacaggtctgttcctggcattcatattcactacttccttttcggccttcgccgggcaggatattaatt

SEQ ID NO: 495002 - DNA, 75 bp, synthetic construct
  source 1..75: mol_type = other DNA
ttgccgtttttttccttatcccgatattttgttttcgcgaagcgtggaaaggctggcatgttggcgctattgata

SEQ ID NO: 495003 - DNA, 75 bp, synthetic construct
  source 1..75: mol_type = other DNA
aacgggttaaaaatgcaccggaaccggtgtatgtctggcgagcaaaaaatcccggactcttcttcgcttatatgg

SEQ ID NO: 495004 - DNA, 75 bp, synthetic construct
  source 1..75: mol_type = other DNA
gcgttactacatccagcccaaacgtaaaaggcacccgtcaaaaaggacggttcgcgtcgaaactcagcctggata

SEQ ID NO: 495005 - DNA, 75 bp, synthetic construct
  source 1..75: mol_type = other DNA
tgctgagcatacctacgaatcactggttcgcgccttccgctacttcggtggttgatcctaccctcgtaatatgga

SEQ ID NO: 495006 - DNA, 75 bp, synthetic construct
  source 1..75: mol_type = other DNA
atgtcttcgccgcaccaaaacaggatgctgagcatacctacgaatcactggttcgcgccttccgctacttcggtg

SEQ ID NO: 495007 - DNA, 75 bp, synthetic construct
  source 1..75: mol_type = other DNA
ctaacggtgataatactctacgtttccagtcatgggttaaacaggcaagcactaaaactgctgccgagggtgact

SEQ ID NO: 495008 - DNA, 75 bp, synthetic construct
  source 1..75: mol_type = other DNA
aaaaagatctggatatcaagttagttaactgcgatgccacagaaatcggaaaactgaccaatggtgtgaaagttt

SEQ ID NO: 495009 - DNA, 75 bp, synthetic construct
  source 1..75: mol_type = other DNA
taattgatgcaccatgcggtattgatccggactcagcagatcagactattgacttcggtcagatttctaaatcac

SEQ ID NO: 495010 - DNA, 75 bp, synthetic construct
  source 1..75: mol_type = other DNA
ttgcgtccgtgaaagaagcaccaattggtatagaggctactccccaccgtgtcaccgaatacctgaataaggtgc

SEQ ID NO: 495011 - DNA, 75 bp, synthetic construct
  source 1..75: mol_type = other DNA
acattttcacggggtcgcatgttgaagtgtcgatctctaaccagatagacaatcaggtcgactttttcgatccta

SEQ ID NO: 495012 - DNA, 75 bp, synthetic construct
  source 1..75: mol_type = other DNA
acccgcgattctgtgtaccagaaccagcaagaaacggaacagaacgaccagaaagcggaacaaaacagcccaaat

SEQ ID NO: 495013 - DNA, 75 bp, synthetic construct
  source 1..75: mol_type = other DNA
gcggcctgtatttgcgacctgctaaggacagaccgcaaatacaacctggatgtgtatagctatatttatgctgaa

SEQ ID NO: 495014 - DNA, 75 bp, synthetic construct
  source 1..75: mol_type = other DNA
attcgaaggcgtaccccacaatgcacttgatgatgcacgtcaccaggcaaaacaagtttcagcaatctggcaaaa

SEQ ID NO: 495015 - DNA, 75 bp, synthetic construct
  source 1..75: mol_type = other DNA
attcagtaaagctatcgatctggaaacctccggcggaatcatcgaccgtaaaacaataaagtggtgggcgaaaca

SEQ ID NO: 495016 - DNA, 75 bp, synthetic construct
  source 1..75: mol_type = other DNA
aaggcggtcatccggggttgcaaaatgctgaacaacgcacggaacgtcagcgttccgatcaccgttgggcgcagc

SEQ ID NO: 495017 - DNA, 75 bp, synthetic construct
  source 1..75: mol_type = other DNA
gtatggcgaatggctatccacctgctcgtcgcgtttgtggttggcgttctgggggctggcgtggctgcgtcactg

SEQ ID NO: 495018 - DNA, 75 bp, synthetic construct
  source 1..75: mol_type = other DNA
tgggcctgggattatccaatatcacaagcttttatggcggcaaaaaatgcttcaccatggaaggatactgcgtta

SEQ ID NO: 495019 - DNA, 75 bp, synthetic construct
  source 1..75: mol_type = other DNA
atatcgccctcattaacctggtctggtgcccctgagggcactaaaagtttcgccgtaactgtttatgatccagat

SEQ ID NO: 495020 - DNA, 75 bp, synthetic construct
  source 1..75: mol_type = other DNA
catgtcattcctcgcgccggacataacgcgcatcgggaaaatcccgctggcgtaatcgcaagtctggcgcagatc

SEQ ID NO: 495021 - DNA, 75 bp, synthetic construct
  source 1..75: mol_type = other DNA
cgttcggatcaccgttgggcgcagcgttttcgcacagaaccattaacggcggtctttgccgactggtatcaacaa

SEQ ID NO: 495022 - DNA, 75 bp, synthetic construct
  source 1..75: mol_type = other DNA
atggttattcagcaacaaagcttccgccctggaagctgcggcgtgtatttgcgacctgctaaggacagaccgcaa

SEQ ID NO: 495023 - DNA, 75 bp, synthetic construct
  source 1..75: mol_type = other DNA
cgctggtgttcagttctcgcgtcgataactacccgctgattttgtgtgaggcgttatcgattggcgtgccggtga

SEQ ID NO: 495024 - DNA, 75 bp, synthetic construct
  source 1..75: mol_type = other DNA
catgtgctgcacagctactggttaaatcttaagagcgtggtgcgcttttgcgaaaaggtgaaaaaccataaaccg

SEQ ID NO: 495025 - DNA, 75 bp, synthetic construct
  source 1..75: mol_type = other DNA
gatgaaagcggtagaggataaaacacctttacgcttccgtatgttctatgttgtgaactctggctatagtgctgc

SEQ ID NO: 495026 - DNA, 75 bp, synthetic construct
  source 1..75: mol_type = other DNA
acaaaatcgaactgcatacctttggtaagttctcgccgttcaccgctggcaacgtggttaatcacggctttgaaa

SEQ ID NO: 495027 - DNA, 75 bp, synthetic construct
  source 1..75: mol_type = other DNA
ccgctggtaacgtggttaatcacggctttgaaaccgacaaacgtaagctgatgagcgcgctcaatcagatggatg

SEQ ID NO: 495028 - DNA, 75 bp, synthetic construct
  source 1..75: mol_type = other DNA
cgccgcggatgaccgcgatggcgaatattgccctgtttcgtctgtttaatcgcgatctgtttggcaatttcaatg

SEQ ID NO: 495029 - DNA, 75 bp, synthetic construct
  source 1..75: mol_type = other DNA
tgccaactggctaatccctgcgcatggcgcactgggcgcagcacaggcctatatggcaacctatatcgtctattt

SEQ ID NO: 495030 - DNA, 75 bp, synthetic construct
  source 1..75: mol_type = other DNA
cttacatcatgatgcgtaaactgctggcggcgcagtatagctgggatgaagtggggatctggcaaggggtgagca

SEQ ID NO: 495031 - DNA, 75 bp, synthetic construct
  source 1..75: mol_type = other DNA
caatccaggagattgcagcacacacactacgtcaacatctgaacgaagctatggctgaatctgcaaagaaagaaa

SEQ ID NO: 495032 - DNA, 75 bp, synthetic construct
  source 1..75: mol_type = other DNA
ggcatatatggcaacttatatcgtctatttttctctttgttgtggcgtttttttactctggcgtaggcgggcatg

SEQ ID NO: 495033 - DNA, 75 bp, synthetic construct
  source 1..75: mol_type = other DNA
ggcggaagtcagccagttcactttattgatggtatttgcccactggctaatccctgcgcatggtgcactgggcgc

SEQ ID NO: 495034 - DNA, 75 bp, synthetic construct
  source 1..75: mol_type = other DNA
tgggcgcttatgtctttggttatctggtgatcgccaaagcttcactgcggttttatattctggcggaagtcagcc

SEQ ID NO: 495035 - DNA, 75 bp, synthetic construct
  source 1..75: mol_type = other DNA
ttgaattccctactccgtttacctacaaagtaatggggcaggcgttacctgagctggttgatcaggtggttgaag

SEQ ID NO: 495036 - DNA, 75 bp, synthetic construct
  source 1..75: mol_type = other DNA
cggaaagctttttgaaagtgtcactggcggcacttactgcgccgttttcttccgcgttacgtcagggattacagg

SEQ ID NO: 495037 - DNA, 75 bp, synthetic construct
  source 1..75: mol_type = other DNA
ggggcgtttaccggctcgcgacgcggaggacgcgccgggctgtttgaaatcgcccacggtggcacgctgtttctt

SEQ ID NO: 495038 - DNA, 75 bp, synthetic construct
  source 1..75: mol_type = other DNA
ctggagaaatttaaaggcgataaaacagcagcggcgaattatttaggcataagccggacgacgttctggcggcgg

SEQ ID NO: 495039 - DNA, 75 bp, synthetic construct
  source 1..75: mol_type = other DNA
cattaaccgtaggattttcgcaggtcggatcggaatccggctggcgcgccgcagaaaccaatgtggcgaaaagtg

SEQ ID NO: 495040 - DNA, 75 bp, synthetic construct
  source 1..75: mol_type = other DNA
gttactgccgacaacatcctcgaaggcaagttgattggtgactggctggtaaaagaagtgaatggcaaaccatgc

SEQ ID NO: 495041 - DNA, 75 bp, synthetic construct
  source 1..75: mol_type = other DNA
agcgctggtggcgtttcaaaaaacctttaatctgcgcctcgatcaacgtagctacattaccgaagaagacgcgcg

SEQ ID NO: 495042 - DNA, 75 bp, synthetic construct
  source 1..75: mol_type = other DNA
cttccaccggctacacccaatggccaattgccatcgagtttgtcctcaaccgtggtcgtatggtgctgtttgata

SEQ ID NO: 495043 - DNA, 75 bp, synthetic construct
  source 1..75: mol_type = other DNA
ctgtcacttcgatgactcccatatcaaaatgatgctgcgcaaaggctttgactttgaagatgcccgtgattactg

SEQ ID NO: 495044 - DNA, 75 bp, synthetic construct
  source 1..75: mol_type = other DNA
cggtctgctgaccgaggcgcaggcttacgaaattgtcgaatgtttgtggtttaaactggcagaactgagtgaagt

SEQ ID NO: 495045 - DNA, 75 bp, synthetic construct
  source 1..75: mol_type = other DNA
tgctggctctaacggcgcatatcttaaaagccgcctgtcagtgccagttattttgattaaaccgagcggctacga

SEQ ID NO: 495046 - DNA, 75 bp, synthetic construct
  source 1..75: mol_type = other DNA
ttcatcgggaatattttgcccgccacgatgcgcgacagggcaaaaagtcgcatccgtttgttgccgtcaactgcg

SEQ ID NO: 495047 - DNA, 75 bp, synthetic construct
  source 1..75: mol_type = other DNA
gactgggagagcgccttcacggatttgcagcatatgttcgagctgacacgacaggagaacgggcaactgagggaa

SEQ ID NO: 495048 - DNA, 75 bp, synthetic construct
  source 1..75: mol_type = other DNA
tctctttgtttacttcaggctattcaatggctcatactccgcgtgagatacagagaaacaattatatttctgcaa

SEQ ID NO: 495049 - DNA, 75 bp, synthetic construct
  source 1..75: mol_type = other DNA
ctgcgttacgacggcaaaactaaccagcaactggtacgcgagatgatggcgctgggcgacaaaatcgaactgcat

SEQ ID NO: 495050 - DNA, 75 bp, synthetic construct
  source 1..75: mol_type = other DNA
tggagcgttaccggacgctgcgcctttaccgacggttgcgaaggctggaaaacgggctgccagaaatgcccgacc

SEQ ID NO: 495051 - DNA, 75 bp, synthetic construct
  source 1..75: mol_type = other DNA
atgaatattctgcaatttaatgtgcgcctagcggaaggcggggcggctggagtggcgttagatctccaccagcgt

SEQ ID NO: 495052 - DNA, 75 bp, synthetic construct
  source 1..75: mol_type = other DNA
gccatcttgctggcgccgtgcatggcgtttgttcgcccctgggcggtcgagaaatttgcccaggtctgggattgc

SEQ ID NO: 495053 - DNA, 75 bp, synthetic construct
  source 1..75: mol_type = other DNA
atgtcagaaataaaatcgctggtcactgctgaagcagtgaaggatgttctgcgctctgaagaagtcaggagcgca

SEQ ID NO: 495054 - DNA, 75 bp, synthetic construct
  source 1..75: mol_type = other DNA
cgcgatctgtttggcaatttcaatgagttatatcgcaccattactcgcacaccgggtccggtggtcctgcatttt

SEQ ID NO: 495055 - DNA, 75 bp, synthetic construct
  source 1..75: mol_type = other DNA
caaactatggcttacaaggaagccaaccctctgatgttcgtgcgcataatcgcgctgccaacggcgcgtgtgatg

SEQ ID NO: 495056 - DNA, 75 bp, synthetic construct
  source 1..75: mol_type = other DNA
tcgcggagatttctcctccggtagtcatctcgtcactttgtattttcaacctcatcctttcttttcatgtgttac

SEQ ID NO: 495057 - DNA, 75 bp, synthetic construct
  source 1..75: mol_type = other DNA
gtttacgtgtccgaaatattcaggaaaacggtcgttctgaatggatcaaggtatattccaccaatgagaaaccga

SEQ ID NO: 495058 - DNA, 75 bp, synthetic construct
  source 1..75: mol_type = other DNA
ggcgtaccggcagagccaccgactgaagcgggagataccaccgcagagaacggtaaacctcagcctgaattaccg

SEQ ID NO: 495059 - DNA, 75 bp, synthetic construct
  source 1..75: mol_type = other DNA
gttccggagccggaaggtatcgcgggtgacgggagtgcttcagatggcggtgaacccacacctgacagcgacatg

SEQ ID NO: 495060 - DNA, 75 bp, synthetic construct
  source 1..75: mol_type = other DNA
aagatgaaatggtcgggatcgtccgattcggtaaagaggattgcgtacgttcggcactttgccaacgtacgctac

SEQ ID NO: 495061 - DNA, 75 bp, synthetic construct
  source 1..75: mol_type = other DNA
ttatacgcaactgaaatcgatctccgatgaagaggtgcgcacggcggttatggccgtcggcaagtcggtgccgct

SEQ ID NO: 495062 - DNA, 75 bp, synthetic construct
  source 1..75: mol_type = other DNA
ggacggggaaatgagaaatccccgacagaaacggttgattacagtgtgttgcaacgagctttaagcgcagaagtc

SEQ ID NO: 495063 - DNA, 75 bp, synthetic construct
  source 1..75: mol_type = other DNA
acgccacagcagatatttccggtgtcgtcgatgtggggctacctggcgaatcgggcgcgctatgagttagccaac

SEQ ID NO: 495064 - DNA, 75 bp, synthetic construct
  source 1..75: mol_type = other DNA
acgccagggcagatatttccggtatcgtcgatgtggggctatctggcaaatcgggcacgtcatgagttagctaac

SEQ ID NO: 495065 - DNA, 75 bp, synthetic construct
  source 1..75: mol_type = other DNA
ttacagacggcgcagaacaccattagtcgcgactttacgctgcgttttgccgagctggaatccaccctttgccgg

SEQ ID NO: 495066 - DNA, 75 bp, synthetic construct
  source 1..75: mol_type = other DNA
acggcacaaaccaaaatcagccgtgacttcacgctgcgttttactgaactggaatcaaccctttgccgggtgtta

SEQ ID NO: 495067 - DNA, 75 bp, synthetic construct
  source 1..75: mol_type = other DNA
ttgcaaccgaaggtcggatcttacgtcagggtgattttggtctgggtgctggtgtaaatccattcactggtccga

SEQ ID NO: 495068 - DNA, 75 bp, synthetic construct
  source 1..75: mol_type = other DNA
ttactggaaaaaatgcctctctctatacccggagacgatgcgccacagctgactttaccctggagtcagcctaat

SEQ ID NO: 495069 - DNA, 75 bp, synthetic construct
  source 1..75: mol_type = other DNA
tgaaatgcaggactatattccggaaaaccgctgttaccggaaaaagaagccatcgtggataacggtgcccgcttt

SEQ ID NO: 495070 - DNA, 75 bp, synthetic construct
  source 1..75: mol_type = other DNA
atgcttaaccagcagctggcacgcgcctcggcggtactggcggtgctggattatacgcaactgaaatcgatctcc

SEQ ID NO: 495071 - DNA, 75 bp, synthetic construct
  source 1..75: mol_type = other DNA
ggagtttgtccatctggcggggctggagagttatcccggtcagttgacgttactggatacccccgggccaaatga

SEQ ID NO: 495072 - DNA, 75 bp, synthetic construct
  source 1..75: mol_type = other DNA
ctggaaatagataaagatatgcgtgcgcttatgcagcggatcgaaaatggcgtcgctttcgaaaaatattatctg

SEQ ID NO: 495073 - DNA, 75 bp, synthetic construct
  source 1..75: mol_type = other DNA
aacaacgctgggtggaggattttgcccatgccgcgcttggcaggcgctggtgcaatgccgatctggcagatatcg

SEQ ID NO: 495074 - DNA, 75 bp, synthetic construct
  source 1..75: mol_type = other DNA
ctggtgctggaaatcatggatgaaatgcgtgaaccaattcagagcggaaccatcgacacatcgagtcaggcgatg

SEQ ID NO: 495075 - DNA, 75 bp, synthetic construct
  source 1..75: mol_type = other DNA
atgaaacaggatatcgaagcgagcgttatcggtggcctgctgattggtggattaacaccgactgccagtgacgtt

SEQ ID NO: 495076 - DNA, 75 bp, synthetic construct
  source 1..75: mol_type = other DNA
ttgtgaactctggctatagtgctgctaacactggttactatgtcatctatgatgcttacgtcacatcacataaaa

SEQ ID NO: 495077 - DNA, 75 bp, synthetic construct
  source 1..75: mol_type = other DNA
gatgaacttgtaaaacgtctctcagccatcagaaagccccgtgacgaggttaaacctgtacggttaggggaaatc

SEQ ID NO: 495078 - DNA, 75 bp, synthetic construct
  source 1..75: mol_type = other DNA
tcatcatggtggattatcttggcctgattgagaagccgaaagcagaccgcaacgacctcgcaattgctcacatct

SEQ ID NO: 495079 - DNA, 75 bp, synthetic construct
  source 1..75: mol_type = other DNA
ttatcggtggcctgctgattggtggattaactccaactgccagtgacgttctggcaacgcttgagccggaagcgt

SEQ ID NO: 495080 - DNA, 75 bp, synthetic construct
  source 1..75: mol_type = other DNA
gagaacaggtacaacatgtgctgaatgataatcccttctccggtcacctgtttatcttccgtggccgacggggtg

SEQ ID NO: 495081 - DNA, 75 bp, synthetic construct
  source 1..75: mol_type = other DNA
ggcaaaatggtgaaaatcctttgggccgatcgtgatggcttatgcctcttcgccaaacggctggagagggggcac

SEQ ID NO: 495082 - DNA, 75 bp, synthetic construct
  source 1..75: mol_type = other DNA
atgttcttttttaattcaaatgatgttttttatctttctgacgttttaaacgtatcggaagacgttatttattct

SEQ ID NO: 495083 - DNA, 75 bp, synthetic construct
  source 1..75: mol_type = other DNA
atgtccgacatctaccaaatcacgttaaccacccaaacaggcgaaacctttacgggcaagacgtcacgacgtcag

SEQ ID NO: 495084 - DNA, 75 bp, synthetic construct
  source 1..75: mol_type = other DNA
taaccacccaaacaggcgaaaccttcactggcaagatgtcacgacgtcagcctgagctggttaatggctttgtgc

SEQ ID NO: 495085 - DNA, 75 bp, synthetic construct
  source 1..75: mol_type = other DNA
taaccacccaaacagacgaaaccttcacaggcaagatgtcacgacgtcagcctgagttggttaacggttttgtgc

SEQ ID NO: 495086 - DNA, 75 bp, synthetic construct
  source 1..75: mol_type = other DNA
ccgtcagtgaaatgcaggactatattccggaaaaccgctgttaccgtgcaaccctggagtttcaggtcacggtgt

SEQ ID NO: 495087 - DNA, 75 bp, synthetic construct
  source 1..75: mol_type = other DNA
tgatcgaccttgaaaccatgggaaaaaatcccgatgccccgattatctcaataggtgcaatatttttcgatccgc

SEQ ID NO: 495088 - DNA, 75 bp, synthetic construct
  source 1..75: mol_type = other DNA
gcccgtggcgctactacaacgatcgcgatgtacgcacaatcgttgagctggggaaagccatagacttcgatgcca

SEQ ID NO: 495089 - DNA, 75 bp, synthetic construct
  source 1..75: mol_type = other DNA
ggcagatcccttaattacggtgaacggtcatcgcattatcacatccaccagcaggacgtgtgaccatctaatgat

SEQ ID NO: 495090 - DNA, 75 bp, synthetic construct
  source 1..75: mol_type = other DNA
tttgttgaggggattagcgaccctaatgatccgaaatgggtcaaggggatccagactcgcgattctgtgaaccag

SEQ ID NO: 495091 - DNA, 75 bp, synthetic construct
  source 1..75: mol_type = other DNA
taataaaaccatcgatctggaaactgctggcggagtcattgatcgggacgcgatcaagtggtggctgaagcaatc

SEQ ID NO: 495092 - DNA, 75 bp, synthetic construct
  source 1..75: mol_type = other DNA
ggaacaaaaccgatcgcagtccgaatttagtacacaccctcgacacactggatgtggagattgcagcagccacac

SEQ ID NO: 495093 - DNA, 75 bp, synthetic construct
  source 1..75: mol_type = other DNA
atgatcgaacactctggtggtgcagagtcactggctaattatttcagtcgcaagttaggtgacaaacgaactatc

SEQ ID NO: 495094 - DNA, 75 bp, synthetic construct
  source 1..75: mol_type = other DNA
gctaattgttatccctatcgcgattattatggcgggtacggtttcggcaacactaatgccagcctcgcatcccct

SEQ ID NO: 495095 - DNA, 75 bp, synthetic construct
  source 1..75: mol_type = other DNA
atgatcaggacgctacggggaaacttgctggttatcgtaaactggaaccgacgacactcacgttaaaccgtgttc

SEQ ID NO: 495096 - DNA, 75 bp, synthetic construct
  source 1..75: mol_type = other DNA
aatgctggcagcgctcaggaccacgccagcgatagtgaaactggcgagacggcagatcccttaattacggtgaac

SEQ ID NO: 495097 - DNA, 75 bp, synthetic construct
  source 1..75: mol_type = other DNA
gacatcccctgcccgtggcgctaccacaacgatcgcgatgtacgcacaatcgttgagctgggaaaaacaatcgac

SEQ ID NO: 495098 - DNA, 75 bp, synthetic construct
  source 1..75: mol_type = other DNA
atttggtctgcctgttgctgggatcatgctgaccgttcacgtagctgtgccgccacatcctggccccgtcgccgc

SEQ ID NO: 495099 - DNA, 75 bp, synthetic construct
  source 1..75: mol_type = other DNA
aaacagcctgaaccagaagagcaacaagaaccggaaaaagtctgtaccgcctgcggtcagaccggcggcggcaac

SEQ ID NO: 495100 - DNA, 75 bp, synthetic construct
  source 1..75: mol_type = other DNA
acatgatgggtcaggtgctggaagatcataaactgccgcgcggattcgctgacgccactcatgaatccattgaga

SEQ ID NO: 495101 - DNA, 75 bp, synthetic construct
  source 1..75: mol_type = other DNA
cgccaaatggcacggtactgttgcgcgtaggtaagagtaactatcgtcgcgatgacggcgtacacgtcaccacca

SEQ ID NO: 495102 - DNA, 75 bp, synthetic construct
  source 1..75: mol_type = other DNA
aaacaggggaaatcgggccagtattttatatcgttatcagtctgactgacgcaatgaatacaggggctgttcctg

SEQ ID NO: 495103 - DNA, 75 bp, synthetic construct
  source 1..75: mol_type = other DNA
cgatggtgtaccgatttttggtctttaccagaaatttgctaacaaagtgaccgttgagtggaaagaaaacggcaa

SEQ ID NO: 495104 - DNA, 75 bp, synthetic construct
  source 1..75: mol_type = other DNA
actggatgccggcgcagtttgcgttaacgttgatctggcccacgcgggtcagcaggcaaaactggaaccggatac

SEQ ID NO: 495105 - DNA, 75 bp, synthetic construct
  source 1..75: mol_type = other DNA
gatgacggcatacacgtcacgaccattcgtgatcacattcttgaagtcgataaatcgggtcgcgttgtcgatgta

SEQ ID NO: 495106 - DNA, 75 bp, synthetic construct
  source 1..75: mol_type = other DNA
cgacatacaccggaaaaagatatcctggaagaagttaaccgcgagctggctgccgggcaagaaacagaagaagaa

SEQ ID NO: 495107 - DNA, 75 bp, synthetic construct
  source 1..75: mol_type = other DNA
gatcgaataccgcttgatgatgcgcttttacaattacgggaatttatagacgaaaactccggtgagttttttgtt

SEQ ID NO: 495108 - DNA, 75 bp, synthetic construct
  source 1..75: mol_type = other DNA
tgtggcaccatctgatgatcgaccttgaaacgatgggaactaacagcaatgcccccatcgtagtgattggtgctg

SEQ ID NO: 495109 - DNA, 75 bp, synthetic construct
  source 1..75: mol_type = other DNA
atgagcactgataaagaagaaattgcactatattacgaagccaaaaatgacaaagtcagaaaacgtcttgggatt

SEQ ID NO: 495110 - DNA, 75 bp, synthetic construct
  source 1..75: mol_type = other DNA
cagacctggggctaatgactgcttttttcgaagcatacctgggcgctgactacaccgatcgcggtctgctgacaa

SEQ ID NO: 495111 - DNA, 75 bp, synthetic construct
  source 1..75: mol_type = other DNA
ttgcaaccgagggtcgtctgctccgtcagggcgatatgggcgttggtgcaggaattagcccgttcactggtccta

SEQ ID NO: 495112 - DNA, 75 bp, synthetic construct
  source 1..75: mol_type = other DNA
gtgttgtcaggatgttcctttctctgctgaaatctcagggtgaagggaaaaaacggtcgtggtggctactgttat

SEQ ID NO: 495113 - DNA, 75 bp, synthetic construct
  source 1..75: mol_type = other DNA
cactcagtgatcgctggaacaatatcctgccatcaggaacacaggattacggacaggccgtagcctcgtggaatc

SEQ ID NO: 495114 - DNA, 75 bp, synthetic construct
  source 1..75: mol_type = other DNA
tgtacgagctggccaccacacaggatgtggtgatcgcctccggcgcggccagcgcacttcttccggttaaggcca

SEQ ID NO: 495115 - DNA, 75 bp, synthetic construct
  source 1..75: mol_type = other DNA
gccgggtggcatgatatccgccggaggtcacagcggacatgcggaaggaacgactcaggccgcagtggcagaagg

SEQ ID NO: 495116 - DNA, 75 bp, synthetic construct
  source 1..75: mol_type = other DNA
caggattacggacaggccgtagcctcgtggaatcagtatgctcaggacaataatctgacaccggagcaggttcaa

SEQ ID NO: 495117 - DNA, 75 bp, synthetic construct
  source 1..75: mol_type = other DNA
accggcagtgaaattcagcggggtatccaggccgcgacagcggcgcttcaggggctggcggggggtaatttagca

SEQ ID NO: 495118 - DNA, 75 bp, synthetic construct
  source 1..75: mol_type = other DNA
tggatgcaggtgtgatcagtgatccgtttattgcagccgtaaatgattacgtgatggggcagggaaaccacggac

SEQ ID NO: 495119 - DNA, 75 bp, synthetic construct
  source 1..75: mol_type = other DNA
tttatcgcctgattgtggatgcgacgacgatgatccccgcaggtattgcgcagctatcgatcgcctgtacggctg

SEQ ID NO: 495120 - DNA, 75 bp, synthetic construct
  source 1..75: mol_type = other DNA
cagggcaagattacgaaagcccgctccccgcaaggactgacgccagatagtttctatccatggctgcttttcgca

SEQ ID NO: 495121 - DNA, 75 bp, synthetic construct
  source 1..75: mol_type = other DNA
tctggctttttcgctggcggatatctccagtgaactgagcgtgccgcgcctgaagtccctggtggtgagaatcga

SEQ ID NO: 495122 - DNA, 75 bp, synthetic construct
  source 1..75: mol_type = other DNA
tttaccgcctgatagttgacgaaacaacgattattccggctggtattgagcgtttatcgctcgcgtgtactgctg

SEQ ID NO: 495123 - DNA, 75 bp, synthetic construct
  source 1..75: mol_type = other DNA
aacgtggccctggtcgcggtttggattttcaaaactgggcgaggaaattcacgaatcatttccggcgctgtcatc

SEQ ID NO: 495124 - DNA, 75 bp, synthetic construct
  source 1..75: mol_type = other DNA
atggtggagatgaacgatgtgttcgctaatctgtataaaacactggagaaaaacggtcagcttgataacacgctg

SEQ ID NO: 495125 - DNA, 75 bp, synthetic construct
  source 1..75: mol_type = other DNA
atgacatcggaaaatccgttactggcgctgcgcgagaagataagcgcgctggatgaaaaattgctggcgttactg

SEQ ID NO: 495126 - DNA, 75 bp, synthetic construct
  source 1..75: mol_type = other DNA
ccagcagcatctcaataaaattaatccgcactctgcccgcattgcttttcttggcccgaaaggttcctactcaca

SEQ ID NO: 495127 - DNA, 75 bp, synthetic construct
  source 1..75: mol_type = other DNA
acagtggtggtggcctgtctgtctacgggggcgccagtgcagttgacattacccagaacagcggtggagctattt

SEQ ID NO: 495128 - DNA, 75 bp, synthetic construct
  source 1..75: mol_type = other DNA
gcgtattgaggcaaaccagcgacaaaacttcacccgatttgtggtgctggcacgtaaagccattaatgtgtctga

SEQ ID NO: 495129 - DNA, 75 bp, synthetic construct
  source 1..75: mol_type = other DNA
tgaaagagttaggtgaaattacccgttcgatgaaggtattaggctgttacccaagtgagaatgtagtgcctgttg

SEQ ID NO: 495130 - DNA, 75 bp, synthetic construct
  source 1..75: mol_type = other DNA
tgacgctgaccatcgatcactgcctgctggtttctggtactacagatttatcaaccatcaccacagtctacagcc

SEQ ID NO: 495131 - DNA, 75 bp, synthetic construct
  source 1..75: mol_type = other DNA
atgcgccaactatatatgcgaatgcacaaaatgcattgcagggaatagcttgtgtaaggcatgaaggtattgaga

SEQ ID NO: 495132 - DNA, 75 bp, synthetic construct
  source 1..75: mol_type = other DNA
ttcacgcttctccggtgatggtgttctaatcagtaatggtgttcgcatttctgttaatccgccgatgcaaagttt

SEQ ID NO: 495133 - DNA, 75 bp, synthetic construct
  source 1..75: mol_type = other DNA
aaccgtaaggccgagcactacttcctcaacggtaaactcgctgctgtgcgtatggatgagttcaagtatcacgtc

SEQ ID NO: 495134 - DNA, 75 bp, synthetic construct
  source 1..75: mol_type = other DNA
agttacccagaacagtggtggggctgtcgtcaccaataccagtgcagtcgtgagtggtaccaacgataacggcag

SEQ ID NO: 495135 - DNA, 75 bp, synthetic construct
  source 1..75: mol_type = other DNA
tcgtgcaccagggggcgtatggggccgttataccgggtcagacaaccgcattagcggcggggccagctcgggcta

SEQ ID NO: 495136 - DNA, 75 bp, synthetic construct
  source 1..75: mol_type = other DNA
ctggagaatggtggctcattaactgtactcaatgggcatcaggccacaggtaccactattaacagtggtggagat

SEQ ID NO: 495137 - DNA, 75 bp, synthetic construct
  source 1..75: mol_type = other DNA
gaatcgcccgatcccgcatggcaaagtcatctcacccgctcgggcgattttatctgggttgaatatgaaaacctg

SEQ ID NO: 495138 - DNA, 75 bp, synthetic construct
  source 1..75: mol_type = other DNA
cctggcgcactatagccgcgaccttggctaccgggtcgttgaacgcgaaaaggcagatatcgatacgcttaaggc

SEQ ID NO: 495139 - DNA, 75 bp, synthetic construct
  source 1..75: mol_type = other DNA
tccgtaggtttcgacttgctgattggcggtaagctgactcccaaagatccacagattagcaccgttgcggcagcc

SEQ ID NO: 495140 - DNA, 75 bp, synthetic construct
  source 1..75: mol_type = other DNA
gagtcagcctgtaaattactatttggaccagatagtgaaaaagcttccattaaagagtacattcgtcgcgggctc

SEQ ID NO: 495141 - DNA, 75 bp, synthetic construct
  source 1..75: mol_type = other DNA
cctgaaagataaagggggaaacacgctggcgatggggaatatggcggtggctgcatttggcgacagcgatgccac

SEQ ID NO: 495142 - DNA, 75 bp, synthetic construct
  source 1..75: mol_type = other DNA
cggtcgaaatcatgaaggcaacggaagagcgtaatggttaccagattgacctgccactgtccgttttcgacccgc

SEQ ID NO: 495143 - DNA, 75 bp, synthetic construct
  source 1..75: mol_type = other DNA
atgaagaagctaaaaggcgttatctcagttttcgctctgagcctctgtctgctgtcaccggctcaggctgaagaa

SEQ ID NO: 495144 - DNA, 75 bp, synthetic construct
  source 1..75: mol_type = other DNA
tatctatctgaacgtcgcctacagccagaaccccaataatctgatgtggcaagataacgtggatcacacgatcca

SEQ ID NO: 495145 - DNA, 75 bp, synthetic construct
  source 1..75: mol_type = other DNA
caaatggctggcacagtttatctcccagtcatcttctgaagaagatttagtacttttacaatccattgttaaatg

SEQ ID NO: 495146 - DNA, 75 bp, synthetic construct
  source 1..75: mol_type = other DNA
ctctggagtttaataagattgttgagcaaatgctgctaaaaggaaaatggcaggatgcacttaatttctggatag

SEQ ID NO: 495147 - DNA, 75 bp, synthetic construct
  source 1..75: mol_type = other DNA
agcaataccgtactggtatttatgagtagctacaaaagtgcaggcaccggcctcaactactttgttaaataccat

SEQ ID NO: 495148 - DNA, 75 bp, synthetic construct
  source 1..75: mol_type = other DNA
cagcagtactaaaccacttcacgattagcaatccacacgaacctctatcagatactatcaatgaaattgcaacag

SEQ ID NO: 495149 - DNA, 75 bp, synthetic construct
  source 1..75: mol_type = other DNA
ctcgaaactgagcatgacattggacattaacccaatgttactaaccctgctgggtgtagaaaagttgccgactaa

SEQ ID NO: 495150 - DNA, 75 bp, synthetic construct
  source 1..75: mol_type = other DNA
cggctccgcctgatgaccggaacacaatttgaggcaaacactaacctggtgcgtgttcctgttcctctgatttgc

SEQ ID NO: 495151 - DNA, 75 bp, synthetic construct
  source 1..75: mol_type = other DNA
ataggtattcagcatatccaggttggccgcgtgaatgagataaccgccctccatcaggatattgaacggatagct

SEQ ID NO: 495152 - DNA, 75 bp, synthetic construct
  source 1..75: mol_type = other DNA
atgtctggcattcgtattcgtctcaaagaaagagacgctattattcagtcactgaagtcaggtgttacgcctaaa

SEQ ID NO: 495153 - DNA, 75 bp, synthetic construct
  source 1..75: mol_type = other DNA
tggcagctaagcaaccagtcggtgaatatcgcagtgatgcgctggcggctgaagagatactgacgctggcgaact

SEQ ID NO: 495154 - DNA, 75 bp, synthetic construct
  source 1..75: mol_type = other DNA
cgcggatcagcctgccggagggaaaagtcaatattatcaatttcaatgggccaggtactgtcaatcctgttgcga

SEQ ID NO: 495155 - DNA, 75 bp, synthetic construct
  source 1..75: mol_type = other DNA
gggcaatgcgacgcgcagggatggccaagaatgtttcgtaatgcggatggcacagtcacgtcgattcctcagcag

SEQ ID NO: 495156 - DNA, 75 bp, synthetic construct
  source 1..75: mol_type = other DNA
attctatgattctttgaagctgatgagcctttttgtccgccaggcaggctatgccggtcttttggtcagcctcga

SEQ ID NO: 495157 - DNA, 75 bp, synthetic construct
  source 1..75: mol_type = other DNA
ttagggcaaatcaatgatgaactgggggcgctgttggacagcgtggaaaatcacacgccagttatcagaaaaaaa

SEQ ID NO: 495158 - DNA, 75 bp, synthetic construct
  source 1..75: mol_type = other DNA
gaaagacgcaatcgcacaaatcgacatcatgcagaatcgtgctgttcaggcaaatcttgcataccagagcagcct

SEQ ID NO: 495159 - DNA, 75 bp, synthetic construct
  source 1..75: mol_type = other DNA
gtaggtgatgtgttttttgctggtgttcccaaggaatatgaagatttctgtaagatagattatgaatcttttgtt

SEQ ID NO: 495160 - DNA, 75 bp, synthetic construct
  source 1..75: mol_type = other DNA
gaagagatactgacgctggctaactggtgcctgttgaactattccgggctgaaaacgccagtcgggagtgcatca

SEQ ID NO: 495161 - DNA, 75 bp, synthetic construct
  source 1..75: mol_type = other DNA
gggtaaacctgtttatctcacggtggatgttaattcatggtcaaccggttcagaacgtcatggtgtctggtatcg

SEQ ID NO: 495162 - DNA, 75 bp, synthetic construct
  source 1..75: mol_type = other DNA
tcacacgccagttatcagaaaaaaagccagtgatttgagcgcactgatgatgcttttcagccaacaggccggtca

SEQ ID NO: 495163 - DNA, 75 bp, synthetic construct
  source 1..75: mol_type = other DNA
actccctatcaaaaaagataaagcatagtgatttctacaaagtaaaaaatcttactgataaaaatatatttgatc

SEQ ID NO: 495164 - DNA, 75 bp, synthetic construct
  source 1..75: mol_type = other DNA
ataaagataaaaataggaaaataccaacaggtattttttataactacgctttggttaacaacaatgactcgttaa

SEQ ID NO: 495165 - DNA, 75 bp, synthetic construct
  source 1..75: mol_type = other DNA
gggcgctttcgtggttgcctccgaactggcccgcgcacggggtaaacgtggcggtgtggcggttgcactgtctct

SEQ ID NO: 495166 - DNA, 75 bp, synthetic construct
  source 1..75: mol_type = other DNA
accggatgatgaatcagttcgcaggagaaaagggaatgcttgggcgtatatatggaataggaaaagacgtggcta

SEQ ID NO: 495167 - DNA, 75 bp, synthetic construct
  source 1..75: mol_type = other DNA
caggtgcttgctgttccgccagcgtacacaagccagcgatgcgcgtgctgtggtcatacagcgaaagaaaatcgc

SEQ ID NO: 495168 - DNA, 75 bp, synthetic construct
  source 1..75: mol_type = other DNA
tgaaataattagaaatttggtttcatatttacgagagggtgtgaaaagtaaaataatttgcattgacttaaaatc

SEQ ID NO: 495169 - DNA, 75 bp, synthetic construct
  source 1..75: mol_type = other DNA
tgatggctgcgcagggcatgacacagaattgggctgagatggggttttctgcgttccttgggaaaatgggcatta

SEQ ID NO: 495170 - DNA, 75 bp, synthetic construct
  source 1..75: mol_type = other DNA
ccaaatcgcttcagggtgaagtgggtgtgaacctcgggatgaatcttgatgttgccggaactgttgtcagaccgt

SEQ ID NO: 495171 - DNA, 75 bp, synthetic construct
  source 1..75: mol_type = other DNA
gtcggcggtagtgccacgaacaccaccattaacagtggtggtttcctgtccgtctacgggggcgccagtgcagta

SEQ ID NO: 495172 - DNA, 66 bp, synthetic construct
  source 1..66: mol_type = other DNA
atgaaacgacatctgaacaccagctacaggctggtatggaatcacattacgggcaccctggtggtg

SEQ ID NO: 495173 - DNA, 75 bp, synthetic construct
  source 1..75: mol_type = other DNA
gattgtttcatttgataaaaaattacatatagaaaaaatagaaaaaacggtaaaaaatctacaagctaataataa

SEQ ID NO: 495174 - DNA, 75 bp, synthetic construct
  source 1..75: mol_type = other DNA
atcgattcgaaaaaacaagctctctacgaccatgtaggaaacggaattgtatcttcattgaatttagatagccaa

SEQ ID NO: 495175 - DNA, 75 bp, synthetic construct
  source 1..75: mol_type = other DNA
ataagccagcgttgcgcgtgctgtggtcatacagcgaaagaaaatcgcctgtcacaaagtcaattcagatgctag

SEQ ID NO: 495176 - DNA, 75 bp, synthetic construct
  source 1..75: mol_type = other DNA
gagacttcagcgacagttaagccgcaaggtcaaattcagcaataactggcagaagcagaaacgcaaaatacagcg

SEQ ID NO: 495177 - DNA, 75 bp, synthetic construct
  source 1..75: mol_type = other DNA
gaagcagaaacgcaaaatacagcgactgcattcccgtatcgcaaatatccgcagggactaccttcacaaagtcac

SEQ ID NO: 495178 - DNA, 75 bp, synthetic construct
  source 1..75: mol_type = other DNA
tgcctgtggagagatggtgcagtcaggccgcccgttgaagcaggaacccaccgaaatgattcaggcgacagcctg

SEQ ID NO: 495179 - DNA, 75 bp, synthetic construct
  source 1..75: mol_type = other DNA
tgattcaaccatctactctgatgtcctggccctttctgaaagcgagaattcagccggtaccacaacaaatgtaaa

SEQ ID NO: 495180 - DNA, 75 bp, synthetic construct
  source 1..75: mol_type = other DNA
ttcagaaaaaccagaagaagctggcgagacttcagcgacagttaagccgcaaggtcaaattcagcaataactggc

SEQ ID NO: 495181 - DNA, 75 bp, synthetic construct
  source 1..75: mol_type = other DNA
gcgagacttcagcgacagttaagccgcaaggtcaaattcagcaataactggcagaagcagaaacgcaaaatacag

SEQ ID NO: 495182 - DNA, 75 bp, synthetic construct
  source 1..75: mol_type = other DNA
tgaaacgtcgtctgttcagcccacgcgtgcgtgcaacgactaccggagcggatatcctgatcctgtctctgctgg

SEQ ID NO: 495183 - DNA, 75 bp, synthetic construct
  source 1..75: mol_type = other DNA
gttcttgcctgtggagagatggtgcagtcaggccgcccgttgaagcaggaacccaccgaaatgattcaggcgaca

SEQ ID NO: 495184 - DNA, 75 bp, synthetic construct
  source 1..75: mol_type = other DNA
caggctcgccacgctgtcagatggcacagtctttgagcctgtaaacagtttccagaaaaaccagaaaaagctggc

SEQ ID NO: 495185 - DNA, 75 bp, synthetic construct
  source 1..75: mol_type = other DNA
agtcacaacgaccgtcagcaaaaaccacgcaatgatagtcattgaggatttgaaggtcagcaacatgtcaaagtc

SEQ ID NO: 495186 - DNA, 75 bp, synthetic construct
  source 1..75: mol_type = other DNA
gaaaatcgcctgtcacaaagtaaattcagatgccaggtatgtggatatacagcgaacgccgatgtaaatggcgct

SEQ ID NO: 495187 - DNA, 75 bp, synthetic construct
  source 1..75: mol_type = other DNA
cttaaagatgccccatcacagccattgcagcagtcactgaaagaccttgagcgggcctacaaaaatttcttccag

SEQ ID NO: 495188 - DNA, 75 bp, synthetic construct
  source 1..75: mol_type = other DNA
ttgtcggcttgtttgcttatctgggggcgtcgcttgctggttggccgctggcgaaagtactcgatacctggcact

SEQ ID NO: 495189 - DNA, 75 bp, synthetic construct
  source 1..75: mol_type = other DNA
ccgatcaaaaagtgttatttattgacgccgacttacgccgtggttattcgcataaccagttcaacgtgagtaatg

SEQ ID NO: 495190 - DNA, 75 bp, synthetic construct
  source 1..75: mol_type = other DNA
tgaagatttcaccgttaatggcacgatcggccagcgtgtggaaaaagacggcattgcacttaccgtcgcagacat

SEQ ID NO: 495191 - DNA, 75 bp, synthetic construct
  source 1..75: mol_type = other DNA
gttaaaggtgcgtctgtctggcatctcgatggtgactccactgtcggcgcattaacgctggataacggaaccgtt

SEQ ID NO: 495192 - DNA, 75 bp, synthetic construct
  source 1..75: mol_type = other DNA
tcgatgtaatcacccgtggtcaggtgccgcctaatccgtcggaactgctgatgcgcgatcggatgcgccagctac

SEQ ID NO: 495193 - DNA, 75 bp, synthetic construct
  source 1..75: mol_type = other DNA
atcacccaacttatcgtgcgctgctggaaaaacgccagacgctggagcaagaacgcaaacgcctgaataagcggg

SEQ ID NO: 495194 - DNA, 75 bp, synthetic construct
  source 1..75: mol_type = other DNA
tagcgaacgcagtaaagaaagcgggatgctggaacttaccatgactggtgatgatccccagttgattactcgtat

SEQ ID NO: 495195 - DNA, 75 bp, synthetic construct
  source 1..75: mol_type = other DNA
ggcaggctgcaggtggaagccggtggctcagcctctatggttactcagaacagtggcggtgctgtcgttactaat

SEQ ID NO: 495196 - DNA, 75 bp, synthetic construct
  source 1..75: mol_type = other DNA
atactatcatcaatggtctccattacaaggatggtagtcagtatgtctccagcggtggtaatgctataaacacta

SEQ ID NO: 495197 - DNA, 75 bp, synthetic construct
  source 1..75: mol_type = other DNA
atgacatcggaaaacccgttactggcgctgcgagagaaaatcagcgcgctggatgaaaaattattagcgttactg

SEQ ID NO: 495198 - DNA, 75 bp, synthetic construct
  source 1..75: mol_type = other DNA
tgctgcgaccttcgcaggcaccctgacgggtaccggtgccctgacacaggaaggcggaagcacccgcttcagcgg

SEQ ID NO: 495199 - DNA, 75 bp, synthetic construct
  source 1..75: mol_type = other DNA
ggtttactgactgtacttgtcggtcatgacgccagcgacacaactgttggcagtgacggtacactgtctgtacag

SEQ ID NO: 495200 - DNA, 75 bp, synthetic construct
  source 1..75: mol_type = other DNA
acgacgattatcagcggcggcatgctgcaggtggaagccggtggctcagcctctaaggttacccagaacattggc

SEQ ID NO: 495201 - DNA, 75 bp, synthetic construct
  source 1..75: mol_type = other DNA
atgctggcggtaagtgatgcggcagtcgtgggccgttatgtcggtaccagcctgctggtcgctcgttttgcgttg

SEQ ID NO: 495202 - DNA, 75 bp, synthetic construct
  source 1..75: mol_type = other DNA
cggtgaatggcggcacgacgcgctggagattgctcaacaacaagaaggggcagggctgacgcgtaaagagatcct

SEQ ID NO: 495203 - DNA, 75 bp, synthetic construct
  source 1..75: mol_type = other DNA
ccgatgcgccgcagattagcgataaacatgaaattgatgttcgttaccgctactggcgtcgacatattctgctga

SEQ ID NO: 495204 - DNA, 75 bp, synthetic construct
  source 1..75: mol_type = other DNA
atcggtgcgctggttgcaggctggggatcggacaaactgtttaacggtaaccgtgggccgatgaatttgatattc

SEQ ID NO: 495205 - DNA, 75 bp, synthetic construct
  source 1..75: mol_type = other DNA
cagcgaatgccggggtgtgggcagaagcgagttaccagaatggcgagaatacagaatcgccggtaacaggtagcg

SEQ ID NO: 495206 - DNA, 75 bp, synthetic construct
  source 1..75: mol_type = other DNA
ctccagcggcggtagtgccaccagtaccacggtaaacggcgggtctcagtctatctacagcggcggcagtgcgac

SEQ ID NO: 495207 - DNA, 75 bp, synthetic construct
  source 1..75: mol_type = other DNA
gaaatgactcagcaacaagaaggggcaggattgacgcgtaaggaaatcctcactaaatatgtgttgctgaacccg

SEQ ID NO: 495208 - DNA, 75 bp, synthetic construct
  source 1..75: mol_type = other DNA
aagcgattaacgcgttgcaggaaacctttaccgttagcgaacgcagtaaagaaagcgggatgctggaacttacca

SEQ ID NO: 495209 - DNA, 75 bp, synthetic construct
  source 1..75: mol_type = other DNA
attactggaatgggcgaacgaccattacgatctggtgattgtcgatacgccgccgatgctggcggtgagtgatgc

SEQ ID NO: 495210 - DNA, 75 bp, synthetic construct
  source 1..75: mol_type = other DNA
cagtggtaaaacgtttgtcagttcaactctggcggcggtgatcgcccagtccgatcaaaaagtgttatttattga

SEQ ID NO: 495211 - DNA, 75 bp, synthetic construct
  source 1..75: mol_type = other DNA
ggtttataccggtggaggagatgctgtatttacagtaaacggaggaaaagtggatgcaggagtttgggaatatta

SEQ ID NO: 495212 - DNA, 75 bp, synthetic construct
  source 1..75: mol_type = other DNA
atgtttacgtcaacggaaatgtcacaaaaacgaccatcacagacggcggcatactacaggtggacgccggtggtt

SEQ ID NO: 495213 - DNA, 75 bp, synthetic construct
  source 1..75: mol_type = other DNA
ccagtggtaattttttgctggatattcaaaacaccggtcgggagccggtatccgcaggtattccacttcgggttg

SEQ ID NO: 495214 - DNA, 75 bp, synthetic construct
  source 1..75: mol_type = other DNA
tgtttgtgatgctgcgtcagtcgccggaaggacgcacactcttttctcagcttttacatctcatgaatcgctatt

SEQ ID NO: 495215 - DNA, 75 bp, synthetic construct
  source 1..75: mol_type = other DNA
ggacgaagaagccatggttaaggggcgtctcaataaagtatctgtaggcacctctggccagatgatcatcgatga

SEQ ID NO: 495216 - DNA, 75 bp, synthetic construct
  source 1..75: mol_type = other DNA
gaacttgatagcggcgaagcctttgctatctacgttgatgatggtgatccgtgtatttcacctacccgtgagtta

SEQ ID NO: 495217 - DNA, 75 bp, synthetic construct
  source 1..75: mol_type = other DNA
ggacgatctgctggtggatgaaaaagattccgcttatacctcaccaaccgcagcggcagagtttgtccaacgtac

SEQ ID NO: 495218 - DNA, 75 bp, synthetic construct
  source 1..75: mol_type = other DNA
cccggtacttatcgttatggcggagtgggaagtttaatttcgttagtacaatctctggctcatgagtaccgcctg

SEQ ID NO: 495219 - DNA, 75 bp, synthetic construct
  source 1..75: mol_type = other DNA
ttattttgccgaaatcaccgtcaggcatcgtatggatgtggtgaaagaacagattgatttactggcgaaaaaagc

SEQ ID NO: 495220 - DNA, 75 bp, synthetic construct
  source 1..75: mol_type = other DNA
ataccttaagcgctcaggcgaccgagaaaatggagaacgtgcgcaagcgggcatcgctgtttattaatgcccgtt

SEQ ID NO: 495221 - DNA, 75 bp, synthetic construct
  source 1..75: mol_type = other DNA
ttattggtcttggtgcggcgctggagtatgtatcagctctggggcttaacaacattgctgagtacgaacagaatc

SEQ ID NO: 495222 - DNA, 75 bp, synthetic construct
  source 1..75: mol_type = other DNA
caggagatgccgccgtgggaagggggcggttctatgatcgccaccgtcagcctgagtgaaggcactacctggacc

SEQ ID NO: 495223 - DNA, 75 bp, synthetic construct
  source 1..75: mol_type = other DNA
tgcgttgccatacggttctgaaattgaacttgatagcggcgaagcctttgctatctacgttgatgatggtgatcc

SEQ ID NO: 495224 - DNA, 75 bp, synthetic construct
  source 1..75: mol_type = other DNA
ataacgaaggctggtcaatctcgtggcgagtggtgggggagacaaccatactggacggatgctctccatgaaatt

SEQ ID NO: 495225 - DNA, 75 bp, synthetic construct
  source 1..75: mol_type = other DNA
ttttcaaatgcaaatgacattcgataacggtgcacccgatctcaatatcaagccaggccagaaagttgtatttga

SEQ ID NO: 495226 - DNA, 75 bp, synthetic construct
  source 1..75: mol_type = other DNA
caaaattatcaattaaaaacaccaagtatccagatgtatgctcctgttacgtcaatgatcttaactaggcggcga

SEQ ID NO: 495227 - DNA, 75 bp, synthetic construct
  source 1..75: mol_type = other DNA
caatgtatcaccctgaatggcatcagggcgttgtcggtattctggcttcgcgcatcaaagagcgttttcatcgtc

SEQ ID NO: 495228 - DNA, 75 bp, synthetic construct
  source 1..75: mol_type = other DNA
gttacccgcggcggaagccattattaatcccaatttgcgtgactgcgagttcccgtcaaaatcactggcaggcgt

SEQ ID NO: 495229 - DNA, 75 bp, synthetic construct
  source 1..75: mol_type = other DNA
gccgagaagtcgatgaaacggccgacttgcccgctgaattgcctcccttgctgcgccgtttatatgccagccggg

SEQ ID NO: 495230 - DNA, 75 bp, synthetic construct
  source 1..75: mol_type = other DNA
atttcttgggctgcatccagaagggaaagaaattggcgctgacagttcaggacggccaatatggattaattcccc

SEQ ID NO: 495231 - DNA, 75 bp, synthetic construct
  source 1..75: mol_type = other DNA
cttcgctattgcaaggcgaagtggtgtcagacggtccgttaagcccggccgaaatgaccatggaagtggcgcagc

SEQ ID NO: 495232 - DNA, 75 bp, synthetic construct
  source 1..75: mol_type = other DNA
ctggatctggtggcgctgggtacggtggcggacgtagtgccgctggacgccaataatcgcattctgacctggcag

SEQ ID NO: 495233 - DNA, 75 bp, synthetic construct
  source 1..75: mol_type = other DNA
atttaaattcattaattaataagctaaaaacaaacaagacaaccaagataattgaagaagatacttattccaata

SEQ ID NO: 495234 - DNA, 75 bp, synthetic construct
  source 1..75: mol_type = other DNA
ttctatgatgcaattaattcttcagatgcagtaatgcttataaattcaggagttggtctttattctctgatggca

SEQ ID NO: 495235 - DNA, 75 bp, synthetic construct
  source 1..75: mol_type = other DNA
tttcaaaacaaaatataacatactcaataaaaaaattctttttgttcctttgcaaagaccaaatgattctgtcat

SEQ ID NO: 495236 - DNA, 75 bp, synthetic construct
  source 1..75: mol_type = other DNA
tgatggtacgctgaaaggttccggtcgctccattcaggggctgcatatgcgtgatgcgctggagcgattagacac

SEQ ID NO: 495237 - DNA, 75 bp, synthetic construct
  source 1..75: mol_type = other DNA
gctggcgaatgaactcgatgcactaaaccagacgcgaaaagagatcgaacagggaatgcaggttgaagcgctcac

SEQ ID NO: 495238 - DNA, 75 bp, synthetic construct
  source 1..75: mol_type = other DNA
gctggcgatgcgctcgcttggttgcagcaatatcgactacctggttccaaaccgtttcgaagacggttacggctt

SEQ ID NO: 495239 - DNA, 75 bp, synthetic construct
  source 1..75: mol_type = other DNA
cggagatgattacgcttgcgcatcagtatggcgcaaaagtgctggtggatggcgctcaggcggtgatgcaccatc

SEQ ID NO: 495240 - DNA, 75 bp, synthetic construct
  source 1..75: mol_type = other DNA
atcgccgtcgcgttgttgccgccgctgttcatgggtgcggcatggctcgactggatctaccgtgcattggttctg

SEQ ID NO: 495241 - DNA, 75 bp, synthetic construct
  source 1..75: mol_type = other DNA
gtggctgcacgactgagccgatcatccaacccacggcaccggccccgctggcaaccggatcggctcaagcggtgt

SEQ ID NO: 495242 - DNA, 75 bp, synthetic construct
  source 1..75: mol_type = other DNA
caggctcttgctcaaccgacaacggacgagttaatgacgctggttaacaagttcattgaagaaaaaacaatctgc

SEQ ID NO: 495243 - DNA, 75 bp, synthetic construct
  source 1..75: mol_type = other DNA
ctgccaaaagatcctgatgacgaacgtaacgccttcctcgaagtccgtgccggaaccggcggcgacgaagcggcg

SEQ ID NO: 495244 - DNA, 75 bp, synthetic construct
  source 1..75: mol_type = other DNA
tcggtagctcatcaaaagtagaaactttcatctcagctctgctcgctaatactcatggacaaaagaatatactaa

SEQ ID NO: 495245 - DNA, 75 bp, synthetic construct
  source 1..75: mol_type = other DNA
tcggccactggcccgaagcggcaatggtgatggtactgttcgcgctggccgaggtaatcgaagccaaatcgctgg

SEQ ID NO: 495246 - DNA, 75 bp, synthetic construct
  source 1..75: mol_type = other DNA
aatcaaattaggtcgtatgtctcgatggcgtgccggtgactactatgcttggcgtgatagtcattcttcagagta

SEQ ID NO: 495247 - DNA, 75 bp, synthetic construct
  source 1..75: mol_type = other DNA
gctccggcttaccgcccgcatccttatgttcgccatcttgccagcgtaggtgaagggatggttatcgaacaccag

SEQ ID NO: 495248 - DNA, 75 bp, synthetic construct
  source 1..75: mol_type = other DNA
ggtcggatgtcacgatggcgcgctgctgattattataagtggcgagatgggtttgaagaaaactcaggtcaacag

SEQ ID NO: 495249 - DNA, 75 bp, synthetic construct
  source 1..75: mol_type = other DNA
tcaggagcaagtggcttctgaaaaagcagagcttgctaaactgaaggatctaccggctattacgctggacggtca

SEQ ID NO: 495250 - DNA, 75 bp, synthetic construct
  source 1..75: mol_type = other DNA
caaagcagtggctgaagcgtgtggctcgcaggcggttatcgttcgtaccatggacatcggcggcgacaaagagct

SEQ ID NO: 495251 - DNA, 75 bp, synthetic construct
  source 1..75: mol_type = other DNA
ttgccgctgacctgacaccgtccgaaaccgcacagttgaacctgaagaaggtgctgggtttcatcaccgacgcgg

SEQ ID NO: 495252 - DNA, 75 bp, synthetic construct
  source 1..75: mol_type = other DNA
ctgccgaaagatcctgatgacgaacgcgatgcttttcttgaagtacgcgccggaaccggcggtgatgaagccgcg

SEQ ID NO: 495253 - DNA, 75 bp, synthetic construct
  source 1..75: mol_type = other DNA
tgccgcgcttgcccgggctccctatcgctaccaggaaatgcttggtgttatctggcgggagaatccgtgccgctg

SEQ ID NO: 495254 - DNA, 75 bp, synthetic construct
  source 1..75: mol_type = other DNA
ttaaccgccggctggtggcaaaaatgttgtctgagctggagtatgagcaggttttccacgcggaatctcagggcg

SEQ ID NO: 495255 - DNA, 75 bp, synthetic construct
  source 1..75: mol_type = other DNA
atgatctggcgctgtgataacgagatggatattcatcagttgttgacggccgcaatggatccgcaggagtttgcc

SEQ ID NO: 495256 - DNA, 75 bp, synthetic construct
  source 1..75: mol_type = other DNA
catcagtcagatggagcaccacgctaacattgttccctggcagatgctttgcgcacgcgttggcgcagagctgcg

SEQ ID NO: 495257 - DNA, 75 bp, synthetic construct
  source 1..75: mol_type = other DNA
ctggaggtacagaccgcctatctggagcgccagctcaccggtaaacatgcattcccgctgattgggtgcttcgac

SEQ ID NO: 495258 - DNA, 75 bp, synthetic construct
  source 1..75: mol_type = other DNA
tactgaaagcccgtcgcgggctgagcgccagtgacctgattaatcttgatgccgatcgtctgcaatgcctgctga

SEQ ID NO: 495259 - DNA, 75 bp, synthetic construct
  source 1..75: mol_type = other DNA
tggaagccctgcatgaacgccatgaagaagttcaggcattgctgggtgatgcgcaaaccatcgctgaccaggatc

SEQ ID NO: 495260 - DNA, 75 bp, synthetic construct
  source 1..75: mol_type = other DNA
aagggaagctggatatgctgattgagccgatcgtccaggaacatcaggctgaccaactggcggcgttgtccgagc

SEQ ID NO: 495261 - DNA, 75 bp, synthetic construct
  source 1..75: mol_type = other DNA
aaggtaagctggatatgctaattgaaccgattatccaggaacatcaggctgaccaactggcggcgttgtccgagc

SEQ ID NO: 495262 - DNA, 75 bp, synthetic construct
  source 1..75: mol_type = other DNA
atggttgaacttaaagagccgtttgccacgttatggcgcggaaaagatccttttgaggaagttaaaactttgcag

SEQ ID NO: 495263 - DNA, 75 bp, synthetic construct
  source 1..75: mol_type = other DNA
ttcgccactgatggttcgtcttggcgtacctgaaaggcgattttatcaactgctggcagcagtgttgagtgatta

SEQ ID NO: 495264 - DNA, 75 bp, synthetic construct
  source 1..75: mol_type = other DNA
gtaggtagtgttgttgccgctatctccatctccgggccttcatcaagactgacagaagatcgttttgtcagccag

SEQ ID NO: 495265 - DNA, 75 bp, synthetic construct
  source 1..75: mol_type = other DNA
tccaggagctgcgcaaagtggcttcaggtatggctattcacaaaaaatggcgacagacctatttttccacgccat

SEQ ID NO: 495266 - DNA, 75 bp, synthetic construct
  source 1..75: mol_type = other DNA
ccagaacctgctgatgtgcgagttcgttgacgatctcgcatctgtgttcccgctcagcgaattgcaggcgtgcat

SEQ ID NO: 495267 - DNA, 75 bp, synthetic construct
  source 1..75: mol_type = other DNA
ccagctcatcatgaaggagcataaagaagggaaagatttcaaagaaattgacctgctggcgcgccagtcggagcg

SEQ ID NO: 495268 - DNA, 75 bp, synthetic construct
  source 1..75: mol_type = other DNA
tgtggtttaacatattgttagttttggtgtgggatacttcccgccgccgtcgtttggcgcgtcgcagcattgccg

SEQ ID NO: 495269 - DNA, 75 bp, synthetic construct
  source 1..75: mol_type = other DNA
gcgtcgtgcgggcggcagattatttaatcaacagcgaagctgaaaccctgttaccccgctgccaacagcgactgg

SEQ ID NO: 495270 - DNA, 75 bp, synthetic construct
  source 1..75: mol_type = other DNA
gcaaaagagatccttagcgagatgggatatacccacgttgaaaacgccggtggtcttaaagatattgagatgccg

SEQ ID NO: 495271 - DNA, 75 bp, synthetic construct
  source 1..75: mol_type = other DNA
accgacatcgcgcagtcctttatggcaatccgccgggctaccacagccagcggtaaccgcccaacctacgaagcc

SEQ ID NO: 495272 - DNA, 75 bp, synthetic construct
  source 1..75: mol_type = other DNA
cgtgacctatatcggtatcgactcaaccggcgttggtcacggggtttacgagaacgtgaaagcgttctttcctgc

SEQ ID NO: 495273 - DNA, 75 bp, synthetic construct
  source 1..75: mol_type = other DNA
tacgcagaacggcgacagtgccggatgcgtggtgctggcaccgccagccgtgccgggcggtaagtttcgcattct

SEQ ID NO: 495274 - DNA, 75 bp, synthetic construct
  source 1..75: mol_type = other DNA
aggcccgcgccgtcagccggaaaagaatgtcttcaccgatgaacagattgagaagctggaaaaaatcttccattc

SEQ ID NO: 495275 - DNA, 75 bp, synthetic construct
  source 1..75: mol_type = other DNA
tctggctcccggcctgctgtgtgcagacgggcagtaccgccagatagtcactgtggaagatgcggtgcgcggcgg

SEQ ID NO: 495276 - DNA, 75 bp, synthetic construct
  source 1..75: mol_type = other DNA
ttacgcatggaatacagcccggatgaataccagaacctgctgatgtgtgagttcgtggacgatctcgcgtccgtg

SEQ ID NO: 495277 - DNA, 75 bp, synthetic construct
  source 1..75: mol_type = other DNA
cggcgctggcagcaaggcagttaaaccggcatcttttgcttcaattacaacaaggttgtttacctctctcaggaa

SEQ ID NO: 495278 - DNA, 75 bp, synthetic construct
  source 1..75: mol_type = other DNA
caacaaagcggctggtatcgcgatatgtatcgctatcaacaactggaggcggcgctcgacgacgctccggaaatt

SEQ ID NO: 495279 - DNA, 75 bp, synthetic construct
  source 1..75: mol_type = other DNA
cgcgtggtatttgctgccggggaaggggtgctgacgctggtggattcgctggtgatgggctgcgcggtgctgatt

SEQ ID NO: 495280 - DNA, 75 bp, synthetic construct
  source 1..75: mol_type = other DNA
aacaaagcggctggtatcgcgatatgtatcgctatcaacaactggaggcggcgcttgacgatgctccggaaattc

SEQ ID NO: 495281 - DNA, 75 bp, synthetic construct
  source 1..75: mol_type = other DNA
taaatggctggcacaatttatctctcagtcatcttctgaagaggattcagtgcgtttacaatccattgttaaatg

SEQ ID NO: 495282 - DNA, 75 bp, synthetic construct
  source 1..75: mol_type = other DNA
catattcagaaaagaaaattatttatggaatattaattaatcagtcgtgtatagtttctgatacccctgacgtgg

SEQ ID NO: 495283 - DNA, 75 bp, synthetic construct
  source 1..75: mol_type = other DNA
acgattcgatacaaacacaggaaaaaaaatcgatacgatatatgttggacgaaacccacatgagcctcgatatac

SEQ ID NO: 495284 - DNA, 75 bp, synthetic construct
  source 1..75: mol_type = other DNA
ggtgcagggcagtttaacgctgggccagctcaccagttttatgatgtatttaggtctgatgatttggccaatgct

SEQ ID NO: 495285 - DNA, 75 bp, synthetic construct
  source 1..75: mol_type = other DNA
gtgcgattatttgctcaattaagctggtatttccgtcgggaatggcgtcgctatctcggggctgtcgccttgctt

SEQ ID NO: 495286 - DNA, 75 bp, synthetic construct
  source 1..75: mol_type = other DNA
atgaagatggtgaatgtggtcttagttttcgtcttccttcaaaatttgcaatgaatggaattaatttagtaaaaa

SEQ ID NO: 495287 - DNA, 75 bp, synthetic construct
  source 1..75: mol_type = other DNA
agttgaccttatttgcactattgccgatgccagtgatggcaatcatgattaagcgcaacggcgatgctttgcatg

SEQ ID NO: 495288 - DNA, 75 bp, synthetic construct
  source 1..75: mol_type = other DNA
ccttgatgatgcgctttcggcggtggacggacgcacagagcaccagatcctgcataacctgcgtcagtgggggca

SEQ ID NO: 495289 - DNA, 75 bp, synthetic construct
  source 1..75: mol_type = other DNA
tgtcgatggcgtgacagaacaacactttactaccgggcagatcctgatgtggatcgccaccatggtgctgattgc

SEQ ID NO: 495290 - DNA, 75 bp, synthetic construct
  source 1..75: mol_type = other DNA
atgctaactttactggttttattcgtattatttatagcgttagtaggcaggaaatataacaggtatgggatttat

SEQ ID NO: 495291 - DNA, 75 bp, synthetic construct
  source 1..75: mol_type = other DNA
gtgaaacagaaatgtgcgggggtaaactctcgtttgatgatgttttcgagcgtgaatacgccagaacggttgtgc

SEQ ID NO: 495292 - DNA, 75 bp, synthetic construct
  source 1..75: mol_type = other DNA
acatgcactgatgcatctgataccggcacagcagcgaactgtggaacacctggacgccatgcagtggatcaacgg

SEQ ID NO: 495293 - DNA, 75 bp, synthetic construct
  source 1..75: mol_type = other DNA
gtgcgtaagccaaccgaagaacaaaaacggatgctgttactgcctgccgaggcggtgaacgtttcacgcaaaggc

SEQ ID NO: 495294 - DNA, 75 bp, synthetic construct
  source 1..75: mol_type = other DNA
ggttttgagatggttatcaataacttctcattaggtatcgcggggatgctcctttgtctgctgggttttgaagtt

SEQ ID NO: 495295 - DNA, 75 bp, synthetic construct
  source 1..75: mol_type = other DNA
agtcatgacgccaccagctcgtcgggcgcaggcctggcagcgtctggtcgccgatctaccggaatcattctattc

SEQ ID NO: 495296 - DNA, 75 bp, synthetic construct
  source 1..75: mol_type = other DNA
gtggaagtcgctgcggaggccgacgccatggtgacggtgttcggcattctgaatctcaccgaggactccttcttc

SEQ ID NO: 495297 - DNA, 75 bp, synthetic construct
  source 1..75: mol_type = other DNA
cgtggctgcaacctggcacgcgcatcacgctgcctgcgccggggatttcacccgccgtcaattcccagcaactgt

SEQ ID NO: 495298 - DNA, 75 bp, synthetic construct
  source 1..75: mol_type = other DNA
aagtcaggtactggctgacgtgatgctcagccactggccgattagcgcctggcaaccgcaacttcccgcaggatg

SEQ ID NO: 495299 - DNA, 75 bp, synthetic construct
  source 1..75: mol_type = other DNA
ccgggctgtcgtcggtcggcattcgcctgtttctggtgacctacgatgcaaaagggctacgcgccgagcaatcca

SEQ ID NO: 495300 - DNA, 75 bp, synthetic construct
  source 1..75: mol_type = other DNA
acattgattcaattcgcctctcgttcatggatgttgtgactcgctacggtatcccggaggattttcacatcacca

SEQ ID NO: 495301 - DNA, 75 bp, synthetic construct
  source 1..75: mol_type = other DNA
ggcagtttctgattgcagattatctgcgaccggaaaaacccgcctttcgcaaatgttatgagcgtctggaactgg

SEQ ID NO: 495302 - DNA, 75 bp, synthetic construct
  source 1..75: mol_type = other DNA
ggcataccggaggattttcacatcaccattgataacacccgtggtgcggcgaataaatggctgacagggggcgcg

SEQ ID NO: 495303 - DNA, 75 bp, synthetic construct
  source 1..75: mol_type = other DNA
tggcactggtgttttcactgcccgttttcgccgctgaacactggatcgatgttcgtgttcctgagcagtatcagc

SEQ ID NO: 495304 - DNA, 75 bp, synthetic construct
  source 1..75: mol_type = other DNA
atgtgttgttaatgatgttctgccaaatatatgcaaaggcaatgcgcgcattcctatttttcacttcttaaatca

SEQ ID NO: 495305 - DNA, 75 bp, synthetic construct
  source 1..75: mol_type = other DNA
atgaattttaagaaaaaactcgaagagcattttaagcagttcgaagcatccccagtgttatttgttggctccgga

SEQ ID NO: 495306 - DNA, 75 bp, synthetic construct
  source 1..75: mol_type = other DNA
cgcattgtttaacgaaccgctgcagggcgaatccgccaataccagcaatattgtggagatttttgatgggaaaga

SEQ ID NO: 495307 - DNA, 75 bp, synthetic construct
  source 1..75: mol_type = other DNA
agattgaagacctggcagcattcgctaaagaagatggtcagccacaatacactatcactaccgggacaatccctg

SEQ ID NO: 495308 - DNA, 75 bp, synthetic construct
  source 1..75: mol_type = other DNA
catgtgcgttcttccattgatggatggtttgtcgccaagagaagcaagggatctagcagaatcaatttcagttgc

SEQ ID NO: 495309 - DNA, 75 bp, synthetic construct
  source 1..75: mol_type = other DNA
tggcggtgcattaaagagaacatttccgataagcttccgggctctggtgaaagcccctgtctcagaagagaatgt

SEQ ID NO: 495310 - DNA, 75 bp, synthetic construct
  source 1..75: mol_type = other DNA
caacgtcgaatacatcggtattgatgccaccggcctcggtgtcggcgtgttccagctcgtgcgctcgttctatcc

SEQ ID NO: 495311 - DNA, 75 bp, synthetic construct
  source 1..75: mol_type = other DNA
aggcttacgacattatcagtcaccgtcgtctggagtttgacgccggacacaccgacatagcgcagtcatttatgg

SEQ ID NO: 495312 - DNA, 75 bp, synthetic construct
  source 1..75: mol_type = other DNA
cggtatggctattcacaagaaatggcgacaaacctatttttccacgccatccagcctgacacacagtgcttatcc

SEQ ID NO: 495313 - DNA, 75 bp, synthetic construct
  source 1..75: mol_type = other DNA
cctaacggggccacactttacttcctcggcaccaatgcccgcactgcccagagttatcacggcaacctgtatctg

SEQ ID NO: 495314 - DNA, 75 bp, synthetic construct
  source 1..75: mol_type = other DNA
ccagatcggcgcgaccttctattttgcccgtgaagccctgattgacgctctgctaaccgggcgtaaccagatttt

SEQ ID NO: 495315 - DNA, 75 bp, synthetic construct
  source 1..75: mol_type = other DNA
tgagcagtctttcgactatcagttgcactggtatcgcgccgggcttgagcaccgcatccgcgatattctgaaatc

SEQ ID NO: 495316 - DNA, 75 bp, synthetic construct
  source 1..75: mol_type = other DNA
aagattctccctcacagccattgcaacagtcactgaaagaccttgagcgggcttacaaaaacttcttccggaagc

SEQ ID NO: 495317 - DNA, 75 bp, synthetic construct
  source 1..75: mol_type = other DNA
aatttataccccgaaagtgatcttatccattctgtagctgatgagattaatatcccaggcgttttcacaatcggg

SEQ ID NO: 495318 - DNA, 75 bp, synthetic construct
  source 1..75: mol_type = other DNA
atatcaagtcattttatttaggtacgcccagtggtaattttaaagcaatagataaccacgggaaggaaataacaa

SEQ ID NO: 495319 - DNA, 75 bp, synthetic construct
  source 1..75: mol_type = other DNA
tttatcagccggggagcttcacgccactcatcagggttgaaaccgccaccggtgagctggcgaaaacgcagcgcc

SEQ ID NO: 495320 - DNA, 75 bp, synthetic construct
  source 1..75: mol_type = other DNA
cggccgtctgattcaggaaactgcccctgacggcgatatcacccgctaccgttatgataatccacacagtgacct

SEQ ID NO: 495321 - DNA, 75 bp, synthetic construct
  source 1..75: mol_type = other DNA
ctgacagacatcagccatatcagcgaagggcaccgggtgacggtgcattacgggtatgatgagaaaggccgcctg

SEQ ID NO: 495322 - DNA, 75 bp, synthetic construct
  source 1..75: mol_type = other DNA
cattgccccggacggcagcagaaacgggacacagtacgatgcgtggggaaaggccatctgtaccacgcagggcgg

SEQ ID NO: 495323 - DNA, 75 bp, synthetic construct
  source 1..75: mol_type = other DNA
gtcgaagatggtcgtttcgttgcccagcaaaaagttgatagttccggtttccagactgaaccggttgccgctgac

SEQ ID NO: 495324 - DNA, 75 bp, synthetic construct
  source 1..75: mol_type = other DNA
accaggtagaagcggttaaacgcttttttgctgaaaatggcaaagcactggctgttggggtgattttgggcgttg

SEQ ID NO: 495325 - DNA, 75 bp, synthetic construct
  source 1..75: mol_type = other DNA
ctaaactcgccacgctgtcagatggcacagtctttgagcctgtaaacagttttcagaaaaaccagaagaagctgg

SEQ ID NO: 495326 - DNA, 75 bp, synthetic construct
  source 1..75: mol_type = other DNA
cggtaccattacgacagtcagcaccggctggtgcactacacgcggacacaatatgcagagccgctggtcgaaagt

SEQ ID NO: 495327 - DNA, 75 bp, synthetic construct
  source 1..75: mol_type = other DNA
gaacgggacctgacgggctggatgtcgctgtcacggaaaccgcaagtgacctggtacggctgggacggcgaccgg

SEQ ID NO: 495328 - DNA, 75 bp, synthetic construct
  source 1..75: mol_type = other DNA
gagtgacgtccggccatccggtcaatcccctgctcggtgcaaaggtccttcccggtgaaaccgacatcgccctgc

SEQ ID NO: 495329 - DNA, 75 bp, synthetic construct
  source 1..75: mol_type = other DNA
tcccctgctcggtgcaaaggtccttcccggtgaaaccgacatcgccctgcccggcccgctgccgttcatcctctc

SEQ ID NO: 495330 - DNA, 75 bp, synthetic construct
  source 1..75: mol_type = other DNA
ggcaggcgctgccggaagacctgcgcctaagtccgcatcgttatctggcgacgaacagtccgcaggggccgtggt

SEQ ID NO: 495331 - DNA, 75 bp, synthetic construct
  source 1..75: mol_type = other DNA
ggcaggcgctgccggaagacctccgcgtaagtccgcatcgttatctggcgacgaacagtccgcaggggccgtggt

SEQ ID NO: 495332 - DNA, 75 bp, synthetic construct
  source 1..75: mol_type = other DNA
ggcaggcgctgccggaagatctgcgcttaagtccgcatcgttatctggcgacgaacagtccgcaggggccgtggt

SEQ ID NO: 495333 - DNA, 75 bp, synthetic construct
  source 1..75: mol_type = other DNA
gctcgatagcagaaccgggcaaaaccaaagcggcaaaagcagaggttgagcgtaacggctacaaagtctgggaac

SEQ ID NO: 495334 - DNA, 75 bp, synthetic construct
  source 1..75: mol_type = other DNA
gaaaaggtcaatgtgatctatttgtacgatgaatttgaaaagagtatgtataatcgtaatctgggagctatcata

SEQ ID NO: 495335 - DNA, 75 bp, synthetic construct
  source 1..75: mol_type = other DNA
ggcaggcgctgccggaagagctgcgcgtaagtccgcatcgttatctggcgacgaacagtccgcaggggccgtggt

SEQ ID NO: 495336 - DNA, 75 bp, synthetic construct
  source 1..75: mol_type = other DNA
ggcaggcgctgccggaagaactacgcgtaagtccgcatcgttatctggcgacgaacagtccgcaggggccgtggt

SEQ ID NO: 495337 - DNA, 75 bp, synthetic construct
  source 1..75: mol_type = other DNA
atggatacaaagacagcaagtgattacctgccacagacaaattggccaacaactcaattaccaccaggatatact

SEQ ID NO: 495338 - DNA, 75 bp, synthetic construct
  source 1..75: mol_type = other DNA
tggcggtgcactatggttatgacagtaaaggccgcctcgccagtgaacacctgacggtgcatcatccgcagacgg

SEQ ID NO: 495339 - DNA, 75 bp, synthetic construct
  source 1..75: mol_type = other DNA
ggcaggcgctgccggaagatcttcgcgtaagtccgcatcgttatctggcgacgaacagtccgcaggggccgtggt

SEQ ID NO: 495340 - DNA, 75 bp, synthetic construct
  source 1..75: mol_type = other DNA
ggcaggcgctgccggaagaactgcgcataagtccgcatcgttatctggcgacgaacagtccgcaggggccgtggt

SEQ ID NO: 495341 - DNA, 75 bp, synthetic construct
  source 1..75: mol_type = other DNA
ggcaggcgctgccggaagaacttcgcttaagtccgcatcgttatctggcgacgaacagtccgcaggggccgtggt

SEQ ID NO: 495342 - DNA, 75 bp, synthetic construct
  source 1..75: mol_type = other DNA
cctgtggagggacgatgcagtcagaccgcccgttgaagcaggaaccagacgctgagcaatcagccgtcacccact

SEQ ID NO: 495343 - DNA, 75 bp, synthetic construct
  source 1..75: mol_type = other DNA
ttcgcctggatagatcgcttttgtgataagtacagcggtggtatctggtccttttacacacttagcaatggcggc

SEQ ID NO: 495344 - DNA, 75 bp, synthetic construct
  source 1..75: mol_type = other DNA
gtggcgatgtcttctgcgaaaggtgacatgaccaccatgcaggcaaaggtgacactgaaggttacagcttccacg

SEQ ID NO: 495345 - DNA, 75 bp, synthetic construct
  source 1..75: mol_type = other DNA
gtacgctattccccatttatatcaacacctggcacggcatccgtaatatcgaccgtgggctggtggagatggcac

SEQ ID NO: 495346 - DNA, 75 bp, synthetic construct
  source 1..75: mol_type = other DNA
tcgtacccgctaaccaatccgaatttgaactgaccgtcacgcaggtacccgacgaacagcgtatcgatttctggc

SEQ ID NO: 495347 - DNA, 75 bp, synthetic construct
  source 1..75: mol_type = other DNA
cggcatctggaatttttacacgctgagcaacggcggcgcgtttatggccccggaagtggagaacgatgaactctg

SEQ ID NO: 495348 - DNA, 75 bp, synthetic construct
  source 1..75: mol_type = other DNA
gcaatgaccgcacactattatcgcttgcgggactatgccctgcagcatcctgaagctcacgccattctgcgtatc

SEQ ID NO: 495349 - DNA, 75 bp, synthetic construct
  source 1..75: mol_type = other DNA
cgttatcaccacgacctgaccggtaaacttatccgtagcgaggatgagggacttatcaccctccggcactacgat

SEQ ID NO: 495350 - DNA, 75 bp, synthetic construct
  source 1..75: mol_type = other DNA
aagaccgcatcactgtcaccgacagcctgaaccgccgtgaaattctgcataccgcaggcgaaggcgggctgaagc

SEQ ID NO: 495351 - DNA, 75 bp, synthetic construct
  source 1..75: mol_type = other DNA
tggtacggctgggacggcgaccggctgaccacgatacagaacgacagaacccgcatccagacgatttatcagccg

SEQ ID NO: 495352 - DNA, 75 bp, synthetic construct
  source 1..75: mol_type = other DNA
ttggttatctggcgatgaatgcgcgggagtttctgcaaacggacgtggtggtagtcgctattattctttacgccc

SEQ ID NO: 495353 - DNA, 75 bp, synthetic construct
  source 1..75: mol_type = other DNA
ggaagcttcacaccactcatcagggtcgagacagagaacggcgagcgggagaaaatgcagcgtcgcagcctggca

SEQ ID NO: 495354 - DNA, 75 bp, synthetic construct
  source 1..75: mol_type = other DNA
gacttaccctgcgcaacggaagatgccaccggcagccggaaaaccatgacgtggagccgttacggtcagttgctg

SEQ ID NO: 495355 - DNA, 75 bp, synthetic construct
  source 1..75: mol_type = other DNA
gaacggcaatggtgcccaaatgagtgcagaagccacaggtatcgctgtctgcctgattgaatacagccatcacgc

SEQ ID NO: 495356 - DNA, 75 bp, synthetic construct
  source 1..75: mol_type = other DNA
cccgctgcacggagcgggagtttgcgaccattcttgccggtatcagcgccggcggtatgtactgtccggaatgcg

SEQ ID NO: 495357 - DNA, 75 bp, synthetic construct
  source 1..75: mol_type = other DNA
gcacggttcactggccggatggtgtaaccccgcttttgtctgatgcttccccgttttgccgatatctttcagcag

SEQ ID NO: 495358 - DNA, 75 bp, synthetic construct
  source 1..75: mol_type = other DNA
gaccatacttgccgctatcagcgccggcggcatatactgcccagaaaacggaacagtccactggccagacggtgt

SEQ ID NO: 495359 - DNA, 75 bp, synthetic construct
  source 1..75: mol_type = other DNA
gcgacagttaagccgcaaggtcaaattcagcaacaactggcagaagcagaaacgcaaaatacagcgactgcattc

SEQ ID NO: 495360 - DNA, 75 bp, synthetic construct
  source 1..75: mol_type = other DNA
aagaagacgcagaagctctgcgctttgataattttgacgatgccgttgagtgctgcgcagacctgaatattccct

SEQ ID NO: 495361 - DNA, 75 bp, synthetic construct
  source 1..75: mol_type = other DNA
aaccatttttgccggtatcagcgccggcggcatgtactgcccggagtgtggcacggttcactggccggacggagt

SEQ ID NO: 495362 - DNA, 75 bp, synthetic construct
  source 1..75: mol_type = other DNA
ttccctccgcagaaaccgttcctgcagcggtacagcatcagattgccgcaacacaggtagccgatgagaaccgca

SEQ ID NO: 495363 - DNA, 75 bp, synthetic construct
  source 1..75: mol_type = other DNA
gcagcgcattagcgacagctattgttatggctctttctgcaccagcattcgctgctgatagcgcggtatcaactg

SEQ ID NO: 495364 - DNA, 75 bp, synthetic construct
  source 1..75: mol_type = other DNA
atctcccggcaaatctatatgggcgtctgggactcgctattgtacgaaggtttttcactggctatcggcgtcacg

SEQ ID NO: 495365 - DNA, 75 bp, synthetic construct
  source 1..75: mol_type = other DNA
gatgacgaagggtatccggaaatagcccgctgcacggagcgggagtttgcgaacattcttgccggtatcagcgcc

SEQ ID NO: 495366 - DNA, 75 bp, synthetic construct
  source 1..75: mol_type = other DNA
gctggtcttctggtttgtacgtgttgatgacgaagggtatccggaaatagcccgctgcacggagcgggagtttgc

SEQ ID NO: 495367 - DNA, 75 bp, synthetic construct
  source 1..75: mol_type = other DNA
accggatgcgatgccatgacggaacattactaccgtctgcgggattacgcgctcagccatgcggaatgtaacacc

SEQ ID NO: 495368 - DNA, 75 bp, synthetic construct
  source 1..75: mol_type = other DNA
tagacgatctggatcgtcgtttccgccggcgcagaacagtatggcgattctgttgctggagtctgctggccatcg

SEQ ID NO: 495369 - DNA, 75 bp, synthetic construct
  source 1..75: mol_type = other DNA
gcaactccacctcacgtgggaagaagctctgcaggccagccatatgtcagtagacgatctggatcgtcgtttccg

SEQ ID NO: 495370 - DNA, 75 bp, synthetic construct
  source 1..75: mol_type = other DNA
gagtatgaatatggaagacgtggatacagagacggccctgaaggttgtgggcattacagcggcagcaagtataca

SEQ ID NO: 495371 - DNA, 75 bp, synthetic construct
  source 1..75: mol_type = other DNA
ggaaatttgctgattcatttgttaaacaaaaaaaatgctggcctccgtctacggccactcagatgcgggtaaata

SEQ ID NO: 495372 - DNA, 75 bp, synthetic construct
  source 1..75: mol_type = other DNA
aaataataaagaattcctctggcttagttacagtataaataatttaagttcggtaaaatatgaaaaatcatactg

SEQ ID NO: 495373 - DNA, 75 bp, synthetic construct
  source 1..75: mol_type = other DNA
gttacataccgcctctggcagttgcatgaacgaaaagtcagcgaacccgagcaggggactttccgtgattttctg

SEQ ID NO: 495374 - DNA, 75 bp, synthetic construct
  source 1..75: mol_type = other DNA
cctggcacatttactcatgctggtacagaaaatctgttggcgctggtcagcgcgatggcgaagcaatatcaccat

SEQ ID NO: 495375 - DNA, 75 bp, synthetic construct
  source 1..75: mol_type = other DNA
tgataatttttctgaagcagaattttctacacactatgtagtgcatggatatgaaatccaacttaaacctcagca

SEQ ID NO: 495376 - DNA, 75 bp, synthetic construct
  source 1..75: mol_type = other DNA
cgggccatggtggaactcagggtcaagccatatgaatcaggcgataaagaatgcgtggttcagcaggcagggtct

SEQ ID NO: 495377 - DNA, 75 bp, synthetic construct
  source 1..75: mol_type = other DNA
tttatttatcagattgccgatcgctacgtaacggaggatgtcataccttgcctgggtgacaacggcattgatctt

SEQ ID NO: 495378 - DNA, 75 bp, synthetic construct
  source 1..75: mol_type = other DNA
agatattctggctctcgcaaggcaagtttctgcattaagttcatatacttacagtacgaaaatgtttatgaaaaa

SEQ ID NO: 495379 - DNA, 75 bp, synthetic construct
  source 1..75: mol_type = other DNA
ctggagtgtggacaccgagggctgaccagtctggtggacgagttaggccgctgccatgaagaatgtccggtcgag

SEQ ID NO: 495380 - DNA, 75 bp, synthetic construct
  source 1..75: mol_type = other DNA
taactttactggaggatgcattaacattattgacggagcttgagtataatcttctttcagggaaattttttatta

SEQ ID NO: 495381 - DNA, 75 bp, synthetic construct
  source 1..75: mol_type = other DNA
ggagtgtggacaccgtgggctgaccagtctggtggacgagttaggccgctgccatgaagaatgtccggtcgagga

SEQ ID NO: 495382 - DNA, 75 bp, synthetic construct
  source 1..75: mol_type = other DNA
gtgctggagcgcgaagggttaagcggtgaagagttccgtgtgcaggcgctggagtgtggacaccgtgggctgacc

SEQ ID NO: 495383 - DNA, 75 bp, synthetic construct
  source 1..75: mol_type = other DNA
tcggagaggaggccgttgtcgggctgcaggttgatgagaacggtttgatgactctttttgaaggtgaggtctcat

SEQ ID NO: 495384 - DNA, 75 bp, synthetic construct
  source 1..75: mol_type = other DNA
acactgattccgcaggtctatttttacgacccggaaatggcgctgtttgccatggagtatctgactcctcacgtg

SEQ ID NO: 495385 - DNA, 75 bp, synthetic construct
  source 1..75: mol_type = other DNA
gcttcaacgctggcgatgcaaaaaccgggctgtgaagtgatcaccggcaccaatttgcaactattactggaaatg

SEQ ID NO: 495386 - DNA, 75 bp, synthetic construct
  source 1..75: mol_type = other DNA
acggcattgtttttctgacggatttgctgggcggcacgccgtttcgcgtagcgaaacgctggcgatgcaaaaacc

SEQ ID NO: 495387 - DNA, 75 bp, synthetic construct
  source 1..75: mol_type = other DNA
cggtgaaaaaggggattttgagaaagcgatcaacgcaaaaatatcacaatcaaagctgtgctatgtcagcgccaa

SEQ ID NO: 495388 - DNA, 75 bp, synthetic construct
  source 1..75: mol_type = other DNA
tattataacgtaatttattttatatcaggtgttttattaacagttttcttaagttattcatgcaggccagaaaca

SEQ ID NO: 495389 - DNA, 75 bp, synthetic construct
  source 1..75: mol_type = other DNA
aaaggattgtgaaaaaacacacagatattataacgtaatttattttatatcaggtgttttattaacagttttctt

SEQ ID NO: 495390 - DNA, 75 bp, synthetic construct
  source 1..75: mol_type = other DNA
aatgacaccactgaaatcatgcaagaagcggtagcagatttgcaaccactcattaatgaactaatcgacaaggca

SEQ ID NO: 495391 - DNA, 75 bp, synthetic construct
  source 1..75: mol_type = other DNA
caggacacaacggaaatcatgcaacaagcggtggcagacttgcaaccactcattaatgaactaatcgacaaggct

SEQ ID NO: 495392 - DNA, 75 bp, synthetic construct
  source 1..75: mol_type = other DNA
atgactctggaaaaaagatgcctgtctttattcatggaaaacggatatgaccttcagacaggtgtatggttttgt

SEQ ID NO: 495393 - DNA, 75 bp, synthetic construct
  source 1..75: mol_type = other DNA
attggcattcccgtcgctaaaaagtgcaaagccctggcccgcgattccttaagcctgcttgcctacgtcaaataa

SEQ ID NO: 495394 - DNA, 75 bp, synthetic construct
  source 1..75: mol_type = other DNA
acatattcaggagctggaaagaaaagttcggtcccttgaattacgggtactttatctaaaaaagctgaaagcctt

SEQ ID NO: 495395 - DNA, 75 bp, synthetic construct
  source 1..75: mol_type = other DNA
aaaagcgccttgaagtcgtgaatcactacttcacaactgatgatggttataggatcatctcggcacgttttggtg

SEQ ID NO: 495396 - DNA, 75 bp, synthetic construct
  source 1..75: mol_type = other DNA
ctacttcactactgatgatggttacaggatcatctcggcacgttttggtgccccccgaatccaggtcaggacatg

SEQ ID NO: 495397 - DNA, 75 bp, synthetic construct
  source 1..75: mol_type = other DNA
gaaaaaggtttaattcccaaacctaaaggtgttagtgctgatccagagttgcgtatcaaggtcgtgaaagctgtg

SEQ ID NO: 495398 - DNA, 75 bp, synthetic construct
  source 1..75: mol_type = other DNA
tgcgggtgacaggcgataaaaaccccgattacaccgggacttacgttttcactaatgactttgcggccttgatgt

SEQ ID NO: 495399 - DNA, 75 bp, synthetic construct
  source 1..75: mol_type = other DNA
gaaaacatacccgtgggtgcaggtttttgaaaacaaaggtgcggcgatggggtgctctaacccgcatccgcacgg

SEQ ID NO: 495400 - DNA, 75 bp, synthetic construct
  source 1..75: mol_type = other DNA
ctagtatgttttgtgtacgaccctgaaggttgggtgactaacccgaaaggtgtgatagacgatcttgaggggaaa

SEQ ID NO: 495401 - DNA, 75 bp, synthetic construct
  source 1..75: mol_type = other DNA
taatgcgccaattgtcaagggggcatttaactgggatctgttacccagagtatctgtcggtgcctcagggtggac

SEQ ID NO: 495402 - DNA, 75 bp, synthetic construct
  source 1..75: mol_type = other DNA
tcagtcaacttgactggaaattcaataacgctgcaattattaaaggtgcaattaattgggatttgatgccccaga

SEQ ID NO: 495403 - DNA, 75 bp, synthetic construct
  source 1..75: mol_type = other DNA
caggcaacataagcaagtttttcagtaatgctctggagaaagtaaccatacccgaagtgagtcccctgcttatgc

SEQ ID NO: 495404 - DNA, 75 bp, synthetic construct
  source 1..75: mol_type = other DNA
ccggaccggagtcgtccgggaacaaatattaaagatgtttacagtgcccctgtatcaccaaatctaccggacctg

SEQ ID NO: 495405 - DNA, 75 bp, synthetic construct
  source 1..75: mol_type = other DNA
ggttacacagcaactggaacaggtaacggatattccggccagccagttaccagcagcgggtaataatgtaccggt

SEQ ID NO: 495406 - DNA, 75 bp, synthetic construct
  source 1..75: mol_type = other DNA
gaaaaaggcttaattcccaaacctaaaggtgttagtgctgatccagagttgcgtattaaggtcgtgaaagctgtg

SEQ ID NO: 495407 - DNA, 75 bp, synthetic construct
  source 1..75: mol_type = other DNA
ccagagccgtggaatggaacctacgaagacattggttcgctggcgatggttctccgtagtgcttcaatcgcaatg

SEQ ID NO: 495408 - DNA, 75 bp, synthetic construct
  source 1..75: mol_type = other DNA
gcgtcacgcaggcgcagcaacgctatgaccgtgttaaggatattgccggtaagctcagtcagcgcggtgctgttg

SEQ ID NO: 495409 - DNA, 75 bp, synthetic construct
  source 1..75: mol_type = other DNA
cagtggcatgaacctgtcgttgcgccgtcttccggcggaatgcgcgcgctgccacaggaggagattcaggtgcag

SEQ ID NO: 495410 - DNA, 75 bp, synthetic construct
  source 1..75: mol_type = other DNA
aaatgatttctatttgtggttacggcaagaaaggagagacactggggaacgtgcttactcgcgtgctgtgtgacg

SEQ ID NO: 495411 - DNA, 75 bp, synthetic construct
  source 1..75: mol_type = other DNA
gttcgtttttaacggcagatggcgatgcatgggttacagtgtttactgcggcggcaataattaacactgatgcac

SEQ ID NO: 495412 - DNA, 75 bp, synthetic construct
  source 1..75: mol_type = other DNA
aaatccacagcaacagggtgaggtaatttatggcgaaatttatctggcctatgccaactggatcggcacgaacca

SEQ ID NO: 495413 - DNA, 75 bp, synthetic construct
  source 1..75: mol_type = other DNA
ccgctggctcgcatcaccctcagctccgacggcaacggtagccagccgttctttgacgacgaggggaatttaacg

SEQ ID NO: 495414 - DNA, 75 bp, synthetic construct
  source 1..75: mol_type = other DNA
aaactgcgatgtgccaatcagcaagttactgccgacgcacgttaaccgcaacgttcctttgtttgaacaggcgct

SEQ ID NO: 495415 - DNA, 75 bp, synthetic construct
  source 1..75: mol_type = other DNA
caggtgtacgctcacggcaaactgatggtcaaagacggcaaggcgtgtgtgaaaggaacgtttgaaactgcataa

SEQ ID NO: 495416 - DNA, 75 bp, synthetic construct
  source 1..75: mol_type = other DNA
gtttgtgagcggatttattgaaggggtacagtcagcactggcgcccttcatggcgacagcctcccgttttgcgcc

SEQ ID NO: 495417 - DNA, 75 bp, synthetic construct
  source 1..75: mol_type = other DNA
aaaggcgagtgctgaagcgtatgcgcttatcgggctggatgcagccaggatgtcatcggctgtagccagtggtgg

SEQ ID NO: 495418 - DNA, 75 bp, synthetic construct
  source 1..75: mol_type = other DNA
aaaacggtcttgcacgcagcagtgacgaggcggttgatctgatggtggcgggcatgcagcgcatggggccggtta

SEQ ID NO: 495419 - DNA, 75 bp, synthetic construct
  source 1..75: mol_type = other DNA
cgacatgcaactgtctatgagcagatgctggttaagctggccgcagaccagcgcacactgaaagcgatttattca

SEQ ID NO: 495420 - DNA, 75 bp, synthetic construct
  source 1..75: mol_type = other DNA
atgttgttcgccaccatgtggaataccgggatccgtatcggtgaagcccggacactcaccccggaatccttcgac

SEQ ID NO: 495421 - DNA, 75 bp, synthetic construct
  source 1..75: mol_type = other DNA
ctggcgacaattgccggtgttacggtaggtaccctggtgtcctttgctatcacttcgctgatactgaagatggaa

SEQ ID NO: 495422 - DNA, 75 bp, synthetic construct
  source 1..75: mol_type = other DNA
caggtgcttgctgttccgccagcgtatacaagccagcgttgcgcgtcctgtggtcatacagcgaaagaaaatcgc

SEQ ID NO: 495423 - DNA, 75 bp, synthetic construct
  source 1..75: mol_type = other DNA
caggtgcttgctgttccgccagcgtaaacaagccagcgttgcgcgtactgtggtcatacagcgaaagataatcgc

SEQ ID NO: 495424 - DNA, 75 bp, synthetic construct
  source 1..75: mol_type = other DNA
attcacctgaacgcgtctccctgttacccattgcgccgggggtggattttgcaacagcgctctccctgagaagaa

SEQ ID NO: 495425 - DNA, 75 bp, synthetic construct
  source 1..75: mol_type = other DNA
tcgatgattatgggaccgcttggcggcctgatgattaaatatatcgataaggcactggaaaaacgcatccccgct

SEQ ID NO: 495426 - DNA, 75 bp, synthetic construct
  source 1..75: mol_type = other DNA
gttaaggcgatgaaacaagagggtgcattctcgttaagcagggttaagcgtatcgcctttgtttgcgatgcgggg

SEQ ID NO: 495427 - DNA, 75 bp, synthetic construct
  source 1..75: mol_type = other DNA
tatcgtcgttactcatgccagtctggaagggcgcgtgaaacgtgtgacggataaaccactgatattgattaataa

SEQ ID NO: 495428 - DNA, 75 bp, synthetic construct
  source 1..75: mol_type = other DNA
accattgaagtaaaacattacgccatagaaaacgtgccttcggatgctgatatcgtcgtcactcacgccagtctg

SEQ ID NO: 495429 - DNA, 75 bp, synthetic construct
  source 1..75: mol_type = other DNA
agacggcgaatggggtgcggacgcagacattactgatcggcggcgcggaccaaacgtgtaatataatagactccc

SEQ ID NO: 495430 - DNA, 75 bp, synthetic construct
  source 1..75: mol_type = other DNA
ggctggcccaagtccggggtctatctttgcttacctggcactgacgccgaaaggctcgttcctggcgacaattgc

SEQ ID NO: 495431 - DNA, 75 bp, synthetic construct
  source 1..75: mol_type = other DNA
caggtgcttgctgttccgccagcgtacacaagccagcgttgcgcgttctgtggtcatacagcgaaagaaaatcgc

SEQ ID NO: 495432 - DNA, 75 bp, synthetic construct
  source 1..75: mol_type = other DNA
aaggccgtttgtgcgggtactgtctgaaaaagtccgcgcgcgacgcggtcgcccgccaaaggatgagggtctggt

SEQ ID NO: 495433 - DNA, 75 bp, synthetic construct
  source 1..75: mol_type = other DNA
agtgccctcctctggtatatgcccgaccagcggcatcacatgctgttcgccaccatgtggaacaccggcatccgt

SEQ ID NO: 495434 - DNA, 75 bp, synthetic construct
  source 1..75: mol_type = other DNA
ccacataccttccggcacagctatatcatgcacatgctctatcaccgccagccccggaaagtcatccaggcactg

SEQ ID NO: 495435 - DNA, 75 bp, synthetic construct
  source 1..75: mol_type = other DNA
ccgtgttttatgaagatgaagtggatattcacctcaatcccaaaattggcgcagactggcagctacgtgggcagc

SEQ ID NO: 495436 - DNA, 75 bp, synthetic construct
  source 1..75: mol_type = other DNA
ctattcgaacatatttgcgcattgctgcatgagcttgttaagcattctcccggcgatttcggttatcagcgttcc

SEQ ID NO: 495437 - DNA, 75 bp, synthetic construct
  source 1..75: mol_type = other DNA
ggttgggaggtgagtagacatttcagtaaaagtatgccttacaatggattacatctggtagttaatagagaaaat

SEQ ID NO: 495438 - DNA, 75 bp, synthetic construct
  source 1..75: mol_type = other DNA
cttcctggctggttgagtggaaaaatgccactgaaacgcaatggcttaaagatgccccgtcacagccattgcaac

SEQ ID NO: 495439 - DNA, 75 bp, synthetic construct
  source 1..75: mol_type = other DNA
tgtgaaaaatgtcactgtcagccagtcctgcggtaagtggtacatcagtattcagacagaaagtgaagtatcaac

SEQ ID NO: 495440 - DNA, 75 bp, synthetic construct
  source 1..75: mol_type = other DNA
cgcagagactaccttcataaagtcacaacgatcatcagcaaaaaccacgcagtgattgtcattgaggatttgaag

SEQ ID NO: 495441 - DNA, 75 bp, synthetic construct
  source 1..75: mol_type = other DNA
acaggcttatcttatactacacctaccttgccctatgatgatggatactcagttaccaatccattaaatccagcc

SEQ ID NO: 495442 - DNA, 75 bp, synthetic construct
  source 1..75: mol_type = other DNA
cttgagcaaatcacccgcaagttgctctcccgtctcgaccagatggaacaagacggcatggtcctcgaagcgatg

SEQ ID NO: 495443 - DNA, 75 bp, synthetic construct
  source 1..75: mol_type = other DNA
aacaaatgctaaaatttcgcgccagccgccacgaagattttccttaccaggaaatccttctgacccgtctttgta

SEQ ID NO: 495444 - DNA, 75 bp, synthetic construct
  source 1..75: mol_type = other DNA
atcggcccggcggtgttaattgccaatactttcgtcaaagagtgtattgaggcgctggtacatgcgggttatctg

SEQ ID NO: 495445 - DNA, 75 bp, synthetic construct
  source 1..75: mol_type = other DNA
ggaaaaccacagtattcagccttctgaattgagttgtgctcttggatcatcccgtaccaacgcgacgcgtattgc

SEQ ID NO: 495446 - DNA, 75 bp, synthetic construct
  source 1..75: mol_type = other DNA
aacaaatgctaaaatttcgcgccagccgccatgaagattttccttatcaggagattcttctgactcgtctttgta

SEQ ID NO: 495447 - DNA, 75 bp, synthetic construct
  source 1..75: mol_type = other DNA
gcggtaatggaaaactatcagcaggctgatggccgtattgaagtaccagaagttctgcgtccgtacatgaacgga

SEQ ID NO: 495448 - DNA, 75 bp, synthetic construct
  source 1..75: mol_type = other DNA
gaagagagggacgtcctggaattcagcagcctgactgagctgaaaaaatatcgcaaaagccacccggaaaagatg

SEQ ID NO: 495449 - DNA, 75 bp, synthetic construct
  source 1..75: mol_type = other DNA
ccatatcaacattgcggaagccgatcacttcaaacagttcctgcgtcagattaagcgtgccggcctctatatccg

SEQ ID NO: 495450 - DNA, 75 bp, synthetic construct
  source 1..75: mol_type = other DNA
gttcattggatcttatcaatgaacaaacggcatttatttctaccggcaaagacagcacggctttgttgaataaat

SEQ ID NO: 495451 - DNA, 75 bp, synthetic construct
  source 1..75: mol_type = other DNA
agccgtctgctgaaacgttatcgtcagtccgggccgcttggtatgaataaccagagtcgcggtcgcactggcaac

SEQ ID NO: 495452 - DNA, 75 bp, synthetic construct
  source 1..75: mol_type = other DNA
tgccaaaggcacgtattaatctaaaacttgacctgcatacggggggggccagcaagaaaactgagcttcccctga

SEQ ID NO: 495453 - DNA, 75 bp, synthetic construct
  source 1..75: mol_type = other DNA
ttagcggcggggcacgccgttcttgcctgtggagagatggtgcagtcaggccgtccgttgaagcaggaacccacc

SEQ ID NO: 495454 - DNA, 75 bp, synthetic construct
  source 1..75: mol_type = other DNA
ttgaagttcgtgaccacgtgacgctgggtgaaatgcattcaggtcttgactttgcagcagcagttaagctgaccg

SEQ ID NO: 495455 - DNA, 75 bp, synthetic construct
  source 1..75: mol_type = other DNA
ctggtaaccgtctgttgccagcgtcactaacagatcaggctctcagtataatcagggagcaataccgtgattttg

SEQ ID NO: 495456 - DNA, 75 bp, synthetic construct
  source 1..75: mol_type = other DNA
tactggcgagctgatacaaattgatggctgcgaccaccactggtttgaaaaccggggtcgaccctgttctgccct

SEQ ID NO: 495457 - DNA, 75 bp, synthetic construct
  source 1..75: mol_type = other DNA
cgccaatgatttttctgtcgagcatctgtttacgtcgctggaagcgatggcggaaagcgatgccattgacgcggt

SEQ ID NO: 495458 - DNA, 75 bp, synthetic construct
  source 1..75: mol_type = other DNA
atggtgcataacgtcaccgtgggtaaagccgacctctctaccacgctgcaaacgagccagaaaaagctggatgag

SEQ ID NO: 495459 - DNA, 75 bp, synthetic construct
  source 1..75: mol_type = other DNA
aggcgctgggagaattgccgaatcagctaatcagcgaactgccaaatattcaggtctttggcgcagtaggggata

SEQ ID NO: 495460 - DNA, 75 bp, synthetic construct
  source 1..75: mol_type = other DNA
gaacaaagcggtggtgactaccgccacctggaaagacaacgacgttattaaggcgctgggagaattgccgaatca

SEQ ID NO: 495461 - DNA, 75 bp, synthetic construct
  source 1..75: mol_type = other DNA
accagcgtcaccacatgttgttcgccaccatgtggaataccgggatccgtatcggtgaagcccggacactcaccc

SEQ ID NO: 495462 - DNA, 75 bp, synthetic construct
  source 1..75: mol_type = other DNA
atgaacaacattattcccctgcagaattcaccagaacgcgtttcgttattgccgatcgccccgggcgttgatttt

SEQ ID NO: 495463 - DNA, 75 bp, synthetic construct
  source 1..75: mol_type = other DNA
ttcccgatatggtgcgcgcccgtctgcataaggtgacaggcctgaccctgcgtgatgccggtatgaatgcagagg

SEQ ID NO: 495464 - DNA, 75 bp, synthetic construct
  source 1..75: mol_type = other DNA
tgcttttgagcgtagggatgtcatcggtcttggcggcgggaaccgtcaaggtgtttagcaatggtagtcgcgagg

SEQ ID NO: 495465 - DNA, 75 bp, synthetic construct
  source 1..75: mol_type = other DNA
agttgtttgctgaactggtggatgagcatctggttaatcatccggggctggcagtcagtcgcatcactgccaaac

SEQ ID NO: 495466 - DNA, 75 bp, synthetic construct
  source 1..75: mol_type = other DNA
accgccagtttgctggatagcggtgtggatgctcacggcgtagtggtgatggattacagtgatttcagcgtcacc

SEQ ID NO: 495467 - DNA, 75 bp, synthetic construct
  source 1..75: mol_type = other DNA
ttgggaagaaatgacctgcttattcgcaccttccctaaagtcattactctttcacgtagcggttcgctgccggaa

SEQ ID NO: 495468 - DNA, 75 bp, synthetic construct
  source 1..75: mol_type = other DNA
tgatgggggcaggcggcccccgtctgtttgttgcgggtctggtgttgatggtggtttcctgccttgtcaccctcg

SEQ ID NO: 495469 - DNA, 75 bp, synthetic construct
  source 1..75: mol_type = other DNA
caggtaactttacggattagtgtgggggttgcgccgctgaacccacaaatgagtcactatcgcgagtggttgaaa

SEQ ID NO: 495470 - DNA, 75 bp, synthetic construct
  source 1..75: mol_type = other DNA
actacgcgctatttccgcatatgtcgattcttgacaacgtcgcctatgggctgatggtcaaaggcgtgaataaaa

SEQ ID NO: 495471 - DNA, 75 bp, synthetic construct
  source 1..75: mol_type = other DNA
cgccagcaatctgccaccgtgggagcgggatgtgaataccgtcttccaggactacgcgctttttccgcatatgtc

SEQ ID NO: 495472 - DNA, 75 bp, synthetic construct
  source 1..75: mol_type = other DNA
gattcttgacaatgtggcctacgggctgatggtcaaaggcgtggataaaaaacagcgctacaccatggcgcaaga

SEQ ID NO: 495473 - DNA, 75 bp, synthetic construct
  source 1..75: mol_type = other DNA
aaaatgaaaaaaacagattatgtaaccagtctagagcttgcgctcctcagatgctgagaaaagaaatattgagac

SEQ ID NO: 495474 - DNA, 75 bp, synthetic construct
  source 1..75: mol_type = other DNA
ccgcagcctggcggatgcccttcagcagtccggcggcgaagacggtggcagtgtggtgttcccgccggtgctggt

SEQ ID NO: 495475 - DNA, 75 bp, synthetic construct
  source 1..75: mol_type = other DNA
ggacagcaccctcagcatgtggccggataaccgtatcgcccgtgacgcgcactatctttaccggtatgaccgtta

SEQ ID NO: 495476 - DNA, 75 bp, synthetic construct
  source 1..75: mol_type = other DNA
gtggtttttacaacatcttgggctggaaccactgctgactgcgttccttacattacctgcggtgggcggaaatac

SEQ ID NO: 495477 - DNA, 75 bp, synthetic construct
  source 1..75: mol_type = other DNA
tctggcataatccggggctggggctgtttttactgctgcttggcccgctaatgtggtttggcattgtctatttcg

SEQ ID NO: 495478 - DNA, 75 bp, synthetic construct
  source 1..75: mol_type = other DNA
tggactgatggcagagaaactttgtggcatgacgggaagcttcgccctgcgaccggaacatatccgcctcaacac

SEQ ID NO: 495479 - DNA, 75 bp, synthetic construct
  source 1..75: mol_type = other DNA
gccggattcgaacaactttccggcggggctatctctatctttggtaagcctgccagtaatctgccgccctgggat

SEQ ID NO: 495480 - DNA, 75 bp, synthetic construct
  source 1..75: mol_type = other DNA
tgcgctgatggcagagaaactttgcggaatgatgggtagcttcgcattgcgcccggaacatattcgcctcaatac

SEQ ID NO: 495481 - DNA, 75 bp, synthetic construct
  source 1..75: mol_type = other DNA
tgagcaggtcgattccccgcgcgatctctatatgcgcccgcgcacgccgtttgttgccggattcgtcgggacatc

SEQ ID NO: 495482 - DNA, 75 bp, synthetic construct
  source 1..75: mol_type = other DNA
cagtgctttggtggtggagataaggcccatatggaagaagagaataaagcatataaaacagcagctgattgcagt

SEQ ID NO: 495483 - DNA, 75 bp, synthetic construct
  source 1..75: mol_type = other DNA
ggtgcaggtgtacaggctgatatcaccaaaaacatgggagcatatgcaagccttgactacaccaaaggtgacgac

SEQ ID NO: 495484 - DNA, 75 bp, synthetic construct
  source 1..75: mol_type = other DNA
atgttacttttggcggtcacgatattaccgccgacggtaaaccaagatttcgttgaaggtgtaaaagttagtggt

SEQ ID NO: 495485 - DNA, 75 bp, synthetic construct
  source 1..75: mol_type = other DNA
ttacaaccaccacgcctgtcgcaccgagtgtgacgcgatgactgagcactattatcgcttacgcgactacgcgct

SEQ ID NO: 495486 - DNA, 75 bp, synthetic construct
  source 1..75: mol_type = other DNA
gctggtcacccactggcactatgacgaagcagaccgcctcacgcaccgcaccgtgaatggcgaaaccgcagagcg

SEQ ID NO: 495487 - DNA, 75 bp, synthetic construct
  source 1..75: mol_type = other DNA
atagataaccacgggaaggaaataacaaacagaaaaggattgcctaatgtctgcagagttcatggtaatatgtaa

SEQ ID NO: 495488 - DNA, 75 bp, synthetic construct
  source 1..75: mol_type = other DNA
cggagcttaccgcaattactgcctcagtggtcccggacgagttacgcatcggcttctggccgcagcactttggct

SEQ ID NO: 495489 - DNA, 75 bp, synthetic construct
  source 1..75: mol_type = other DNA
acatcgcgcgcggttttatcgtcgactatccgattctgctgctggatgaacccaccgcctcgctggacgctaaaa

SEQ ID NO: 495490 - DNA, 75 bp, synthetic construct
  source 1..75: mol_type = other DNA
gcgaatgcgtggtgctccacggccattccggcagcggcaaatcaaccctgctgcgctcgctgtacgccaactatc

SEQ ID NO: 495491 - DNA, 75 bp, synthetic construct
  source 1..75: mol_type = other DNA
gccatcgtcggcatcttccacgacgaagccgtacgcaatgacgtcgccgaccgcctgcacccaatgggagcctct

SEQ ID NO: 495492 - DNA, 75 bp, synthetic construct
  source 1..75: mol_type = other DNA
attgatgaatccgcaaaaatctttctggtggcgctcggtacgctattccccatttatatcaacacctggcatggc

SEQ ID NO: 495493 - DNA, 75 bp, synthetic construct
  source 1..75: mol_type = other DNA
ccaaagtgaaagccgttagtgcggcgctgggagaaaacgtcactgcggcacaaatcaaagccgcgctggctgagg

SEQ ID NO: 495494 - DNA, 75 bp, synthetic construct
  source 1..75: mol_type = other DNA
ataagcagcaggtgtatttcaccaggcagaattatccgcatgagtgcatgcaaccggtctggaagtttcaacagt

SEQ ID NO: 495495 - DNA, 75 bp, synthetic construct
  source 1..75: mol_type = other DNA
gcgataaaagatggtgagttcttctctatgctggggccgtccggctccggcaaaaccacctgcctgcgcctgatt

SEQ ID NO: 495496 - DNA, 75 bp, synthetic construct
  source 1..75: mol_type = other DNA
agctttggcagcatggcaggcagtaatgccgcatataaactgaccagcacatacacccccgcaggccagttacag

SEQ ID NO: 495497 - DNA, 75 bp, synthetic construct
  source 1..75: mol_type = other DNA
gctatatcatgcacatgctctatcaccgccagccccggaaagtcatccaggcactggctggtcacagggatccac

SEQ ID NO: 495498 - DNA, 75 bp, synthetic construct
  source 1..75: mol_type = other DNA
agcgcccttctcttttatatgcccgatcagcgacaccatatgttgtttgcaacgatgtggaataccgggatccgt

SEQ ID NO: 495499 - DNA, 75 bp, synthetic construct
  source 1..75: mol_type = other DNA
ataaataccggggccggatggtggcgcaccgtcacacgggccggccggaaatccgttaccgttacgacagcgacg

SEQ ID NO: 495500 - DNA, 75 bp, synthetic construct
  source 1..75: mol_type = other DNA
atgagaccagacatgcgtacaacgcgcaggggctggcgaaccgctgtataccggacagcctgcccgccgtggaat

SEQ ID NO: 495501 - DNA, 75 bp, synthetic construct
  source 1..75: mol_type = other DNA
ccgacccggcgggaaaccgcctgccggacccggagctgcacccggacagtaccctcacggcgtggccggataacc

SEQ ID NO: 495502 - DNA, 75 bp, synthetic construct
  source 1..75: mol_type = other DNA
aaaccatgacatggagccgttacggtcagttgctgaccgtcactgactgttccggttatgtaacccgttatgacc

SEQ ID NO: 495503 - DNA, 75 bp, synthetic construct
  source 1..75: mol_type = other DNA
gtttgaccagttttatgagttagaaggttggtcttccactctgatcaattcgcggtgggtgcttgagctgatgac

SEQ ID NO: 495504 - DNA, 75 bp, synthetic construct
  source 1..75: mol_type = other DNA
gtaacctggaagagtttttcgcccgtgagtcctgcggctggtgtacgccatgtcgcgacggtctgccgtggagcg

SEQ ID NO: 495505 - DNA, 75 bp, synthetic construct
  source 1..75: mol_type = other DNA
atttaccagaacgcgtttccctgttacccattgcgccgggggtggattttgcgaccgctgtggcattacgacgca

SEQ ID NO: 495506 - DNA, 75 bp, synthetic construct
  source 1..75: mol_type = other DNA
gctggtcacccactggcactatgacgaagcagaccgcatcacgcaccgcaccgtgaagggtgaaaccgcagaaca

SEQ ID NO: 495507 - DNA, 75 bp, synthetic construct
  source 1..75: mol_type = other DNA
gtggtctgacgcgcagtatggaatacgatgctgccggacgggtcatccgcctgaccagtgaaaacggcagccaca

SEQ ID NO: 495508 - DNA, 75 bp, synthetic construct
  source 1..75: mol_type = other DNA
ttgccggggcagcagtatgatgaggagtcgggactgtattacaaccgtcaccggtactacgatccgttgcagggg

SEQ ID NO: 495509 - DNA, 75 bp, synthetic construct
  source 1..75: mol_type = other DNA
tgcccgcgccgttcaggcgggtattccgctggcacgcgtcactctcagctccgacggcaacggtagccagccgtt

SEQ ID NO: 495510 - DNA, 75 bp, synthetic construct
  source 1..75: mol_type = other DNA
cagcaatctcatctcagcttcgatgagttcctggcggttgccgctaaacagtccagcctgatggttgagtcgctg

SEQ ID NO: 495511 - DNA, 75 bp, synthetic construct
  source 1..75: mol_type = other DNA
cccgcgctgagcgtcttcacatccgcactgaaatcaaccgcaggctctggcgcgcatcacgcgtcgcgcaaatca

SEQ ID NO: 495512 - DNA, 75 bp, synthetic construct
  source 1..75: mol_type = other DNA
cccagcgacatgcgtcttcttcgatcaggacagcaagcaatatgaccgctctgatgctatgtgggctatggaaat

SEQ ID NO: 495513 - DNA, 75 bp, synthetic construct
  source 1..75: mol_type = other DNA
tggttgaccgtcagacagggcaggttatcgcgcttaatgacctttcgcagggtaactatgaagtgactgtcgatg

SEQ ID NO: 495514 - DNA, 75 bp, synthetic construct
  source 1..75: mol_type = other DNA
ttaccctgctgcagggagcgcatttgtatgcgccggaagatcggggaatttgcgatgtcctcatcgctaacggca

SEQ ID NO: 495515 - DNA, 75 bp, synthetic construct
  source 1..75: mol_type = other DNA
aaactgcgatgtgccgatcagcaagctgctgccgacccacgttaaccgcaacgttccgttgtttgagcaggcgct

SEQ ID NO: 495516 - DNA, 75 bp, synthetic construct
  source 1..75: mol_type = other DNA
tagatgtattgattatattaatccagagcataaaaaaacgataaaggctttacaagatgctggctatctcaagta

SEQ ID NO: 495517 - DNA, 75 bp, synthetic construct
  source 1..75: mol_type = other DNA
gggcgggctgacgcgcagtatggagtacgatgctgccggacgtgtcatcagcctgaccaacgagaacggcagcca

SEQ ID NO: 495518 - DNA, 75 bp, synthetic construct
  source 1..75: mol_type = other DNA
tgcgctgctgtcttcagctatctcgccgaagatatggcagaactgcaaagcctcatcaaccagcaacaccaccac

SEQ ID NO: 495519 - DNA, 75 bp, synthetic construct
  source 1..75: mol_type = other DNA
aaccagtcgcccctgccgaaggtattgcccgcgccgttcaggcgggtattccgctggcacgcgtcaccctcagct

SEQ ID NO: 495520 - DNA, 75 bp, synthetic construct
  source 1..75: mol_type = other DNA
gttggtctgctgggcaccgactctatctctcgccacccggaatccctgctcgccaagacccgtgcgctcaatgaa

SEQ ID NO: 495521 - DNA, 75 bp, synthetic construct
  source 1..75: mol_type = other DNA
ccgttggcgagctgttggcgtgggtaaaagaagatgaaaaccgtcgcaaaggtgagatggtactgattgtcgaag

SEQ ID NO: 495522 - DNA, 75 bp, synthetic construct
  source 1..75: mol_type = other DNA
ggcataaagcacaggaggatgatttgcccgccgatgcgctgcgcacgctggcgctgttgcaggcagaactgccgc

SEQ ID NO: 495523 - DNA, 75 bp, synthetic construct
  source 1..75: mol_type = other DNA
aggtgctgttatccctgctcagtttctgcaccgcatgcagccttaacggtgtccagacccgcgagtgtggtcaca

SEQ ID NO: 495524 - DNA, 75 bp, synthetic construct
  source 1..75: mol_type = other DNA
tgaaaaaagcggcggcgctggccgcagaaattcacggcgtgaagaaaaatgcgctgtataagtatgcgctggagc

SEQ ID NO: 495525 - DNA, 75 bp, synthetic construct
  source 1..75: mol_type = other DNA
ttgaagcggagccgcgcacgctgattttttatgaatctacccaccgtctgttagatagcctggaagatatcgttg

SEQ ID NO: 495526 - DNA, 75 bp, synthetic construct
  source 1..75: mol_type = other DNA
atgaaacaacaccaatcggcggataattctcagggccagctttacatcgtaccgacgccaatcggcaatctggcg

SEQ ID NO: 495527 - DNA, 75 bp, synthetic construct
  source 1..75: mol_type = other DNA
acgaaattaacgacagaaattgccagctattgcgctgatgaatttaaaaaacttaacgacaaaaggaactggtaa

SEQ ID NO: 495528 - DNA, 75 bp, synthetic construct
  source 1..75: mol_type = other DNA
atgaaaaatatattgtttaataactggctgaagatttcagtcatgaaaaatggtgatttgtcgctagctgacatt

SEQ ID NO: 495529 - DNA, 75 bp, synthetic construct
  source 1..75: mol_type = other DNA
cgttatgaaaaatggcgatttgtctcttattcaacttggtcttgataaagaaaaacgcgaaataactgaatctgt

SEQ ID NO: 495530 - DNA, 75 bp, synthetic construct
  source 1..75: mol_type = other DNA
tgatgctgaagctatctgtgaagcagcatcacgtccatctatgcgtttcgtgcagcccagaaccgaatctcagca

SEQ ID NO: 495531 - DNA, 75 bp, synthetic construct
  source 1..75: mol_type = other DNA
ccagtcaggatggggcggtaaaccggatgtgcgggttatccgcaatctgattacggaaagtgaagtggcggtgaa

SEQ ID NO: 495532 - DNA, 75 bp, synthetic construct
  source 1..75: mol_type = other DNA
taaggccgcgcagccagagcctcagcctcaacaacagccagaacctccttatggcttcgacgatgatgcgccatt

SEQ ID NO: 495533 - DNA, 75 bp, synthetic construct
  source 1..75: mol_type = other DNA
gcgctgctacaggcagaactgccgttgaaaaaagcggcggcgctggcggcagaaattcacggcgtgaagaaaaat

SEQ ID NO: 495534 - DNA, 75 bp, synthetic construct
  source 1..75: mol_type = other DNA
tacctcaccggatgatccactattaaaagcgcgcatggaagattgtcgtttgcgcggtggcgacccgttcgatga

SEQ ID NO: 495535 - DNA, 75 bp, synthetic construct
  source 1..75: mol_type = other DNA
tgcgcggtggcgacccgttcgatgaagtgcaactaccagatgccgtcattactctcaaacagggggtagggcgac

SEQ ID NO: 495536 - DNA, 75 bp, synthetic construct
  source 1..75: mol_type = other DNA
tggtgatatcagcacctgcgtcagcgtggcggaagattcgcaggcgtggccgctggtcaccagcaccaacgacaa

SEQ ID NO: 495537 - DNA, 75 bp, synthetic construct
  source 1..75: mol_type = other DNA
tacctcgcacgccatgatgcgcgatctggctgagcagttccgcgctaccatgacgcttcccgtattgttgcaggg

SEQ ID NO: 495538 - DNA, 75 bp, synthetic construct
  source 1..75: mol_type = other DNA
ctccagtcgacaattgctcgatctggcaaaagacatcaccatcgcctatcgcaccgaattaaaagacactcagca

SEQ ID NO: 495539 - DNA, 75 bp, synthetic construct
  source 1..75: mol_type = other DNA
aaccggtacgggcaaaacctacgcttacctggcccctgcgctgcgggcgaaaaagaaagtcattatctcgaccgg

SEQ ID NO: 495540 - DNA, 75 bp, synthetic construct
  source 1..75: mol_type = other DNA
actttatggcacgcaagctggcagagttagggcattttccaaagctgatatcaccgcaatttgtccgcccgttcg

SEQ ID NO: 495541 - DNA, 75 bp, synthetic construct
  source 1..75: mol_type = other DNA
gacagcgcttgctgagtattccctgcgttggaacgctgactgccagtattatttcaactgagattggcgacggga

SEQ ID NO: 495542 - DNA, 75 bp, synthetic construct
  source 1..75: mol_type = other DNA
atcactgcgttaagcgccgcgggtttaccatccgatcgtttttgttatgaaggctttttccctgccaaatcaaaa

SEQ ID NO: 495543 - DNA, 75 bp, synthetic construct
  source 1..75: mol_type = other DNA
tcgaacgtctcgaacagcaggcgctggcgggcggcgatctgccggtacaaattttaagcgatgtgatcctgctac

SEQ ID NO: 495544 - DNA, 75 bp, synthetic construct
  source 1..75: mol_type = other DNA
aaccagtagtttctgggaaggggtggatgtgcgcggcgatacgctgtcactggtgattatcgacaagttgccgtt

SEQ ID NO: 495545 - DNA, 75 bp, synthetic construct
  source 1..75: mol_type = other DNA
atgatgcgcgatctggccgagcagttccgtgccaccatgacgcttcccgttttgttgcagggtgaaaccagtaaa

SEQ ID NO: 495546 - DNA, 75 bp, synthetic construct
  source 1..75: mol_type = other DNA
gttattatctcgattcggtggaagtccacctgcccccgttctgggagcagtacatcaacgatgaaaatagcgttg

SEQ ID NO: 495547 - DNA, 75 bp, synthetic construct
  source 1..75: mol_type = other DNA
aatcgatcttggtgctgatccgcatagttgtgatgatggtatccatgctgccgcaactggcgctatctggctggg

SEQ ID NO: 495548 - DNA, 75 bp, synthetic construct
  source 1..75: mol_type = other DNA
aagagcgccgcttgctgcaacataccagtgcgcaacttcacgcaggcgaaacgctgacgctgcaaaaactggtgt

SEQ ID NO: 495549 - DNA, 75 bp, synthetic construct
  source 1..75: mol_type = other DNA
aagagcgccgcttgctgcaacataccagtgcacaactacctgcgggcaaaacgctgtcgctgcaaaaacgggtgt

SEQ ID NO: 495550 - DNA, 75 bp, synthetic construct
  source 1..75: mol_type = other DNA
tgatccgcatagctgcgatgacggtatccatgccgccgcaactggcgctatctggctgggggcgattcagggttt

SEQ ID NO: 495551 - DNA, 75 bp, synthetic construct
  source 1..75: mol_type = other DNA
gagtggggtagtgcatcgcttcgtcagcttgaaatgtgtgtacagcagagttacgaccaacttcttgcagcatcc

SEQ ID NO: 495552 - DNA, 75 bp, synthetic construct
  source 1..75: mol_type = other DNA
ggtcagcttatatccgtggctgaagaatctgttttctgtttgggtgattttattttgcccttcaatgggaccgct

SEQ ID NO: 495553 - DNA, 75 bp, synthetic construct
  source 1..75: mol_type = other DNA
ggcgcgctatttccgtgggaaagcgcgcgcagcggcgaagaagagacgccggaatttgccgccattaacattcgc

SEQ ID NO: 495554 - DNA, 75 bp, synthetic construct
  source 1..75: mol_type = other DNA
caatactggcaggcaacgggagatgaaagcttcatcgctcacgaaggcatggcgctactgctggaaactgcgaaa

SEQ ID NO: 495555 - DNA, 75 bp, synthetic construct
  source 1..75: mol_type = other DNA
aggatggacgcagtgatgtggccatcagctgttgctgtatggtgagcggtgatgtgcagcaatgctataccgcca

SEQ ID NO: 495556 - DNA, 75 bp, synthetic construct
  source 1..75: mol_type = other DNA
cttattagcgtaattgaggaatctgatttctgtttacgcgattttattttgcccttcaatgggaccgctaccacg

SEQ ID NO: 495557 - DNA, 75 bp, synthetic construct
  source 1..75: mol_type = other DNA
aaaatgacatcaacgaactggtgaacctgcctgacgtcatagggatggagattaccttgaatggtgaactttttg

SEQ ID NO: 495558 - DNA, 75 bp, synthetic construct
  source 1..75: mol_type = other DNA
cgcgcagcggcgaagaagagacgccggaatttgccgccattaatatccgcaccggactgcgccagaaagtggcct

SEQ ID NO: 495559 - DNA, 75 bp, synthetic construct
  source 1..75: mol_type = other DNA
cggtggtactgagcgcagcattttccggcccggcattggccgaaggtatcaatagtttttctcaggcgaaagccg

SEQ ID NO: 495560 - DNA, 75 bp, synthetic construct
  source 1..75: mol_type = other DNA
ctgctttgctggcctgctcactacttgcggggtggctgttcaaaatacgcgcccggcggcgacaattgccctgga

SEQ ID NO: 495561 - DNA, 75 bp, synthetic construct
  source 1..75: mol_type = other DNA
cccggatcgttccggcctgtggcgctatctcagcaccacactgctgctactgacgatgctgggtagcgccattta

SEQ ID NO: 495562 - DNA, 75 bp, synthetic construct
  source 1..75: mol_type = other DNA
tgaagaatatgcgctgagtcgtccgcgcgggctgcgtgaagcgttgctgatcgtcgcctccttcctgatgttctt

SEQ ID NO: 495563 - DNA, 75 bp, synthetic construct
  source 1..75: mol_type = other DNA
atgcgctggtaaatctcggcaacagtaaggactgggacgcactggtaaaacgcgccaacgccggaaaactcgacg

SEQ ID NO: 495564 - DNA, 75 bp, synthetic construct
  source 1..75: mol_type = other DNA
gtattcgtatgctgaaaattcaggaatattacgaaagctgcctgaatcctaagctactcacatcttcagaaagcc

SEQ ID NO: 495565 - DNA, 75 bp, synthetic construct
  source 1..75: mol_type = other DNA
gcctgcgtggtacgccgcgccgttggggcttatttggcgagaacgatcaagagcagataaacaacatttcgctcg

SEQ ID NO: 495566 - DNA, 75 bp, synthetic construct
  source 1..75: mol_type = other DNA
gcaactttatgtacagtcagtggaatggtggcgagggtcagtatggacagtgcgccatgaaggtggatttcaaag

SEQ ID NO: 495567 - DNA, 75 bp, synthetic construct
  source 1..75: mol_type = other DNA
cagtggtactgagcgcagcattttccggcccggcgttggccgaaggtatcaatagtttttctcaggcgaaagccg

SEQ ID NO: 495568 - DNA, 75 bp, synthetic construct
  source 1..75: mol_type = other DNA
aaaaagctgccgaaccaccagcgcgtgcacgcggtgccattgcgcgcacctacttctatatgcgcgaccaataca

SEQ ID NO: 495569 - DNA, 75 bp, synthetic construct
  source 1..75: mol_type = other DNA
ctgttttctgatgttgtcgacctaattgtcaaacgtgctatttatcgcaaaaaaataaccacgacggatgaatta

SEQ ID NO: 495570 - DNA, 75 bp, synthetic construct
  source 1..75: mol_type = other DNA
aaaaataaccacgacggatgaattaataaaattcatggctgaacaatccacatattgcgcgtgtgagctaaaaaa

SEQ ID NO: 495571 - DNA, 75 bp, synthetic construct
  source 1..75: mol_type = other DNA
gcgagcgcgacgaacgcattgcaaaggtgcaaggcaatcataacccgtatgtgcaacgcgcttgccaggcgcaaa

SEQ ID NO: 495572 - DNA, 75 bp, synthetic construct
  source 1..75: mol_type = other DNA
gcattgaacaaatcttccctgagctttcgaacttaattgatattattaataaatggctttcccatggaaacattg

SEQ ID NO: 495573 - DNA, 75 bp, synthetic construct
  source 1..75: mol_type = other DNA
caaaagataatacctgagccatcaggagaggctgtgaaagaaatgattgatggtaaaaaggaacgactgaagggg

SEQ ID NO: 495574 - DNA, 75 bp, synthetic construct
  source 1..75: mol_type = other DNA
cgaagaaaatattgtaggaagacagtattctgaactacaaaatcaccataaaacagaagcattatctcagaataa

SEQ ID NO: 495575 - DNA, 75 bp, synthetic construct
  source 1..75: mol_type = other DNA
caacgccactggagcgccgactggcgcaaacctgcaacgggatttctgatctgcaggtgtcactgcgtgacttgt

SEQ ID NO: 495576 - DNA, 75 bp, synthetic construct
  source 1..75: mol_type = other DNA
atgccgccctgctggaaaaactccaggctgtcgcagagttccttcgggaagccgaaggctggggatggtgcgccg

SEQ ID NO: 495577 - DNA, 75 bp, synthetic construct
  source 1..75: mol_type = other DNA
ttgttaaagggataaataattatggggataagattactgttaccgtgaagccggaaggtgacgagcaagcgtcgc

SEQ ID NO: 495578 - DNA, 75 bp, synthetic construct
  source 1..75: mol_type = other DNA
gagggttatcgtgtctggttaacctcgcacaacgacttaggtatcacccgttacatggttgctatgggaaccgca

SEQ ID NO: 495579 - DNA, 75 bp, synthetic construct
  source 1..75: mol_type = other DNA
gatcctaaaaccagcgcgccaatcatcgccagataccgtcaggcaggacatgatatttatctcgatgactttggt

SEQ ID NO: 495580 - DNA, 75 bp, synthetic construct
  source 1..75: mol_type = other DNA
ctttgaagatatgggtagctggctacaccagcacccggatcaacatatttcaataaatcttgaatccacagtact

SEQ ID NO: 495581 - DNA, 75 bp, synthetic construct
  source 1..75: mol_type = other DNA
gatgtaaaacatcaggttgataatatggtcacagaatataaagggaatataggtgatactcagaacagcatacgt

SEQ ID NO: 495582 - DNA, 75 bp, synthetic construct
  source 1..75: mol_type = other DNA
tgacgctgctgattataagaaacgtatttgaagatatgggcgactggctgcgacaacacccgaaccagcatattt

SEQ ID NO: 495583 - DNA, 75 bp, synthetic construct
  source 1..75: mol_type = other DNA
ctccttagccaatggcaaaattgtcggtgccgaagcactggcacgttggccacagacggacggtagctggttgtc

SEQ ID NO: 495584 - DNA, 75 bp, synthetic construct
  source 1..75: mol_type = other DNA
gcagtctgaagatgaattgttacgccagcgggagaaaatcaaccgtagtctggatgtgctggaaggatatctggt

SEQ ID NO: 495585 - DNA, 75 bp, synthetic construct
  source 1..75: mol_type = other DNA
tctgagaacagcgacgcttgacgtcacaaaagggggaaagatgagcggcaatatcacgcacagcggcggcaactt

SEQ ID NO: 495586 - DNA, 75 bp, synthetic construct
  source 1..75: mol_type = other DNA
agtcttgaggaagagtggcgtacccggatagaagagagccacagggcgcttgagtgttgccgtgaagaaaagcgc

SEQ ID NO: 495587 - DNA, 75 bp, synthetic construct
  source 1..75: mol_type = other DNA
ccaactttcaatgacacgcttgtattgaaaaactcacagaaccgccttgctacatgggttccatccattggtgac

SEQ ID NO: 495588 - DNA, 75 bp, synthetic construct
  source 1..75: mol_type = other DNA
ataattggcagcctgtggagtgatgccagtccggcccccggcaaaagcctgaaagaaatcgtgatcagcgcgccg

SEQ ID NO: 495589 - DNA, 75 bp, synthetic construct
  source 1..75: mol_type = other DNA
tggtgcgtgcgcgttcgcagcggcgaactggaaacaggctggttgcgctggaacaccacgcgcgcgggagccttc

SEQ ID NO: 495590 - DNA, 75 bp, synthetic construct
  source 1..75: mol_type = other DNA
acaaaagggggaaagatgagcggcaatatcacgcacagcggcggcaatttcacctcaaacggcatcacagtgcat

SEQ ID NO: 495591 - DNA, 75 bp, synthetic construct
  source 1..75: mol_type = other DNA
gagatgtatcaggagcttgagcgcctgattgaagacgccaaaccggcaagccgtcaccttaccgggctggctatc

SEQ ID NO: 495592 - DNA, 75 bp, synthetic construct
  source 1..75: mol_type = other DNA
atgaatgaccggctattacccgttggctcgtcgccgctggaggtcgccgccgccgctgcgttctctgagattcag

SEQ ID NO: 495593 - DNA, 75 bp, synthetic construct
  source 1..75: mol_type = other DNA
cagcgagagaaaatcaaccgtagcctggatgtgctggaaggatatctggtcgatggcacgctcaaagtcgatacg

SEQ ID NO: 495594 - DNA, 75 bp, synthetic construct
  source 1..75: mol_type = other DNA
tgcgtgaagcggcagagcaggcaatacatgatgactggggatatgatgcggatattttccatgaacaggtgacac

SEQ ID NO: 495595 - DNA, 75 bp, synthetic construct
  source 1..75: mol_type = other DNA
gaaaaaacgccggtcagtattcgtgagctgtggaacccggatacctgcccggcaaatctgctgccgtggctggcg

SEQ ID NO: 495596 - DNA, 75 bp, synthetic construct
  source 1..75: mol_type = other DNA
attacccgggacattcccggctacttgttcgccggtggtgtggcttatgacggcgatgtaattacggtttaccca

SEQ ID NO: 495597 - DNA, 75 bp, synthetic construct
  source 1..75: mol_type = other DNA
attgttggcaacgtccataacattgtgattaccagtagcgacgaaattgctcggggaataatcacccgactacaa

SEQ ID NO: 495598 - DNA, 75 bp, synthetic construct
  source 1..75: mol_type = other DNA
cagatgtactgatttttgaaccgaaagtttttggtgatgagcgtggtttcttttttgagagctttaaccagaaga

SEQ ID NO: 495599 - DNA, 75 bp, synthetic construct
  source 1..75: mol_type = other DNA
ccatttctgaacctcgcgacgttgcggtgttacagcagtggttttatttcatgagtgatgcttcaatgttaaagc

SEQ ID NO: 495600 - DNA, 75 bp, synthetic construct
  source 1..75: mol_type = other DNA
cacgttttcaaacactgatcctgtagctgaacctgagaaatcagtttcgcaacaggaagacaatgttgaaaatgg

SEQ ID NO: 495601 - DNA, 75 bp, synthetic construct
  source 1..75: mol_type = other DNA
gtcgaccgcccacacttagtcaaactgatcgaaaacctgtttagccgcgaaagctttgctcgcaccgaaccgcca

SEQ ID NO: 495602 - DNA, 75 bp, synthetic construct
  source 1..75: mol_type = other DNA
ctgattattattatccggagtttgaacgaactttgttatggaatgatgcagatgtgaatattgcgtggcccctcc

SEQ ID NO: 495603 - DNA, 75 bp, synthetic construct
  source 1..75: mol_type = other DNA
atttgggcaatatgaatcagttattctgacagaggaaaataaaaaaatattttatataccaccaggctttgcaca

SEQ ID NO: 495604 - DNA, 75 bp, synthetic construct
  source 1..75: mol_type = other DNA
tgcaactaggtgagccaggttatcgcggtaacctgcgtgagctgttagctaatccgcaaattcagcgggcatttt

SEQ ID NO: 495605 - DNA, 75 bp, synthetic construct
  source 1..75: mol_type = other DNA
gttacaaaagtgcgctgaccgtcttgcccagagtgcgcaggattttcgcctgcaactcggtgagccaggttatcg

SEQ ID NO: 495606 - DNA, 75 bp, synthetic construct
  source 1..75: mol_type = other DNA
gggcaactgttgcagcaatttgtcagcgccggtaacgcgcttcttgtggcgaccagcagtttctgggaaggggtg

SEQ ID NO: 495607 - DNA, 75 bp, synthetic construct
  source 1..75: mol_type = other DNA
gaactgtcctatggcggtgatgatataacagaccagaagagcgtgtctaaaagcgaagttcgctggatagacata

SEQ ID NO: 495608 - DNA, 75 bp, synthetic construct
  source 1..75: mol_type = other DNA
ccgccgcgttgcgccaggttggtgtgtcgaccgcccacacttagtcaaactggtcgaaaacctgtttagccgcga

SEQ ID NO: 495609 - DNA, 75 bp, synthetic construct
  source 1..75: mol_type = other DNA
ctgcggcacagcctgagtgcgagcgaggcgatgatgtggatggagttcgacagggtatccccgctgggtgatgag

SEQ ID NO: 495610 - DNA, 75 bp, synthetic construct
  source 1..75: mol_type = other DNA
gaactcaatattcaatggcctttaagtaatcctatattatcagataaagatatgaaaggttgcttacttaaagaa

SEQ ID NO: 495611 - DNA, 75 bp, synthetic construct
  source 1..75: mol_type = other DNA
ttgctctgttgttatccgtcgttgtcgggcgatggcagttactttttcacactaaaggatgggacgtttttacgg

SEQ ID NO: 495612 - DNA, 75 bp, synthetic construct
  source 1..75: mol_type = other DNA
ggagagcaggttaaagagacggtacgaaaaaatgtatctccccttgagctttaccgtaagaacaaagaacgatag

SEQ ID NO: 495613 - DNA, 75 bp, synthetic construct
  source 1..75: mol_type = other DNA
gaaaaaatgtatctcctcttgagcgttaccgtaagaacaaagaacgacagctgcgtttgggggatatgaagtatg

SEQ ID NO: 495614 - DNA, 75 bp, synthetic construct
  source 1..75: mol_type = other DNA
aggttaaccccaaacagatcgctcttgaactcacagagcgcgaatttgccgatccgaaaaccagcgccccgataa

SEQ ID NO: 495615 - DNA, 75 bp, synthetic construct
  source 1..75: mol_type = other DNA
cttcctttatcgacgtgattccttatagctcatggcaaattgatgccgctattattggcaatgcccgtaatatag

SEQ ID NO: 495616 - DNA, 75 bp, synthetic construct
  source 1..75: mol_type = other DNA
tgttgcagaaaggctggcatcggcaagtctttatttggttaccgctcgggttggtgattggcctgctggcagcga

SEQ ID NO: 495617 - DNA, 75 bp, synthetic construct
  source 1..75: mol_type = other DNA
aaacaatattaaacgttgaagagcgcaggagaacagaagtctatattcataaccttaatgaagatggatttgcac

SEQ ID NO: 495618 - DNA, 75 bp, synthetic construct
  source 1..75: mol_type = other DNA
gctttacttaacatagattggcaattatacaaagaacctcttatatcacaaaaagattgtttgggtactccattt

SEQ ID NO: 495619 - DNA, 75 bp, synthetic construct
  source 1..75: mol_type = other DNA
ccaataatttttactcaaaagaacatgagaaatgtattatttggaatgatgctttacttaacatagattggcaat

SEQ ID NO: 495620 - DNA, 75 bp, synthetic construct
  source 1..75: mol_type = other DNA
atacgggtactgttttaatattatctcttccgttaactatgatatatattctttctgttatcataaaaaggttgt

SEQ ID NO: 495621 - DNA, 75 bp, synthetic construct
  source 1..75: mol_type = other DNA
cagcggtttttttgctgatactcccggaaaaatgggattgcttgctgtttatacgggtactgttttcatattatc

SEQ ID NO: 495622 - DNA, 75 bp, synthetic construct
  source 1..75: mol_type = other DNA
tcattgggaatcagagcggaacaaatcgcgtttttatgcttcgccgtacggatttgaagccatttgtctggaaga

SEQ ID NO: 495623 - DNA, 75 bp, synthetic construct
  source 1..75: mol_type = other DNA
gaagcggtgctgacggaggcggaagaagaacgcatgaacgaactgctgacacgctacgacgcgctggaaaatcag

SEQ ID NO: 495624 - DNA, 75 bp, synthetic construct
  source 1..75: mol_type = other DNA
ctcagtcaggaggtgctgttatccctgctcagtttctgcactgcgtgcagcatccacggtgttcagacccgtgag

SEQ ID NO: 495625 - DNA, 75 bp, synthetic construct
  source 1..75: mol_type = other DNA
gaagtgcagaccattcgtcgtctggtgaccgaaagtgaagtggcggtggcggggaacagtaaattccgcttcgtg

SEQ ID NO: 495626 - DNA, 75 bp, synthetic construct
  source 1..75: mol_type = other DNA
tcgccgactggctgcactcaacatgctggcagagcgtggcatcattccggctgactggcctgttcgtgtgaaggt

SEQ ID NO: 495627 - DNA, 75 bp, synthetic construct
  source 1..75: mol_type = other DNA
tcgccgactggctgcactcaacatgctggcagagcgtggcatcattccggctgactggcctgtacgagtgaaggt

SEQ ID NO: 495628 - DNA, 75 bp, synthetic construct
  source 1..75: mol_type = other DNA
gtcagggagcgcagtcgccataaatccgcgctggtcatgcagaagtacagccgccagcaggcacgggaggcagag

SEQ ID NO: 495629 - DNA, 75 bp, synthetic construct
  source 1..75: mol_type = other DNA
acctgaaaaagccgcagattatcgcagccctgaatgaggcagactgtccggtgccgcacgggacgcggagaagat

SEQ ID NO: 495630 - DNA, 75 bp, synthetic construct
  source 1..75: mol_type = other DNA
tggaaagagaggtcaggcatggctgagtctgatgcaggagaaagcccgtctggaggctctgttaccggaaggatg

SEQ ID NO: 495631 - DNA, 75 bp, synthetic construct
  source 1..75: mol_type = other DNA
tgaccgggtggcagagcatgacctggaaaccctgttctggcagtggggtgagcgtttcccgtcactggccggaat

SEQ ID NO: 495632 - DNA, 75 bp, synthetic construct
  source 1..75: mol_type = other DNA
aaaaagcacgtttggtcgccctgttgccggagggatggtcacgggacatgacgacattcctgtcactcagtcagg

SEQ ID NO: 495633 - DNA, 75 bp, synthetic construct
  source 1..75: mol_type = other DNA
tgtggtcacacgtcacgcagtccgctggattcgctggaaagcgccatcggctttcacatgcgcgactggtggcag

SEQ ID NO: 495634 - DNA, 75 bp, synthetic construct
  source 1..75: mol_type = other DNA
tgggtgcctggctggatgtgtacaccacgtccacagaaggataccactgaacacaccaataacctggctgatgcc

SEQ ID NO: 495635 - DNA, 75 bp, synthetic construct
  source 1..75: mol_type = other DNA
tcgccgactggctgcactcaacatgctggcagagcgtggcatcattccggctgactggcctgtccgcgtgaaggt

SEQ ID NO: 495636 - DNA, 75 bp, synthetic construct
  source 1..75: mol_type = other DNA
gattccgcaggagctggcgacggcggcatcaatgactgaaaacggtcatcgtcgggatatgcaccctgccgaaca

SEQ ID NO: 495637 - DNA, 75 bp, synthetic construct
  source 1..75: mol_type = other DNA
gattccgcaggagctggcgaccgccgcatcaatgactgaaaacggtcatcgtcgggatatgcaccctgccgaaca

SEQ ID NO: 495638 - DNA, 75 bp, synthetic construct
  source 1..75: mol_type = other DNA
gattccgcaggagctggcgactgctgcatcaatgactgaaaacggtcatcgtcgggatatgcaccctgccgaaca

SEQ ID NO: 495639 - DNA, 75 bp, synthetic construct
  source 1..75: mol_type = other DNA
tccgaacccgtagctgggaagataacggtatcacccgttacgtcactgaaattcttgttaagaccacgggcacca

SEQ ID NO: 495640 - DNA, 75 bp, synthetic construct
  source 1..75: mol_type = other DNA
ccggaagcggtgtggtggtgtcctggcgttacggtaatgtgtgtgtccagcgtggtgtgcagttgcgcagtgaag

SEQ ID NO: 495641 - DNA, 75 bp, synthetic construct
  source 1..75: mol_type = other DNA
aaggaaggtgccgcattcctggcgctgatggcagaaaaagcccgtcttgcggccctgttaccggagggatggtca

SEQ ID NO: 495642 - DNA, 75 bp, synthetic construct
  source 1..75: mol_type = other DNA
tattccgcaggagctggcgacagctgcatcaatgactgaaaacggtcatcgtcgggatatgcaccctgccgaaca

SEQ ID NO: 495643 - DNA, 75 bp, synthetic construct
  source 1..75: mol_type = other DNA
aattccgcaggagctggcgacagcggcatcaatgactgaaaacggtcatcgtcgggatatgcaccctgccgaaca

SEQ ID NO: 495644 - DNA, 75 bp, synthetic construct
  source 1..75: mol_type = other DNA
tcgccgactggctgcactcaacatgctggcagagcgtggcatcattccggctgactggcctgtgcgggtgaaggt

SEQ ID NO: 495645 - DNA, 75 bp, synthetic construct
  source 1..75: mol_type = other DNA
gattccgcaggagctggcgacagcagcatcaatgactgaaaacggtcatcgtcgggatatgcaccctgccgaaca

SEQ ID NO: 495646 - DNA, 75 bp, synthetic construct
  source 1..75: mol_type = other DNA
cattccgcaggagctggcgaccgcggcatcaatgactgaaaacggtcatcgtcgggatatgcaccctgccgaaca

SEQ ID NO: 495647 - DNA, 75 bp, synthetic construct
  source 1..75: mol_type = other DNA
tattccgcaggagctggcgactgcggcatcaatgactgaaaacggtcatcgtcgggatatgcaccctgccgaaca

SEQ ID NO: 495648 - DNA, 75 bp, synthetic construct
  source 1..75: mol_type = other DNA
aggtggccacatcagaaagctggcgtgacaaacagacgggggagatgcgggagcagacggaatggcaccgcgtgg

SEQ ID NO: 495649 - DNA, 75 bp, synthetic construct
  source 1..75: mol_type = other DNA
gctggtatggcggcaagggaggccggtcatgccgtccgtgagatggagcggtggatggtgccgaacaaactccgg

SEQ ID NO: 495650 - DNA, 75 bp, synthetic construct
  source 1..75: mol_type = other DNA
tctgaaaatccagagattaacgcgctctacggcataaaaaataaaaaagcaaaagcctcagaaaaaattgccaac

SEQ ID NO: 495651 - DNA, 75 bp, synthetic construct
  source 1..75: mol_type = other DNA
agtatgacgagcaactggcggaatattacctcacccgtggcagcaataatcgccgggatacctggagcgatcata

SEQ ID NO: 495652 - DNA, 75 bp, synthetic construct
  source 1..75: mol_type = other DNA
tcaccgaaagtgaagtggcggtggccgggaacagtaaattccgcttcgtgggggctgatgccttctcgccagatg

SEQ ID NO: 495653 - DNA, 75 bp, synthetic construct
  source 1..75: mol_type = other DNA
tcaccgaaagtgaagtggcggtggctgggaacagtaaattccgcttcgtgggggctgatgccttctcgccagacg

SEQ ID NO: 495654 - DNA, 75 bp, synthetic construct
  source 1..75: mol_type = other DNA
ttaccgaaagtgaagtggcggtggccgggaacagtaaattccgcttcgtgggggctgatgccttctcgccagacg

SEQ ID NO: 495655 - DNA, 75 bp, synthetic construct
  source 1..75: mol_type = other DNA
gcagcagagcggctgttcccgtcggtgcggttccgtgtcagggagcgcagtcgccacaaatccgcactgatcatg

SEQ ID NO: 495656 - DNA, 75 bp, synthetic construct
  source 1..75: mol_type = other DNA
attcgccggaaacagtcggaagctggcatgcacgctggagtgaccgggtggcagagcatgacctggaaaccctgt

SEQ ID NO: 495657 - DNA, 75 bp, synthetic construct
  source 1..75: mol_type = other DNA
tcgccataaatctgcactggtcatgcagaagtacagccgtcagcaggcgagggaggcagagcagaaaacccgtgc

SEQ ID NO: 495658 - DNA, 75 bp, synthetic construct
  source 1..75: mol_type = other DNA
atgacgccaaccattgaacttacttgtggccatcgctccattcgccatttcactgatgaacccatttccgaggcg

SEQ ID NO: 495659 - DNA, 75 bp, synthetic construct
  source 1..75: mol_type = other DNA
gacaaccgctgggtgcctggctggatgtgtgcaccacatccacagacggataccactgaacgcaccgataacctg

SEQ ID NO: 495660 - DNA, 75 bp, synthetic construct
  source 1..75: mol_type = other DNA
cagaagtacagccgccagcaggcacgggaggcagagcagaaagcccgtgcgtaccaggcgctggttgctcaggct

SEQ ID NO: 495661 - DNA, 75 bp, synthetic construct
  source 1..75: mol_type = other DNA
tgtggtcacacgtcacgcagtccgcttgactcgctggaaaccgctatcggctttcacatgcgtgactggtggcag

SEQ ID NO: 495662 - DNA, 75 bp, synthetic construct
  source 1..75: mol_type = other DNA
gccagtcttgcagcaagagaggccggtcacgctgtccgtgagatggagcggtggatggtgccgaacaaactccgg

SEQ ID NO: 495663 - DNA, 75 bp, synthetic construct
  source 1..75: mol_type = other DNA
tgccctgacaactctgccgatgggcggtggtaaaggcggcagcgatttcgacccgaaagggaaaagcgaaggcga

SEQ ID NO: 495664 - DNA, 75 bp, synthetic construct
  source 1..75: mol_type = other DNA
accgggtaaagcggctaatgctggtggcgtcgctacatcgggcctggaaatgggcacaattcattgcagttacgc

SEQ ID NO: 495665 - DNA, 75 bp, synthetic construct
  source 1..75: mol_type = other DNA
gaaggacggtgccgcattcatggcgatgatggcagaaaaagcccgtcttgctgccctgttaccggagggatgggc

SEQ ID NO: 495666 - DNA, 75 bp, synthetic construct
  source 1..75: mol_type = other DNA
acgggatatgacgacgttcctgtcactcagtcaggaggtactgttatccctgctcagtttctgcaccgcgtgcag

SEQ ID NO: 495667 - DNA, 75 bp, synthetic construct
  source 1..75: mol_type = other DNA
cattaagggcgttggtctgttgcagaatctggttgtgcatgtcctgtctggtgaccgttatggcgttgccgcagg

SEQ ID NO: 495668 - DNA, 75 bp, synthetic construct
  source 1..75: mol_type = other DNA
tgaggcaggactgtccggtgccgcacgggacgcggagaagatgaagaaaggcgatgcggctgaacatgcagagtt

SEQ ID NO: 495669 - DNA, 75 bp, synthetic construct
  source 1..75: mol_type = other DNA
cgccatgcaggcggtggctgtcacagaacaacgtcgtcgtcagggacgcacactttcagcatggccttatgccag

SEQ ID NO: 495670 - DNA, 75 bp, synthetic construct
  source 1..75: mol_type = other DNA
actcagccaggaggtgctgttatccctgctcagcttctgtaccgcgtgcagtcttaacggtgtccagacccgcga

SEQ ID NO: 495671 - DNA, 75 bp, synthetic construct
  source 1..75: mol_type = other DNA
caagccgttcgtgaagtaatgaccacactctggccttttcttgaacaaaatccaaaatatcgccagatgtcatta

SEQ ID NO: 495672 - DNA, 75 bp, synthetic construct
  source 1..75: mol_type = other DNA
ggcctgttacagaatctggttgttcatgccctgctaggtgaccgttacggtgtcgccgcaggctgcactcaacat

SEQ ID NO: 495673 - DNA, 75 bp, synthetic construct
  source 1..75: mol_type = other DNA
tggcagtccaggcagcactgatgcagcaaccggacaaatctctggcactgctggcatggacgctctgcctgaatg

SEQ ID NO: 495674 - DNA, 75 bp, synthetic construct
  source 1..75: mol_type = other DNA
ggcgttgggtacacctgaagtcagtagtctctggcaccagcaacaaaaaaatccgccctttgtcctcaagcataa

SEQ ID NO: 495675 - DNA, 75 bp, synthetic construct
  source 1..75: mol_type = other DNA
gcttcgctattaagccataaacattcccgctgcgaagtgatttctggcgtcacgttaccgttaattgagcagatg

SEQ ID NO: 495676 - DNA, 75 bp, synthetic construct
  source 1..75: mol_type = other DNA
ggcctggcggacagtgaagatggcgaaattaacgatattttcgcccgcattctgttatgtcgcgaaaaagatcac

SEQ ID NO: 495677 - DNA, 75 bp, synthetic construct
  source 1..75: mol_type = other DNA
gtattctcgtgagaccaatacaatcgaccatagtcaggcgatctatcacccctatttaaatgcgtatctgccccg

SEQ ID NO: 495678 - DNA, 75 bp, synthetic construct
  source 1..75: mol_type = other DNA
acccgtgcgtaccaggcgctggttgctcaggcagaaatcgaactggcgttccattcgccggaaacagtcggaagc

SEQ ID NO: 495679 - DNA, 75 bp, synthetic construct
  source 1..75: mol_type = other DNA
gcgttacatgaaacagactcgggtgatggcgttatttttttaaccgatattgccggagcgccgccgtaccgcgtc

SEQ ID NO: 495680 - DNA, 75 bp, synthetic construct
  source 1..75: mol_type = other DNA
atgacgttgagaaggtcagcattcgctggcctgacttgccggattttaacgacatgctcattcaggggtgtgaag

SEQ ID NO: 495681 - DNA, 75 bp, synthetic construct
  source 1..75: mol_type = other DNA
tattcggactgtttaccgggacggatttcgggattgtgtttggggcgttcgccggagcgttgtttgtggcaacga

SEQ ID NO: 495682 - DNA, 75 bp, synthetic construct
  source 1..75: mol_type = other DNA
tggcgtgtggcggcacattttctggtgtcgttcattgttggtgtactgggggcgcgtgtactgtcagcctggatt

SEQ ID NO: 495683 - DNA, 75 bp, synthetic construct
  source 1..75: mol_type = other DNA
ttttatggagaagtttattgcgccaccaggcgttaatcacctgattatctttgcagacaatgatgagcacggcgc

SEQ ID NO: 495684 - DNA, 75 bp, synthetic construct
  source 1..75: mol_type = other DNA
atgacgttgagaaggtcagtattcgctggcctgacctgccggattttaacgacatgctcattcagggggggaagc

SEQ ID NO: 495685 - DNA, 75 bp, synthetic construct
  source 1..75: mol_type = other DNA
acttgccacgggtaagccctgggtgacgttgtgtgatgaaatcgatcggctgatcggaaatacctggaagaggga

SEQ ID NO: 495686 - DNA, 75 bp, synthetic construct
  source 1..75: mol_type = other DNA
cggttgccgtcgcagcgggcgtaatgtctgctcaggcaatggctgttgatttccacggctatgcacgttccggta

SEQ ID NO: 495687 - DNA, 75 bp, synthetic construct
  source 1..75: mol_type = other DNA
aggaatcgatccgatttatttcggtgtcatgtttatcattaactgctcaatcggcttaattacaccgcctatcgg

SEQ ID NO: 495688 - DNA, 75 bp, synthetic construct
  source 1..75: mol_type = other DNA
aactacaccatcagttacccactagtggcgtttcagtccggaaaaatgtttaaacgcctgggaggtggctatgcg

SEQ ID NO: 495689 - DNA, 75 bp, synthetic construct
  source 1..75: mol_type = other DNA
atgattcgccgcgtcgttaattccctgtatcaccgatacaactgttgccccccccgcgtggggcagtggtttgcc

SEQ ID NO: 495690 - DNA, 75 bp, synthetic construct
  source 1..75: mol_type = other DNA
caagcaaatttcctccgtggatgaactgacgaaattaacgacagaaatcgccagctattgcgctgatgaatttaa

SEQ ID NO: 495691 - DNA, 75 bp, synthetic construct
  source 1..75: mol_type = other DNA
atgtcctgttctcgttcagttgtattactgaacaatgccttaaaaatctccgttatgaaaaatggcgatttgtct

SEQ ID NO: 495692 - DNA, 75 bp, synthetic construct
  source 1..75: mol_type = other DNA
cctaccgtattaattcttacaccagtattaatgccattagtgaaagaagcgggaatagatccggtctatttcggc

SEQ ID NO: 495693 - DNA, 75 bp, synthetic construct
  source 1..75: mol_type = other DNA
atccacagtcgttacggtattcgccaattgatctggcagggagatacgcagatgttaagtctgacgtcgggagca

SEQ ID NO: 495694 - DNA, 75 bp, synthetic construct
  source 1..75: mol_type = other DNA
ttgagccgtttcgttcctcgcattatcccgttttatttactcttgcttgtagcaggcggtacagctaacgcacaa

SEQ ID NO: 495695 - DNA, 75 bp, synthetic construct
  source 1..75: mol_type = other DNA
tgtatcaccgatacaaccgttgcccccgtgtggggcagtggtttgccaccagcaacggtcatgttctgcgggttt

SEQ ID NO: 495696 - DNA, 75 bp, synthetic construct
  source 1..75: mol_type = other DNA
tgcgcttagccagcaggttaatcagcatgtagaatcctggctttcgccgtgggggaacgccagtgttgacgtcaa

SEQ ID NO: 495697 - DNA, 75 bp, synthetic construct
  source 1..75: mol_type = other DNA
tcgccgaaatcgtgaaagattttggtgaaaccagtatgactgataacggtcaggatacaggcgaacaggcaaaag

SEQ ID NO: 495698 - DNA, 75 bp, synthetic construct
  source 1..75: mol_type = other DNA
cgattgtcggtggtggtggaagataaccagggacagcgtgtctcctccaatgagatcacgctaacgcttgccgaa

SEQ ID NO: 495699 - DNA, 75 bp, synthetic construct
  source 1..75: mol_type = other DNA
gtatggcgaatggctattcatctgctcgtcgcgtttgtggttggcgttctgggggctggcgtggctgcgtcactg

SEQ ID NO: 495700 - DNA, 75 bp, synthetic construct
  source 1..75: mol_type = other DNA
gcgtgtacaaatctctggcggataatcacccaggtatcacatctgcctgttgctggagccacgcaaggcgcggct

SEQ ID NO: 495701 - DNA, 75 bp, synthetic construct
  source 1..75: mol_type = other DNA
aaaagacgagcgcgccgggtggcaggctgcacggtgcggtgacgtatgccctgaagcgttggccggcgctggaaa

SEQ ID NO: 495702 - DNA, 75 bp, synthetic construct
  source 1..75: mol_type = other DNA
tttcttcttggatgaagagccgaaaaccgcagaagtcattccatttgagccaaagcccgcatggaatgatgatga

SEQ ID NO: 495703 - DNA, 75 bp, synthetic construct
  source 1..75: mol_type = other DNA
atacttaactctttgtgggatggtggttctcttttcatcgacaggaaatcatctcccggaattaatttgaaggag

SEQ ID NO: 495704 - DNA, 75 bp, synthetic construct
  source 1..75: mol_type = other DNA
ctttaagacattgtcgggaatatgctgccaaaaatgcagagtatatggcaagactggcaggacttcttcaccatt

SEQ ID NO: 495705 - DNA, 75 bp, synthetic construct
  source 1..75: mol_type = other DNA
cagaaagctggcgtgacaaacagacgggggagatacgggagcagacagaatggcaccgtgttgtgctgttcggca

SEQ ID NO: 495706 - DNA, 75 bp, synthetic construct
  source 1..75: mol_type = other DNA
gatgacgtggcaataaagaataagaagtcacaaattaaaaaacaaaaagatcagtttccggcggtgccggaacga

SEQ ID NO: 495707 - DNA, 75 bp, synthetic construct
  source 1..75: mol_type = other DNA
ggaggggatcgatatgttgtggttggaagaagcccacgcactgacggaataccagtggaaaattctggagccaac

SEQ ID NO: 495708 - DNA, 75 bp, synthetic construct
  source 1..75: mol_type = other DNA
catgtcattgagcggtaatgatgctgccgaactcatagacctccaggagcgagctgagaaggtcttgtctgttct

SEQ ID NO: 495709 - DNA, 75 bp, synthetic construct
  source 1..75: mol_type = other DNA
agcggcaaccaaggttaaagctgttctcgctaagacattggctttatttaattttttatccacacccccatgtca

SEQ ID NO: 495710 - DNA, 75 bp, synthetic construct
  source 1..75: mol_type = other DNA
attttttatccacacccccatgtcaaaatgataccccctccccctgtcaggatgacgtggcaataaagaataaga

SEQ ID NO: 495711 - DNA, 75 bp, synthetic construct
  source 1..75: mol_type = other DNA
atatgcttacctgaagaacaagcgttctcctgatattggcgggatatcaaacttcgataatctgccgcattgcat

SEQ ID NO: 495712 - DNA, 75 bp, synthetic construct
  source 1..75: mol_type = other DNA
agactggcaggacttatttaccattcgagcggtgaagagggggagatttccccttacacatgcagaaatggcgag

SEQ ID NO: 495713 - DNA, 75 bp, synthetic construct
  source 1..75: mol_type = other DNA
gcactgctgtggcgctcggcggggcgacggtattcgggctgtttaccgggacggatttcgggattgtgtttggcg

SEQ ID NO: 495714 - DNA, 75 bp, synthetic construct
  source 1..75: mol_type = other DNA
aaaatcctgacgttcctgaataaccaggatatcggctcgctggtggcgctgataacgcgccggggaggttcaggt

SEQ ID NO: 495715 - DNA, 75 bp, synthetic construct
  source 1..75: mol_type = other DNA
cgtaatcgtttctgctttagccgtcaaaatcctgacgttcctgaataaccaggatatcggctcgctggtggcgct

SEQ ID NO: 495716 - DNA, 75 bp, synthetic construct
  source 1..75: mol_type = other DNA
tgccgcaggcgctttcagcctggcgggtggcggcacattttctggtgtcgttcattgtcggcgtgctgggagcgc

SEQ ID NO: 495717 - DNA, 75 bp, synthetic construct
  source 1..75: mol_type = other DNA
aacaatgccgcaggcgctttcagcctggcgtgtggcggcgcattttcttgtgtcgtttattatcggtgtgctggg

SEQ ID NO: 495718 - DNA, 75 bp, synthetic construct
  source 1..75: mol_type = other DNA
gcacagctgctgcgctcggtggggcgactgttttcgggctgtttaccggaacggatttcgggattgtgtttggcg

SEQ ID NO: 495719 - DNA, 75 bp, synthetic construct
  source 1..75: mol_type = other DNA
acgccagaagctgattcaaatcgctaataagcaggtgctgggccatgccacaatagccgatgttgaaaaagcgta

SEQ ID NO: 495720 - DNA, 75 bp, synthetic construct
  source 1..75: mol_type = other DNA
ctttcagccactggctgcgttctgacagtaaatctcagtggcgacatgccagtgccagttacagcatgtcacacg

SEQ ID NO: 495721 - DNA, 75 bp, synthetic construct
  source 1..75: mol_type = other DNA
gtttgggcctttaagacattgtcgggaatatgctgccaaaaatgcagagtatatggcaagactggcaggacttct

SEQ ID NO: 495722 - DNA, 75 bp, synthetic construct
  source 1..75: mol_type = other DNA
gggcggctggtacagcaaaagccgcgttttaccacacagttagctcaacaacgcgaacgcaacatactgaagatg

SEQ ID NO: 495723 - DNA, 75 bp, synthetic construct
  source 1..75: mol_type = other DNA
gccagcgtgtcgataaggttgttgattactatgctgatggcgcagacgattactatgcgaaagacggtaacgcga

SEQ ID NO: 495724 - DNA, 75 bp, synthetic construct
  source 1..75: mol_type = other DNA
acgccagaagctgattcagatcgcgaataaacaggtgctgggccatgcctcaatggtcgatgtagaaaaagcgta

SEQ ID NO: 495725 - DNA, 75 bp, synthetic construct
  source 1..75: mol_type = other DNA
cgcccgtcgtggaatgcacagaccttctgagaacagcgacgcttgacgtcacaaaaggaggaaagatgagcggca

SEQ ID NO: 495726 - DNA, 75 bp, synthetic construct
  source 1..75: mol_type = other DNA
cggccgggtttccactaaccgctggggaattggtgtggtgacggatgtgagcagctattaccgcaacaccactac

SEQ ID NO: 495727 - DNA, 75 bp, synthetic construct
  source 1..75: mol_type = other DNA
cgtggtttcacaacagggacgggttctgtatgactcaaccgtaccggcgggaccgttcaccattcaggacctgga

SEQ ID NO: 495728 - DNA, 75 bp, synthetic construct
  source 1..75: mol_type = other DNA
gcctatccgatgacgccagaacaaatcgaaatacgtgagctgaggaaaaagctacaacgcattgaaatggagaat

SEQ ID NO: 495729 - DNA, 75 bp, synthetic construct
  source 1..75: mol_type = other DNA
gtttaagccgtgggatggtcaggaatctgggaaggctgtttatctgacctcgtaccccgtggacacgtcaaagca

SEQ ID NO: 495730 - DNA, 75 bp, synthetic construct
  source 1..75: mol_type = other DNA
actggcctgagagcgtcgacactgatgcgaaaaaatgcgccgcctttgcgggttctggcgtatccgttcagccgc

SEQ ID NO: 495731 - DNA, 75 bp, synthetic construct
  source 1..75: mol_type = other DNA
taataaattacctaaggatatggaggcaaaaagatctgtcgttgaaacaattttaacagaaggtgctatcgggta

SEQ ID NO: 495732 - DNA, 75 bp, synthetic construct
  source 1..75: mol_type = other DNA
tatctggtgcaggaaaaaggcatgtcgattctgaaagtgggtctggtcgcctcgattccggcactgtgtggcttt

SEQ ID NO: 495733 - DNA, 75 bp, synthetic construct
  source 1..75: mol_type = other DNA
ctgcttgataagtttggctcgaaaaaagtttacacctacagcctctttttctggtcgctgttcaccttcctgcaa

SEQ ID NO: 495734 - DNA, 75 bp, synthetic construct
  source 1..75: mol_type = other DNA
accgcaggtttattacatatcgtccagcggcaaagagacgctccctaactgtcgcccggttggtgaacataacaa

SEQ ID NO: 495735 - DNA, 75 bp, synthetic construct
  source 1..75: mol_type = other DNA
tggtgtttcccctggagataccttgcgtgttgactggaacggaaaaactcaatgcgttgtaaacatacctgacga

SEQ ID NO: 495736 - DNA, 75 bp, synthetic construct
  source 1..75: mol_type = other DNA
agggtacagcggtaccctggatggtgggttaagtagctactcgttgaatgcaggtatgagcaatggcaacagctt

SEQ ID NO: 495737 - DNA, 75 bp, synthetic construct
  source 1..75: mol_type = other DNA
tatccggcgaagcatcatgggggatcggtaataaatggtctctctatggcggcagcattttttcggaagattata

SEQ ID NO: 495738 - DNA, 75 bp, synthetic construct
  source 1..75: mol_type = other DNA
ggcaggctggtattccgttgctcagaagccacgatgccagaaaactgctgcagatgaccggagaatggctggata

SEQ ID NO: 495739 - DNA, 75 bp, synthetic construct
  source 1..75: mol_type = other DNA
gggcgacggtcacgatgaaaggagccgcgttacatgccggaggaatgaacggaggaacccgtcttctggtggata

SEQ ID NO: 495740 - DNA, 75 bp, synthetic construct
  source 1..75: mol_type = other DNA
tggtaaccagccctcacagagccagatgagcgcgtattacaaccacagcagcccattggcgagtctgtcagccaa

SEQ ID NO: 495741 - DNA, 75 bp, synthetic construct
  source 1..75: mol_type = other DNA
gggccgtgacctgaatgagttcggtacggtatctgctgatgtgacctggtccgtggcccgtattccgggagaaga

SEQ ID NO: 495742 - DNA, 75 bp, synthetic construct
  source 1..75: mol_type = other DNA
ggagtcgtttctacatgtaccgcgccatcccgcgctggcgcgcaaatctcactctgggtgagaactacatcaatt

SEQ ID NO: 495743 - DNA, 75 bp, synthetic construct
  source 1..75: mol_type = other DNA
gttaccggaatgacttcacggggcgtgagaaggagctgtatacagccacattcaacaaaagcttcgaggactgga

SEQ ID NO: 495744 - DNA, 75 bp, synthetic construct
  source 1..75: mol_type = other DNA
cgcgttacatgccggaggaatgaacggaggaacccgtcttctggtggataccgatggtgtcggaggtgtgccggt

SEQ ID NO: 495745 - DNA, 75 bp, synthetic construct
  source 1..75: mol_type = other DNA
agatattcgcaaatttgttaccgtcaaaattggttaacgggggattctatggacactccatacattgagttattt

SEQ ID NO: 495746 - DNA, 75 bp, synthetic construct
  source 1..75: mol_type = other DNA
gagcagactgaatggcaccgcgtggtgctgttcggcaagctcgcggaagtggcaggtgaatatctgcgcaagggg

SEQ ID NO: 495747 - DNA, 75 bp, synthetic construct
  source 1..75: mol_type = other DNA
aattgcatgcggcaggtatacggaccggtgatgcagagcgaatactgtccagcggtgaatactggcaacgtcaga

SEQ ID NO: 495748 - DNA, 75 bp, synthetic construct
  source 1..75: mol_type = other DNA
ggcctggctgagcggagtgaatccgggagaaaccctgaatgtcggctgggacggccggacacagtgtgtggtgga

SEQ ID NO: 495749 - DNA, 75 bp, synthetic construct
  source 1..75: mol_type = other DNA
gctggcgttattcaggaatttaccccgctgatgctggcagacaatggcgagtttaagccgtgggatggtcaggaa

SEQ ID NO: 495750 - DNA, 75 bp, synthetic construct
  source 1..75: mol_type = other DNA
cgtatcccgtggacacgtcaacgcagaaatcagcacagtgttacaagacggggatattcaatattgccgccgtta

SEQ ID NO: 495751 - DNA, 75 bp, synthetic construct
  source 1..75: mol_type = other DNA
gatgcaggtcagtggtggtgattcgaaagaaacggccagtcgtggcgcgctgctgctggacatatctggtgtaat

SEQ ID NO: 495752 - DNA, 75 bp, synthetic construct
  source 1..75: mol_type = other DNA
ccggtggcgatccgttatatgtcgcacgtcgctgccttgcaatagcgtcggaagatgtcggcaatgctgatccgc

SEQ ID NO: 495753 - DNA, 75 bp, synthetic construct
  source 1..75: mol_type = other DNA
tggtagcgcacccgatgcggcgctgtactggtatgcgcgaattattaccgctggtggcgatccgttatatgtcgc

SEQ ID NO: 495754 - DNA, 75 bp, synthetic construct
  source 1..75: mol_type = other DNA
ccgaattgctgacggaaatcgccggtgagcgtagtgcccgattcgataataaaggcgatcgcttttacgatctga

SEQ ID NO: 495755 - DNA, 75 bp, synthetic construct
  source 1..75: mol_type = other DNA
gtattctttgcgagaatttcttaaaaagaaaagtataatgagttttctttcttgtacatatcattttattaaagc

SEQ ID NO: 495756 - DNA, 75 bp, synthetic construct
  source 1..75: mol_type = other DNA
aacataaaacaaacagagaatgttaatattattgaaaccaatatagggcaattggctttttctttaaatttggca

SEQ ID NO: 495757 - DNA, 75 bp, synthetic construct
  source 1..75: mol_type = other DNA
ataaatatgattcatatgtaatgcctgcgataaatagcatattgaatcaaacttataaaaaatatgagttaataa

SEQ ID NO: 495758 - DNA, 75 bp, synthetic construct
  source 1..75: mol_type = other DNA
gccgggcgttaaatacgctggaaatgatggcggatatggccgaagtcaatgatagcggtaagcgggtcctgaagc

SEQ ID NO: 495759 - DNA, 75 bp, synthetic construct
  source 1..75: mol_type = other DNA
ttacttctggtgtgaaagagattcgcgaggcgatcgagcgcgcgcggcagaaccgcaacgccggacgccgcacca

SEQ ID NO: 495760 - DNA, 75 bp, synthetic construct
  source 1..75: mol_type = other DNA
ccatcacttttattggcgcaaccactgaaaacccgtcgtttgagcttaattcggcactgctttcccgtgcccgtg

SEQ ID NO: 495761 - DNA, 75 bp, synthetic construct
  source 1..75: mol_type = other DNA
cgaggatattgagcgagtacttactcaggcgatggaagacaaaacgcgcggctatggcgggcaggatattgttct

SEQ ID NO: 495762 - DNA, 75 bp, synthetic construct
  source 1..75: mol_type = other DNA
gaaggcaagattggcgaaaagctcacctggctggctgaacaggatcaaaatagccccataaaacgctaccgttaa

SEQ ID NO: 495763 - DNA, 75 bp, synthetic construct
  source 1..75: mol_type = other DNA
tttctaccgcatattgaagatggcaccatcactttcattggcgcgacgactgaaaacccctcgtttgagcttaat

SEQ ID NO: 495764 - DNA, 75 bp, synthetic construct
  source 1..75: mol_type = other DNA
ctggcggcggaagtcagtaacgaaaatgccacggtcgtcgatcacaatgaaacctggtccacctttacctggagc

SEQ ID NO: 495765 - DNA, 75 bp, synthetic construct
  source 1..75: mol_type = other DNA
gcgccatcagttattacgattacgcattgaaaacgccggcagataccggtgacagcatcggtgtcgtcttcgcta

SEQ ID NO: 495766 - DNA, 75 bp, synthetic construct
  source 1..75: mol_type = other DNA
ccaaagcagcagagctggcaaaagtgaaacagtggcatctggaatactacgttgatgaaccgaccttcttcgaca

SEQ ID NO: 495767 - DNA, 75 bp, synthetic construct
  source 1..75: mol_type = other DNA
ttccgaagcgatgcaaaaggaatttaaaaaagatctcttgaaatttcctctaaaaaatgctcctggcgcccttga

SEQ ID NO: 495768 - DNA, 75 bp, synthetic construct
  source 1..75: mol_type = other DNA
gtcgatgaaccgaccttcttcgacaaagtgatggacaacatgtcaggttctgtccgggcgatgttgccagatgcg

SEQ ID NO: 495769 - DNA, 75 bp, synthetic construct
  source 1..75: mol_type = other DNA
tcggcaaagctctgaaagagtttcgtgacagcggtaaaccggtttatgccattggcgagaactacagtcaggggc

SEQ ID NO: 495770 - DNA, 75 bp, synthetic construct
  source 1..75: mol_type = other DNA
atggcgcaattatggatggcgaagaaactcaggggaatgttggcggcgataccactgcggcgcaaatccgcgacg

SEQ ID NO: 495771 - DNA, 75 bp, synthetic construct
  source 1..75: mol_type = other DNA
ttggacatgtgggggaaaatagttggaataagtcgttatattaatactccaatagaaaacagttgtttcggattc

SEQ ID NO: 495772 - DNA, 75 bp, synthetic construct
  source 1..75: mol_type = other DNA
gtaatgccagttcctagtggtgttcaggtaaatattcgaaaaattattagtccttatttcggtttttcatctgac

SEQ ID NO: 495773 - DNA, 75 bp, synthetic construct
  source 1..75: mol_type = other DNA
atgtgggaagacacaatacttacccaatactcagcaagtaaaaaattattgtccatcatagacacatttaaccag

SEQ ID NO: 495774 - DNA, 75 bp, synthetic construct
  source 1..75: mol_type = other DNA
gcaaaaatgtatgacttccagcgtgtaaatagcttgcttgtcacaaaagcagagcgtctggaaaggctgaacgcc

SEQ ID NO: 495775 - DNA, 75 bp, synthetic construct
  source 1..75: mol_type = other DNA
aaataagtcagcacttacttatgatcgtggtgcagcccaagaaagagggcaagatcaaccccgagggaatgggga

SEQ ID NO: 495776 - DNA, 75 bp, synthetic construct
  source 1..75: mol_type = other DNA
gcaaaaatgtatgacttccagcgtgtaaatagcttgcttgtcacaaaagcagagcgtctggaaagggctgaacgc

SEQ ID NO: 495777 - DNA, 75 bp, synthetic construct
  source 1..75: mol_type = other DNA
ttcgcagacggaaacgccaccgtctctaacgagatgaagggcaagctggagctggttgtcgcggattatctgtaa

SEQ ID NO: 495778 - DNA, 75 bp, synthetic construct
  source 1..75: mol_type = other DNA
cagggagtaatcattgggattatgccgcagcacgtcgtatgcaagaacgtgctgcggttggatgctattttttcc

SEQ ID NO: 495779 - DNA, 75 bp, synthetic construct
  source 1..75: mol_type = other DNA
agccgacgcatatcgttgtaccggtcgggctggaaaaagccgcagagcaactgcttaaccgtgaactgttcgcgg

SEQ ID NO: 495780 - DNA, 75 bp, synthetic construct
  source 1..75: mol_type = other DNA
taagcgaggtcgcttacaggccattctgtcagctggggtattgttccgggaagacacactgacaaaagcgctcag

SEQ ID NO: 495781 - DNA, 75 bp, synthetic construct
  source 1..75: mol_type = other DNA
gctgggcaaaacttagaagtgatgcttgattctccggcttccggcgatacaccgattaagtggaaagcttctctg

SEQ ID NO: 495782 - DNA, 75 bp, synthetic construct
  source 1..75: mol_type = other DNA
tgaatgatattgtcgatgatggcaatcaagatgttaaatttgttgacaagaagggccgttgttattatttcgggc

SEQ ID NO: 495783 - DNA, 75 bp, synthetic construct
  source 1..75: mol_type = other DNA
ggaacaggagcatgaggcgcggctgaaacgtcatgataaccaccgtctgagccgtgaaacggcattagtcggggt

SEQ ID NO: 495784 - DNA, 75 bp, synthetic construct
  source 1..75: mol_type = other DNA
agagcttcccctgatgacatgggctgaaccggaataccgcaaaagacaactccgcttctggaaactcgagaaaca

SEQ ID NO: 495785 - DNA, 75 bp, synthetic construct
  source 1..75: mol_type = other DNA
ccggaccaatccccatgcgcacatcatgctgaccacgagagctgtcggggaaacgggattcgcaggaaaggtcag

SEQ ID NO: 495786 - DNA, 75 bp, synthetic construct
  source 1..75: mol_type = other DNA
cgctaccgtggatggacgaagatgaactgcgttatcgcgaagaagtcccttgttattgcggtaaaaaaggctgta

SEQ ID NO: 495787 - DNA, 75 bp, synthetic construct
  source 1..75: mol_type = other DNA
tggaacgcgaactgttcgcggatggcaataccaccgtctccaacgagatgaagggcaagctgcaactggttgtcg

SEQ ID NO: 495788 - DNA, 75 bp, synthetic construct
  source 1..75: mol_type = other DNA
aaagaaaaactgtcagcacgggaagcggagcggcgcagggaggaagccgaagcggaagcgcgccggaaggaacag

SEQ ID NO: 495789 - DNA, 75 bp, synthetic construct
  source 1..75: mol_type = other DNA
ttgcgcctttcatggtggctgtgggtggatcgtagtatgaccccgccaccggggcgtggtagctgggaaccgcta

SEQ ID NO: 495790 - DNA, 75 bp, synthetic construct
  source 1..75: mol_type = other DNA
aaattaatgcaattgtcgatgttcaaagtgtgagtggggctttttacggaggtacctcagtccggaataacatca

SEQ ID NO: 495791 - DNA, 75 bp, synthetic construct
  source 1..75: mol_type = other DNA
atcgagagtaggtagtgagacagagcaagattcaccattactggatctgtatcgggtggcggaacaggttgtgct

SEQ ID NO: 495792 - DNA, 75 bp, synthetic construct
  source 1..75: mol_type = other DNA
agcgattatcacccgtatgctgttgacgaaagtgaagctggaaccgacggacgaagatggcggggagccaatagc

SEQ ID NO: 495793 - DNA, 75 bp, synthetic construct
  source 1..75: mol_type = other DNA
cagacagagggccaggaacaaaaacagtgtgacggagtaaaggaccgggagcttaccggtaattcagcaccggca

SEQ ID NO: 495794 - DNA, 75 bp, synthetic construct
  source 1..75: mol_type = other DNA
acaaacgaaccctgtcagtggtgaatatggtacagcccggtgaggtaaaatatttttcacttgaacaatttttaa

SEQ ID NO: 495795 - DNA, 75 bp, synthetic construct
  source 1..75: mol_type = other DNA
aggctctgcattacctgttggggtgcctgttccgtggccttcagccactccgccaacaggctggctgaaatgcaa

SEQ ID NO: 495796 - DNA, 75 bp, synthetic construct
  source 1..75: mol_type = other DNA
gctgggcaatcttattaaacgttttcgtagcggcgcggagtcgctgcccgatgcggtggtgctgactacggaaga

SEQ ID NO: 495797 - DNA, 75 bp, synthetic construct
  source 1..75: mol_type = other DNA
ccaacgtgagccatgagttacgtacgccattgaccgtgttacagggttacctggagatgatggatgagcagccgc

SEQ ID NO: 495798 - DNA, 75 bp, synthetic construct
  source 1..75: mol_type = other DNA
gagtttacgcaatatctgaaaacgcgtgatttttctcgcccgctcaatctggtgctcaacaccgggcggcatctg

SEQ ID NO: 495799 - DNA, 75 bp, synthetic construct
  source 1..75: mol_type = other DNA
atccgatcatgggacgcgtggaataatacagtactggaaccaaatgacagacagggcgacagtctgttgtcgaca

SEQ ID NO: 495800 - DNA, 75 bp, synthetic construct
  source 1..75: mol_type = other DNA
cctcaattaccttggtttgggggaaggctctgcattgcctgttggtgtaccggttccatggcccaccgccacacc

SEQ ID NO: 495801 - DNA, 75 bp, synthetic construct
  source 1..75: mol_type = other DNA
cgcctttgtcgaactaactctttccctgttccgattgctcacatttttgcatttaggcctgaagggcaggaacga

SEQ ID NO: 495802 - DNA, 75 bp, synthetic construct
  source 1..75: mol_type = other DNA
gcggttctggcaattcttcctcgcgagctgcgtcaccgactctgcatcttcgataccctggaacgccgtgcatta

SEQ ID NO: 495803 - DNA, 75 bp, synthetic construct
  source 1..75: mol_type = other DNA
gcgctgcgtattggtgcgtatgtagtccgtcacaacctcatcatgccggataactttggccgtactgctgccacg

SEQ ID NO: 495804 - DNA, 75 bp, synthetic construct
  source 1..75: mol_type = other DNA
atgattactcctgcacagcaacactggcagaacgtgatggcgcagcgcgcaggccgggcgaatgaaggcgtggac

SEQ ID NO: 495805 - DNA, 75 bp, synthetic construct
  source 1..75: mol_type = other DNA
tccgtcacaacctcatcatgccggataactttggccgtactgctgccacggtactgaccgaagaaatctgcaacc

SEQ ID NO: 495806 - DNA, 75 bp, synthetic construct
  source 1..75: mol_type = other DNA
ggaaagagccgtcaaaaagctgtcttcgccccctccggatccggtcaaaaaaagcgccaaaaccaccaggaaaac

SEQ ID NO: 495807 - DNA, 75 bp, synthetic construct
  source 1..75: mol_type = other DNA
aaattgtcgccaaccaggatatgccggacgaagtgcgcgccaaattatgcaaggcgtgcgcctttgcccgccgtg

SEQ ID NO: 495808 - DNA, 75 bp, synthetic construct
  source 1..75: mol_type = other DNA
gcctgaccgatgcagacaacatggcctcatcactgaagctgctgcgcgaagcgatgcacctgaacccgaacgcag

SEQ ID NO: 495809 - DNA, 75 bp, synthetic construct
  source 1..75: mol_type = other DNA
gcagcagatcgccgggtagagacaacgaaagaggccagcaatgtacagcagaccgttaaccatatgcctggcgat

SEQ ID NO: 495810 - DNA, 75 bp, synthetic construct
  source 1..75: mol_type = other DNA
catttctcgtgaaatcttcgatggcagtgagccggcgctccgggccgtcattgccaacggtaagattaaattcct

SEQ ID NO: 495811 - DNA, 75 bp, synthetic construct
  source 1..75: mol_type = other DNA
gagctgtacaccgtcacgctcaacaagaacttcgaggactggaagacctcggtcaacctgcagtacagccatcag

SEQ ID NO: 495812 - DNA, 75 bp, synthetic construct
  source 1..75: mol_type = other DNA
agtattactgcctgtctatgcttccctatccttctggtcgactacacatgggccacgttcgtaactacaccattg

SEQ ID NO: 495813 - DNA, 75 bp, synthetic construct
  source 1..75: mol_type = other DNA
aaggcgcgcgcgttttcccgtcgtgctctgacagatgcagacagtgtgaccctgtcgctgaaactgctgcgcgaa

SEQ ID NO: 495814 - DNA, 75 bp, synthetic construct
  source 1..75: mol_type = other DNA
ctcggtagaaaaagccggactcgccgtcggtgacatcatcgccaatggcattatccccggcgggctggagatgat

SEQ ID NO: 495815 - DNA, 75 bp, synthetic construct
  source 1..75: mol_type = other DNA
cagccggtatcactgagcaactggccgcacgctggtaccaacatatcactgctgctatgaatgagtttggcatta

SEQ ID NO: 495816 - DNA, 75 bp, synthetic construct
  source 1..75: mol_type = other DNA
cgcagaaaacctatcgtgactctcgttggcaagaacgagatgagttatttcagggaatggttgccgaaggtattt

SEQ ID NO: 495817 - DNA, 75 bp, synthetic construct
  source 1..75: mol_type = other DNA
attgccactcgagcgccagcgagcgatcgccaatctggtgtacagcaaacgcatggggaacaatgcccctggtga

SEQ ID NO: 495818 - DNA, 75 bp, synthetic construct
  source 1..75: mol_type = other DNA
tatgacgccaacggtgattatttctttatcaatggaaacaatttaggctatcaaaaaatatcatttaacgataac

SEQ ID NO: 495819 - DNA, 75 bp, synthetic construct
  source 1..75: mol_type = other DNA
gagcagacagaatggcaccgcgtggtgctgttcggcaagctcgcggaagtggcaggggaatatctgcgcaagggg

SEQ ID NO: 495820 - DNA, 75 bp, synthetic construct
  source 1..75: mol_type = other DNA
gataatctggaaaaatggtttggacattattgtcatatccattgccaggtctctctggggcgcttgatcaacttt

SEQ ID NO: 495821 - DNA, 75 bp, synthetic construct
  source 1..75: mol_type = other DNA
gaggctcccatgcctggtaacggggaaatgacctgttaccttctgcttcacaaccggaacggagaatatacgctc

SEQ ID NO: 495822 - DNA, 75 bp, synthetic construct
  source 1..75: mol_type = other DNA
gcatggggaacaatgcccctggtgatggctggaattaccgtgggcgcgggcttatccagattaccggtttgaata

SEQ ID NO: 495823 - DNA, 75 bp, synthetic construct
  source 1..75: mol_type = other DNA
ggctaacttcgttcgggctgggcgtctcactcaggggcaggctaatgcactgggtcgccatgctggtgaaccacc

SEQ ID NO: 495824 - DNA, 75 bp, synthetic construct
  source 1..75: mol_type = other DNA
atggagattaagcaattccagcgagctgctggtatcagcgatgcgctggccgcacgctggttctcgcatataact

SEQ ID NO: 495825 - DNA, 75 bp, synthetic construct
  source 1..75: mol_type = other DNA
aactgctagatgggacagaggtggaatggaaagcccttggagatgtcacgagtgtcttgcggggaaaaaggctaa

SEQ ID NO: 495826 - DNA, 75 bp, synthetic construct
  source 1..75: mol_type = other DNA
tcaatgctaaatactcccgcgataaagagtccgaagcagatgatttctcctttgatctgttgaagaaacgtggca

SEQ ID NO: 495827 - DNA, 75 bp, synthetic construct
  source 1..75: mol_type = other DNA
tactcccgtgataaagagtccgaagcagatgatttctcctttgatctgttgaagaaacgtggcatcagcacctag

SEQ ID NO: 495828 - DNA, 75 bp, synthetic construct
  source 1..75: mol_type = other DNA
actggatcacacggcggctgggtggaatgcaaagtcgaaggtgaggtggcaaaggggctttatcatctggcaaaa

SEQ ID NO: 495829 - DNA, 75 bp, synthetic construct
  source 1..75: mol_type = other DNA
aacgcaagggcatactggaattacaagcggcgggactcgtcgtttctgcccatggaggccagcataaatccgtca

SEQ ID NO: 495830 - DNA, 75 bp, synthetic construct
  source 1..75: mol_type = other DNA
tggattcatcacaaaactggaatacaaagcaacagagaaaggtgtgcatctggtgaaactggatcaatggttcgc

SEQ ID NO: 495831 - DNA, 75 bp, synthetic construct
  source 1..75: mol_type = other DNA
atgaatactacaggtatgtctttcagctcttttggtataagttgccatagagagaactccttcaggaactctttc

SEQ ID NO: 495832 - DNA, 75 bp, synthetic construct
  source 1..75: mol_type = other DNA
cgctggtcagcgaaatgcaaaagaattcgccaatccacgatactctggctaatccggttgaaatgattacacgcc

SEQ ID NO: 495833 - DNA, 75 bp, synthetic construct
  source 1..75: mol_type = other DNA
gaggaacaaatcgacggagaaccagacgtgcgagtgatgctgagctatcgcgcggaccattattctccctctcag

SEQ ID NO: 495834 - DNA, 75 bp, synthetic construct
  source 1..75: mol_type = other DNA
cgtaacgatctgaaaccgttgttgtctgtggccaaaaagtcccgcaggtatgcctggctcacagagtttgattca

SEQ ID NO: 495835 - DNA, 75 bp, synthetic construct
  source 1..75: mol_type = other DNA
aactgctggcgctgcgtgggattgatgccagcgccggaatggtcagatcgatgatggccggtgcgtcagtggcgt

SEQ ID NO: 495836 - DNA, 75 bp, synthetic construct
  source 1..75: mol_type = other DNA
cgtgcagcgtcggggctggataagctgccgtcgcaggtaatggctgcgaagaaaaagaccagtgacctcgtgaac

SEQ ID NO: 495837 - DNA, 75 bp, synthetic construct
  source 1..75: mol_type = other DNA
gtgcgcgctttaaagagtcattaatgaaccttgcatcggtagtgcttgccttctcagactctcgtagtggtcggt

SEQ ID NO: 495838 - DNA, 75 bp, synthetic construct
  source 1..75: mol_type = other DNA
gagcagaccgaatggcaacgcgtggtgctgttcggcaagctcgcggaagtggcaggcgaatatctgcgcaagggg

SEQ ID NO: 495839 - DNA, 75 bp, synthetic construct
  source 1..75: mol_type = other DNA
actatgcttcaattctctgtgatgatggcatggaagctccggcaaaacccacgttgatatcaacagttactggcc

SEQ ID NO: 495840 - DNA, 75 bp, synthetic construct
  source 1..75: mol_type = other DNA
gctcttttgggataagtagctatagagaaaactccttttggaactgtttccgagggaagaatgatgaggtcgtaa

SEQ ID NO: 495841 - DNA, 75 bp, synthetic construct
  source 1..75: mol_type = other DNA
aagtaaaagtgtccgggatagttatcagtgcaatggagaaagaaatgactagcggaaacgttgggttattgataa

SEQ ID NO: 495842 - DNA, 75 bp, synthetic construct
  source 1..75: mol_type = other DNA
cggcattaatgaactgattgatgacttgatggatcacatcagtctggaaaacaatgtgctgttcccgcgcgcgct

SEQ ID NO: 495843 - DNA, 75 bp, synthetic construct
  source 1..75: mol_type = other DNA
cgtcgcacaacagaatgactgggaagctaccgatccggccttccgtgaagcaaacgtgcagggtaaaaacctgat

SEQ ID NO: 495844 - DNA, 75 bp, synthetic construct
  source 1..75: mol_type = other DNA
catatgatgccttgatgaccgacactctggttgttccttcaatgcgacgacgtggagattttcctgtaggacagg

SEQ ID NO: 495845 - DNA, 75 bp, synthetic construct
  source 1..75: mol_type = other DNA
agccagtcgcaggtgcacatccggcaattgctcactttttacaacagcctgatgccgaacgtttaagcgaactgt

SEQ ID NO: 495846 - DNA, 75 bp, synthetic construct
  source 1..75: mol_type = other DNA
agctcaaaaataggatgaagacagaagttgatggtgaaatcactgagagagaattttcagttcaaatcaaggtgt

SEQ ID NO: 495847 - DNA, 75 bp, synthetic construct
  source 1..75: mol_type = other DNA
tcataaaatgttcaatgggagaacggacgattcacttttctgttcgcaaatttagcggcaatatactggatacag

SEQ ID NO: 495848 - DNA, 75 bp, synthetic construct
  source 1..75: mol_type = other DNA
atgccgatgaatactacaggtacgtctttcagctcttttggtataagttgccatagagaaaactccttcaggaac

SEQ ID NO: 495849 - DNA, 75 bp, synthetic construct
  source 1..75: mol_type = other DNA
cagcgctgggttaaacagtacggttcgaaacctgactttgaaccagtcaactaccgtaacctgctgctgaccatt

SEQ ID NO: 495850 - DNA, 75 bp, synthetic construct
  source 1..75: mol_type = other DNA
ctgggatatttctggtcctggtgccggtctggaaaacatcgatgttggcttcggtaaactctctctggcagcaac

SEQ ID NO: 495851 - DNA, 75 bp, synthetic construct
  source 1..75: mol_type = other DNA
gtcatgacgttcatatgatcgacttctactactgggatatttctggtcctggtgccggtctggaaaacatcgatg

SEQ ID NO: 495852 - DNA, 75 bp, synthetic construct
  source 1..75: mol_type = other DNA
atgaatgctacaggtacgtctttcagttcttttgggataagttgccatagagaaaattccttttggaactgtttc

SEQ ID NO: 495853 - DNA, 75 bp, synthetic construct
  source 1..75: mol_type = other DNA
agcagatcggcggtgcgccggtcacggtatatcgggaacttcgccgcctgggcgatcgcgaactggtgttacacc

SEQ ID NO: 495854 - DNA, 75 bp, synthetic construct
  source 1..75: mol_type = other DNA
taagtgacaaaaaaattcgccaggcagtgcgtcagtttcatcctcaatcctttcaacaattacgcaagtttattc

SEQ ID NO: 495855 - DNA, 75 bp, synthetic construct
  source 1..75: mol_type = other DNA
atgtacgtttgtttgtgtaatggtgtaagtgacaaaaaaattcgtcaggcggtacgtcaatttcatcctcagtct

SEQ ID NO: 495856 - DNA, 75 bp, synthetic construct
  source 1..75: mol_type = other DNA
gagcagacggaatggcaccgcgtggtgctgttcggcaagctcgcggaagtggcaggagaatatctgcgcaagggg

SEQ ID NO: 495857 - DNA, 75 bp, synthetic construct
  source 1..75: mol_type = other DNA
tgacactgaagcggaagacagagggaacagggcctgtccgcagccggaaaaccatcatcaatgtcaccacaccac

SEQ ID NO: 495858 - DNA, 75 bp, synthetic construct
  source 1..75: mol_type = other DNA
tctgaccctgcccacgctggatgaggccgtgaataccctgaagccctggtggccgggattatttgacggtgacac

SEQ ID NO: 495859 - DNA, 75 bp, synthetic construct
  source 1..75: mol_type = other DNA
taaaaaactgcgcagggcgctgaaggccatcacccgttcagaaagctatcttggtgccatgaaagccggtgcctg

SEQ ID NO: 495860 - DNA, 75 bp, synthetic construct
  source 1..75: mol_type = other DNA
atgacggcacagatcgccgtaaccgccatgataattggcagcctgtggagtgatgccagtccggcccccggcaaa

SEQ ID NO: 495861 - DNA, 75 bp, synthetic construct
  source 1..75: mol_type = other DNA
cacctcaaacggcatcacagtgcatacgcataaacacggtggcgtgaaaggtggcagcgattcgacaggaggccc

SEQ ID NO: 495862 - DNA, 75 bp, synthetic construct
  source 1..75: mol_type = other DNA
cgcgtgtggtccaagtatatgacgcgtatcaagcgtccaaaacgttttcacactctttccggcggtaaaccgcag

SEQ ID NO: 495863 - DNA, 75 bp, synthetic construct
  source 1..75: mol_type = other DNA
caatggggagcagaaccatccgtttctctgtgggcagtatgaataaacatattcttagtacggtcacccggcaga

SEQ ID NO: 495864 - DNA, 75 bp, synthetic construct
  source 1..75: mol_type = other DNA
aagcggggcgtaaatccagcagtaaaccgtcaaaagtgcaggagactgcactgtctgccctgctggcgcagacgg

SEQ ID NO: 495865 - DNA, 75 bp, synthetic construct
  source 1..75: mol_type = other DNA
tcggcgtttcgctgttacggcaatgaagaattacgttgggtattccgcctgctggtggggcatgaatctgaaact

SEQ ID NO: 495866 - DNA, 75 bp, synthetic construct
  source 1..75: mol_type = other DNA
tgcgcagggcgctgaaggctgttacccgttcagaaagctatcttggcgcaatgaaggccggtgcctgccgctatg

SEQ ID NO: 495867 - DNA, 75 bp, synthetic construct
  source 1..75: mol_type = other DNA
acatccggcaaaaaggaatactggaactaaaggcggcgggactcgtcgtctctgcccatggaggccagcgtaaat

SEQ ID NO: 495868 - DNA, 75 bp, synthetic construct
  source 1..75: mol_type = other DNA
gagtacaaggcagcgacaaaaggcgttcacctggtaaaactcgaccagtggtttgccagttcgaaaacgtgccat

SEQ ID NO: 495869 - DNA, 75 bp, synthetic construct
  source 1..75: mol_type = other DNA
cgtaatctgcgacgcaaacaaaaagcattatcccgtaagcaaaagggaagcgcgaatcgtaaaaaggccagaatc

SEQ ID NO: 495870 - DNA, 75 bp, synthetic construct
  source 1..75: mol_type = other DNA
cgcgaaatcttccgtaaatatgccctgaaagaagacggcaacgaaccgggagcgcaggaaaaccgctttcaggtt

SEQ ID NO: 495871 - DNA, 75 bp, synthetic construct
  source 1..75: mol_type = other DNA
gtgccatgaaagccggtgcctgccggtatgacacggaagggtatgtgacggagcatatttctcaggaggaggaag

SEQ ID NO: 495872 - DNA, 75 bp, synthetic construct
  source 1..75: mol_type = other DNA
aaggccgcagaaaaaggcgtgcatctggtaaaactcgaccagtggtttgccagttcgaaacagtgccatagttgt

SEQ ID NO: 495873 - DNA, 75 bp, synthetic construct
  source 1..75: mol_type = other DNA
ccggtatgacacggaagggtatgtgacggagcatatttctcaggaggaagaagcgtatgcggcagcgcgtctgga

SEQ ID NO: 495874 - DNA, 75 bp, synthetic construct
  source 1..75: mol_type = other DNA
atggcagagcaaaaacgaccggtactgacactgaagcggaaaacggaaggagagacgcctgtccgcagccggaaa

SEQ ID NO: 495875 - DNA, 75 bp, synthetic construct
  source 1..75: mol_type = other DNA
gcagcgcgtctggagaaaattcgccgccagaaccggataaaggcagaacttcaggccgtgcttgatgagaaataa

SEQ ID NO: 495876 - DNA, 75 bp, synthetic construct
  source 1..75: mol_type = other DNA
atggcattgcaacaggcggtaattaatcttgatgtggcattttccaacttttttaatccgaagcggaaagcgcgg

SEQ ID NO: 495877 - DNA, 75 bp, synthetic construct
  source 1..75: mol_type = other DNA
tctgacgctgccctcgctggatgaggcggtgaacactctgaaaccttggtggccgggattgtttgacggtaacac

SEQ ID NO: 495878 - DNA, 75 bp, synthetic construct
  source 1..75: mol_type = other DNA
gcttctggcctgcggtatccgggacgtgttactggaagacgtggcgcagcggaatatcccgctctcgcataaaaa

SEQ ID NO: 495879 - DNA, 75 bp, synthetic construct
  source 1..75: mol_type = other DNA
actggtggctttggttatgatccgattttcttcgtgccttctgaaggcaaaaccgctgccgaactgactcgcgaa

SEQ ID NO: 495880 - DNA, 75 bp, synthetic construct
  source 1..75: mol_type = other DNA
aaccacgtcgaagcggcagaactactgcgtgtaactgctgaagcaatccagaacgaagcgcaggagatccactaa

SEQ ID NO: 495881 - DNA, 75 bp, synthetic construct
  source 1..75: mol_type = other DNA
aaccacgtcgaagcagcagaactactgcgtgtaactgctgaagcaatccagaacgaagcacaggagatccactaa

SEQ ID NO: 495882 - DNA, 75 bp, synthetic construct
  source 1..75: mol_type = other DNA
gacgaagcagagcgcgtacgtttctgggccggtcgcaaaaatgcgttcccggcggtaggacgtatctccccggat

SEQ ID NO: 495883 - DNA, 75 bp, synthetic construct
  source 1..75: mol_type = other DNA
taccggacgaccaacgtcaggcgcgcttccattgcgtgctggtatatctgcgccacgctgaagatccaaccccgc

SEQ ID NO: 495884 - DNA, 75 bp, synthetic construct
  source 1..75: mol_type = other DNA
tcttcttcgtaccttccgaagggaaaaccgctgccgaactgacccgcgaagaaaagagcgccatttcccaccgtg

SEQ ID NO: 495885 - DNA, 75 bp, synthetic construct
  source 1..75: mol_type = other DNA
ctttccagccacatgatgaaagaagagcagatcctcttcccgatgatcaaacaaggcaatggggccaatcagcgt

SEQ ID NO: 495886 - DNA, 75 bp, synthetic construct
  source 1..75: mol_type = other DNA
ctgagcatatcagcctggaaaacaatgtgctgttcccgcgcgcgctggcgggtgagtgatctaaaagctggatgg

SEQ ID NO: 495887 - DNA, 75 bp, synthetic construct
  source 1..75: mol_type = other DNA
tctgatagtgctggtgctgatcgcgttatttgtaatcctggcaccgatgctttcgcagtttgcctatgacgatac

SEQ ID NO: 495888 - DNA, 75 bp, synthetic construct
  source 1..75: mol_type = other DNA
ctgaggcaatggctgcccgccttgatagccttgcgtgtcatattacatcccgccagctaaaccacgtcgaagcag

SEQ ID NO: 495889 - DNA, 75 bp, synthetic construct
  source 1..75: mol_type = other DNA
aaccacgtggaagcggcagaactgctgcgtgtgactgctgaagcaatccagaacgaagcgcaggagatccactaa

SEQ ID NO: 495890 - DNA, 75 bp, synthetic construct
  source 1..75: mol_type = other DNA
tcttaatcttttactgacagaggcccgtcttgaagaacgtcgggcaagggctgaggcaatggctgcccgccttga

SEQ ID NO: 495891 - DNA, 75 bp, synthetic construct
  source 1..75: mol_type = other DNA
gacgaagcagagcgcgtacgtttctgggccggccgcaagaacgccttcccggcagtggggcgcatttccccggat

SEQ ID NO: 495892 - DNA, 75 bp, synthetic construct
  source 1..75: mol_type = other DNA
agcccgctgctgaatcatccctataaactcctctctatctttgaacagtgggcatcagacgatggcatcagggaa

SEQ ID NO: 495893 - DNA, 75 bp, synthetic construct
  source 1..75: mol_type = other DNA
ggcggtcgcacccagtccatgtttgattctcacccaccatcaacagagcgtgcgcaacacatccgtgatcgtatc

SEQ ID NO: 495894 - DNA, 75 bp, synthetic construct
  source 1..75: mol_type = other DNA
acgggcgataacgtagtgattcgtcagtcgcacggcggctcaggtaaacaggcaacgtcggtgattaacggcata

SEQ ID NO: 495895 - DNA, 75 bp, synthetic construct
  source 1..75: mol_type = other DNA
attttcttgttagtcataaaattaaaacattgattggtatgactttgttcgtacttaaggcaagccctaatgttc

SEQ ID NO: 495896 - DNA, 75 bp, synthetic construct
  source 1..75: mol_type = other DNA
ccccgtaaaattcaagggagaacactcggctggactgccagccagtatgaggagtggttgagtaaatcacactga

SEQ ID NO: 495897 - DNA, 75 bp, synthetic construct
  source 1..75: mol_type = other DNA
ttatgattcataatatgccttcctgggtcactatacctgaagccgccgaaataacgatgaaaactttaaagagaa

SEQ ID NO: 495898 - DNA, 75 bp, synthetic construct
  source 1..75: mol_type = other DNA
caatgagcgtggcaacggtactgactggttgccagaatatggactccaacggactgctctcatcaggagcggaag

SEQ ID NO: 495899 - DNA, 75 bp, synthetic construct
  source 1..75: mol_type = other DNA
gtgcgagctggacggcgtggagtctgacgtacaggaagactgcgagcgggttaacgacatcttgttgaaagcggg

SEQ ID NO: 495900 - DNA, 75 bp, synthetic construct
  source 1..75: mol_type = other DNA
gtacataacctgctgaaaattgaagtgcaaacgctggatggcgaggcgctgacgctgggatcggacgcgctggat

SEQ ID NO: 495901 - DNA, 75 bp, synthetic construct
  source 1..75: mol_type = other DNA
actggcgataacgtggtgattcgtcagtcacacggtggttcaggtaaacaagcgacgtcggtaatcaacggtatt

SEQ ID NO: 495902 - DNA, 75 bp, synthetic construct
  source 1..75: mol_type = other DNA
cgcgcggcagtagcgtcttatgtgcagtctccgcgctattaccgtgcgttaatggctggcgacgcccgttacgac

SEQ ID NO: 495903 - DNA, 75 bp, synthetic construct
  source 1..75: mol_type = other DNA
ggcaaaactggaagaaggtcgccaaagctcaatgtttgacgaccatcctgcatccgccgaacgcgcccagcatat

SEQ ID NO: 495904 - DNA, 75 bp, synthetic construct
  source 1..75: mol_type = other DNA
agacgctggaaaatttcagtgaaaagctggaggtcgaagggcgcagtttatggcaggacgcacgccgtcgtttta

SEQ ID NO: 495905 - DNA, 75 bp, synthetic construct
  source 1..75: mol_type = other DNA
agaaattcatccgtgaacgtcctgtggaaaaaatacggcaatggcgacaacggtactcccggccgatagtgaatg

SEQ ID NO: 495906 - DNA, 75 bp, synthetic construct
  source 1..75: mol_type = other DNA
acggttacacacgaaactcctgacccgcggcgtgatacacgccgacgagaccgggctgcgtatcctggacacgaa

SEQ ID NO: 495907 - DNA, 75 bp, synthetic construct
  source 1..75: mol_type = other DNA
ggtcaaccgctatatccgcccgcagtacagctgtccctgctgtgagaaagtgttcagcggaaaaatgccggcaca

SEQ ID NO: 495908 - DNA, 75 bp, synthetic construct
  source 1..75: mol_type = other DNA
tgctgggcccatgccagaaggggcttcgccgacctgtataaaatgaacaaagatccacgggcagccatcgcggtg

SEQ ID NO: 495909 - DNA, 75 bp, synthetic construct
  source 1..75: mol_type = other DNA
tggccgggaaccgcgcggcacagataatgagccttctggaaacggcaaaacgtaatggtctggagccgcatgcct

SEQ ID NO: 495910 - DNA, 75 bp, synthetic construct
  source 1..75: mol_type = other DNA
ccacagatagtcagcttcgactgccagaccgggcgtggtcatgaacatcctgaaaactggcttcagggctggagc

SEQ ID NO: 495911 - DNA, 75 bp, synthetic construct
  source 1..75: mol_type = other DNA
actgaaaaaggcgtgctgttcaactctggcgagttcaacggtcttgaccatgaagcggccttcaacgccatcgcc

SEQ ID NO: 495912 - DNA, 75 bp, synthetic construct
  source 1..75: mol_type = other DNA
gcgacctgtacgccggaatactaccgttgggaacagaaatgcttcaccgaactgtataaaaaaggcctggtatat

SEQ ID NO: 495913 - DNA, 75 bp, synthetic construct
  source 1..75: mol_type = other DNA
atatcttcatatgagtctgggttgtccaaaagtcgaaatatggccattgaaaatgcaaaatacgattatctttgg

SEQ ID NO: 495914 - DNA, 75 bp, synthetic construct
  source 1..75: mol_type = other DNA
actggcaagatgctggagggaaatatgctggatggcttgaaagcatgggatttgaatatcaatctgatgaaggtt

SEQ ID NO: 495915 - DNA, 75 bp, synthetic construct
  source 1..75: mol_type = other DNA
tggtagcaaaatatcttgatggcgttaccgtgcgtaaagtgatttacgtaccgggtaaactcctcaatctggtcg

SEQ ID NO: 495916 - DNA, 75 bp, synthetic construct
  source 1..75: mol_type = other DNA
gtgatgttgcggcactgaacgtcgatgcgctgactgaagatcagaaagcgctgcgtcgcgatgtgcataaaacta

SEQ ID NO: 495917 - DNA, 75 bp, synthetic construct
  source 1..75: mol_type = other DNA
tgacgcgtctgcctgaatggccggaggagcgactggcagagttgctgccccttgagggatttaccttcggtgaat

SEQ ID NO: 495918 - DNA, 75 bp, synthetic construct
  source 1..75: mol_type = other DNA
cggtcctgttagcagacagctttaaaggcggtggcaaagtgctttcctgcggcaacggcggctcccattgcgacg

SEQ ID NO: 495919 - DNA, 75 bp, synthetic construct
  source 1..75: mol_type = other DNA
cgtggttcattcctgatgatgcaaagttacatcgcaaactgttgcgctggtacagctcggtgaaaacaggtatgg

SEQ ID NO: 495920 - DNA, 75 bp, synthetic construct
  source 1..75: mol_type = other DNA
tattacccgttagtggtgatgatgattgaagctcgtgaactggttaacgatcagggtaaacagctactttatgtc

SEQ ID NO: 495921 - DNA, 75 bp, synthetic construct
  source 1..75: mol_type = other DNA
gggcgtatctcactcatggtcggtgttgctgcggcactggtggctgtggtcgtcgggacactttatggttcgctt

SEQ ID NO: 495922 - DNA, 75 bp, synthetic construct
  source 1..75: mol_type = other DNA
tcctctttgaatcctttttaagcttcctggggctgggtacacaagagccgttaagcagctggggcgcattgctga

SEQ ID NO: 495923 - DNA, 75 bp, synthetic construct
  source 1..75: mol_type = other DNA
ttctcccgttacgttgaagcggtaggtcgcgaaggcgatgtactgctggggatctctacctccggtaactctgca

SEQ ID NO: 495924 - DNA, 75 bp, synthetic construct
  source 1..75: mol_type = other DNA
ttgcccggaatgtgatgaaaccctgcacttcattcgcaatgaagtcagcgagaaaatggaatatatccccgcaca

SEQ ID NO: 495925 - DNA, 75 bp, synthetic construct
  source 1..75: mol_type = other DNA
taaaaaatgcgaatcgctggccgggatgcagcgttccctgttcgaagaggatgttgacgcggatatcgcagaaat

SEQ ID NO: 495926 - DNA, 75 bp, synthetic construct
  source 1..75: mol_type = other DNA
tttcgcaaatctgtataaggccagcagggagccccgtgcagccatggcgctgagaaaaatcgcgggtctttatcg

SEQ ID NO: 495927 - DNA, 75 bp, synthetic construct
  source 1..75: mol_type = other DNA
gcgtgccgcatctatccttgaagctgcacgtaaagacccgatttttgcgggtatctctgataatgccaccgctca

SEQ ID NO: 495928 - DNA, 75 bp, synthetic construct
  source 1..75: mol_type = other DNA
gagaacattcagttcagctcgatggatgtgctgtgctacgtccgtgatgaaaatccgggtatatcagccaggggg

SEQ ID NO: 495929 - DNA, 75 bp, synthetic construct
  source 1..75: mol_type = other DNA
ctcatgaacaggatatgctgcgtcttcgcatcatgatctggcgcactcttgcgaccgacacctttgacatcgctc

SEQ ID NO: 495930 - DNA, 75 bp, synthetic construct
  source 1..75: mol_type = other DNA
cgccttaaaatcaggggctcgaccagagtttatggttattggcaacatgaccgaagcccaggcaacaacgctggc

SEQ ID NO: 495931 - DNA, 75 bp, synthetic construct
  source 1..75: mol_type = other DNA
atgaagccagatgagtttgcgcaaatccagcaggcggtaattacccagatgctgcaggcaccgcaaacgctcggc

SEQ ID NO: 495932 - DNA, 75 bp, synthetic construct
  source 1..75: mol_type = other DNA
gcgccgctgtgggttatcgacttcccgatgtttgaagacgacggcgaaggcggcctgaccgcgatgcaccatccg

SEQ ID NO: 495933 - DNA, 75 bp, synthetic construct
  source 1..75: mol_type = other DNA
ggcgtcagtggggcatgggcttcctgctgcaaagcaacgaaaaacagccatcgtatctgtgggagcgttacaagg

SEQ ID NO: 495934 - DNA, 75 bp, synthetic construct
  source 1..75: mol_type = other DNA
aattgattacctatctgattggtaatcgcagcccaggtacactttctgactggctgcaaaagcagggattagttg

SEQ ID NO: 495935 - DNA, 75 bp, synthetic construct
  source 1..75: mol_type = other DNA
ggcgtcagtggggcatgggcttccttttgcaaagcaatgataaacagccttcattcttgtgggagcgttacaagg

SEQ ID NO: 495936 - DNA, 75 bp, synthetic construct
  source 1..75: mol_type = other DNA
gaattatgggggcgcgttgacccgaacttcccgtttgccatgctgttccctggctcccgtaccgaagacattctg

SEQ ID NO: 495937 - DNA, 75 bp, synthetic construct
  source 1..75: mol_type = other DNA
gcttccgcgccatccctcgcaactgtatgaactgctgcttgaaggtgtggtgctgtttatcatccttaacctgta

SEQ ID NO: 495938 - DNA, 75 bp, synthetic construct
  source 1..75: mol_type = other DNA
acatcagcatggggcaaattctttccatcccgatgattgtcgcgggtgtgatcatgatggtctgggcatatcgtc

SEQ ID NO: 495939 - DNA, 75 bp, synthetic construct
  source 1..75: mol_type = other DNA
cgtcgtcgtgatcttggtagcctgatcttcatcgatatgcgcgaccgcgagggtatcgtgcaggtatttttcgat

SEQ ID NO: 495940 - DNA, 75 bp, synthetic construct
  source 1..75: mol_type = other DNA
tacctggtgccttctcgtgtgcacaaagggaaattctacgcactgccgcagtctccgcagctgttcaaacagctg

SEQ ID NO: 495941 - DNA, 75 bp, synthetic construct
  source 1..75: mol_type = other DNA
agatacaaaaagatctagagaaagaattaataaaaaatctttctgataaattaaaaaaagccttcaaaggtaata

SEQ ID NO: 495942 - DNA, 75 bp, synthetic construct
  source 1..75: mol_type = other DNA
gcggagttccgtagtaaaactgatgagttgattacctatctgattggcaatcgcagcccaggaacgctttctgac

SEQ ID NO: 495943 - DNA, 75 bp, synthetic construct
  source 1..75: mol_type = other DNA
ggctgatgaaccggatcaggtctggcgcgaaccggcgacccgttttgtgctggagtttatgggcgaagtgaaccg

SEQ ID NO: 495944 - DNA, 75 bp, synthetic construct
  source 1..75: mol_type = other DNA
ccgaaaggccactacacccaattagtcgtgcagccgctggggtggtacaacgaaccgctgacggtcgtgatgcac

SEQ ID NO: 495945 - DNA, 75 bp, synthetic construct
  source 1..75: mol_type = other DNA
tggggccgtccggttccgggaaaaccacgctgctgcgcattatcgccgggctggagcatcaaaccagcgggcata

SEQ ID NO: 495946 - DNA, 75 bp, synthetic construct
  source 1..75: mol_type = other DNA
ctgatctgcaccgaatgtcctggtctcagctggcaagagttgcggaagagtcgacagtacatcatgattatgccc

SEQ ID NO: 495947 - DNA, 75 bp, synthetic construct
  source 1..75: mol_type = other DNA
catcagctggattgatacaacgctgtcagggaataagtctggcagctccccaaaattgatagcgccattatcatc

SEQ ID NO: 495948 - DNA, 75 bp, synthetic construct
  source 1..75: mol_type = other DNA
gtgttgccgcggcgtgaacgcccgaatgcggcggcgatcaaagcgaaagtgacaaaattgctggagatggtgcag

SEQ ID NO: 495949 - DNA, 75 bp, synthetic construct
  source 1..75: mol_type = other DNA
tatggttgagtgagtattttgaatatattattatacctaataagttaagcaatgcagagactttttattttgcat

SEQ ID NO: 495950 - DNA, 75 bp, synthetic construct
  source 1..75: mol_type = other DNA
agataaaattaaaattgtacaattaattgtaagtcatttagatgagagaacattaagctgtataaaaaatatctc

SEQ ID NO: 495951 - DNA, 75 bp, synthetic construct
  source 1..75: mol_type = other DNA
ggcgaatgtgctggatatcgatttccgttatccgtcaatcactcgtgatatggattacgtcgagtggctggcaga

SEQ ID NO: 495952 - DNA, 75 bp, synthetic construct
  source 1..75: mol_type = other DNA
ggatttaaaaggaaggcgacctcaggagatacatttctgaaacccaatagcacagaatacatacgctggagtgca

SEQ ID NO: 495953 - DNA, 75 bp, synthetic construct
  source 1..75: mol_type = other DNA
aaatgaccgtggcactacgtgaaacgagcgcaggtgaggggatacctggagactttcgtgctcaggcaattttca

SEQ ID NO: 495954 - DNA, 75 bp, synthetic construct
  source 1..75: mol_type = other DNA
atcaacaactaattatattggtatgggtataaaagcacttggtgaagatgattcgacattcttaatcccaaacag

SEQ ID NO: 495955 - DNA, 75 bp, synthetic construct
  source 1..75: mol_type = other DNA
tgatgatggataccttgacaactggtttcaggtatatcctttattaaacgagtttaatctcaaggcacatatttt

SEQ ID NO: 495956 - DNA, 75 bp, synthetic construct
  source 1..75: mol_type = other DNA
gagctggcgggtttgcaaaagctgtaattgatagtttagatcatgcatgttatgaaattcatggtttcatcgata

SEQ ID NO: 495957 - DNA, 75 bp, synthetic construct
  source 1..75: mol_type = other DNA
agcatgggaattatatatcatattgtacaaatatctctactaatgttgttcttaatggtgatgtattcgttgggg

SEQ ID NO: 495958 - DNA, 75 bp, synthetic construct
  source 1..75: mol_type = other DNA
acgcagaatggcgatgtgctgatcaaggcacacccggctgctgcgatgaaggctgatgcctggaagcggatccgg

SEQ ID NO: 495959 - DNA, 75 bp, synthetic construct
  source 1..75: mol_type = other DNA
gttgaagacggggttattgtggagcgcggcacgcacaacgatttgctggagcaccgtggcgtctacgcgcaactt

SEQ ID NO: 495960 - DNA, 75 bp, synthetic construct
  source 1..75: mol_type = other DNA
tgcgtaacatcaacctgaaaattccggcagggaagacggttgctctggttggacgctctggttcgggtaatcaac

SEQ ID NO: 495961 - DNA, 75 bp, synthetic construct
  source 1..75: mol_type = other DNA
gatatcacgacccgcactatcgaagcggtgcgtaaatcgaaggaagcgttagacctgttcactaccggagcataa

SEQ ID NO: 495962 - DNA, 75 bp, synthetic construct
  source 1..75: mol_type = other DNA
catcgctggtgaatttggataaagtgtcgttgtataaatatcagattaaaaacaatgcatttgatgagcaaaagc

SEQ ID NO: 495963 - DNA, 75 bp, synthetic construct
  source 1..75: mol_type = other DNA
gcgcttctgctggcgaaccgattccaatggcgggcattccacaccatgcggtggaaaactatcttgccaaactgg

SEQ ID NO: 495964 - DNA, 75 bp, synthetic construct
  source 1..75: mol_type = other DNA
atgagtgtaatagaaaatttagacgcccataccccaatgatgcagcagtatctcaagctgaaagcccagcacccg

SEQ ID NO: 495965 - DNA, 75 bp, synthetic construct
  source 1..75: mol_type = other DNA
cagtgatgcgcagcgcgataatgccaaccgcagcgctgtggccactgcttccgcccgcatcggcaccattctggt

SEQ ID NO: 495966 - DNA, 75 bp, synthetic construct
  source 1..75: mol_type = other DNA
caaaccaggtttggcaaaacgccttatggtgtggccagaatagccaaagcgcaaggcgtacctgttattgctgtt

SEQ ID NO: 495967 - DNA, 75 bp, synthetic construct
  source 1..75: mol_type = other DNA
cttgattcgcaaaaacgcacgaaagagaatatacaacatgttaataaatcaatagaaaagttatcttttgccata

SEQ ID NO: 495968 - DNA, 75 bp, synthetic construct
  source 1..75: mol_type = other DNA
tgatgttctattacagttggcaactgtcgatcattttgattgtgctggcaccgattgtttcgattgcgattcgtg

SEQ ID NO: 495969 - DNA, 75 bp, synthetic construct
  source 1..75: mol_type = other DNA
gtggccctgcggcctccggtaagccaatgcccccctcaaatggtgggccaaatcatggcagccctggtcatggtc

SEQ ID NO: 495970 - DNA, 75 bp, synthetic construct
  source 1..75: mol_type = other DNA
tggccaaaattacaagagttatatggaagtaacttcgaaattgagcgacctaatgaaaatatgaaagcatttctg

SEQ ID NO: 495971 - DNA, 75 bp, synthetic construct
  source 1..75: mol_type = other DNA
ttgaacattaattttgatgttgtgatcaagagcgatgatcatcaggttgatatggattatgggttgaagaccctg

SEQ ID NO: 495972 - DNA, 75 bp, synthetic construct
  source 1..75: mol_type = other DNA
tgcctgagtttgaaaaactgaaggaacagtatgaatacctgtgggatatgccggacaaccgcggctatctgacaa

SEQ ID NO: 495973 - DNA, 75 bp, synthetic construct
  source 1..75: mol_type = other DNA
tccgccagtcaaacctgtgtatggagatcactttacctactcgtccactgacatttaccgacgacccgaacggtg

SEQ ID NO: 495974 - DNA, 75 bp, synthetic construct
  source 1..75: mol_type = other DNA
tgcggccagcatttttgatgggattaccaccagccagttgcatgaggctttggttaaatctgccgctgatttgat

SEQ ID NO: 495975 - DNA, 75 bp, synthetic construct
  source 1..75: mol_type = other DNA
cgtcgccgcctgtttggtcacatgatgggaatgcctgtgtcattctttgacaaacagtctactggtacgctgtta

SEQ ID NO: 495976 - DNA, 75 bp, synthetic construct
  source 1..75: mol_type = other DNA
gtcgaggatggtgtcattgtggaacgcggtacgcataacgatttgcttgagcaccgtggcgtttacgcgcaactt

SEQ ID NO: 495977 - DNA, 75 bp, synthetic construct
  source 1..75: mol_type = other DNA
gctgtttaccattctggacagtgagcaggagaaagacgaaggtaagcgcgtgatcgagcgtgcgactggcgacgt

SEQ ID NO: 495978 - DNA, 75 bp, synthetic construct
  source 1..75: mol_type = other DNA
ctggtgttgatgcaggtgcactacagtaaagggattgataaaataaaagcgttgctgccggatcgtacctgggag

SEQ ID NO: 495979 - DNA, 75 bp, synthetic construct
  source 1..75: mol_type = other DNA
tgatagcccaccgtttgtctaccattgaaaaggcagacgaaattgtggtcgtcgaggacggggtcattgtggaac

SEQ ID NO: 495980 - DNA, 75 bp, synthetic construct
  source 1..75: mol_type = other DNA
tcgtgctttgttgcgtgacagcccgattctgattctggacgaagccacctcggcactggatactgaatctgaacg

SEQ ID NO: 495981 - DNA, 75 bp, synthetic construct
  source 1..75: mol_type = other DNA
taacggcgaataccagaccgacagcgccgcatatcgccccctgggcgaatactgggaatctatcggcggatcgtg

SEQ ID NO: 495982 - DNA, 75 bp, synthetic construct
  source 1..75: mol_type = other DNA
atgaaactgagtgaaaaacagcaactttttacggtgatgatcgccagcctgattcattttgcccaggaaaaaggc

SEQ ID NO: 495983 - DNA, 75 bp, synthetic construct
  source 1..75: mol_type = other DNA
tatcgcctgaccttcggtgaggcataccgcacgccggagcaggcagcactgaatgcgaaaaccggaaaaggcatc

SEQ ID NO: 495984 - DNA, 75 bp, synthetic construct
  source 1..75: mol_type = other DNA
gccacttggtgtattattggaccggtgtttcaaaattgcgttagttaccgatgggcgcctctccggggcatcagg

SEQ ID NO: 495985 - DNA, 75 bp, synthetic construct
  source 1..75: mol_type = other DNA
ctttctgatgttgtaccgctgatggcacgtctctacccgaacggtccggctgatattaaccacttccaggcggca

SEQ ID NO: 495986 - DNA, 75 bp, synthetic construct
  source 1..75: mol_type = other DNA
actgggaatctatcggcggatcgtggggtggacgtttcagtaagccggacgggaaccatttcagtcttgagcata

SEQ ID NO: 495987 - DNA, 75 bp, synthetic construct
  source 1..75: mol_type = other DNA
ttgctcaaaagggtagcgtattggatgggcatggctttagcggtgatgcaaccgacaacattacccttgctggct

SEQ ID NO: 495988 - DNA, 75 bp, synthetic construct
  source 1..75: mol_type = other DNA
ggcgcaaaacatcgctaccgtgccgcaattacaaaaatggtcgcgggcacggattgacgatcgtatcgacgaatt

SEQ ID NO: 495989 - DNA, 75 bp, synthetic construct
  source 1..75: mol_type = other DNA
ggtaacgcgcggcgcgttgcaacaagagatgacgcgcattcaccgtttgctggggcgtaccattgtgctggtcac

SEQ ID NO: 495990 - DNA, 75 bp, synthetic construct
  source 1..75: mol_type = other DNA
ctgctgcgtctgccgccagcctcttcctccacaaccagtggtgcaagcaacacgtcgtccaccagtcagggcgat

SEQ ID NO: 495991 - DNA, 75 bp, synthetic construct
  source 1..75: mol_type = other DNA
aacgtatcctcgaagaggcgcgtgcgtacaaggctcagactatcctggaagcccagggtgaagtggcacgctttg

SEQ ID NO: 495992 - DNA, 75 bp, synthetic construct
  source 1..75: mol_type = other DNA
tatggctctttctgccccagcattcgctactgatagcacggtatcaactgatccggttacgctgaatacagagaa

SEQ ID NO: 495993 - DNA, 75 bp, synthetic construct
  source 1..75: mol_type = other DNA
gattaactgggatgacttctctgacctttctgatgttgtaccgctgatggcacgtctctacccgaacggtccggc

SEQ ID NO: 495994 - DNA, 75 bp, synthetic construct
  source 1..75: mol_type = other DNA
atgctgttccctcaacctggaccttttattcccgtatgcagcgggtgaataatgcccttcctcctgaatcgggaa

SEQ ID NO: 495995 - DNA, 75 bp, synthetic construct
  source 1..75: mol_type = other DNA
cgcaggagattagccggagtgaatacacgaattacacctgtgagcgggatttacaggtggagcagtactgcacac

SEQ ID NO: 495996 - DNA, 75 bp, synthetic construct
  source 1..75: mol_type = other DNA
ggtatcggctttggcagcgggaaacatcctgactgccggggcattacggtggaagagctgcaggcactgcggttt

SEQ ID NO: 495997 - DNA, 75 bp, synthetic construct
  source 1..75: mol_type = other DNA
acttctccattctacagtcaatggcgcacgacttagcgcaaacagcatggcgtggtgcgcctcgtccgttacctg

SEQ ID NO: 495998 - DNA, 75 bp, synthetic construct
  source 1..75: mol_type = other DNA
gctatttatgctttaccctcaaatcaagtcattccctctacatggatattttattcccgaatgcaaagagtcaat

SEQ ID NO: 495999 - DNA, 75 bp, synthetic construct
  source 1..75: mol_type = other DNA
atgcttttacggcatcataatttcgcattctttttagggctggtaacagccctctattcctctattagctatgct

SEQ ID NO: 496000 - DNA, 75 bp, synthetic construct
  source 1..75: mol_type = other DNA
atgaaacgcgttatcgtgatgatgctggctgcgctgaccaccttcggaacgggattgcaggccagcgataaatac

SEQ ID NO: 496001 - DNA, 75 bp, synthetic construct
  source 1..75: mol_type = other DNA
cgctggggaaagccaaagagaaactgctcactgtttatgtcggcacatactgctcgaagaaggtgctgggcgtgt

SEQ ID NO: 496002 - DNA, 75 bp, synthetic construct
  source 1..75: mol_type = other DNA
cgatattaatcacttccaggcggcgggaggcgtaccggtgctggtgcgtgaactgctcaaggcgggtctgctgca

SEQ ID NO: 496003 - DNA, 75 bp, synthetic construct
  source 1..75: mol_type = other DNA
aggctgtttcggcgctggctgcggtgacagcggccgcaaaggatgtggctgccatgaatgatgtgaatgtccggg

SEQ ID NO: 496004 - DNA, 75 bp, synthetic construct
  source 1..75: mol_type = other DNA
ttgatggtgagcgtctgattattccctggaacagcaactgtaaccgggaaagcatttcagagaagtgtaaggctt

SEQ ID NO: 496005 - DNA, 75 bp, synthetic construct
  source 1..75: mol_type = other DNA
acttaccagaaggttgtcacgcttgattacagcactacaaactggaaatggaacggtgcactgagtatcccggaa

SEQ ID NO: 496006 - DNA, 75 bp, synthetic construct
  source 1..75: mol_type = other DNA
caattgcaaaaatggtcgcgggcgcggattgacgatcgtatcgacgaattaatggcgctactggggctggagtca

SEQ ID NO: 496007 - DNA, 75 bp, synthetic construct
  source 1..75: mol_type = other DNA
aattttacaggcgctggagagtggcgcgaccagcattattattggcatcggcggcagtgccaccaacgacggcgg

SEQ ID NO: 496008 - DNA, 75 bp, synthetic construct
  source 1..75: mol_type = other DNA
tgattgttgagctggacaataacctctctcactatgccgatgtcattaaaaaagcgctgcatgttgatgtgaaag

SEQ ID NO: 496009 - DNA, 75 bp, synthetic construct
  source 1..75: mol_type = other DNA
cattgatagccagagcattcacggtaaagtgccgattggcgtagcgaacgtcgcgaagaaatacaataaaccggt

SEQ ID NO: 496010 - DNA, 75 bp, synthetic construct
  source 1..75: mol_type = other DNA
ccgacgctggaagatgcctgtaatgtgctgggtgtgaagccgacggatgatgcgaccaccattaaacgtgcctat

SEQ ID NO: 496011 - DNA, 75 bp, synthetic construct
  source 1..75: mol_type = other DNA
ttgaaatgaccgttgcgctacgtgaaacagatgcagggcaaggcgtaccggggaattttcgtgcactggcaacgt

SEQ ID NO: 496012 - DNA, 75 bp, synthetic construct
  source 1..75: mol_type = other DNA
ttataccgcagtctggtgattcatcttcgacgacaagtaatatcggtatgggtttcaaaaaacggactactgatg

SEQ ID NO: 496013 - DNA, 75 bp, synthetic construct
  source 1..75: mol_type = other DNA
ctgtgcggcaacactattctcgaacagtggcaatatcccgcaggcaccttcggtattgattttcgctacggctaa

SEQ ID NO: 496014 - DNA, 75 bp, synthetic construct
  source 1..75: mol_type = other DNA
attttgattctgccggttgtctcgaatgcggaacctgtcgggtgctttgcggcaacactatcctcgaacaatggc

SEQ ID NO: 496015 - DNA, 75 bp, synthetic construct
  source 1..75: mol_type = other DNA
agtggggcgagcgttttccgtcactggccggaatggaacgctggcagtggcaggatatgccattctggcaggtta

SEQ ID NO: 496016 - DNA, 75 bp, synthetic construct
  source 1..75: mol_type = other DNA
ggccagtgggctggcgttagtaccgtcggaaaagcgtgatccgttggtgacgacttctcgcggcacgggagagtt

SEQ ID NO: 496017 - DNA, 75 bp, synthetic construct
  source 1..75: mol_type = other DNA
cacttcgccgtatgtcctggtcggaactcatcacggcaggacaggaagcagaatttcagcatgattacgagcgtg

SEQ ID NO: 496018 - DNA, 75 bp, synthetic construct
  source 1..75: mol_type = other DNA
attttgattccgccggttgtctggagtgcggcacctgtcgggtgctgtgcggtaacactattctcgaacagtggc

SEQ ID NO: 496019 - DNA, 75 bp, synthetic construct
  source 1..75: mol_type = other DNA
tggacagaatgaatctgcatggcgcttcccgtactgcggcgcaaaatgctttccgggtgggaaaatcagataatt

SEQ ID NO: 496020 - DNA, 75 bp, synthetic construct
  source 1..75: mol_type = other DNA
agggcagtgcgcgattgctggcgcaggcagattgataaaagggccgcagagaaaatcagcgccagtcagtcagcc

SEQ ID NO: 496021 - DNA, 75 bp, synthetic construct
  source 1..75: mol_type = other DNA
tatgtatcttctttcgggtgggtacagggcagtgcgcgatttctggcgcagcaacggcgattcttgtgcatgccg

SEQ ID NO: 496022 - DNA, 75 bp, synthetic construct
  source 1..75: mol_type = other DNA
atgacatttctgaaccagttaatgctgtacttctgtacggcggtctgtgtgctgtatcttctttcgggtgggtac

SEQ ID NO: 496023 - DNA, 75 bp, synthetic construct
  source 1..75: mol_type = other DNA
cacggtggtcgcgtttcgctgatggaaatcaccgaagacggttacgccattctacaatttggcggcggctgtaac

SEQ ID NO: 496024 - DNA, 75 bp, synthetic construct
  source 1..75: mol_type = other DNA
tattgttgctttctggttgcagccatagggctaacgatggctggagcggacaggataaagcgcaacactttatcg

SEQ ID NO: 496025 - DNA, 75 bp, synthetic construct
  source 1..75: mol_type = other DNA
ggcgcatcaaaagagctgtgggatagccgccccgaggggagcggctggagctggaaggattttgcttgggatgtc

SEQ ID NO: 496026 - DNA, 75 bp, synthetic construct
  source 1..75: mol_type = other DNA
tggatcggatgaatttacacggtgcttcccgtactgcggcgcaaaatgcattccgggtgggaaaatcagacaatt

SEQ ID NO: 496027 - DNA, 75 bp, synthetic construct
  source 1..75: mol_type = other DNA
tcactggcagcaagcgcagcgcggcccgacgctggaagatgcctgtaatgtgttgggcgtgaagccgacagatga

SEQ ID NO: 496028 - DNA, 75 bp, synthetic construct
  source 1..75: mol_type = other DNA
gccgcctgagatgatggagatggcgaagcaaaaagcgcaggaaattcagcaggcctatgaattgattaagcagca

SEQ ID NO: 496029 - DNA, 75 bp, synthetic construct
  source 1..75: mol_type = other DNA
catcaggtgatgctgtacttctgtacggtggtatgcgtgctgtatcttctttcgggtgggtacagggcagtgcgc

SEQ ID NO: 496030 - DNA, 75 bp, synthetic construct
  source 1..75: mol_type = other DNA
agacgaacagcagtcctgaaaagagttgttgaatacgtgaaggaagaaacaggattcactcttgcacggggatgg

SEQ ID NO: 496031 - DNA, 75 bp, synthetic construct
  source 1..75: mol_type = other DNA
gcacccgaatgaacgggcggtgctgtatgtcattgctgaagaattagggatctcccgcgcccagtttgaccagtt

SEQ ID NO: 496032 - DNA, 75 bp, synthetic construct
  source 1..75: mol_type = other DNA
atgacgaagaaaaaagcacataaacctggttcagcgcccaccgcgcttaacaagcgcccccgtcacgaatacttt

SEQ ID NO: 496033 - DNA, 75 bp, synthetic construct
  source 1..75: mol_type = other DNA
taatccgccgcgttaccggaatcagccagcagcatgacgaacaggccacacagccggacagcgtgaccgctgaaa

SEQ ID NO: 496034 - DNA, 75 bp, synthetic construct
  source 1..75: mol_type = other DNA
acctgaaaaagccgcagattatcgcagccctgaatgacgccggactgtccggtgccgcacgggacgcggagaaga

SEQ ID NO: 496035 - DNA, 75 bp, synthetic construct
  source 1..75: mol_type = other DNA
gcagcaagacaaaaacgggagcaacgccagagcgcggccccgtaccagtggaagacgccggagcggttgcggcgg

SEQ ID NO: 496036 - DNA, 75 bp, synthetic construct
  source 1..75: mol_type = other DNA
ccagcagcatgacgaacaggccacgcagccggacagcgtgaccgctgaaaattatgtgcgtgttgttgctgaggt

SEQ ID NO: 496037 - DNA, 75 bp, synthetic construct
  source 1..75: mol_type = other DNA
attacgcgcgtgtggtggctgaggtgatgcgccgtgacggtattgagcttaacggcgtggatatgcgcaacatac

SEQ ID NO: 496038 - DNA, 75 bp, synthetic construct
  source 1..75: mol_type = other DNA
ccgcccaactggcaagccagcaaagcggtgtgccacatcatttgatcctcgctcaggcggcgctggaatctggct

SEQ ID NO: 496039 - DNA, 75 bp, synthetic construct
  source 1..75: mol_type = other DNA
tgacgaatgccaaaagcgctgagcagggggcgcaggcattacaggacgcgggatatgcgaccgatcctcattatg

SEQ ID NO: 496040 - DNA, 75 bp, synthetic construct
  source 1..75: mol_type = other DNA
gaactgctgctacgtaaagacggcgagcgttttagctccattccgttagccggttccgcgcgtcgtcagccggat

SEQ ID NO: 496041 - DNA, 75 bp, synthetic construct
  source 1..75: mol_type = other DNA
attatgcgcgtgttgttgctgaggtgatgcgccgtgatggtattgagcttaacggcgtggatatgcgcaacatac

SEQ ID NO: 496042 - DNA, 75 bp, synthetic construct
  source 1..75: mol_type = other DNA
gaggatgcgcccgactcccccgtcgtgacgcgtgaagcgcagctggatattcagtcgcaatctcagccgccgaca

SEQ ID NO: 496043 - DNA, 75 bp, synthetic construct
  source 1..75: mol_type = other DNA
ttatgccacaaaatgatcctgatcaggtggctccggtcgctccagaaccaatacaggaaggccagccagaagagc

SEQ ID NO: 496044 - DNA, 75 bp, synthetic construct
  source 1..75: mol_type = other DNA
ataccgtcgccgcgtggagatgtatcgggagaaggaaaaaataacttaccactggaagaagccggagcggttacg

SEQ ID NO: 496045 - DNA, 75 bp, synthetic construct
  source 1..75: mol_type = other DNA
ttcaaagtgaagctgattaacgcccgcattgccagcataaagcatattgtgccgcacactgtcaacaatagccag

SEQ ID NO: 496046 - DNA, 75 bp, synthetic construct
  source 1..75: mol_type = other DNA
atgctttttcatacaagtgggatgcatagtttattccttgatgaattgtgttttattttgaaatgtgttgaatag

SEQ ID NO: 496047 - DNA, 75 bp, synthetic construct
  source 1..75: mol_type = other DNA
ataagtttttcggtatacattcaaaacatgatttgttaatgatttttcatacaagtaggatgcatagtttattct

SEQ ID NO: 496048 - DNA, 75 bp, synthetic construct
  source 1..75: mol_type = other DNA
tgaccatcacgaaaccggtggacaaatcttcccccctgctgggcaaggccatttcggagaatgaatgtctgacct

SEQ ID NO: 496049 - DNA, 75 bp, synthetic construct
  source 1..75: mol_type = other DNA
tgaccatcacgaaaccggtggacaaatcctcccctctgctgggcaaggccatttcagagaatgaatgtctgacct

SEQ ID NO: 496050 - DNA, 75 bp, synthetic construct
  source 1..75: mol_type = other DNA
tgcgtgtaaatggcttcgatcaaggttactttatgtactgtgaagatattgacctgtgcttgaggcttagcctgg

SEQ ID NO: 496051 - DNA, 75 bp, synthetic construct
  source 1..75: mol_type = other DNA
taatccgccgtgatggtatccagcttaatggcgtggatatgcgcaacatacgaaccagagttcttgagttgctgg

SEQ ID NO: 496052 - DNA, 75 bp, synthetic construct
  source 1..75: mol_type = other DNA
taatccgccgcgttaccggaatcagccagcagcatgacgaacagggcacgcaaccggacagcgtgaccgctgaaa

SEQ ID NO: 496053 - DNA, 75 bp, synthetic construct
  source 1..75: mol_type = other DNA
aatgatgtggatatgcgcaatatacgaaccagagtccttgagttgctggcataccgtcgccgttctcaacaacgg

SEQ ID NO: 496054 - DNA, 75 bp, synthetic construct
  source 1..75: mol_type = other DNA
attcatttggtttttgtcatgaatcgatagcatctcttttgtctattactaatggttcttcccggaatgcaattt

SEQ ID NO: 496055 - DNA, 75 bp, synthetic construct
  source 1..75: mol_type = other DNA
gctcgtcaggaacatacctgcctgccgaatctgcttgagcgccagttcgctgtgcccgagccagatagggtatgg

SEQ ID NO: 496056 - DNA, 75 bp, synthetic construct
  source 1..75: mol_type = other DNA
ggcagcactgatgcagcaaccggacaaatccctggcacttctggcatggacactctgtctgaatgtatttggcag

SEQ ID NO: 496057 - DNA, 75 bp, synthetic construct
  source 1..75: mol_type = other DNA
tgccaaagcgcagggcatcaaaaatccggtgatggtcggggcgattcccttcgatccacgtcagccttcgtcgct

SEQ ID NO: 496058 - DNA, 75 bp, synthetic construct
  source 1..75: mol_type = other DNA
aggggcagggcttcgttcggcctgaaaaccagagccaacaaaatttctgcgaaattatcccagttagttccggcg

SEQ ID NO: 496059 - DNA, 75 bp, synthetic construct
  source 1..75: mol_type = other DNA
ttattggcgggagtgaaaccaatattgttagtgccagagcgttacataaggcgttaggtgtagggcgcgttttcc

SEQ ID NO: 496060 - DNA, 75 bp, synthetic construct
  source 1..75: mol_type = other DNA
aatatgctggcgcgtatcgtgctgggtggcatgactgcaaaacagtgggcgcaggcgaacggcatcacaggcgaa

SEQ ID NO: 496061 - DNA, 75 bp, synthetic construct
  source 1..75: mol_type = other DNA
cgaagccgatgatgcaccacaaaggcaagttcggtccgcatgaggacatgatgttcaaagacctgaacctgaccg

SEQ ID NO: 496062 - DNA, 75 bp, synthetic construct
  source 1..75: mol_type = other DNA
ttgcctctaccctggctcttggcgcggctaatctggctcacgccgcagatacgactaccgcagcaccggctgatg

SEQ ID NO: 496063 - DNA, 75 bp, synthetic construct
  source 1..75: mol_type = other DNA
caagttcggtccgcatcaggacatgatgttcaaagacctgaacttgaccgacgcgcagaaacagcagatccgcga

SEQ ID NO: 496064 - DNA, 75 bp, synthetic construct
  source 1..75: mol_type = other DNA
atggcagttcgtggaattaacaaggttgtactcattgggcgcttgggtaaagacccggaagtccgttacatcccc

SEQ ID NO: 496065 - DNA, 75 bp, synthetic construct
  source 1..75: mol_type = other DNA
tttgctggttttactcatgttatggttgttggcggtggtgccagccttgtggctggggcagtaaaaaaagcgaca

SEQ ID NO: 496066 - DNA, 75 bp, synthetic construct
  source 1..75: mol_type = other DNA
gcaaaacgcgctgccaccgtgctctggacaagcttttccagcagataacaatggctatgcgccgccaccgtgtcg

SEQ ID NO: 496067 - DNA, 75 bp, synthetic construct
  source 1..75: mol_type = other DNA
ttccggtagcatccggcgttattggcgggcgtgaagccgctgttgttagcgcaaaagcgttacacaaagcgttgg

SEQ ID NO: 496068 - DNA, 75 bp, synthetic construct
  source 1..75: mol_type = other DNA
attccagccagatagcggaattgataatcaatggcgctcctatcgtgtcgaacccggtaaaacgatggcgcagct

SEQ ID NO: 496069 - DNA, 75 bp, synthetic construct
  source 1..75: mol_type = other DNA
gtcgggatgacaatgaattcctgactcgttatatcccgaatgcagaacagcgtgagcagatcctgacagtattac

SEQ ID NO: 496070 - DNA, 75 bp, synthetic construct
  source 1..75: mol_type = other DNA
tggcgaggcttacagcaagattaagcactctggcagacccggtaaagactatctgttaagtgtcggaatggcgaa

SEQ ID NO: 496071 - DNA, 75 bp, synthetic construct
  source 1..75: mol_type = other DNA
cgctgtttgccgatgccaaatcgcagggcatcaaaaatccgctgctggtcggggcgattcccttcgatcctcgtc

SEQ ID NO: 496072 - DNA, 75 bp, synthetic construct
  source 1..75: mol_type = other DNA
tcgtcagccggatgaagtgctcgatcgcgaagcgggtaatcgtctgctggcgtcagaaaaagatcgccatgaaca

SEQ ID NO: 496073 - DNA, 75 bp, synthetic construct
  source 1..75: mol_type = other DNA
atggatacgtcactggctgaggaagtacagcagaccatggcaacacttgcgcccaatcgctttttctttatgtcg

SEQ ID NO: 496074 - DNA, 75 bp, synthetic construct
  source 1..75: mol_type = other DNA
actgatcaccacgccgacgctgtggcatctcgcaactccctttgaaggtaaagcgaattcgcaagaaaacgcact

SEQ ID NO: 496075 - DNA, 75 bp, synthetic construct
  source 1..75: mol_type = other DNA
gaggtactgcgcgaacgcagtagtgagttacacgttccttcctccccacaattgatcaccacgccgacgctgtgg

SEQ ID NO: 496076 - DNA, 75 bp, synthetic construct
  source 1..75: mol_type = other DNA
ccggttagttacaacttccatgtcccgctgtccgatggtggagttctgctcggtgccagcccggaactgctgctg

SEQ ID NO: 496077 - DNA, 75 bp, synthetic construct
  source 1..75: mol_type = other DNA
caccatcgcagcgtccttcggtaacgtacacggtgtttacaagccgggtaacgtggttctgactccgaccatcct

SEQ ID NO: 496078 - DNA, 75 bp, synthetic construct
  source 1..75: mol_type = other DNA
gtacacggtgtttacaagccgggtaacgttgttctgactccgaccattctgcgcgactctcaggaatatgtttcc

SEQ ID NO: 496079 - DNA, 75 bp, synthetic construct
  source 1..75: mol_type = other DNA
agaactggcaatgatcgaacgcaccgaacagggccgcgccgttcgtcagtacttcatcaaatgcgaggaggagct

SEQ ID NO: 496080 - DNA, 75 bp, synthetic construct
  source 1..75: mol_type = other DNA
gcctgaacttcgtattccacggtggttccggttctactgctcaggaaattaaagactccgtaagctacggcgtag

SEQ ID NO: 496081 - DNA, 75 bp, synthetic construct
  source 1..75: mol_type = other DNA
ctgggttgcaccggtggtgaagaagacggggtggacaacagccacatggacgcttctgcactgtacacccagccg

SEQ ID NO: 496082 - DNA, 75 bp, synthetic construct
  source 1..75: mol_type = other DNA
tgaaaatgaacatcgataccgacacccaatgggcgacctgggaaggtgttctgaactactacaaagcgaacgaag

SEQ ID NO: 496083 - DNA, 75 bp, synthetic construct
  source 1..75: mol_type = other DNA
gggcattatatcagcacggcgcagtaagttatctggaagtgctggatgccgagcgttctttatttgcaacccgac

SEQ ID NO: 496084 - DNA, 75 bp, synthetic construct
  source 1..75: mol_type = other DNA
aatctggatatcgccgaaattcgccagcagcagtcggtggtgaattatgaacagaaaatccagaacgcctttaaa

SEQ ID NO: 496085 - DNA, 75 bp, synthetic construct
  source 1..75: mol_type = other DNA
tgccgtgcaaagactgatcgcgccaacgcaaagcccatcattgctggcaattccgttttttatcttgctcggcac

SEQ ID NO: 496086 - DNA, 75 bp, synthetic construct
  source 1..75: mol_type = other DNA
tatttagccactgaggaagcccagcgcgcggtgcatattctgctggtttctaatgtcgcgcaaagctatttcaat

SEQ ID NO: 496087 - DNA, 75 bp, synthetic construct
  source 1..75: mol_type = other DNA
tttgtgtggcccttgcgctaaccggttgttcactggcaccggattatcagcgcccggcaatgcccgtgccgcagc

SEQ ID NO: 496088 - DNA, 75 bp, synthetic construct
  source 1..75: mol_type = other DNA
aacgcgggctggcgcaccttttttgttgataatcaggtgaagacgctgattagcgaggcgctggtgaataaccgg

SEQ ID NO: 496089 - DNA, 75 bp, synthetic construct
  source 1..75: mol_type = other DNA
ttaacatgccatctgatgaacagctgaatatgtgggaaaaacaggttcagcatataaggaagggaattaccctta

SEQ ID NO: 496090 - DNA, 75 bp, synthetic construct
  source 1..75: mol_type = other DNA
ctaatccagataaccctatagaagttataggtacagttaagggtattactgaagatattttgtcagctttaacag

SEQ ID NO: 496091 - DNA, 75 bp, synthetic construct
  source 1..75: mol_type = other DNA
ccagctatatggcgtattacaacgtccagcaggcgctgaatatcgctcgtcagtttggctgtagcgacgacgcgt

SEQ ID NO: 496092 - DNA, 75 bp, synthetic construct
  source 1..75: mol_type = other DNA
gcagtacttttggcaaggattcagacatcgtgatgggcgtaagagcgcaacaaaagaaaaacccgccgttcgctg

SEQ ID NO: 496093 - DNA, 75 bp, synthetic construct
  source 1..75: mol_type = other DNA
tttgcctctgtcagaggtgttgtaaaagaagatgcaccttttggtcttatcgttggtggtaatcatacagtgctt

SEQ ID NO: 496094 - DNA, 75 bp, synthetic construct
  source 1..75: mol_type = other DNA
taacgaggctgttactgctgacctgcagttaattgaggagataaagcaccgtcgtcaggacaagcaggagaaaca

SEQ ID NO: 496095 - DNA, 75 bp, synthetic construct
  source 1..75: mol_type = other DNA
acagcctgcaaagcgttaaattaccggcgggcttgtcgtcgcaaatcttattgcagcgcccggatattatggaag

SEQ ID NO: 496096 - DNA, 75 bp, synthetic construct
  source 1..75: mol_type = other DNA
atgagtacaatagaaaatttcgacgcccatacgccaatgatgcagcagtatctcaagctgaaagcccagcatccc

SEQ ID NO: 496097 - DNA, 75 bp, synthetic construct
  source 1..75: mol_type = other DNA
caggagcgtcaggataacctgctggcagctatctggcaggacagcaaaggtttcggctacgcgacgctggatatc

SEQ ID NO: 496098 - DNA, 75 bp, synthetic construct
  source 1..75: mol_type = other DNA
gcctggacacgctgaaagtcggctttaacgcggttcatggttattacattcagatcagccgtggacaaagccatc

SEQ ID NO: 496099 - DNA, 75 bp, synthetic construct
  source 1..75: mol_type = other DNA
cctacatcggcagctatgtaccggcacaaaaagtcgagattggacctatcgatcgcatctttacccgcgtagggg

SEQ ID NO: 496100 - DNA, 75 bp, synthetic construct
  source 1..75: mol_type = other DNA
cagctttatgaagagttgtttgacctgctgctgccgcatctggaagcgttgcaacagagtgcgagcgcactggca

SEQ ID NO: 496101 - DNA, 75 bp, synthetic construct
  source 1..75: mol_type = other DNA
gcggactttgtgctgccggttgtctgttgcagtatgcgaaagatacccaacgcacgaccctgccgcatattcgtt

SEQ ID NO: 496102 - DNA, 75 bp, synthetic construct
  source 1..75: mol_type = other DNA
taaaggtttcggctacgcaacgctggatatcagttccggtcgttttcgcctgagcgaaccggcggaccgcgaaac

SEQ ID NO: 496103 - DNA, 75 bp, synthetic construct
  source 1..75: mol_type = other DNA
ttatctacgacgccaccgacggaaccctgacgctgccgcaaagcgatgaaccggacagccagctatccctcaccg

SEQ ID NO: 496104 - DNA, 75 bp, synthetic construct
  source 1..75: mol_type = other DNA
attaccggcgggcttgtcgtcgcaaatcttattgcagcgcccggatattatggaagctgaacatgcgttaatggc

SEQ ID NO: 496105 - DNA, 75 bp, synthetic construct
  source 1..75: mol_type = other DNA
aaggtcgccatccggtggttgaacaggtgctgaatgagccgtttatcgctaacccgctgaacctgtcaccgcagc

SEQ ID NO: 496106 - DNA, 75 bp, synthetic construct
  source 1..75: mol_type = other DNA
atgaatgaaaacattgacaaggacttctccagccatacgccaatgatgcagcagtatctcaagctgaaagcccag

SEQ ID NO: 496107 - DNA, 75 bp, synthetic construct
  source 1..75: mol_type = other DNA
gcggaactgctgtatgcagaagatttcgccgagatgtcgctgattgaaggccgtcgcggcctgcgccgtcgtccg

SEQ ID NO: 496108 - DNA, 75 bp, synthetic construct
  source 1..75: mol_type = other DNA
atacagaagtatttttgctaccgttccatctgtttagcgatccgacggttgcccgaagtttactgcgttatcgct

SEQ ID NO: 496109 - DNA, 75 bp, synthetic construct
  source 1..75: mol_type = other DNA
tgaggtcgcagggaatgagtatttcggtcggatttatgtggatggcaaactttttagtttcgcaattcttcccga

SEQ ID NO: 496110 - DNA, 75 bp, synthetic construct
  source 1..75: mol_type = other DNA
agccggattacgctacttaattatttttcagaataaaaatcaagtttgctctgatgaatgctatgggagtgaggg

SEQ ID NO: 496111 - DNA, 75 bp, synthetic construct
  source 1..75: mol_type = other DNA
agttaagggaagaaccaaccagcatttatttttgtgttaccgagggagctttacagaaatttggtccactaatga

SEQ ID NO: 496112 - DNA, 75 bp, synthetic construct
  source 1..75: mol_type = other DNA
gttcattcgcccagctttcgatacgacagaggaactggcagcacagattgccatacagcgaatgaatcaggctat

SEQ ID NO: 496113 - DNA, 75 bp, synthetic construct
  source 1..75: mol_type = other DNA
atgtgtccagcgtggtgtgcagttgcgcagtgaagatgacgcggctgacgacgctgaccgcacggaacaggtgca

SEQ ID NO: 496114 - DNA, 75 bp, synthetic construct
  source 1..75: mol_type = other DNA
ggctctgtacagccaaacaaccggctattatgctctctttggtatgctgttctttatgattttctatgcactttc

SEQ ID NO: 496115 - DNA, 75 bp, synthetic construct
  source 1..75: mol_type = other DNA
cgcgccggaattccttgccgtgctcaagctgcgggccgctcccgccgcgaaggacgtgctcgacgccatcgaggt

SEQ ID NO: 496116 - DNA, 75 bp, synthetic construct
  source 1..75: mol_type = other DNA
cgagaagttcgccgcactcaagcgcgagcaggccctgcccctggcgatcaacccgaacagcgaccagtacctgga

SEQ ID NO: 496117 - DNA, 75 bp, synthetic construct
  source 1..75: mol_type = other DNA
tacaaggtgaaactgactaacgcccggatctcaaacatcggccttaccgttccccataccattaacgacagccca

SEQ ID NO: 496118 - DNA, 75 bp, synthetic construct
  source 1..75: mol_type = other DNA
ggcctcaacctggtgacggcggctatcgtgctgtggaacacggtgtacctggaacgcgccacccaggggttggtc

SEQ ID NO: 496119 - DNA, 75 bp, synthetic construct
  source 1..75: mol_type = other DNA
tgcggcggtgccggatcgggcgcaggcgctgatcgaccaaaccagccagttactgccgcgcatcaagatcaccga

SEQ ID NO: 496120 - DNA, 75 bp, synthetic construct
  source 1..75: mol_type = other DNA
tgtgtgtcctggaagatgccagagctacgctgacagatgaaattattgagttgcatgaacgaatattgaacagtc

SEQ ID NO: 496121 - DNA, 75 bp, synthetic construct
  source 1..75: mol_type = other DNA
ctttcatttatgaatcaatttcatgggagcatactttggccgggacaaatgcaatgagtaaatgggaggaacgaa

SEQ ID NO: 496122 - DNA, 75 bp, synthetic construct
  source 1..75: mol_type = other DNA
ctattcccggcagcagaacagaccaacctgaagactccggcacaggagacagcggcaaaacagcagtggatcgct

SEQ ID NO: 496123 - DNA, 75 bp, synthetic construct
  source 1..75: mol_type = other DNA
gtgatcagcatacaggcaaagccagaacccatgagtacgcctccggacacagggagagacgtttaccatccacca

SEQ ID NO: 496124 - DNA, 75 bp, synthetic construct
  source 1..75: mol_type = other DNA
ccgccacccttgggggaataacaccggcgcagtggctgatggaggaatacaggcggggaaaggcggcaggattta

SEQ ID NO: 496125 - DNA, 75 bp, synthetic construct
  source 1..75: mol_type = other DNA
cgatcagcaagcgttagattatgcgctttatcacctgcgcatcatgacgcctgcccacgatgagcgcagcagcat

SEQ ID NO: 496126 - DNA, 75 bp, synthetic construct
  source 1..75: mol_type = other DNA
gcgtcgcttcgtcagcttgaaatgtgcgcgcagcagagttacgaccaacttcttgcagcatcaacagaaaactgg

SEQ ID NO: 496127 - DNA, 75 bp, synthetic construct
  source 1..75: mol_type = other DNA
gtgatcagcatacaggcaaagccagagcccatgagtacacctccggacacagggagagacgtttaccatccacca

SEQ ID NO: 496128 - DNA, 75 bp, synthetic construct
  source 1..75: mol_type = other DNA
tcgccttgttgctgacctggttcgcggtaagaaagtgtcgcaggctctggatattttgacctacaccaacaagaa

SEQ ID NO: 496129 - DNA, 75 bp, synthetic construct
  source 1..75: mol_type = other DNA
cgcgtgcagtatccacggtgtccagacccgtgagtatggtcacacgtcacgcagtccgctggacacgctggagag

SEQ ID NO: 496130 - DNA, 75 bp, synthetic construct
  source 1..75: mol_type = other DNA
tgagtggggaaacacaagggctgatttcagcgagttgttcaacgcttgattctatcggaaacaaagcacagccag

SEQ ID NO: 496131 - DNA, 75 bp, synthetic construct
  source 1..75: mol_type = other DNA
ccgtcgccagggcaattcatcaagtggtgtaaagacagcaagatggttcttggcgtcaccattgacgatgtgatg

SEQ ID NO: 496132 - DNA, 75 bp, synthetic construct
  source 1..75: mol_type = other DNA
tacaaaatggttgcaggtactgataaccagccatcatgggaagaacgtccaccattgacccatgaggaacaggtg

SEQ ID NO: 496133 - DNA, 75 bp, synthetic construct
  source 1..75: mol_type = other DNA
tgataatcgagagtttttcaagcttgaagataatgagctttctgaatctctaaatgaaataagggcgctggttgg

SEQ ID NO: 496134 - DNA, 75 bp, synthetic construct
  source 1..75: mol_type = other DNA
gatctgaaagcagcagcgccgaaagggattgaaccggtcatcacgctttccagtggtgaagcgaagcaaatcgaa

SEQ ID NO: 496135 - DNA, 75 bp, synthetic construct
  source 1..75: mol_type = other DNA
cttcagtggatgtatgccatcgatgtgctgattgaaacacagggcgaggtctgcctccttccgcttcctggtgat

SEQ ID NO: 496136 - DNA, 75 bp, synthetic construct
  source 1..75: mol_type = other DNA
cttcagtggatgtatgccatcgatgtgctgattgaaacacagggcgaggtctgcctccttcctcttcctggagat

SEQ ID NO: 496137 - DNA, 75 bp, synthetic construct
  source 1..75: mol_type = other DNA
atgccccatgcggcgaaggttctcaaacaggtgatggtgaataccggagggaacaaagagcaggtcccgcaaaac

SEQ ID NO: 496138 - DNA, 75 bp, synthetic construct
  source 1..75: mol_type = other DNA
cttcagtgggtgtatgccatcgatgtgctgattgaaacacagggcgaggtctgcctccttcctcttcctggggat

SEQ ID NO: 496139 - DNA, 75 bp, synthetic construct
  source 1..75: mol_type = other DNA
cttcagtgggtgtatgccatcgatgtgctgattgaaacacagggcgaggtctgcctccttccacttcctggtgat

SEQ ID NO: 496140 - DNA, 75 bp, synthetic construct
  source 1..75: mol_type = other DNA
cttcagtggctgtatgccatcgatgtgctgattgaaacacagggcgaggtctgcctccttcctcttcctggcgat

SEQ ID NO: 496141 - DNA, 75 bp, synthetic construct
  source 1..75: mol_type = other DNA
gaccgcccggtgcgccgctggagcgaagaacgtaaggctgcggtacggcggcggaatctggagaaacgtatcaac

SEQ ID NO: 496142 - DNA, 75 bp, synthetic construct
  source 1..75: mol_type = other DNA
cgatgcgccatcggggaaggaaggtgccgcattcatggcgctgatggcagaaaaagcccgtcttgcagccctgtt

SEQ ID NO: 496143 - DNA, 75 bp, synthetic construct
  source 1..75: mol_type = other DNA
tgacggaggcggaagaagaacgtctgaacgaactgatgacgcgttacgacgcgctggaaaatcagtgtgaggaat

SEQ ID NO: 496144 - DNA, 75 bp, synthetic construct
  source 1..75: mol_type = other DNA
aggtgctcagactcagtcggaagagacacaacagttcagcggtcagcctcagcaggaatcacagccggaacctca

SEQ ID NO: 496145 - DNA, 75 bp, synthetic construct
  source 1..75: mol_type = other DNA
gaaatccttgttaaaactacgggcaccatgcagatgctgggacgtgccgcaggtgctcagactcagtcggaagag

SEQ ID NO: 496146 - DNA, 75 bp, synthetic construct
  source 1..75: mol_type = other DNA
tggatgtgtgcactacgtccacaggcagagacggaaaccacggaataccgtgacaaccaggccgatgccgcctga

SEQ ID NO: 496147 - DNA, 75 bp, synthetic construct
  source 1..75: mol_type = other DNA
tgacaaacagacaggggagatgcgggagcagacagaatggcaccgcgtggtgctgttcggcaagctcgcggaagt

SEQ ID NO: 496148 - DNA, 75 bp, synthetic construct
  source 1..75: mol_type = other DNA
tggtgtcctggcgttatggaaacgtatgtgtccagcgtggtgtgcagttgcgtagtgaagatgatgtggctgacg

SEQ ID NO: 496149 - DNA, 75 bp, synthetic construct
  source 1..75: mol_type = other DNA
gagcagacggaatggcatcgcgtggtgctgttcggcaagctcgcggaagtggcaggggaatatctgcgcaagggg

SEQ ID NO: 496150 - DNA, 75 bp, synthetic construct
  source 1..75: mol_type = other DNA
gagcagacggaatggcaacgcgtggtgctgttcggcaagctcgcggaagtggcaggtgaatatctgcgcaagggg

SEQ ID NO: 496151 - DNA, 75 bp, synthetic construct
  source 1..75: mol_type = other DNA
tgctggcgcagacggaggaagtgagcgtgccgctggcctcgctgattaaatcaccgctgaatgtgcgcacggtgc

SEQ ID NO: 496152 - DNA, 75 bp, synthetic construct
  source 1..75: mol_type = other DNA
aactgcgtactgatttgttcagcgatgacggggatggttatgtcgaccgcgtggcgctcgatgctgccctgctgg

SEQ ID NO: 496153 - DNA, 75 bp, synthetic construct
  source 1..75: mol_type = other DNA
attcatggcgctgatggcagaaaaagcccgtcttgcggccctgttaccggagggatggtcacgggacatgacgac

SEQ ID NO: 496154 - DNA, 75 bp, synthetic construct
  source 1..75: mol_type = other DNA
tgacaaacagaccggggagatgcgggagcagaccgaatggcaccgcgtggtgctgttcggcaagctcgcggaagt

SEQ ID NO: 496155 - DNA, 75 bp, synthetic construct
  source 1..75: mol_type = other DNA
tgacaaacagactggggagatgcgggagcagactgaatggcaccgcgtggtgctgttcggcaagctcgcggaagt

SEQ ID NO: 496156 - DNA, 75 bp, synthetic construct
  source 1..75: mol_type = other DNA
tgacaaacagacaggggagatgcgggagcagaccgaatggcaacgcgtggtgctgttcggcaagctcgcggaagt

SEQ ID NO: 496157 - DNA, 75 bp, synthetic construct
  source 1..75: mol_type = other DNA
gagcagactgaatggcaacgcgtggtgctgttcggcaagctcgcggaagtggcaggggaatatctgcgcaagggg

SEQ ID NO: 496158 - DNA, 75 bp, synthetic construct
  source 1..75: mol_type = other DNA
tgacaaacagacgggggagatgcgggagcagacggaatggcaccgcgtggtgctgttcggcaagctcgcggaagt

SEQ ID NO: 496159 - DNA, 75 bp, synthetic construct
  source 1..75: mol_type = other DNA
tgacaaacagacgggggagatgcgggagcagaccgaatggcagcgcgtggtgctgttcggcaagctcgcggaagt

SEQ ID NO: 496160 - DNA, 75 bp, synthetic construct
  source 1..75: mol_type = other DNA
aaggccgcgcagcccgagcctcagcctcaacaacagccagaacctccttatggcttcgacgatgatgcgccattc

SEQ ID NO: 496161 - DNA, 75 bp, synthetic construct
  source 1..75: mol_type = other DNA
agtgaagtggcggtggcggggaacagtaaattccgcttcgtgggggctgatgccttctcgccagatgaactgcgc

SEQ ID NO: 496162 - DNA, 75 bp, synthetic construct
  source 1..75: mol_type = other DNA
aagaacgcctgaacgaactgatggcacgttacgacgcactggaaaaccagtgtgaggaatctgacctgctggaag

SEQ ID NO: 496163 - DNA, 75 bp, synthetic construct
  source 1..75: mol_type = other DNA
cgcagtgaggatgatgtggctgacgacgctgaccgcacggaacaggtgcaggagaaagcctccgtggaggaaatc

SEQ ID NO: 496164 - DNA, 75 bp, synthetic construct
  source 1..75: mol_type = other DNA
tctgcgcaagggtgcgcaggtctacatcgaaggtcagcttcgcacccgtagctgggaagataacggtatcacccg

SEQ ID NO: 496165 - DNA, 75 bp, synthetic construct
  source 1..75: mol_type = other DNA
gtgtccagcgtggtgtgcagttgcgcagtgaggatgacgcggctgacgacgctgaccgcacggaacaggtgcagg

SEQ ID NO: 496166 - DNA, 75 bp, synthetic construct
  source 1..75: mol_type = other DNA
atctgacctgctggaagcagaaatgaagctggttgactgtatggcgaaggtcagggcgtggacgccggagatgcg

SEQ ID NO: 496167 - DNA, 75 bp, synthetic construct
  source 1..75: mol_type = other DNA
tgcagagcaccacatgaaagacaaccgctgggtgcctgactggatgtgtgcgccacgtccacaggcagagacgga

SEQ ID NO: 496168 - DNA, 75 bp, synthetic construct
  source 1..75: mol_type = other DNA
cgcagcgaggatgatgcggctgacgacgctgaccgcacggaacaggtgcgggataaagcggcggtggaggaaatc

SEQ ID NO: 496169 - DNA, 75 bp, synthetic construct
  source 1..75: mol_type = other DNA
cgcagcgaggatgatgcggctgacgacgctgaccgcacggaacaggtgccggacaaagcggctgtggaggaaatc

SEQ ID NO: 496170 - DNA, 75 bp, synthetic construct
  source 1..75: mol_type = other DNA
tgtcggtgagtgccgtgaggatgccggaacataccgcagtctgccggagccggaagcggtgctgacggaggcgga

SEQ ID NO: 496171 - DNA, 75 bp, synthetic construct
  source 1..75: mol_type = other DNA
agtgtgaggaatccgacctgctggaagctgaattgaagctgatgcgctgcatgagcaaggtcagtgcgtggacac

SEQ ID NO: 496172 - DNA, 75 bp, synthetic construct
  source 1..75: mol_type = other DNA
aggctgggaatggtgcgccggacgcatggagcctgtcggtttctgccgtgaggatgccggaacataccgctgtct

SEQ ID NO: 496173 - DNA, 75 bp, synthetic construct
  source 1..75: mol_type = other DNA
gggttcctggatggatgcggtcaccagatgtgatacctgacgtcgctgatggtgatgagacaaattctgatgaac

SEQ ID NO: 496174 - DNA, 75 bp, synthetic construct
  source 1..75: mol_type = other DNA
tcacatgcgcgactggtggcagccgacgaaagaaaactttttcggacacctgaaaaagccgcagattatcgcagc

SEQ ID NO: 496175 - DNA, 75 bp, synthetic construct
  source 1..75: mol_type = other DNA
tcgcggaagccagtctggcagccagagaggccggttatgccgtccgtgagatggagcgatggatggtgccgaaca

SEQ ID NO: 496176 - DNA, 75 bp, synthetic construct
  source 1..75: mol_type = other DNA
tgctgattgaaacacagggcgaggtctgtctccttccccttcccggcgatgcagcagagcggttattcccgtcgg

SEQ ID NO: 496177 - DNA, 75 bp, synthetic construct
  source 1..75: mol_type = other DNA
ctttacggcactaacctcgttaatctgctgaaactgttgtgcaaagagaaagacggtaacatcactgtggatttt

SEQ ID NO: 496178 - DNA, 75 bp, synthetic construct
  source 1..75: mol_type = other DNA
cgatttcagggattattgttgtcggagcactgttgcagattggccagggcggctgggttagcttccttagtttta

SEQ ID NO: 496179 - DNA, 75 bp, synthetic construct
  source 1..75: mol_type = other DNA
caggcaaaccagcgccgaagctaattacccgtgaaatggttgactccatgaaggcgggcagtgtgattgtcgacc

SEQ ID NO: 496180 - DNA, 75 bp, synthetic construct
  source 1..75: mol_type = other DNA
tggtgtcctggcgttatggaaacgtatgtgtccagcgtggtgtgcagttgcgcagtgaagatgacgcgactgatg

SEQ ID NO: 496181 - DNA, 75 bp, synthetic construct
  source 1..75: mol_type = other DNA
atggatgggcacgggatatgacgacgttcctgtcactcagtcaggaggtgctgttatcactgctcagtttctgca

SEQ ID NO: 496182 - DNA, 75 bp, synthetic construct
  source 1..75: mol_type = other DNA
gcctgatggttttctgtacggcctgttccgtggatggcgtacagacccgggagtgtggtcacacatcacgcagcc

SEQ ID NO: 496183 - DNA, 75 bp, synthetic construct
  source 1..75: mol_type = other DNA
tctcgatcaactacaccatgctcaacattggctggaccatcggcccaccgctcggcacgctgttggtgatgcaaa

SEQ ID NO: 496184 - DNA, 75 bp, synthetic construct
  source 1..75: mol_type = other DNA
tttattttttccggcaacagcctgctattgtggggtatgtcagctgcggtatttactgtcggtgaaatcatttat

SEQ ID NO: 496185 - DNA, 75 bp, synthetic construct
  source 1..75: mol_type = other DNA
ggcttcttttgtaagcggcgcatttgcttcatgcatttcacaatatgtgatggggattttgccgaaaaggtggtc

SEQ ID NO: 496186 - DNA, 75 bp, synthetic construct
  source 1..75: mol_type = other DNA
tgggcagccacagagtgctgacgcgacgaaaaaaggtggcgcgaaaacgaaaggccgtggacgtaaggccgcgca

SEQ ID NO: 496187 - DNA, 75 bp, synthetic construct
  source 1..75: mol_type = other DNA
acacgtaccctaccctaccgtctgggcaatgatccggaagtccgttacatccccaacgggggcgcagtggcaaac

SEQ ID NO: 496188 - DNA, 75 bp, synthetic construct
  source 1..75: mol_type = other DNA
tctgcgtaagggcgcgcaggtctacatcgaaggtcagcttcgcacccgtagctgggaggataacggtatcacccg

SEQ ID NO: 496189 - DNA, 75 bp, synthetic construct
  source 1..75: mol_type = other DNA
gcccgggcataccgcaacctgccggagccggaagcggtgctgacggaggcggaagaagaacacctgaacgaactg

SEQ ID NO: 496190 - DNA, 75 bp, synthetic construct
  source 1..75: mol_type = other DNA
gcctgtcggtgaatgccgtgaagatgcccgggcataccgcaacctgccggagccggaagcggtgctgacggaggc

SEQ ID NO: 496191 - DNA, 75 bp, synthetic construct
  source 1..75: mol_type = other DNA
aaaggccgtggacgtaaggccgcgcagcccgagcctcagccgccgtctgaacccgagtataacttcgatgacgac

SEQ ID NO: 496192 - DNA, 75 bp, synthetic construct
  source 1..75: mol_type = other DNA
tgacgagggtggctatgtggactgtgttgcgctcgatgctgccctgctggaaaaactccaggctgtcgctgaaca

SEQ ID NO: 496193 - DNA, 75 bp, synthetic construct
  source 1..75: mol_type = other DNA
tggagcctgtcggtttctgccgtgaggatgccggaacataccgcagtctgccggagccggaagcggtgctgacgg

SEQ ID NO: 496194 - DNA, 75 bp, synthetic construct
  source 1..75: mol_type = other DNA
ctggcaggccttgcacctgtcatcctcgatgcgctggcagaagaccgtatcaccacagagcactgtcaggcgctg

SEQ ID NO: 496195 - DNA, 75 bp, synthetic construct
  source 1..75: mol_type = other DNA
gagcagacagaatggcatcgcgtggtgctgttcggcaagctcgcggaagtggctatacatcatggcagttcgtgg

SEQ ID NO: 496196 - DNA, 75 bp, synthetic construct
  source 1..75: mol_type = other DNA
ctggcagagcgtggcatcattccggctgactggtctgtccgcgtgaaaattattccgcaggaactggcgacggcg

SEQ ID NO: 496197 - DNA, 75 bp, synthetic construct
  source 1..75: mol_type = other DNA
ccgttgctgacgaaaatgtcctcagagcgcacgctggcagtccaggcagcactgatgcagcaaccggacaaatct

SEQ ID NO: 496198 - DNA, 75 bp, synthetic construct
  source 1..75: mol_type = other DNA
actgattaaatcaccgctgaatgtgcgcacggtgccgtattccgcagagtcagtcagcgaactggcggagtccat

SEQ ID NO: 496199 - DNA, 75 bp, synthetic construct
  source 1..75: mol_type = other DNA
cggactggcctgtccgcgtgaaggttatcccgcaggaactggcgacggctgcatcgctgaccgagaacggtcagc

SEQ ID NO: 496200 - DNA, 75 bp, synthetic construct
  source 1..75: mol_type = other DNA
agtcttgcagcaagagaggccggtcacgctgtccgtgagatggagcggtggatggtgccgaacaaactccgggag

SEQ ID NO: 496201 - DNA, 75 bp, synthetic construct
  source 1..75: mol_type = other DNA
gtcagggaacgcagtcgccataaatccgcactggtcatgcagaagtacagccgccagcaggcacgggaggcagag

SEQ ID NO: 496202 - DNA, 75 bp, synthetic construct
  source 1..75: mol_type = other DNA
aaaaactccaggctgtcgctgaacaccttcgggaagccgaaggctgggaatggtgcgccggacgtatggagcctg

SEQ ID NO: 496203 - DNA, 75 bp, synthetic construct
  source 1..75: mol_type = other DNA
cctcagagcgcacgctggcagtccaggcagcactgatgcagcaaccggacaaaatccctggcactgctggcatgg

SEQ ID NO: 496204 - DNA, 75 bp, synthetic construct
  source 1..75: mol_type = other DNA
gatggggcggtaaaccggaagtgcagaccattcgtcgtctggtgaccgaaagtgaagtggcggtggcggggaaca

SEQ ID NO: 496205 - DNA, 75 bp, synthetic construct
  source 1..75: mol_type = other DNA
tgaccgaaagtgaagtggcggtggcggggaacagtaaattccgctttgtgggggctgatgccttctcgccagacg

SEQ ID NO: 496206 - DNA, 75 bp, synthetic construct
  source 1..75: mol_type = other DNA
acgtcacgcagtccgcttgactcgctggaaacggctatcggattccacatgcgtgactggtggcagccaaccaga

SEQ ID NO: 496207 - DNA, 75 bp, synthetic construct
  source 1..75: mol_type = other DNA
gcacggaacaggcgcaggagaaagcctccgtggaggaaatcagtctgccactgctgacgaaaatgtcctcagagc

SEQ ID NO: 496208 - DNA, 75 bp, synthetic construct
  source 1..75: mol_type = other DNA
cgcagaagaactgcgcggcaaccgttctcagtggctgtatgctgtcgatgtgctgattgaaacacagggcgaggt

SEQ ID NO: 496209 - DNA, 75 bp, synthetic construct
  source 1..75: mol_type = other DNA
aaacggagcgtaaatccagccgtaacccgtcaaaagcacaggaaacagtcctgtctgccctgctggcgcagacgg

SEQ ID NO: 496210 - DNA, 75 bp, synthetic construct
  source 1..75: mol_type = other DNA
ccgctgctgacgaaaatgtcttccgaacgcacgctggcagtccaggcagcactgatgcagcaaccggacaaatct

SEQ ID NO: 496211 - DNA, 75 bp, synthetic construct
  source 1..75: mol_type = other DNA
gtgaaaattattccgcaggaactggcgactgccgcatcaatgactgaaaacggtcatcgtcgggatatgcaccct

SEQ ID NO: 496212 - DNA, 75 bp, synthetic construct
  source 1..75: mol_type = other DNA
tgcagccttaacggtgtccagacccgcgagtgtggtcgcacgtcacgcagtccgcttgactcactggagagcgcc

SEQ ID NO: 496213 - DNA, 75 bp, synthetic construct
  source 1..75: mol_type = other DNA
acaaccgctgggtgcctggctggatgtgtgcaccacatccacagacggataccactgaacgcaccgataacctgg

SEQ ID NO: 496214 - DNA, 75 bp, synthetic construct
  source 1..75: mol_type = other DNA
gaacatgcagagcaccatatgaaagacaaccgctgggtgcctggctggatgtgtgcaccacatccacagacggat

SEQ ID NO: 496215 - DNA, 75 bp, synthetic construct
  source 1..75: mol_type = other DNA
ctggcagagcgtgacatcattcaggctgactggcctgtccgtgtgaaggtcattccgcaggagctggcgactgcc

SEQ ID NO: 496216 - DNA, 75 bp, synthetic construct
  source 1..75: mol_type = other DNA
aaatcagcctggaatgtaaacattattcgctgaccagcgatgcgccgtcagggaaggaaggtgccgcgttcatgg

SEQ ID NO: 496217 - DNA, 75 bp, synthetic construct
  source 1..75: mol_type = other DNA
cgaaaaaagggagcgcgaaaacgaaaggccgtggacgtaaggctgcgcagccggagcctcagccgcaaccgccgg

SEQ ID NO: 496218 - DNA, 75 bp, synthetic construct
  source 1..75: mol_type = other DNA
tgcagcaccatatgaaagacaaccgctgggtgcctggctggatgtgtgcaccacgcccacagacggatgccactg

SEQ ID NO: 496219 - DNA, 75 bp, synthetic construct
  source 1..75: mol_type = other DNA
gagatgcgtgccggaagtggcgtggtggtgtcctggcgttatggaaacgtatgtgtccagcgtggtgtgcagtta

SEQ ID NO: 496220 - DNA, 75 bp, synthetic construct
  source 1..75: mol_type = other DNA
atccctgtcctggcgagcatgaactggtttcagaagtggtggaggcggggcagcctgcaccggcatccgttatgt

SEQ ID NO: 496221 - DNA, 75 bp, synthetic construct
  source 1..75: mol_type = other DNA
tgcagcatccacggcgttcagacccgcgagtgtggtcacacgtcacgcagcccgctggacacgctggagagcgcc

SEQ ID NO: 496222 - DNA, 75 bp, synthetic construct
  source 1..75: mol_type = other DNA
caaaagtacagccgccagcaggcgagggaggcagagcagaaagcccgtgcgtaccaggcgctggtcgctcaggct

SEQ ID NO: 496223 - DNA, 75 bp, synthetic construct
  source 1..75: mol_type = other DNA
ctgctggaaaaactccaggctgtcgctgaacaccttcgggaagccgaaggctgggaatggtgcgccggacgcatg

SEQ ID NO: 496224 - DNA, 75 bp, synthetic construct
  source 1..75: mol_type = other DNA
gtggaggaaatcagtctgccactgctgacgaaaatgtcttccgaacgcacgctggcagtccaggcagcactgatg

SEQ ID NO: 496225 - DNA, 75 bp, synthetic construct
  source 1..75: mol_type = other DNA
ccgccacgttcagcgaatgctgaaactggcagaccttgccccagtgatcctcgatgcgctggcagaagacctcat

SEQ ID NO: 496226 - DNA, 75 bp, synthetic construct
  source 1..75: mol_type = other DNA
ccgccacgttcagcgaatgctgaaactggcagaccttgccccagtgatccttgatgcgctggcagaagaccccat

SEQ ID NO: 496227 - DNA, 75 bp, synthetic construct
  source 1..75: mol_type = other DNA
gtcgggatatgcaccctgctgaacagattgccggattccgcgcaatggcgcaggaaggtgcgtattaccgtgaag

SEQ ID NO: 496228 - DNA, 75 bp, synthetic construct
  source 1..75: mol_type = other DNA
ctggtctcactgattaagtcaccgctgaatgtgcgcacggtgccgtattctgcggagtccgtcagtgaactggct

SEQ ID NO: 496229 - DNA, 75 bp, synthetic construct
  source 1..75: mol_type = other DNA
ccgccacgttcagcgaatgctgaaactggctgaccttgccccagtgatcctggatgcgctggcagaagaccccat

SEQ ID NO: 496230 - DNA, 75 bp, synthetic construct
  source 1..75: mol_type = other DNA
ccgccacgttcagcgaatgctgaaactggctgaccttgccccagtgatcctcgatgcgctggcagaagaccgcat

SEQ ID NO: 496231 - DNA, 75 bp, synthetic construct
  source 1..75: mol_type = other DNA
atggaggccgttggtgagtgccgtgaggatgccggaacataccgcagtctgccggagccggaagcgatgctgacg

SEQ ID NO: 496232 - DNA, 75 bp, synthetic construct
  source 1..75: mol_type = other DNA
tgcggttccgtgtcagggaacgcagtcgccataaatccgcactggtcatgcagaagtacagccgccagcaggcac

SEQ ID NO: 496233 - DNA, 75 bp, synthetic construct
  source 1..75: mol_type = other DNA
cagcaaccggacaaatctctggcactgctggcatggacgctctgcctgaatgtgtttagcagcggagcgtacagt

SEQ ID NO: 496234 - DNA, 75 bp, synthetic construct
  source 1..75: mol_type = other DNA
tattccgcaggaactggcgacggcggcatcgatgaccgagaacggtcatcgtcgggatatgcaccctaccgaaca

SEQ ID NO: 496235 - DNA, 75 bp, synthetic construct
  source 1..75: mol_type = other DNA
cggtatcacccgttacgtcactgaaattcttgttaagaccacgggcaccgtgcagatgctggggagtgcaccaca

SEQ ID NO: 496236 - DNA, 75 bp, synthetic construct
  source 1..75: mol_type = other DNA
atgaaagacaaccgctgggtgcctggctggatgtgtacaccacgtccacagatggatgccactgaacacaccact

SEQ ID NO: 496237 - DNA, 75 bp, synthetic construct
  source 1..75: mol_type = other DNA
ctctggagacgtttcgctggcatcaatcggcaacggtggatgaagaaacctatcgcgcattgcataacgaacatc

SEQ ID NO: 496238 - DNA, 75 bp, synthetic construct
  source 1..75: mol_type = other DNA
ttatatccatgttcattggtgttgattgtttctctaattttatcaaaaagaatatcaaacaagtattttagaatg

SEQ ID NO: 496239 - DNA, 75 bp, synthetic construct
  source 1..75: mol_type = other DNA
ggcaagaccatcgatgggaaaaaccacatttgcaatgaacctctgcgaaaatgtggcgttatcacaggataaaac

SEQ ID NO: 496240 - DNA, 75 bp, synthetic construct
  source 1..75: mol_type = other DNA
gtgcatctctctgctgatgaagcaacggcacgcaaagtgggagcaagacacggatcgccagttattttaaccgtc

SEQ ID NO: 496241 - DNA, 75 bp, synthetic construct
  source 1..75: mol_type = other DNA
gtgcatctctctgctgatgaagcaacggcccgcaaagtcggggcaagacacggttcgccggttatcttaaccgtc

SEQ ID NO: 496242 - DNA, 75 bp, synthetic construct
  source 1..75: mol_type = other DNA
tgtccggtatttgatgagtttcagttgtaccaggaagcggaagaacgcagtaaacgccgctgtggtttgctttaa

SEQ ID NO: 496243 - DNA, 75 bp, synthetic construct
  source 1..75: mol_type = other DNA
tacgccagtttgatagaaagcgcaaagcgctctatagatcaatacaatgaggcctgtgtcgctaatggaggtgat

SEQ ID NO: 496244 - DNA, 75 bp, synthetic construct
  source 1..75: mol_type = other DNA
aagtgctgctaaaaaactggctgaaaatgaaatcatcagagttaagcaaattattatctggagcgttttgccaga

SEQ ID NO: 496245 - DNA, 75 bp, synthetic construct
  source 1..75: mol_type = other DNA
atggaagaagaaggtattcttgcaggtatctcttctggagcagctgttgctgcggcgttgaaactacaagaagat

SEQ ID NO: 496246 - DNA, 75 bp, synthetic construct
  source 1..75: mol_type = other DNA
ttacaaagatttgtttcctgagatcgatgcttcgcttttccgtagcatggtgctcgtctgtatgggttacaccat

SEQ ID NO: 496247 - DNA, 75 bp, synthetic construct
  source 1..75: mol_type = other DNA
gttggggaacagcctctcatggttcacctaaatcatgggcaattggttctctgggccgctttggtaacgaatact

SEQ ID NO: 496248 - DNA, 75 bp, synthetic construct
  source 1..75: mol_type = other DNA
tgggataagagcgattcaggtgaggcgttaccggaaacggccagatatgagtgctgtgagtgcggcgggattatg

SEQ ID NO: 496249 - DNA, 75 bp, synthetic construct
  source 1..75: mol_type = other DNA
gcaggccagcggcaactattggtgatttggaattacgttggcaaagagccatgcccaagagaccaagtgcgtttc

SEQ ID NO: 496250 - DNA, 75 bp, synthetic construct
  source 1..75: mol_type = other DNA
ggagtatatattggcggcctgcgcaataacattgaagcggtgacggaactgctgaaattgccaaagcatgttctg

SEQ ID NO: 496251 - DNA, 75 bp, synthetic construct
  source 1..75: mol_type = other DNA
actacctcaggtaaaatacaaaattttttgttaagaaaagatattatgcagcgattaacgcaggatgtctgtgaa

SEQ ID NO: 496252 - DNA, 75 bp, synthetic construct
  source 1..75: mol_type = other DNA
agcatgaccgtttcattctccacgccgtttgcgctgggaatttttaagccacgtacgttgatgatcacctcacag

SEQ ID NO: 496253 - DNA, 75 bp, synthetic construct
  source 1..75: mol_type = other DNA
ggcctgcggataacccggatctcaagccgcgtttaccggcctctattttggtgcatgaaaacagctaccaaccgc

SEQ ID NO: 496254 - DNA, 75 bp, synthetic construct
  source 1..75: mol_type = other DNA
cgcagcggaatcgttggggttgggcggtgtatatattggcggcttgcgcaataacattgaagcggtgacggagct

SEQ ID NO: 496255 - DNA, 75 bp, synthetic construct
  source 1..75: mol_type = other DNA
cactgatgaacctatctccgctgaacagcgcgaggcgattatcaacagcgcccgggcgacttccagttccagttt

SEQ ID NO: 496256 - DNA, 75 bp, synthetic construct
  source 1..75: mol_type = other DNA
cggcgcaggtggcgtttaacaagctgaacaaattcgcgctcgcgcctttcaaagcagagtttccgcgcccgcagg

SEQ ID NO: 496257 - DNA, 75 bp, synthetic construct
  source 1..75: mol_type = other DNA
aaatgcgcaacgggcaacttagcgagctgacaggcgaagagcgcgatgctgcttcgcgtgatgccgttgcccgga

SEQ ID NO: 496258 - DNA, 75 bp, synthetic construct
  source 1..75: mol_type = other DNA
taggttatattctggatgaacatgagcggatattcagaaaacaggcttctttatatacggtactgggtatactca

SEQ ID NO: 496259 - DNA, 75 bp, synthetic construct
  source 1..75: mol_type = other DNA
gcattacctgcatcattccggtgttagcgccggtgctcggacacctgattatgcttaaattcccttggcagagtc

SEQ ID NO: 496260 - DNA, 75 bp, synthetic construct
  source 1..75: mol_type = other DNA
gcgttatgttgtcgcggacaacggcgaaaaggggctgaccttcgctgttgaaccgattaagctggcgctatctga

SEQ ID NO: 496261 - DNA, 75 bp, synthetic construct
  source 1..75: mol_type = other DNA
ccgcctgctggagatgcgcagcgggcagcttagcgagctgatcggcgaagaacgcgatgcggcttcacgtgatgc

SEQ ID NO: 496262 - DNA, 75 bp, synthetic construct
  source 1..75: mol_type = other DNA
ttgtggttattctaccgtcatcgggtgagcgttatttaagcaccgcattgtttgccgatctcttcactgagaaag

SEQ ID NO: 496263 - DNA, 75 bp, synthetic construct
  source 1..75: mol_type = other DNA
atggtacatgaccgcatagcggaagaactcgaggcgaaaggcttttaccggagggcgtcggcgcgatggggtgaa

SEQ ID NO: 496264 - DNA, 75 bp, synthetic construct
  source 1..75: mol_type = other DNA
gtcaatcgcacttatgccgaaatgggtatagatggtgctggtgatgaaatatggcgcaattaccaggacagctaa

SEQ ID NO: 496265 - DNA, 75 bp, synthetic construct
  source 1..75: mol_type = other DNA
aacctctgaataatgcttatgcgtggcttctagctttactgcctctcttctttggagcaccgccagatgagtatt

SEQ ID NO: 496266 - DNA, 75 bp, synthetic construct
  source 1..75: mol_type = other DNA
gtgaatcaggacggtacactggacgtcagcggcggcggtcacggtattgatatcaccggcgacagcgccacggtg

SEQ ID NO: 496267 - DNA, 75 bp, synthetic construct
  source 1..75: mol_type = other DNA
ttcagattgacggcgacaaagcggttgtcaataacgacggtgacagtgccatcagtaacggcggcaccggcacgc

SEQ ID NO: 496268 - DNA, 75 bp, synthetic construct
  source 1..75: mol_type = other DNA
aaccaccatggacccggaaagtcgtcgtatgctgcgcgttaccgttaaggatgcgattgctgctgaccagctgtt

SEQ ID NO: 496269 - DNA, 75 bp, synthetic construct
  source 1..75: mol_type = other DNA
gccagggggatgccatcagcgaaacctggctgtatcaatatttcccgccagcaccggataaacgccggtacgttg

SEQ ID NO: 496270 - DNA, 75 bp, synthetic construct
  source 1..75: mol_type = other DNA
gacacatatcaatacggtttgtcggcccgcggcctggcgatcgacacttacaccgacagtaaagaagagttcccc

SEQ ID NO: 496271 - DNA, 75 bp, synthetic construct
  source 1..75: mol_type = other DNA
ggtgattatggatgtggaaaatcacctgtatgcgcgcaaagacattaaacaactgggcattgcgccgatgaccag

SEQ ID NO: 496272 - DNA, 75 bp, synthetic construct
  source 1..75: mol_type = other DNA
atggtaatgacattaacattactctggaacttaccggtgacaggaacttctacgtccgtgttccaaatgtttatc

SEQ ID NO: 496273 - DNA, 75 bp, synthetic construct
  source 1..75: mol_type = other DNA
ctgaaagagaataacggttcgactgcaccaaaatgtatgaaggtgacaatagaggacaaggtgacggataagttc

SEQ ID NO: 496274 - DNA, 75 bp, synthetic construct
  source 1..75: mol_type = other DNA
cgtaatcgtcgcgttgcttgctggtaacatcttcatcggtatcccacaccaggaagaggttgctcttgaagaagc

SEQ ID NO: 496275 - DNA, 75 bp, synthetic construct
  source 1..75: mol_type = other DNA
gagatcgccggtaataacgggaaagttattcaggacggtatactggatgtcagcggcggcggtcacgggattgat

SEQ ID NO: 496276 - DNA, 75 bp, synthetic construct
  source 1..75: mol_type = other DNA
tataccatcaataatgatgtctatttaagtgatgatgtttttaataataaccaggcatatacatcaacaagttac

SEQ ID NO: 496277 - DNA, 75 bp, synthetic construct
  source 1..75: mol_type = other DNA
cgacaataatgcgtttaccggcgagatgagtatccagaatggcgaggtgacgttggggcgcagcgatgagttaat

SEQ ID NO: 496278 - DNA, 75 bp, synthetic construct
  source 1..75: mol_type = other DNA
tgcgaaaattgttaataaaggtacttgtagattcaattggtcaacgcaacagttatgtgaaaacatggggttgcg

SEQ ID NO: 496279 - DNA, 75 bp, synthetic construct
  source 1..75: mol_type = other DNA
aatcaggcatatacatcaaccagctatagtgatggggacggcggtgccattgatgttacggataatagtacggat

SEQ ID NO: 496280 - DNA, 75 bp, synthetic construct
  source 1..75: mol_type = other DNA
cgggagtcatcgtgaaagagggagcgggagagttagtcctcaatgccgacaataatgcgtttaccggcgagatga

SEQ ID NO: 496281 - DNA, 75 bp, synthetic construct
  source 1..75: mol_type = other DNA
ggtgccgccgatttacgtgtcactaacgccgtatttcacaataacatcgctaatgacggcaaaggcggtgcaatt

SEQ ID NO: 496282 - DNA, 75 bp, synthetic construct
  source 1..75: mol_type = other DNA
cggagtccatcggtatccaggttgacggcgaccaggccatcgtcaataacgaaggcgagagcactatcaccaatg

SEQ ID NO: 496283 - DNA, 75 bp, synthetic construct
  source 1..75: mol_type = other DNA
actccatcggtattcagatcgacggcgacaaagcggttgtcaataacgacggtgacaacgccatcagcaacggcg

SEQ ID NO: 496284 - DNA, 75 bp, synthetic construct
  source 1..75: mol_type = other DNA
tggatgtcagcggcggcggtcacggtattgatatcaccggcgacagcgccacggtggacaacaagggcggtatga

SEQ ID NO: 496285 - DNA, 75 bp, synthetic construct
  source 1..75: mol_type = other DNA
gtcacggtattgatatcaccggcgacagcgcgacggtggacaacaaaggtggaatgactgtcaccgatccggatt

SEQ ID NO: 496286 - DNA, 75 bp, synthetic construct
  source 1..75: mol_type = other DNA
tgatatcaccggcgacagcgcaacggtggataacaaaggcggtatgaccgtcgcggatgcggattcgattggcat

SEQ ID NO: 496287 - DNA, 75 bp, synthetic construct
  source 1..75: mol_type = other DNA
gatcactgcaaaagtgatggaacagcacagtgttctcaatatgggctctgcagccggtgttgcagacccgggggt

SEQ ID NO: 496288 - DNA, 75 bp, synthetic construct
  source 1..75: mol_type = other DNA
ccgccacgttcagcgaatgctgaaactggcagaccttgccccagtgatcctggatgcgctggcagaagaccccat

SEQ ID NO: 496289 - DNA, 75 bp, synthetic construct
  source 1..75: mol_type = other DNA
gggggatttaccgggattccctggcggataatccctatgccgatgaagctatgtggaaggtggaaaatgcaatta

SEQ ID NO: 496290 - DNA, 75 bp, synthetic construct
  source 1..75: mol_type = other DNA
gtttggtctggggacggggggggtatattacattccgtggagtgtatatgtattccttgccgatgttgatgaggt

SEQ ID NO: 496291 - DNA, 75 bp, synthetic construct
  source 1..75: mol_type = other DNA
ccgccacgttcagcgaatgctgaaactggcagaccttgccccagtgatcctcgatgcgctggcagaagaccgcat

SEQ ID NO: 496292 - DNA, 75 bp, synthetic construct
  source 1..75: mol_type = other DNA
ggccgtggacgtaaggccgcgcagccggagcctcagccgcaaccgccgaagggtgacgattacgggttttcagac

SEQ ID NO: 496293 - DNA, 75 bp, synthetic construct
  source 1..75: mol_type = other DNA
aaagcaaacttcttcggacacctgcaaaagccgcagattatcgatgccctgaatgatgccggactgtccggtgct

SEQ ID NO: 496294 - DNA, 75 bp, synthetic construct
  source 1..75: mol_type = other DNA
gctatttcttgtcggacgctttatgcaagggctgggcgctggctgctgttatgtcgtcgcattcgcgattttacg

SEQ ID NO: 496295 - DNA, 75 bp, synthetic construct
  source 1..75: mol_type = other DNA
catcgcggtactcatgctgtctttgtttattctgaaagaaacgcgcccagcagcgcctgccgcttcggacaagcc

SEQ ID NO: 496296 - DNA, 75 bp, synthetic construct
  source 1..75: mol_type = other DNA
gtcggtacatggaatatgctgatcgggattctgattgcctgtagcatagtgagcctgttgctgattatgttcgtc

SEQ ID NO: 496297 - DNA, 75 bp, synthetic construct
  source 1..75: mol_type = other DNA
aagccataactcgtttttcatatggtagtggaaatcttatcggcagtggagctctggctattagtggagcatggt

SEQ ID NO: 496298 - DNA, 75 bp, synthetic construct
  source 1..75: mol_type = other DNA
cagaagaccgattacacaagttttgacgtgatgaacaaacagggaagcatgaaggacgtgctggactttatctgc

SEQ ID NO: 496299 - DNA, 75 bp, synthetic construct
  source 1..75: mol_type = other DNA
atgacgacgttaacccaatgccagcagcaggtgctggatatgctgatttcttaccagcaagagcgtggctttccg

SEQ ID NO: 496300 - DNA, 75 bp, synthetic construct
  source 1..75: mol_type = other DNA
tgcagatgctggtacgtgccgcaggtgctcagactcagccggaagaggggcaacagttcagcggtcagcctcagc

SEQ ID NO: 496301 - DNA, 75 bp, synthetic construct
  source 1..75: mol_type = other DNA
tcgccgactggctgcactcaacatgctggcagagcgtggcatccttccggctgactggcctgtacgcgtgaaggt

SEQ ID NO: 496302 - DNA, 75 bp, synthetic construct
  source 1..75: mol_type = other DNA
gcaaaggaggccggtcatgctgtccgtgagatggagcggtggatggtgccgaacaaactccgggaggtggcgtga

SEQ ID NO: 496303 - DNA, 75 bp, synthetic construct
  source 1..75: mol_type = other DNA
aggtggccacgtcagaaagctggcgtgacaaacagacgggggagatgcgggagcagacagaatggcaccgcgtgg

SEQ ID NO: 496304 - DNA, 75 bp, synthetic construct
  source 1..75: mol_type = other DNA
cgcagcgaggatgatgcggctgacgacgctgaccgcacggaacaggtgctggagaaagcggcggtggaggaaatc

SEQ ID NO: 496305 - DNA, 75 bp, synthetic construct
  source 1..75: mol_type = other DNA
ttacgggttttcagatgatacccgttctgaacgactgactgtgacaaccgctccgtcctgtgcggggcatcaccg

SEQ ID NO: 496306 - DNA, 75 bp, synthetic construct
  source 1..75: mol_type = other DNA
ggagggatggtcacgggacatgacgacgttcctgtcactcagtcaggaggtgctgttatccctgctcagtttctg

SEQ ID NO: 496307 - DNA, 75 bp, synthetic construct
  source 1..75: mol_type = other DNA
cgatgacggggacggttatgtcgaccgcgtggcgctcgatgccgccctgctggaaaaactccaggctgtcgctga

SEQ ID NO: 496308 - DNA, 75 bp, synthetic construct
  source 1..75: mol_type = other DNA
accgccccgtccagtgcggggcatcaccggagagatgaggatgagcgaatatttcagaatatttcaggggctgcc

SEQ ID NO: 496309 - DNA, 75 bp, synthetic construct
  source 1..75: mol_type = other DNA
tgcggttccgcgtcagggagcgcagccgccataaatccgcgctggtcatgcaaaagtacagccgtcggcaggcac

SEQ ID NO: 496310 - DNA, 75 bp, synthetic construct
  source 1..75: mol_type = other DNA
taccggatggaaagagtccccctaaagcagactgacagacatcacaaatccccgggtggggatttgtgtataaga

SEQ ID NO: 496311 - DNA, 75 bp, synthetic construct
  source 1..75: mol_type = other DNA
gcagcagagcggttgtttccgtcggtgcggtttcgtgtcagggagcgcagtcgccacaaatccgcactggtcatg

SEQ ID NO: 496312 - DNA, 75 bp, synthetic construct
  source 1..75: mol_type = other DNA
ccttcgggaagccgaaggctgggaatggtgcgccggacgcatggagcctgtcggtgagtgccgtgaagatgcccg

SEQ ID NO: 496313 - DNA, 75 bp, synthetic construct
  source 1..75: mol_type = other DNA
ttatcaccaccctcagcgtttcggtgatcctcaccttcgtgaatacgtcgccagtattgatgatggaaatcatgg

SEQ ID NO: 496314 - DNA, 75 bp, synthetic construct
  source 1..75: mol_type = other DNA
atatttttactggaagccatgtagagatttcaatctctgatcagcttaccaatcaggtcgactttttcgatccca

SEQ ID NO: 496315 - DNA, 75 bp, synthetic construct
  source 1..75: mol_type = other DNA
tacaatcgagtttaaattagaacctgatggcgggattctagatcgcggtattgctaccgaaggccggatcttacg

SEQ ID NO: 496316 - DNA, 75 bp, synthetic construct
  source 1..75: mol_type = other DNA
acattttcacggggtcgcatgttgaagtctccgtgtctactatggtggataaccagccggactttttcgatcctg

SEQ ID NO: 496317 - DNA, 75 bp, synthetic construct
  source 1..75: mol_type = other DNA
acccgcaacggttctatggcaatttttgctaaaagtatattaaatggttctaacggtgatgcaaccgacaacatt

SEQ ID NO: 496318 - DNA, 75 bp, synthetic construct
  source 1..75: mol_type = other DNA
gcatcctatgacctggatgtaaacggtgtaatgctgggtggtgatacccgcttcatgactgaagatggtagctag

SEQ ID NO: 496319 - DNA, 75 bp, synthetic construct
  source 1..75: mol_type = other DNA
gcggatgcccgttttaggtgcagacagagagtggcacgctattcatcgactgcatgatgtcggtgttgatacgat

SEQ ID NO: 496320 - DNA, 75 bp, synthetic construct
  source 1..75: mol_type = other DNA
attaccgatcccgcactgcgtgaagccctggtgccgctaaccggtgggcaaaaacacgttgcgcaagctgcagag

SEQ ID NO: 496321 - DNA, 75 bp, synthetic construct
  source 1..75: mol_type = other DNA
catttatactggattatttgcacaaacagggttgggctacgcgctaaacccgccacgccgatgtatgatacgcgg

SEQ ID NO: 496322 - DNA, 75 bp, synthetic construct
  source 1..75: mol_type = other DNA
ctttttgcttcatttgccatttactggccgggaagatgaattaaaaatttcggttatcgatctacatcgggcgca

SEQ ID NO: 496323 - DNA, 75 bp, synthetic construct
  source 1..75: mol_type = other DNA
gtacggtgttggatttggtgaaagagggctaaatccattaacccgcacgtcatttattattacagaagatctcac

SEQ ID NO: 496324 - DNA, 75 bp, synthetic construct
  source 1..75: mol_type = other DNA
ctttttactccatttgccatttactggccgggaagatgaattaaaaatttcggttatcgatctgcaccgggcaca

SEQ ID NO: 496325 - DNA, 75 bp, synthetic construct
  source 1..75: mol_type = other DNA
taataataaacaaacaatttatgcctctgcttcggcacaaggaacaggttcagcaacgcaaaatttaaatttgtc

SEQ ID NO: 496326 - DNA, 75 bp, synthetic construct
  source 1..75: mol_type = other DNA
tgcgtcaggctaccgacagcgccctgcgcggggttatcggtaaatacaccatggaccgcattctgacggaaggtc

SEQ ID NO: 496327 - DNA, 75 bp, synthetic construct
  source 1..75: mol_type = other DNA
cgcacggtgccgtattctgtggagtccgtcagcgaactggcggagtcaattaaaggtgtcggcctgctgcagaat

SEQ ID NO: 496328 - DNA, 75 bp, synthetic construct
  source 1..75: mol_type = other DNA
tgcgggatgtcggcgttgatactatgtatggggtgggcattggcggaaaaggcatgaatccgctgaccagaactt

SEQ ID NO: 496329 - DNA, 75 bp, synthetic construct
  source 1..75: mol_type = other DNA
cgacacgctggatgatcgacgtcgggcaaaagtgctgtcattactcaacggtattacctgcatcattccggtgtt

SEQ ID NO: 496330 - DNA, 75 bp, synthetic construct
  source 1..75: mol_type = other DNA
aacgataaattttctaaggttatcgatgcgctgcaacagcgaggctatcaggttgtgctaacctgtgggccctcg

SEQ ID NO: 496331 - DNA, 75 bp, synthetic construct
  source 1..75: mol_type = other DNA
atgcgttgcaacatcgtggttatcaggttgtgctgacttgtggcccttcggcagatgatctcgcttgcgtagatg

SEQ ID NO: 496332 - DNA, 75 bp, synthetic construct
  source 1..75: mol_type = other DNA
caataattggggcggctaataataaacaaacaatttatgcctctgcttcggcacaaggcgcaggttcagcaacgc

SEQ ID NO: 496333 - DNA, 75 bp, synthetic construct
  source 1..75: mol_type = other DNA
tactgggaaggtaatgcttatgctgatgcttatggcgataaagcgagtagtaatctgaatataaatctttccgat

SEQ ID NO: 496334 - DNA, 75 bp, synthetic construct
  source 1..75: mol_type = other DNA
atggtagtgtccgctattgccagtacacctcaggctacagtcaatactggcacgtttgcttctcaaaacggcact

SEQ ID NO: 496335 - DNA, 75 bp, synthetic construct
  source 1..75: mol_type = other DNA
aattccaaaggatatgcggcaggaagttgcgctcacctcaatgaataaagcatttaccagctatgccaaatcacc

SEQ ID NO: 496336 - DNA, 75 bp, synthetic construct
  source 1..75: mol_type = other DNA
caccatcacagctcaaggtgaaggcacctatgtccggactgcaatggtcattgattcaactggcgatgttgttgt

SEQ ID NO: 496337 - DNA, 75 bp, synthetic construct
  source 1..75: mol_type = other DNA
acagtcaacctgaatattaaggatggctcagtaattggggcggctaataataaacaaacaatttatgcctctgct

SEQ ID NO: 496338 - DNA, 75 bp, synthetic construct
  source 1..75: mol_type = other DNA
ttcagcagggaaaccgctggcttaactggctggagaaacaaccgaaaggggcagtccgtccggtggtaattgaat

SEQ ID NO: 496339 - DNA, 75 bp, synthetic construct
  source 1..75: mol_type = other DNA
ctttgaactcgcaaaccggggcgtaactaaggatgaaagccttcgtaactcactgcgcggcgcaattatggggct

SEQ ID NO: 496340 - DNA, 75 bp, synthetic construct
  source 1..75: mol_type = other DNA
ctcagttgggaaataacgaagacagtgtaatctttattaaccagttagaaggattatggccggttgagcgttatc

SEQ ID NO: 496341 - DNA, 75 bp, synthetic construct
  source 1..75: mol_type = other DNA
tagtggtggtatcggtcactcgacaacttttttgtatagcgccatcgcacagcatccgcactacaacactatccg

SEQ ID NO: 496342 - DNA, 75 bp, synthetic construct
  source 1..75: mol_type = other DNA
actcaatcaacataacataccactgccagaattggcggatgggcactataccgcctattcagtacgcaaaacaaa

SEQ ID NO: 496343 - DNA, 75 bp, synthetic construct
  source 1..75: mol_type = other DNA
tggtgtatttgttctggtaagcgatgcccagcctacaaatcctactattgcacggcctaacctggtggaaaatct

SEQ ID NO: 496344 - DNA, 75 bp, synthetic construct
  source 1..75: mol_type = other DNA
tgagatgctcctctccctggacgataccagcgtgtggtttaacatcaataatcgtcggcttaaagcccggcgcaa

SEQ ID NO: 496345 - DNA, 75 bp, synthetic construct
  source 1..75: mol_type = other DNA
ctcaccgcaagatgaaagataaatttgtgcgctgggataacccgccgacgctggacggtatgaccggacacgccg

SEQ ID NO: 496346 - DNA, 75 bp, synthetic construct
  source 1..75: mol_type = other DNA
ctgccattagaggcggcaggacgagtcagggaaattcaggagcgtgcaatacaagctgtcatccatggtgagcgt

SEQ ID NO: 496347 - DNA, 75 bp, synthetic construct
  source 1..75: mol_type = other DNA
agttcgatcgcgcctcgcaggatgcattctggcgttcgccctggcagcttagcccgcaaagtaaccggatgggct

SEQ ID NO: 496348 - DNA, 75 bp, synthetic construct
  source 1..75: mol_type = other DNA
tgctggaggaagatgtaatactcagggtaacggtacagaatataacggtggtgctgctggtaaagccgttactgg

SEQ ID NO: 496349 - DNA, 75 bp, synthetic construct
  source 1..75: mol_type = other DNA
gatcatctgctgtgtccgagactggtcaacggtggatgagcgccgcaatgcaagctgttcgcttaggtcgtccgg

SEQ ID NO: 496350 - DNA, 75 bp, synthetic construct
  source 1..75: mol_type = other DNA
cgtgaattaaaagaaaaaactgtaataggttcattatgtggattaaatccaagaaaaggtcttgagcaaatactg

SEQ ID NO: 496351 - DNA, 75 bp, synthetic construct
  source 1..75: mol_type = other DNA
ctcacagctgaaaattatgatttatctcgcctgattcagggattgttcagtctgcatttgaaaatggtaatgctg

SEQ ID NO: 496352 - DNA, 75 bp, synthetic construct
  source 1..75: mol_type = other DNA
aaagttcgacgtgccactcgtgatgccctgctattgagtgaatttgtccaacagcatggattggcaatcaaacat

SEQ ID NO: 496353 - DNA, 75 bp, synthetic construct
  source 1..75: mol_type = other DNA
tgtacaggtgatcccatatatctattccgtagatgctgagggcaacgagtataacttcctcacggattactatcg

SEQ ID NO: 496354 - DNA, 75 bp, synthetic construct
  source 1..75: mol_type = other DNA
ggcaccatcgcccatcgaacggctgcaacgaatgaatccgctgtctatctcgctgtataagatgcacggttacga

SEQ ID NO: 496355 - DNA, 75 bp, synthetic construct
  source 1..75: mol_type = other DNA
cgatcgataccagcaagacatggaaaagcttgaatcagaaaacatggaattaagacgaaagcttggtgaagcaaa

SEQ ID NO: 496356 - DNA, 75 bp, synthetic construct
  source 1..75: mol_type = other DNA
gacctgcccttctcattagatcgactggacgacgacgttcgcgcgtatctggaaaataacgacgctctggcacca

SEQ ID NO: 496357 - DNA, 75 bp, synthetic construct
  source 1..75: mol_type = other DNA
tcccattatccgcggcatttggtttgaaaaaaactggcctggttttcttaatgggacaatttaccagccacagga

SEQ ID NO: 496358 - DNA, 75 bp, synthetic construct
  source 1..75: mol_type = other DNA
cgagcggcggtgcgatggatcacgacacggcgtatgtcgaagcggtcggttccctacatacccttggcgggctgc

SEQ ID NO: 496359 - DNA, 75 bp, synthetic construct
  source 1..75: mol_type = other DNA
ataacttcctcgcggattactatcgcaccacccaggagctggcttcaaacatcttccgtaaaggctatcagtggc

SEQ ID NO: 496360 - DNA, 75 bp, synthetic construct
  source 1..75: mol_type = other DNA
tcgcccatcgaacggctgcaacgaatgaatccgctgtctatctcgctgtataagatgcacggttacgatctcacc

SEQ ID NO: 496361 - DNA, 75 bp, synthetic construct
  source 1..75: mol_type = other DNA
gagaagtagccggaactcacggcgttacccgaccaggcggtgcggcgctgaatgccggacaggttattgccgtgc

SEQ ID NO: 496362 - DNA, 75 bp, synthetic construct
  source 1..75: mol_type = other DNA
ccatgctgttaaatgaatttgcgcagcaacatggtctaactatcaaccacgccggtgaaattgccgagctattta

SEQ ID NO: 496363 - DNA, 75 bp, synthetic construct
  source 1..75: mol_type = other DNA
caacttcaccaaactggcagaggcactggcgagcggtggggcgatggatcacgacaccgcttatgtcgaagcggt

SEQ ID NO: 496364 - DNA, 75 bp, synthetic construct
  source 1..75: mol_type = other DNA
acgcaccaccgatcgcgaactgttatctcacggtttgttaccgggtgtggtgcaggtgccgcataacgggcagcc

SEQ ID NO: 496365 - DNA, 75 bp, synthetic construct
  source 1..75: mol_type = other DNA
agtacagcatgtgggtgaccgggaaagatgcctggttttttgctaactacgacccgcgcatgaagcgcgaaggta

SEQ ID NO: 496366 - DNA, 75 bp, synthetic construct
  source 1..75: mol_type = other DNA
atgtccggcagtgcttttgccattacgcaccacgccttcagtagcagagcaggaaggacatctgatggaaatgga

SEQ ID NO: 496367 - DNA, 75 bp, synthetic construct
  source 1..75: mol_type = other DNA
gtattgatcgacatggtatatctgtttctctcggtgaaattgtgaacattgaattcacgaatttgcatgagcttg

SEQ ID NO: 496368 - DNA, 75 bp, synthetic construct
  source 1..75: mol_type = other DNA
ggaccggtattgacgttaccactatccaacagggcgatgaggcgtggcaccggctgcgcctcggcgttatcaccg

SEQ ID NO: 496369 - DNA, 75 bp, synthetic construct
  source 1..75: mol_type = other DNA
gcctatcgctgtggattcagcgacagtaaccacttttcgacgctttttcgccgagagtttaactggtcaccgcgt

SEQ ID NO: 496370 - DNA, 75 bp, synthetic construct
  source 1..75: mol_type = other DNA
gacgataaacactcctacgcttccgttaacgatctggttttgcagaatattatttattgcccggagcggctgacg

SEQ ID NO: 496371 - DNA, 75 bp, synthetic construct
  source 1..75: mol_type = other DNA
agttaaaacttctcaaagatgatttttttgccagcgaccagcaggcagtcgctgtggctgaccgttatccgcaag

SEQ ID NO: 496372 - DNA, 75 bp, synthetic construct
  source 1..75: mol_type = other DNA
gctggtagaggatgtctgcaatgcttacaaaaaaaaatatgggcaggatcttacaggacattatcttgaggtact

SEQ ID NO: 496373 - DNA, 75 bp, synthetic construct
  source 1..75: mol_type = other DNA
ttatatctggcgtacagccgaagatggcgacgtccggcattctcatcgagagatggaagggaagtttgtcgaatg

SEQ ID NO: 496374 - DNA, 75 bp, synthetic construct
  source 1..75: mol_type = other DNA
aaatcatcaccccttgggcgactaaggttgctgagagcttcaccgccgacattgcgcgccagaatgaaaagcagt

SEQ ID NO: 496375 - DNA, 75 bp, synthetic construct
  source 1..75: mol_type = other DNA
atgcaatctgattttttacagttagcgatcgcttttgcaggatatgtttgtattggcttctgtgtatacatgatc

SEQ ID NO: 496376 - DNA, 75 bp, synthetic construct
  source 1..75: mol_type = other DNA
gctgctgtggggcaaccgcattcgcgccttgccggggccggaatatcatgagttcgatcgtgcctcgcaggatgc

SEQ ID NO: 496377 - DNA, 75 bp, synthetic construct
  source 1..75: mol_type = other DNA
cgcgccccggtaggccaggtgatgaaatccatcgttgccgagcagattaagtacatcaaatcgctacctcttgag

SEQ ID NO: 496378 - DNA, 75 bp, synthetic construct
  source 1..75: mol_type = other DNA
atgccgaagacgaagcgccgcccggcatcggcgaacctgatgacgaaccgcaggaaccgtcaggcggaaatccgc

SEQ ID NO: 496379 - DNA, 75 bp, synthetic construct
  source 1..75: mol_type = other DNA
ttcgttaagaagcaaatcaaaaatttggaagctccggacgaaaaatcagcttcgaatcagtcgtttgaggatgtt

SEQ ID NO: 496380 - DNA, 75 bp, synthetic construct
  source 1..75: mol_type = other DNA
ccggttcgagctggagcacacaccgagcgtcattactgccagaggcaagaagtttgttgtccgcgaacttgctga

SEQ ID NO: 496381 - DNA, 75 bp, synthetic construct
  source 1..75: mol_type = other DNA
gaaacaggctgaaaagggtatctactctgaccatcggatactggttttcgcctcgttgtctcttggcgaacaggg

SEQ ID NO: 496382 - DNA, 75 bp, synthetic construct
  source 1..75: mol_type = other DNA
agtagtgaatgcagccctgtctctggcacagggtaagaacgcccttgtcggtgccgcaggtgctgccaccggcga

SEQ ID NO: 496383 - DNA, 75 bp, synthetic construct
  source 1..75: mol_type = other DNA
ctcggcgttgaggaagttgtcgccaaagttttcgatgtcaatgagccactgagtcaaatcaatcaggcaaaactc

SEQ ID NO: 496384 - DNA, 75 bp, synthetic construct
  source 1..75: mol_type = other DNA
cagttacgaaaccaggctcactctgatgcagagcaaggtacgttacgttatttccttaatgatgggggagtgcgt

SEQ ID NO: 496385 - DNA, 75 bp, synthetic construct
  source 1..75: mol_type = other DNA
agagtctggaaaaagccattggcgcgggtgaattgtcaccgcgtgaccaggcgctggtaaccgatatgtgggaac

SEQ ID NO: 496386 - DNA, 75 bp, synthetic construct
  source 1..75: mol_type = other DNA
gagttgtcgccgcgtgaccaggcgctggtgaccgatatgtgggaaaacctgtttcagcaggcttcacagcagtaa

SEQ ID NO: 496387 - DNA, 75 bp, synthetic construct
  source 1..75: mol_type = other DNA
tatcaagcggaagccaaagccgatggcagcgatggtgttgtcatggatatgcatatcactgacagttttggtgat

SEQ ID NO: 496388 - DNA, 75 bp, synthetic construct
  source 1..75: mol_type = other DNA
attttcattatcgattgcagaaaatctaatagcaaaaattcaaagtgaaacagatattccaatagtgatcgttta

SEQ ID NO: 496389 - DNA, 75 bp, synthetic construct
  source 1..75: mol_type = other DNA
atccttatcaccctctattaaacattcagcagcaatcataaaagatgcttatattgcaataactcctgacacctc

SEQ ID NO: 496390 - DNA, 75 bp, synthetic construct
  source 1..75: mol_type = other DNA
ctgtcagccctgctggcgcagacggcggaagtgagcgtgccgctggcctcactgattaaatcaccactgaatgtg

SEQ ID NO: 496391 - DNA, 75 bp, synthetic construct
  source 1..75: mol_type = other DNA
aagcagcacaaagtctatctgagagtgataatgtttctgatattgacgaagattggatagaggctttcttcaggg

SEQ ID NO: 496392 - DNA, 75 bp, synthetic construct
  source 1..75: mol_type = other DNA
attccctcgttgctctgttgaagtctgaaatgaagatacacggaaacaaagtggatttgcccctatatttccaga

SEQ ID NO: 496393 - DNA, 75 bp, synthetic construct
  source 1..75: mol_type = other DNA
agcggggctatgggtgatctcaccgcattgcagacgatatttagcaaagtggcaagcgaagccggggaatctgag

SEQ ID NO: 496394 - DNA, 75 bp, synthetic construct
  source 1..75: mol_type = other DNA
gacgtccactgctcagtcttatcttgagaacgtcttgtcgccttatggttctgtcagaaccagcttgtcgatagg

SEQ ID NO: 496395 - DNA, 75 bp, synthetic construct
  source 1..75: mol_type = other DNA
taacagtgatcttagtgttaacgccacgattaattatcagttcggtgttccgctaaaagatcaactgaatagcga

SEQ ID NO: 496396 - DNA, 75 bp, synthetic construct
  source 1..75: mol_type = other DNA
aaataccctcacggaagggaacaacaaccactggaatctggtgctgccagcctggcagtacagctctgatcccgc

SEQ ID NO: 496397 - DNA, 75 bp, synthetic construct
  source 1..75: mol_type = other DNA
attgttataataatgtctaccgtttatccttatcaccctcgattaaacgttcagcagcaatcataaaagatgctt

SEQ ID NO: 496398 - DNA, 75 bp, synthetic construct
  source 1..75: mol_type = other DNA
ctgataagaaagcagcggcagaaaaagccgccgcagacaaaaaagcggcagcggcaaaagctgcagctgaaaaag

SEQ ID NO: 496399 - DNA, 75 bp, synthetic construct
  source 1..75: mol_type = other DNA
tatctggagggggaacgcgtctatcagaatcccattctggtgtactgcatcatctggctgttcgataccggacag

SEQ ID NO: 496400 - DNA, 75 bp, synthetic construct
  source 1..75: mol_type = other DNA
ttgcagctgctgcgcggtgaggatggccagaaaacggcggcgggtgtggacgatgtggaaacacttcagaaagcc

SEQ ID NO: 496401 - DNA, 75 bp, synthetic construct
  source 1..75: mol_type = other DNA
gccaaagaagcgatagaacttggcctctcatttgatgaatatgatcctaagtgtcttcctgcaattcagtataaa

SEQ ID NO: 496402 - DNA, 75 bp, synthetic construct
  source 1..75: mol_type = other DNA
atgacactgaaaattggacctgtcggaaaactgatcgttgtatgtagtcagaagggcggaatcgttaaatcgcag

SEQ ID NO: 496403 - DNA, 75 bp, synthetic construct
  source 1..75: mol_type = other DNA
gaagggtggaatcgttaaatcgcagtcatccagtgaaattgcatatgatcttcgtaaagctggtttccgcgtgct

SEQ ID NO: 496404 - DNA, 75 bp, synthetic construct
  source 1..75: mol_type = other DNA
tcgacagtgacagctatcagttgctcaaggcatatgatgtcaatatctccggtctggtaagcaccaccatgcaga

SEQ ID NO: 496405 - DNA, 75 bp, synthetic construct
  source 1..75: mol_type = other DNA
tcgacagtgacagctataagttactcaaagcatatgatgtcaatatctccggtctggtaagcacaaccatgcaga

SEQ ID NO: 496406 - DNA, 75 bp, synthetic construct
  source 1..75: mol_type = other DNA
cgatgccgccctgctggaaaaactccaggctgtcgcagagttccttcgggaagccgaaggctgggaatggtgcgc

SEQ ID NO: 496407 - DNA, 75 bp, synthetic construct
  source 1..75: mol_type = other DNA
gccgggcttcagttactgagaaacggcaacgataaaccactggccagcaccatcagtgaccagaacatactgata

SEQ ID NO: 496408 - DNA, 75 bp, synthetic construct
  source 1..75: mol_type = other DNA
ttctcctacagatgcattttttactaatttaatagagtctatgtcgaagttggcccaacagggagaaaaaattgg

SEQ ID NO: 496409 - DNA, 75 bp, synthetic construct
  source 1..75: mol_type = other DNA
tattttcagcaggtgtttgaaaaaatccgcgacaaatggcgcgtgaatgaacgccttgctgcccgctactggcgc

SEQ ID NO: 496410 - DNA, 75 bp, synthetic construct
  source 1..75: mol_type = other DNA
tgcatcccttccgtgtgggaagtggtctggcacagcggatcttcttcgagcaactggcgattcatgccggctatc

SEQ ID NO: 496411 - DNA, 75 bp, synthetic construct
  source 1..75: mol_type = other DNA
caatctgaatggtgccgtggttgtgcaggccgaggatatcgcccggatatgcttcttcaacgtgcgaacggtcac

SEQ ID NO: 496412 - DNA, 75 bp, synthetic construct
  source 1..75: mol_type = other DNA
atctcaccctgggtaaaggtgtcgccaatctgaatggtgccgtggttgtgcaggccgaggatatcgcccggatat

SEQ ID NO: 496413 - DNA, 75 bp, synthetic construct
  source 1..75: mol_type = other DNA
gacgaacacggcacgtttacactcgaaaaaacgccacaacggattgtggtgctggaactctcgttcgccgatgcg

SEQ ID NO: 496414 - DNA, 75 bp, synthetic construct
  source 1..75: mol_type = other DNA
aatgacatgggctttcatgatgcgagaagcaggtttcccacccgtcccccctttatttgaattaccgatccacga

SEQ ID NO: 496415 - DNA, 75 bp, synthetic construct
  source 1..75: mol_type = other DNA
atgctattcataagtcatttaaaggcgaaaacgaatttacaagttgtgggtttaacgatgacatgttattcccca

SEQ ID NO: 496416 - DNA, 75 bp, synthetic construct
  source 1..75: mol_type = other DNA
tattaattgtcgcatccacaattaataaatctgtttttgattcgctttgtcttaaagagactaaattaacattag

SEQ ID NO: 496417 - DNA, 75 bp, synthetic construct
  source 1..75: mol_type = other DNA
acgaaaaactggccgaagatgtctcacaggttaaaggtaaagttgccaacgttgaaagccgtctggaactgttag

SEQ ID NO: 496418 - DNA, 75 bp, synthetic construct
  source 1..75: mol_type = other DNA
aggattgtagagagaattcactctttacaatacagactatcgacgaagcaatagcgataatgaccgaaagtggaa

SEQ ID NO: 496419 - DNA, 75 bp, synthetic construct
  source 1..75: mol_type = other DNA
ggaggcagcaaattatttgtctacatgcgccagagcagcatttaacgaccctgagtggtttgtagaaaaccatca

SEQ ID NO: 496420 - DNA, 75 bp, synthetic construct
  source 1..75: mol_type = other DNA
gttgaaagccgcttggaactgttagaatcaggtccttccactataactgaagatatgaaatcccttgatgaacga

SEQ ID NO: 496421 - DNA, 75 bp, synthetic construct
  source 1..75: mol_type = other DNA
aaggatcagctttcgcgcaaatggctgagatattggcccaaaactcacgagcacttgctgatgcaattcataatc

SEQ ID NO: 496422 - DNA, 75 bp, synthetic construct
  source 1..75: mol_type = other DNA
agagtcaaccgattattggtataaatgtgctctggccgcatttaacgaccctgactggtttgtgaaaaaccacca

SEQ ID NO: 496423 - DNA, 75 bp, synthetic construct
  source 1..75: mol_type = other DNA
gtagtagggaaagagattgatcgcatcaatctggatgaattcagaaacacggtgaaaagaattatcgtaaaaatt

SEQ ID NO: 496424 - DNA, 75 bp, synthetic construct
  source 1..75: mol_type = other DNA
caagtgctgctgtttaatggcgtttacgaatgcatcctggtcggcgcactgtttttaatcgtccatatgatcatc

SEQ ID NO: 496425 - DNA, 75 bp, synthetic construct
  source 1..75: mol_type = other DNA
cgcacttaaaggcgtttcgcattatctggcgttaaagacgctactcagtttatggacaggcataatcgtctggct

SEQ ID NO: 496426 - DNA, 75 bp, synthetic construct
  source 1..75: mol_type = other DNA
gccatcgcctggggatgtccaccatggtggtatttctttcattgttaatttggggatggctgctcggcccggtag

SEQ ID NO: 496427 - DNA, 75 bp, synthetic construct
  source 1..75: mol_type = other DNA
ggggcaatgggggatctcaccgcgctgcagatgatatttagcaaagtggtaagcgaagccggggaatctgagtaa

SEQ ID NO: 496428 - DNA, 75 bp, synthetic construct
  source 1..75: mol_type = other DNA
ccttcgggaagccgaaggctgggaatggtgcgccggacgtatggagcctgtcggtttctgccgtgaggatgccgg

SEQ ID NO: 496429 - DNA, 75 bp, synthetic construct
  source 1..75: mol_type = other DNA
tattattgcacagtccttaattataacattcataccgacatgattatcttctgtccggaagaatcagaggctgcg

SEQ ID NO: 496430 - DNA, 75 bp, synthetic construct
  source 1..75: mol_type = other DNA
tgggttcaggattaacgtgcccttctcttctaaaatcaccctcggactggagtccgatggcttgattacttggct

SEQ ID NO: 496431 - DNA, 75 bp, synthetic construct
  source 1..75: mol_type = other DNA
aatcgccactcgtcaagtctggcggtcaattatattggaacattgatacctcatcaaatcaaaaacctttaaaac

SEQ ID NO: 496432 - DNA, 75 bp, synthetic construct
  source 1..75: mol_type = other DNA
tctactaaaataattattggccttgagtctgatgggttgattacctggttggaagagttattatttctcctgcct

SEQ ID NO: 496433 - DNA, 75 bp, synthetic construct
  source 1..75: mol_type = other DNA
gtcaactggtttattcgtcgaggagtccgacgccccatcgccattaccatcgtggtagtggtgatgctaatcgca

SEQ ID NO: 496434 - DNA, 75 bp, synthetic construct
  source 1..75: mol_type = other DNA
cgtgccccacgtatcgccatcaagaatgattacgctacctatagctatccattcaatgtcaaacgtcctgatgtg

SEQ ID NO: 496435 - DNA, 75 bp, synthetic construct
  source 1..75: mol_type = other DNA
tcttctaaaatcaccctcggactggagtccgatggcttgattacttggctgacggagttgaatttctccccagcc

SEQ ID NO: 496436 - DNA, 75 bp, synthetic construct
  source 1..75: mol_type = other DNA
cggaaacatataatttgtggctgatttcacttaagctccagaacgacgaaggcaatgttattgatgaacacgttt

SEQ ID NO: 496437 - DNA, 75 bp, synthetic construct
  source 1..75: mol_type = other DNA
agaagaggcgctgggggtttcgttgctgacagtgttacatattacctttggcgacaatggtccactgatggagaa

SEQ ID NO: 496438 - DNA, 75 bp, synthetic construct
  source 1..75: mol_type = other DNA
cgattcattgcaggctcgtttgccttttaaactggaatttcgcattaccgtaaaagatggcatccgccatattcg

SEQ ID NO: 496439 - DNA, 75 bp, synthetic construct
  source 1..75: mol_type = other DNA
gttgccaccgtgggctgcggctccacggggaacgtacagaaacacctgtacagcgagcaggaggtggcccgtcgc

SEQ ID NO: 496440 - DNA, 75 bp, synthetic construct
  source 1..75: mol_type = other DNA
cagcggtgccgccatgccccagtccgcctttgaggcgatgaccgacgcggcgttcaacgtcggcagtaccggcct

SEQ ID NO: 496441 - DNA, 75 bp, synthetic construct
  source 1..75: mol_type = other DNA
caatggccgcgacatgccacagcgccacttcgaggcaatgacggatgccgcctttaatctggggtgcaaaggtct

SEQ ID NO: 496442 - DNA, 75 bp, synthetic construct
  source 1..75: mol_type = other DNA
atgcctttcgtgcggaacgcaaacacatttccgaaagcgaaacccgttttcggaacgccatggaatattccggcc

SEQ ID NO: 496443 - DNA, 75 bp, synthetic construct
  source 1..75: mol_type = other DNA
ggcggttgaagtgatgtcgcaggctgacatcgcctgttatgcctccaaaaatggtggccgcggccgggtgacagt

SEQ ID NO: 496444 - DNA, 75 bp, synthetic construct
  source 1..75: mol_type = other DNA
atcaatcctgactggcggctgttcagtgaagatttgaatatttggttaattatcgatcacctggaatacaaccgt

SEQ ID NO: 496445 - DNA, 75 bp, synthetic construct
  source 1..75: mol_type = other DNA
ctggacgaccatcaacattattgaggctgtcgtgggcgcaatgctgctgcgtaaattattaccgtggtataaccc

SEQ ID NO: 496446 - DNA, 75 bp, synthetic construct
  source 1..75: mol_type = other DNA
tgtcggatcgtattcaatcaggtgggccgcgatcttcaactcgctgaaagcaaatatggcagattacctactact

SEQ ID NO: 496447 - DNA, 75 bp, synthetic construct
  source 1..75: mol_type = other DNA
tttcaggaaaaagagcgcctgcacattacgctggactccatcggcgaagccgtggtctgtattgatatggcgatg

SEQ ID NO: 496448 - DNA, 75 bp, synthetic construct
  source 1..75: mol_type = other DNA
tataattttgatggattgaataaaatgattagttcggttcaaaaaaaagatctgaggaaagattattctgatgta

SEQ ID NO: 496449 - DNA, 75 bp, synthetic construct
  source 1..75: mol_type = other DNA
caaagacaaaccggttatcgtggtagatggttctggcatgcagtgccaggagccagcaaacgcgctgacgaaagc

SEQ ID NO: 496450 - DNA, 75 bp, synthetic construct
  source 1..75: mol_type = other DNA
gccttaactggtggttctacaggtcaaaatatggcgcagtaatcgttatcttcacagtggtttctttactgatga

SEQ ID NO: 496451 - DNA, 75 bp, synthetic construct
  source 1..75: mol_type = other DNA
catcggcgcttgcctgcgccactctctgcggcgcggcggcgttgtttattgctgcgcttatcagcactgcgcaat

SEQ ID NO: 496452 - DNA, 75 bp, synthetic construct
  source 1..75: mol_type = other DNA
ctttgatgaagttgccatagacttggtgaacggcgattttgcccagttcgtaaaagacgttcgtaaagcagagcg

SEQ ID NO: 496453 - DNA, 75 bp, synthetic construct
  source 1..75: mol_type = other DNA
cggcatggcattgaactcaatgaagagcaattttcctttgtcgactctttctgtaaagagattggtatcggctgg

SEQ ID NO: 496454 - DNA, 75 bp, synthetic construct
  source 1..75: mol_type = other DNA
aaagaagacgctgtggttgtggatttacgccaacgtgatgacttccgtaaaggccatatcgctggctctatcaat

SEQ ID NO: 496455 - DNA, 75 bp, synthetic construct
  source 1..75: mol_type = other DNA
ctccactttccgccctaacccgattggtatgtcgctggtagagctgaaagaggttgtttgccataaagacagcgt

SEQ ID NO: 496456 - DNA, 75 bp, synthetic construct
  source 1..75: mol_type = other DNA
agaaaaattcgccgttccgcgccagccaggtctggtaaaaagcgccaacggcgaactgcatctcattgctcccta

SEQ ID NO: 496457 - DNA, 75 bp, synthetic construct
  source 1..75: mol_type = other DNA
catcgagatatgaagggttcggtttgccactactggaagctatggcatatcaattgccaatatttgcgtcaaata

SEQ ID NO: 496458 - DNA, 75 bp, synthetic construct
  source 1..75: mol_type = other DNA
ggtgatgaccatcgcccgccagcttagcgtgccgggaaatcttaaccttttgggctttgtgacactcatttatgg

SEQ ID NO: 496459 - DNA, 75 bp, synthetic construct
  source 1..75: mol_type = other DNA
tgggcgctactttgctgacgggcaagtcgcctttttggggcgcaacgatacccaagtgaaggtgaatggttaccg

SEQ ID NO: 496460 - DNA, 75 bp, synthetic construct
  source 1..75: mol_type = other DNA
cagaacagatggcctgcgtttacgcctggctggcgcagttgttttcccgggaacgtgacgatgacagcctggcac

SEQ ID NO: 496461 - DNA, 75 bp, synthetic construct
  source 1..75: mol_type = other DNA
ccttcccacataaactgattcgtctctgttttgccaagaaggaatcgacgttgctggcagcagcagaacgcctgc

SEQ ID NO: 496462 - DNA, 75 bp, synthetic construct
  source 1..75: mol_type = other DNA
gccgttactgaccgcccatctctggacgctggtcggcttgtcgattgtgccaggctgctttggctggttgtgggc

SEQ ID NO: 496463 - DNA, 75 bp, synthetic construct
  source 1..75: mol_type = other DNA
tggctgggctgcattttgccctctcctcgcaaacgctatggcaaggtgccggggcgctttctggcattatattga

SEQ ID NO: 496464 - DNA, 75 bp, synthetic construct
  source 1..75: mol_type = other DNA
tggccgttttactcgcgcatatgtgaactatctttctgcgctgactgacacacaagaaagccgtcaattgatggt

SEQ ID NO: 496465 - DNA, 75 bp, synthetic construct
  source 1..75: mol_type = other DNA
cgggttgctttggctggctgtgggcggcaaaacgctggggagcgttaccttgcctgacagcgaacttactggtgc

SEQ ID NO: 496466 - DNA, 75 bp, synthetic construct
  source 1..75: mol_type = other DNA
ggagcgctttctgccattatattgattgttctggcactattgatcccgtcgaaaaaacacctcatcgcgcctgcg

SEQ ID NO: 496467 - DNA, 75 bp, synthetic construct
  source 1..75: mol_type = other DNA
gaactgtcgtggattgccagcggcaactacgcagggtatctggcaggcagcatgctgttttcattcggcgcgttt

SEQ ID NO: 496468 - DNA, 75 bp, synthetic construct
  source 1..75: mol_type = other DNA
tgcgactgcggcagcaaaacagtctggtgacagaaaagattctgtttatgcttgaaggtgccattatcggcattc

SEQ ID NO: 496469 - DNA, 75 bp, synthetic construct
  source 1..75: mol_type = other DNA
atgaaaagcctctcctataagcggatctataagtcacagaaatacctggcaacgttgggcacaattgaataccga

SEQ ID NO: 496470 - DNA, 75 bp, synthetic construct
  source 1..75: mol_type = other DNA
tgaaagtctatggcgaaatcaactgaagctggtgcgtctgtcgaaatattctctcgatgcagcgctgaaagagaa

SEQ ID NO: 496471 - DNA, 75 bp, synthetic construct
  source 1..75: mol_type = other DNA
cgcgcctatctgaactatctggcggatctcacggacacccatgaaagccgccagcttatggttttgtcgctggca

SEQ ID NO: 496472 - DNA, 75 bp, synthetic construct
  source 1..75: mol_type = other DNA
atgctcaacgttcaggaaaaagtgagcattgtgaatgaactaaggcaggaatggtcattgtctcgattgttaatt

SEQ ID NO: 496473 - DNA, 75 bp, synthetic construct
  source 1..75: mol_type = other DNA
aaccgtcagaaaactgatgaaggaactgggtattagcagcctgatccgcgttaaaaaataccgttcatataaagg

SEQ ID NO: 496474 - DNA, 75 bp, synthetic construct
  source 1..75: mol_type = other DNA
tggctgggctgcatttttccctctcctcgcaaacgctatggcaaggtgctggggcgctttctggaattatattga

SEQ ID NO: 496475 - DNA, 75 bp, synthetic construct
  source 1..75: mol_type = other DNA
ctgatgtgggcagtactggcgtttttactcaactacgtgcccaatatcggcgcggtaatttccgccgtaccgcca

SEQ ID NO: 496476 - DNA, 75 bp, synthetic construct
  source 1..75: mol_type = other DNA
ttaccttcaccacagcgctaatgaccgggctttccggggcaatggcgagcgtgcttttgctggtgatggccgttg

SEQ ID NO: 496477 - DNA, 75 bp, synthetic construct
  source 1..75: mol_type = other DNA
tatgctgccgaagtttaataaggagctgacgcgcaaactttttaaattgcaggagatgttgccttttctgaattt

SEQ ID NO: 496478 - DNA, 75 bp, synthetic construct
  source 1..75: mol_type = other DNA
agtgatttgctttgatcccagctatgacagttacgcgcccgccatcgcgctttcggggggaatagtgaaacgtat

SEQ ID NO: 496479 - DNA, 75 bp, synthetic construct
  source 1..75: mol_type = other DNA
acctgtcgcaaggctttcctgattttgatggtccgcgctatttgcaggagcggctggcgtaccacgttgcccagg

SEQ ID NO: 496480 - DNA, 75 bp, synthetic construct
  source 1..75: mol_type = other DNA
gaacttttgaacgcgtttttaaacaagaatgcgtcacccaaaaaattgaaagacggttacggctacgccttccgc

SEQ ID NO: 496481 - DNA, 75 bp, synthetic construct
  source 1..75: mol_type = other DNA
tcttaatatgttaactgagaatgatatcctgttattaagagcattatttctcaacaatatcacggacgcggacgc

SEQ ID NO: 496482 - DNA, 75 bp, synthetic construct
  source 1..75: mol_type = other DNA
atgggctttagggatgcccgttcatctggtaacgactgattttctgttatgggcatctggtaattcttcagagtt

SEQ ID NO: 496483 - DNA, 75 bp, synthetic construct
  source 1..75: mol_type = other DNA
aagaagtgtcgcagaggcaaaacttaaccttgaagctgttgaagcaaagctatacgacacagagcgtaagaactt

SEQ ID NO: 496484 - DNA, 75 bp, synthetic construct
  source 1..75: mol_type = other DNA
aagcgattcacaaatcggtatatatacaactgacagtaatactctgaaggatggattgtgtagccaagcccacat

SEQ ID NO: 496485 - DNA, 75 bp, synthetic construct
  source 1..75: mol_type = other DNA
gtgaaaaggcatctctttccctatagccgctattttacgctgagtacggaaagtatcagcgacgaacaatcccag

SEQ ID NO: 496486 - DNA, 75 bp, synthetic construct
  source 1..75: mol_type = other DNA
gctcaggtgaaagggcatctctttccctatagccgctattttacgctgagtacggaaagtatcagcgacgaacaa

SEQ ID NO: 496487 - DNA, 75 bp, synthetic construct
  source 1..75: mol_type = other DNA
ggaattatctgacacgttgtggtcataaattcctatggttaaaaataaaccctgtaccgccaggatataccggtt

SEQ ID NO: 496488 - DNA, 75 bp, synthetic construct
  source 1..75: mol_type = other DNA
cggaccatctgctgaccaccggcagcctgtttgcaaatcttgccaacaactacgacaagtttaactacaccaatc

SEQ ID NO: 496489 - DNA, 75 bp, synthetic construct
  source 1..75: mol_type = other DNA
gataaatattgctatcgcgataacagctacaaacaggcgggatctatcgacggtagccagatgttccacggtccg

SEQ ID NO: 496490 - DNA, 75 bp, synthetic construct
  source 1..75: mol_type = other DNA
ggatgtgttagtcaaagcgagcgtcgggcagtatctggcaggggataaaggcggtacgctggagattgccaaacg

SEQ ID NO: 496491 - DNA, 75 bp, synthetic construct
  source 1..75: mol_type = other DNA
attatttactgggcgagacggcaaagcgcacaggagctggcgagccatgccagagcctacggtgactggctggca

SEQ ID NO: 496492 - DNA, 75 bp, synthetic construct
  source 1..75: mol_type = other DNA
gcgcacaggagctggcgagtcacgccagagcctacagcgactggctggcaaatccgctgcccgtgggaggtcgct

SEQ ID NO: 496493 - DNA, 75 bp, synthetic construct
  source 1..75: mol_type = other DNA
ggcaatggttaccagagtttgttgcgcgttgtcgtcagtatgacagctttggtttttacgcggcactaagccagt

SEQ ID NO: 496494 - DNA, 75 bp, synthetic construct
  source 1..75: mol_type = other DNA
atgacaccagaaattatcctgcaacgcacaggtattgacataaacaatgtcgaacagggagatgatgcatggcaa

SEQ ID NO: 496495 - DNA, 75 bp, synthetic construct
  source 1..75: mol_type = other DNA
cagaaatgaagctgattgactgcatggcgaaggtcagggcgtggacgccggagatgcgtgccggaagtggtgtgg

SEQ ID NO: 496496 - DNA, 75 bp, synthetic construct
  source 1..75: mol_type = other DNA
tactggcgctgggcattagcgcggcctgctacggcgaaacgtatcctgcgcctatcgggccgtcgcaatcagatt

SEQ ID NO: 496497 - DNA, 75 bp, synthetic construct
  source 1..75: mol_type = other DNA
cctcttcgagttcactactgacgtgaaagtcacggagtctccgatcctgttccgtgacgagagcatgcgcactgc

SEQ ID NO: 496498 - DNA, 75 bp, synthetic construct
  source 1..75: mol_type = other DNA
gagatggtgccggagttcatcgacaaaatggacgaagcactggcggaaattggttttgtatttggagaacaatgg

SEQ ID NO: 496499 - DNA, 75 bp, synthetic construct
  source 1..75: mol_type = other DNA
tgaaaaatacatggaggtttttgacgaaatggtaccggagttcatcgaaaaaatggatgaggcactggctgaaat

SEQ ID NO: 496500 - DNA, 75 bp, synthetic construct
  source 1..75: mol_type = other DNA
acggcatggtttggctatcaaacacgtgggcgaagttgccgaattgtttatgtggcggcatatggcgctgacgtc

SEQ ID NO: 496501 - DNA, 75 bp, synthetic construct
  source 1..75: mol_type = other DNA
gagaagtcgccggaactcacggtgttacccgacctggcggcgcggcgctgaatgccggacaagtttttgccgtgc

SEQ ID NO: 496502 - DNA, 75 bp, synthetic construct
  source 1..75: mol_type = other DNA
caggagctatcctcgcaaccggttcccgcgcccataacccgtgggggctggcaattgtcactgcgcccaatgtgg

SEQ ID NO: 496503 - DNA, 75 bp, synthetic construct
  source 1..75: mol_type = other DNA
ataatcaacacatgaacggcggcattgaggtggatatctgggggcaaacctctctacccggctgttttgccgtgg

SEQ ID NO: 496504 - DNA, 75 bp, synthetic construct
  source 1..75: mol_type = other DNA
tactggcaacgggcggaccgggcgagctttatcgcgacagtgtttatccgcataaatgctttggctcgctggggc

SEQ ID NO: 496505 - DNA, 75 bp, synthetic construct
  source 1..75: mol_type = other DNA
acaacacggtttaaccatcaatcacgcaggcgaaattgccgaactatttatgtggcggcatatggcgctgacttc

SEQ ID NO: 496506 - DNA, 75 bp, synthetic construct
  source 1..75: mol_type = other DNA
cgttgcaatattccgtgggccgccgccttaacccggttaacatccgcgcgctgatgacagcaggcaccctctgtt

SEQ ID NO: 496507 - DNA, 75 bp, synthetic construct
  source 1..75: mol_type = other DNA
aatgtcatcgcccgttttcgccgcacctcgtggagtctggttgaggcgtcaatggatcttggggccaatggctgg

SEQ ID NO: 496508 - DNA, 75 bp, synthetic construct
  source 1..75: mol_type = other DNA
cattctggcgttagtcatcattgccgcgtgggcgctgatgttaaaaggtattaacgccagaccccagaggcaacc

SEQ ID NO: 496509 - DNA, 75 bp, synthetic construct
  source 1..75: mol_type = other DNA
atgagccagcttgatgaggccatccttgatgcactgacacacgttactttcccaaagggttttgcacaggcagaa

SEQ ID NO: 496510 - DNA, 75 bp, synthetic construct
  source 1..75: mol_type = other DNA
gctggtgggcaatgatgccaacgcgcccgcacttgagatcgcgctcggtcagttaacggttgaatttgaaagcga

SEQ ID NO: 496511 - DNA, 75 bp, synthetic construct
  source 1..75: mol_type = other DNA
gtagatgaagaagcaaagttttttaatccatttccaccaagagcgtttgaaaataaacctctttataatgaggag

SEQ ID NO: 496512 - DNA, 75 bp, synthetic construct
  source 1..75: mol_type = other DNA
caaaccttccgctacgtagtgttgccgaatctcagttcggcgctactggcaggaggaatgctggcgtttgccttg

SEQ ID NO: 496513 - DNA, 75 bp, synthetic construct
  source 1..75: mol_type = other DNA
ggtatcgtgatgctggctaacaaaaactatcccaatccagcgagagtcgccgcctggcagattctcaacgctcta

SEQ ID NO: 496514 - DNA, 75 bp, synthetic construct
  source 1..75: mol_type = other DNA
ccaggaacacaacgtctgtatgccaactccagtatcggtttgttcggcgcactggctgtgaagccgtctggtttg

SEQ ID NO: 496515 - DNA, 75 bp, synthetic construct
  source 1..75: mol_type = other DNA
atttgtaacgcgttgccgtcagtatgacagctttggtttttacgcgacactaagccagttattgctggtgctggt

SEQ ID NO: 496516 - DNA, 75 bp, synthetic construct
  source 1..75: mol_type = other DNA
aaacagtggaacgggatcacactattacatctcgcaacctacaccgctggcggcctgccattgcaggtgccggat

SEQ ID NO: 496517 - DNA, 75 bp, synthetic construct
  source 1..75: mol_type = other DNA
tgtcttccagccactcaaactcacccatacgtggattaatgtgccgcctgcagaagaaaagaattacgcctgggg

SEQ ID NO: 496518 - DNA, 75 bp, synthetic construct
  source 1..75: mol_type = other DNA
cgttagatgctgaagcttacggtgtgaaatcgacgattgaagatatggcccgctggctgcaaagcaatatgaatc

SEQ ID NO: 496519 - DNA, 75 bp, synthetic construct
  source 1..75: mol_type = other DNA
tcatttattttattcatccacaacttgcctttgctcgtccatcagaagagttagtggacatacaaaaatatattt

SEQ ID NO: 496520 - DNA, 75 bp, synthetic construct
  source 1..75: mol_type = other DNA
gttttgagcgagaagatatctacaatgccctgctatggctggaaaaacttgctgattatcaggaagggttggcag

SEQ ID NO: 496521 - DNA, 75 bp, synthetic construct
  source 1..75: mol_type = other DNA
ttgaacgcttcacagcacttttcgacgcgcatcatatgaacattgcggagctggtgtcgcgcacgcaacctgctg

SEQ ID NO: 496522 - DNA, 75 bp, synthetic construct
  source 1..75: mol_type = other DNA
aatgatgtttccaggatggcaaagtcaggtgctgggcgtcagtcaattgccagtcaggccgctaatgtgtccgaa

SEQ ID NO: 496523 - DNA, 75 bp, synthetic construct
  source 1..75: mol_type = other DNA
tgccgaaaaggtggtcgcggttgttcttccggttaatgctgccatggtagttacgttgcaatattccgtgggccg

SEQ ID NO: 496524 - DNA, 75 bp, synthetic construct
  source 1..75: mol_type = other DNA
cacggaagatattggctccgccattgatgagtattttgctggtcaggctgttcagcaacaaacagttaatcaggc

SEQ ID NO: 496525 - DNA, 75 bp, synthetic construct
  source 1..75: mol_type = other DNA
gaaaaggcagcatgggatagcgtccgctccacgatgcctgacgcaaaggccagaatgtcaaacctgaacgctaca

SEQ ID NO: 496526 - DNA, 75 bp, synthetic construct
  source 1..75: mol_type = other DNA
ttgatgcaggggatctataccactcaggatggacgcagtgatgtggccatcagctgttgctgccaggtgagcggt

SEQ ID NO: 496527 - DNA, 75 bp, synthetic construct
  source 1..75: mol_type = other DNA
tccgcctgatgtgtaaggcacacaagcatggtcgcttaggtatggcttccgatttagggatgactatcgaccagt

SEQ ID NO: 496528 - DNA, 75 bp, synthetic construct
  source 1..75: mol_type = other DNA
cactctctgcggcgcggcggcgttgtttattgctgcgcttatcagcacagcgcaattatttaagctgcaagtggt

SEQ ID NO: 496529 - DNA, 75 bp, synthetic construct
  source 1..75: mol_type = other DNA
ttggtagcgatgaattcaatcgcttgtcgagagctggtattgtcgcctcgttaagcggtatgaatgaatatgaat

SEQ ID NO: 496530 - DNA, 75 bp, synthetic construct
  source 1..75: mol_type = other DNA
gaaagcgcgacgccaacggctggcagggcgcgctatttccgtgggaaagcgcgcgcagcggcgaagaagagacgc

SEQ ID NO: 496531 - DNA, 75 bp, synthetic construct
  source 1..75: mol_type = other DNA
gcccgaagtttactgcgttatcgctggcacaacttgcctggcgcgcaggagaaagcgcgcgtagcggcgaagaag

SEQ ID NO: 496532 - DNA, 75 bp, synthetic construct
  source 1..75: mol_type = other DNA
ggatgcagaaaacgaatgttagtcgcgccgttcgcgcgctactggatgttggggtgatctttgagggacctaaag

SEQ ID NO: 496533 - DNA, 75 bp, synthetic construct
  source 1..75: mol_type = other DNA
gttgcccgggaaaatctgctgcaggaacgacttcagcagatggagcaggatatggttcgtgacctgcagaaagag

SEQ ID NO: 496534 - DNA, 75 bp, synthetic construct
  source 1..75: mol_type = other DNA
agcgctgcgacatgcaccccgccgaacagattgcgggcttccggacgctggaaggtgaaggtaaaacccccgcgc

SEQ ID NO: 496535 - DNA, 75 bp, synthetic construct
  source 1..75: mol_type = other DNA
gcataacggtgagtggaagacactgagcagtgacaaagtggggaaaacgggattttttgagaacgtgctagcgaa

SEQ ID NO: 496536 - DNA, 75 bp, synthetic construct
  source 1..75: mol_type = other DNA
atgcagagcggttgttcagtacggcacgggagctgcgggacgtggcagctggccgtgctgttctccgccaggcgg

SEQ ID NO: 496537 - DNA, 75 bp, synthetic construct
  source 1..75: mol_type = other DNA
cgggcagagcaacatattgacctggcctatgccatcaccgcccacggtgcgcagggggcgagtgaaacctttgcc

SEQ ID NO: 496538 - DNA, 75 bp, synthetic construct
  source 1..75: mol_type = other DNA
atgacagacggacagtcagaaacggtgctgaccggtaatctggtgatggcgctttttaatcacgacaccagtcgc

SEQ ID NO: 496539 - DNA, 75 bp, synthetic construct
  source 1..75: mol_type = other DNA
atgccggtgtgggtaagaccacacagttccgggcggtgatgtcagccgtgaacatgctgccggagagtgagcgtc

SEQ ID NO: 496540 - DNA, 75 bp, synthetic construct
  source 1..75: mol_type = other DNA
ggtatcagcaaggatgacgggctgataaccctgcaggatgcggaaggtaacacgcggctgatttcgccccgggag

SEQ ID NO: 496541 - DNA, 75 bp, synthetic construct
  source 1..75: mol_type = other DNA
ccggactccgcgtctccggcggtgaccgcctgcaggtggcatccgtcagtgaagatgcgatgacggttgttgtgc

SEQ ID NO: 496542 - DNA, 75 bp, synthetic construct
  source 1..75: mol_type = other DNA
gagaaggggctgttcacatcaggaattcatgtgctcgatgagctgtccgtccgggcactcagtcgtgacatcatg

SEQ ID NO: 496543 - DNA, 75 bp, synthetic construct
  source 1..75: mol_type = other DNA
tacaggcagtgcactgatggccatgaaagatgccggggtgaacacgtatcgctggcagggcggagaacagcggcc

SEQ ID NO: 496544 - DNA, 75 bp, synthetic construct
  source 1..75: mol_type = other DNA
ccattgtgtccgggcagggcggtgcagccgggcagcgtgagcgggtggctgaactggtcatgatggcccgggaac

SEQ ID NO: 496545 - DNA, 75 bp, synthetic construct
  source 1..75: mol_type = other DNA
ttcgtggccctgcagggcagccgtaacggagagagcctgctggctgataatatgcaggatggtgtccggattgcc

SEQ ID NO: 496546 - DNA, 75 bp, synthetic construct
  source 1..75: mol_type = other DNA
tgaccggatgcgcttcacgaagagtgaccgggagcgtggttatgtggccaacagcgtctggacggtgacagcggt

SEQ ID NO: 496547 - DNA, 75 bp, synthetic construct
  source 1..75: mol_type = other DNA
acccgcacgcaggcgcccggggctgtttcactggaggggccggatgtgcagcaggcggtgacacaggccattgcc

SEQ ID NO: 496548 - DNA, 75 bp, synthetic construct
  source 1..75: mol_type = other DNA
gtaacggcaagtccgccggtatctggctgaacccactgaccacggatgacggaaacgggctgcggggattcagtg

SEQ ID NO: 496549 - DNA, 75 bp, synthetic construct
  source 1..75: mol_type = other DNA
ctgtggattttgctgtccgtcaggtggaggcgctggcttccacacgggtgatgacggacggacagtcagaaacgg

SEQ ID NO: 496550 - DNA, 75 bp, synthetic construct
  source 1..75: mol_type = other DNA
gaactggtcatgatggcccgggagcagggtaagcgtaaactgaccgccgtatgtagccatcagacgagaattggt

SEQ ID NO: 496551 - DNA, 75 bp, synthetic construct
  source 1..75: mol_type = other DNA
ttccggtgacagtgtcacgctttctgacggactgcagacccgggtgattcgccccggtcaggagcaggcagaaca

SEQ ID NO: 496552 - DNA, 75 bp, synthetic construct
  source 1..75: mol_type = other DNA
gtgcgtcgtatgaggcagaaaagagcattcttcgccatattctcgaaggtaaggaggcggtcacgccgctgatgg

SEQ ID NO: 496553 - DNA, 75 bp, synthetic construct
  source 1..75: mol_type = other DNA
acagtgcgacggtgtttgcctccgtcacacagatggcaatggacaacgccaccctgaacggtctggcccgcagcg

SEQ ID NO: 496554 - DNA, 75 bp, synthetic construct
  source 1..75: mol_type = other DNA
aaaatggcagagaacaaacctgacctgccggatggcaaaacagagcaggctgtcagggaaattgccgggcaggag

SEQ ID NO: 496555 - DNA, 75 bp, synthetic construct
  source 1..75: mol_type = other DNA
ccgcagccgtatgtggcactgccggcgtttgaccgtaacggcaagtcagcaggtatctggctgaacccactgacc

SEQ ID NO: 496556 - DNA, 75 bp, synthetic construct
  source 1..75: mol_type = other DNA
ggaagcggtccgggaggttgcccgggaaaatctgctgcaggagcgtctgcagcagatggagcgggatatggtccg

SEQ ID NO: 496557 - DNA, 75 bp, synthetic construct
  source 1..75: mol_type = other DNA
gtcgtttgctgcagaaggaaccagttttgttgacctgggacgggaaatcgatgcgcagataaaacggggcgattt

SEQ ID NO: 496558 - DNA, 75 bp, synthetic construct
  source 1..75: mol_type = other DNA
gtaacggcaaatcagccggtatctggctgaacccgctgacctcggatgacggaaacgggctgcggggattcagcg

SEQ ID NO: 496559 - DNA, 75 bp, synthetic construct
  source 1..75: mol_type = other DNA
ccattgtgtccgggcaggggggagccgccgggcagcgtgagcgggtggctgagctggcaatgatggcccgggagc

SEQ ID NO: 496560 - DNA, 75 bp, synthetic construct
  source 1..75: mol_type = other DNA
aggaaaccgggttcgacatccgggcatatcgtgacgcggcggatcagcgtgcggagacccgcacgcaggcgcccg

SEQ ID NO: 496561 - DNA, 75 bp, synthetic construct
  source 1..75: mol_type = other DNA
tagatatcgccatgtttggtcgtatgctggcgaataaacctgagtttaatgttgaagccgcctgccaggtcgcgc

SEQ ID NO: 496562 - DNA, 75 bp, synthetic construct
  source 1..75: mol_type = other DNA
cggtttccggtgacagtgtcacactttctgacggtcagcagacccgtgtgattcgccccggtcaggagcgggcag

SEQ ID NO: 496563 - DNA, 75 bp, synthetic construct
  source 1..75: mol_type = other DNA
agacgcgcagtgctgccgatgtggtcatcatgaaggagattgtgcgtcagacgccggaactgcgggaggcggtat

SEQ ID NO: 496564 - DNA, 75 bp, synthetic construct
  source 1..75: mol_type = other DNA
aggtaaggaggcggtcacgccgctgatggagagagtacctggcgaactcatggagaaactgacatcaggacagcg

SEQ ID NO: 496565 - DNA, 75 bp, synthetic construct
  source 1..75: mol_type = other DNA
agcagtgataaagtggggaaaaccggtttttccgagaacgtgctcgcgaaccgtattgcgttcgggaaaatatat

SEQ ID NO: 496566 - DNA, 75 bp, synthetic construct
  source 1..75: mol_type = other DNA
gaatttgacgccgtaaaagcgctggcccatcaactggcagaagaaaagcgcgcgccaaaagaggaagatctcgcg

SEQ ID NO: 496567 - DNA, 75 bp, synthetic construct
  source 1..75: mol_type = other DNA
aatggcacccggcagttagatgtggcggtgcagcgtattacaacgcttcgcgaaaacatgaatacggtctacgaa

SEQ ID NO: 496568 - DNA, 75 bp, synthetic construct
  source 1..75: mol_type = other DNA
aaaaaacccgggtttaatgtagaagccgcctgccaggtcgcgcatgcgtttggtgtcagtgaaacgattgtcgaa

SEQ ID NO: 496569 - DNA, 75 bp, synthetic construct
  source 1..75: mol_type = other DNA
ggacgtggcggccggccgtgccgttctccgtcaggcagggctggccgggggagacagtcctgcacggtttattgc

SEQ ID NO: 496570 - DNA, 75 bp, synthetic construct
  source 1..75: mol_type = other DNA
ctccgtcaggcagggctggccgggggagacagtcctgcacggtttattgcacccgggcgcaaatatccgcagccg

SEQ ID NO: 496571 - DNA, 75 bp, synthetic construct
  source 1..75: mol_type = other DNA
tcgctgtgacctgttggtgattaaacccgatcagtaccagacacctgtcgaactggatgatgaagaagacgatta

SEQ ID NO: 496572 - DNA, 75 bp, synthetic construct
  source 1..75: mol_type = other DNA
cattcatctggcccttcctgtggtggaaagtaaaaatctggccttcagccaggtggatctgctgacagaggcgaa

SEQ ID NO: 496573 - DNA, 75 bp, synthetic construct
  source 1..75: mol_type = other DNA
ctgccggatggcaaaacagagcaggctgtcagggaaattgccgggcaggagcgtgaccgggctgacataactgaa

SEQ ID NO: 496574 - DNA, 75 bp, synthetic construct
  source 1..75: mol_type = other DNA
gtttttacccgtcttctggagggaaggctgccggacggagcggatctaagccgcatgcaggatggtagtaacagg

SEQ ID NO: 496575 - DNA, 75 bp, synthetic construct
  source 1..75: mol_type = other DNA
gatggccatgctcgggggggacaaacgtcttattgaagcacataaccaggccgtggattttgctgtccgtcaggt

SEQ ID NO: 496576 - DNA, 75 bp, synthetic construct
  source 1..75: mol_type = other DNA
ccggctttgagtcagcctacgtggccctgtcgcgtatgaagcagcatgtgcaggtgtacaccgataaccgtcagg

SEQ ID NO: 496577 - DNA, 75 bp, synthetic construct
  source 1..75: mol_type = other DNA
tttccggacgctcacagactatccgggaggccgtcggggaagacgcctcgctgaaatcccgggatgtggcggcgc

SEQ ID NO: 496578 - DNA, 75 bp, synthetic construct
  source 1..75: mol_type = other DNA
cgtctctccacctgggagaaaaacccggatgcccttgccctggtggataatgtgtatcaccggattgccggtatc

SEQ ID NO: 496579 - DNA, 75 bp, synthetic construct
  source 1..75: mol_type = other DNA
ggcattaatgaaaacatgacgcacgtagaaaaaggtctgccagaagaggtgattcctgatttggcggagcactta

SEQ ID NO: 496580 - DNA, 75 bp, synthetic construct
  source 1..75: mol_type = other DNA
tcgctgcgatctgttggtcattaaacctgaccagtatcagacacccgttgaactggatgacgaagaagacgatta

SEQ ID NO: 496581 - DNA, 75 bp, synthetic construct
  source 1..75: mol_type = other DNA
ccggacgctcacaggctatccgggaggccgtcggggaagacgcctcgctgaaatcccgggatgtggcggcactgg

SEQ ID NO: 496582 - DNA, 75 bp, synthetic construct
  source 1..75: mol_type = other DNA
cggggaggtttttacgggctgctcaacggcgcgtaatcctcttcaaatcagaatgacatgctcacattactctct

SEQ ID NO: 496583 - DNA, 75 bp, synthetic construct
  source 1..75: mol_type = other DNA
atgacaacatttattcagcttcatttgttaaccgcttaccctgctgccaaccttaaccgtgatgataccggtgcg

SEQ ID NO: 496584 - DNA, 75 bp, synthetic construct
  source 1..75: mol_type = other DNA
ccattgcaacagtcactgaaagaccttgagcgggcttacaaaaacttcttccggaagcgggctgcttttccctga

SEQ ID NO: 496585 - DNA, 75 bp, synthetic construct
  source 1..75: mol_type = other DNA
tgccgggtgtgtggggcaacgtgaacctgcaccggtagaagaagtgaaaccagcgccggaacaaccagccgagcc

SEQ ID NO: 496586 - DNA, 75 bp, synthetic construct
  source 1..75: mol_type = other DNA
acagtgccgacgatcccgcagcagccggggccgattgagcatgaagatcaaaccgcaccgcctgcgccgcatgtt

SEQ ID NO: 496587 - DNA, 75 bp, synthetic construct
  source 1..75: mol_type = other DNA
tctggccaaaacttgagccattactaaaagaatatccggatataaatctggaattaattgatgattatactttaa

SEQ ID NO: 496588 - DNA, 75 bp, synthetic construct
  source 1..75: mol_type = other DNA
cccgagacctacgcgaccgcctaaaacccgttctggaggctctagggccgctcaaccgcgatatgcaggccaagg

SEQ ID NO: 496589 - DNA, 75 bp, synthetic construct
  source 1..75: mol_type = other DNA
aaatggcttcctggctggttgagtggaaaaaggccactgaaacgcaatggcttaaagattctcccagtcacagcc

SEQ ID NO: 496590 - DNA, 75 bp, synthetic construct
  source 1..75: mol_type = other DNA
cgctgggtgcctgactggatgtgtgctccacgtccacaggcagagacggaaaccacggaataccgtgacaaccag

SEQ ID NO: 496591 - DNA, 75 bp, synthetic construct
  source 1..75: mol_type = other DNA
gctgatttcgccccgggaggcggtggctgaaggtgtcacactgtacaccccggacaccatccgggtggggaccgg

SEQ ID NO: 496592 - DNA, 75 bp, synthetic construct
  source 1..75: mol_type = other DNA
cggcaggctgaagaggccatccgccgtgaaacggaacgccgtgcggatgaaattgtccgtaaaatggcagagaac

SEQ ID NO: 496593 - DNA, 75 bp, synthetic construct
  source 1..75: mol_type = other DNA
acaaccgtactaacggttcgctgaatgccgcagaagcgaccgaaacgctgcgaaatgcgctggctaataacggta

SEQ ID NO: 496594 - DNA, 75 bp, synthetic construct
  source 1..75: mol_type = other DNA
agatcaaacggcaccgcctgcgccgcatattcgccattatgactggaatggcgcaatgcagccgatggtcagtaa

SEQ ID NO: 496595 - DNA, 75 bp, synthetic construct
  source 1..75: mol_type = other DNA
aagcgggctgcttttccccgattcaaaaagcggggacagaatgatgcattccgctacccgcagggcgtaaagctc

SEQ ID NO: 496596 - DNA, 75 bp, synthetic construct
  source 1..75: mol_type = other DNA
accgcgtcctccctaccatctttactaccccagccgtctgcaacattctccggcatttgcacttgtgctcgaagc

SEQ ID NO: 496597 - DNA, 75 bp, synthetic construct
  source 1..75: mol_type = other DNA
gatttttgcgcgatcctgccgtcaggctctattcttaacgttatgaataaactcattgaactcagacgcgccaaa

SEQ ID NO: 496598 - DNA, 75 bp, synthetic construct
  source 1..75: mol_type = other DNA
ggcattgattcgacgccacgaaccggcgttgctgattggcaactggtttagccagccagaaaacgcccgccgcgt

SEQ ID NO: 496599 - DNA, 75 bp, synthetic construct
  source 1..75: mol_type = other DNA
aaggatgccggggttaacatatatcgctggcagggcggagagcaacgaccggcaaccatcatcagtgaaccggac

SEQ ID NO: 496600 - DNA, 75 bp, synthetic construct
  source 1..75: mol_type = other DNA
tcgtcatcaggtgctgctggatactctgatcgcacaactgatcgccctgctccagcgcgataaatcacgcaaatt

SEQ ID NO: 496601 - DNA, 75 bp, synthetic construct
  source 1..75: mol_type = other DNA
gcttgatgatattagccgcgatcgcacgcatcagatccgccatacgtttgatcgcgccacttttgcgctgatcga

SEQ ID NO: 496602 - DNA, 75 bp, synthetic construct
  source 1..75: mol_type = other DNA
gtattcagcgtctgcttaagcgcgcggtgcatcgggcgattgataaagtggatctttccggcaccagtgcgttaa

SEQ ID NO: 496603 - DNA, 75 bp, synthetic construct
  source 1..75: mol_type = other DNA
aaatcatccgttagcgtgcaaaatagcgttatcagaaaagccatgaaagatttggaagctattgaatatcttaaa

SEQ ID NO: 496604 - DNA, 75 bp, synthetic construct
  source 1..75: mol_type = other DNA
ccgcccttgatgggctggggcttgcttatctgccgctagatacggtggagaattaccttgaaaacggaatgttag

SEQ ID NO: 496605 - DNA, 75 bp, synthetic construct
  source 1..75: mol_type = other DNA
tgccggagttcgtttgggcgaacaggttgatatggatatgatttccctgccccttgccagggacttccgttttgc

SEQ ID NO: 496606 - DNA, 75 bp, synthetic construct
  source 1..75: mol_type = other DNA
ccgtggaatcccggtgccatcaccggtggccgcgtgtggggggatatcccggacaacagcgtccagccgggagcc

SEQ ID NO: 496607 - DNA, 75 bp, synthetic construct
  source 1..75: mol_type = other DNA
gcaggctgaagaggccatccgccgtgaaacggaacgccgtgcggatgaaattgtccgtaaaatggcagagaacaa

SEQ ID NO: 496608 - DNA, 75 bp, synthetic construct
  source 1..75: mol_type = other DNA
ctcgttcagttttattaatggcgagcagctgcagcgttttgttaagcagattatgagcaatgctgccggttactt

SEQ ID NO: 496609 - DNA, 75 bp, synthetic construct
  source 1..75: mol_type = other DNA
gagacagtcctgcacggtttattgcaccggggcgcaaatatccgcagccgtatgtggcactgccggcgtttgacc

SEQ ID NO: 496610 - DNA, 75 bp, synthetic construct
  source 1..75: mol_type = other DNA
ctggcgctggcgatgttctttgcggtatgggagtctgcaaaatggcgtcctgtcgcgtgggcaggttcagcgctg

SEQ ID NO: 496611 - DNA, 75 bp, synthetic construct
  source 1..75: mol_type = other DNA
ccgtttacctggtacattgtggcagcagcgatctatctggtgattaccctgctcagtcagtacattctcaaacgc

SEQ ID NO: 496612 - DNA, 75 bp, synthetic construct
  source 1..75: mol_type = other DNA
atgaaaagacttcacaagaggttcctgttagctacgttttgcacgttattcacagcaactctccaggccgccgat

SEQ ID NO: 496613 - DNA, 75 bp, synthetic construct
  source 1..75: mol_type = other DNA
cactccgaccgcgcatagaggcattttcatcgctgacaggccacatggcctcgcagggccggagggggactggtg

SEQ ID NO: 496614 - DNA, 75 bp, synthetic construct
  source 1..75: mol_type = other DNA
aagcatcgccacccgtacccaggaaccatttacctggtacattgtggcggcggcgatttacctggtgattaccct

SEQ ID NO: 496615 - DNA, 75 bp, synthetic construct
  source 1..75: mol_type = other DNA
cggcgatttacctggtgatcaccctgctcagtcagtacattctcaaacgcattgacctacgcgcgacacgttttg

SEQ ID NO: 496616 - DNA, 75 bp, synthetic construct
  source 1..75: mol_type = other DNA
agaaggcgatgctgaaaggcgaggctttcccggatgtccccatgacactgtatgaagccattgtccgagactata

SEQ ID NO: 496617 - DNA, 75 bp, synthetic construct
  source 1..75: mol_type = other DNA
ataatcctgacagcggtgtggtggtgagaatcgccggtgaaggtcgtccgtggaatcccggtgccatcaccggtg

SEQ ID NO: 496618 - DNA, 75 bp, synthetic construct
  source 1..75: mol_type = other DNA
agtaaggatgacgggctgataaccctggaggatgcggaaggtaacacgcggctgatttcgccccgggaggcggtg

SEQ ID NO: 496619 - DNA, 75 bp, synthetic construct
  source 1..75: mol_type = other DNA
aacaacctggttctgcatctggctggcacaatattactttgtcattaaccgattgtccgattgaaacaagtgcag

SEQ ID NO: 496620 - DNA, 75 bp, synthetic construct
  source 1..75: mol_type = other DNA
tttctaccgtattaagctgcctgagtatcttggcttctttgccggtaaacgctttgtgccgatcatttcaggcct

SEQ ID NO: 496621 - DNA, 75 bp, synthetic construct
  source 1..75: mol_type = other DNA
aattgtccggtgggaacgtcgagggtcactgccagcttcagcggggcagccgacagtaccggatattataaaaac

SEQ ID NO: 496622 - DNA, 75 bp, synthetic construct
  source 1..75: mol_type = other DNA
ctgggggagcagatacagcatgtgctggatgataaccccttctccggtcacctgtttattcttccgtggccgacg

SEQ ID NO: 496623 - DNA, 75 bp, synthetic construct
  source 1..75: mol_type = other DNA
cacggcctgaccagttgcgcgagcatgaacgtctgcgaaagctaggctttaccgtggtggtattagatagcaaaa

SEQ ID NO: 496624 - DNA, 75 bp, synthetic construct
  source 1..75: mol_type = other DNA
atggcctacgaacgtgaaagccttatcgaaaagcacctcgtcgccgaagtgaaaaaggctggcggggtcgccttt

SEQ ID NO: 496625 - DNA, 75 bp, synthetic construct
  source 1..75: mol_type = other DNA
taatacttcggttatttgcactattttatccctgttgaatttggttaagccggtgcagacgcgccgggaaacgca

SEQ ID NO: 496626 - DNA, 75 bp, synthetic construct
  source 1..75: mol_type = other DNA
tggatacgcgaaaatccaaacagcacgtcgatcctgaagtcagaatggctgaatggatgcagacgctgaaggaaa

SEQ ID NO: 496627 - DNA, 75 bp, synthetic construct
  source 1..75: mol_type = other DNA
ccggacggacgccagaacgttagggatcaccgccccgctacgcatgtcaggcgatctcagcggcactccggggat

SEQ ID NO: 496628 - DNA, 75 bp, synthetic construct
  source 1..75: mol_type = other DNA
gtttccagtcgccatatacatctttcaacagcggattatttgcgtctttttcctgaacaaccgattagcgagaaa

SEQ ID NO: 496629 - DNA, 75 bp, synthetic construct
  source 1..75: mol_type = other DNA
aaggcgtggaacgttaacccacttctcactgcaagaggcgatgtgcgagctggaaggcggcgcaggatgtgtgct

SEQ ID NO: 496630 - DNA, 75 bp, synthetic construct
  source 1..75: mol_type = other DNA
aaaacacgcgacacgcaatcgcgccaatggcgagttgttttatggacggcgtggaacgttaacccatttctcctt

SEQ ID NO: 496631 - DNA, 75 bp, synthetic construct
  source 1..75: mol_type = other DNA
aatggcgagttgttctatggacggcgcggaacgttaacccatttctccttacaagaagcgatgtgcgaactggaa

SEQ ID NO: 496632 - DNA, 75 bp, synthetic construct
  source 1..75: mol_type = other DNA
gggaaaatgcctatctgatgggccaaatggtcgatgcagataccgcctatataaccagccgtggtctgcgtactt

SEQ ID NO: 496633 - DNA, 75 bp, synthetic construct
  source 1..75: mol_type = other DNA
gcccacaaggaaagattgatttcagcggcacattgattcgcctgcatattggtctggaaaacgtcgacgatctga

SEQ ID NO: 496634 - DNA, 75 bp, synthetic construct
  source 1..75: mol_type = other DNA
gtggtgccggatgccatcattatgatcgacaacacctgggcagccggtgtgctgtttaaggcgctggattttggc

SEQ ID NO: 496635 - DNA, 75 bp, synthetic construct
  source 1..75: mol_type = other DNA
cggtatgattctgtgagcatgacatcaaaagttacgacaaagctggataatcgcgtcctacaggattttctggca

SEQ ID NO: 496636 - DNA, 75 bp, synthetic construct
  source 1..75: mol_type = other DNA
gaaaaacgttcgacgcgcccatgaacgcaatcggattaaacgtctgacgcgcgaaagcttccgtctgcgccaaca

SEQ ID NO: 496637 - DNA, 75 bp, synthetic construct
  source 1..75: mol_type = other DNA
taccggatccgccgactctggtactgagcaccaagcgccagtggcacggaacggtaagaaaaacggaacgtatcc

SEQ ID NO: 496638 - DNA, 75 bp, synthetic construct
  source 1..75: mol_type = other DNA
gagatcctcgcgggtgcgatggcgaatggtcatatcaatctgatggtggcaggtctggtcggtgcgtttatgacc

SEQ ID NO: 496639 - DNA, 75 bp, synthetic construct
  source 1..75: mol_type = other DNA
ccgtacccacggcctgttcctgatgaccccggaagttctgcatctggtgggtattgtcggggcggttacgctgct

SEQ ID NO: 496640 - DNA, 75 bp, synthetic construct
  source 1..75: mol_type = other DNA
aatgagcttgtcggcaaagacggcggcgcaatccagattgaaacatcaccgatgagcactctattcggaaaatga

SEQ ID NO: 496641 - DNA, 75 bp, synthetic construct
  source 1..75: mol_type = other DNA
ggtctggaaaaatgtaagtggaccattaacgcactcattaatcatcattacaaaatcgttgctgcctcctggcag

SEQ ID NO: 496642 - DNA, 75 bp, synthetic construct
  source 1..75: mol_type = other DNA
gcgcgacgctaacaaagacggtgtgttccagctatctgaaaagctcactgacgaagagatgaaacagtatgacta

SEQ ID NO: 496643 - DNA, 75 bp, synthetic construct
  source 1..75: mol_type = other DNA
cacgctggtgatgccggttatcaaagagaataccctgacagagggtaacaataaccactggaacctggtgctgcc

SEQ ID NO: 496644 - DNA, 75 bp, synthetic construct
  source 1..75: mol_type = other DNA
tgttacgcaaatgcccaagccccgtgtggatggtgaaagaccagccgtggccggaagggggtaaggcgctggtgg

SEQ ID NO: 496645 - DNA, 75 bp, synthetic construct
  source 1..75: mol_type = other DNA
actctgaagatttcgacttttatgaagaacgccctgcgcgcggctgggatattcgcgctgaagcctggctacccg

SEQ ID NO: 496646 - DNA, 75 bp, synthetic construct
  source 1..75: mol_type = other DNA
ttcctcggggcagaaattggtgggctaaatgcttttatctatcgtgtgggggcggctaaacccagcaacctgata

SEQ ID NO: 496647 - DNA, 75 bp, synthetic construct
  source 1..75: mol_type = other DNA
aagccgttcctgggtattgcctggttgctgaaacgcgatccgctgaactcaatgatgaacatcccggctgtcctt

SEQ ID NO: 496648 - DNA, 75 bp, synthetic construct
  source 1..75: mol_type = other DNA
gcgctggcattcgcactacttccgctggcggcggcctgtgcgcgtacgccattgtcgaattttaatgttggcgca

SEQ ID NO: 496649 - DNA, 75 bp, synthetic construct
  source 1..75: mol_type = other DNA
caccagtgcgttgatgctggagagtatgaccaaaaacgatcgtcatcaggtgctgctcgatacgctgatcgcaca

SEQ ID NO: 496650 - DNA, 75 bp, synthetic construct
  source 1..75: mol_type = other DNA
ccggaaatggcagcgcgagccgatgccgtaaaaagctatctgaaagaagatgaagcttttaatcgctatctcagt

SEQ ID NO: 496651 - DNA, 75 bp, synthetic construct
  source 1..75: mol_type = other DNA
ctcaactgcgggagaaactcgctcgtgtcagcgccgtgattgacgccaaaatcctccatcgccagccgaaatatc

SEQ ID NO: 496652 - DNA, 75 bp, synthetic construct
  source 1..75: mol_type = other DNA
aaaccatatcaccattatctcgcaagaatttcataatcaacgcgccatctggctggcaaaacagtacggcatcga

SEQ ID NO: 496653 - DNA, 75 bp, synthetic construct
  source 1..75: mol_type = other DNA
gcgcgattctggcagaaaaagccgatgcgccgttgattcagtgggatgcaacctccgcaacgctgaaagctctcg

SEQ ID NO: 496654 - DNA, 75 bp, synthetic construct
  source 1..75: mol_type = other DNA
ggcgacgctgatgctgctgggcggtgcggtcggtaaatctgcgcagttgccgttgcagacatggcttgccgacgc

SEQ ID NO: 496655 - DNA, 75 bp, synthetic construct
  source 1..75: mol_type = other DNA
atgtacgcttcctggtatatgcgcggtgaagagggctactctcgcttcttcgcttacaccaacctgttcatcgcc

SEQ ID NO: 496656 - DNA, 75 bp, synthetic construct
  source 1..75: mol_type = other DNA
ggcgacgctgatgctgctgggcggtgcggttggtaaatctgcgcagctgccgttgcagacatggcttgccgacgc

SEQ ID NO: 496657 - DNA, 75 bp, synthetic construct
  source 1..75: mol_type = other DNA
atgggatattcagctgctaaagtgtccactcatattgagcttgagaaaaaccgtggttactggcgggcaaaaggg

SEQ ID NO: 496658 - DNA, 75 bp, synthetic construct
  source 1..75: mol_type = other DNA
gcgacgttggattacctcgaacagttacgcagaaaagaacccaatgcagaaaatagcgttgatattagtcaacgt

SEQ ID NO: 496659 - DNA, 75 bp, synthetic construct
  source 1..75: mol_type = other DNA
ctgacggcaataacatgctgatgtgggcgacgttgatgctgctgggcggtgcggtcggtaaatctgcgcagttgc

SEQ ID NO: 496660 - DNA, 75 bp, synthetic construct
  source 1..75: mol_type = other DNA
caggctgatggtgtagatggtgtggtgatggatctcgatattactgatagctttggcgacaacactgaccgcaac

SEQ ID NO: 496661 - DNA, 75 bp, synthetic construct
  source 1..75: mol_type = other DNA
gtactaaaggatgtgcgattgatatcggtacggtgattgataacgacaactgtaccagtaagttttcgcgctttt

SEQ ID NO: 496662 - DNA, 75 bp, synthetic construct
  source 1..75: mol_type = other DNA
ctgcctggcgcattcatcacagtcgactgattcgctttgatggcgtcacgttgccatttcagcagaagatgaccg

SEQ ID NO: 496663 - DNA, 75 bp, synthetic construct
  source 1..75: mol_type = other DNA
gactgatttgcgagaaaattctgacgtaaccggcatcggggcatccattaccgacgaggacatagagaatgccga

SEQ ID NO: 496664 - DNA, 75 bp, synthetic construct
  source 1..75: mol_type = other DNA
cccataaaattgaatgataatatgtctattgtttcaataaatgcaatactaaacaaacttttagttgtagcgcat

SEQ ID NO: 496665 - DNA, 75 bp, synthetic construct
  source 1..75: mol_type = other DNA
gtgggctggcgggcagtacgctgtctgttgatgcggcagtgcgcaacatggtcgagttgacgggcgtaacgcctg

SEQ ID NO: 496666 - DNA, 75 bp, synthetic construct
  source 1..75: mol_type = other DNA
gcaccacaaaaattgtttcctatacttcagctaataactctaataggtatcagttcgttattttcttttatgtca

SEQ ID NO: 496667 - DNA, 75 bp, synthetic construct
  source 1..75: mol_type = other DNA
atgcaattaaataccagacagacccggatttttaagcttgccaacttactgggcaccggcaagcccgtttccgct

SEQ ID NO: 496668 - DNA, 75 bp, synthetic construct
  source 1..75: mol_type = other DNA
cagctggaatttgcgtatcgttcatcgtttttggtgggcgccggtgtagacgctatggccgatgatatgacccgc

SEQ ID NO: 496669 - DNA, 75 bp, synthetic construct
  source 1..75: mol_type = other DNA
cgaaaccttctgggatgagctcgctatatgggatggtcttaacgataacctcaaatggtcacgattatacggtgg

SEQ ID NO: 496670 - DNA, 75 bp, synthetic construct
  source 1..75: mol_type = other DNA
attgatgtttccattcaggccgctaccaaatatctggtggggcattcagatgcgatgattggcactgccgtgtgc

SEQ ID NO: 496671 - DNA, 75 bp, synthetic construct
  source 1..75: mol_type = other DNA
ccgatcgctccacggtggcaaccaacacaactaccgctcttgcaaccgcggtgcgtgatttgggcatgtcgccgg

SEQ ID NO: 496672 - DNA, 75 bp, synthetic construct
  source 1..75: mol_type = other DNA
cacgactaccgctctggcaaccgcggtgcgtgatttgggaatgtcgccggctgctgcgctgaccgatttgcgcga

SEQ ID NO: 496673 - DNA, 75 bp, synthetic construct
  source 1..75: mol_type = other DNA
tcctcaaactggcggcctggggcggcgtgctttttctccattttcccatcttgattatcgccgcctatgcgttta

SEQ ID NO: 496674 - DNA, 75 bp, synthetic construct
  source 1..75: mol_type = other DNA
actataaagcggggaccggagataacagcgatgtcagcattaatgccactcttaattatcagttcggcgttccgc

SEQ ID NO: 496675 - DNA, 75 bp, synthetic construct
  source 1..75: mol_type = other DNA
cgaatgaacatcccgagtgcgtgattaaagatacgcctgaagaagctatcgggctggaaaaatgtaaatggacca

SEQ ID NO: 496676 - DNA, 75 bp, synthetic construct
  source 1..75: mol_type = other DNA
ataattttgatgaatggttattgggtggaaatatattttatgattatgattttacccgaggacatcgccgtttag

SEQ ID NO: 496677 - DNA, 75 bp, synthetic construct
  source 1..75: mol_type = other DNA
caaagaaaaagatccgcttgatgtcaccctgtggttaaaagcggatgccaccaacgaacaccctgagtgcgtcat

SEQ ID NO: 496678 - DNA, 75 bp, synthetic construct
  source 1..75: mol_type = other DNA
gcgaacacatccaatgcagacattgtaataccggcgaccaaccgtgaagcggcgcaatcctatggtgcaaaagtg

SEQ ID NO: 496679 - DNA, 75 bp, synthetic construct
  source 1..75: mol_type = other DNA
ccaataccactaacgccgatatagagatcccggcaacgaacaaggacgcggcaacgaagtttagtgcccaggtaa

SEQ ID NO: 496680 - DNA, 75 bp, synthetic construct
  source 1..75: mol_type = other DNA
tcctcaaactggcggcctggggcggcgtggttttcctacattttcccatcctgattatcgccgcctatgcgttta

SEQ ID NO: 496681 - DNA, 75 bp, synthetic construct
  source 1..75: mol_type = other DNA
tctggcgttattaaccgcctttaaaaccatcaatctggagccgggattttcaccatcgtggtcggtcatgcgact

SEQ ID NO: 496682 - DNA, 75 bp, synthetic construct
  source 1..75: mol_type = other DNA
ctgttactgctgctgcccattgcgttgccgggcattgtcactggtctggcgctattactattaaccgcttttaaa

SEQ ID NO: 496683 - DNA, 75 bp, synthetic construct
  source 1..75: mol_type = other DNA
tgattatgatttatatgaaaggttttataaaaaagcaataattaattggagtcatgtttttggtaaaaataaaaa

SEQ ID NO: 496684 - DNA, 75 bp, synthetic construct
  source 1..75: mol_type = other DNA
atgtttattcttgaacagaaaactatcatcggtggagaacgctggtttacgccaatgaaggacttagaacctatt

SEQ ID NO: 496685 - DNA, 75 bp, synthetic construct
  source 1..75: mol_type = other DNA
tggtgaactggttaatggtgttgaggttgcactggaatatacggcagaacgagggatcgcgctgcttaagcagaa

SEQ ID NO: 496686 - DNA, 75 bp, synthetic construct
  source 1..75: mol_type = other DNA
aagtgattctggccgaagaagcaaagctcattaaaaaagataatgtgaattctgcttttttccagaccagtgttc

SEQ ID NO: 496687 - DNA, 75 bp, synthetic construct
  source 1..75: mol_type = other DNA
ctccagttagggaccgctgcaacacgagatgttggtgccgggttaattaatggcattccggacatgtcctcattc

SEQ ID NO: 496688 - DNA, 75 bp, synthetic construct
  source 1..75: mol_type = other DNA
caggtaacaaataccggtttttatgcccgctgccagatgtacgacggcagaccatcatcaaatgctttttcctgg

SEQ ID NO: 496689 - DNA, 75 bp, synthetic construct
  source 1..75: mol_type = other DNA
gaggcgggttttccggtagtcaggtcaatatatgaattgccattaagcgatgatgtactcgatgaggtacgcgag

SEQ ID NO: 496690 - DNA, 75 bp, synthetic construct
  source 1..75: mol_type = other DNA
caatatatgaattgccactaagtgaggatgtactcgatgaggtgcgcgaggaaatgcgatcgttaggagcttaca

SEQ ID NO: 496691 - DNA, 75 bp, synthetic construct
  source 1..75: mol_type = other DNA
ggaaatccgtgggattcggaaaacatggattggtaactccgaacctttcactgatatcaaacattacattcttat

SEQ ID NO: 496692 - DNA, 75 bp, synthetic construct
  source 1..75: mol_type = other DNA
gggcttcgatccggatcgtgaaccgccattcttcttctgcaaaccggcggatgccgttgttccggttgccgctgg

SEQ ID NO: 496693 - DNA, 75 bp, synthetic construct
  source 1..75: mol_type = other DNA
aggatgccggaacataccgcagtctgccggagccggaagcgatgctgacggaggcagaagaagaacgcctgaaca

SEQ ID NO: 496694 - DNA, 75 bp, synthetic construct
  source 1..75: mol_type = other DNA
taaaaaaggcagcgatgtcccactggaaaaggcccatgaatatgtctggggttatgccacaggccttgatatgac

SEQ ID NO: 496695 - DNA, 75 bp, synthetic construct
  source 1..75: mol_type = other DNA
aaaatactattgctgacattctcacataccttggtttgggagaagcggcgaaaagggatgtcggcacgggtaatg

SEQ ID NO: 496696 - DNA, 75 bp, synthetic construct
  source 1..75: mol_type = other DNA
gtgtctggcctcagtatggccgtgtggaaattcatggtgtgcttaaaacctggattggtgattcaaaacctttca

SEQ ID NO: 496697 - DNA, 75 bp, synthetic construct
  source 1..75: mol_type = other DNA
ggcccagtagtcaaaggtgatgtgatcacgggcaacgtcgagggcttaacccctatcgcggtgaagattgtctga

SEQ ID NO: 496698 - DNA, 75 bp, synthetic construct
  source 1..75: mol_type = other DNA
tcaaagtgaaacagatattccaatagtgatcgtttatggacccaaaggggaagataaagccagggcattagtgga

SEQ ID NO: 496699 - DNA, 75 bp, synthetic construct
  source 1..75: mol_type = other DNA
gccctgcagggcagccgtaacggagaaagcctgctggctgataatatgcaggatggcgtccggattgcccgtgat

SEQ ID NO: 496700 - DNA, 75 bp, synthetic construct
  source 1..75: mol_type = other DNA
acagcggcaggctgaagaggccatccgccgtgaaacggaacgccgtgcggatgaaattgtccgtaaaatggcaga

SEQ ID NO: 496701 - DNA, 75 bp, synthetic construct
  source 1..75: mol_type = other DNA
atccgccgtgaaacggaacgccgcgcagatgaaattgtcagaaaaatggcagagaacaaacctgacctgccggat

SEQ ID NO: 496702 - DNA, 75 bp, synthetic construct
  source 1..75: mol_type = other DNA
cgtaaaatggcagagaacaaacctgacctgccggacggcagaacagagctggctgtcagggatattgccgggcag

SEQ ID NO: 496703 - DNA, 75 bp, synthetic construct
  source 1..75: mol_type = other DNA
gttgcccgggaaaacctgctgcaggagcgactgcagcagatggagcgggatatggttcgtgacctgcagaaagag

SEQ ID NO: 496704 - DNA, 75 bp, synthetic construct
  source 1..75: mol_type = other DNA
tgttcagtacggcgcgggagctgcgggacgtggcggcagggcgtgccgttcttcgtcaggcggggcttgccgggg

SEQ ID NO: 496705 - DNA, 75 bp, synthetic construct
  source 1..75: mol_type = other DNA
acgggaaactcccttgtaatcaatttcccaattgcatttccgaatggttgtgttgattgttttgctatatttgag

SEQ ID NO: 496706 - DNA, 75 bp, synthetic construct
  source 1..75: mol_type = other DNA
gaagataaagccagggtattagtggattgttataataatgtcggtttccttgttgatgacttccatatccacctc

SEQ ID NO: 496707 - DNA, 75 bp, synthetic construct
  source 1..75: mol_type = other DNA
ggatcagaatctccgggctcccgtacccatgacatgggcatttatgatgcgtgaggcgggttttccagcagtcag

SEQ ID NO: 496708 - DNA, 75 bp, synthetic construct
  source 1..75: mol_type = other DNA
gtggccaacagcgtctggacggtgacagcggtttccggtgacagtgtcacgctatcggacggacagcagacccgg

SEQ ID NO: 496709 - DNA, 75 bp, synthetic construct
  source 1..75: mol_type = other DNA
cggccggaagtgccggtaattattataccgacaaggataattactatgtgctgggcagcatgggagaacgctggg

SEQ ID NO: 496710 - DNA, 75 bp, synthetic construct
  source 1..75: mol_type = other DNA
tggagaaaattgcctgatggaaccatcattcaaatgggaatatcagcatcagggccattaggctcacctgtaaat

SEQ ID NO: 496711 - DNA, 75 bp, synthetic construct
  source 1..75: mol_type = other DNA
ttggcccggtagtgaaaggtgatgtgatcacgggcaacgtcgagggcttaacccctatcgcggtgaagattgtct

SEQ ID NO: 496712 - DNA, 75 bp, synthetic construct
  source 1..75: mol_type = other DNA
aaaaactccaggctgtcgcagagtaccttcgggaagccgaaggctgggagtggtgcgccgggcgcatggagcctg

SEQ ID NO: 496713 - DNA, 75 bp, synthetic construct
  source 1..75: mol_type = other DNA
gggctacctgtctgcctgaattattatggttctggtggtggtgaaattctgcctgcgggacttcaggtcgtgacg

SEQ ID NO: 496714 - DNA, 75 bp, synthetic construct
  source 1..75: mol_type = other DNA
taaggaagcggtaaacggggttatcaccctgccgtttacggcgtcatctgatgcaggtgtggtgacgctgactgc

SEQ ID NO: 496715 - DNA, 75 bp, synthetic construct
  source 1..75: mol_type = other DNA
gttgcggataacagctacctcgacagcgagacgctgcataccagcgcgtatgtactgcgcaaactgaaatccgtc

SEQ ID NO: 496716 - DNA, 75 bp, synthetic construct
  source 1..75: mol_type = other DNA
tcctgaatccacaggcgcggcggcaacggttacgctgacggtgaccggggcggcaaccgaaaccggcacggtgaa

SEQ ID NO: 496717 - DNA, 75 bp, synthetic construct
  source 1..75: mol_type = other DNA
acgtcacgacgattgccagcagtatcaaagatgccatcaatgccgttccgactctgccgtttacagcttcatctt

SEQ ID NO: 496718 - DNA, 75 bp, synthetic construct
  source 1..75: mol_type = other DNA
tgggacgcgcgggatatgtcgcggcaaatcgagttaaatattggcaaggatctccagtttattcgtgttaacggc

SEQ ID NO: 496719 - DNA, 75 bp, synthetic construct
  source 1..75: mol_type = other DNA
tgaagcatttaaccgctatcttggtgaattgtggggagatttgcgggagtggttgaaagcggatatcaacagcga

SEQ ID NO: 496720 - DNA, 75 bp, synthetic construct
  source 1..75: mol_type = other DNA
atgccactgcggttgccaccgcgattaaggaagcggtaaatggggttatcaccctgccgtttacggcgtcatctg

SEQ ID NO: 496721 - DNA, 75 bp, synthetic construct
  source 1..75: mol_type = other DNA
ccgtatcaacaccctgttcccgcctgactatgttaaccagctgcgagtgtttgctgtcgttaaccagttccgcct

SEQ ID NO: 496722 - DNA, 75 bp, synthetic construct
  source 1..75: mol_type = other DNA
tcgtctcactcgctttattccttaaagtctggcggccgaaaaataccgaaacggcaatctgtagtggtcaagtaa

SEQ ID NO: 496723 - DNA, 75 bp, synthetic construct
  source 1..75: mol_type = other DNA
ccgattctggtcgccggtcaggtaacgggaatcgatccgttccacattggcgcaatggcgggacgtcagttaccg

SEQ ID NO: 496724 - DNA, 75 bp, synthetic construct
  source 1..75: mol_type = other DNA
ctctggctgactggttttatctcaacccggaatggctgcacggcagggttcgttatcctttaagccgtgccggtg

SEQ ID NO: 496725 - DNA, 75 bp, synthetic construct
  source 1..75: mol_type = other DNA
gagcgggggcgttattacctgacggaatgtcagttggtggaaagaaacagaaatgcgggcttctggtcaggtcgg

SEQ ID NO: 496726 - DNA, 75 bp, synthetic construct
  source 1..75: mol_type = other DNA
cgtaccggcgaaagtgatcttctgcgactatgccggattctcaacgctggattcggtagtgcgtgccaaaaaggt

SEQ ID NO: 496727 - DNA, 75 bp, synthetic construct
  source 1..75: mol_type = other DNA
aaaaattacgatgaagcgtccggaatgcaacaggctttaatcactaagggcgttccggcaaaagccatcttctgc

SEQ ID NO: 496728 - DNA, 75 bp, synthetic construct
  source 1..75: mol_type = other DNA
gctgtctcatggcgtggcaacggcgtatgtcgaaagcggggtactgcgcattcagcgtgatgtcaccacgtacag

SEQ ID NO: 496729 - DNA, 75 bp, synthetic construct
  source 1..75: mol_type = other DNA
ttgtcaccccggcggtgatcaaaggggaactgctggcaacctaccgtcagcttgagcgtgcggggatcgtggaaa

SEQ ID NO: 496730 - DNA, 75 bp, synthetic construct
  source 1..75: mol_type = other DNA
cctgcaacccaaaaggcgtttccgggccgcctcccttcgaattgtcgggtggtcatgggtggtctgggccgttgg

SEQ ID NO: 496731 - DNA, 75 bp, synthetic construct
  source 1..75: mol_type = other DNA
acgtcgcgacgattgccagcagtatcaaagatgccatcaatgccgttccggccctgccgtttacggcctcatctt

SEQ ID NO: 496732 - DNA, 75 bp, synthetic construct
  source 1..75: mol_type = other DNA
tgtttatgtgggacgtacccgcgtgcaggctccggtgaccaacggcgataacgtcacgacgattgccagcagtat

SEQ ID NO: 496733 - DNA, 75 bp, synthetic construct
  source 1..75: mol_type = other DNA
cgtcgaatacgctggttccgattttttatgcggaaatggataaccaggcggcgaatactgcacaggacagcggag

SEQ ID NO: 496734 - DNA, 75 bp, synthetic construct
  source 1..75: mol_type = other DNA
atgagcactcaagacaagaacaaaactcgtcgagttagagttggttttttcactggtaatggaagcaaaaaagat

SEQ ID NO: 496735 - DNA, 75 bp, synthetic construct
  source 1..75: mol_type = other DNA
atcaggattttgtgttttttatttttctatgtttttagtttccgttctacataaggaagatcttattgccggagg

SEQ ID NO: 496736 - DNA, 75 bp, synthetic construct
  source 1..75: mol_type = other DNA
ctatagatttaaggggacagtttttgttccaatggggcctgctttatctgttggatttttcatatgcttattgcg

SEQ ID NO: 496737 - DNA, 75 bp, synthetic construct
  source 1..75: mol_type = other DNA
ttatgggccggcatcaaacacgacatcggcctgccaggcgattcacctttactctcgcgccacttccccgctgcg

SEQ ID NO: 496738 - DNA, 75 bp, synthetic construct
  source 1..75: mol_type = other DNA
ccattaattgacacgatgaaagaaatgtcaatgcgccccagcctgtggatattattcgtcgtcatcattgtgatg

SEQ ID NO: 496739 - DNA, 75 bp, synthetic construct
  source 1..75: mol_type = other DNA
ccgaacaccctgtcgccatgatgaaggccgtccacgcggtggtacatcgtaatgaaaccgcagaccgcgcgtatg

SEQ ID NO: 496740 - DNA, 75 bp, synthetic construct
  source 1..75: mol_type = other DNA
cgatcaattatgtggtcagtggtcagtggtcagtggtcagcaccctacgctttaaggtgctatgcttgatcggca

SEQ ID NO: 496741 - DNA, 75 bp, synthetic construct
  source 1..75: mol_type = other DNA
ggcctgataaggttaaaaaccttgagttgcttgggcgtcatgtttctgttcaggcgtttaaagacaacgtcaaaa

SEQ ID NO: 496742 - DNA, 75 bp, synthetic construct
  source 1..75: mol_type = other DNA
cgcaatccgtcctttcttctgtacaggctgaggatatcctgaaccagctctatcaacggcgggttaaagggattg

SEQ ID NO: 496743 - DNA, 75 bp, synthetic construct
  source 1..75: mol_type = other DNA
gatgctgggcgaaggcgaagaaacccagtggagtctgctgctctatagtctgatgatcatcgtgcgcgagggctg

SEQ ID NO: 496744 - DNA, 75 bp, synthetic construct
  source 1..75: mol_type = other DNA
cagaaacaatcgcactaaagctcacggcactattgcggaagtcgtgaatcacttcaaaaaacgccgtatttccat

SEQ ID NO: 496745 - DNA, 75 bp, synthetic construct
  source 1..75: mol_type = other DNA
cttttcagcccgcgtaacccgaaacatgtggccacctttgggcatatgtttggtcgtcttgcgccgctgttcggc

SEQ ID NO: 496746 - DNA, 75 bp, synthetic construct
  source 1..75: mol_type = other DNA
gtgggcaaagatatggtgcgcgatcaacgttatttctcgctcgcgactcgaatcgccgctgaaatgggggcgcag

SEQ ID NO: 496747 - DNA, 75 bp, synthetic construct
  source 1..75: mol_type = other DNA
ctgaccatccggtggcgatgatgaaagccgtacaggcggtggttcaccataacgaaacggctgatcgggcatatg

SEQ ID NO: 496748 - DNA, 75 bp, synthetic construct
  source 1..75: mol_type = other DNA
atactgacagcgaaacaggcgtaggccgctggtggaaaccgtttgatgtgagctacgagtttaaatatgtcggtc

SEQ ID NO: 496749 - DNA, 75 bp, synthetic construct
  source 1..75: mol_type = other DNA
atgggtggaagcttctgataacgacatcctcagtgatatctaccagcaaacgatcaattatgtggtcagtggtca

SEQ ID NO: 496750 - DNA, 75 bp, synthetic construct
  source 1..75: mol_type = other DNA
cagaatacgacatatcattatctgacgatgaaaactatgacgatgactattatcgtgaacgcccgtgtccgggag

SEQ ID NO: 496751 - DNA, 75 bp, synthetic construct
  source 1..75: mol_type = other DNA
atgtataattatggtgaatcatattcagaatacgacatatcattatctgacgatgaaaactatgacgatgactat

SEQ ID NO: 496752 - DNA, 75 bp, synthetic construct
  source 1..75: mol_type = other DNA
agggcgcgatgcatggctgggatttacccaccgcgcagggggcttcgttacagttcaaacagatgtttgcccgcc

SEQ ID NO: 496753 - DNA, 75 bp, synthetic construct
  source 1..75: mol_type = other DNA
ctggaacccgccgacgctcaatggcgtactgatgaaacttagcgttgggcaatatctggcaaaagataaaggcgc

SEQ ID NO: 496754 - DNA, 75 bp, synthetic construct
  source 1..75: mol_type = other DNA
ttcgcaatgacgtttatctcaacaacttgcaggcgaactattttgctgacttaggcaatggtttctatggccagg

SEQ ID NO: 496755 - DNA, 75 bp, synthetic construct
  source 1..75: mol_type = other DNA
gctcaccgacggacgctctgttctttggtctggcaaagtcctgaaaaatccccccggtaaacctaaagtcgacgc

SEQ ID NO: 496756 - DNA, 75 bp, synthetic construct
  source 1..75: mol_type = other DNA
gggctgaagtcgatcctgatggtattcagggcgctgtcagaacaatcaaaaggcgcacaggccgcagccatgaac

SEQ ID NO: 496757 - DNA, 75 bp, synthetic construct
  source 1..75: mol_type = other DNA
caaacggggtgagaaaggcaaactaggcctgaagtccattctgctggtattcagaacattacttgaacagtcaaa

SEQ ID NO: 496758 - DNA, 75 bp, synthetic construct
  source 1..75: mol_type = other DNA
ctaaccgtaccgcatacgaaaacctgtcaaaacctgacatacaattcagaatcgctgaactgaaagcgcaacgca

SEQ ID NO: 496759 - DNA, 75 bp, synthetic construct
  source 1..75: mol_type = other DNA
tcgaacttggcgaggggttacgtctgaccagttcccgcgtcaccgaggatggtatggggctgaatatttacgcgg

SEQ ID NO: 496760 - DNA, 75 bp, synthetic construct
  source 1..75: mol_type = other DNA
gaccagttcccgcgtcaccgaggacggtatggggctgaatatttacgcgggcgataactacattacaggctggta

SEQ ID NO: 496761 - DNA, 75 bp, synthetic construct
  source 1..75: mol_type = other DNA
gtcgtatgtggcgctggatgcgaaaccgcaaacgtgggcaggcaggtctgccggtcccggatgccatgacgtctg

SEQ ID NO: 496762 - DNA, 75 bp, synthetic construct
  source 1..75: mol_type = other DNA
aagtattctctttacgatgttggtaaatctggtttgacgaatacagaattattagcaccgcgtagtgaaatagca

SEQ ID NO: 496763 - DNA, 75 bp, synthetic construct
  source 1..75: mol_type = other DNA
gcgcgcttcttatctggcaggtccgggactcactgcggccagccctgtttgctttctggctgttgctggtcgccc

SEQ ID NO: 496764 - DNA, 75 bp, synthetic construct
  source 1..75: mol_type = other DNA
tgaattgctccgggcggaggcgggatgtcatcgggtgggggggtttgggggggaggggggggaaccacaaggctc

SEQ ID NO: 496765 - DNA, 75 bp, synthetic construct
  source 1..75: mol_type = other DNA
atgaatcagggtaaatccgttgctgtgcaatctgtcaggccggtccttaatttctccgcgctgcagcgcgatgtt

SEQ ID NO: 496766 - DNA, 75 bp, synthetic construct
  source 1..75: mol_type = other DNA
gctcgaagctaccggccagttatgaggtaaacgccgtgtcgtttgatcactataacggcgtggcaactgtctatt

SEQ ID NO: 496767 - DNA, 75 bp, synthetic construct
  source 1..75: mol_type = other DNA
gatcgaagctccccgccagctatgaagtaaatgccgtatcgtttgatcactataacggcgtggcaactgtctatt

SEQ ID NO: 496768 - DNA, 75 bp, synthetic construct
  source 1..75: mol_type = other DNA
aaatcttggattcataacgtgcggcacacgttctggtgaagctgtaggctcactgggatgtacggtatatggcga

SEQ ID NO: 496769 - DNA, 75 bp, synthetic construct
  source 1..75: mol_type = other DNA
ttaagacgaattttcctgatgctgatttttggataattcgtcgaggctctttaaaaaccgttggcgaaccctcct

SEQ ID NO: 496770 - DNA, 75 bp, synthetic construct
  source 1..75: mol_type = other DNA
atgaaactttctgatgttgcaaccattaagacgaattttcctgatgctgatttttggataattcgtcgaggctct

SEQ ID NO: 496771 - DNA, 75 bp, synthetic construct
  source 1..75: mol_type = other DNA
gtgctttcacgttacctttattactgcttccttcacctgcatcaatcaaaggtatgggaaccagtagcaacggga

SEQ ID NO: 496772 - DNA, 75 bp, synthetic construct
  source 1..75: mol_type = other DNA
atagaaggtgcatggggatcgggtaaaacaagcctccttaatctgatcctgagaaaccttgccctgaaaaaagat

SEQ ID NO: 496773 - DNA, 75 bp, synthetic construct
  source 1..75: mol_type = other DNA
caggggatagagaaagcaaggaaagacggcaaatataaagggcgtaaacctaatcaagccagacatgatgcaatt

SEQ ID NO: 496774 - DNA, 75 bp, synthetic construct
  source 1..75: mol_type = other DNA
ggacacaggtacagaaggtgctagggtgcagccgcggcacaatcagtagcgcaataaaacgtaaatcccggcaat

SEQ ID NO: 496775 - DNA, 75 bp, synthetic construct
  source 1..75: mol_type = other DNA
atcacaaaggcggagttatcccgcgtggagatagtcgagctgctcagtcaggagtcggaaaaatttcacaatatc

SEQ ID NO: 496776 - DNA, 75 bp, synthetic construct
  source 1..75: mol_type = other DNA
aaccttgtctgactggtggaagcagttctgggatgcggccatgaatattggtcgtgaagattcgctggatgcgca

SEQ ID NO: 496777 - DNA, 75 bp, synthetic construct
  source 1..75: mol_type = other DNA
tacgatcagcagcgtcttaacgatcttcaggagaaaaaacgccagaaggatttgcaggatgcaaaagagcaggca

SEQ ID NO: 496778 - DNA, 75 bp, synthetic construct
  source 1..75: mol_type = other DNA
gtcggcactggcagaggaaaccggccggcgtacatcggatattgataataacctcaatgcgctgggaagtacgct

SEQ ID NO: 496779 - DNA, 75 bp, synthetic construct
  source 1..75: mol_type = other DNA
ttagagcgctatcgtattgcagaagagaatgcccgtattcagggtgatgcacagacactgaagtctgctaatacc

SEQ ID NO: 496780 - DNA, 75 bp, synthetic construct
  source 1..75: mol_type = other DNA
tgatttccgctctgctggcgttttccgccccggggttttctgccgctgataatgtcgcggcggtggtggacagca

SEQ ID NO: 496781 - DNA, 75 bp, synthetic construct
  source 1..75: mol_type = other DNA
cgttattggcggacttgtcgcggcggtcctgggtctgggtaaagcctggcatgacggccggaaggagggcgagga

SEQ ID NO: 496782 - DNA, 75 bp, synthetic construct
  source 1..75: mol_type = other DNA
gattctgatgtcattaaaacctatgttgctcttgggcttgggatcggattagttgccgaacaatccagcggcgaa

SEQ ID NO: 496783 - DNA, 75 bp, synthetic construct
  source 1..75: mol_type = other DNA
gtgagtattgaggatgtcaggaacatgatacagcggtaccgcgatgcggaaatggcggtactggaaggaaaatcc

SEQ ID NO: 496784 - DNA, 75 bp, synthetic construct
  source 1..75: mol_type = other DNA
acggtcaacatgccagatgtgcccagttatagggttagaaattcaggagatgtcactgaaaaaattgacttctct

SEQ ID NO: 496785 - DNA, 75 bp, synthetic construct
  source 1..75: mol_type = other DNA
cttcagcaacatgggaaatggcctggcaacttttggtaagcgtgcagcaagaaccgtattgacggggatgtgtta

SEQ ID NO: 496786 - DNA, 75 bp, synthetic construct
  source 1..75: mol_type = other DNA
cgctgaggggatccgggataacgctggctaaccgtgccggatggatagacacactgatgtcaccgaaaggcatga

SEQ ID NO: 496787 - DNA, 75 bp, synthetic construct
  source 1..75: mol_type = other DNA
tcagcttaaagagcaggcaacccgccagaatctttcttcttctgagttgcttcgtgctaaggctgcccagctggg

SEQ ID NO: 496788 - DNA, 75 bp, synthetic construct
  source 1..75: mol_type = other DNA
atgattaacggcaaacccaccgcagattacgagcgcattctggctgataacggcatgccggtaaccgaagaacag

SEQ ID NO: 496789 - DNA, 75 bp, synthetic construct
  source 1..75: mol_type = other DNA
tattttgcgtaagttgttcgatcgctattatggcgaggttgccggggaagggacgtttttgttcccgcacgttgc

SEQ ID NO: 496790 - DNA, 75 bp, synthetic construct
  source 1..75: mol_type = other DNA
gccaaatacttcagcgtggttatcggcggtgatgatgtgcaaaacaaaaaaccgcatccggacccgctgttactg

SEQ ID NO: 496791 - DNA, 75 bp, synthetic construct
  source 1..75: mol_type = other DNA
cggttgcgtcagtccggaatgacaatcatcacccgggatgttgaggtctcagactcgctgaccggaaccacacgg

SEQ ID NO: 496792 - DNA, 75 bp, synthetic construct
  source 1..75: mol_type = other DNA
gctgcacagggggtgatccgtttcttcaaagaagatgcaaaggccgttgtgacggtcaaagccgggacacttatc

SEQ ID NO: 496793 - DNA, 75 bp, synthetic construct
  source 1..75: mol_type = other DNA
ctgcaccgcgtgcagcatccacggcgttcagacccgcgagtgtggtcacacgtcacgcagtccgctggactcgct

SEQ ID NO: 496794 - DNA, 75 bp, synthetic construct
  source 1..75: mol_type = other DNA
atcacggcgaaatgatgggcgcacataagctgatcagtaaaggagcggcgatgtatgacgacatcacccgtattc

SEQ ID NO: 496795 - DNA, 75 bp, synthetic construct
  source 1..75: mol_type = other DNA
tcctgatggtggtttcgtatgatgagccgcatcacccgttcacctgtccggtggagtatttagagaaatacgctg

SEQ ID NO: 496796 - DNA, 75 bp, synthetic construct
  source 1..75: mol_type = other DNA
cccacaagatggctattcgccagtggtacgtgactatgacaccggcctgccgacacaaggggtgaaagtggagga

SEQ ID NO: 496797 - DNA, 75 bp, synthetic construct
  source 1..75: mol_type = other DNA
gtggctgaacgtatgggcattgctccacaacaaatgctgtttgttggcgactctcgcaatgatattcaggcggca

SEQ ID NO: 496798 - DNA, 75 bp, synthetic construct
  source 1..75: mol_type = other DNA
gctggatgggggcgttccgtccacgcccacaggatggctattcgccggtagtacgcgactatgacaccggcctgc

SEQ ID NO: 496799 - DNA, 75 bp, synthetic construct
  source 1..75: mol_type = other DNA
gtggcgtgatggtggaatttaaccgctacgagattgagcatgacagctttggcggttttattccggtgcgttgct

SEQ ID NO: 496800 - DNA, 75 bp, synthetic construct
  source 1..75: mol_type = other DNA
cagagaaaaacctgcctgtactgctggcgctgattggcatctggtacaacaatttctttggcgcggaaactgaag

SEQ ID NO: 496801 - DNA, 75 bp, synthetic construct
  source 1..75: mol_type = other DNA
cataaatgctaattcaatttggtttgaatactataaccataatgaatcattgtttctgaatgatcgctttcatat

SEQ ID NO: 496802 - DNA, 75 bp, synthetic construct
  source 1..75: mol_type = other DNA
aatagcttaattgtgattgatgaacctgaattatttttacatcctaaccttgaaatagaattcattgggctacta

SEQ ID NO: 496803 - DNA, 75 bp, synthetic construct
  source 1..75: mol_type = other DNA
tgatttacacactgaaaacacgccaggcaactcttattccggaaggcatagcaggtatgtcggttgacgtcatcg

SEQ ID NO: 496804 - DNA, 75 bp, synthetic construct
  source 1..75: mol_type = other DNA
atcgtcactatccagacgttcccgtttgtcctgaaggcgattgaaaacagcgtcagcctcaagcagcgcaaatac

SEQ ID NO: 496805 - DNA, 75 bp, synthetic construct
  source 1..75: mol_type = other DNA
tgcttggggattatcctcaggctgtacagaatgctgtcattgaaagcatgggggcgtttgagaaacattcagttg

SEQ ID NO: 496806 - DNA, 75 bp, synthetic construct
  source 1..75: mol_type = other DNA
acagctaacacactataagttgtgggagaagcgtactcaggatctcaagttacaagaagggggagaaggacttaa

SEQ ID NO: 496807 - DNA, 75 bp, synthetic construct
  source 1..75: mol_type = other DNA
caacgcccacagcgcgcgtgactggttcctgaaagcggcaggtgatgagaaacacgttgcgaaacactttgcggc

SEQ ID NO: 496808 - DNA, 75 bp, synthetic construct
  source 1..75: mol_type = other DNA
ccatcggctttgataattttgttgaactgctttctggcgcacacgcgatggacaagcatttctccaccacgcctg

SEQ ID NO: 496809 - DNA, 75 bp, synthetic construct
  source 1..75: mol_type = other DNA
actgaaaaaagtgaatccggaaaccaccctgttcctggtggcgtctaaaaccttcactactcaggaaactatgac

SEQ ID NO: 496810 - DNA, 75 bp, synthetic construct
  source 1..75: mol_type = other DNA
atatgttcgagttctgggactgggtcggtggtcgctactctctgtggtctgcgattggcctgtcgattgttctct

SEQ ID NO: 496811 - DNA, 75 bp, synthetic construct
  source 1..75: mol_type = other DNA
attacaggatctggcgaaagagtgcgatctggcgggcgcgattaagtcgatgttctctggcgagaagatcaaccg

SEQ ID NO: 496812 - DNA, 75 bp, synthetic construct
  source 1..75: mol_type = other DNA
acatgttcgagttctgggactgggtcggcggtcgttactctttgtggtcagcgattggtctgtcgattgttctct

SEQ ID NO: 496813 - DNA, 75 bp, synthetic construct
  source 1..75: mol_type = other DNA
ggcctatctggcggagcgcggcgtcgataaaacgatcctcaaaaaactctgtatcgataatcccggagtaagcga

SEQ ID NO: 496814 - DNA, 75 bp, synthetic construct
  source 1..75: mol_type = other DNA
aatctttgcccgacagggtgtcgaactgagccgtgcattactctccaactgggttgacgcgtgctgccagttaat

SEQ ID NO: 496815 - DNA, 75 bp, synthetic construct
  source 1..75: mol_type = other DNA
ttcacgagtgtctcgatgggtcttggcgtgtttaaacagggcttgactggtgatactagccaaataaattacagc

SEQ ID NO: 496816 - DNA, 75 bp, synthetic construct
  source 1..75: mol_type = other DNA
gtgttcagggtggagaatgcttcatcgttttaaccaaagaaaacaacgagttacaagtttctattctgtctgctg

SEQ ID NO: 496817 - DNA, 75 bp, synthetic construct
  source 1..75: mol_type = other DNA
tcgcacactcggatccgtcaggaaaagacgtggcgtatcagcggaaaatgcttgataagggtgtctggctggaat

SEQ ID NO: 496818 - DNA, 75 bp, synthetic construct
  source 1..75: mol_type = other DNA
taaacacttccgtaggcagtcgatacacgcaatacatcaccgatatggtggtaggtactggcctagatccgaagc

SEQ ID NO: 496819 - DNA, 75 bp, synthetic construct
  source 1..75: mol_type = other DNA
atgaagaatgataaattaaccaacgaacagcaggcgcagaacaagtcaaacctgaaaaagtgggctggttatgtt

SEQ ID NO: 496820 - DNA, 75 bp, synthetic construct
  source 1..75: mol_type = other DNA
cgtggcgaacactatttttctttccgtgctggtggctgtcagaggcaacgttgcacgtctggttgatcatctgag

SEQ ID NO: 496821 - DNA, 75 bp, synthetic construct
  source 1..75: mol_type = other DNA
ccggaaggggcaacgatcaggagcatccaggcgacgcaaaacggtgatgactttaacagcttcaatgatgcgatg

SEQ ID NO: 496822 - DNA, 75 bp, synthetic construct
  source 1..75: mol_type = other DNA
aagcgccggaagtagtacaggattttgcacctggtactattcaggaattaccggaaggggcaacgatcaagagca

SEQ ID NO: 496823 - DNA, 75 bp, synthetic construct
  source 1..75: mol_type = other DNA
ttctcagagattcaagccgaaaagagcgcactaaatattatcgttgatggtgagagcaaggataacccttctcaa

SEQ ID NO: 496824 - DNA, 75 bp, synthetic construct
  source 1..75: mol_type = other DNA
tttacaaaggcgagaaatgcatctggactctcatttgatggagacccgccaacattccatgaactgcgtagcctg

SEQ ID NO: 496825 - DNA, 75 bp, synthetic construct
  source 1..75: mol_type = other DNA
tgtgggtaaaaagagtttgctgtggatccccttttttggtcagttgtactggttaactggcaacttattgatcga

SEQ ID NO: 496826 - DNA, 75 bp, synthetic construct
  source 1..75: mol_type = other DNA
cttaaagttgagtgtcgcaaacccgctgatgctgaaagttatggtaatgctatctatatcgctaaccaccagaac

SEQ ID NO: 496827 - DNA, 75 bp, synthetic construct
  source 1..75: mol_type = other DNA
acttcaaaaaaagccgcatttccatctggatgttcccggaaggaacgcgtagccgtggtcgtggcttgctgccat

SEQ ID NO: 496828 - DNA, 75 bp, synthetic construct
  source 1..75: mol_type = other DNA
tgttcgcaaggatgcaaatagtgaaatacgtcaatttgccaaatggttacaatctgacgaagcttatcttgtatt

SEQ ID NO: 496829 - DNA, 75 bp, synthetic construct
  source 1..75: mol_type = other DNA
cttcagtggatgtatgccatcgatgtgctgattgaaacacagggcgaggtctgcctccttccacttcctggagat

SEQ ID NO: 496830 - DNA, 75 bp, synthetic construct
  source 1..75: mol_type = other DNA
tatctatatcgctaaccaccagaacaattatgacatggtgacggcatcgaacattgtgcagccgccgacagtgac

SEQ ID NO: 496831 - DNA, 75 bp, synthetic construct
  source 1..75: mol_type = other DNA
atgctaaacacctacgtcgcagaaggtaaagcagcgtccgcaagagtaatcaggtcaacccttgttgacgttttt

SEQ ID NO: 496832 - DNA, 75 bp, synthetic construct
  source 1..75: mol_type = other DNA
atgctaaacacctacgtagcagaaggtaaaacggcttccgcaaaattaatcaggtcaacccttgttgacgttttt

SEQ ID NO: 496833 - DNA, 75 bp, synthetic construct
  source 1..75: mol_type = other DNA
tacctggaaaaatttgaaagccagagaattcataaaacggttgatgaactggcggcaacgatcgataaagaattg

SEQ ID NO: 496834 - DNA, 75 bp, synthetic construct
  source 1..75: mol_type = other DNA
tcgacgtagttgataacgcgttatctatgttcgccactgatgggaaacgcgtagcgatcactacatggacgcgca

SEQ ID NO: 496835 - DNA, 75 bp, synthetic construct
  source 1..75: mol_type = other DNA
ctggcaatggatttggctgtcgttacagggcagagagtcggcgatttgtgcagaatgaaatggtcagacataaac

SEQ ID NO: 496836 - DNA, 75 bp, synthetic construct
  source 1..75: mol_type = other DNA
ccaaggacgggtaaagagttcggattaggccgagacaggaggatagcaatcactgaagcaatacaggccaatatt

SEQ ID NO: 496837 - DNA, 75 bp, synthetic construct
  source 1..75: mol_type = other DNA
cttcagtggctgtatgccatcgatgtgctgattgaaacacagggcgaggtctgcctccttccacttcctggcgat

SEQ ID NO: 496838 - DNA, 75 bp, synthetic construct
  source 1..75: mol_type = other DNA
tcgtcggggctgctggggtgacagtgactgatgacatcagcagagcgctggcttttgctattaagtgggtggctg

SEQ ID NO: 496839 - DNA, 75 bp, synthetic construct
  source 1..75: mol_type = other DNA
ttgatagccaatgataccgcgtttgttgataccggcatcggtccgctcatcgtcaatggtcgagtccgcaaagtg

SEQ ID NO: 496840 - DNA, 75 bp, synthetic construct
  source 1..75: mol_type = other DNA
gcttagcgtcgcccagcgtctgaattacagtggtgaaggcaacgaaccggtcgagcggatgatgaaggattactt

SEQ ID NO: 496841 - DNA, 75 bp, synthetic construct
  source 1..75: mol_type = other DNA
tcgccgttgcattacatacaccagggctgatgaatccggagcctctcttcgggcagctggttttgttcgtgtgaa

SEQ ID NO: 496842 - DNA, 75 bp, synthetic construct
  source 1..75: mol_type = other DNA
gatgaatcaggagcatctctccgcgcagctggttttgttcgtgtgaaagagcttcctccaagaaaaagctgggcg

SEQ ID NO: 496843 - DNA, 75 bp, synthetic construct
  source 1..75: mol_type = other DNA
acagcgtgttgctgcgtgccgacgatcccctgatcgacatgaactacatcaccagcttcaccggtatgactgaca

SEQ ID NO: 496844 - DNA, 75 bp, synthetic construct
  source 1..75: mol_type = other DNA
gggcgcagcagtcgctggtacaaaagtgaagtggagcagtggatgcagcagcgaatcgaagagtcacgaggagct

SEQ ID NO: 496845 - DNA, 75 bp, synthetic construct
  source 1..75: mol_type = other DNA
aaaggcttattcaccctgacgacgatcccttcggtagactcgattctggtggcatgtatcgcgtatgcgattctc

SEQ ID NO: 496846 - DNA, 75 bp, synthetic construct
  source 1..75: mol_type = other DNA
gcgtgttgctgcgtgccgacgatcccctgatcgacatgaattacatcactagctttacaggtatgactgacaaat

SEQ ID NO: 496847 - DNA, 75 bp, synthetic construct
  source 1..75: mol_type = other DNA
agccgctggtacaaaagtgaagtggagcagtggatgcaacaacgaattgaggaatcacgaggagcagcagcatga

SEQ ID NO: 496848 - DNA, 75 bp, synthetic construct
  source 1..75: mol_type = other DNA
cctgatcgacatgaactacatcaccagtttcaccggcatgaccgataaatggttttacaggctgatcagtgaagg

SEQ ID NO: 496849 - DNA, 75 bp, synthetic construct
  source 1..75: mol_type = other DNA
tatattgtggcgcattcgctttgccctgcatctggtcgtcagtcgttacgataatcgcctgttattcgatcgcca

SEQ ID NO: 496850 - DNA, 75 bp, synthetic construct
  source 1..75: mol_type = other DNA
caggcgatggttgcggggcagaactgcaaagctggtttgaacctccaaaaccgggaacaacaaagcctgagaaga

SEQ ID NO: 496851 - DNA, 75 bp, synthetic construct
  source 1..75: mol_type = other DNA
cctgctggtgggcgcttcaacggcggtcacgccagccaccagaccggactggatgttgatatcttcctgcaactg

SEQ ID NO: 496852 - DNA, 75 bp, synthetic construct
  source 1..75: mol_type = other DNA
atgaacaaaaccgcgattgcgttgctggccctgcttgccagcaacgtcagcctggcggcgacgccgtggcaaaaa

SEQ ID NO: 496853 - DNA, 75 bp, synthetic construct
  source 1..75: mol_type = other DNA
aagctgggggttgtggcggatattggtggttcaggtatggcgatgtttgccccgcagtacaacatcgagatcaat

SEQ ID NO: 496854 - DNA, 75 bp, synthetic construct
  source 1..75: mol_type = other DNA
aagatgaactgattcaggcactgacgctgctggatgtaaaacagcaggagcttcagaaacagacggcactcaacg

SEQ ID NO: 496855 - DNA, 75 bp, synthetic construct
  source 1..75: mol_type = other DNA
ggatttatcagtctgctgatttgagtcgttacagtggcacggtggttaaccgtccgacgttttttgcttttgcaa

SEQ ID NO: 496856 - DNA, 75 bp, synthetic construct
  source 1..75: mol_type = other DNA
cccataccgaccgcaaatcgttcctcgaactgatcgccctcgaccaacctggactgctggcgcgagtcgggaaaa

SEQ ID NO: 496857 - DNA, 75 bp, synthetic construct
  source 1..75: mol_type = other DNA
tattcaggaccctgaagtcatcaagcagtttgccgaagaagtgcaaacagaaaaccgacttcgttatctggtatg

SEQ ID NO: 496858 - DNA, 75 bp, synthetic construct
  source 1..75: mol_type = other DNA
ggcgagcgagtagaagatttattcataattgccaccgctgaccggcgtgcgcttaataacgagttgcagcaggaa

SEQ ID NO: 496859 - DNA, 75 bp, synthetic construct
  source 1..75: mol_type = other DNA
atgaacaaaaccgcgattgcgctgctggccctgcttgccagtagcgtcagcctggcagcgacgccgtggcaaaaa

SEQ ID NO: 496860 - DNA, 75 bp, synthetic construct
  source 1..75: mol_type = other DNA
tgactacagaaaggccgagcaggcgctgacggagagcctgaaccgacaactgaatgagaatcgccgttactggca

SEQ ID NO: 496861 - DNA, 75 bp, synthetic construct
  source 1..75: mol_type = other DNA
gtcggcgtactgcggatattgataataacctcaatgcgctgggcagtacgctgaagtatctgtctgatttatgga

SEQ ID NO: 496862 - DNA, 75 bp, synthetic construct
  source 1..75: mol_type = other DNA
cttcagtgggtgtatgccatcgatgtgctgattgaaacacagggcgaggtctgcctccttccacttcctggggat

SEQ ID NO: 496863 - DNA, 75 bp, synthetic construct
  source 1..75: mol_type = other DNA
cagcaagccttcttcggcctcttcactggcgaaaccgaagataaatggggctggttagatcaagttaatcaataa

SEQ ID NO: 496864 - DNA, 75 bp, synthetic construct
  source 1..75: mol_type = other DNA
acaggcagcagaacggcataacattcgaagccgatattctgagtaacagcacgatggacgtactgatccagattc

SEQ ID NO: 496865 - DNA, 75 bp, synthetic construct
  source 1..75: mol_type = other DNA
taactgatcctaaattaaaaatctccacaaaaatagaaccaattgatggcttaaatcacgattcagcagttcaat

SEQ ID NO: 496866 - DNA, 75 bp, synthetic construct
  source 1..75: mol_type = other DNA
actggaaagtagctgatatctggacctggtatgctaatcataaatccctatgtaacccattgtataatatcatgt

SEQ ID NO: 496867 - DNA, 75 bp, synthetic construct
  source 1..75: mol_type = other DNA
accatttgaatgtgtctaaaagcacaatggcgaatagatacttgcgagacacattcccagctgactggatcataa

SEQ ID NO: 496868 - DNA, 75 bp, synthetic construct
  source 1..75: mol_type = other DNA
aggcgctggaacaggggatcgatgcgatggtttcttcctggaatcgcgcagcaccgaacactatcccaactgcgg

SEQ ID NO: 496869 - DNA, 75 bp, synthetic construct
  source 1..75: mol_type = other DNA
gaggtttaccacatccatatgcatttgttgggtggccgtccgctgggaccaatgctggcgcataaaggtctgtaa

SEQ ID NO: 496870 - DNA, 75 bp, synthetic construct
  source 1..75: mol_type = other DNA
tggcgggcaagaggtgtaccacatccatatgcacttgctgggtggccgtcctctgggcccaatgctggcgcataa

SEQ ID NO: 496871 - DNA, 75 bp, synthetic construct
  source 1..75: mol_type = other DNA
cgccgatggtaaagattaaaatcctgccgagtttcgtaggggttcccttcccgtcggtgctacttatcgttgcgg

SEQ ID NO: 496872 - DNA, 75 bp, synthetic construct
  source 1..75: mol_type = other DNA
aaacttgaattggaaaatatggatctaagaaggaagctcggtgaagcacggcgagatattgaagcatataaacgt

SEQ ID NO: 496873 - DNA, 75 bp, synthetic construct
  source 1..75: mol_type = other DNA
tgtgctctggccgcatttaacgaccctgactggtttataaaaaaccaccatgctgttcgtcaggcaaagagaaaa

SEQ ID NO: 496874 - DNA, 75 bp, synthetic construct
  source 1..75: mol_type = other DNA
tactggcgttgccgggcattatctttttagttctctttcccatcattctgtcgctatggattgccttcctttggg

SEQ ID NO: 496875 - DNA, 75 bp, synthetic construct
  source 1..75: mol_type = other DNA
gtcatagctggtacatttaccccatctacgactggaaagtcgctgatatctggacctggtatgctagccatcaac

SEQ ID NO: 496876 - DNA, 75 bp, synthetic construct
  source 1..75: mol_type = other DNA
atctgaaggagccaacccaaattattgctggtgggatgttgatccagttgatgctgcaaatgaagccatgagtta

SEQ ID NO: 496877 - DNA, 75 bp, synthetic construct
  source 1..75: mol_type = other DNA
tgacaaacagaccggggagatgcgggagcagactgaatggcagcgcgtggtgctgttcggcaagctcgcggaagt

SEQ ID NO: 496878 - DNA, 75 bp, synthetic construct
  source 1..75: mol_type = other DNA
acgaagatggagaagatgctttcattcgtattggttctatcgctatggtgcgagttgcgcttgatgtgctggaac

SEQ ID NO: 496879 - DNA, 75 bp, synthetic construct
  source 1..75: mol_type = other DNA
tctggcaggtcatcgcagaggctggtatggcggcaagggaggccggtcatgccgtccgtgagatggagcggtgga

SEQ ID NO: 496880 - DNA, 75 bp, synthetic construct
  source 1..75: mol_type = other DNA
agtccgttacatccccaacgggggcgcagtggcaaacctgcaggtggccacgtcagaaacctggcgcgacaaaca

SEQ ID NO: 496881 - DNA, 75 bp, synthetic construct
  source 1..75: mol_type = other DNA
caaaaaatgaattagaaccgtggacacctgaaggaaacgacccaaattattgctggtgggaggttgatccggttg

SEQ ID NO: 496882 - DNA, 75 bp, synthetic construct
  source 1..75: mol_type = other DNA
cggcatcaggattgcgtattaccatgattttgctgggtattgccgtcacacctgtgctgttgtcatcctcaagcc

SEQ ID NO: 496883 - DNA, 75 bp, synthetic construct
  source 1..75: mol_type = other DNA
tgacaaacagacgggggagatgcgggagcagaccgaatggcatcgcgtggtgctgttcggcaagctcgcggaagt

SEQ ID NO: 496884 - DNA, 75 bp, synthetic construct
  source 1..75: mol_type = other DNA
atgaatttcaaaaacggaggacaagcagtcataacgcgcatgcttgaagcgtatggattcaagacaaggcaagct

SEQ ID NO: 496885 - DNA, 75 bp, synthetic construct
  source 1..75: mol_type = other DNA
atgtccatatcacgctggtaaacggcggactagtgattccactgagtgttgagcctgatgcgccgcaaaacgaag

SEQ ID NO: 496886 - DNA, 75 bp, synthetic construct
  source 1..75: mol_type = other DNA
tatgggaatgtccatatcaccatggtgaatggtggtccggttattgagctttactgtgagccagatgagtccgag

SEQ ID NO: 496887 - DNA, 75 bp, synthetic construct
  source 1..75: mol_type = other DNA
aagagcttgctcagatacaagatgaacacgctaagaacagaaaaaaggctgaaattgcagctttaaccgcttccg

SEQ ID NO: 496888 - DNA, 75 bp, synthetic construct
  source 1..75: mol_type = other DNA
atgttcccgctggcctgggcagggatctctatgttctttatgctcggcttctcggaagcgccatcattcccggcg

SEQ ID NO: 496889 - DNA, 75 bp, synthetic construct
  source 1..75: mol_type = other DNA
catcaagcaattgctctctaaccgcatgatgttgggcgtatttttcggacaatattttatcaacaccatcacctg

SEQ ID NO: 496890 - DNA, 75 bp, synthetic construct
  source 1..75: mol_type = other DNA
cccacaagatggctattcgccggtggtacgcgattatgacaccggcctgccgacacaaggagtgaaggtggaaga

SEQ ID NO: 496891 - DNA, 75 bp, synthetic construct
  source 1..75: mol_type = other DNA
agaactagctgactcctatgctaaacgtttagctgatattgaagagtatagttctatattgcacttaagaaatga

SEQ ID NO: 496892 - DNA, 75 bp, synthetic construct
  source 1..75: mol_type = other DNA
aaaacatcttcgagagataatgcgatcatataccaaacgtttattggaggctgaagagtccaaagctacgttaca

SEQ ID NO: 496893 - DNA, 75 bp, synthetic construct
  source 1..75: mol_type = other DNA
tgacggcgctgtggatcaagttgattcataacccgacagatcacccacgtatgtctgcggaagagctgaagttta

SEQ ID NO: 496894 - DNA, 75 bp, synthetic construct
  source 1..75: mol_type = other DNA
gcagaggaaaccggccggcgtacatcggatattgataataacctcaatgcgctgggaagcacgctacagacactg

SEQ ID NO: 496895 - DNA, 75 bp, synthetic construct
  source 1..75: mol_type = other DNA
tggggcgctgaggggatccggaataacgctggctaaccgtgccggatggatagacacactgatgtcaccgaaagg

SEQ ID NO: 496896 - DNA, 75 bp, synthetic construct
  source 1..75: mol_type = other DNA
gaccagtcaactggctgaagaagagcgcgctcagcgtcagcaacatgacctggatatcgccacggtgggtatggg

SEQ ID NO: 496897 - DNA, 75 bp, synthetic construct
  source 1..75: mol_type = other DNA
agcagaggatgacctggcgaacaaaccggaacatcaccgcttatgggcgcaggcgatgccatcgccagtcggtga

SEQ ID NO: 496898 - DNA, 75 bp, synthetic construct
  source 1..75: mol_type = other DNA
tggggcgctactttaaggatgcgggctatcacacctgttacatcggcaaatggcatctcgatggacatgactatt

SEQ ID NO: 496899 - DNA, 75 bp, synthetic construct
  source 1..75: mol_type = other DNA
gttattgctgcagtacagtcagcaacaggcacaggtggaaggacagattgctgctgcaagacagtcagcaggcat

SEQ ID NO: 496900 - DNA, 75 bp, synthetic construct
  source 1..75: mol_type = other DNA
ttatatttcattaaaatgtcgcaagtatgggcttttgctggctgtttttttggggttcttgctgtagttgcatca

SEQ ID NO: 496901 - DNA, 75 bp, synthetic construct
  source 1..75: mol_type = other DNA
aatcttgaagcaagtaacttgttagatacaataaaatcaaagattattttgtttgatactgatcaaacaaaattt

SEQ ID NO: 496902 - DNA, 75 bp, synthetic construct
  source 1..75: mol_type = other DNA
ttggttattacgcctggtagccaggattacccatccccggccatgtcctggctttatcccgatcggggggacttt

SEQ ID NO: 496903 - DNA, 75 bp, synthetic construct
  source 1..75: mol_type = other DNA
gtaaatgccgcgaaggctctggacaatgagctgcattttcttactgccactcagcttgagcagatacgcgtcctt

SEQ ID NO: 496904 - DNA, 75 bp, synthetic construct
  source 1..75: mol_type = other DNA
tagaaaagataagagcaattgaatatacgcccgagcaggcaagaattttatttaatggaaggccacaggaaagcg

SEQ ID NO: 496905 - DNA, 75 bp, synthetic construct
  source 1..75: mol_type = other DNA
ttaatccctgactatctgatgatctgtatggaatatctgcacaaacggggagtatgggaaccacgcgctacgggg

SEQ ID NO: 496906 - DNA, 75 bp, synthetic construct
  source 1..75: mol_type = other DNA
taatagcaggtcttgatgatgatgatgtcgatgatgactatataaatagattgattgaaatagaatatataagga

SEQ ID NO: 496907 - DNA, 75 bp, synthetic construct
  source 1..75: mol_type = other DNA
tagggaaagaagaattgcgttattttcgcttacgcgatctttgcacactgaagcatgacgaaatagtcgaacgct

SEQ ID NO: 496908 - DNA, 75 bp, synthetic construct
  source 1..75: mol_type = other DNA
tttgaacaagactcttgccggagctcaaaagaaaataacgattatttccccttggttatcctggcaaaaagtgga

SEQ ID NO: 496909 - DNA, 75 bp, synthetic construct
  source 1..75: mol_type = other DNA
acaatagcagcatggctggtggcacataaggatgatatagagcgccattacggggaaccactgtacaaagttgtt

SEQ ID NO: 496910 - DNA, 75 bp, synthetic construct
  source 1..75: mol_type = other DNA
attcagctgaccagccagctggcggaagaggagcgcgctcagcgtcagcaacataatctggatatcgccatggcg

SEQ ID NO: 496911 - DNA, 75 bp, synthetic construct
  source 1..75: mol_type = other DNA
agtttaaacggctgaaggatgatccggttaacgccgcgaaggcgctggatgatgagctgcattttctgactgcca

SEQ ID NO: 496912 - DNA, 75 bp, synthetic construct
  source 1..75: mol_type = other DNA
gaaacgattaaatctgcgctggcagcaattgttgaattgcaacagaaattaactgcggcagagaagaaaaaggag

SEQ ID NO: 496913 - DNA, 75 bp, synthetic construct
  source 1..75: mol_type = other DNA
atttgcaggatgcaaaagagcaggcagagcggaattatcaggagcaacagaaacgacgtaatgctgaaaatgctg

SEQ ID NO: 496914 - DNA, 75 bp, synthetic construct
  source 1..75: mol_type = other DNA
caaaaatcatggcgcagatggccattatgcaggcggtgaaggggattggttcggcgtttggctgggggagcgcat

SEQ ID NO: 496915 - DNA, 75 bp, synthetic construct
  source 1..75: mol_type = other DNA
ggcagataggtccggctgccctgaaggtggtttatgacctcgggaaaaaagcagcagcggactttatgcaacagc

SEQ ID NO: 496916 - DNA, 75 bp, synthetic construct
  source 1..75: mol_type = other DNA
gcgctgacgctgctggatgcaaaacagcaggagctgcagaagcagacggcgctgaatgaccttaagaaaaaatcc

SEQ ID NO: 496917 - DNA, 75 bp, synthetic construct
  source 1..75: mol_type = other DNA
tgccctgaaggcggtttatgacctcgggaaaaaagcggcagcggactttatgcaacagcaggcccgtgatggtgg

SEQ ID NO: 496918 - DNA, 75 bp, synthetic construct
  source 1..75: mol_type = other DNA
cttcagtggatgtatgccatcgatgtgctgattgaaacacagggcgaggtctgcctccttccccttcctggcgat

SEQ ID NO: 496919 - DNA, 75 bp, synthetic construct
  source 1..75: mol_type = other DNA
gcaggggggctgacggtaagctgggtgttgtggcagcgacctgtggttcggggatggtgatgtttgcgccgcagt

SEQ ID NO: 496920 - DNA, 75 bp, synthetic construct
  source 1..75: mol_type = other DNA
agctgattcaggcactgacgctgctggatgcaaaacagcaggagctgcagaagcagactgccctcaatgacctga

SEQ ID NO: 496921 - DNA, 75 bp, synthetic construct
  source 1..75: mol_type = other DNA
cgggggtgatgggagaagcaggccctgaagccattctgccactgcgtcgaggtgctgacggtaagctgggggttg

SEQ ID NO: 496922 - DNA, 75 bp, synthetic construct
  source 1..75: mol_type = other DNA
cttcagtggatgtatgccatcgatgtgctgattgaaacacagggcgaggtctgcctccttccgcttcctggggat

SEQ ID NO: 496923 - DNA, 75 bp, synthetic construct
  source 1..75: mol_type = other DNA
aaaacagacgctactggcaggagcaggaactgatgcaggcagactggaaaaacggtgccatgcgggcgtttcaga

SEQ ID NO: 496924 - DNA, 75 bp, synthetic construct
  source 1..75: mol_type = other DNA
tttgttaccaccggcaaactcaatttcaaatctttcacctcatctgtgctgtcagatatggcaaaaattctggcg

SEQ ID NO: 496925 - DNA, 75 bp, synthetic construct
  source 1..75: mol_type = other DNA
acaggtggaaggacagattgctgctgccagacagtcagcaggcattgccacggaaaggatgacagaagcgcataa

SEQ ID NO: 496926 - DNA, 75 bp, synthetic construct
  source 1..75: mol_type = other DNA
cggcagaaacagcagaacaggtgttctcgtcagccttcagcaacatgggaaatggcctggcaacttttgtcacta

SEQ ID NO: 496927 - DNA, 75 bp, synthetic construct
  source 1..75: mol_type = other DNA
atacttacatcagatggtataacgagcggcgtataaaattatcgccgggtgcagtcagccccaaaatgtaccgcc

SEQ ID NO: 496928 - DNA, 75 bp, synthetic construct
  source 1..75: mol_type = other DNA
atgcaggatttgaggctgtttaatctcgtgtttgagagcgatcctggctggatactggatttctctaaccgcacc

SEQ ID NO: 496929 - DNA, 75 bp, synthetic construct
  source 1..75: mol_type = other DNA
ggtcaacactatgctggatagcgctgtcaaaacgttaaatgctggcgaacgaccggtgatacacagtgacagagg

SEQ ID NO: 496930 - DNA, 75 bp, synthetic construct
  source 1..75: mol_type = other DNA
gctggaacagctggagcgtgacagtaggcagaaaggaacattcggcacggatgaataccggaacgcagaacaaac

SEQ ID NO: 496931 - DNA, 75 bp, synthetic construct
  source 1..75: mol_type = other DNA
cttcagtggatgtatgccatcgatgtgctgattgaaacacagggcgaggtctgcctccttcctcttcctggtgat

SEQ ID NO: 496932 - DNA, 75 bp, synthetic construct
  source 1..75: mol_type = other DNA
aaatggctgacagatatcacggagttccagctccctgcaggtaaagtctggctatcaccggtggtggactgcttc

SEQ ID NO: 496933 - DNA, 75 bp, synthetic construct
  source 1..75: mol_type = other DNA
agcgatatcaggtacaactgagtcttcgtcagaaataccagcaacagctggagcagttgaggcgggatagtgagc

SEQ ID NO: 496934 - DNA, 75 bp, synthetic construct
  source 1..75: mol_type = other DNA
tgatgaaatcgataaaagggattggcagtgtactgggatttgatctcagcagcctttccctgaatgccaatgggg

SEQ ID NO: 496935 - DNA, 75 bp, synthetic construct
  source 1..75: mol_type = other DNA
ctcgtcagccttcagcaacatgggaaatggcctggcaacttttgtcactaccggcaaactcaatttcaaatcctt

SEQ ID NO: 496936 - DNA, 75 bp, synthetic construct
  source 1..75: mol_type = other DNA
tcagaaaaggttgtacgcagacttatggtggaagaacagcttgtcgtcagccgtaaccgtcgtcgccgctacagc

SEQ ID NO: 496937 - DNA, 75 bp, synthetic construct
  source 1..75: mol_type = other DNA
cttacgcaggctgaggcagaggctacccgacagaaagtggcgtttatccgtcagcttaaagagcaggcaacccgc

SEQ ID NO: 496938 - DNA, 75 bp, synthetic construct
  source 1..75: mol_type = other DNA
tgcgtttcatgagtagccttgcgggggctaagcatcgcgtctaccagctagtgtttgcgggaacggtagcagcgg

SEQ ID NO: 496939 - DNA, 75 bp, synthetic construct
  source 1..75: mol_type = other DNA
catctaatattgcatctgcacttaaatatgcaaatagccgtgcagtaacaatgatttataacaagtatagcgatg

SEQ ID NO: 496940 - DNA, 75 bp, synthetic construct
  source 1..75: mol_type = other DNA
tacactgcagatgacttcgattcttcgctggcgacactgaccgataagcaggtcagctcgcattatctggtgcct

SEQ ID NO: 496941 - DNA, 75 bp, synthetic construct
  source 1..75: mol_type = other DNA
ccgacgttatataacggcgaagcggatgcagaaactcaggcgattgccgaagcgttgctggagaaatacgggcag

SEQ ID NO: 496942 - DNA, 75 bp, synthetic construct
  source 1..75: mol_type = other DNA
cagatgcatttccgcccgacgttatacaacggcgaagcggatgcagaaactcaggcgattgccgaagcgttgctg

SEQ ID NO: 496943 - DNA, 75 bp, synthetic construct
  source 1..75: mol_type = other DNA
tgttcgccagcagcggctgaaattaagcctgtccggaaggctggcgataaaggtgattgcagagccaccggataa

SEQ ID NO: 496944 - DNA, 75 bp, synthetic construct
  source 1..75: mol_type = other DNA
cggcgatcctgttactggcagggtgcgcaggggaaaaaggcattgtcgagaaagatggataccaactcgacaccc

SEQ ID NO: 496945 - DNA, 75 bp, synthetic construct
  source 1..75: mol_type = other DNA
tacacggcggatgatttcgacacgtcgctggcgacgctgaccgataaaaaagtcagctcgcactacctggtgcca

SEQ ID NO: 496946 - DNA, 75 bp, synthetic construct
  source 1..75: mol_type = other DNA
ttgttaaattcattcaaactttcgctacagtacattctgccgaaactatggcttactcgcctggcgggttggggc

SEQ ID NO: 496947 - DNA, 75 bp, synthetic construct
  source 1..75: mol_type = other DNA
gccagacgctgaacccgccccacttcctgctgaagagatcgaagcagaacacgacgccagcccattggttgacga

SEQ ID NO: 496948 - DNA, 75 bp, synthetic construct
  source 1..75: mol_type = other DNA
gcgcggtttcttcgatgtcctgcaatcctctgtgaagcatagccgccagcggatgtatctggtacccccggtttt

SEQ ID NO: 496949 - DNA, 75 bp, synthetic construct
  source 1..75: mol_type = other DNA
ggaacaggaactggcctggcatgcgggagtcagcgcctggcgcggcgcaacacggattaacgatacttcgattgg

SEQ ID NO: 496950 - DNA, 75 bp, synthetic construct
  source 1..75: mol_type = other DNA
cgctggcgacactgaccgataagcaggtcagctcgcattatctggtccctgcggtaccaccgcgatacaacggta

SEQ ID NO: 496951 - DNA, 75 bp, synthetic construct
  source 1..75: mol_type = other DNA
gccgtgccgccgcgttacaacggcaaaccgcgtatctggcaactggtgccggaacaagaactggcctggcacgcg

SEQ ID NO: 496952 - DNA, 75 bp, synthetic construct
  source 1..75: mol_type = other DNA
catacccaccgtcgctgaatacctactggcgaagacggggaagccaatattacataagcgataaaggccagaaat

SEQ ID NO: 496953 - DNA, 75 bp, synthetic construct
  source 1..75: mol_type = other DNA
caaccgaccttgaccgcgaaggggaagctattgcatggcacctgcgggaagttattggtggtgatgatgcgcgct

SEQ ID NO: 496954 - DNA, 75 bp, synthetic construct
  source 1..75: mol_type = other DNA
gtctgctggaaaaagcgcgctacagcgtgctggaacgtgaagacaaaccgacaaccagtaaacctggcgctcctt

SEQ ID NO: 496955 - DNA, 75 bp, synthetic construct
  source 1..75: mol_type = other DNA
atgctcatagagtttgttttgccttacccgccgacggtgaacacctactggcgacgtcgtggcagcacatatttt

SEQ ID NO: 496956 - DNA, 75 bp, synthetic construct
  source 1..75: mol_type = other DNA
agtccccggcaaaagccaaaacgatcaacaagtatctgggtagtgactacgtggtgaaatccagtgtcggtcaca

SEQ ID NO: 496957 - DNA, 75 bp, synthetic construct
  source 1..75: mol_type = other DNA
tcacgaagcagagtggaaagctgtactggatcacttcttctcggatttcacccagcagttagataaagctgaaaa

SEQ ID NO: 496958 - DNA, 75 bp, synthetic construct
  source 1..75: mol_type = other DNA
tgacgctcgttgaactgacaccagcccagcactttaccaagccgccagcccgtttcagtgaagcatcgctggtta

SEQ ID NO: 496959 - DNA, 75 bp, synthetic construct
  source 1..75: mol_type = other DNA
aggcaccggaagcgggtttcgaacaccaaaaagagatgcctccagcccctgcgcctgatggtctgccttcggaaa

SEQ ID NO: 496960 - DNA, 75 bp, synthetic construct
  source 1..75: mol_type = other DNA
cgttccacagctactttcttcgccctggcgacagtaaaaagccgattatttacgatgtcgaaacgctgcgcgacg

SEQ ID NO: 496961 - DNA, 75 bp, synthetic construct
  source 1..75: mol_type = other DNA
atcttttatatgaccgcctctttccaggcgccggaagccggatttgaacatcaaaaaacgatgccacctgctccc

SEQ ID NO: 496962 - DNA, 75 bp, synthetic construct
  source 1..75: mol_type = other DNA
gttcgtggtcagccagtatctggtggacgtctgggggtgaagatttaccccataatgcatgaagagcaggtcaaa

SEQ ID NO: 496963 - DNA, 75 bp, synthetic construct
  source 1..75: mol_type = other DNA
gtatcaaaagccggggagcgttatcgccgggcagtggcgcttattgttcgccagcagcggctgaaattaagcctg

SEQ ID NO: 496964 - DNA, 75 bp, synthetic construct
  source 1..75: mol_type = other DNA
gcgcgttcatcagtacctgctcggttatgcctctgacctcaatttcttgccagtagctttacagccgcacggcat

SEQ ID NO: 496965 - DNA, 75 bp, synthetic construct
  source 1..75: mol_type = other DNA
tccagccgctgaaaacgctgatggccgatgatccggattacagtttcgatattctggaagcccgctacgccattg

SEQ ID NO: 496966 - DNA, 75 bp, synthetic construct
  source 1..75: mol_type = other DNA
cttcaatttaaaagtttgatgctcaaagaattaaacttcgtaatgaattacgtgttcactcttgagacttggtat

SEQ ID NO: 496967 - DNA, 75 bp, synthetic construct
  source 1..75: mol_type = other DNA
atgccagaaattaaaggcaccgtcactgaagacctggtcaaacaggcgctgtattcaggtgaagtaaataaatta

SEQ ID NO: 496968 - DNA, 75 bp, synthetic construct
  source 1..75: mol_type = other DNA
caggcagtttcccagacattactcatccgtccgccactcgtcagcgaagcagcaagctgcttcctgttaccgttc

SEQ ID NO: 496969 - DNA, 75 bp, synthetic construct
  source 1..75: mol_type = other DNA
actcttcaatttaaaagtttgatgctcaaagaattaaactttgtaatgaattacgtgttcactcttgagacttga

SEQ ID NO: 496970 - DNA, 75 bp, synthetic construct
  source 1..75: mol_type = other DNA
tgttgaagcggcccatgaatttggacgcttctttaccgggcaaatcaccgccgccggtaaagtaccaccagcaaa

SEQ ID NO: 496971 - DNA, 75 bp, synthetic construct
  source 1..75: mol_type = other DNA
ttccccaatccaaatggtgacttactgccaggcatgtacgtcacagcgttagtggatgaaggtagtcgccagaat

SEQ ID NO: 496972 - DNA, 75 bp, synthetic construct
  source 1..75: mol_type = other DNA
aactttatcgaaggcgataaagtgaaccagggcgattcgctgtatcagattgatcctgcacctttacaggccgag

SEQ ID NO: 496973 - DNA, 75 bp, synthetic construct
  source 1..75: mol_type = other DNA
agacttggtattcattttttcgtcttgcgacgttaagaatccgcatcttcgagtgcccacacagattgtctgata

SEQ ID NO: 496974 - DNA, 75 bp, synthetic construct
  source 1..75: mol_type = other DNA
gtaatgaattacgtgttcactcttgagacttggtattcattttttcgtcttgcgacgttaagaatccgcatcttc

SEQ ID NO: 496975 - DNA, 75 bp, synthetic construct
  source 1..75: mol_type = other DNA
ccggaatcgagcgcatgaatgaaatgacacaacaggcgcaaaaagcacttctaccatttaacgcttctttattat

SEQ ID NO: 496976 - DNA, 75 bp, synthetic construct
  source 1..75: mol_type = other DNA
gcagggacgttgcgcttatcgttcgtcaactgcaattgaaattaaatctgtccggaaggctggcgataaagatta

SEQ ID NO: 496977 - DNA, 75 bp, synthetic construct
  source 1..75: mol_type = other DNA
cgagcagtttgatgaaattaatattgtgcgcggtcagctcgttccaggtgggcggctgggcgtgaagatttacga

SEQ ID NO: 496978 - DNA, 75 bp, synthetic construct
  source 1..75: mol_type = other DNA
tcgtgacctggacaatatcctgaaagcgccactggatgcactgacacatgcgggactgcttatcgacgacgagca

SEQ ID NO: 496979 - DNA, 75 bp, synthetic construct
  source 1..75: mol_type = other DNA
ttgcagagccaccggataagcgccgtcgcgacctggacaatatcctgaaagcaccactggatgcgctgacgcatg

SEQ ID NO: 496980 - DNA, 75 bp, synthetic construct
  source 1..75: mol_type = other DNA
tccggaaggctggcaataaaaattactgcagagccaccggataagcgccgtcgtgacctggacaatattctgaaa

SEQ ID NO: 496981 - DNA, 75 bp, synthetic construct
  source 1..75: mol_type = other DNA
ctgaaagcaccgctggatgcgttgacgcatgcgggactgcttatcgacgacgagcagtttgatgaaatcaatatt

SEQ ID NO: 496982 - DNA, 75 bp, synthetic construct
  source 1..75: mol_type = other DNA
aattcaagacacgcatccgtcagcaaattgaagatccgatcatgcgtaaagcggtggcgaacgcgcagcagcgta

SEQ ID NO: 496983 - DNA, 75 bp, synthetic construct
  source 1..75: mol_type = other DNA
ggctataaagattttaaagatctgccctacgcctgttctctatgcacagcctgtgacagcgtttgcccggtgcgt

SEQ ID NO: 496984 - DNA, 75 bp, synthetic construct
  source 1..75: mol_type = other DNA
gacttctcatagacgacgagcagtttgatgaaatcaatattgtgcgcggtcagctcgttcctggtgggcggctgg

SEQ ID NO: 496985 - DNA, 75 bp, synthetic construct
  source 1..75: mol_type = other DNA
aagcggcaccggaagtgaaaactgaggaaaaatgtgcctgctcaccgtggcgtaaatacgcgttgatggcgctgg

SEQ ID NO: 496986 - DNA, 75 bp, synthetic construct
  source 1..75: mol_type = other DNA
gtccggaaggctggcgataaagattattgcagagccaccggataagcgccgtcgtgacctggacaatatcctgaa

SEQ ID NO: 496987 - DNA, 75 bp, synthetic construct
  source 1..75: mol_type = other DNA
cgagcagtttgatgaaatcaatattgtgcgcggtcaggtcgttcctggtggtcggttggggataaaaatcacagg

SEQ ID NO: 496988 - DNA, 75 bp, synthetic construct
  source 1..75: mol_type = other DNA
aaaactcgaagcagcagcagcggcggcgcgtgaggcatataaaccgaaaagaaaaattaacccggtaaaaaatga

SEQ ID NO: 496989 - DNA, 75 bp, synthetic construct
  source 1..75: mol_type = other DNA
gacttcgaacgtctgatggaaggcgctaagctgctgaaatgttcagagtttggtgaggcgatcatcaagaagatg

SEQ ID NO: 496990 - DNA, 75 bp, synthetic construct
  source 1..75: mol_type = other DNA
atgttacgccatatgggctggactgaagccgcagacctgattgttaaaggtatggaaggcgcgattaacgcgaag

SEQ ID NO: 496991 - DNA, 75 bp, synthetic construct
  source 1..75: mol_type = other DNA
agttcttcggtgatgattctccgttctgccaggaaggttctccgttccagagctctccgttctgccaggggggcc

SEQ ID NO: 496992 - DNA, 75 bp, synthetic construct
  source 1..75: mol_type = other DNA
gttgtatgaacaggccgccagtgatgatggggaggtatcacgccccagagagcctaactggacgacctgggcgaa

SEQ ID NO: 496993 - DNA, 75 bp, synthetic construct
  source 1..75: mol_type = other DNA
gctgaacaggattttttaacccgacaccctgacgcggttgtgttcagtgcgaaaaaacgccagtggggtagccag

SEQ ID NO: 496994 - DNA, 75 bp, synthetic construct
  source 1..75: mol_type = other DNA
aggaagctgatctgttcccagcccagttattgggaatgcttccgaacctggaatacatagccaaaatttcaggcg

SEQ ID NO: 496995 - DNA, 75 bp, synthetic construct
  source 1..75: mol_type = other DNA
atgacaatgagttatgacccgctcgcctacgagatgccgtggcggcccaactatgaaaaaaatgctgtagcaggc

SEQ ID NO: 496996 - DNA, 75 bp, synthetic construct
  source 1..75: mol_type = other DNA
gtcctgagcgctttgtgtattttcatccgggttttcctgagcattcagtacgtcttaatcccctgagaaacttta

SEQ ID NO: 496997 - DNA, 75 bp, synthetic construct
  source 1..75: mol_type = other DNA
acttcgaacgtctgatggaaggcgctaaactgctgaaatgttcagaatttggtgatgcgatcatcaagaacatgt

SEQ ID NO: 496998 - DNA, 75 bp, synthetic construct
  source 1..75: mol_type = other DNA
taccggcagcgtctggtcaccaaaggttttgttacaggataaagctctgctgtggttcacctgctcagcctttct

SEQ ID NO: 496999 - DNA, 75 bp, synthetic construct
  source 1..75: mol_type = other DNA
accgccatgctcagcgcgtttttgaaatcctgaaacgcgactggacttctatcgtaggcaaagagtctacggtca

SEQ ID NO: 497000 - DNA, 75 bp, synthetic construct
  source 1..75: mol_type = other DNA
gagacggtaacttccgggattgtctctgcgctggggcgtagcggcctgaatgccgaaaactacgaaaacttcatc

SEQ ID NO: 497001 - DNA, 75 bp, synthetic construct
  source 1..75: mol_type = other DNA
ggtcatccgcctgggacgttcacctgtacagcgttgtgtgaatcatatttctgaaccggatacagaaattccgcc

SEQ ID NO: 497002 - DNA, 75 bp, synthetic construct
  source 1..75: mol_type = other DNA
ctgccgaatgtgacggcgaggtggttcgtcccaaagaaccgaactggacagcctgggcaaacgaaattcgcctga

SEQ ID NO: 497003 - DNA, 75 bp, synthetic construct
  source 1..75: mol_type = other DNA
aaaaacgtcatgagcccgtcaaagcttcgcgaaaaatgggatgagctggttattcgtctgggacgttcgcctgta

SEQ ID NO: 497004 - DNA, 75 bp, synthetic construct
  source 1..75: mol_type = other DNA
gaccgaaagaacccaactggacagcatgggccaatgacgttcggacaatgcggatgctggatggcagaactcaca

SEQ ID NO: 497005 - DNA, 75 bp, synthetic construct
  source 1..75: mol_type = other DNA
ttgaacgctttctggataaacaccctgatgcgcatacgtggaatgtgccgaagcgacagtggggaacccgtgatg

SEQ ID NO: 497006 - DNA, 75 bp, synthetic construct
  source 1..75: mol_type = other DNA
catcttagcattggtgatcattgctgcgtgggtgctgatgttaaaaggtattaacgccagaccccagaggcaacc

SEQ ID NO: 497007 - DNA, 75 bp, synthetic construct
  source 1..75: mol_type = other DNA
cctgaacggcgaactgattggtatcaacaccgcaatcctcgcaccagacggcggcaacatcggtattggttttgc

SEQ ID NO: 497008 - DNA, 75 bp, synthetic construct
  source 1..75: mol_type = other DNA
gccagaatcaggttgattccagctccatcttcaacggcattgaaggcgctgagatgagcaacaaaggcaaagatc

SEQ ID NO: 497009 - DNA, 75 bp, synthetic construct
  source 1..75: mol_type = other DNA
ttcggcgatgattctccgttctgccaggacggttctccgttccagagctctccgttctgccaggggggtcagggc

SEQ ID NO: 497010 - DNA, 75 bp, synthetic construct
  source 1..75: mol_type = other DNA
caaccattgataaaaaacaacctgataggggggcgatggttggccccgatccgtcagtattaaaacctgatccgt

SEQ ID NO: 497011 - DNA, 75 bp, synthetic construct
  source 1..75: mol_type = other DNA
gcaaaagcgggcattaaagcgggtgatgtgatcacctcactgaacggtaagccgatcagcagctttgccgcactg

SEQ ID NO: 497012 - DNA, 75 bp, synthetic construct
  source 1..75: mol_type = other DNA
ctgcactgggacgtagcggcctgaacgccgaaaactacgaaaacttcatccagaccgatgccgcaatcaaccgcg

SEQ ID NO: 497013 - DNA, 75 bp, synthetic construct
  source 1..75: mol_type = other DNA
accggtgctgatccatttaaagcctttggccaaatggcactgaataacatagtgcaaggtttgttgcttacgtca

SEQ ID NO: 497014 - DNA, 75 bp, synthetic construct
  source 1..75: mol_type = other DNA
gtttgatgaaatcaatattgtgcgcggtcagcgcgttcctggggggcgactgggcgtgaagatttaccccataat

SEQ ID NO: 497015 - DNA, 75 bp, synthetic construct
  source 1..75: mol_type = other DNA
atgcaactcggcgtatcacgtaattcactgcgcgaggcgctggcaaaactggtgagtgaaggcgtgctgctcagt

SEQ ID NO: 497016 - DNA, 75 bp, synthetic construct
  source 1..75: mol_type = other DNA
attctggaagctcgctacgctattgaggccagcaccgcctggcatgcggcaatgcgcgccacacaagccgataaa

SEQ ID NO: 497017 - DNA, 75 bp, synthetic construct
  source 1..75: mol_type = other DNA
gccgtgatgtggcgcttattgttcgccagcagcgactgaaattaaacctgtccggacggctggcgataaagatta

SEQ ID NO: 497018 - DNA, 75 bp, synthetic construct
  source 1..75: mol_type = other DNA
atgctcatagatttggttttaccttacccgccgacggtgaacacctactggcgtcgtcgtggcagtacatatttt

SEQ ID NO: 497019 - DNA, 75 bp, synthetic construct
  source 1..75: mol_type = other DNA
accaaatcacgactccgtatcaaagtcatcgcagacgttccagactcccgccgccgcgacctcgacaacatcctg

SEQ ID NO: 497020 - DNA, 75 bp, synthetic construct
  source 1..75: mol_type = other DNA
ctattacgctggcccggcgaaaacaccggagaacatggcctgcggttcactgggtccaaccacgggtggacgaat

SEQ ID NO: 497021 - DNA, 75 bp, synthetic construct
  source 1..75: mol_type = other DNA
agccattgcatggcacctgcgggaagttattggcggcgatgatgcgcgctatagccgggtggtgtttaacgaaat

SEQ ID NO: 497022 - DNA, 75 bp, synthetic construct
  source 1..75: mol_type = other DNA
gcgtcgctttatggaccgcgtggtggggtatatggtttcgccgctgctgtggaaaaagatcgctcgtggtctgtc

SEQ ID NO: 497023 - DNA, 75 bp, synthetic construct
  source 1..75: mol_type = other DNA
caatattgtgcgcggtcagcctgtgccaggtggacggctgggcgtgaagatttacgaaatcagaggtggtaacga

SEQ ID NO: 497024 - DNA, 75 bp, synthetic construct
  source 1..75: mol_type = other DNA
ttgcagagccaccggataagcgccgccgtgacctggacaacattctgaaagcaccgctggatgcgctgacgcatg

SEQ ID NO: 497025 - DNA, 75 bp, synthetic construct
  source 1..75: mol_type = other DNA
acaaaatgcgccgctggatatgtataccgaagtcaatacgcaaaccaatctcccggcgcagattgatatcagcgc

SEQ ID NO: 497026 - DNA, 75 bp, synthetic construct
  source 1..75: mol_type = other DNA
gatcttctcgatcaactacaccatgctcaatattggctggaccgtcggcccgccactcggcacgctgttggtcat

SEQ ID NO: 497027 - DNA, 75 bp, synthetic construct
  source 1..75: mol_type = other DNA
ccttcatgtcgaacagcaaaaaacaggagcccggatagccattcccctggctctgcgttgcgacaaattaaatct

SEQ ID NO: 497028 - DNA, 75 bp, synthetic construct
  source 1..75: mol_type = other DNA
gcgcgtctattttgaaaaaccccgtactaccatcggctggaaagggttaattaacgatcctcatatggatggctc

SEQ ID NO: 497029 - DNA, 75 bp, synthetic construct
  source 1..75: mol_type = other DNA
tggcaatcgctcaattattggtctgatgatcgaaagtaatatccacgagggcaatcagtcttccgagcaaccgcg

SEQ ID NO: 497030 - DNA, 75 bp, synthetic construct
  source 1..75: mol_type = other DNA
ccaagagaaccaacttaaagcttatgatgatgatgtgcttaaaaacttactcaatggctggtttatgcatatcgc

SEQ ID NO: 497031 - DNA, 75 bp, synthetic construct
  source 1..75: mol_type = other DNA
ggcttcttttgtaagcggcgcatttgcttcatgcatttcacaatatgtgatggtgattgctggtgatgctgccaa

SEQ ID NO: 497032 - DNA, 75 bp, synthetic construct
  source 1..75: mol_type = other DNA
taccctgggtgacgtggtgtcatcctgtcgtgattacatccttagtccgtggttattgcaccatcatcacgctaa

SEQ ID NO: 497033 - DNA, 75 bp, synthetic construct
  source 1..75: mol_type = other DNA
tttttaggaatgctggaaacccttttcgaacatggtgttacttcccggaaaacatttgaagattcaccattgttc

SEQ ID NO: 497034 - DNA, 75 bp, synthetic construct
  source 1..75: mol_type = other DNA
gcgacgtcatggcaatacgtatttcatctcggaggccggaaagcgttatcgccgtgatgtggcgctaattgttcg

SEQ ID NO: 497035 - DNA, 75 bp, synthetic construct
  source 1..75: mol_type = other DNA
accaaatcacgactccgcatcaaagtcatcgcagacgttccagactcccgccgccgcgacctcgataacatcctg

SEQ ID NO: 497036 - DNA, 75 bp, synthetic construct
  source 1..75: mol_type = other DNA
tttcacaatatgtgatggtgattgctgatggtgattttgccgaaaaggtggtcgcggttgttcttccggtgaatg

SEQ ID NO: 497037 - DNA, 75 bp, synthetic construct
  source 1..75: mol_type = other DNA
gcgacgtcgtggcagcacatattttgtatcaaaatccggagaacgttatcgccgggctgtgacgctaattgttcg

SEQ ID NO: 497038 - DNA, 75 bp, synthetic construct
  source 1..75: mol_type = other DNA
agcggccaagcaagcagtcaaaattaaccctgatttccgattgaaagtgatagtggatcgtaagctggctacgca

SEQ ID NO: 497039 - DNA, 75 bp, synthetic construct
  source 1..75: mol_type = other DNA
ttggtgatcacgattcgcacaaacccatgagtgagaatacggtaaatagtgcgttacgggtcatgggggctttgt

SEQ ID NO: 497040 - DNA, 75 bp, synthetic construct
  source 1..75: mol_type = other DNA
tggtttcagaacgatggcctgtagttcactgattgagtcaggattgtggtcgagggatgcagtggagcggcagat

SEQ ID NO: 497041 - DNA, 75 bp, synthetic construct
  source 1..75: mol_type = other DNA
tttttccgggggatcatgacgcaactaaggttatgagtgaaaacacggtaaacagcgcattgcgtgcgatgggct

SEQ ID NO: 497042 - DNA, 75 bp, synthetic construct
  source 1..75: mol_type = other DNA
gctaatggcgtcgatcccagtgagaacaagaaagccgttaaggtagagcaggagcaagaggcgataacgtttgaa

SEQ ID NO: 497043 - DNA, 75 bp, synthetic construct
  source 1..75: mol_type = other DNA
gtgtgtccagcgtggtgtgcagttgcgcagtgaggatgacgtggctgacgacgctgaccgtacggaacaggtgca

SEQ ID NO: 497044 - DNA, 75 bp, synthetic construct
  source 1..75: mol_type = other DNA
aacatcttggggagcgaatgttgatgctgcagtggtgggctgattatctggatgcgaatagaatggcggctatca

SEQ ID NO: 497045 - DNA, 75 bp, synthetic construct
  source 1..75: mol_type = other DNA
ttatcatgatggtgggtcggttacaccagaatatcccttacgttctgttacgctccccggtggggagcgtgtaca

SEQ ID NO: 497046 - DNA, 75 bp, synthetic construct
  source 1..75: mol_type = other DNA
caagttccggccatgcagggaaccttacaaccgtccatgagagcacccctgaagatgctgtgcttggactggttc

SEQ ID NO: 497047 - DNA, 75 bp, synthetic construct
  source 1..75: mol_type = other DNA
ctcttatgcaggagaaaaaccgtcttgaaggcctgttaccgcaaggctggaagaaggacttttccacatttttca

SEQ ID NO: 497048 - DNA, 75 bp, synthetic construct
  source 1..75: mol_type = other DNA
tagacctcgatcttttgctggcctgtactgcgagtcagttgcctgaacatctggtcgaagatctgaaaagacggg

SEQ ID NO: 497049 - DNA, 75 bp, synthetic construct
  source 1..75: mol_type = other DNA
tgatgaagattttcggttcgcttccggtatttactacagacaacttcattttgatgattatttcagaaaactgaa

SEQ ID NO: 497050 - DNA, 75 bp, synthetic construct
  source 1..75: mol_type = other DNA
gacctggagaaatatttataaaggtcaggggaaagtggcaatggtatgaacaaaagatgagttacagtgattgtc

SEQ ID NO: 497051 - DNA, 75 bp, synthetic construct
  source 1..75: mol_type = other DNA
gcgagacgaagcgcgtaagcttttagctaacggcgtcgatcccagtgaaaacaagaaagcggttaaggtagaaca

SEQ ID NO: 497052 - DNA, 75 bp, synthetic construct
  source 1..75: mol_type = other DNA
gttcaaagtattggcgatttcgtttccgttttggcggtaaacaacatttgatggcgttcggcgtttacccggatg

SEQ ID NO: 497053 - DNA, 75 bp, synthetic construct
  source 1..75: mol_type = other DNA
atggccctaacggatactaaagttcgctctgcgaaacctgaggagaaagagtattcacttgttgacggcgacggc

SEQ ID NO: 497054 - DNA, 75 bp, synthetic construct
  source 1..75: mol_type = other DNA
ggcggttgcttccagtaatcgacagcatcgtccggcgctggagttaaagcgcatccctgagttgcttgagaaaat

SEQ ID NO: 497055 - DNA, 75 bp, synthetic construct
  source 1..75: mol_type = other DNA
atggcactgacagatactaaggttcgttctgctaaatctgaggaaaaagagtattcacttgttgatggtgatggc

SEQ ID NO: 497056 - DNA, 75 bp, synthetic construct
  source 1..75: mol_type = other DNA
agtgcactacgggtgatgggttatgacactaaggttgaagtttgcggccacggcttccgtacaatggcctgtagt

SEQ ID NO: 497057 - DNA, 75 bp, synthetic construct
  source 1..75: mol_type = other DNA
gttgcagtggtgggccgattttctggatgcgaacagagagaagggtatcagtccgtttgaatatgcaaaggttaa

SEQ ID NO: 497058 - DNA, 75 bp, synthetic construct
  source 1..75: mol_type = other DNA
tgatcactattccggaagaccattaacccgacttgctgtcgaacttaccttgttagtctttatccgttcaagcga

SEQ ID NO: 497059 - DNA, 75 bp, synthetic construct
  source 1..75: mol_type = other DNA
aacatctgggggagcgcaggttgatgctgcagtggtgggcggattatctggatgcgaatcgggagataggggtaa

SEQ ID NO: 497060 - DNA, 75 bp, synthetic construct
  source 1..75: mol_type = other DNA
gctccaaatactggcggctacgttatcgcttcggtggtaaagagaagatgctggcgctggggaaataccctgaag

SEQ ID NO: 497061 - DNA, 75 bp, synthetic construct
  source 1..75: mol_type = other DNA
accgatgagtgaaaacacggtgaacaaggcgctgcgcgttatgggttatgacactagggtagaggtttgtgggca

SEQ ID NO: 497062 - DNA, 75 bp, synthetic construct
  source 1..75: mol_type = other DNA
gtgcagctaaaccggatgaaaaaccttataaacttgccgacagcggcaacatgtttttgctcgttcaccctaacg

SEQ ID NO: 497063 - DNA, 75 bp, synthetic construct
  source 1..75: mol_type = other DNA
gctgcagtggtgggcggattatctggatgctaatcgggagaaggcggtaagtccgttcaattttggtaaaatgaa

SEQ ID NO: 497064 - DNA, 75 bp, synthetic construct
  source 1..75: mol_type = other DNA
agcgtgtggccatgcatccggcagaacaaattgccggattccgcaaactctccgaacaagggaaaagcccggcgc

SEQ ID NO: 497065 - DNA, 75 bp, synthetic construct
  source 1..75: mol_type = other DNA
atttggcgtgttcgcggcggaaccggtaacggcatcccaggcacagaacatgaataaaatcggcgtggtttctgc

SEQ ID NO: 497066 - DNA, 75 bp, synthetic construct
  source 1..75: mol_type = other DNA
atgaaaactatcaatactgttgttgctgctatggctctttcaactctgtcatttggcgtgtttgccgcggaaccg

SEQ ID NO: 497067 - DNA, 75 bp, synthetic construct
  source 1..75: mol_type = other DNA
aagaagccaaacttcactgccgcatagacggtaacacagaagacacactgattcaggcatacataagcgcggcgc

SEQ ID NO: 497068 - DNA, 75 bp, synthetic construct
  source 1..75: mol_type = other DNA
gcaggccgctggcgtaaatacaagcacattcgaggatgagaacgcgatgctggatcagttggtgagccgttcgca

SEQ ID NO: 497069 - DNA, 75 bp, synthetic construct
  source 1..75: mol_type = other DNA
ccgcaacatcagcaatctggacgaacagtttcgccagcagttcaagggctatgacagctatctgaactcgattgg

SEQ ID NO: 497070 - DNA, 75 bp, synthetic construct
  source 1..75: mol_type = other DNA
ccgcggcctcggccaaggctccagcatcgagcacgatgcccgaccgttacgaaaagtggtcggaacagggccgcg

SEQ ID NO: 497071 - DNA, 75 bp, synthetic construct
  source 1..75: mol_type = other DNA
tatcgaaaacagcgtcagcctgaaacagcgtaaatacgcggtaatcgccgacgaagcgcactcctcgcagagcgg

SEQ ID NO: 497072 - DNA, 75 bp, synthetic construct
  source 1..75: mol_type = other DNA
catggtgtttggtttacatcatctaatattgcatctgcacttaaatacgcaaatagtcgtgcagtaacaatgatt

SEQ ID NO: 497073 - DNA, 75 bp, synthetic construct
  source 1..75: mol_type = other DNA
tcttgataccaacaattttgtcgtaaagaacgctcagccaatgctggcaaaacttcgcggcgaggaatggattca

SEQ ID NO: 497074 - DNA, 75 bp, synthetic construct
  source 1..75: mol_type = other DNA
gctggaaaactcgcagccgataatcatcgtcaccatccagacattcccgttcgtgctgaaagccatcgaaaacag

SEQ ID NO: 497075 - DNA, 75 bp, synthetic construct
  source 1..75: mol_type = other DNA
tgaattattcattagcgaccatttgaccgacaaagatatgatcagcaatgcttttgcggtgtataacaaaataac

SEQ ID NO: 497076 - DNA, 75 bp, synthetic construct
  source 1..75: mol_type = other DNA
ccgccgtgcgctataagctggcatttgataaatacattagcgagaacaattacccgaaaatcagcgcgatggtag

SEQ ID NO: 497077 - DNA, 75 bp, synthetic construct
  source 1..75: mol_type = other DNA
gcgcagcgtagttcccccagcgaccaataagccggtggtactgcgggcgtcaggtgcgaactctattctggcgga

SEQ ID NO: 497078 - DNA, 75 bp, synthetic construct
  source 1..75: mol_type = other DNA
tggccgtcgtcttgccgccctgcaacagttgctcagcgagcagcgtatcgatgccggatatccggttgtcgtcaa

SEQ ID NO: 497079 - DNA, 75 bp, synthetic construct
  source 1..75: mol_type = other DNA
cgcccgcttcgtgtttatcgggcgtgaaatgtatgagtctgcaggtggcatggtacgtgaggatttgttcagcgc

SEQ ID NO: 497080 - DNA, 75 bp, synthetic construct
  source 1..75: mol_type = other DNA
atgccgggtatctggttatcgtcaagcgcgtcagcgacgaaatggctgtggtggcctcgatggtggagaacaaca

SEQ ID NO: 497081 - DNA, 75 bp, synthetic construct
  source 1..75: mol_type = other DNA
tcatggtcactggctcgtgagggatccgtcagaaactacggcgatgaccgcgagcattatctggtgctgccggcg

SEQ ID NO: 497082 - DNA, 75 bp, synthetic construct
  source 1..75: mol_type = other DNA
ggcgctgttgccggagggctggaagaaggattacaccaccttctttacgctcgacggacagactttgatgagtct

SEQ ID NO: 497083 - DNA, 75 bp, synthetic construct
  source 1..75: mol_type = other DNA
aagagtggtcaggcatggctgtctctgatgcaggagaaaacccgtctggaggcgctgttgccggagggctggaag

SEQ ID NO: 497084 - DNA, 75 bp, synthetic construct
  source 1..75: mol_type = other DNA
atgatacgactgaaagactgtctgctctccgcctgcctggtatcgccgctgactcaggcggctgatctcggtacc

SEQ ID NO: 497085 - DNA, 75 bp, synthetic construct
  source 1..75: mol_type = other DNA
cgctgatattggcatagccagtgagcgtttgagcaatgatccccaactcgtcgctttcccctggtttcgttggca

SEQ ID NO: 497086 - DNA, 75 bp, synthetic construct
  source 1..75: mol_type = other DNA
cgctggattgtcggttgaggatattaagcggcaggtgatggaaaagagtgaagaggtaattgattatcagatata

SEQ ID NO: 497087 - DNA, 75 bp, synthetic construct
  source 1..75: mol_type = other DNA
aaacccctgccagaaccagcaaaaaagcagttaaaccagccgaagcagcagcccttaaagctgcacttgaggcag

SEQ ID NO: 497088 - DNA, 75 bp, synthetic construct
  source 1..75: mol_type = other DNA
acatgcagagttccacatgaaagacaaccgctgggtgcctggctggatgtgtacaccacgtccacaggcagagac

SEQ ID NO: 497089 - DNA, 75 bp, synthetic construct
  source 1..75: mol_type = other DNA
acaaaccgattatcgctgtagaaaactatgatcgaattgatggaccttatgctgatgacactgatgctatggggc

SEQ ID NO: 497090 - DNA, 75 bp, synthetic construct
  source 1..75: mol_type = other DNA
acaagggaagcgttattgccatagcgatatgaatcgaatgtttggcgggcgctggcagttatttgccgaaagcgg

SEQ ID NO: 497091 - DNA, 75 bp, synthetic construct
  source 1..75: mol_type = other DNA
gcggcaagctggtttatcaatggcggcaaaacaccactcaaatttggcgcgattagcgactggatggaagcacgc

SEQ ID NO: 497092 - DNA, 75 bp, synthetic construct
  source 1..75: mol_type = other DNA
tctcatgttgtggtcccggcaattcataaagatcgccatcagatccgtcgagtgctacacgaacgtctgggctat

SEQ ID NO: 497093 - DNA, 75 bp, synthetic construct
  source 1..75: mol_type = other DNA
tgggaagccattcgccacggttatcaaacggtgatggttgctggtggtgccgaagagttatgcccttcagaagca

SEQ ID NO: 497094 - DNA, 75 bp, synthetic construct
  source 1..75: mol_type = other DNA
taacgagtaaaaaaccggttatcaccgagcgagaaatcaacggcgttcgctggcgctggctgggcgatggtgtgc

SEQ ID NO: 497095 - DNA, 75 bp, synthetic construct
  source 1..75: mol_type = other DNA
ttgggggcggcgggactggaggcgctggtgtttcatcaggcgccgggcgggacgtttactcacttcagcgctgaa

SEQ ID NO: 497096 - DNA, 75 bp, synthetic construct
  source 1..75: mol_type = other DNA
gccagaagtctgttttatgctgttacagttatcgttatattccttattggatggggaacaggcgttgttttcttt

SEQ ID NO: 497097 - DNA, 75 bp, synthetic construct
  source 1..75: mol_type = other DNA
gcccggagccttttttatgctgttacagtcattgttatattcctgattggatggggaacaggtgtttttttcttc

SEQ ID NO: 497098 - DNA, 75 bp, synthetic construct
  source 1..75: mol_type = other DNA
gcggggaaactgccggaggcgtttttctggacggatgcggaaaacaatgatgtacaggtgacagcagaagagctt

SEQ ID NO: 497099 - DNA, 75 bp, synthetic construct
  source 1..75: mol_type = other DNA
tacttggtattacgttcttgcacgctatgatgatcgtctggttttatcgaaatcgtacagtaatgggagttctgc

SEQ ID NO: 497100 - DNA, 75 bp, synthetic construct
  source 1..75: mol_type = other DNA
gttttaataatcacacttcttgtcaggtcaggcaggaggtttatttcagacaaatgtatttcggaagagtctttt

SEQ ID NO: 497101 - DNA, 75 bp, synthetic construct
  source 1..75: mol_type = other DNA
tctactatggtttcccatggtggatagtgggagctggcgttgatgatgtggccagaagcctgttttatgctgtta

SEQ ID NO: 497102 - DNA, 75 bp, synthetic construct
  source 1..75: mol_type = other DNA
aaacggtgatggttgctggtggcgccgaagagttatgcccttcagaagcggcggtatttgatacgcttttcgcca

SEQ ID NO: 497103 - DNA, 75 bp, synthetic construct
  source 1..75: mol_type = other DNA
ctcggtgcgctgctgccaactatgcaccagtcttcaatggggtcgctgatgatctcggcgggctacaaggtgcat

SEQ ID NO: 497104 - DNA, 75 bp, synthetic construct
  source 1..75: mol_type = other DNA
cggacgagctggctattctgttgcggcagatggacgaggcgtttgggagcgactgcaaacgttcgggctctgcga

SEQ ID NO: 497105 - DNA, 75 bp, synthetic construct
  source 1..75: mol_type = other DNA
cggccgagttggccattctgttgcggcagatggccaaggcctcggcaggtgatgaaaggtcggatgacaccgata

SEQ ID NO: 497106 - DNA, 75 bp, synthetic construct
  source 1..75: mol_type = other DNA
atgaagttgccgagatacgtccccaggtgggcggtattatcattaaacgcaactttatcgaaggcgataaagtga

SEQ ID NO: 497107 - DNA, 75 bp, synthetic construct
  source 1..75: mol_type = other DNA
attacaggcgtcagcggaaaatcgtcagtcaccgtcggcgctctggttactgctaaccagggagatgcgctggtg

SEQ ID NO: 497108 - DNA, 75 bp, synthetic construct
  source 1..75: mol_type = other DNA
atgattcccgcatgctgttcctgtcggcactgagcgcactgttaggttgtgcaacctggcgtctgacctattcgc

SEQ ID NO: 497109 - DNA, 75 bp, synthetic construct
  source 1..75: mol_type = other DNA
tatcttctcgatgagtcggaaaagcgcgcggggagtatcagtgcggtgaagtcgttcgaggcgtttcgcgcatgg

SEQ ID NO: 497110 - DNA, 75 bp, synthetic construct
  source 1..75: mol_type = other DNA
cccactgacagaccaaggttttgcgaaccaagggggcttagcaaatggagcctatgttgccattaaaactgtaaa

SEQ ID NO: 497111 - DNA, 75 bp, synthetic construct
  source 1..75: mol_type = other DNA
gttcagctgggtactgtaactccgaatggcgaaggcgaaaaaattaatgtcgtttttaaagccacaaatgcgcag

SEQ ID NO: 497112 - DNA, 75 bp, synthetic construct
  source 1..75: mol_type = other DNA
cagccgagctggccattctattgcggcagatggccacggcctcggtagatgctgtgaggtcggaggacgccgata

SEQ ID NO: 497113 - DNA, 75 bp, synthetic construct
  source 1..75: mol_type = other DNA
ctgctgagctagccattctgttgcggcagatggtcacggcctcggcaggtgatgagaggtcggatgacaccgata

SEQ ID NO: 497114 - DNA, 75 bp, synthetic construct
  source 1..75: mol_type = other DNA
ggtggtaatttcctcagcattcattctgttattattattaacaggagttacgttaaaaacattcctgacaaaaac

SEQ ID NO: 497115 - DNA, 75 bp, synthetic construct
  source 1..75: mol_type = other DNA
atgaaatcaacgcctggcgtaatgcgatggaagcggcgaactacacgtttgagcacaatgggcgtaaatgggact

SEQ ID NO: 497116 - DNA, 75 bp, synthetic construct
  source 1..75: mol_type = other DNA
aggagtgaaacattcccatagaggctcaaaaatgcgtacaacgcatctagtgcctctttcaacgcaagcccttgc

SEQ ID NO: 497117 - DNA, 75 bp, synthetic construct
  source 1..75: mol_type = other DNA
ctggcattggggaaataccccgaagtgtcgttgacagatgccagggcacgccgggatgaggctcgtaagctttta

SEQ ID NO: 497118 - DNA, 75 bp, synthetic construct
  source 1..75: mol_type = other DNA
ggaagcgaaatatcaaagatattggtactcgtgacttactggtcccaattaaagcagtggaaaagtcaggacgcc

SEQ ID NO: 497119 - DNA, 75 bp, synthetic construct
  source 1..75: mol_type = other DNA
attctgttgtcacagaacaaatggaaggactcatcgccacctggccacacctgcaggcaaattacgcaccccgat

SEQ ID NO: 497120 - DNA, 75 bp, synthetic construct
  source 1..75: mol_type = other DNA
gctgcgtatatccataaagcagaacatctggaagaacggcgactgatgctacagtggtgggccgattttctggat

SEQ ID NO: 497121 - DNA, 75 bp, synthetic construct
  source 1..75: mol_type = other DNA
atctggatgagcgtaagctgatgttgcagtggtgggtcgattttctggatgccaatcgggaaagagcgattacgc

SEQ ID NO: 497122 - DNA, 75 bp, synthetic construct
  source 1..75: mol_type = other DNA
cagatatgcccgctggtctgaaattgatattgacaatgccatgtggactattctgcgtattaccgtgaaggagat

SEQ ID NO: 497123 - DNA, 75 bp, synthetic construct
  source 1..75: mol_type = other DNA
cggagtacgtgccgcgtatattcataaagcagaacatctggaagaacgtcggcttatgctgcaatggtgggcaga

SEQ ID NO: 497124 - DNA, 75 bp, synthetic construct
  source 1..75: mol_type = other DNA
cgcgaaaacgaaaggccgtggacgtaaggccgcgcagcccgagcctcagcctcaacaacagccagaacctcctta

SEQ ID NO: 497125 - DNA, 75 bp, synthetic construct
  source 1..75: mol_type = other DNA
tggtttcagaacgatggcgtgtagttcactaattgagtcaggattgtggtcgagggatgcggtagagaggcagat

SEQ ID NO: 497126 - DNA, 75 bp, synthetic construct
  source 1..75: mol_type = other DNA
tcggttcgtccgacattcgtcagctcaaaaccagccacctattagccccgattaaaaaagttgatgccagtggta

SEQ ID NO: 497127 - DNA, 75 bp, synthetic construct
  source 1..75: mol_type = other DNA
cggtgcgttatcgacaaccaaagcgcgacattaccccgctttaccctcaagccgattccctgagtttcttgcacg

SEQ ID NO: 497128 - DNA, 75 bp, synthetic construct
  source 1..75: mol_type = other DNA
gccgcacagcgccagggaattaaaattagccgccagttggtcggtaattattgtacatcattagatatggccgga

SEQ ID NO: 497129 - DNA, 75 bp, synthetic construct
  source 1..75: mol_type = other DNA
tgaaaaaatcacggatctgctgacggtggaaaaggcgcgggagcagaaaggaagcgaaatcaacgcctggcgaaa

SEQ ID NO: 497130 - DNA, 75 bp, synthetic construct
  source 1..75: mol_type = other DNA
atactcctgagaagtcggatgttccggggtcaatgtacctgaaggcagaggatggccgtgactggtatgaaagcc

SEQ ID NO: 497131 - DNA, 75 bp, synthetic construct
  source 1..75: mol_type = other DNA
ctgtattaatacctgtcccgcttatcgccagattggtggacatggctatggctcaatctacccgggcccaatcgg

SEQ ID NO: 497132 - DNA, 75 bp, synthetic construct
  source 1..75: mol_type = other DNA
ggagaaagcgcgcgggatgaagggcgatgaaataaacgcgtggcgtaatgcgatggaggcggcgaactacacgtt

SEQ ID NO: 497133 - DNA, 75 bp, synthetic construct
  source 1..75: mol_type = other DNA
gtacaggcgctgtggccagcgaatcagagtgttgcggaggtggcagatacggaagaaaaccgcaaagctgatatc

SEQ ID NO: 497134 - DNA, 75 bp, synthetic construct
  source 1..75: mol_type = other DNA
ggaaattcacgtaaggcagcgcaccatgaagaaggagctggaaaaactgagtagtgcagatgatgttctggcgta

SEQ ID NO: 497135 - DNA, 75 bp, synthetic construct
  source 1..75: mol_type = other DNA
gataaaagagtggactgaagccagagacctgccatcacctgatggagaaagcttccgtagttggttcaagcgaca

SEQ ID NO: 497136 - DNA, 75 bp, synthetic construct
  source 1..75: mol_type = other DNA
tcggcgcaaatcggcaaaaaatggtcgatgagttaggccactgggaagaatggcgcgatcgtgccagccagatcc

SEQ ID NO: 497137 - DNA, 75 bp, synthetic construct
  source 1..75: mol_type = other DNA
atgtcgataaaaaccagcgatgtagaatttaaactgcgtattcgtcagcagatagaagatccgattatgcgcaaa

SEQ ID NO: 497138 - DNA, 75 bp, synthetic construct
  source 1..75: mol_type = other DNA
ccaagttcaactgccgatatagagttgattaaagttgtcggtgttcatggccctgtatatgcagcctatctaatc

SEQ ID NO: 497139 - DNA, 75 bp, synthetic construct
  source 1..75: mol_type = other DNA
tcttcagctagcacatgagccaccatcgcatgtggttgtgccggcaatacataaagatcgccatcaaatccgcag

SEQ ID NO: 497140 - DNA, 75 bp, synthetic construct
  source 1..75: mol_type = other DNA
gtcggcatgttctggaaaatcttgatgcttatttgtatcaattgtccgaaaaggttactgcgaatggcgggcatg

SEQ ID NO: 497141 - DNA, 75 bp, synthetic construct
  source 1..75: mol_type = other DNA
tgatgaagacagcaatcttgaaagcctgtgctggtcgtgccacgccgccaagacggcgcgagaaagactcaagta

SEQ ID NO: 497142 - DNA, 75 bp, synthetic construct
  source 1..75: mol_type = other DNA
cagcacaaccgctgctatttgatgcagaactggacaccgtgcgtgggcgtcttggtagcgtaaaaggcgttaatt

SEQ ID NO: 497143 - DNA, 75 bp, synthetic construct
  source 1..75: mol_type = other DNA
cgcatcagagttctgacctgcctccatctctgtggcattgatggtgaaacaggggaatccgttgagcttgcggat

SEQ ID NO: 497144 - DNA, 75 bp, synthetic construct
  source 1..75: mol_type = other DNA
gccctgattctggggcgtgagccggatatatccgggagtgccgcagagatagcgcagcgggtggcagaatgggaa

SEQ ID NO: 497145 - DNA, 75 bp, synthetic construct
  source 1..75: mol_type = other DNA
attttgcgtaatggcttaaccgtgccggtcagccgccgttatctgaaaagcttaaaagaggcgattggcctgtaa

SEQ ID NO: 497146 - DNA, 75 bp, synthetic construct
  source 1..75: mol_type = other DNA
atgattaaagtcttaattgtcgatgatgaaccgttagcacgggagaacctgcgcgtatttttgcaagagcagagc

SEQ ID NO: 497147 - DNA, 75 bp, synthetic construct
  source 1..75: mol_type = other DNA
aaacattgacggggctaacgcttggtatcgacagccgtttctcccatgaagaaagcagcacaactcaggcgggtg

SEQ ID NO: 497148 - DNA, 75 bp, synthetic construct
  source 1..75: mol_type = other DNA
gttgcggttgctacggaagaggggattgacgacgacgctattctgcgtgcgctggagagcttccagggaaccggt

SEQ ID NO: 497149 - DNA, 75 bp, synthetic construct
  source 1..75: mol_type = other DNA
gcgcgtattccggtgattcgtcgcgcggaaatgctggctgagttaatgcgttttcgtcatggcatcgccattgcc

SEQ ID NO: 497150 - DNA, 75 bp, synthetic construct
  source 1..75: mol_type = other DNA
ttagcgccaaatccggtcacgcagcagttaatgaatctgggggcgacgatttatttcaaccatcgcccggaaaac

SEQ ID NO: 497151 - DNA, 75 bp, synthetic construct
  source 1..75: mol_type = other DNA
taaccctgaatgcgccgggccgtcataacgctctgaatgctgctgctgcggttgcggtggcgacggaagaaggga

SEQ ID NO: 497152 - DNA, 75 bp, synthetic construct
  source 1..75: mol_type = other DNA
gttaacggtgggctggtaaaagcggctggcgttcatgcgcgcttaggtcatggtcgctatttgattgccgaagca

SEQ ID NO: 497153 - DNA, 75 bp, synthetic construct
  source 1..75: mol_type = other DNA
ttttcgtcacggtatcgccattgccgggacgcatggtaaaaccaccaccaccgcgatggtttccagtatttatgc

SEQ ID NO: 497154 - DNA, 75 bp, synthetic construct
  source 1..75: mol_type = other DNA
gttggtgtggtgattggtgggggtaacctgttccgtggcgctggtctggcgaaagcggggatgaaccgcgttgtg

SEQ ID NO: 497155 - DNA, 75 bp, synthetic construct
  source 1..75: mol_type = other DNA
atgcaacagttcgctattgcaggggcggcatcggttcgccctttcaacccgattttatcggtacagcattcacga

SEQ ID NO: 497156 - DNA, 75 bp, synthetic construct
  source 1..75: mol_type = other DNA
agagcacttaataactatcatgaagctcaaatggggaagaaaaaaatcactaaagcagattggaatattcttgct

SEQ ID NO: 497157 - DNA, 75 bp, synthetic construct
  source 1..75: mol_type = other DNA
ccggcacagaatattcttgaaataggttatattcctctcagtgatattatcagaaaaaatctcgaacttgatatc

SEQ ID NO: 497158 - DNA, 75 bp, synthetic construct
  source 1..75: mol_type = other DNA
acctatgtttattgctatcacaaacggcagtgaacattcacaggaggcgggtcgttttattaatttcttattgag

SEQ ID NO: 497159 - DNA, 75 bp, synthetic construct
  source 1..75: mol_type = other DNA
cggcgaactgctctgtcgccgtgatgcaggatggcgcaccgcgcatgctgatgatggaaaacggcagttccctac

SEQ ID NO: 497160 - DNA, 75 bp, synthetic construct
  source 1..75: mol_type = other DNA
ttcgtgacggcctgaaagagagcgttgagatggcgagccgcgcgcaggtcacactggcgatggagatcatggatt

SEQ ID NO: 497161 - DNA, 75 bp, synthetic construct
  source 1..75: mol_type = other DNA
ataatgaagactctttttacagatgttaccggtactgtaccagatgctgaagagatcgcgcataaagccgaactt

SEQ ID NO: 497162 - DNA, 75 bp, synthetic construct
  source 1..75: mol_type = other DNA
tgataaagggcggcgatgcgctggccatcatcagaaaactggcgtcggtgtacggcatcacggtgacgacagaca

SEQ ID NO: 497163 - DNA, 75 bp, synthetic construct
  source 1..75: mol_type = other DNA
atcgtactaaagaccagtttgtacagcctgtggtgaaagacgtcaaaaaaggcatgagccgggcgcaggttgcac

SEQ ID NO: 497164 - DNA, 75 bp, synthetic construct
  source 1..75: mol_type = other DNA
ttttgatgaaataaagaaaaaaattgataacggtgaatggaaagaaggcaaagctataccaacagaaagagaact

SEQ ID NO: 497165 - DNA, 75 bp, synthetic construct
  source 1..75: mol_type = other DNA
aagtgctgccagtggtcaacacacagggccagccttgcggtacgctgcattttcaggatctgctggtagaggcgt

SEQ ID NO: 497166 - DNA, 75 bp, synthetic construct
  source 1..75: mol_type = other DNA
atgaaaaaaatcataatattgctcagtttactgatactcctgcctctaacggcgaccagtaatccattgattcca

SEQ ID NO: 497167 - DNA, 75 bp, synthetic construct
  source 1..75: mol_type = other DNA
ggcggtatatcgtgccgatgactacgtccatgaaaaaccctggcaggggattggtgtgggcgcggccgttggact

SEQ ID NO: 497168 - DNA, 75 bp, synthetic construct
  source 1..75: mol_type = other DNA
agcggtaaaacggtcacactttatagcgctctgcaaacgctgaataccgccgatattaatatttgcagcgtcgaa

SEQ ID NO: 497169 - DNA, 75 bp, synthetic construct
  source 1..75: mol_type = other DNA
ggcaggcacccggttgtgtacattgctaccacggtttttatggtcgtacggccttatttgaagttctgcccataa

SEQ ID NO: 497170 - DNA, 75 bp, synthetic construct
  source 1..75: mol_type = other DNA
gtcagcttatttccgctaataccgacgttgaatcgctggaaacgcacgcccgacaggcgggtatgcgtacgcttt

SEQ ID NO: 497171 - DNA, 75 bp, synthetic construct
  source 1..75: mol_type = other DNA
tcccgggaaaattccgctcgatctgattgaagtacgctccggctcatacctcgaagaggatgatattgtccgtct

SEQ ID NO: 497172 - DNA, 75 bp, synthetic construct
  source 1..75: mol_type = other DNA
atgcagaggctggaaagcttgtgacttttggtatcgtgccttataaacctgaaacgggctatggttacatccgtc

SEQ ID NO: 497173 - DNA, 75 bp, synthetic construct
  source 1..75: mol_type = other DNA
ttgaaaacggctgcctggccgtagagcaaggcttaaccacctttgaagagttaatccgcgtactgggatgccgca

SEQ ID NO: 497174 - DNA, 75 bp, synthetic construct
  source 1..75: mol_type = other DNA
tattccagacaatgtatggtcgtcgccgctgccccactggcaggcacccggttgtgtacattgctaccacggttt

SEQ ID NO: 497175 - DNA, 75 bp, synthetic construct
  source 1..75: mol_type = other DNA
tgtcttccgacgacgattccgacagccagccgatggctccggtgctctatctgcaggataaatcatctaactttg

SEQ ID NO: 497176 - DNA, 75 bp, synthetic construct
  source 1..75: mol_type = other DNA
cccggacaccggagatcattaacgacctggcttttcatgcatcgcaagttctgattgaaagcatcaatctcgaca

SEQ ID NO: 497177 - DNA, 75 bp, synthetic construct
  source 1..75: mol_type = other DNA
gatccgcgatggcgaaacggcagaaattgccattaaagccgcgcaaaccggtcacctggtgttgtctaccctaca

SEQ ID NO: 497178 - DNA, 75 bp, synthetic construct
  source 1..75: mol_type = other DNA
ccgccagattaaaagtgttgggaagcctggatattgcggaacatcgcctgccgcaagatgggcaattcactgtcg

SEQ ID NO: 497179 - DNA, 75 bp, synthetic construct
  source 1..75: mol_type = other DNA
ttatggtcgcacggccttatttgaagttctgcccataacaccggtcatacgccagcttatttccgctaataccga

SEQ ID NO: 497180 - DNA, 75 bp, synthetic construct
  source 1..75: mol_type = other DNA
atccgcgtcgccgagcagtatgccgatgaaggccacctggtcaccttcggtatcgtgccgaacgccccggaaacc

SEQ ID NO: 497181 - DNA, 75 bp, synthetic construct
  source 1..75: mol_type = other DNA
tgtacgccgaatctggcctggtcaccaccgtcggggtgaaagatttggtggtagtgcagaccaaagatgcagtgc

SEQ ID NO: 497182 - DNA, 75 bp, synthetic construct
  source 1..75: mol_type = other DNA
atgcggtgatggagcagaccgcggatgcggtagtggtgccgatggacgcgggctggagcgatgtcggctcctggt

SEQ ID NO: 497183 - DNA, 75 bp, synthetic construct
  source 1..75: mol_type = other DNA
ttagatcggcaattccatacgctgctgatgggaaattggtaacatttggtataattccagacaaagcagaaactg

SEQ ID NO: 497184 - DNA, 75 bp, synthetic construct
  source 1..75: mol_type = other DNA
gcctgatggcgtcggccccttgcaaagcggtgatgagctgacggttactttcgatggacattctttgacaactcg

SEQ ID NO: 497185 - DNA, 75 bp, synthetic construct
  source 1..75: mol_type = other DNA
aacgaacagcggatgctgttgtagtaccgatggatgcgggctggagtgatgtgggctcttgggcttcgttatggg

SEQ ID NO: 497186 - DNA, 75 bp, synthetic construct
  source 1..75: mol_type = other DNA
agatgtgaaacatgtggttgagcagctcaaagccgagggtcgacacgagtatcggatgcatcgcgaagtataccg

SEQ ID NO: 497187 - DNA, 75 bp, synthetic construct
  source 1..75: mol_type = other DNA
gctgcgccagctcaacaagctgtcgaacaacattattcttgagccggtcgggcgcaacaccgccccggccatcgc

SEQ ID NO: 497188 - DNA, 75 bp, synthetic construct
  source 1..75: mol_type = other DNA
tgtcagcaccaaggacgccgtgctggtgatgaatcgcgagcgttcccaggacgtgaagaaggcggtcgagttcct

SEQ ID NO: 497189 - DNA, 75 bp, synthetic construct
  source 1..75: mol_type = other DNA
agcgaaaactgctacatcaacagcgacgagaagctggtggcggccattggcgtagagaatctggtgattgtcagc

SEQ ID NO: 497190 - DNA, 75 bp, synthetic construct
  source 1..75: mol_type = other DNA
cactagcattgaaagggtatatggtaacttttggtgttgtgcctaataagccagaaacagggtatggatatataa

SEQ ID NO: 497191 - DNA, 75 bp, synthetic construct
  source 1..75: mol_type = other DNA
tataatagcaaaaataatttcatttttaccgacgcaaacttagttacaactgttggcgttgatgaccttattatt

SEQ ID NO: 497192 - DNA, 75 bp, synthetic construct
  source 1..75: mol_type = other DNA
tcattattgctggcgggtcctgcagtcgtttatggcctctgtcgcgcacactctatcccaaacagtttttatgtc

SEQ ID NO: 497193 - DNA, 75 bp, synthetic construct
  source 1..75: mol_type = other DNA
gtttactgatactcctgcctctgacagcagccagcaagccattaattccaataatgaagacactttttacggacg

SEQ ID NO: 497194 - DNA, 75 bp, synthetic construct
  source 1..75: mol_type = other DNA
taggttttatcgcctgggctgcgacgtttatcttattttcctggatcttttgctacacgactcgttttatttatg

SEQ ID NO: 497195 - DNA, 75 bp, synthetic construct
  source 1..75: mol_type = other DNA
ccaattacaatgaagacgtcctgcgtctgaccaccggttgctcggtcattgtgacgggtaaagtcgtggcgtcgc

SEQ ID NO: 497196 - DNA, 75 bp, synthetic construct
  source 1..75: mol_type = other DNA
atgacaatgcctgagcgtgtctcgctgaccatggcgatgcgagattcaggaaccgttctcgactggaaaagcctg

SEQ ID NO: 497197 - DNA, 75 bp, synthetic construct
  source 1..75: mol_type = other DNA
tttcagagtttgagactatcgagcaagaagaaagttacaccaaatggttgcgtgaaaaagtggctgccagtctgg

SEQ ID NO: 497198 - DNA, 75 bp, synthetic construct
  source 1..75: mol_type = other DNA
cgattaccagaatatcgccactctgggcagggctgattggtgtctgtacgtttattgccgcgttgttattgacga

SEQ ID NO: 497199 - DNA, 75 bp, synthetic construct
  source 1..75: mol_type = other DNA
ttatagcccgtgtgaagagcatggttacgatctggcactcagccacgaccagatgcgccaactcactgccaccgg

SEQ ID NO: 497200 - DNA, 75 bp, synthetic construct
  source 1..75: mol_type = other DNA
aatatcgccgaagagatccccatctggaaagaggaactctgtactgatgaatcccctaatgatttttatcaaaat

SEQ ID NO: 497201 - DNA, 75 bp, synthetic construct
  source 1..75: mol_type = other DNA
gggtattttgtatacgattccaaaaaggccggtggtctgacagtttctcacctgcgtgtgagcgagcatccaatt

SEQ ID NO: 497202 - DNA, 75 bp, synthetic construct
  source 1..75: mol_type = other DNA
tactccagggccgcgtagccgttgacagcgaagtcaccgtacgcggatgggtacgtccccgccgagattcaaaag

SEQ ID NO: 497203 - DNA, 75 bp, synthetic construct
  source 1..75: mol_type = other DNA
tcttaccgtgcttattgcaaggaggagtaaaccatgaaactaccgggaaacgcccttatctggtgcgtattaatc

SEQ ID NO: 497204 - DNA, 75 bp, synthetic construct
  source 1..75: mol_type = other DNA
taacgcggcgaaaatcgcccgcgaatgtggcctggcggcccgtattaataccgtcatgcagatggcttttttcca

SEQ ID NO: 497205 - DNA, 75 bp, synthetic construct
  source 1..75: mol_type = other DNA
gagcgatgaagaaattcgattctttatcaacggcattcgcgataacactatctcagaagggcagattgccgccct

SEQ ID NO: 497206 - DNA, 75 bp, synthetic construct
  source 1..75: mol_type = other DNA
gtatcccttcaacgctagcgctatccatgcgttggcagaggcattctgccgcgacgatcgcaacgaattaaaatt

SEQ ID NO: 497207 - DNA, 75 bp, synthetic construct
  source 1..75: mol_type = other DNA
tcaatgacctcagtctgccggcgcgtcagtatattcagaaaagccgccttaatacgcatgaggacgggcgcaaag

SEQ ID NO: 497208 - DNA, 75 bp, synthetic construct
  source 1..75: mol_type = other DNA
ccttgaaaaacatcaatgaatgtattcgcaccgaggcggaagagttggcggagtacaccttactggccgtgcatc

SEQ ID NO: 497209 - DNA, 75 bp, synthetic construct
  source 1..75: mol_type = other DNA
ctggaggtcagtggacgctggatggaagcggcagaagcatggcgacgggctgccggtgttgcgccccggacagac

SEQ ID NO: 497210 - DNA, 75 bp, synthetic construct
  source 1..75: mol_type = other DNA
agagatgacgctacgcgatgcgctctcattgtttgtcgctcgtggttgtaaagtgttgccggtggttgacgctca

SEQ ID NO: 497211 - DNA, 75 bp, synthetic construct
  source 1..75: mol_type = other DNA
gctagttgaacaatcggtgatgccaacgcgggtgaccaaagttgagcagcaggttaaaaaaaccgtgcagccacc

SEQ ID NO: 497212 - DNA, 75 bp, synthetic construct
  source 1..75: mol_type = other DNA
gtaaaaaacgtgatggtcatgcgctgagtgatgatgaaattcgtttctttatcaatggcattcgcgacaacacta

SEQ ID NO: 497213 - DNA, 75 bp, synthetic construct
  source 1..75: mol_type = other DNA
aaccgttctcgactggaaaagcctgcatctgaatggcccgattgttgataaacactccaccggtggcgtcggcga

SEQ ID NO: 497214 - DNA, 75 bp, synthetic construct
  source 1..75: mol_type = other DNA
ctggcggaaggtctggatgcgctggtgatggacgtgaaagtgggtagcggcgcgtttatgccgacctacgaactc

SEQ ID NO: 497215 - DNA, 75 bp, synthetic construct
  source 1..75: mol_type = other DNA
cgcgcaaatcgatagtgttctgatggagatgacgcagaatcttcagatcctcaaagataatgccggaggcagtga

SEQ ID NO: 497216 - DNA, 75 bp, synthetic construct
  source 1..75: mol_type = other DNA
tttatggcaggtactttgtggactggatgggggcttactcaagcgttttacggacacgctgcagcggtggcaaaa

SEQ ID NO: 497217 - DNA, 75 bp, synthetic construct
  source 1..75: mol_type = other DNA
tttaatcaactatttaatttccgtggacgcagcttttctgatcttttcctacagattagaaaagcactgcacgaa

SEQ ID NO: 497218 - DNA, 75 bp, synthetic construct
  source 1..75: mol_type = other DNA
agcaaaggccaggatctggtggaacgcaactggcaggctctggcgctggcgcgtgaatccgtagaagaagttccg

SEQ ID NO: 497219 - DNA, 75 bp, synthetic construct
  source 1..75: mol_type = other DNA
gtggtcaaagccacgcaactggcaggcaaaagtacctgggaaccgttctatttcgccatcgtctgtggcgtgatt

SEQ ID NO: 497220 - DNA, 75 bp, synthetic construct
  source 1..75: mol_type = other DNA
gtgggcaagtgtttcggcggatcatgtttccggcgatgatgcgttacgccctgccaggcattggcaacaactggc

SEQ ID NO: 497221 - DNA, 75 bp, synthetic construct
  source 1..75: mol_type = other DNA
ggtgccgaaaagccatcagcagatgttatctatggaccagacctgtcaggtcgtcccggctatattgaagtatcc

SEQ ID NO: 497222 - DNA, 75 bp, synthetic construct
  source 1..75: mol_type = other DNA
gttcccggcgatgatgcgttacgccctaccggggattggcaacaactggcaggtcattcttaaatcaacggctct

SEQ ID NO: 497223 - DNA, 75 bp, synthetic construct
  source 1..75: mol_type = other DNA
gatggtcgccggtattataaccctggggtttatctacggcgcttacttcaccgaaacgttccgcggcgcgtttat

SEQ ID NO: 497224 - DNA, 75 bp, synthetic construct
  source 1..75: mol_type = other DNA
ggctacaccacactgattcgtggtgtgccggatttagtgttgatgctgctgatattttacggtttgcagattgcg

SEQ ID NO: 497225 - DNA, 75 bp, synthetic construct
  source 1..75: mol_type = other DNA
gaagttcaggtagcactgctgactgcacagatcaaccacctgcagggccactttgcagagcacaaaaaagatcac

SEQ ID NO: 497226 - DNA, 75 bp, synthetic construct
  source 1..75: mol_type = other DNA
gcacatcgtcgctttccttttggtagccgtgacgacgcggtacgccagcgagcacgggagatcatgagcaaagcg

SEQ ID NO: 497227 - DNA, 75 bp, synthetic construct
  source 1..75: mol_type = other DNA
gcaaaaacaaccactggcaaccaaaatccgaacgcttaaccgaaccagtgcatccattgagcgcctgctagaaaa

SEQ ID NO: 497228 - DNA, 75 bp, synthetic construct
  source 1..75: mol_type = other DNA
gcagcatcggcagcatcagcgccactctaccgggaggctttagttcgctgtgggttaatcaggaaaaaacccgca

SEQ ID NO: 497229 - DNA, 75 bp, synthetic construct
  source 1..75: mol_type = other DNA
agcaattttattagataagggaagagttgttgctgatggtaatccttcagatataatgaatttatataatgcaaa

SEQ ID NO: 497230 - DNA, 75 bp, synthetic construct
  source 1..75: mol_type = other DNA
gcttaaactcataaccgggacgtccaggccgacgactggagaaattgaaatctccggacgtgtcgctgcattact

SEQ ID NO: 497231 - DNA, 75 bp, synthetic construct
  source 1..75: mol_type = other DNA
ggtgcgtttatttcattactcgatacggtaatcgtcgaattaaataaagcgatcgaaattcacgataaaaaataa

SEQ ID NO: 497232 - DNA, 75 bp, synthetic construct
  source 1..75: mol_type = other DNA
ccgaagctggcgctatcgcgactgtgcatggcgctttgcaaacgggcgcactctctacatcgtttacatcatcgc

SEQ ID NO: 497233 - DNA, 75 bp, synthetic construct
  source 1..75: mol_type = other DNA
catgtcgaagaagagaaaatcaattacgatttcttcctcaacctcccagaaatcgaccgtagcaaactggaacgt

SEQ ID NO: 497234 - DNA, 75 bp, synthetic construct
  source 1..75: mol_type = other DNA
gcccgcgcgctgaatccggagcatccggtgattcgcggtacctcggctaacccggacacctacttccagtcacgt

SEQ ID NO: 497235 - DNA, 75 bp, synthetic construct
  source 1..75: mol_type = other DNA
ggcgagcgtgaggcattgcctcgcgtcattggtgggcgctatggtctgtcttccaaagagtttggcccggactgt

SEQ ID NO: 497236 - DNA, 75 bp, synthetic construct
  source 1..75: mol_type = other DNA
taacgccaccggctgttcttcaatttatggcggtaacctgccctctacaccgtataccaccgatgccaacggtcg

SEQ ID NO: 497237 - DNA, 75 bp, synthetic construct
  source 1..75: mol_type = other DNA
tcaggaagcgcaagatttcgccctcatttcgcaaatcgcgacactaaaaagccgtgtgccatttattcatttctt

SEQ ID NO: 497238 - DNA, 75 bp, synthetic construct
  source 1..75: mol_type = other DNA
ggcagggcgcaactcagctaatggccagttcggaattagcctgtcttcaggcacataagattcagaccgcgttaa

SEQ ID NO: 497239 - DNA, 75 bp, synthetic construct
  source 1..75: mol_type = other DNA
gcacataagattcagaccgcattaattagtcaggatgaaggctgtggcaaaataaaagttaatttaattctgatt

SEQ ID NO: 497240 - DNA, 75 bp, synthetic construct
  source 1..75: mol_type = other DNA
aggggtattctgttaaaaacgccgctggtcagtctaatggcgtctacaaactgtatgtgaaagaggatggttccg

SEQ ID NO: 497241 - DNA, 75 bp, synthetic construct
  source 1..75: mol_type = other DNA
tatgacctggcattgagtcacgaccagatgcgccaactcaccgcaaccggcttctggccgctgtatcgctttgat

SEQ ID NO: 497242 - DNA, 75 bp, synthetic construct
  source 1..75: mol_type = other DNA
ccatttaacacaaattctgccaggcgacagcgcactggcagaattgcaaggcgcgattgccaaaagctacagcag

SEQ ID NO: 497243 - DNA, 75 bp, synthetic construct
  source 1..75: mol_type = other DNA
attacgggcatccgcaagcggaacgggtgattatcctgatgggctctgccattggcacctgtgaagaagtggttg

SEQ ID NO: 497244 - DNA, 75 bp, synthetic construct
  source 1..75: mol_type = other DNA
atgacgtgacatttattccgggtcacggaccattatccacacttggttatgagcgcctgcataatcccttcctgc

SEQ ID NO: 497245 - DNA, 75 bp, synthetic construct
  source 1..75: mol_type = other DNA
agttctggctgcaaggcttgcctgcgcaaagtcgtatgtttggtctggaagagtgccagccgctgacgccagatc

SEQ ID NO: 497246 - DNA, 75 bp, synthetic construct
  source 1..75: mol_type = other DNA
atgacgtgacgtttatacctggtcacgggccgttatcaaccctcggctatgagcggttgcataaccccttcctgc

SEQ ID NO: 497247 - DNA, 75 bp, synthetic construct
  source 1..75: mol_type = other DNA
ctatggttctgtctcaaaagcttcagtagatcagaagtttgctgatttacttggtcttgtgtggcctgaccgtat

SEQ ID NO: 497248 - DNA, 75 bp, synthetic construct
  source 1..75: mol_type = other DNA
atgacgtgacatttattccgggtcacggaccattatctacacttggttatgagcgcctgcacaatcccttcctgc

SEQ ID NO: 497249 - DNA, 75 bp, synthetic construct
  source 1..75: mol_type = other DNA
atgacgtgacatttattccgggtcacggaccattatcaactcttggttacgaacgcctgcataatcccttcctgc

SEQ ID NO: 497250 - DNA, 75 bp, synthetic construct
  source 1..75: mol_type = other DNA
tcatcttagcgtacggacatccctgaaggcgtctgaagcatttctggaaggagctctgactctgcagggagtaag

SEQ ID NO: 497251 - DNA, 75 bp, synthetic construct
  source 1..75: mol_type = other DNA
gcggtgattgatacctgcatcgcgcatatgagtatggtttgcccgtacgatgatttgctgatcctggggttacgt

SEQ ID NO: 497252 - DNA, 75 bp, synthetic construct
  source 1..75: mol_type = other DNA
ttaatgacagttgcagcctgaacattagcggcagcgatgaagagcaggcgcggcgcgtgctggaagagtatatcc

SEQ ID NO: 497253 - DNA, 75 bp, synthetic construct
  source 1..75: mol_type = other DNA
ggcgtggaagatcgcggtgtgatgacggcgtttatgcaggcactgggatttacggcacagcagggcggctgggag

SEQ ID NO: 497254 - DNA, 75 bp, synthetic construct
  source 1..75: mol_type = other DNA
ggcgtggaagatcgcggtgtgatgacggcgtttatgcaggcgctggggtttacggcgcaacagggcggctgggag

SEQ ID NO: 497255 - DNA, 75 bp, synthetic construct
  source 1..75: mol_type = other DNA
aattctgccaggcaatgacgcagacttactggtcatgacgccagaattacgcattgagcaggtatacgctcgcgg

SEQ ID NO: 497256 - DNA, 75 bp, synthetic construct
  source 1..75: mol_type = other DNA
taatcatgcctacgtttaatgctgcatcttatatttcgtatagcatcatttctgtaattgaacaatcatataatg

SEQ ID NO: 497257 - DNA, 75 bp, synthetic construct
  source 1..75: mol_type = other DNA
caatattcagaagcacagcgaatcattgctccctgctatttctttgtggaacggactgggtcaccgttttgaaag

SEQ ID NO: 497258 - DNA, 75 bp, synthetic construct
  source 1..75: mol_type = other DNA
agtgttagttggagtgcttgataaagccccaatgcctgattttagtagcgccacgatgaatacagggacattacc

SEQ ID NO: 497259 - DNA, 75 bp, synthetic construct
  source 1..75: mol_type = other DNA
atcagggaagaattaacgctacacaaagtagcgccaccatgcagaatacctggtggcaggtatctggagactctg

SEQ ID NO: 497260 - DNA, 75 bp, synthetic construct
  source 1..75: mol_type = other DNA
ataatatgcgttttggcctggagctggaaaaatcggcgttcgggaaatataacgtggacaatgcgataaacgcta

SEQ ID NO: 497261 - DNA, 75 bp, synthetic construct
  source 1..75: mol_type = other DNA
tttgctatataaccaaaagcctgattgtcgtctccgagcttgcccacagagttaccagtaagaactgtcgcaaat

SEQ ID NO: 497262 - DNA, 75 bp, synthetic construct
  source 1..75: mol_type = other DNA
tatcgtctgcttatcaggcatgggcagagactcttttgtatggctttgataccgcctatcgaggcgcaataacag

SEQ ID NO: 497263 - DNA, 75 bp, synthetic construct
  source 1..75: mol_type = other DNA
gattaccactccaagcgctaatatttttaatccatcacaggggcctttagcaaactatctaattatgggagatag

SEQ ID NO: 497264 - DNA, 75 bp, synthetic construct
  source 1..75: mol_type = other DNA
cagaaataataacttatgatatgatgcttaaaagtaattttattggtaacctgacaggtatatataatagggaaa

SEQ ID NO: 497265 - DNA, 75 bp, synthetic construct
  source 1..75: mol_type = other DNA
tgatgacatttgggaaaaagaaaaattatccttgcaaatccctttactcgaaaaaggatatgatgtagtttgttc

SEQ ID NO: 497266 - DNA, 75 bp, synthetic construct
  source 1..75: mol_type = other DNA
gaaccggtaatgaggtctcctctgttgagggaagtgccactgcaaccacagccggtgaccagagtgattaccgcg

SEQ ID NO: 497267 - DNA, 75 bp, synthetic construct
  source 1..75: mol_type = other DNA
gttcagattggtgccgacagaaagcatgagctggacggagtggatttgttcacgggggcattactgacctataca

SEQ ID NO: 497268 - DNA, 75 bp, synthetic construct
  source 1..75: mol_type = other DNA
accggaggtattgaggcttatgacagttccgtgagtgtgacctctcagaatgctgtttttgaccgtgcaggctgc

SEQ ID NO: 497269 - DNA, 75 bp, synthetic construct
  source 1..75: mol_type = other DNA
atgttaacgattcaatttctctgtcctttgcctaacggtattcatgctcgtccggcgtgggaacttaaagaacag

SEQ ID NO: 497270 - DNA, 75 bp, synthetic construct
  source 1..75: mol_type = other DNA
tcggctgggtcgatcagattaccaactccgacaatacctatttttatactgaagccacggtgagctacccggaaa

SEQ ID NO: 497271 - DNA, 75 bp, synthetic construct
  source 1..75: mol_type = other DNA
gcattgataccacgccgcccgttctacctgacccgatgcagtggatcagagctggtttccagtacggtagtctgg

SEQ ID NO: 497272 - DNA, 75 bp, synthetic construct
  source 1..75: mol_type = other DNA
tcctgatccccattttcccggccaccagcggcaatgtcggcgaatccagcttcatgatcgagctgccgcaaatcc

SEQ ID NO: 497273 - DNA, 75 bp, synthetic construct
  source 1..75: mol_type = other DNA
aaaaggcaattcctggacaccggccgacattgtcaggttcactggaccggattgcgttgatatgggccgtgttaa

SEQ ID NO: 497274 - DNA, 75 bp, synthetic construct
  source 1..75: mol_type = other DNA
atacgggctgaactacccgcgtatcttccccgcgacagatgatgcggattcctaccagcttactgcggttgcggt

SEQ ID NO: 497275 - DNA, 75 bp, synthetic construct
  source 1..75: mol_type = other DNA
tctgatgcgaggtccggtctgcataaagctgagtggttcgctatcgacagtaatggcgtccgtcgctctgttgat

SEQ ID NO: 497276 - DNA, 75 bp, synthetic construct
  source 1..75: mol_type = other DNA
tgctccccaaactcatctccggtgagctatccctggatgatcttccggatctcaccaccgatacagaagctgcat

SEQ ID NO: 497277 - DNA, 75 bp, synthetic construct
  source 1..75: mol_type = other DNA
gctcccgaaactcatctccggtgagctatccctggaagatcttccggatctcaccaccgatacagaagctgcata

SEQ ID NO: 497278 - DNA, 75 bp, synthetic construct
  source 1..75: mol_type = other DNA
agcgatggagacactggatcccagaagtcaggacattatccgcgcgcgctggctggatgacgataataaagcgac

SEQ ID NO: 497279 - DNA, 75 bp, synthetic construct
  source 1..75: mol_type = other DNA
gactataatataaaaagacgattagaatatatttttaaggatagaaacatttttgtacacgtgaagaatggtggt

SEQ ID NO: 497280 - DNA, 75 bp, synthetic construct
  source 1..75: mol_type = other DNA
ggtttttggcaagcggaaagggcgaatatatgaaagacaatggcgcggcggttattcttaatctggttggggagt

SEQ ID NO: 497281 - DNA, 75 bp, synthetic construct
  source 1..75: mol_type = other DNA
atgacaaatgtgattgcttgtattgacggttcaaatgtgacatccgctgtatgtgatgccagtggctgggccgcc

SEQ ID NO: 497282 - DNA, 75 bp, synthetic construct
  source 1..75: mol_type = other DNA
cgttatttgatattgatggaaatgttaaaatgttacgaaaggaaaatattcaatatcaaaagcatgacaatttgg

SEQ ID NO: 497283 - DNA, 75 bp, synthetic construct
  source 1..75: mol_type = other DNA
cgggcatgattctggagaaaaccgggcgcacctcgcataccctgattctggcccgtgcctcggcgatcccggtac

SEQ ID NO: 497284 - DNA, 75 bp, synthetic construct
  source 1..75: mol_type = other DNA
cagtttttgagcctcgatttaaaaaatcttgcaggcatgattctggagaaaaccgggcgcacctcgcatactctg

SEQ ID NO: 497285 - DNA, 75 bp, synthetic construct
  source 1..75: mol_type = other DNA
gccgattatcttccgcacgatggacatcggtggcgataaaagcattccttacctcaacattccccaggaagagaa

SEQ ID NO: 497286 - DNA, 75 bp, synthetic construct
  source 1..75: mol_type = other DNA
gtaaggcatgcgagtgccgcagcgcgcaggaaatcgaagcgttactcaccgcgtttacgccggaagaagacgttc

SEQ ID NO: 497287 - DNA, 75 bp, synthetic construct
  source 1..75: mol_type = other DNA
tctatatggagcgcgacagtgcgccggacgaacaggaacagtttgaagcataccaacaggtgctactggcggcgg

SEQ ID NO: 497288 - DNA, 75 bp, synthetic construct
  source 1..75: mol_type = other DNA
gggtcagcgacattcgtgatatcagcgaacaattgctgcatatcacctggccggaactgaagccgcgtaataatc

SEQ ID NO: 497289 - DNA, 75 bp, synthetic construct
  source 1..75: mol_type = other DNA
gcagtacggcaacggctgcaaccagcaaaccagtcacgagtgtggcatctggtccgcgtgcattaagccgaaatc

SEQ ID NO: 497290 - DNA, 75 bp, synthetic construct
  source 1..75: mol_type = other DNA
gccgccaccggagccggtggtagagccagaaccggaacctgagccgatccccgaaccaccaaaagaagcaccggc

SEQ ID NO: 497291 - DNA, 75 bp, synthetic construct
  source 1..75: mol_type = other DNA
tttttacgctgtttgtggatggtgaaaacgaagtgggtaaggtgacgtccgtcaccctgcctaaactgacgcgca

SEQ ID NO: 497292 - DNA, 75 bp, synthetic construct
  source 1..75: mol_type = other DNA
gtcgggctgttccgtaccgaaatgctgtatatggatcgcgacagcgcgccggacgagcaggagcaatttgaagcc

SEQ ID NO: 497293 - DNA, 75 bp, synthetic construct
  source 1..75: mol_type = other DNA
ttaatgacagttgcagcctgaatattagcggcagcgatgaagagcaggcgcggcgcgtgctggaagagtacatcc

SEQ ID NO: 497294 - DNA, 75 bp, synthetic construct
  source 1..75: mol_type = other DNA
tgtatatggatcgcgatagcgcgccggacgagcaggaacagtttgaagcctaccagcaggtgttactggcggcgg

SEQ ID NO: 497295 - DNA, 75 bp, synthetic construct
  source 1..75: mol_type = other DNA
ctacgagatcccgatggcggaagtggtgctcgacttcttcgatcgcctgaaatctacctcgcgtggttatgcgtc

SEQ ID NO: 497296 - DNA, 75 bp, synthetic construct
  source 1..75: mol_type = other DNA
tcgacagtccatccaagctgccagcggtaaataacatctacgaactgcgcgagccgattgccgaatgtcacatgc

SEQ ID NO: 497297 - DNA, 75 bp, synthetic construct
  source 1..75: mol_type = other DNA
cagcctgaacgatgcttcactgttctatgagccggaaagctccagcgcgctgggctttggtttccgctgcggctt

SEQ ID NO: 497298 - DNA, 75 bp, synthetic construct
  source 1..75: mol_type = other DNA
tcgacagcccgtctaagctgccagcagtgaataacatctacgaactgcgtgagccgatcgcggaatgtcacatgc

SEQ ID NO: 497299 - DNA, 75 bp, synthetic construct
  source 1..75: mol_type = other DNA
accgcaggtttacgccggtctgttcccggtaagttctgacgactatgaagccttccgcgatgcgctgggcaaact

SEQ ID NO: 497300 - DNA, 75 bp, synthetic construct
  source 1..75: mol_type = other DNA
ccgaccgcctgggtattttcacgccgaagcaagttgatcgtactgaactgaaatgtggtgaagtaggttggttgg

SEQ ID NO: 497301 - DNA, 75 bp, synthetic construct
  source 1..75: mol_type = other DNA
taaccatccggcagaggattttactgccacaccgtcacctgccgatgaagtggcctatttccagctttccggcgg

SEQ ID NO: 497302 - DNA, 75 bp, synthetic construct
  source 1..75: mol_type = other DNA
ttgagttaccgggagctgaatcaggcggcggataacctcgcgtgtagtttgcgccgtcagggcattaaacctggt

SEQ ID NO: 497303 - DNA, 75 bp, synthetic construct
  source 1..75: mol_type = other DNA
tcagggcattaaacctggtgaaaccgcgctggtacaattgggtaacgtcgctgaactttacattacctttttcgc

SEQ ID NO: 497304 - DNA, 75 bp, synthetic construct
  source 1..75: mol_type = other DNA
cgctccagtcggcgataccttaacgctggcgcgtaatccggcagaaaaggcgctgcctggctttaagaaagtcaa

SEQ ID NO: 497305 - DNA, 75 bp, synthetic construct
  source 1..75: mol_type = other DNA
atcgacgctgtctgaccgtattatccagatctgcggtggcctgtccgaccgtgaaatggaggcgcaggttctcga

SEQ ID NO: 497306 - DNA, 75 bp, synthetic construct
  source 1..75: mol_type = other DNA
gtgttaagcgtgtttgcccggcatattcagaagattgtcggtgataaggggctggtggcgcgcatgggcggcgaa

SEQ ID NO: 497307 - DNA, 75 bp, synthetic construct
  source 1..75: mol_type = other DNA
tgctgccgcaggcgtatcttggtaacgtcattacgctatgcgtagaaaaacgcggcgtacagaccaacatggttt

SEQ ID NO: 497308 - DNA, 75 bp, synthetic construct
  source 1..75: mol_type = other DNA
gaattgcagtataacttctctccgtccagtttcagtaagctcaccccggcgcaggaactggataaagataaaata

SEQ ID NO: 497309 - DNA, 75 bp, synthetic construct
  source 1..75: mol_type = other DNA
gcgttatcagacattgcaggccagttgtctttccgatccggagtgctcgcttgagcaggctcgcgagaagttact

SEQ ID NO: 497310 - DNA, 75 bp, synthetic construct
  source 1..75: mol_type = other DNA
gcgacaagtaccgtgaccactgcaaatgcgtcttccgcagatgaaagcagtatccgtgcacaggtgctggctgag

SEQ ID NO: 497311 - DNA, 75 bp, synthetic construct
  source 1..75: mol_type = other DNA
ggggctaccgggatgacagcgtcaccattattgaccgcgataactggcaggttcgtctggatttagtcaccgatg

SEQ ID NO: 497312 - DNA, 75 bp, synthetic construct
  source 1..75: mol_type = other DNA
cttcgggctggcgcttgactgctacagcggtacaccacaacggctggaagccgcgccggctgccggagggacaca

SEQ ID NO: 497313 - DNA, 75 bp, synthetic construct
  source 1..75: mol_type = other DNA
ggtgggaagtgccgctgccgacggtgtacgccttcagcttttatatttttcagcagctcaatgcctggccgaaag

SEQ ID NO: 497314 - DNA, 75 bp, synthetic construct
  source 1..75: mol_type = other DNA
ggtgatccgctctgccagtgtgaaaggcgcagacgtcaatgccggtattattaacccagtgaaagattttgcgac

SEQ ID NO: 497315 - DNA, 75 bp, synthetic construct
  source 1..75: mol_type = other DNA
gcagaagatggggtatttaatgatgtgcttgaaagagtcattaccctgattggtggagagcatctgcttaagtaa

SEQ ID NO: 497316 - DNA, 75 bp, synthetic construct
  source 1..75: mol_type = other DNA
aatggcgtaatggcgggggtgtttgcccagcatattcagaagattgtcggtgataaggggctggtggcacgaatg

SEQ ID NO: 497317 - DNA, 75 bp, synthetic construct
  source 1..75: mol_type = other DNA
tgccatgctggcggatgaaacctggatgtcaggtgccgaatgtctggcacacggatttgctgaccaggtgacacc

SEQ ID NO: 497318 - DNA, 75 bp, synthetic construct
  source 1..75: mol_type = other DNA
ccatggggagtgagtggtggtgatgcggatgatatgcgcgattatgccgacctgcttgataaagttgaatcggtc

SEQ ID NO: 497319 - DNA, 75 bp, synthetic construct
  source 1..75: mol_type = other DNA
ttatctggctgcgtccaaaggctccgatacgattgaagtggcttatctcaacggtgtggatacgccatatattga

SEQ ID NO: 497320 - DNA, 75 bp, synthetic construct
  source 1..75: mol_type = other DNA
ggcggcgcgctggcgcaaagtgcatggtgatatcgactttgtcatgctggcgaaaaacccgaccatcgacgcctg

SEQ ID NO: 497321 - DNA, 75 bp, synthetic construct
  source 1..75: mol_type = other DNA
tattccccttcctctttacaggttgacgataaccaccgcatctacgccgcgcgttttaacgagcgcctgcttgct

SEQ ID NO: 497322 - DNA, 75 bp, synthetic construct
  source 1..75: mol_type = other DNA
ggcaattttgtgggagacgggatccgccaggcgctgatggcccgcgccggatttgagactacggagaaggataat

SEQ ID NO: 497323 - DNA, 75 bp, synthetic construct
  source 1..75: mol_type = other DNA
ctgttgccagcctatgcgcagaaaaccggaaaaaccaccgatgaaattgccgccatgctggcggatgaaacctgg

SEQ ID NO: 497324 - DNA, 75 bp, synthetic construct
  source 1..75: mol_type = other DNA
atgcgattacaggaggatgccaacggcgactccctgaatattacccccgcttttgttctggtccctgctgcgctg

SEQ ID NO: 497325 - DNA, 75 bp, synthetic construct
  source 1..75: mol_type = other DNA
atgcgcctccaggaggatgctaacggcgactcactgaatattacccctgcttttgttctggtccctgccgcgctg

SEQ ID NO: 497326 - DNA, 75 bp, synthetic construct
  source 1..75: mol_type = other DNA
ggcgtggaagatcgcggtgtgatgacggcgtttatgcaggcactgggatttacggcacaacagggcggctgggaa

SEQ ID NO: 497327 - DNA, 75 bp, synthetic construct
  source 1..75: mol_type = other DNA
acctcggatataaggccagcctttctgttaaaaacatgggctatctgagttcggatattcatgtaggaaccacgg

SEQ ID NO: 497328 - DNA, 75 bp, synthetic construct
  source 1..75: mol_type = other DNA
aaaagacggtaggatgctgatgaccgtgggaacgaatgcagaaattaaaaacaatgtgcgttttggcctagaact

SEQ ID NO: 497329 - DNA, 75 bp, synthetic construct
  source 1..75: mol_type = other DNA
ctgcagtggaaatatgatgcagctaatggtaccggcaccctgactcaggggaaaacgagctgggatatgcatgga

SEQ ID NO: 497330 - DNA, 75 bp, synthetic construct
  source 1..75: mol_type = other DNA
cggcagatccgaaaacctggtacctggctgcggcacaggggaccgacaccattgaagtggcctggctcgatggtg

SEQ ID NO: 497331 - DNA, 75 bp, synthetic construct
  source 1..75: mol_type = other DNA
aaggtacgactgcggacatgattcataaaatcgttccgctgatcgcttatatgagcaagttttttaccctcaagg

SEQ ID NO: 497332 - DNA, 75 bp, synthetic construct
  source 1..75: mol_type = other DNA
acgacgggatcaaaatggcgtgtctggaagatgcatcatgtacaccggaaatggcccgtgaaaagctgttgaacg

SEQ ID NO: 497333 - DNA, 75 bp, synthetic construct
  source 1..75: mol_type = other DNA
cagcagcagcgatttttctcatattctggctggtggtgctgaaaaatcagtgctgaaaggctggcaggacagcgg

SEQ ID NO: 497334 - DNA, 75 bp, synthetic construct
  source 1..75: mol_type = other DNA
atggcgaactgtgtgggctggcatgggaggatatcgatctggaagcgggtaccttgaccgtcaaaaggaattaca

SEQ ID NO: 497335 - DNA, 75 bp, synthetic construct
  source 1..75: mol_type = other DNA
atgattgaatttagccatgtcagcaagctgttcggcgcacaaaaagccgttaacgatctcaatctcaattttgag

SEQ ID NO: 497336 - DNA, 75 bp, synthetic construct
  source 1..75: mol_type = other DNA
ccactattgcactggcgacctatggcgagctgttcagtatcacccgtcaggccattatcaatgatgatctgaata

SEQ ID NO: 497337 - DNA, 75 bp, synthetic construct
  source 1..75: mol_type = other DNA
acacggtgctggtgaagtggcgctacagcgcgtttcatcgttctccgctggagcaaatgctcaaagagagtggac

SEQ ID NO: 497338 - DNA, 75 bp, synthetic construct
  source 1..75: mol_type = other DNA
gtgctggcgctgttcagccatcagcgtagtgaactgaacgcctatgccagccagattgaaccggcgttactgatt

SEQ ID NO: 497339 - DNA, 75 bp, synthetic construct
  source 1..75: mol_type = other DNA
gtgctggcgctgttcagccatcagcgtagtgaactgaacgcctatgccagccagattgaacccgcattgctgatt

SEQ ID NO: 497340 - DNA, 75 bp, synthetic construct
  source 1..75: mol_type = other DNA
cagttctttatcaacgttgccgataacgccttcctcgaccacggtcagcgtgatttcggttacgcggtatttggt

SEQ ID NO: 497341 - DNA, 75 bp, synthetic construct
  source 1..75: mol_type = other DNA
accaaacccgccaatcaaaaatgaagccgataacggcctgcgcaacacgcgtggcaccatcgcgatggcgcgtac

SEQ ID NO: 497342 - DNA, 75 bp, synthetic construct
  source 1..75: mol_type = other DNA
cgctgacgcacagcacctctgattttggcaatattctgctggatgtgtcgaacaaggggctgatccagggctggg

SEQ ID NO: 497343 - DNA, 75 bp, synthetic construct
  source 1..75: mol_type = other DNA
aggcattaacgatctgtttgccatgtttggcggtcgctatcaggcgcttcaggcgcagtgtgtggctgatcctga

SEQ ID NO: 497344 - DNA, 75 bp, synthetic construct
  source 1..75: mol_type = other DNA
ccatttggctttacgggcggtgatgcggaggacatgcgcacctatgccgacctgctcgataaggttgaggcggtt

SEQ ID NO: 497345 - DNA, 75 bp, synthetic construct
  source 1..75: mol_type = other DNA
gtcaatgatctccgggcacttggggacgtcacccacatcaacctttatatcaactcgcccggtggtgatgtcttc

SEQ ID NO: 497346 - DNA, 75 bp, synthetic construct
  source 1..75: mol_type = other DNA
tggcagcagtttgcgtggcagagagcagaatactgccagcggcgcagcaggggtaaggccggacatccaccacgt

SEQ ID NO: 497347 - DNA, 75 bp, synthetic construct
  source 1..75: mol_type = other DNA
atgcggtcgttacccgaaaattctgttgacctgatagtcacggacccgccgtactttaaagtgaagcctgagggc

SEQ ID NO: 497348 - DNA, 75 bp, synthetic construct
  source 1..75: mol_type = other DNA
ccgtccggacgctggaacgggtgcaacaaggaaagcctgcgggcgtattttccggcaacagagcgcattctgttc

SEQ ID NO: 497349 - DNA, 75 bp, synthetic construct
  source 1..75: mol_type = other DNA
agtctttacctgttctgtggtcatcgcctggcatctgacaccgaaatcatgatgcgtcagcgctttaatgtgctg

SEQ ID NO: 497350 - DNA, 75 bp, synthetic construct
  source 1..75: mol_type = other DNA
caccgatgtgtggacgtataaaccggtgcagtactatccagggaaacatccgtgcgaaaaaccggcagaaatgtt

SEQ ID NO: 497351 - DNA, 75 bp, synthetic construct
  source 1..75: mol_type = other DNA
gtctggcatctgacaccgaaatcatgatgcgtgagcggtttaacgtgctgaaccatatcatctgggcaaagccgt

SEQ ID NO: 497352 - DNA, 75 bp, synthetic construct
  source 1..75: mol_type = other DNA
atggcaacagataaccgctcactgatgagcagtgcccatcagaaagcattcagtcttgcaacacagttacctcct

SEQ ID NO: 497353 - DNA, 75 bp, synthetic construct
  source 1..75: mol_type = other DNA
ggaaagtttacgggcatatttcccggcaacagagcgcattctgtttgccgaacattatcaggggccataccagct

SEQ ID NO: 497354 - DNA, 75 bp, synthetic construct
  source 1..75: mol_type = other DNA
ccggaaagaaaaacatggcgtcacactggtttggtacaagtcagtggcagttgccgaacgagggtgattacagaa

SEQ ID NO: 497355 - DNA, 75 bp, synthetic construct
  source 1..75: mol_type = other DNA
tgcagcagaaaaacatcaacgcggggaactggaaaagccacaccaccagctggtcagcacatacagtgaactgaa

SEQ ID NO: 497356 - DNA, 75 bp, synthetic construct
  source 1..75: mol_type = other DNA
atggtgtcgcactggttcagtgccagtcagtggcagctaccgaacgaaagcgattatctgaaattacagtcgctg

SEQ ID NO: 497357 - DNA, 75 bp, synthetic construct
  source 1..75: mol_type = other DNA
gcagcagataatcagcgcaagcagtcgtccgggtgacctggttgcagattttttatgggctcaggttcaatggta

SEQ ID NO: 497358 - DNA, 75 bp, synthetic construct
  source 1..75: mol_type = other DNA
cagtcgtccgggtgatttggttgccgacttttttatggggtcaggttccacgataaaagccgcgctttcgcttgg

SEQ ID NO: 497359 - DNA, 75 bp, synthetic construct
  source 1..75: mol_type = other DNA
ggaaacatccgtgcgaaaaaccggcagaaatgctgcagcagataatcagcgcaagcagtcgtccgggtgacctgg

SEQ ID NO: 497360 - DNA, 75 bp, synthetic construct
  source 1..75: mol_type = other DNA
gaccgctgacaatatcaccttgaaaaccagtgagtttgtactggaggctgaccgcacgcgtattaacagcgaagt

SEQ ID NO: 497361 - DNA, 75 bp, synthetic construct
  source 1..75: mol_type = other DNA
ggggcatcaaatcaatggtcattgagaccgctgacaacatcaccgtgaaaaccagtgagtttgtactggaggctg

SEQ ID NO: 497362 - DNA, 75 bp, synthetic construct
  source 1..75: mol_type = other DNA
ggggcatcaaatcaatggtcattgagaccgctgacaacatcaccttgaaaaccagtgagtttgttctggaggctg

SEQ ID NO: 497363 - DNA, 75 bp, synthetic construct
  source 1..75: mol_type = other DNA
ggccgctgacaatatcaccctgaaaaccagtgagtttgtactggaggctgaccgcacgcgcattaacagcgaagt

SEQ ID NO: 497364 - DNA, 75 bp, synthetic construct
  source 1..75: mol_type = other DNA
gcccgctgacaatatcaccatgaaaaccagtgagtttgtactggaggctgaccgcacgcgaattaacagcgaagt

SEQ ID NO: 497365 - DNA, 75 bp, synthetic construct
  source 1..75: mol_type = other DNA
gtccgctgacaatatcaccttgaaaaccagtgagtttgtactggaggctgaccgcacgcggattaacagcgaagt

SEQ ID NO: 497366 - DNA, 75 bp, synthetic construct
  source 1..75: mol_type = other DNA
ccttcaaaaccggggagtttatcgtggaagccgacaccacccgtattaacagtgaggtggtgatcaacggtggtg

SEQ ID NO: 497367 - DNA, 75 bp, synthetic construct
  source 1..75: mol_type = other DNA
gctgagtctgggcggaaatcttgaaaccgcctttgcgctgcccgccatctattcgaatcagttcgcaccaccgtc

SEQ ID NO: 497368 - DNA, 75 bp, synthetic construct
  source 1..75: mol_type = other DNA
gctgacaacatcaccatgaaaaccagtgagtttgtactggaggctgaccgcacgcgcattaacagcgaagtggtg

SEQ ID NO: 497369 - DNA, 75 bp, synthetic construct
  source 1..75: mol_type = other DNA
ggggcatcaaatcaatggtcattgagaccgctgacaacatcaccatgaaaaccagtgagtttgtgctggaggctg

SEQ ID NO: 497370 - DNA, 75 bp, synthetic construct
  source 1..75: mol_type = other DNA
ggggcatcaaatcaatggtcattgagaccgctgacaaaatcaccctgaaaaccagtgagtttgtcctggaggctg

SEQ ID NO: 497371 - DNA, 75 bp, synthetic construct
  source 1..75: mol_type = other DNA
cacaggggtagtcaccgaagtggacaaggagaactggctttgccgggtgaaaacaggcgagcttgaaactaactg

SEQ ID NO: 497372 - DNA, 75 bp, synthetic construct
  source 1..75: mol_type = other DNA
gttgtgagttaatcaacgctgactgcctggaatttatccagaccttaccggaaaactctgtcgatctgatagtca

SEQ ID NO: 497373 - DNA, 75 bp, synthetic construct
  source 1..75: mol_type = other DNA
tacggatgtctggacgcacaagcctgtgcagtattaccccggcaaacatccctgtgagaaaccggcggatatgtt

SEQ ID NO: 497374 - DNA, 75 bp, synthetic construct
  source 1..75: mol_type = other DNA
aaaagcggcactgtcgctgggatgcagggcgattggcgtggaactggaagaggaacgttttaatcagacggtcag

SEQ ID NO: 497375 - DNA, 75 bp, synthetic construct
  source 1..75: mol_type = other DNA
aaaagcagcaatggcgctggggcgtcgggcgttaggtgttgaacttgagtcagagcggtttaatcagacggtgaa

SEQ ID NO: 497376 - DNA, 75 bp, synthetic construct
  source 1..75: mol_type = other DNA
aaccatattatctgggcgaagccgtccggacgctggaatggctgcaacaaggaaagcctgcgggcgtatttcccg

SEQ ID NO: 497377 - DNA, 75 bp, synthetic construct
  source 1..75: mol_type = other DNA
ccggaaagaaaaacatggcttcgcactggtttggtatcagtcagtggcagttaccgaacgagggtgattacaaca

SEQ ID NO: 497378 - DNA, 75 bp, synthetic construct
  source 1..75: mol_type = other DNA
tttttatggggtcaggctccacaattaaagccgcaatgacgctggggcgtcgggcaattggtgtggaactggaaa

SEQ ID NO: 497379 - DNA, 75 bp, synthetic construct
  source 1..75: mol_type = other DNA
ctggtttagtaccagtcagtggcagttaccgaatgaggccgattacagtaaactgcaggcgctgtttgcacgtgt

SEQ ID NO: 497380 - DNA, 75 bp, synthetic construct
  source 1..75: mol_type = other DNA
tttccgtatcagttgccgttccgtatacggatgtctggacgcacaagcccgtgcagtattatccgggcaaacatc

SEQ ID NO: 497381 - DNA, 75 bp, synthetic construct
  source 1..75: mol_type = other DNA
ggccagtgggctggcgttggttccagcggaaaagcgtgatccgttggtgaccacttctcgtggtacgggtgaatt

SEQ ID NO: 497382 - DNA, 75 bp, synthetic construct
  source 1..75: mol_type = other DNA
aagggagatgatgattacctgaaatggctggatcagtgtctggcgcagttctggcgggtgttaaaacctgccgga

SEQ ID NO: 497383 - DNA, 75 bp, synthetic construct
  source 1..75: mol_type = other DNA
gaatataaaaatttgcggcggtatttcggtgtgacggcgcaggttccgtacaccgatgtctggacgcataaaccg

SEQ ID NO: 497384 - DNA, 75 bp, synthetic construct
  source 1..75: mol_type = other DNA
ggcaaacatccctgtgaaaaaccagccgatatgttgcgccagataattactgccagcagccgtccgggtgatttg

SEQ ID NO: 497385 - DNA, 75 bp, synthetic construct
  source 1..75: mol_type = other DNA
caggctatcggcgttgaactcgagaaggacaggtttagccagacggtgggggaaataagggcgttaacaggggaa

SEQ ID NO: 497386 - DNA, 75 bp, synthetic construct
  source 1..75: mol_type = other DNA
ttacagtcgctgtttgcccgggtggcagaagagaaacatcagcgcggtgaactggaaaagccccaccaccagctg

SEQ ID NO: 497387 - DNA, 75 bp, synthetic construct
  source 1..75: mol_type = other DNA
caccgatgtgtggacgcataaaccggtgcagtactatccagggaaacatccgtgcgaaaaaccggcagaaatgct

SEQ ID NO: 497388 - DNA, 75 bp, synthetic construct
  source 1..75: mol_type = other DNA
gccacagagcgcgttctgtttgctgaacattaccaggggccatatcgcggcaaaagtgacggctatgcggcaaaa

SEQ ID NO: 497389 - DNA, 75 bp, synthetic construct
  source 1..75: mol_type = other DNA
ggcgtcgtgcaattggtgtcgagctggaggctgaacgttttgagcagaccgcaagggatgtacagaatttaatca

SEQ ID NO: 497390 - DNA, 75 bp, synthetic construct
  source 1..75: mol_type = other DNA
gacgatgattacctgaaatggctggaccagtgtctggcgcagttctggcgggtactgaagcctgccggaagtctt

SEQ ID NO: 497391 - DNA, 75 bp, synthetic construct
  source 1..75: mol_type = other DNA
gttgtgagttggtcaacgctgattgcctggaatttatccggaccttacctgaaaactctgtcgatctgatagtca

SEQ ID NO: 497392 - DNA, 75 bp, synthetic construct
  source 1..75: mol_type = other DNA
gtaattggtattgcaggtagcctgacgaacgatgtcgctgttgtacatcaacatggcattgatgctgtattcagc

SEQ ID NO: 497393 - DNA, 75 bp, synthetic construct
  source 1..75: mol_type = other DNA
agcattatcaggggccatataatccgaaaagcgacggatttgctgagaaaagcaacgaggtcaaacagcacgtca

SEQ ID NO: 497394 - DNA, 75 bp, synthetic construct
  source 1..75: mol_type = other DNA
gatgcgtgaacgcttcaacgttatgaaccacattatctgggcgaagccatcagggcgttggaacggttgtaataa

SEQ ID NO: 497395 - DNA, 75 bp, synthetic construct
  source 1..75: mol_type = other DNA
cgggcgttaggtgttgagcttgagtcagagcggtttaaccagacggtgaaagaggtaagtgaactggtggggaaa

SEQ ID NO: 497396 - DNA, 75 bp, synthetic construct
  source 1..75: mol_type = other DNA
gtgaagcccgagggctgggataaccagtggacgggggatgaggattacctgaaatggctggaccagtgtcttgcg

SEQ ID NO: 497397 - DNA, 75 bp, synthetic construct
  source 1..75: mol_type = other DNA
ttggcgtgacggcgcaggtgccgtacaccgatgtgtggacgcataaaccggtgcagtactatcccgggaaacatc

SEQ ID NO: 497398 - DNA, 75 bp, synthetic construct
  source 1..75: mol_type = other DNA
aatcaatcatttccgttagtgaatcgcctggcagcatttatattactctcgcaggaaggtgatctttatcacgaa

SEQ ID NO: 497399 - DNA, 75 bp, synthetic construct
  source 1..75: mol_type = other DNA
attcattcacgatggtttattaattaaaaataagaaaggatatttaattaaaaacagaaagcagttgttagagct

SEQ ID NO: 497400 - DNA, 75 bp, synthetic construct
  source 1..75: mol_type = other DNA
aaaagcaagaaagggtatctaattaaaaacagaaagcagttgtcaggactggcactggagatggacccggaaaat

SEQ ID NO: 497401 - DNA, 75 bp, synthetic construct
  source 1..75: mol_type = other DNA
ttgtcgcctgtcttcagcaggcaatggcagatagccaggtgcggggcgtactgctggacattgacagtccgggcg

SEQ ID NO: 497402 - DNA, 75 bp, synthetic construct
  source 1..75: mol_type = other DNA
aggaaaggtgagcacgaacctgatttttaaggagtgtcgccagagtgcagcgatgaaacgggtattggcggtata

SEQ ID NO: 497403 - DNA, 75 bp, synthetic construct
  source 1..75: mol_type = other DNA
atgacgggaaaagaagcaattattcattacctgggggctcataagagcttctgtgcgcaggacgttgctgcggta

SEQ ID NO: 497404 - DNA, 75 bp, synthetic construct
  source 1..75: mol_type = other DNA
tggtgcagccgctggggtggtacaacgaaccgctgacggttgtgatgcatggcgacgatgccccgcagcgtggcg

SEQ ID NO: 497405 - DNA, 75 bp, synthetic construct
  source 1..75: mol_type = other DNA
aaaacagaaagcagttgttagggctggcgctggagatggagatggacccggaaaataaattctccgggatgatgc

SEQ ID NO: 497406 - DNA, 75 bp, synthetic construct
  source 1..75: mol_type = other DNA
aaaagcaagaaagggtatctaattaaaaacagaaagcagttgtcaggactggcgctggagatggacccggagaat

SEQ ID NO: 497407 - DNA, 75 bp, synthetic construct
  source 1..75: mol_type = other DNA
gtgaaagaaatccacaataatgatcttaagcagcaattgatgagtgaatccgcgtttaaggattgctttttaacg

SEQ ID NO: 497408 - DNA, 75 bp, synthetic construct
  source 1..75: mol_type = other DNA
atgtatacggggctgtctgtggaagctgtcacggggacagaggctgccgtttttgaaggtcagtccgctattaag

SEQ ID NO: 497409 - DNA, 75 bp, synthetic construct
  source 1..75: mol_type = other DNA
atcctggctgcttcaccgcaggcgaatgccggaccatcactccgtgatcagatcatggcactggatgaggcaaaa

SEQ ID NO: 497410 - DNA, 75 bp, synthetic construct
  source 1..75: mol_type = other DNA
atgcggcggcgatcaaagcgaaagtgacaaaattgctggagatggtgcagcttgcccatctggcagatcgctatc

SEQ ID NO: 497411 - DNA, 75 bp, synthetic construct
  source 1..75: mol_type = other DNA
gctcccggaatgctggctgaaacggacgagtacatggccgtaggtaaacgaccggcccgtgtttaccgggtggtg

SEQ ID NO: 497412 - DNA, 75 bp, synthetic construct
  source 1..75: mol_type = other DNA
atccgcgcagagtgaagccgatcgcattatggcgtgtgaagaagcgaacggtcgtgaacaactggcggcaacgct

SEQ ID NO: 497413 - DNA, 75 bp, synthetic construct
  source 1..75: mol_type = other DNA
ttttgaaggtcagtccggcattgaggccgggctggcggatgaattaatcaatgcgtcggatgccatcagtgtgat

SEQ ID NO: 497414 - DNA, 75 bp, synthetic construct
  source 1..75: mol_type = other DNA
gcgcccgggctgtgctggctgcgggatcaggtaaggcagaaccggtctctgcatccacaaccgccctgtttgaac

SEQ ID NO: 497415 - DNA, 75 bp, synthetic construct
  source 1..75: mol_type = other DNA
ccggcgcgtttgactgcgctgacatgatttaccgactccgtcagcagaagccggtctgggcactgtgcaatgaca

SEQ ID NO: 497416 - DNA, 75 bp, synthetic construct
  source 1..75: mol_type = other DNA
ggggatgcggccattttccggaatgactggctatgacggcattgtcgcctgtcttcagcaggcaatggcagatag

SEQ ID NO: 497417 - DNA, 75 bp, synthetic construct
  source 1..75: mol_type = other DNA
gctggctgtgccttttgcaccgcaggccgttgcgaaaacggcagccgctaccaccgcttcacaaccggaaattgc

SEQ ID NO: 497418 - DNA, 75 bp, synthetic construct
  source 1..75: mol_type = other DNA
actatgccgcaattaactgcaacggaagccgccgtgcaggagaaccagcgagtgatggggatcctgacgtgtcag

SEQ ID NO: 497419 - DNA, 75 bp, synthetic construct
  source 1..75: mol_type = other DNA
ccggctgcggtccaggggggcgtgtcacaggcgtcagcagacggtgatgcggacgtgaaaatgctcatggccatg

SEQ ID NO: 497420 - DNA, 75 bp, synthetic construct
  source 1..75: mol_type = other DNA
ggcggatgcgccggatcaggtctggcgtgaaccggcgacccgctttgtgctcgaatttatgggcgaagtgaaccg

SEQ ID NO: 497421 - DNA, 75 bp, synthetic construct
  source 1..75: mol_type = other DNA
aggaaaggtgagcacgaatctgatttttaaggagtgtcgtcaaagtgccgcgatgaagcgggtgttgatggtttg

SEQ ID NO: 497422 - DNA, 75 bp, synthetic construct
  source 1..75: mol_type = other DNA
ctgccggggtgtttaaaaattcagcattaaatatattagaacttattggattcataacactcatttatccaccta

SEQ ID NO: 497423 - DNA, 75 bp, synthetic construct
  source 1..75: mol_type = other DNA
atgaacgcacaactcacagaaatcatgcgccttatcaccaacctaatccgcaccggaactgtaacggaagtggac

SEQ ID NO: 497424 - DNA, 75 bp, synthetic construct
  source 1..75: mol_type = other DNA
cactggggtagtcaccgaagtggaccgggagaactggctttgccgggtgaaaacaggcgaccttgaaaccaactg

SEQ ID NO: 497425 - DNA, 75 bp, synthetic construct
  source 1..75: mol_type = other DNA
ggaggctgaccgcacgcgcattaacagtgaagtggtgatcaatggtggagttacccagggcggcggagcgatgag

SEQ ID NO: 497426 - DNA, 75 bp, synthetic construct
  source 1..75: mol_type = other DNA
gtcattgaggccgctgacaatatcaccatgaaaaccagtgagtttgtgctggaggctgaccgcacgcgaattaac

SEQ ID NO: 497427 - DNA, 75 bp, synthetic construct
  source 1..75: mol_type = other DNA
catcggaaggtgagcaggtggtactgctgagtctgggcggcaatctggaaacagcctttgctttgcccgccatct

SEQ ID NO: 497428 - DNA, 75 bp, synthetic construct
  source 1..75: mol_type = other DNA
tgcggggcacgcaattaattttcatgatggcatcgtcggaaatcagccaggattttcacgatttaatttcaccag

SEQ ID NO: 497429 - DNA, 75 bp, synthetic construct
  source 1..75: mol_type = other DNA
aagttcgatcgtcggacgaaacaaggtaaagctgacgaagaggcatttcttcgtgatgtggcggatatggggatt

SEQ ID NO: 497430 - DNA, 75 bp, synthetic construct
  source 1..75: mol_type = other DNA
attcgaatcagttcgcaccaccgtctacgtcggcggacgcctgcgtgacagaacatcctgacggcgcctggtttg

SEQ ID NO: 497431 - DNA, 75 bp, synthetic construct
  source 1..75: mol_type = other DNA
gcctatccgtcgctcagactgcctgatttgcgcggggagtttatccgtggctgggatgacgggcgcggggttgac

SEQ ID NO: 497432 - DNA, 75 bp, synthetic construct
  source 1..75: mol_type = other DNA
cttctgaaatgtaccccaaactggcacaggcttaccccacgaataaattaccggatttacggggcgaatttatcc

SEQ ID NO: 497433 - DNA, 75 bp, synthetic construct
  source 1..75: mol_type = other DNA
acggggtgagtttattcgtggctgggatgacggacgaggtattgatgcaggacgagagatactttcatttcagga

SEQ ID NO: 497434 - DNA, 75 bp, synthetic construct
  source 1..75: mol_type = other DNA
tttgtgctggaggctgaccgcacgcgtattaacagcgaagtagtgatcaatggtggtgttacccagggcggcggt

SEQ ID NO: 497435 - DNA, 75 bp, synthetic construct
  source 1..75: mol_type = other DNA
actgggtggtggttgcgggaacggcaaaagtcaccattgacggtgatatcaaactgcttggtgaaaacgagtcca

SEQ ID NO: 497436 - DNA, 75 bp, synthetic construct
  source 1..75: mol_type = other DNA
ggtgccgatggatgcgggctggagcgatgtcggttcctggtcttcattatgggagatcagcgcccacaccgccga

SEQ ID NO: 497437 - DNA, 75 bp, synthetic construct
  source 1..75: mol_type = other DNA
ccgtgcgtaatgccatgccgtatgccgaagcgggcaagctggtgaccttcggcattgtgccggatctacctgaaa

SEQ ID NO: 497438 - DNA, 75 bp, synthetic construct
  source 1..75: mol_type = other DNA
taaacgtatccggatgcatgaacaaatgagcaggataatccggaagactggcacagacgaaatactcttccgtct

SEQ ID NO: 497439 - DNA, 75 bp, synthetic construct
  source 1..75: mol_type = other DNA
atgagccagaacgctacggtcaacgttgacgtcaaattaggcgtcaacaaattccatgttgatgagggccaccca

SEQ ID NO: 497440 - DNA, 75 bp, synthetic construct
  source 1..75: mol_type = other DNA
aagtcattactattgtcatggccgtacagctgagctgatcatcctctcaattcacacgccgacaatggtagtgag

SEQ ID NO: 497441 - DNA, 75 bp, synthetic construct
  source 1..75: mol_type = other DNA
ttctaacggaattgtggttgatgcacatcagcatactggcgtcctgaaaggtggcgacacaaccggaggcccggt

SEQ ID NO: 497442 - DNA, 75 bp, synthetic construct
  source 1..75: mol_type = other DNA
aaacgggcgacctcgaaaccaactggattaactggctgacactgcgcgcgggcaaatcgcgcacctggtggaaac

SEQ ID NO: 497443 - DNA, 75 bp, synthetic construct
  source 1..75: mol_type = other DNA
atgcaatcactcagtttaagaaacaatattgtcagcatgaacgcacaattaaccgaaatcatgcgccttatcacc

SEQ ID NO: 497444 - DNA, 75 bp, synthetic construct
  source 1..75: mol_type = other DNA
tgccgttgtggtgccgatggatgcgggctggagcgatgtcggttcctggtcctctttatgggagatcagcgccca

SEQ ID NO: 497445 - DNA, 75 bp, synthetic construct
  source 1..75: mol_type = other DNA
gggaatgcccgcacatggtggcgaccatcggaaggtgaacaggtggtgctgctgagtctgggcggaaatcttgaa

SEQ ID NO: 497446 - DNA, 75 bp, synthetic construct
  source 1..75: mol_type = other DNA
ggaggctgaccgcacgcgcattagcagcgaagtggtgatcaatggtggtgttacccagggcggcggagcgatgag

SEQ ID NO: 497447 - DNA, 75 bp, synthetic construct
  source 1..75: mol_type = other DNA
atacacgaaggagttagccaatgcgaaagctgaaaatgatgctcttcggcgtaagcttgataatggtggtcgggt

SEQ ID NO: 497448 - DNA, 75 bp, synthetic construct
  source 1..75: mol_type = other DNA
gtgccgcctgggtcgtggggcgtaatgccgatcttctccgacagaatgcgctttaaaaacctggtatcacgctgc

SEQ ID NO: 497449 - DNA, 75 bp, synthetic construct
  source 1..75: mol_type = other DNA
caatttgctggaacacgatgatagccatgtcggcgttcaactggtgaaggcgcaaacggttattgggtcgggtgg

SEQ ID NO: 497450 - DNA, 75 bp, synthetic construct
  source 1..75: mol_type = other DNA
ctgatgttaccgctggtcgtaagcgcctgcggatcaacgccacctgtccaggctccgtgcgtgaagccaccgcca

SEQ ID NO: 497451 - DNA, 75 bp, synthetic construct
  source 1..75: mol_type = other DNA
atacacgaaggagttagctgatgcgaaagctgaaaatgatgctcttctgcggaagcttgataatggtggcagggt

SEQ ID NO: 497452 - DNA, 75 bp, synthetic construct
  source 1..75: mol_type = other DNA
atgggtataagccaagtcagctaaacacaaaagacaatatacaaaagacaataaatacaaatacccccttacccc

SEQ ID NO: 497453 - DNA, 75 bp, synthetic construct
  source 1..75: mol_type = other DNA
aataaaacattagccaagtcggctaatgggtataagccaagtcagctaaacacaaaagacaatatacaaaagaca

SEQ ID NO: 497454 - DNA, 75 bp, synthetic construct
  source 1..75: mol_type = other DNA
ccggcgaatgattttgtccgccagttttttgggcatagtgaactgggtgtccgcctgctttcgttacgtagcgtg

SEQ ID NO: 497455 - DNA, 75 bp, synthetic construct
  source 1..75: mol_type = other DNA
ctttacccatgcaacagggactgaattcgccggtgttgcccaactgaaagacagtaccttcactctggaacgcga

SEQ ID NO: 497456 - DNA, 75 bp, synthetic construct
  source 1..75: mol_type = other DNA
tcaaaagggaaattatggagtcaaattctcgctgatgtctcgggattacccgtcaatattccggtggtcaaagaa

SEQ ID NO: 497457 - DNA, 75 bp, synthetic construct
  source 1..75: mol_type = other DNA
ccgctctgattatctgcatcgtcgtctgtctgtcgtgggcggtcaatcattaccgtgataacgccatcgcctaca

SEQ ID NO: 497458 - DNA, 75 bp, synthetic construct
  source 1..75: mol_type = other DNA
cgaaacgttctcggtatccggtccggaatcatcagcgaccaaacagccatgagggcgctgcaggaatacatcacc

SEQ ID NO: 497459 - DNA, 75 bp, synthetic construct
  source 1..75: mol_type = other DNA
acggcggaatcctacgacgataactatctggatgatgaggatgccgactgggtatccaccgggcagggacagaaa

SEQ ID NO: 497460 - DNA, 75 bp, synthetic construct
  source 1..75: mol_type = other DNA
tttgacttaattcgtatgttcctggagatccagattcaggcggcgtttgccgatggttcgctgcatcctaatgaa

SEQ ID NO: 497461 - DNA, 75 bp, synthetic construct
  source 1..75: mol_type = other DNA
aggtaaggtgcagatccctgtggtgagcggaaatggtcagttcgccgcagtggctgaagtcaccgttactgaagc

SEQ ID NO: 497462 - DNA, 75 bp, synthetic construct
  source 1..75: mol_type = other DNA
ggcagattgataaaagggccgcagagaaaatcagcgccagtcagtcagtcggaagcaaacccgaagagcccatta

SEQ ID NO: 497463 - DNA, 75 bp, synthetic construct
  source 1..75: mol_type = other DNA
tggggcgcactattgtgctggtcactcatgatattgatgaggcgctacggctggcagaacatctggtattgatgg

SEQ ID NO: 497464 - DNA, 75 bp, synthetic construct
  source 1..75: mol_type = other DNA
cgaaacgttctcggtatccgggacggaatcatcagagaccagacagcactgagaacgcttcaggaatacatcagg

SEQ ID NO: 497465 - DNA, 75 bp, synthetic construct
  source 1..75: mol_type = other DNA
tcgccgttatctctcaatctgggtcggaattgacaatatcaatggaaacatcctgtttgtacaggtgttccccag

SEQ ID NO: 497466 - DNA, 75 bp, synthetic construct
  source 1..75: mol_type = other DNA
ctgtcggtgaaatcatttatgcgccgggcgagtatatgttgattgaccatattgcgccgccaggaatgaaagcca

SEQ ID NO: 497467 - DNA, 75 bp, synthetic construct
  source 1..75: mol_type = other DNA
tgtatttctgtacagcagtttgtgtgctgtatcttctttctggtgggtacagagtcgtgagagatttctggcgca

SEQ ID NO: 497468 - DNA, 75 bp, synthetic construct
  source 1..75: mol_type = other DNA
gtaactttatggcgaactacacctacggtgtctcgctgctgattgctaacgtcgcgattgctatttcggcggttg

SEQ ID NO: 497469 - DNA, 75 bp, synthetic construct
  source 1..75: mol_type = other DNA
ccgcaggactggcctggggagctaagtatctcgaaattacggcaaccaaatatgattcaccaacaatgtatgtcg

SEQ ID NO: 497470 - DNA, 75 bp, synthetic construct
  source 1..75: mol_type = other DNA
tgtcgccgttgaatcggatatccggttaaatcttgagttcgactttaagcgccaactgatcgccccaacgatgaa

SEQ ID NO: 497471 - DNA, 75 bp, synthetic construct
  source 1..75: mol_type = other DNA
tttgcgctggtcagttttcggttccccgacatggtacgctacccctgcctgcccgtcagaaccgaccagtacgga

SEQ ID NO: 497472 - DNA, 75 bp, synthetic construct
  source 1..75: mol_type = other DNA
acgcgagttgtattctttaacagaacgctggacatgtacatatccgcttttgaagaaagtattaagtcagatatt

SEQ ID NO: 497473 - DNA, 75 bp, synthetic construct
  source 1..75: mol_type = other DNA
agagttgcaacaggctcttcagtcccagtgtgatatctggcagatactgattgactggaatgctggaaacaaggc

SEQ ID NO: 497474 - DNA, 75 bp, synthetic construct
  source 1..75: mol_type = other DNA
cctggtgattatattaataagaaaggacgactgaattttccagttgatgtttataattctcctgaaaaagaaaaa

SEQ ID NO: 497475 - DNA, 75 bp, synthetic construct
  source 1..75: mol_type = other DNA
gtgtgtcggaaaccgtgctgtccggctggaggtcagggaactctgggcagaggctgcggatgtatggtggctggc

SEQ ID NO: 497476 - DNA, 75 bp, synthetic construct
  source 1..75: mol_type = other DNA
gcgtgccggaagccgtgccgtcagcctggaggtcaggggattccggaaggaggccgctgaagcgtggctccaggc

SEQ ID NO: 497477 - DNA, 75 bp, synthetic construct
  source 1..75: mol_type = other DNA
ctggaggtcagtggacgctggatggaagcggcagaagcatggcgacgggctgcctgcatagctccccggacagac

SEQ ID NO: 497478 - DNA, 75 bp, synthetic construct
  source 1..75: mol_type = other DNA
gccgtgacgacgcggtacgccagcgagcacgggagatcatgagcaaagcgattcgtctggcacgcgatctcggca

SEQ ID NO: 497479 - DNA, 75 bp, synthetic construct
  source 1..75: mol_type = other DNA
tcggcatacgcaccatccagctggcgggctacgacgtctattacgaagaccacgatgaaggcacccggcaacgtt

SEQ ID NO: 497480 - DNA, 75 bp, synthetic construct
  source 1..75: mol_type = other DNA
tcggcaacctcagcgcctggggcaatgatgttcccgccgaactgaaactgggcattgaccgtatcgccgcaatcc

SEQ ID NO: 497481 - DNA, 75 bp, synthetic construct
  source 1..75: mol_type = other DNA
tggataatgtatctgtttcattttttccgcaaagcttcagtcagtctttccataatgatttttaccgtcttgcag

SEQ ID NO: 497482 - DNA, 75 bp, synthetic construct
  source 1..75: mol_type = other DNA
ttttataacctcttaaaactgcgttggatcgggttaatttttgattcatataaaatcccggattcagttcctggt

SEQ ID NO: 497483 - DNA, 75 bp, synthetic construct
  source 1..75: mol_type = other DNA
aatgtgttgagagacccgataatgggtcttcgttcgaatgatgctgcggctagggcaataggtaccattaagcat

SEQ ID NO: 497484 - DNA, 75 bp, synthetic construct
  source 1..75: mol_type = other DNA
gtatgcaacgagtttttggcattttctccagaagggagaatgatgtatctgagttaatgatgaaggatgcagcga

SEQ ID NO: 497485 - DNA, 75 bp, synthetic construct
  source 1..75: mol_type = other DNA
cttctgttgaaaactctgccccacgtccaaagcaaacgcttgagctgcctcccccacgtgtaaatgcagtcgaag

SEQ ID NO: 497486 - DNA, 75 bp, synthetic construct
  source 1..75: mol_type = other DNA
ggcacgtgaaaatgacgtggttgaatacgaaatccactggcgaaagcgtattcataatcaacataatatctggtc

SEQ ID NO: 497487 - DNA, 75 bp, synthetic construct
  source 1..75: mol_type = other DNA
cgggaggatgcctttacctttaccaatctggttttaaagccactgattgaatacattcgttggattcatttactt

SEQ ID NO: 497488 - DNA, 75 bp, synthetic construct
  source 1..75: mol_type = other DNA
ggctctcggaaagcgatctggtatcccgggaacaggatatccgtcttaatctggaattcgatttcaaacgccagc

SEQ ID NO: 497489 - DNA, 75 bp, synthetic construct
  source 1..75: mol_type = other DNA
tgcagcaacgctctcttttcgacgactggcggcaaacgcatacactgaagaccctggctgactgggatgactggt

SEQ ID NO: 497490 - DNA, 75 bp, synthetic construct
  source 1..75: mol_type = other DNA
tatgggttattctttccattaagtggcgaatcatgggcaacggcacctgaaatcgaacttgctctgtcgctcggg

SEQ ID NO: 497491 - DNA, 75 bp, synthetic construct
  source 1..75: mol_type = other DNA
tcgataacatgcagcgtattctgaatacccgtgccggaagccttaagcatcttccggattatggtctgccggata

SEQ ID NO: 497492 - DNA, 75 bp, synthetic construct
  source 1..75: mol_type = other DNA
agctgtatggtaatttttcagaaggatttgaaattaatgttctttgtgaacatgagcagattatactctctattc

SEQ ID NO: 497493 - DNA, 75 bp, synthetic construct
  source 1..75: mol_type = other DNA
gaaacccggggcggttcactccatatcggttttgataccgaatatgttttcaatcctgaaacacaacagaatgat

SEQ ID NO: 497494 - DNA, 75 bp, synthetic construct
  source 1..75: mol_type = other DNA
gcgacaggtaaggtgcagatccctgtggtgagcggaaatggtcagttcgccgcagtggctgaagtcaccgttact

SEQ ID NO: 497495 - DNA, 75 bp, synthetic construct
  source 1..75: mol_type = other DNA
caaaaggtgtggtcgaaacctccctgaacgtcggtgtggtgaccatgactgacaataacgtagaaattcactgcc

SEQ ID NO: 497496 - DNA, 75 bp, synthetic construct
  source 1..75: mol_type = other DNA
atctggtacgtgaaacctatcagcgtctgttcaacaagacgccgaacatccagattatccacgcgggcctggaat

SEQ ID NO: 497497 - DNA, 75 bp, synthetic construct
  source 1..75: mol_type = other DNA
tccgtcaatggcagaagatcgcagtacggtgacggcggcaaccggtatgactgtgacgcctgccagctcctcggt

SEQ ID NO: 497498 - DNA, 75 bp, synthetic construct
  source 1..75: mol_type = other DNA
cgccgatccgtcgaaagccaccattagtgtgaaagatatgacaattacggtaaacggcgtggcgacaggtaaggt

SEQ ID NO: 497499 - DNA, 75 bp, synthetic construct
  source 1..75: mol_type = other DNA
ctgaaatcgctggtaaatacctatcaggatatcctgaaaaatgagctggcagagaaagagaaaaatctggcatta

SEQ ID NO: 497500 - DNA, 75 bp, synthetic construct
  source 1..75: mol_type = other DNA
aatcagaattttgcgaccattaccgtgaaagggaacacgatcacggtgaaaggtgttgcggcaggtaaagcgcag

SEQ ID NO: 497501 - DNA, 75 bp, synthetic construct
  source 1..75: mol_type = other DNA
atctggatgatgaggatgctgactgggtatccaccgggcaggggcagaaatctgccggtgacaccagttttacgc

SEQ ID NO: 497502 - DNA, 75 bp, synthetic construct
  source 1..75: mol_type = other DNA
gatcgacagcggtaaagactacgtggtgagcatgctggattcgctgggtaaactggcaggcgcgaaaaccgaagc

SEQ ID NO: 497503 - DNA, 75 bp, synthetic construct
  source 1..75: mol_type = other DNA
caccgactccgaagaagaaggtgaaatctacatgggttgcgcggggggtatcgacttcacctccaacctgcattt

SEQ ID NO: 497504 - DNA, 75 bp, synthetic construct
  source 1..75: mol_type = other DNA
aatgccaacaaactgctggtgcgcttcctggcgggtcatgcggaagaactggatctgcgccttatcgatttcaac

SEQ ID NO: 497505 - DNA, 75 bp, synthetic construct
  source 1..75: mol_type = other DNA
gaaagatgatggcgatgaggcgaagggcagggcactgaaacagcatgtgatggccccgctgatttcttactttcg

SEQ ID NO: 497506 - DNA, 75 bp, synthetic construct
  source 1..75: mol_type = other DNA
ggggcgcgagctaaaacagcacgtcatggccccgctgatttcttactttcgtgatgcgcgtaaatcactgggaat

SEQ ID NO: 497507 - DNA, 75 bp, synthetic construct
  source 1..75: mol_type = other DNA
cggcgctaatggcgtttcttggtgcggaactgaaaagtggtattgaaatcgtcactacggcgctgaatctggagg

SEQ ID NO: 497508 - DNA, 75 bp, synthetic construct
  source 1..75: mol_type = other DNA
aatttctgccagcagtcgtccgggggatgtggttgcggatttttttatgggatcgggggcaacaataaaagcagc

SEQ ID NO: 497509 - DNA, 75 bp, synthetic construct
  source 1..75: mol_type = other DNA
gcaacagagcgcattctgtttgcagaacattatcagggaccgtatcgcccgaaagatgatggctatgtggcacag

SEQ ID NO: 497510 - DNA, 75 bp, synthetic construct
  source 1..75: mol_type = other DNA
cgtccgggtgacctggttgcagattttttcatggggtcgggttcgacagtcaaagccgcgatggcgctggggcgg

SEQ ID NO: 497511 - DNA, 75 bp, synthetic construct
  source 1..75: mol_type = other DNA
aatcatataatttgggcaaaaccatcgggccgctggaatggttgtaacaaagaaagcctgcgtgcgtactttcca

SEQ ID NO: 497512 - DNA, 75 bp, synthetic construct
  source 1..75: mol_type = other DNA
tgcggaaaagatacgctggagcacagacgagatgcagcccgataagggtcttgaaatgaccgttgcgctacgtga

SEQ ID NO: 497513 - DNA, 75 bp, synthetic construct
  source 1..75: mol_type = other DNA
gagcgcgaccgggcagggacagaaatctgcaggtgataccagttttacactggcctggaaaccgggagaagaagg

SEQ ID NO: 497514 - DNA, 75 bp, synthetic construct
  source 1..75: mol_type = other DNA
gtgttgcagcatgtgttctcaatgccagttctgtgaataatattgagcctgcactattactgtcagttatgactg

SEQ ID NO: 497515 - DNA, 75 bp, synthetic construct
  source 1..75: mol_type = other DNA
gcagcagataatcagcgcgagcagtcgtccgggggacctggttgcagattttttcatggggtcgggttcgacagt

SEQ ID NO: 497516 - DNA, 75 bp, synthetic construct
  source 1..75: mol_type = other DNA
acggcaaaacagattgctgatgccacaggaaagaaaaacatggtgtcgcactggttcagtgccagccagtggcag

SEQ ID NO: 497517 - DNA, 75 bp, synthetic construct
  source 1..75: mol_type = other DNA
ggtcagagcaccaccctgactgtggccgttcagccggaaggcgcaacggataaaaccttccgcgcaacgtcggca

SEQ ID NO: 497518 - DNA, 75 bp, synthetic construct
  source 1..75: mol_type = other DNA
gtggcgacaggtaaggtgcagatccctgtggtgagcggaaatggtcagttcgccgcagtggctgaagtcaccgtt

SEQ ID NO: 497519 - DNA, 75 bp, synthetic construct
  source 1..75: mol_type = other DNA
gggaagagcacgacgctgaccgtggcattccagccggaaggcgcaaccgacaagagcttccgtgcggtgtctgcg

SEQ ID NO: 497520 - DNA, 75 bp, synthetic construct
  source 1..75: mol_type = other DNA
gagatggcgaagcaaaaagcgcaggaaattcagcaggcctatgagctgataaagcagcagaaagggtttaaataa

SEQ ID NO: 497521 - DNA, 75 bp, synthetic construct
  source 1..75: mol_type = other DNA
gtgaaagtgaccaacgtgggtaaaccttctgtggcggaagaacgcagcgaaattacgccggtcactgcgattaag

SEQ ID NO: 497522 - DNA, 75 bp, synthetic construct
  source 1..75: mol_type = other DNA
tcgcgtgagcgatatggtgttcctcgatgactccaatccgttaaccggttttatgctaatcgacaccgccatctg

SEQ ID NO: 497523 - DNA, 75 bp, synthetic construct
  source 1..75: mol_type = other DNA
tggtgtgctggctgcggttaaacgcggttccattttcgatcacacagcggttggcctggcgctgacaggttattc

SEQ ID NO: 497524 - DNA, 75 bp, synthetic construct
  source 1..75: mol_type = other DNA
gccgtgacggcgaaagaagtgatcacccgcacggtgaaagtcactaacgtgggtaaaccttctgtagcggaagaa

SEQ ID NO: 497525 - DNA, 75 bp, synthetic construct
  source 1..75: mol_type = other DNA
gccgaattccggtatgggaagagttcgtgccgcgcttccaggccacgctggaacttggcgtctgcgcgatgattt

SEQ ID NO: 497526 - DNA, 75 bp, synthetic construct
  source 1..75: mol_type = other DNA
acgatgattatcctcgtcaacctgctggtcgatctgctgtacggcgtggtgaacccgcgtattcgttcgtcataa

SEQ ID NO: 497527 - DNA, 75 bp, synthetic construct
  source 1..75: mol_type = other DNA
cgatggtgctgggtacgattccgctggcggttatcgttcgtatgacgcgctcctcgatgctggaagtgctgggcg

SEQ ID NO: 497528 - DNA, 75 bp, synthetic construct
  source 1..75: mol_type = other DNA
gaccgcgaccgggcaggggcagaagtctgcaggagataccagttttacgctggcctggaaaccgggagaagatgg

SEQ ID NO: 497529 - DNA, 75 bp, synthetic construct
  source 1..75: mol_type = other DNA
cggtaaaaggtgccggtaccaccctgtgggtttataacggtcagggtgatgcctatgcaaacccgttgtcagatg

SEQ ID NO: 497530 - DNA, 75 bp, synthetic construct
  source 1..75: mol_type = other DNA
gatccgtcgacgggcaccattggtgtgaaagatatggtgattactgtgacgggggttgcggctggtaaggtgcag

SEQ ID NO: 497531 - DNA, 75 bp, synthetic construct
  source 1..75: mol_type = other DNA
aagacgtgatgacccgcacagtgaaaatcagcggtgtggggcgtccgtatctggcagaggaaggcactgaaatcg

SEQ ID NO: 497532 - DNA, 75 bp, synthetic construct
  source 1..75: mol_type = other DNA
tggcctggaaaccgggagaggaaggtcagaaagggcttataggctggtttgaaagcggcgatgtccgggcctata

SEQ ID NO: 497533 - DNA, 75 bp, synthetic construct
  source 1..75: mol_type = other DNA
gaaggatctgacgccgggcgagatgacggctgaaccctacgatgataactacctggatgatgaagacgcggactg

SEQ ID NO: 497534 - DNA, 75 bp, synthetic construct
  source 1..75: mol_type = other DNA
ggatgtgttccgtggctgggtgagtgccattggtaaagcggtgaccgccaaagaggtgatcacccgtaccgtgaa

SEQ ID NO: 497535 - DNA, 75 bp, synthetic construct
  source 1..75: mol_type = other DNA
atggcagaagatcgcagcacggtaacagcggcaaatcgacctgacagaggtcggtggagaacgttattttttctg

SEQ ID NO: 497536 - DNA, 75 bp, synthetic construct
  source 1..75: mol_type = other DNA
gccaccaacgggcaatgtggcaaaaggtcagaatatcaccctgaccgtggctgttcagccggaaggggcgacgga

SEQ ID NO: 497537 - DNA, 75 bp, synthetic construct
  source 1..75: mol_type = other DNA
ctagtgggtgcagcagtggcatcagttggattgataccactctgaccggaaatgcatcatcaagctcacctaagc

SEQ ID NO: 497538 - DNA, 75 bp, synthetic construct
  source 1..75: mol_type = other DNA
aatggagatgtatgggagggggttggtaaatatcattccaaaacccctagctataagtataagtatatagaaaaa

SEQ ID NO: 497539 - DNA, 75 bp, synthetic construct
  source 1..75: mol_type = other DNA
atgaaaaagattaatgcaataattttattatcttctctgacctctgcctcggtatttgctggcgcatacgtcgaa

SEQ ID NO: 497540 - DNA, 75 bp, synthetic construct
  source 1..75: mol_type = other DNA
ttcaacatttggacagtgggttggagtctatttatctgcagagaacaaacgccagctatgggtaccggaaggctt

SEQ ID NO: 497541 - DNA, 75 bp, synthetic construct
  source 1..75: mol_type = other DNA
cgctgggcgactgcgtactgtctctgtcggagaaagatctgcaggcacatactctggccaccgcagaagtatata

SEQ ID NO: 497542 - DNA, 75 bp, synthetic construct
  source 1..75: mol_type = other DNA
tttttgaggaagctgtaggccgcaaagttgaatttgttcaggataaccattcgaagtccagtaaaggtgttttac

SEQ ID NO: 497543 - DNA, 75 bp, synthetic construct
  source 1..75: mol_type = other DNA
gaattacgctggttagatcgtaatgtcgaaccgtaccaccgcgagcaaaaccagattcgtatcgggacgaagtat

SEQ ID NO: 497544 - DNA, 75 bp, synthetic construct
  source 1..75: mol_type = other DNA
tataaccataataactatagttcaacagatttgaacggggaactggataataatgacacctatgaaattggtacc

SEQ ID NO: 497545 - DNA, 75 bp, synthetic construct
  source 1..75: mol_type = other DNA
ctggacgcgcaatctgcacctaaaatcagtaaaagcatcgatgttccccaaaaagcggtaattcatgaaacttgc

SEQ ID NO: 497546 - DNA, 75 bp, synthetic construct
  source 1..75: mol_type = other DNA
ggttacacagggccaactgaaaaattttatgaaccacatggcattaattatctctctagcaaaaatgtggttgat

SEQ ID NO: 497547 - DNA, 75 bp, synthetic construct
  source 1..75: mol_type = other DNA
gtcaacaaaagatcaaattcaaaaacagaagctcggatatggtgacattgtcattacacgttcaggctcaggaac

SEQ ID NO: 497548 - DNA, 75 bp, synthetic construct
  source 1..75: mol_type = other DNA
gcggtactcagcgcagagaataaacgtcagctgtggatcccggaagggttcgcccacgggtttatggcgctgagc

SEQ ID NO: 497549 - DNA, 75 bp, synthetic construct
  source 1..75: mol_type = other DNA
atgaacattattaaaacagatattcctgaggtgctgatttttgaaccgcgcgtgtttggtgatgcgcggggcttc

SEQ ID NO: 497550 - DNA, 75 bp, synthetic construct
  source 1..75: mol_type = other DNA
cttagataaaggctgcgcaattagtagccatttaatccgattagaattcgaagatgaggaaaccgcagcagctgt

SEQ ID NO: 497551 - DNA, 75 bp, synthetic construct
  source 1..75: mol_type = other DNA
attttatagtttgatcgacgcacaacgcactgcattcgaaaagtttacattattaaatgttgatggggtaaatat

SEQ ID NO: 497552 - DNA, 75 bp, synthetic construct
  source 1..75: mol_type = other DNA
aatcacgtgacaaccagcagcagcaggtcgcgttaaggcagagaattgtctctctacaactacaggtcaaaagtg

SEQ ID NO: 497553 - DNA, 75 bp, synthetic construct
  source 1..75: mol_type = other DNA
tggtaatacactgtactggattggtcctccggggggaaatgtgacgccgggccggataccgacttcgcagcggta

SEQ ID NO: 497554 - DNA, 75 bp, synthetic construct
  source 1..75: mol_type = other DNA
tgaaagaggggttaaatgggatgatccctgtattgatattaagtggcctctagtatcgtctcccctgttatcaga

SEQ ID NO: 497555 - DNA, 75 bp, synthetic construct
  source 1..75: mol_type = other DNA
cacatcgctggaagcagaggcagttatgttctgtatatcaggacaaaatgtagattcagaagaacatgtatcaac

SEQ ID NO: 497556 - DNA, 75 bp, synthetic construct
  source 1..75: mol_type = other DNA
ggtaaaggcttcgtgttgccccgccattcaggtgtcgtcattcacggtaatgtaaagatcggtgagaatgtgatt

SEQ ID NO: 497557 - DNA, 75 bp, synthetic construct
  source 1..75: mol_type = other DNA
agaactttacgctgacgtcaccggtatccggaaccgttgctgccgtgctgatcagacagggacagtctgtcaggg

SEQ ID NO: 497558 - DNA, 75 bp, synthetic construct
  source 1..75: mol_type = other DNA
agtttttggtgatgaacgtggcttcttttttgagagttttaaccagaaagtatttgaagaagctgtaggacggaa

SEQ ID NO: 497559 - DNA, 75 bp, synthetic construct
  source 1..75: mol_type = other DNA
tggtgggagattttgactgtgatgtcagacggacgggaagaaaaatactgatgaaaggtacctgtgtttttcctc

SEQ ID NO: 497560 - DNA, 75 bp, synthetic construct
  source 1..75: mol_type = other DNA
gatgaatgggacatctatgaatccattgcggattattttgatgtggtgggagattttaactgtgatgtcagatgg

SEQ ID NO: 497561 - DNA, 75 bp, synthetic construct
  source 1..75: mol_type = other DNA
gacgaggcagaatttgtttataagacaaataattattattatcaaaagcatgaaagaagcattctttggaacgat

SEQ ID NO: 497562 - DNA, 75 bp, synthetic construct
  source 1..75: mol_type = other DNA
ttacaccgctgtttgaatattccggtgcttgctccggttgtggcgagacgccgtatattaaattgctgactcagc

SEQ ID NO: 497563 - DNA, 75 bp, synthetic construct
  source 1..75: mol_type = other DNA
acacacattgctatggaatgatccaactatcaatataagttggccaatcatacaaaactgcaagccaattatttc

SEQ ID NO: 497564 - DNA, 75 bp, synthetic construct
  source 1..75: mol_type = other DNA
atgccaaagaaactgaccagttatagcgatgctgggatcgatatcatcccggcgaatggcaagggggcgtcatgc

SEQ ID NO: 497565 - DNA, 75 bp, synthetic construct
  source 1..75: mol_type = other DNA
atggtcaggaagccgtgcagacattggtggcaatacgtgagctactggaatcaccggaacaactgttgctggatc

SEQ ID NO: 497566 - DNA, 75 bp, synthetic construct
  source 1..75: mol_type = other DNA
cggaatacgcagaacaaccgggggtttctccaccacatgcagggttaacgtctaatcaactggaattattgcaga

SEQ ID NO: 497567 - DNA, 75 bp, synthetic construct
  source 1..75: mol_type = other DNA
tcagacaacaagggaaacatgcgtccgttgtttaccattctgaaagagatgcaggccagctttgataaacacagg

SEQ ID NO: 497568 - DNA, 75 bp, synthetic construct
  source 1..75: mol_type = other DNA
ctgtcaaatgatgatgtcagccatgtgggcgacgtgttgtcggcaacgatgaataagtcggcggctgattttcag

SEQ ID NO: 497569 - DNA, 75 bp, synthetic construct
  source 1..75: mol_type = other DNA
acattgcgtgaaaacggaaataccaacaggtattccgtggtggtaaatgcagggacgcaggctttatctctgcat

SEQ ID NO: 497570 - DNA, 75 bp, synthetic construct
  source 1..75: mol_type = other DNA
aatgaaaaagcggccgatttctggcgtgcgctggtggaagcgggcgttaagccatgcggtctgggcgcgcgtgac

SEQ ID NO: 497571 - DNA, 75 bp, synthetic construct
  source 1..75: mol_type = other DNA
gatatcgcacagaaatctggctacagcagacgcaacatccagcttctgttccgaaatttcatgcatgtgcctgga

SEQ ID NO: 497572 - DNA, 75 bp, synthetic construct
  source 1..75: mol_type = other DNA
gcaaagggactctgaacaacgatatgtctattaataccccggctgatggtgtaaatattgccctgcacaatattg

SEQ ID NO: 497573 - DNA, 75 bp, synthetic construct
  source 1..75: mol_type = other DNA
atgatagtcagactaacaagctatcactatttattgagttcgaacgccggattgtgtgtgtcccgtgggcgcgtc

SEQ ID NO: 497574 - DNA, 75 bp, synthetic construct
  source 1..75: mol_type = other DNA
cgtgatttattcctttcaagcgaaggaaacccgtttaattcagaaactgaaatgaaatggcatcacccactataa

SEQ ID NO: 497575 - DNA, 75 bp, synthetic construct
  source 1..75: mol_type = other DNA
ggtacgccaacgccagcgtgaagaatacgaagcctgcaaacgggcggaatctgataagggggattttgaattatg

SEQ ID NO: 497576 - DNA, 75 bp, synthetic construct
  source 1..75: mol_type = other DNA
tattccggcgaccagctcttatgcaggctatcagccggtcacggcaccggctggccgctcttatgtagaccagag

SEQ ID NO: 497577 - DNA, 75 bp, synthetic construct
  source 1..75: mol_type = other DNA
tcgcacgccaaccatttctgacgaagtgaaacaggagatgctggcagtcgcgacccgggaagggtttgatgtcag

SEQ ID NO: 497578 - DNA, 75 bp, synthetic construct
  source 1..75: mol_type = other DNA
gttaaacaggagatgctggcagttgcgacccgggaagggtttgacgtcagtaaatttatttgggtacagcaaccc

SEQ ID NO: 497579 - DNA, 75 bp, synthetic construct
  source 1..75: mol_type = other DNA
tgcgtgcaatcctaacgctgaaagtagaatcacagtttgcaggtcagggtgatattgatttgctggaaggtgacg

SEQ ID NO: 497580 - DNA, 75 bp, synthetic construct
  source 1..75: mol_type = other DNA
cggaacgcggcgtgcaggtgttcttcactcaggtctttcgcgacagctttttccatgccgatatgcaccctggca

SEQ ID NO: 497581 - DNA, 75 bp, synthetic construct
  source 1..75: mol_type = other DNA
ggtcagccgacctgaatttgggttgatgcccgcctggttaatggcgggggggctgagcgcctggtttgtcggttg

SEQ ID NO: 497582 - DNA, 75 bp, synthetic construct
  source 1..75: mol_type = other DNA
agagtatacgttccgctacaggaaaccaatgggctgaagaggaagatcctcactccatcctgaaggcattgagga

SEQ ID NO: 497583 - DNA, 75 bp, synthetic construct
  source 1..75: mol_type = other DNA
tttttccacacacagaggtttcatgtttctgctattcagatgcataaactctgttgcgcttaaagtcaggtatat

SEQ ID NO: 497584 - DNA, 75 bp, synthetic construct
  source 1..75: mol_type = other DNA
cggattgatgaatgtattgtcagaaaatatatggaaagtgccgacaggatccagcactctgatagtgctgtttct

SEQ ID NO: 497585 - DNA, 75 bp, synthetic construct
  source 1..75: mol_type = other DNA
attgcgaaagccggtggggatgttgatgccattcaggcggcaacgccggtcacgctgaatatggcgctggcgaac

SEQ ID NO: 497586 - DNA, 75 bp, synthetic construct
  source 1..75: mol_type = other DNA
cccgtcagtgtgcactgaaacggcttacctgccattcattcagaaagtagttgctaaagcgattatcttctctga

SEQ ID NO: 497587 - DNA, 75 bp, synthetic construct
  source 1..75: mol_type = other DNA
agaatcacaattcgcaggtcagggtgatattgatttgctggaaggtgattctaaaaccgtagcgcctgcaattga

SEQ ID NO: 497588 - DNA, 75 bp, synthetic construct
  source 1..75: mol_type = other DNA
cgctaatcagcattaccgctcacatgagaacgctgtagaacgtgatttactgcgtgcaatcctcacgctgaaagt

SEQ ID NO: 497589 - DNA, 75 bp, synthetic construct
  source 1..75: mol_type = other DNA
gtgtgcaggaaaatcattaccccgtttctggcccggggattttttcccgactttctatgcctgccatcttactgt

SEQ ID NO: 497590 - DNA, 75 bp, synthetic construct
  source 1..75: mol_type = other DNA
gtttggtgggggtcatattgctgctggcagcgtggctgcctttgtctggcaccagttacggcattgccgggctac

SEQ ID NO: 497591 - DNA, 75 bp, synthetic construct
  source 1..75: mol_type = other DNA
cctggtatgaggggaatatcctgtttgcctttgcagtcgcagcacaggtgctgacgtggtgtgagacgcgcagcc

SEQ ID NO: 497592 - DNA, 75 bp, synthetic construct
  source 1..75: mol_type = other DNA
ggaaatcattaccccgtttctggcccggagattttttcccgacgttctatgcctgtcatctggctgtgctgggcg

SEQ ID NO: 497593 - DNA, 75 bp, synthetic construct
  source 1..75: mol_type = other DNA
gctgtttgccctggtatgggggctgaatctgtcccgtcatgcgcatatccggcaggtggccattaaccggctgtg

SEQ ID NO: 497594 - DNA, 75 bp, synthetic construct
  source 1..75: mol_type = other DNA
atctggcaggctttccctggtatgaggggaatatcctgtttgcctttgcagtggcggcacaggtgctgacgtggt

SEQ ID NO: 497595 - DNA, 75 bp, synthetic construct
  source 1..75: mol_type = other DNA
agagcggaacgtctggcgctgttggcctgcctgctggcggttattccggcgcttaaccttgcccccagtgatgca

SEQ ID NO: 497596 - DNA, 75 bp, synthetic construct
  source 1..75: mol_type = other DNA
agagcggaacgtctggcgctgttggcctgcctgctggcagttattccggcacttaaccttgccgccagtgatgca

SEQ ID NO: 497597 - DNA, 75 bp, synthetic construct
  source 1..75: mol_type = other DNA
gatgtttctggtcgggcgaggagcctttccgctgtttgccctggtgtgggggctgaatctgtcccgtcatacgca

SEQ ID NO: 497598 - DNA, 75 bp, synthetic construct
  source 1..75: mol_type = other DNA
ggtgcgtttccgctgtttgcccaggtatgggggctgaatctgtcccgtcatgcacatatccgtcagtccgccgtt

SEQ ID NO: 497599 - DNA, 75 bp, synthetic construct
  source 1..75: mol_type = other DNA
gatgacggtgctgaccgttggtctggtgtcgtgtacagggaaatcattaccccgtttctggcccggggatttttt

SEQ ID NO: 497600 - DNA, 75 bp, synthetic construct
  source 1..75: mol_type = other DNA
tcaaacagcctgcatacgcagcgcctggccgtggattttaatctgttcgtaaatgggcagtacaagacccgtacg

SEQ ID NO: 497601 - DNA, 75 bp, synthetic construct
  source 1..75: mol_type = other DNA
gctaccgctatgaagatatcgacgtgctggatttccgcgtttgctataacggcgaatggtacaacacgcgctttg

SEQ ID NO: 497602 - DNA, 75 bp, synthetic construct
  source 1..75: mol_type = other DNA
acaccctcttgcagtaccagtgtaacatgcaggaagagcccggcgattgccatcagcctcacaaccccgctagaa

SEQ ID NO: 497603 - DNA, 75 bp, synthetic construct
  source 1..75: mol_type = other DNA
gactgcgcacgcttgtagaaaatgaaaaaacaacttatgcacaaatcgcccgcgagtctggggtggccgcaggaa

SEQ ID NO: 497604 - DNA, 75 bp, synthetic construct
  source 1..75: mol_type = other DNA
atttgcccgtctgttttcccgtattgcaaagcgcactgcaattaataaaacaaaaaaagccgatgtaaaagctat

SEQ ID NO: 497605 - DNA, 75 bp, synthetic construct
  source 1..75: mol_type = other DNA
tgtgctgtgcaattaccgccagcgcgctagtttctgccggaacacacgccgcctcctggaaagagacgctcacca

SEQ ID NO: 497606 - DNA, 75 bp, synthetic construct
  source 1..75: mol_type = other DNA
tgtgctgtgccattgccgccagcgcattaatttccaccggggcgcatgctgcgtcctggaaagatgcgctctcca

SEQ ID NO: 497607 - DNA, 75 bp, synthetic construct
  source 1..75: mol_type = other DNA
gcgtcctggaaagatgcgctctccagcgccgccagcgaacttggcaaccaaaacagcacgacacaggaaggcggt

SEQ ID NO: 497608 - DNA, 75 bp, synthetic construct
  source 1..75: mol_type = other DNA
gttatggggctgggcagttttttcccagttcgcgtattacgttgccggctttccctggtatgaggggaatatcct

SEQ ID NO: 497609 - DNA, 75 bp, synthetic construct
  source 1..75: mol_type = other DNA
ccggtcttgtgatgacggtgctgaccgttggtctggtgtcgtgtgcaggaaaatcattaccccgtttctggcccg

SEQ ID NO: 497610 - DNA, 75 bp, synthetic construct
  source 1..75: mol_type = other DNA
atgactgaaatacaacgcctgctaaccgaaacgattgattctctgaatacgcgcgaaaaacgcgacaacaaaccc

SEQ ID NO: 497611 - DNA, 75 bp, synthetic construct
  source 1..75: mol_type = other DNA
ggtatcagtggctcattaaccagtggcacctcccaatgggtaggtaaatcatcttcagaaggaaaccatacacac

SEQ ID NO: 497612 - DNA, 75 bp, synthetic construct
  source 1..75: mol_type = other DNA
acgaacgcatcctcgagcgccagtagttccgcttcctcggcaacggcggcagcaaattccgcgaaggcggcaaaa

SEQ ID NO: 497613 - DNA, 75 bp, synthetic construct
  source 1..75: mol_type = other DNA
caagtaagcccggggacttcttccagtagatcgtattatcaacgtattcagacacagtcagcaggtgctcatacc

SEQ ID NO: 497614 - DNA, 75 bp, synthetic construct
  source 1..75: mol_type = other DNA
gtagctgaagaggctgctgatgctgctcaagaattagcacagaaggcaggattattaagtcgctttactgctgct

SEQ ID NO: 497615 - DNA, 75 bp, synthetic construct
  source 1..75: mol_type = other DNA
gttccgccagttccggaaatacaggatgatgtcgcgcaagcaattgaaaatctcaagcagaagttagtggaatgc

SEQ ID NO: 497616 - DNA, 75 bp, synthetic construct
  source 1..75: mol_type = other DNA
gtgattgtctggatgaggctgagcaagagcttatcgttaccattaacaaatatgtcagtcagttggcagcagaac

SEQ ID NO: 497617 - DNA, 75 bp, synthetic construct
  source 1..75: mol_type = other DNA
agtatggccagaagatggcgagttaagcgaattaacgtggtgcagccacaatcagcaccatgatgacacgctata

SEQ ID NO: 497618 - DNA, 75 bp, synthetic construct
  source 1..75: mol_type = other DNA
attgaagaaaccgccgcaatggtcggggcgctgcatgatgcaaaaatcacaggctcaatggcggggacgggaagc

SEQ ID NO: 497619 - DNA, 75 bp, synthetic construct
  source 1..75: mol_type = other DNA
gtagtgagcgaatgccggatagcaaaacagccgttcttgttgccagggagtttgataggaaaggtgactggcgaa

SEQ ID NO: 497620 - DNA, 75 bp, synthetic construct
  source 1..75: mol_type = other DNA
atcgatgattgtctggatgaggctgagcaagagcttatcgttaccattaacaaatatgccagtcagttggcagca

SEQ ID NO: 497621 - DNA, 75 bp, synthetic construct
  source 1..75: mol_type = other DNA
gatgtggctcagcgtctggtgcagcatcttgcagagcatggcattcaaccagcccggaatatggctgaacatatt

SEQ ID NO: 497622 - DNA, 75 bp, synthetic construct
  source 1..75: mol_type = other DNA
agcgcaacaaggctttttacagcccaaaattccaccctggtatcaggctcttcccgttctgcatcgcttcatcag

SEQ ID NO: 497623 - DNA, 75 bp, synthetic construct
  source 1..75: mol_type = other DNA
tatcgagtctttctcgtagtatagcgactgcagttcgaagcaacagtttctctgtatcaccgcaaaaagtgtcac

SEQ ID NO: 497624 - DNA, 75 bp, synthetic construct
  source 1..75: mol_type = other DNA
atcttgcagagcatggcattcaaccagcccggagtatggctgaacatattcctccggcacctaactggcctgcgc

SEQ ID NO: 497625 - DNA, 75 bp, synthetic construct
  source 1..75: mol_type = other DNA
tcgacagtctactgctgaaagttcgttacatcaacaacttcctaatgtgaggcagcgcctgatacaacatcttgc

SEQ ID NO: 497626 - DNA, 75 bp, synthetic construct
  source 1..75: mol_type = other DNA
ttccaaccgtcaaccgcaatattacagctgtatataaaaaaagcagcttctctgtatcaccacagaaaatcacat

SEQ ID NO: 497627 - DNA, 75 bp, synthetic construct
  source 1..75: mol_type = other DNA
ctccatgacgatgaacaaaaccgccgccgattttgacggcatgagcgatgcgctgacctatgccgcacctgtggc

SEQ ID NO: 497628 - DNA, 75 bp, synthetic construct
  source 1..75: mol_type = other DNA
agattggtggatttctcctgggtggggagagagttagagtttcttatatactagatacaggccgttttttagcag

SEQ ID NO: 497629 - DNA, 75 bp, synthetic construct
  source 1..75: mol_type = other DNA
ttatatgccagatacaggccgttttttagcagaaagtgaagggctgggactggtttatgcagaattattgaatat

SEQ ID NO: 497630 - DNA, 75 bp, synthetic construct
  source 1..75: mol_type = other DNA
cttgagcaggcagcagccatgaccggtgtgctgcatgacaataacatcagggggtcaatggcgggtacgggtagt

SEQ ID NO: 497631 - DNA, 75 bp, synthetic construct
  source 1..75: mol_type = other DNA
cttctacttctgcgaagtctatcggtacagtctctgaagcttcaactaaagcactggcgaaggcttccgaaggta

SEQ ID NO: 497632 - DNA, 75 bp, synthetic construct
  source 1..75: mol_type = other DNA
actgggagtctctgggtggaacatggggcggacgcttcagaagccgccctgacggcaatcatttcagccttgaac

SEQ ID NO: 497633 - DNA, 75 bp, synthetic construct
  source 1..75: mol_type = other DNA
cttttgcagcaattaacaacgttgctaaaggggcaagtgaggcggctgaaaaagcaagctctgcatcttcaaagg

SEQ ID NO: 497634 - DNA, 75 bp, synthetic construct
  source 1..75: mol_type = other DNA
ggaccagagtaaaaacgaatatcacatcagtctgacgggcggtactgcgccggggactcagctcgaccgccagtt

SEQ ID NO: 497635 - DNA, 75 bp, synthetic construct
  source 1..75: mol_type = other DNA
ttttcggggaggaggccagctcagccgccgccgtgctgatgactgccgcctcaaccggaaagctggacaaactga

SEQ ID NO: 497636 - DNA, 75 bp, synthetic construct
  source 1..75: mol_type = other DNA
ggtgccattggtcttgtagcctggccggttatcaccggcatcaatgccatcatcgcggcagcaggcgcaatgggg

SEQ ID NO: 497637 - DNA, 75 bp, synthetic construct
  source 1..75: mol_type = other DNA
ttctctccatgacgatgaacaaaaccgccgccgattttgacggcatgagcgatgcgctgacctatgccgcacctg

SEQ ID NO: 497638 - DNA, 75 bp, synthetic construct
  source 1..75: mol_type = other DNA
ggaaagctggacaaactgaccgctgcgtttaaagcctcagacgggaagaccgccgagctggtaaatatcatgcag

SEQ ID NO: 497639 - DNA, 75 bp, synthetic construct
  source 1..75: mol_type = other DNA
gtgttaaaactcgacggctggatccagaaaaacaaatcactggcatcaaccatcggcctcattgtcggtggtgca

SEQ ID NO: 497640 - DNA, 75 bp, synthetic construct
  source 1..75: mol_type = other DNA
caaccatttcgcatactgcggtagtctggttgattgcctttggcgggatggtgatcagcaaacgctttactgcgc

SEQ ID NO: 497641 - DNA, 75 bp, synthetic construct
  source 1..75: mol_type = other DNA
ttgaaagccctcacattgggtgcaactctggtcgtcagtttcagcatcggcctggcattaacgctggtcaccgta

SEQ ID NO: 497642 - DNA, 75 bp, synthetic construct
  source 1..75: mol_type = other DNA
ccagtgacattaaacgacgctttgatggtagagaggtcaccaactggcaaattttgctgtttggcttaaccggcg

SEQ ID NO: 497643 - DNA, 75 bp, synthetic construct
  source 1..75: mol_type = other DNA
atgaccgaatttaccactcttcttcagcaaggaaacgcctggttcttcattcccagcgccatcttacttggtgcg

SEQ ID NO: 497644 - DNA, 75 bp, synthetic construct
  source 1..75: mol_type = other DNA
ttttagtatcggcctggcattaacgctggtcacggtgggcgttggcgcggcaatcagtgttcaacaggtcgctaa

SEQ ID NO: 497645 - DNA, 75 bp, synthetic construct
  source 1..75: mol_type = other DNA
aaacgacgctttgatggtagagaggtcaccaactggcaaattttgttatttggcttaaccggtggccttatcccc

SEQ ID NO: 497646 - DNA, 75 bp, synthetic construct
  source 1..75: mol_type = other DNA
gcgactatcgaaagtctccgtgctgatgtttctgctgggcgtaagcgcctgcaagtctccgccacctgtgcaaag

SEQ ID NO: 497647 - DNA, 75 bp, synthetic construct
  source 1..75: mol_type = other DNA
aagagcagcgtgacaaaaacgccagagagttgaagctggcgaacgccaccatcgctgacatgcagcagcgtcagc

SEQ ID NO: 497648 - DNA, 75 bp, synthetic construct
  source 1..75: mol_type = other DNA
agagctgaaaatgaaactcttcgcgctgacgttgccgctggtcgtaagcgcctgcgtatcaacgccacctgtcca

SEQ ID NO: 497649 - DNA, 75 bp, synthetic construct
  source 1..75: mol_type = other DNA
ctgccggtaccactttgccggaagatgtggcagatcgcgccattcgccccaaattactggaagagtatgttggtc

SEQ ID NO: 497650 - DNA, 75 bp, synthetic construct
  source 1..75: mol_type = other DNA
ggtattgtgcagcgcctggagttttaccaggtgcctgatttgcaatatatcgtcagtcgtagcgcacggtttatg

SEQ ID NO: 497651 - DNA, 75 bp, synthetic construct
  source 1..75: mol_type = other DNA
gctttttgcaacgtacgccgcgtgggcgtatggcaacagcgcgagcgtggaaccatttcggcatcacgccgccag

SEQ ID NO: 497652 - DNA, 75 bp, synthetic construct
  source 1..75: mol_type = other DNA
gttggcgcagcaatcagcgttcagcaggtcgcaaaacgctggagcggatttaacactctcgctaaacgcgctccc

SEQ ID NO: 497653 - DNA, 75 bp, synthetic construct
  source 1..75: mol_type = other DNA
cgggattatttcactctcagagagcggttgatgacgatgcagaagcaactggaagtggcgcaggaatatatccgc

SEQ ID NO: 497654 - DNA, 75 bp, synthetic construct
  source 1..75: mol_type = other DNA
atggacgcaggcgtgccgatcaaagctgctgttgcgggtatcgcaatgggcctggtgaaagaaggcgataactac

SEQ ID NO: 497655 - DNA, 75 bp, synthetic construct
  source 1..75: mol_type = other DNA
ccgctctggttatctgcatcatcgtcagcctgtcatgggcagtcaattattaccgtgataacgccatctcctaca

SEQ ID NO: 497656 - DNA, 75 bp, synthetic construct
  source 1..75: mol_type = other DNA
aaagagatcatgcaggttgcgctgaaccaggctaaaggtgcgcgtctgcatatcctgggcgtaatggaacaggcg

SEQ ID NO: 497657 - DNA, 75 bp, synthetic construct
  source 1..75: mol_type = other DNA
cggtcgtgaaaaagatatgatccgtggtctggatgtgcgtactggcgtgctgccgcgtactcacggttctgcgct

SEQ ID NO: 497658 - DNA, 75 bp, synthetic construct
  source 1..75: mol_type = other DNA
cactctcgctaaacgtgccccctatttttccagtctgttgattggcttagttggggtgtatatgggcgtgcatgg

SEQ ID NO: 497659 - DNA, 75 bp, synthetic construct
  source 1..75: mol_type = other DNA
actgggtgaaattttgcacgccattgagaaaaaagttgttcgtagccgcgtactggcaggtgaaccgcgtatcga

SEQ ID NO: 497660 - DNA, 75 bp, synthetic construct
  source 1..75: mol_type = other DNA
ttgagaaagtgaccgactacctgcagatgggtcaggaagttccggtgaaagttctggaagttgatcgccagggcc

SEQ ID NO: 497661 - DNA, 75 bp, synthetic construct
  source 1..75: mol_type = other DNA
gtgctgccgcgtactcacggttctgcgctgttcacccgtggtgaaactcaggcgctggttaccgcaacgctgggt

SEQ ID NO: 497662 - DNA, 75 bp, synthetic construct
  source 1..75: mol_type = other DNA
gattatttctccctcagagaaagactgatcataatgcaaaaacaactggagggggcacagcgatacattcgtgag

SEQ ID NO: 497663 - DNA, 75 bp, synthetic construct
  source 1..75: mol_type = other DNA
ttattaccgtctccgacgtggaatcgacaagataaccgcgcaggttaactacctgcaggattacatcaggacgca

SEQ ID NO: 497664 - DNA, 75 bp, synthetic construct
  source 1..75: mol_type = other DNA
ttattaccgtctccgacgtggaatcgacaagataaccgcgcaggttaactacttgcaggactacatcaggacgca

SEQ ID NO: 497665 - DNA, 75 bp, synthetic construct
  source 1..75: mol_type = other DNA
ttattaccgtctccgatgtggaatcgacaagataaccgcgcaggttaactacctgcaggactacatcaggacgca

SEQ ID NO: 497666 - DNA, 75 bp, synthetic construct
  source 1..75: mol_type = other DNA
gattatttcgcccttagagagcgaatcgtcacagtgacgaagcaagtcagctatcttcagagctatatcaaggga

SEQ ID NO: 497667 - DNA, 75 bp, synthetic construct
  source 1..75: mol_type = other DNA
ctgcctgttatgggctgttaatcattaccgtgataacgccatcgcctacaaagagcagcgcgacaaagccgcatc

SEQ ID NO: 497668 - DNA, 75 bp, synthetic construct
  source 1..75: mol_type = other DNA
accggaaaagtggagttcgaggttagcgccgatctgatgcaccatcaacggcggattattggctcctgggtgacc

SEQ ID NO: 497669 - DNA, 75 bp, synthetic construct
  source 1..75: mol_type = other DNA
ccagatacacaaaggagcttgctgatgctaatgcgactatcgaaagtctccgtgctgatgtttctgctgggcgta

SEQ ID NO: 497670 - DNA, 75 bp, synthetic construct
  source 1..75: mol_type = other DNA
agcaaaagactggcaggaagctatcgatttctcgatggcatcattgctggataaaaactatatcagcgagaatta

SEQ ID NO: 497671 - DNA, 75 bp, synthetic construct
  source 1..75: mol_type = other DNA
gatttttcaatgacatcattgttagcaataaattatgtcaacgagagctacattcaggctattaaaaattccacc

SEQ ID NO: 497672 - DNA, 75 bp, synthetic construct
  source 1..75: mol_type = other DNA
agaagtggaatcaacaggataaccgcgcaggttaactacctgcaggaatacatcaggacgcaatgcctgaaatga

SEQ ID NO: 497673 - DNA, 75 bp, synthetic construct
  source 1..75: mol_type = other DNA
tattaccgtctccgaagtggaatcgacaggataaccgcgcaggttaactacctgcaggagtacatcaggacgcaa

SEQ ID NO: 497674 - DNA, 75 bp, synthetic construct
  source 1..75: mol_type = other DNA
cctgaataactttaagccgggagaggtgattcccggctataccgaaaatccgccggaatcggcgcattacggtgg

SEQ ID NO: 497675 - DNA, 75 bp, synthetic construct
  source 1..75: mol_type = other DNA
ccacctgctccggtaccgtgcgtgaagcccccaccacctccggcgtggataatgcaaccgccccccgactggcag

SEQ ID NO: 497676 - DNA, 75 bp, synthetic construct
  source 1..75: mol_type = other DNA
gtttgtgcaaacggtgaatgtgacgccattgagaacggaacatctgacggttttggtaaggcggtatcggcgctg

SEQ ID NO: 497677 - DNA, 75 bp, synthetic construct
  source 1..75: mol_type = other DNA
attactgacatgcagcagcgtcagcgtgatgttgctgcgctggatgaaaaatacacaaaggagttagccgatgcg

SEQ ID NO: 497678 - DNA, 75 bp, synthetic construct
  source 1..75: mol_type = other DNA
ttcgggcaatggcatttgccattcgtattgtggccattgctgttctggtctgggcaatccgttggtggtgaaatg

SEQ ID NO: 497679 - DNA, 75 bp, synthetic construct
  source 1..75: mol_type = other DNA
agagaacggctgatggcaatgcagaagcaactggaaggtgaaccgccccgggtttcctggagagtgttttatctg

SEQ ID NO: 497680 - DNA, 75 bp, synthetic construct
  source 1..75: mol_type = other DNA
ggctccgtgcgtgaagcccccaccacctccggcgtggataatgcaaccggcccccgactggcagacacagttgaa

SEQ ID NO: 497681 - DNA, 75 bp, synthetic construct
  source 1..75: mol_type = other DNA
cggcctgtacggcattgcgcgtgaactgccaggagaagagcggcagcgcctgcctgcaggaagaagtgactttct

SEQ ID NO: 497682 - DNA, 75 bp, synthetic construct
  source 1..75: mol_type = other DNA
gcgataaaaaagccagagagctggagctggcaaacgcaaccattactgatatgcaggtgcgccagcgcgatgttg

SEQ ID NO: 497683 - DNA, 75 bp, synthetic construct
  source 1..75: mol_type = other DNA
ctgatgttgccgctggtcgtaagcgcctgcggatcaacgccacctgtccaggctccgtgcgtaaagccaccaccg

SEQ ID NO: 497684 - DNA, 75 bp, synthetic construct
  source 1..75: mol_type = other DNA
ggcaccaccattccgtcagacagtgaactggctgaacgtgtgaaagagcaggttgcttcggcgctgcagcagtct

SEQ ID NO: 497685 - DNA, 75 bp, synthetic construct
  source 1..75: mol_type = other DNA
ttgctccggtcggggaaatgtttgctccactggcacccatttttgacggactcggtgagaaactgcgcggcgtct

SEQ ID NO: 497686 - DNA, 75 bp, synthetic construct
  source 1..75: mol_type = other DNA
tccgacagtaaaggcaacacgcgcccgatttttaccatcctcaaggaaatgcaggccagttttgagcgtaacaat

SEQ ID NO: 497687 - DNA, 75 bp, synthetic construct
  source 1..75: mol_type = other DNA
agcgttgatggcaccgcttaacgtctttaacaagctgcgaagcggtgtcgactggcttctcgaaaagctcggcat

SEQ ID NO: 497688 - DNA, 75 bp, synthetic construct
  source 1..75: mol_type = other DNA
gcaggccagctttgagcggaacaagctcggcactggtcagaaagcagaatacgttaaaacgatattcggcgagga

SEQ ID NO: 497689 - DNA, 75 bp, synthetic construct
  source 1..75: mol_type = other DNA
tggtgccgggctatgatttctcattaaaaaattctgagttgcaggcagtactcggcgtggcgaaagattccgcag

SEQ ID NO: 497690 - DNA, 75 bp, synthetic construct
  source 1..75: mol_type = other DNA
tgctgctgaatgccgtcgaccgggcaagccgaccgctcaaagccattcagaacgccagcaaatccctgtccggtg

SEQ ID NO: 497691 - DNA, 75 bp, synthetic construct
  source 1..75: mol_type = other DNA
ggaaaacgctgcgctgctgaccgggatgaaatcagcatttcagctttcaaacgacaatattgcgcacattggcga

SEQ ID NO: 497692 - DNA, 75 bp, synthetic construct
  source 1..75: mol_type = other DNA
ccgttcatcgttcgcagttggcatgcggtaacctggcacacggtttcgctgcttgccagccagaagacaaagcct

SEQ ID NO: 497693 - DNA, 75 bp, synthetic construct
  source 1..75: mol_type = other DNA
gaccagaccgccgccagaactcatgccgccacgtatggcaccggtggttatattccggcgaccagctcttatgca

SEQ ID NO: 497694 - DNA, 75 bp, synthetic construct
  source 1..75: mol_type = other DNA
aaatggaggcgctacgcaaacaggcacgccagctcggtgacaatacagccgcttctgctgatgatgcagccagtg

SEQ ID NO: 497695 - DNA, 75 bp, synthetic construct
  source 1..75: mol_type = other DNA
tgccggggtcggtattgcgacagcgggaacgatggccggggttaaattgctgatgcccggttatgactttgcgca

SEQ ID NO: 497696 - DNA, 75 bp, synthetic construct
  source 1..75: mol_type = other DNA
aagcgtgccgcctctgagctgcagacgaaatacaacagcctgagaacgtcagtacagcgccagcgctccgagctg

SEQ ID NO: 497697 - DNA, 75 bp, synthetic construct
  source 1..75: mol_type = other DNA
ggaacgatggccggggttaaattgctgatgcccggttatgactttgcgcaaaaaaactccgagctgcaggccgtg

SEQ ID NO: 497698 - DNA, 75 bp, synthetic construct
  source 1..75: mol_type = other DNA
ctgggtgaaaagttacaggccgcgtggcagtggtttaaaaacctgattgccccggttaaagccacccaggacacc

SEQ ID NO: 497699 - DNA, 75 bp, synthetic construct
  source 1..75: mol_type = other DNA
ctgggcgaaaagttacaggccgcgtggcagtggtttaaaaacctgattgccccggtcaaagccacccaggacacc

SEQ ID NO: 497700 - DNA, 75 bp, synthetic construct
  source 1..75: mol_type = other DNA
atcaacagtctgcactgtcaacgactggccgtggatttcaatctgtttattaatggcgaatatcagtccacaaca

SEQ ID NO: 497701 - DNA, 75 bp, synthetic construct
  source 1..75: mol_type = other DNA
ctcttacgttcgtgaagatgcaagcacggctgcgaccgctggttttgtaagaaccaatacagcatataccgtaac

SEQ ID NO: 497702 - DNA, 75 bp, synthetic construct
  source 1..75: mol_type = other DNA
cggtggcgcactggcgcttactggcatcatcggtgcaattggtcttgtagcctggccggttatcaccggcattaa

SEQ ID NO: 497703 - DNA, 75 bp, synthetic construct
  source 1..75: mol_type = other DNA
cttgagcaggcagcggccatgacaggtgtgctgcatgacaataacatcagggggtcaatggctggtactggtagt

SEQ ID NO: 497704 - DNA, 75 bp, synthetic construct
  source 1..75: mol_type = other DNA
cgcccgcaggcctgtcttatatcgaccagagcaaaagcgaatacaacatcaacctgcagggcggagtcgcaccgg

SEQ ID NO: 497705 - DNA, 75 bp, synthetic construct
  source 1..75: mol_type = other DNA
gacctctacgaccagcaagatagctcattgcgtcagctaactcagacagcaacacggtatgtgctaaagcttgat

SEQ ID NO: 497706 - DNA, 75 bp, synthetic construct
  source 1..75: mol_type = other DNA
tatcaggcttatcagcctgtcacggctcccaccggtcgtacctacattgaccagagcagcccaacctatcaaatc

SEQ ID NO: 497707 - DNA, 75 bp, synthetic construct
  source 1..75: mol_type = other DNA
cgcagattattgtagccaaatctggcgcagataaagacggcatagtggcgcaaacaccggccattctgaatatgt

SEQ ID NO: 497708 - DNA, 75 bp, synthetic construct
  source 1..75: mol_type = other DNA
ctcctacgggaaaagcgtatgacgctattaaagagctcggcgtaaaaacggctgatggtaaggggaacacgcgcc

SEQ ID NO: 497709 - DNA, 75 bp, synthetic construct
  source 1..75: mol_type = other DNA
actaaggcatcctttcaactgtcaaatgatgatgtcagccatgtgggcgacgtgttgtctgcaacgatgaataag

SEQ ID NO: 497710 - DNA, 75 bp, synthetic construct
  source 1..75: mol_type = other DNA
tgccatcatcgcggcagcaggcgcaatgggtgcaatcttcacgacggttggtagtgccattatgacggccatcgg

SEQ ID NO: 497711 - DNA, 75 bp, synthetic construct
  source 1..75: mol_type = other DNA
agatgctgaactcaattattaccgtctccgaggtggaatcgacaagataaccgcgcaggttaactacctgcagga

SEQ ID NO: 497712 - DNA, 75 bp, synthetic construct
  source 1..75: mol_type = other DNA
actcaattattaccgtctccgaagtggaatcgacaagataaccgcgcaggttaactacctgcaggagtacatcag

SEQ ID NO: 497713 - DNA, 75 bp, synthetic construct
  source 1..75: mol_type = other DNA
cctacaaagagcagcgcgataaaaaagtcagtgagctggagctggcaaatgcaaccattactgatatgcagcagc

SEQ ID NO: 497714 - DNA, 75 bp, synthetic construct
  source 1..75: mol_type = other DNA
ctgcttaacataaaagaaataccttattcttatgagagaagatcgcaaattcctgaaatatctattgtattcttc

SEQ ID NO: 497715 - DNA, 75 bp, synthetic construct
  source 1..75: mol_type = other DNA
tctgctggtggcctgtggagcgctgtggatggcaacagaccattaccgtgataacgcgattacctacaaagcgca

SEQ ID NO: 497716 - DNA, 75 bp, synthetic construct
  source 1..75: mol_type = other DNA
tctggggctgaatcattaccgcgataacgccatcacctacaaagcgcagcgtgataaaaaagccagagagctgga

SEQ ID NO: 497717 - DNA, 75 bp, synthetic construct
  source 1..75: mol_type = other DNA
atcagagacggaatcatcagcgaccaggcagcactgagaacgcttcaggaatatatccgcactcagtgcttgaat

SEQ ID NO: 497718 - DNA, 75 bp, synthetic construct
  source 1..75: mol_type = other DNA
ccagatatacaaaggagcttgctgatgctaacgcgactatcgaaagtctccgtgctgatgtttctgctgggcgta

SEQ ID NO: 497719 - DNA, 75 bp, synthetic construct
  source 1..75: mol_type = other DNA
tatttcatcctcagagaacggctgatgacaatgcagaagcaactggaaggagcacaggaatatatccgtacccag

SEQ ID NO: 497720 - DNA, 75 bp, synthetic construct
  source 1..75: mol_type = other DNA
aagcgcctgcgggtcaacgccacctgccccggtaccgtgcgtgaagccaccggcacctccagcgtggataatgca

SEQ ID NO: 497721 - DNA, 75 bp, synthetic construct
  source 1..75: mol_type = other DNA
ccgctctggctatctgcatcatcgtctgcctgtcgtgggcggtcaatcattaccgtgataacgccatcgcctaca

SEQ ID NO: 497722 - DNA, 75 bp, synthetic construct
  source 1..75: mol_type = other DNA
ccagatacatgtttgataaatggtcacgacgtatgtaaagcctctgttatatattggaattaccttgtagaaaaa

SEQ ID NO: 497723 - DNA, 75 bp, synthetic construct
  source 1..75: mol_type = other DNA
ctccgaccggtaaagcgtgggatgcgcttaaggagctgggtgtcaaaacttccgacagtaaaggcaacacgcgcc

SEQ ID NO: 497724 - DNA, 75 bp, synthetic construct
  source 1..75: mol_type = other DNA
aaagtggatcgtatggcgctgctggagtcagaagccgcgtcttatcatgcgccgggtacgtgtactttttacggt

SEQ ID NO: 497725 - DNA, 75 bp, synthetic construct
  source 1..75: mol_type = other DNA
gtagtgccattgtgacagcgctcggtgcgattacctggccgattgtggccgtcggtgcggcgattgtggccgggg

SEQ ID NO: 497726 - DNA, 75 bp, synthetic construct
  source 1..75: mol_type = other DNA
ccggaaatatggcctcagtgggcgctgccggtgtggggattgcggcggcgggaacgatggccggagttaagttgc

SEQ ID NO: 497727 - DNA, 75 bp, synthetic construct
  source 1..75: mol_type = other DNA
cactgcgaaagctgacgcagacggccacgcaatatgtgctcaggctcgacggctggatccagaaaaataaagggc

SEQ ID NO: 497728 - DNA, 75 bp, synthetic construct
  source 1..75: mol_type = other DNA
ctcggcaccggtcaacaagccgaatacatgaaaacgatattcggtgaggaagccagttcggcggcggcggtgctc

SEQ ID NO: 497729 - DNA, 75 bp, synthetic construct
  source 1..75: mol_type = other DNA
gcagaaattcagcgtatcgtcgatgatatgttcgagacgatgtacgcagaaaaagtattggcctggcggcaaccc

SEQ ID NO: 497730 - DNA, 75 bp, synthetic construct
  source 1..75: mol_type = other DNA
cactgtagatggctttttcaaacccactgaggttgtgattaagtcagatcctgtaaccgcagatgtcacaatcat

SEQ ID NO: 497731 - DNA, 75 bp, synthetic construct
  source 1..75: mol_type = other DNA
tgctcaggactgttttgaactggctggaagagattacaaaatagaccctgatttactgagagcaatatcatggaa

SEQ ID NO: 497732 - DNA, 75 bp, synthetic construct
  source 1..75: mol_type = other DNA
atgtgaaaaccatattcggcgaggaggctatgaaatccgcaagtgtgctgatggcggcagcggccagcggaaaac

SEQ ID NO: 497733 - DNA, 75 bp, synthetic construct
  source 1..75: mol_type = other DNA
tcgctcgacagtaatgtgatagcttccttcgagcagcctttctctcatcatggtgggacaaaagtgttaagtggt

SEQ ID NO: 497734 - DNA, 75 bp, synthetic construct
  source 1..75: mol_type = other DNA
taaagcatcctatgttcgtgcggatgcaagcaaagcactgagagatcccctcataatttccccaaagcgtaacca

SEQ ID NO: 497735 - DNA, 75 bp, synthetic construct
  source 1..75: mol_type = other DNA
ctgtatatcgagacgatggaaaaagtgttgggcaacacccgcaaagtgctggttaacgataaaggtggcaacctg

SEQ ID NO: 497736 - DNA, 75 bp, synthetic construct
  source 1..75: mol_type = other DNA
cgagcgtggatcgcgatggtgctggcccaggaaacagcgattatgctgcttgacgaaccaacgacctggctggat

SEQ ID NO: 497737 - DNA, 75 bp, synthetic construct
  source 1..75: mol_type = other DNA
tctgcgctgcatgatcattgacgatccagttgccggaacgccgcttgtggtgccgctcgggagaaataaaatatg

SEQ ID NO: 497738 - DNA, 75 bp, synthetic construct
  source 1..75: mol_type = other DNA
agtcagtgttatgtctgatgccgttcagtcagacccgtcgaatcctgccctgcaggttttgtctgtaaattttga

SEQ ID NO: 497739 - DNA, 75 bp, synthetic construct
  source 1..75: mol_type = other DNA
tggcgagcacattcaacattacgccagtaaagaggttgcacgccggattggtctgttggcgcaaaatgctaccac

SEQ ID NO: 497740 - DNA, 75 bp, synthetic construct
  source 1..75: mol_type = other DNA
ctcatctggcaaatcaaagcgttgataccctctccggtgggcaacgtcagcgagcgtggatcgcgatggtgctgg

SEQ ID NO: 497741 - DNA, 75 bp, synthetic construct
  source 1..75: mol_type = other DNA
gccgggtgatatcaccgtgcaggagctggtggcgcgtgggcgttatccgcatcaaccgctgtttacccgctggcg

SEQ ID NO: 497742 - DNA, 75 bp, synthetic construct
  source 1..75: mol_type = other DNA
ataatccgacatttaccggagaaccaaaagcgccgacacctaccgcaggaaataacaccacgcggattgcgacta

SEQ ID NO: 497743 - DNA, 75 bp, synthetic construct
  source 1..75: mol_type = other DNA
aacgcttcattcacgaggaagtattggtaacactggtggtagtgaaactcgcccccgcaatattgcatttaacta

SEQ ID NO: 497744 - DNA, 75 bp, synthetic construct
  source 1..75: mol_type = other DNA
tagatgtctaccatgtctggtgggacccggatctcgcagtcagatcctgcgtgccggaaaacgcatcctcgcgtt

SEQ ID NO: 497745 - DNA, 75 bp, synthetic construct
  source 1..75: mol_type = other DNA
gatacctgatatgggtagcttcacgctttctgtttcaggtactggatatcaaaaattaccatcaggttttattct

SEQ ID NO: 497746 - DNA, 75 bp, synthetic construct
  source 1..75: mol_type = other DNA
ctttcgcttttccgtcggcgtgctacgtgatggttgccagccacgtggggcatacaccttcgggtgccggaatac

SEQ ID NO: 497747 - DNA, 75 bp, synthetic construct
  source 1..75: mol_type = other DNA
tggtttcactgctgcaaacatcggcagtcttacgcaagggtcttccacttttaatgcaccaacaccgtcaggaat

SEQ ID NO: 497748 - DNA, 75 bp, synthetic construct
  source 1..75: mol_type = other DNA
tctgcgctgcatgatcattgacgatccggtagccggaacgccgcttgtggtgccgctcggacgaacggcaccttc

SEQ ID NO: 497749 - DNA, 75 bp, synthetic construct
  source 1..75: mol_type = other DNA
aaagtcgtagatatgatggaaaccggatctaatgacgttctcgtcattaaggcaaacctgaaagatgcgtttggt

SEQ ID NO: 497750 - DNA, 75 bp, synthetic construct
  source 1..75: mol_type = other DNA
ataatccgacatttaccggagaaccaaaagcgccgacgcctgatgcaggaaataacaccacgcggattgcgacca

SEQ ID NO: 497751 - DNA, 75 bp, synthetic construct
  source 1..75: mol_type = other DNA
ggtaagcagccactggatgagacgctgactcatttgagtggaaaggatgtagctggtcttctcgcataccttggt

SEQ ID NO: 497752 - DNA, 75 bp, synthetic construct
  source 1..75: mol_type = other DNA
gtcagaaacagcaccatcttctggctaacgatctggagcatattctttatggcgatcacattgttcaggcttcgc

SEQ ID NO: 497753 - DNA, 75 bp, synthetic construct
  source 1..75: mol_type = other DNA
atggctaacggtaaagtattaagacagctgataaaagcgggcgcgacgggcgacacggctacgttccgtcgcgtt

SEQ ID NO: 497754 - DNA, 75 bp, synthetic construct
  source 1..75: mol_type = other DNA
caacggaaggtggtctgtatcaatatgacctgacacagggagctgatggtaacttttatttcgtaaaaaacacgc

SEQ ID NO: 497755 - DNA, 75 bp, synthetic construct
  source 1..75: mol_type = other DNA
attttgagtgcggcaatcgccacgcgcactgagcggcgcagtggtctggcggcattgtttagttcgcgggaataa

SEQ ID NO: 497756 - DNA, 75 bp, synthetic construct
  source 1..75: mol_type = other DNA
aagctgtggagcacaaacagctacgcccgttggatgtgcagtttgctttgaccgtagcgggtgatgaacatcctg

SEQ ID NO: 497757 - DNA, 75 bp, synthetic construct
  source 1..75: mol_type = other DNA
tgaatcgcatgtggtgtaacgagcggacggtagcgcgcttcttcaatgaggtgaatcatgccatcgaggtggatg

SEQ ID NO: 497758 - DNA, 75 bp, synthetic construct
  source 1..75: mol_type = other DNA
tctggtatcaacaacagcttatggtggtgtatccagtaatattacaggttcatacgcgacggcggtttgttcttt

SEQ ID NO: 497759 - DNA, 75 bp, synthetic construct
  source 1..75: mol_type = other DNA
cgttgatgagacgctggcggcgaataatcttgaccgttctcaactggactggctggttccgcatcaggctaacct

SEQ ID NO: 497760 - DNA, 75 bp, synthetic construct
  source 1..75: mol_type = other DNA
ggtaaacaaccgctggacaatacgctgactcatttgagtggaaaggatgttgccggtcttctcgcataccttggt

SEQ ID NO: 497761 - DNA, 75 bp, synthetic construct
  source 1..75: mol_type = other DNA
atacagtcaattttcatcagaaaaatatgcagaaaaaaatcaatgcgccaaataaaacgcaggttgcctgttatg

SEQ ID NO: 497762 - DNA, 75 bp, synthetic construct
  source 1..75: mol_type = other DNA
cccttgtggcaatatcttgatgcactgcatccgtatttgtggcgcgaaggaaaggatttcccgccttcgcccgcg

SEQ ID NO: 497763 - DNA, 75 bp, synthetic construct
  source 1..75: mol_type = other DNA
gaaaaaccttacgattcgtccatacttatattatgattatcgagtatattgatggtgtagagttgtgtgatatac

SEQ ID NO: 497764 - DNA, 75 bp, synthetic construct
  source 1..75: mol_type = other DNA
attgatctctcagggaaacgcgcttcggcacaacgaaaggcaaaagatcgtattgatttagaacgtcattacggt

SEQ ID NO: 497765 - DNA, 75 bp, synthetic construct
  source 1..75: mol_type = other DNA
atgaagcattccagtattttttttgtgtgcacaactcttgtgatgtgttctctgactgcgccagtctatgcagag

SEQ ID NO: 497766 - DNA, 75 bp, synthetic construct
  source 1..75: mol_type = other DNA
gcagtaaaacgcatccagaccgaagccacggcggggcgtaaaacaggtggctcagtggatctgttatgggtgaac

SEQ ID NO: 497767 - DNA, 75 bp, synthetic construct
  source 1..75: mol_type = other DNA
cctatccgcgcccaccggactttaccggcacggcgtttcttgaacagttgctgattatgctgacgccagatccca

SEQ ID NO: 497768 - DNA, 75 bp, synthetic construct
  source 1..75: mol_type = other DNA
gaacacggtatttgaaacgccgtcgatggtcagtgtcgtcacgaatgacacaccgtggagtcagaatgcggttac

SEQ ID NO: 497769 - DNA, 75 bp, synthetic construct
  source 1..75: mol_type = other DNA
ccgtgagattggcgcaggtattcaactggacggcctgcttacaggcaatgatcggctgcagttgaaaggcggata

SEQ ID NO: 497770 - DNA, 75 bp, synthetic construct
  source 1..75: mol_type = other DNA
gcgtctggtttgcgatgccggacggcaatattaagtctgtgcaaccgagtcgcttgccagagcacgaaacgacgt

SEQ ID NO: 497771 - DNA, 75 bp, synthetic construct
  source 1..75: mol_type = other DNA
tcagcatacctgttggtcatagaggcgtttatgccggatggcgtgctgaactttcagcatcagccacgcatgtga

SEQ ID NO: 497772 - DNA, 75 bp, synthetic construct
  source 1..75: mol_type = other DNA
taatgaggaaagacctgcgtcggtatttgcgaaaggttctgtcaggcttacggacgccagtaaggcaggtgccag

SEQ ID NO: 497773 - DNA, 75 bp, synthetic construct
  source 1..75: mol_type = other DNA
agtggtgatcacagcaccggctcagggctcacctggttcggtaaaactgaaaaaacggatgcgcttctttctgtc

SEQ ID NO: 497774 - DNA, 75 bp, synthetic construct
  source 1..75: mol_type = other DNA
tgcgcaggcatttattgatgttaagcccgcagatcaaaaccccgcagcttcaggaagaacagatatcagggcgaa

SEQ ID NO: 497775 - DNA, 75 bp, synthetic construct
  source 1..75: mol_type = other DNA
agggcggtgtttacccaaaagtgattggccttgatgcttcaagaattgttccaactgcaaacgaaaatcgacccc

SEQ ID NO: 497776 - DNA, 75 bp, synthetic construct
  source 1..75: mol_type = other DNA
attttccgattgcatttccgaacagatgtctgcgggtatttgcgactcaggattacactcccggcagtgcaaatg

SEQ ID NO: 497777 - DNA, 75 bp, synthetic construct
  source 1..75: mol_type = other DNA
aaaagcgccgacgcctgccgcaggaaataacaccacgcggattgcgactactgcgtttgttcaggccgctattac

SEQ ID NO: 497778 - DNA, 75 bp, synthetic construct
  source 1..75: mol_type = other DNA
atgatactcactctcaggggcgttgcggtttactatgcaggatacggatttttcagctggcgtcgcacgatgctg

SEQ ID NO: 497779 - DNA, 75 bp, synthetic construct
  source 1..75: mol_type = other DNA
aacatgcagaaaaaaatcaatgcaccaaataagacccaggttgcctgttacgcggccgctactggcttaatttga

SEQ ID NO: 497780 - DNA, 75 bp, synthetic construct
  source 1..75: mol_type = other DNA
atgcaggatacggattttttcagctggcttcgcacgatgctgttgcgttttcagaggatggaggccgcagaagag

SEQ ID NO: 497781 - DNA, 75 bp, synthetic construct
  source 1..75: mol_type = other DNA
ataaaaaatgaattgaaagactttggctatacatatcttatattcaaaaagaaaattaaaaaagcaatcagggat

SEQ ID NO: 497782 - DNA, 75 bp, synthetic construct
  source 1..75: mol_type = other DNA
atgatatataataaaacgataagtgggttgaaagtttttataaaagataatgatcccttttatgaacgagttctg

SEQ ID NO: 497783 - DNA, 75 bp, synthetic construct
  source 1..75: mol_type = other DNA
gcgatcctcataaaggaaattttatagtatccgaaaaaggtttaagactaattgacctttcaggtaaaaaaacaa

SEQ ID NO: 497784 - DNA, 75 bp, synthetic construct
  source 1..75: mol_type = other DNA
tgactaatttgagtggaaaggatgtagctggtcttctcacataccttggtttgggagaaggctctgcattacctg

SEQ ID NO: 497785 - DNA, 75 bp, synthetic construct
  source 1..75: mol_type = other DNA
gagtccatcgtcgtcaggaacatcatgggacgcaaccagtagggcagacaaggtaatcctttatcgcaaggacct

SEQ ID NO: 497786 - DNA, 75 bp, synthetic construct
  source 1..75: mol_type = other DNA
gctatacatatcttatattcaaaaagaaaattaaaaaagcaatcagggatgtaaaagtcaaactaggattgaaga

SEQ ID NO: 497787 - DNA, 75 bp, synthetic construct
  source 1..75: mol_type = other DNA
tataggagctttcaggcctgaatggaagtataaacttctgtggtcagccccctttaaacttggaaaatgtttgtg

SEQ ID NO: 497788 - DNA, 75 bp, synthetic construct
  source 1..75: mol_type = other DNA
aaatagccagattatacatatcacttttccagtctcgatttggaaatatgttaccttgctataaatatgatgatt

SEQ ID NO: 497789 - DNA, 75 bp, synthetic construct
  source 1..75: mol_type = other DNA
tctggttacgtatttgaatcatatcaattagaaaagaaaattgtttcatttaattatttctggtgttcaacactt

SEQ ID NO: 497790 - DNA, 75 bp, synthetic construct
  source 1..75: mol_type = other DNA
atgacccccgaacaccttccaacagaacagtatgaagcgcagttagccgaaaaagtggtacgtttgcaaagtatg

SEQ ID NO: 497791 - DNA, 75 bp, synthetic construct
  source 1..75: mol_type = other DNA
tcggtaatggcttcactgactataaaaaatatatcgaagggccgtatgaagatctctactgtttcccggtgatgc

SEQ ID NO: 497792 - DNA, 75 bp, synthetic construct
  source 1..75: mol_type = other DNA
agagcaatgataattgcatcgtaaaaaactatttaatggttattaatgaatatccttaccgtaatactcattttt

SEQ ID NO: 497793 - DNA, 75 bp, synthetic construct
  source 1..75: mol_type = other DNA
gcgggaggtggtgcaaaaggagaactctggagccagattctggctgatgtgtcagggctaccagttaatgttcct

SEQ ID NO: 497794 - DNA, 75 bp, synthetic construct
  source 1..75: mol_type = other DNA
actactggaggaaatggcttcccgtgtaccggcaggagcatggggagtgatgccgatcttctctgacaggatgcg

SEQ ID NO: 497795 - DNA, 75 bp, synthetic construct
  source 1..75: mol_type = other DNA
tcgacccggaaaaatgtaataaggctacccttttccgcgcgctggaagagaatgcggccattgtgtcgacctgca

SEQ ID NO: 497796 - DNA, 75 bp, synthetic construct
  source 1..75: mol_type = other DNA
caatcaaaaataaagcatatcaaaaagatattacaataactaattcaatcaacacgataaaaagacggcttgact

SEQ ID NO: 497797 - DNA, 75 bp, synthetic construct
  source 1..75: mol_type = other DNA
tacagaagtgccgctcggttttttttgtgataatcagtacgaaaatattagcgccatcatttttaattgcaacgc

SEQ ID NO: 497798 - DNA, 75 bp, synthetic construct
  source 1..75: mol_type = other DNA
tttggtcactgcatattttcgacacttacttagaaccacaatcccccgcatttcatgacatgcaaaacgctatgc

SEQ ID NO: 497799 - DNA, 75 bp, synthetic construct
  source 1..75: mol_type = other DNA
atccagttcttatatatcactttttcattcacggtttggaggtatgctaccttgctacgaatatgataacctgtt

SEQ ID NO: 497800 - DNA, 75 bp, synthetic construct
  source 1..75: mol_type = other DNA
cagagcagacaccaaataccatttctgccagtaacactatttttaacgttcaggcgttgacacaacttcaggcag

SEQ ID NO: 497801 - DNA, 75 bp, synthetic construct
  source 1..75: mol_type = other DNA
ttcagcgtcatcaccgtctcaatgctattgcccgtattgagaagatgataaatgacctgccttcatcaggtgatc

SEQ ID NO: 497802 - DNA, 75 bp, synthetic construct
  source 1..75: mol_type = other DNA
ttccctggtgaatgcaacgtatttttcgacaaagttgcttcagactttgtgatagatggtaagcccagaggtagt

SEQ ID NO: 497803 - DNA, 75 bp, synthetic construct
  source 1..75: mol_type = other DNA
ttgcttattcatggtttgtgtgtttctggaagccataagggtcatgattggggacagattcattcttgtattgca

SEQ ID NO: 497804 - DNA, 75 bp, synthetic construct
  source 1..75: mol_type = other DNA
atgttccctgtgattgtgcacggactggctctgctggctccttccctctggctgtttattcagtggcagtgggat

SEQ ID NO: 497805 - DNA, 75 bp, synthetic construct
  source 1..75: mol_type = other DNA
aaaaagctggatgatgagtggcgtcaggaagcggaagccctgcgcgatgcactgcgcgcgcagaatctgaatgtg

SEQ ID NO: 497806 - DNA, 75 bp, synthetic construct
  source 1..75: mol_type = other DNA
aaaaattctatgaatatctttctaagtatcatactaataatagtcaaataatagtgattgaaaatcctcatcctc

SEQ ID NO: 497807 - DNA, 75 bp, synthetic construct
  source 1..75: mol_type = other DNA
acttgcaggctttataggcatgtatttcgcggaatataagggtatggatgaaagtcttcagaattgcgtgactat

SEQ ID NO: 497808 - DNA, 75 bp, synthetic construct
  source 1..75: mol_type = other DNA
agtgtccttatgtggctaaatatagataaagcacgaaagtattgtcaggataataacaaaaagatgatatattct

SEQ ID NO: 497809 - DNA, 75 bp, synthetic construct
  source 1..75: mol_type = other DNA
gaaaagccgatttattgaataaaagttgtattgtacatgagaaaactcagttggaaattggtccctctgattctg

SEQ ID NO: 497810 - DNA, 75 bp, synthetic construct
  source 1..75: mol_type = other DNA
agggttaagttttcgagatttagccagattagcactgattcaggaaggtgaaatacaaaagaaaggctcgccttt

SEQ ID NO: 497811 - DNA, 75 bp, synthetic construct
  source 1..75: mol_type = other DNA
ggaggaaagaagttacgggaaattgtagaactatccacctacacggagattgaactctatttagttagtaatgct

SEQ ID NO: 497812 - DNA, 75 bp, synthetic construct
  source 1..75: mol_type = other DNA
attatgctaaatcatgctctataccatgaagtatcaggcagagagccatatatggcaaagtgcgaacaagtattt

SEQ ID NO: 497813 - DNA, 75 bp, synthetic construct
  source 1..75: mol_type = other DNA
cgtatttaccgtttccggtgttattgccgcatttcgtcgcagcgccctggcagaagtgggttactggagtgacga

SEQ ID NO: 497814 - DNA, 75 bp, synthetic construct
  source 1..75: mol_type = other DNA
ctggccgcgccaacggggaaagctgctgcgcgcttaaccgaatcgcttggcaaggctttgcgccagttaccgctg

SEQ ID NO: 497815 - DNA, 75 bp, synthetic construct
  source 1..75: mol_type = other DNA
tgaatcgcatgtggtgtaatgagcgcacagtggcgcgatttttcaacgaagtgaatcatgccattgaggtggatg

SEQ ID NO: 497816 - DNA, 75 bp, synthetic construct
  source 1..75: mol_type = other DNA
tggcagtagatgataaccgtcaggcgctggacgatgccgctgcgctgaacgccgcctgttacatgcaggtggttg

SEQ ID NO: 497817 - DNA, 75 bp, synthetic construct
  source 1..75: mol_type = other DNA
tctgtacgaagcgcgggaacaggtgaaacaagggattcgccagttgctgccacattcgaaagatgtcggcgtacc

SEQ ID NO: 497818 - DNA, 75 bp, synthetic construct
  source 1..75: mol_type = other DNA
tctggtgggatccggatctcgccagtcagatcctgcgtgccggaaaacgcatcctcgcgtttcatgtttccgact

SEQ ID NO: 497819 - DNA, 75 bp, synthetic construct
  source 1..75: mol_type = other DNA
gcttgctggcttctcaagcggtcagcaggggagatgaacccacgccgatggtcctctgtggcgatcgtctttatt

SEQ ID NO: 497820 - DNA, 75 bp, synthetic construct
  source 1..75: mol_type = other DNA
cgatgctatcgagtttccactacccgataaacatcagttgtcagaattgatgaaactcaaacttcgtggtattcg

SEQ ID NO: 497821 - DNA, 75 bp, synthetic construct
  source 1..75: mol_type = other DNA
gttcacctacgttgcctccggcaccggtagacaaagaaagggggctgccactgttggacctacggcaaccgcagc

SEQ ID NO: 497822 - DNA, 75 bp, synthetic construct
  source 1..75: mol_type = other DNA
gaactcacgttccggcaggaactggcacagaagcggcatctttgcgcgacagtctctgcctgctgcaaaaaagct

SEQ ID NO: 497823 - DNA, 75 bp, synthetic construct
  source 1..75: mol_type = other DNA
cccgctggatgtgcaatttgccctgaccgtggcgggagatgaacatcctgccgtcaccctcgcggcagccctgtt

SEQ ID NO: 497824 - DNA, 75 bp, synthetic construct
  source 1..75: mol_type = other DNA
cgccctgcgggaagggccgtttggcgtggctggactgaatgagcgaattgagcagtttatgcaacagaagcgcaa

SEQ ID NO: 497825 - DNA, 75 bp, synthetic construct
  source 1..75: mol_type = other DNA
atttattcagtatcaataccgcgacgctgggctataaagtgccgctgcccgccattattgatgcctgtgccgcac

SEQ ID NO: 497826 - DNA, 75 bp, synthetic construct
  source 1..75: mol_type = other DNA
gggtgtggactggagtgatgccaatcttgcgggtagcctgattgggcagaaactggcgattaacgaattcgtcgc

SEQ ID NO: 497827 - DNA, 75 bp, synthetic construct
  source 1..75: mol_type = other DNA
gaagggagtttctcggtgctgattggtacatcaggctccggtaaatccaccacattgaaaatgatcaaccgtctg

SEQ ID NO: 497828 - DNA, 75 bp, synthetic construct
  source 1..75: mol_type = other DNA
tatcagccgatttttcgaacttggtacattgaacgtcattgaggttgccgctatttcaggccatcgctccctgaa

SEQ ID NO: 497829 - DNA, 75 bp, synthetic construct
  source 1..75: mol_type = other DNA
ccgggcagcagtggtatctggcccgttacaacaccaccggtaaaaaccgcgaagtcctgtttggctggctcagcg

SEQ ID NO: 497830 - DNA, 75 bp, synthetic construct
  source 1..75: mol_type = other DNA
tgctggccccgttggcatggattatgggggtggactggagtgatgcaaatcttgccggaagtttgattgggcaga

SEQ ID NO: 497831 - DNA, 75 bp, synthetic construct
  source 1..75: mol_type = other DNA
tttcgccaaaacgcgcgccggaaatcgcccagcttggtttacgggcgctggcagcagcaacgctttccaacctga

SEQ ID NO: 497832 - DNA, 75 bp, synthetic construct
  source 1..75: mol_type = other DNA
acattgaacgtcattgaggttgccgctatttcaggccatcgctccctgaacatgttgaaacgatacacacacctt

SEQ ID NO: 497833 - DNA, 75 bp, synthetic construct
  source 1..75: mol_type = other DNA
ggaagcaatattacttaccgaacaataaatgattatggcgcacttacccccaaaatgacgggcgtaatggaataa

SEQ ID NO: 497834 - DNA, 75 bp, synthetic construct
  source 1..75: mol_type = other DNA
gcactggaaaataaacatgccgattacccgcaccagctactggccggattaatgtccgccactcaggattgccag

SEQ ID NO: 497835 - DNA, 75 bp, synthetic construct
  source 1..75: mol_type = other DNA
caggaactgaagatagaaaacttgcattttcatgacctccgtcatgaggctatcagccgatttttcgaacttggt

SEQ ID NO: 497836 - DNA, 75 bp, synthetic construct
  source 1..75: mol_type = other DNA
aatttacgcgagcgttatccgcatcagctttccggcggtcagcagcagcgcgtgggggttgcccgtgcactggct

SEQ ID NO: 497837 - DNA, 75 bp, synthetic construct
  source 1..75: mol_type = other DNA
gctgctgataacgcggtatcaactacaccggttacattggataaagataagacaactctggaacaagatgttgtt

SEQ ID NO: 497838 - DNA, 75 bp, synthetic construct
  source 1..75: mol_type = other DNA
cgataatgaaactggcgagacagcaaatcccttaattaaggtgaacggtcataatgaagtcacatccaccagcag

SEQ ID NO: 497839 - DNA, 75 bp, synthetic construct
  source 1..75: mol_type = other DNA
tggtatcgaggtcatccccgcgcacgtcactgaatatctgaacagggtactgactgaaacagaccacgctacccc

SEQ ID NO: 497840 - DNA, 75 bp, synthetic construct
  source 1..75: mol_type = other DNA
acacagaaacttttggagaaaatgacgccgctgatggagaagactcagcacaaactgaggagaagatcattcagg

SEQ ID NO: 497841 - DNA, 75 bp, synthetic construct
  source 1..75: mol_type = other DNA
atcgtctgaacgtggagcctgcggtttttcgtggttttaccacaccggaactggggctggcggccctgacaggcg

SEQ ID NO: 497842 - DNA, 75 bp, synthetic construct
  source 1..75: mol_type = other DNA
gtcagaacagtggcgggcattgccctgactgtggtccagtaatgggagatgaaacttacgctgaaacttttggag

SEQ ID NO: 497843 - DNA, 75 bp, synthetic construct
  source 1..75: mol_type = other DNA
gtggggaaatggagccaacttcgacaacgcaattttacgccgttcatatgaacgacaggggatcccctgtccgtg

SEQ ID NO: 497844 - DNA, 75 bp, synthetic construct
  source 1..75: mol_type = other DNA
agtaaaattgcgccacaaattgggccgaacaacgcccgtagtggtacgccatgactgcggaagatatccagaacc

SEQ ID NO: 497845 - DNA, 75 bp, synthetic construct
  source 1..75: mol_type = other DNA
gcaattgctcatcacggacgcaaacataaagaagatatagaagcgcgccacgaacagttaacaaaaggtggcacg

SEQ ID NO: 497846 - DNA, 75 bp, synthetic construct
  source 1..75: mol_type = other DNA
tcagttcgctcggctctacacaatacggatttggtgacgctttaacctctaatcaattgggggtcataaatggca

SEQ ID NO: 497847 - DNA, 75 bp, synthetic construct
  source 1..75: mol_type = other DNA
tggccagagcctacccgaccctccgtcttcccgatttacgcggtgagtttatccgtggatgggacgacgggcgca

SEQ ID NO: 497848 - DNA, 75 bp, synthetic construct
  source 1..75: mol_type = other DNA
ccgtaatcgcattgataccgccgagcagtttattgacaaggtggcctcgtcgtcatcgattaccgggaagccgta

SEQ ID NO: 497849 - DNA, 75 bp, synthetic construct
  source 1..75: mol_type = other DNA
acaaagaacaacttgatatgttgatatcattttttagtgacgatacgataagtaatttagccgctgagaataatg

SEQ ID NO: 497850 - DNA, 75 bp, synthetic construct
  source 1..75: mol_type = other DNA
cacagcgttatgagaacattgaagttattgctgtaaatgacggttcaacagacaaaacccgtgcgatcctggatc

SEQ ID NO: 497851 - DNA, 75 bp, synthetic construct
  source 1..75: mol_type = other DNA
gtgaccccatgcaggccatttttggctttcgggggaaccagctcgtggactgggatgcacatgtactctctcact

SEQ ID NO: 497852 - DNA, 75 bp, synthetic construct
  source 1..75: mol_type = other DNA
agccagatcccgggggcaacgaccgtcgaagccgtagatttggtcgaccttaccgactttggtgcagcgtttaac

SEQ ID NO: 497853 - DNA, 75 bp, synthetic construct
  source 1..75: mol_type = other DNA
ccattcaaagaattaaaatcattatttgatcctttgaatatttaccctttttactattttatgccatttctattt

SEQ ID NO: 497854 - DNA, 75 bp, synthetic construct
  source 1..75: mol_type = other DNA
gaccagtcgtaacagataaagtctacgatccaagccaggataaggcagaccctgacgccaaagagcaactgatgc

SEQ ID NO: 497855 - DNA, 75 bp, synthetic construct
  source 1..75: mol_type = other DNA
tttttcatgcgacaaagaatgttgtatttgaaattttatattcgaaagaaaaattaaattcactgaaggtttgtt

SEQ ID NO: 497856 - DNA, 75 bp, synthetic construct
  source 1..75: mol_type = other DNA
agctgttaacggatatattaatatcaaatatgataagttatcaacgttatcaaatgcagcaggaacaggaactga

SEQ ID NO: 497857 - DNA, 75 bp, synthetic construct
  source 1..75: mol_type = other DNA
ttgggacaatggtttcttttatgaaatttcaggatatgagaaataatcaggaaaacattctagcttctactgtag

SEQ ID NO: 497858 - DNA, 75 bp, synthetic construct
  source 1..75: mol_type = other DNA
aaaaaatatgaacacacgtataaatacattgattatttattatatccatcaattaatgcagagcggttagtggtg

SEQ ID NO: 497859 - DNA, 75 bp, synthetic construct
  source 1..75: mol_type = other DNA
cactcgcgggcgccagcagatggccagccagaccccgggtgcgacgaccgtcgaagctgtcgatttggttgacct

SEQ ID NO: 497860 - DNA, 75 bp, synthetic construct
  source 1..75: mol_type = other DNA
gtcgatttagtcgaccttaccgactttggtgcagcgttaaacctagacgctgcggatgcgttgacgcgcctggtg

SEQ ID NO: 497861 - DNA, 75 bp, synthetic construct
  source 1..75: mol_type = other DNA
aatatcatcgggggacgatcacagccccggccgggtgcggtaaaacacaaatcattgcggataccctagctctgt

SEQ ID NO: 497862 - DNA, 75 bp, synthetic construct
  source 1..75: mol_type = other DNA
aagcaagttgctgatgaactgggcatcggcattgctacgctctatcgcaagattaagaaatatgagttgttaaac

SEQ ID NO: 497863 - DNA, 75 bp, synthetic construct
  source 1..75: mol_type = other DNA
tggttaacgtggttccttcaggtgaagttatcgacagcacgctattgccgccaaatctgctgaataatggcacaa

SEQ ID NO: 497864 - DNA, 75 bp, synthetic construct
  source 1..75: mol_type = other DNA
ggatcggtttatcctggcattgctcccgatgtcgtcgaaatattgcgtaagcatcgttggcccggaaacctgcgc

SEQ ID NO: 497865 - DNA, 75 bp, synthetic construct
  source 1..75: mol_type = other DNA
agtatccgattgatgcggtacaccctgacaagtttgcagaattgctcggaaaaccgcgtgctgcggtcgttgaaa

SEQ ID NO: 497866 - DNA, 75 bp, synthetic construct
  source 1..75: mol_type = other DNA
aatgatccgcgaggcgctttcacgtcataacagcaagaagcaagttgctgatgaactgggcatcggcattgctac

SEQ ID NO: 497867 - DNA, 75 bp, synthetic construct
  source 1..75: mol_type = other DNA
acccgtcgtctgggatcggtttatcctggcattgctcccgatgtcgtcgaaatattgcgtaagcatcgttggccc

SEQ ID NO: 497868 - DNA, 75 bp, synthetic construct
  source 1..75: mol_type = other DNA
ttcagcatgctcttccaggaatcaagtttacagtgatggatgccgttacatctgatttgcaggtaagagagaata

SEQ ID NO: 497869 - DNA, 75 bp, synthetic construct
  source 1..75: mol_type = other DNA
cttgtgtgctgttaacagaatattaccacttctctcttcatttattaacgaagatgtaattcatccgtggttata

SEQ ID NO: 497870 - DNA, 75 bp, synthetic construct
  source 1..75: mol_type = other DNA
tcggcagaaagcgccgcatcatccgcttcaacagccacaacgaaggctggcaaagccactgagcaagccactgca

SEQ ID NO: 497871 - DNA, 75 bp, synthetic construct
  source 1..75: mol_type = other DNA
gattactatattaaattaacttcagagacctttaaaaagaataactcaattgcattgcccgagattaagattgct

SEQ ID NO: 497872 - DNA, 75 bp, synthetic construct
  source 1..75: mol_type = other DNA
atagacatttttataatttttttattctatgtgctattaatagagctttatcacttctttcatcatttatgaatg

SEQ ID NO: 497873 - DNA, 75 bp, synthetic construct
  source 1..75: mol_type = other DNA
actcaaaaaagagttgcattctattggtcatgtagtcctgatgatttacttgtagagttagtattatcgcaggaa

SEQ ID NO: 497874 - DNA, 75 bp, synthetic construct
  source 1..75: mol_type = other DNA
tggtggaagcgggcgttaagccatgcggtctgggcgcgcgtgacacgctgcgtctggaagcgggcatgaatcttt

SEQ ID NO: 497875 - DNA, 75 bp, synthetic construct
  source 1..75: mol_type = other DNA
tcgcgctgttagtggttggcgtggtcattgcagtcagagcaaaaccggaaaagcctttaactgaatctgtctcag

SEQ ID NO: 497876 - DNA, 75 bp, synthetic construct
  source 1..75: mol_type = other DNA
gacgcatgggcgacgtcggacgcagtcttttgcgtggtaacagcgcgctggtagatgagtgtgtcgcgttttatg

SEQ ID NO: 497877 - DNA, 75 bp, synthetic construct
  source 1..75: mol_type = other DNA
gtgaagttcgacttccttggtttgcgtacgctcaccatcatcaactgggcgctggagatgatcaacaagcggcgg

SEQ ID NO: 497878 - DNA, 75 bp, synthetic construct
  source 1..75: mol_type = other DNA
ggtttacatcaatgattgcgttgttaattcaatatgccaatgcaaatggcatgtggctgacgtttggtgaagcgt

SEQ ID NO: 497879 - DNA, 75 bp, synthetic construct
  source 1..75: mol_type = other DNA
gcgaatgttttgcaaatagcactgcaaacgaagataaaacttttttatcgacctgattctattaaagcggaacct

SEQ ID NO: 497880 - DNA, 72 bp, synthetic construct
  source 1..72: mol_type = other DNA
atgaaccgtgttctgtgcgtggttatcattgtcctgctggtggcctgtggtgcgcttagtctggggctgaat

SEQ ID NO: 497881 - DNA, 75 bp, synthetic construct
  source 1..75: mol_type = other DNA
tggtggaagcgggcgttaagccatgcggcctgggcgcgcgtgacacgctgcgtctggaagcgggtatgaatcttt

SEQ ID NO: 497882 - DNA, 75 bp, synthetic construct
  source 1..75: mol_type = other DNA
agcgggctatgaaattgcgctgcccaatgaaaaagcggccgatttctggcgcgcgctggtggaagcgggcgttaa

SEQ ID NO: 497883 - DNA, 75 bp, synthetic construct
  source 1..75: mol_type = other DNA
catggtggatttccacggctggatgatgccgctgcattacggttcgcaaatcgacgaacatcatgcggtacgtac

SEQ ID NO: 497884 - DNA, 75 bp, synthetic construct
  source 1..75: mol_type = other DNA
taaaagcgacgttgaatacgccggactggtgaagttcgacttccttggtttgcgtacgctcaccatcatcaactg

SEQ ID NO: 497885 - DNA, 75 bp, synthetic construct
  source 1..75: mol_type = other DNA
gataacattgatcatgggccggagagtcttaacgtgctgcgccctgatgaatcccctaatgatttttatcaaaat

SEQ ID NO: 497886 - DNA, 75 bp, synthetic construct
  source 1..75: mol_type = other DNA
atcgcccagggatgcggcggcggtgtttgtgccgtcagtgctttacatgccgctcaacagattgcccaacgcgca

SEQ ID NO: 497887 - DNA, 75 bp, synthetic construct
  source 1..75: mol_type = other DNA
ggcaagaaaacactccagcgtagtatgttgcgcactggccaacaaattagcccggatagcgtgggcaatcacaac

SEQ ID NO: 497888 - DNA, 75 bp, synthetic construct
  source 1..75: mol_type = other DNA
gtcatgaagcaaaattgatttctccgcagttcgttcgcccttttgttaagagcaacaagaacgattttgtcgatg

SEQ ID NO: 497889 - DNA, 75 bp, synthetic construct
  source 1..75: mol_type = other DNA
gagctgcgaaaaaacgatcgcgggtataaaaccggtgatgttctttcattgtgcgagtggaagcacgggaaatac

SEQ ID NO: 497890 - DNA, 75 bp, synthetic construct
  source 1..75: mol_type = other DNA
acctgaatttacgcgccaaattagatcacctgccacgcgatttccgtatgggctcccgacgcaccggtattatcg

SEQ ID NO: 497891 - DNA, 75 bp, synthetic construct
  source 1..75: mol_type = other DNA
taccgtagggtttgtcgcttctactttcccgaccggcggcaatattatgactatcattttttataacgtcggcgg

SEQ ID NO: 497892 - DNA, 75 bp, synthetic construct
  source 1..75: mol_type = other DNA
atggcaatgatggttgccggacgcgctgaagcgggagtggccttaggtgcgactcgcgtaatttatccggcaggg

SEQ ID NO: 497893 - DNA, 75 bp, synthetic construct
  source 1..75: mol_type = other DNA
aatgcttaagttaagtgggcgacaatggagtggctgggatgtatggatatgttgtctggcggcaattttgctgat

SEQ ID NO: 497894 - DNA, 75 bp, synthetic construct
  source 1..75: mol_type = other DNA
ccgtggtggcgcttgccatgtggggaatgcttaagttaagtgggcgacaatggagtggctgggatgtatggatat

SEQ ID NO: 497895 - DNA, 75 bp, synthetic construct
  source 1..75: mol_type = other DNA
actgggaacatcatcagccctgtgtgcgtggcgaagcgtggcaatggcaaggattgcgtttcagcgtgcactggc

SEQ ID NO: 497896 - DNA, 75 bp, synthetic construct
  source 1..75: mol_type = other DNA
ggattttgattgggatactcccatttataatggttctgcgaaagatattgtctcattattatttgaaattaacca

SEQ ID NO: 497897 - DNA, 75 bp, synthetic construct
  source 1..75: mol_type = other DNA
cgttatgctattgcccagcaccagactctaaccgggcgttttcttcaggcaagaatcattgaaccggggtgtagt

SEQ ID NO: 497898 - DNA, 75 bp, synthetic construct
  source 1..75: mol_type = other DNA
cgatggttgtgcatttaagcgggccgttaattctggagcaagggttatggtttcttgccgaccggtctttggctt

SEQ ID NO: 497899 - DNA, 75 bp, synthetic construct
  source 1..75: mol_type = other DNA
ttggtttcatgaatatagagcctgtagttctttgggttccaatgatactgcaactgttgttaagcgttgctatct

SEQ ID NO: 497900 - DNA, 75 bp, synthetic construct
  source 1..75: mol_type = other DNA
cagtgacatcagcatacctgttggtcatagaggcgtttatgcaggatggcgtgctgcactttcggcagcagccac

SEQ ID NO: 497901 - DNA, 75 bp, synthetic construct
  source 1..75: mol_type = other DNA
caatttaattgcgatactataaaaactaaggctgaaatatcattagccggcaattcaataatttacctttttgat

SEQ ID NO: 497902 - DNA, 75 bp, synthetic construct
  source 1..75: mol_type = other DNA
cattgaattacgacgtgctaaagattatgattttgcgctacaggtgaaacatcaacttggtttaggagaagacat

SEQ ID NO: 497903 - DNA, 75 bp, synthetic construct
  source 1..75: mol_type = other DNA
tcaccgttgtcgcgacaggaaatcagaacacggtatttgaaacgccgtcaatggtcagtgtcgtcacgaatgaca

SEQ ID NO: 497904 - DNA, 75 bp, synthetic construct
  source 1..75: mol_type = other DNA
cccctgcagataacagtctcatcaatgtaaaatcgacactatatctcagtgatatcaccgtcaagacaaacggcc

SEQ ID NO: 497905 - DNA, 75 bp, synthetic construct
  source 1..75: mol_type = other DNA
cagaacctccggtgttaatgttgtcaacaggagccatactctgatttttccgggagcccatcagttaagttatgg

SEQ ID NO: 497906 - DNA, 75 bp, synthetic construct
  source 1..75: mol_type = other DNA
cccctacagcagtgtcacctttaatcagggagagggcagggtcgatattcgcgtgccacaggctttcctggggcg

SEQ ID NO: 497907 - DNA, 75 bp, synthetic construct
  source 1..75: mol_type = other DNA
aatatcatgggggcgctgaatctgaaagcactgacgtcaccgctaatctgcgaatataaaaccattaatgaatat

SEQ ID NO: 497908 - DNA, 75 bp, synthetic construct
  source 1..75: mol_type = other DNA
tcagcgaattcctgaataaaggaaaactgaagcccgaaaacggcggctcagacagcaaactcagtgctgaacaaa

SEQ ID NO: 497909 - DNA, 75 bp, synthetic construct
  source 1..75: mol_type = other DNA
gcaatatttccgtggtgcctttagtcgtaatggtgaagagctaaacaagaccatcgttaagatgcaaaaggccaa

SEQ ID NO: 497910 - DNA, 75 bp, synthetic construct
  source 1..75: mol_type = other DNA
tatgtattataaggattcgtttgtaggcggcatggttgattggggtcgtagtgctttaggcttatcgcctatccc

SEQ ID NO: 497911 - DNA, 75 bp, synthetic construct
  source 1..75: mol_type = other DNA
ccggaacagaaggatggtgttatctcttccgccgattttatgtctcagaccccctacagcagtgtcacctttaat

SEQ ID NO: 497912 - DNA, 75 bp, synthetic construct
  source 1..75: mol_type = other DNA
ggggcaagtaacggtcgatttttcagcgcaaggctggcggattagcagcctcagggagcaaattttacctcgttg

SEQ ID NO: 497913 - DNA, 75 bp, synthetic construct
  source 1..75: mol_type = other DNA
gtatgttgctcataacgttgattggtttcttcctgattactttcgtctatatgtacgtttgctatgcctcggcag

SEQ ID NO: 497914 - DNA, 75 bp, synthetic construct
  source 1..75: mol_type = other DNA
aatgaactggaaagctctaaaagagctgatgtaagcgcaaacatagtcaacattggaaataacaaatataaactt

SEQ ID NO: 497915 - DNA, 75 bp, synthetic construct
  source 1..75: mol_type = other DNA
acgacgatgtatcaacatggtcaattgagtgcgaaagcgctggcaaggtcacagtaggtgacgttccgtcagtgc

SEQ ID NO: 497916 - DNA, 75 bp, synthetic construct
  source 1..75: mol_type = other DNA
gtcaattatcgcatcaagatatggaattcttggagtgtatcaggatgcaatgatatcaaatagacgtgtaatacc

SEQ ID NO: 497917 - DNA, 75 bp, synthetic construct
  source 1..75: mol_type = other DNA
gtttcttcctgattactttcgtctatatgtacgtttgctatgtgatcttgaccctccatctccgaacagcttttg

SEQ ID NO: 497918 - DNA, 75 bp, synthetic construct
  source 1..75: mol_type = other DNA
ggttgttaattctgattgcggtgctcggatatatctattcactgcaaaccagcatgttattcattacgttaatcg

SEQ ID NO: 497919 - DNA, 75 bp, synthetic construct
  source 1..75: mol_type = other DNA
cgtttacaggccgtgacgttgctgtattcttcgctatcgcttgtccaaatgcgaagccggaaactggagcgtaca

SEQ ID NO: 497920 - DNA, 75 bp, synthetic construct
  source 1..75: mol_type = other DNA
gagaaagggtacgcagtaagatgaaaaaccgtaaagcaaagatgcttatttcccgtgtatacagactttgctatc

SEQ ID NO: 497921 - DNA, 75 bp, synthetic construct
  source 1..75: mol_type = other DNA
cggtattatatcaacgcttattgctcgaagagcaatcctcacagacctctttgtcgatgaacagtacgagcaact

SEQ ID NO: 497922 - DNA, 75 bp, synthetic construct
  source 1..75: mol_type = other DNA
acgatgatgtgtccacctggtccattgaatgcgaaagcgctggcaaggtcacggtaggtgacgttccgtcagtgt

SEQ ID NO: 497923 - DNA, 75 bp, synthetic construct
  source 1..75: mol_type = other DNA
gcgccacgttgtcagccccggtgaaactaccggatcacaaccttatgtgtggcttaaacttgtttccccggttga

SEQ ID NO: 497924 - DNA, 75 bp, synthetic construct
  source 1..75: mol_type = other DNA
acgatgatgtttccacctggtccattgagtgcgaaagcgctggcaaggtaacggtaggcgacgttccgccagcat

SEQ ID NO: 497925 - DNA, 75 bp, synthetic construct
  source 1..75: mol_type = other DNA
ataataatttatcacccggacaggaaaaaataataaatgtatctggagggcagaaaggcagtcattctgctactg

SEQ ID NO: 497926 - DNA, 75 bp, synthetic construct
  source 1..75: mol_type = other DNA
aggcgtcattgaaccaggttgtagcctgcgtgcgcaatatctggcatctctgcaaacgacgctgaaaccgtattc

SEQ ID NO: 497927 - DNA, 75 bp, synthetic construct
  source 1..75: mol_type = other DNA
atcaatggcttgatactccacatcagggtcaagtgacggtcaatttttcagcgcaaggctggcggattagcagcc

SEQ ID NO: 497928 - DNA, 75 bp, synthetic construct
  source 1..75: mol_type = other DNA
gtggtttccctgtccggagtggcaactgccgccagtattgcgcgcggttgtttccctcatccatctacaacttgg

SEQ ID NO: 497929 - DNA, 75 bp, synthetic construct
  source 1..75: mol_type = other DNA
ccctgttaaaaccgtccgttatatcgcgctgacgttgctgtttttcgtttggggcatattagcagcaaagcaaat

SEQ ID NO: 497930 - DNA, 75 bp, synthetic construct
  source 1..75: mol_type = other DNA
tacctcatcatcattgccattaattcagcgagtgaatggaaaagtggcactcgcatcggcatcgcgctataacgc

SEQ ID NO: 497931 - DNA, 75 bp, synthetic construct
  source 1..75: mol_type = other DNA
gaatctgctgtgctgctttttatgcctggttgacgggaatgcaacctcctgcattgcgtaccgtggtggcgcttg

SEQ ID NO: 497932 - DNA, 75 bp, synthetic construct
  source 1..75: mol_type = other DNA
cgaacgtacggcgctcaattttgtgcaaactctttccggggttgccagtaaggttcgccactatgtcgaattact

SEQ ID NO: 497933 - DNA, 75 bp, synthetic construct
  source 1..75: mol_type = other DNA
ttaattgttgcggcagtgggtaatgatggcgcagatatacgaaaactgagtgctcagcagagaatatggcctgcg

SEQ ID NO: 497934 - DNA, 75 bp, synthetic construct
  source 1..75: mol_type = other DNA
agggagagatcttaatgcagaaaaagcaattagcatgttctgcaagaaaaattatattcctgtccgtcagggaag

SEQ ID NO: 497935 - DNA, 75 bp, synthetic construct
  source 1..75: mol_type = other DNA
cgcttttttccatgcaaggtaaaaaagagaatacgctgcggataatcaacgctactaatcatcagttaccaggcg

SEQ ID NO: 497936 - DNA, 75 bp, synthetic construct
  source 1..75: mol_type = other DNA
cgtctggggctttctgatgccttcctgatcaaagaaaaccatattattgcctccggctcagtgcgccaggcggtc

SEQ ID NO: 497937 - DNA, 75 bp, synthetic construct
  source 1..75: mol_type = other DNA
gcgcgaatttgccgaaactggtgtggattttatctccgtcggcgcgctgaccaagcacgtacaggcactcgatct

SEQ ID NO: 497938 - DNA, 75 bp, synthetic construct
  source 1..75: mol_type = other DNA
aaacccggaacgtaatgtgccaatcgcggtactcggcggtacgttaggtgcggcggtgatttatatcgtctccac

SEQ ID NO: 497939 - DNA, 75 bp, synthetic construct
  source 1..75: mol_type = other DNA
gactgggcagatgcgcgtcactaccgctttggtgcttccagcctgctggcaagcctgttgaaagcgctgggccac

SEQ ID NO: 497940 - DNA, 75 bp, synthetic construct
  source 1..75: mol_type = other DNA
ctgcacgaactcgcagaagaactccagaacagcatacggacacgctttgaagtagaaaatagcacagagagataa

SEQ ID NO: 497941 - DNA, 75 bp, synthetic construct
  source 1..75: mol_type = other DNA
gggctggtgggtttgctaaagcggtaatagatagtttggatcatgatgaatacgttcttgaaggatttattgatt

SEQ ID NO: 497942 - DNA, 75 bp, synthetic construct
  source 1..75: mol_type = other DNA
cgctgaaagagcagggcaccccggaaatccgtatcgctacggtaaccaacttcccacacggtaacgacgacatcg

SEQ ID NO: 497943 - DNA, 75 bp, synthetic construct
  source 1..75: mol_type = other DNA
gctttggtgcttccagcctgctggcaagcctgctggcaagcctgctgaaagcgctgggccacggcgacggtaaga

SEQ ID NO: 497944 - DNA, 75 bp, synthetic construct
  source 1..75: mol_type = other DNA
acagggtccaactctgccgataatatagcgggcgtttattacagacccgttcaaaagtatataaatggcacctgg

SEQ ID NO: 497945 - DNA, 75 bp, synthetic construct
  source 1..75: mol_type = other DNA
tttttgtcggtggacttggtaactaccagtttggtttttacatgattaataattcaaggacagccaatggcaccg

SEQ ID NO: 497946 - DNA, 75 bp, synthetic construct
  source 1..75: mol_type = other DNA
ggcgcggcaaacggtctggagtttgacgtgatcgcagccgtggtagttggtggtacggcgctttccggtggtcgc

SEQ ID NO: 497947 - DNA, 75 bp, synthetic construct
  source 1..75: mol_type = other DNA
acgctgaaaatctcttctctggtaaatatttcgccacgcttggtgatgaaccgccgcatacaccaactggtagtg

SEQ ID NO: 497948 - DNA, 75 bp, synthetic construct
  source 1..75: mol_type = other DNA
gggatatatttgcaaaccgttttgctattaacagcagtaatggtatgtggattcagatgcgcgataacaacgcta

SEQ ID NO: 497949 - DNA, 75 bp, synthetic construct
  source 1..75: mol_type = other DNA
ctgtggcactcctgctgtttctggtggtgatggtggatttcaccaccaggatcatgtcggtgctggcggatggag

SEQ ID NO: 497950 - DNA, 75 bp, synthetic construct
  source 1..75: mol_type = other DNA
tctcgacatatactgacagcaatatctcttcggtagatggtgttggtctatatattggccccaaagttcacaact

SEQ ID NO: 497951 - DNA, 75 bp, synthetic construct
  source 1..75: mol_type = other DNA
gaagctctgcgtccactggcagcagaagaagcgcgtgatgcgtttgttcaaggggaagatattgtgctctctgaa

SEQ ID NO: 497952 - DNA, 75 bp, synthetic construct
  source 1..75: mol_type = other DNA
tcgcgcattagcgttaccagcctgatttctgcctctgctcagggtaaaaaagcggtcgatgccttagccgggcag

SEQ ID NO: 497953 - DNA, 75 bp, synthetic construct
  source 1..75: mol_type = other DNA
tctttaacgcgtggcctgaaattactggagtggattgccgaatccaatggcagtgtggcactcacagagctggcg

SEQ ID NO: 497954 - DNA, 75 bp, synthetic construct
  source 1..75: mol_type = other DNA
atggctacatacggcggtcagtttacgcttaccagcaacgtatcaaaagtctgtaaaatcatgggcgtttcgcgt

SEQ ID NO: 497955 - DNA, 75 bp, synthetic construct
  source 1..75: mol_type = other DNA
gcaacgtatcaaaagtctgtaaaatcatgggcgtttcgcgtgatacattttatcgttaccgcgaactggtcgatg

SEQ ID NO: 497956 - DNA, 75 bp, synthetic construct
  source 1..75: mol_type = other DNA
gaaatcgaaacggctcatccgggatatctgggttcgcaggacacgttctatgtaggcaacctgaaaggtgtcgcg

SEQ ID NO: 497957 - DNA, 75 bp, synthetic construct
  source 1..75: mol_type = other DNA
atattctggcactggcggcttacaatgccgggccaggtcgggttgaccagtggttaaagcgttttggtgatcccc

SEQ ID NO: 497958 - DNA, 75 bp, synthetic construct
  source 1..75: mol_type = other DNA
tacttgtgctgacgctggcaggtacgccggtcttagcatcagaaaacacggcatctctggctgtgggaaacatct

SEQ ID NO: 497959 - DNA, 75 bp, synthetic construct
  source 1..75: mol_type = other DNA
aagaagcgcgtgatgcgtttgttcagggcgaagatattgtgctctctgaagagaacgaattcccaactcaggtag

SEQ ID NO: 497960 - DNA, 75 bp, synthetic construct
  source 1..75: mol_type = other DNA
agcggtcgatgcgttagcggggcagagcgcgaaactgctgaacggtattccgattgatgaagaagatttctttgg

SEQ ID NO: 497961 - DNA, 75 bp, synthetic construct
  source 1..75: mol_type = other DNA
cggtgcgtgttatcagtcattcttctaccatgtctccagaaacctataccggcccacaaacgccagtttcaacat

SEQ ID NO: 497962 - DNA, 75 bp, synthetic construct
  source 1..75: mol_type = other DNA
cggcacagcgctttccggcgggcgcggttcgttattcggtacgctgcttggtgtgttggtaattacgctaatcgg

SEQ ID NO: 497963 - DNA, 75 bp, synthetic construct
  source 1..75: mol_type = other DNA
tcctaatccgctgctgccggaatgccgcgacgatacgcgtaatgcggttatcaaacacggtgcggacatgggtat

SEQ ID NO: 497964 - DNA, 75 bp, synthetic construct
  source 1..75: mol_type = other DNA
ccgatggattacaacggcatgaagctggtgcgcgagggggctcgcccgatcagcggtgataccggactgcgcgat

SEQ ID NO: 497965 - DNA, 75 bp, synthetic construct
  source 1..75: mol_type = other DNA
ctttaaagccctcggcgcaccggtggaattgatcaaagtgcacaacacgccggacggcaatttccccaacggtat

SEQ ID NO: 497966 - DNA, 75 bp, synthetic construct
  source 1..75: mol_type = other DNA
tgttcggttatatcaacgtcaaaaaccttactccgctgaaacttgtgatcaactccgggaacggcgcggcgggtc

SEQ ID NO: 497967 - DNA, 75 bp, synthetic construct
  source 1..75: mol_type = other DNA
ccttaagccgctgaagctggtcattaactccggcaacggcgcggcgggcccggtggtggatgccctggaagcccg

SEQ ID NO: 497968 - DNA, 75 bp, synthetic construct
  source 1..75: mol_type = other DNA
atgtccggcaccgaagagatctatttcgccacgttccatctcggagtggatggcggcatcgaagttaccgccagc

SEQ ID NO: 497969 - DNA, 75 bp, synthetic construct
  source 1..75: mol_type = other DNA
tttacgtttcgacgcagccgaccttgtttacgcgcaatgttccaacgcgttattacggctatgtcacccaaccct

SEQ ID NO: 497970 - DNA, 75 bp, synthetic construct
  source 1..75: mol_type = other DNA
ccagcgcgcagtacgttggtttacctcacagccagcgctatccagccacactgagccacaggttaccgttagtgt

SEQ ID NO: 497971 - DNA, 75 bp, synthetic construct
  source 1..75: mol_type = other DNA
ccattataaaattatcgctgttttgcggtacgttatcgccgggttatgccagaatcataaaaaagcaggttggga

SEQ ID NO: 497972 - DNA, 75 bp, synthetic construct
  source 1..75: mol_type = other DNA
ttctgtcgatggtggatgacatgctgttgaaggctgtatctgtactgggtaaagacgaatacccgctgctccact

SEQ ID NO: 497973 - DNA, 75 bp, synthetic construct
  source 1..75: mol_type = other DNA
aaagccccacttatacgctggtcgaaccctatacgctcgacaacttaatggtttatcactttgatttgtaccgcc

SEQ ID NO: 497974 - DNA, 75 bp, synthetic construct
  source 1..75: mol_type = other DNA
cacctttagccggggctttttacaagctctgggtcatcagggtaatgtcaaaagccccacttatacgctggtcga

SEQ ID NO: 497975 - DNA, 75 bp, synthetic construct
  source 1..75: mol_type = other DNA
cataccattaacaccaatattttctccacgctggttcctaaccagcaggccgtcaacgtgatgttctgtgatatg

SEQ ID NO: 497976 - DNA, 75 bp, synthetic construct
  source 1..75: mol_type = other DNA
gccgcaaagttttcgtgatttatgtcagcaggcggcaatggcggcgggatatcgggattttcagccggacgcctg

SEQ ID NO: 497977 - DNA, 75 bp, synthetic construct
  source 1..75: mol_type = other DNA
gcagtaatggtatgtggattcagatgcgcgataacaacgctatctttgggaaaaatatagttaacactgatagcg

SEQ ID NO: 497978 - DNA, 75 bp, synthetic construct
  source 1..75: mol_type = other DNA
aaatggagaagcaaacaaagcaccacaacaaaagacctgatgaatcttaaatgggatgctttgtatgttcttgtc

SEQ ID NO: 497979 - DNA, 75 bp, synthetic construct
  source 1..75: mol_type = other DNA
atgaccaacgccctgccagtgccgattgacgaaaacgaggtgctggactggctgggtggacaatttctcggtgtg

SEQ ID NO: 497980 - DNA, 75 bp, synthetic construct
  source 1..75: mol_type = other DNA
tgctggtgttgctgttaggtgcgctgatggggacgctggccggggtgctgcgcggtgtatttaacgtgccaagtt

SEQ ID NO: 497981 - DNA, 75 bp, synthetic construct
  source 1..75: mol_type = other DNA
ttgatatgcgaaaccagaatgtcatttttggtagaaacgcagtatcaacaagttctgcgcaggctttgttaagac

SEQ ID NO: 497982 - DNA, 75 bp, synthetic construct
  source 1..75: mol_type = other DNA
attcctgttcgtgtcgcctatgcaatctggttacgtacgccaatggctgtggatttatctgaggtcattatcaac

SEQ ID NO: 497983 - DNA, 75 bp, synthetic construct
  source 1..75: mol_type = other DNA
tttccttattgttgctgcggcaagtattcctgttcgtgtcgtctatgcaatctggttacgcacgccaatggctgt

SEQ ID NO: 497984 - DNA, 75 bp, synthetic construct
  source 1..75: mol_type = other DNA
ccacgctgtcagatggcacagtctttgagcctgtaaacagttttcagaaaaaccagaagacgctggcgagacttc

SEQ ID NO: 497985 - DNA, 75 bp, synthetic construct
  source 1..75: mol_type = other DNA
ggtgataacgacaccggatttaaacaaaatggcgatggtaatctggatgtttatgctaataacgtccatgttatg

SEQ ID NO: 497986 - DNA, 75 bp, synthetic construct
  source 1..75: mol_type = other DNA
gctgtcatgcttgccgccgttctgaagacgcgcggtaacgtcgtgcagatatttaaaatatcgaggtctcaacat

SEQ ID NO: 497987 - DNA, 75 bp, synthetic construct
  source 1..75: mol_type = other DNA
atggctatcatcccaaaaaactatgcgcggttagaaagcggctatcgcgaaaaagcattaaaaatctatccgtgg

SEQ ID NO: 497988 - DNA, 75 bp, synthetic construct
  source 1..75: mol_type = other DNA
ttcttaaccttatcagctactgaacagatggaatatgacagccctatgatggtgaccactcaaaatatgcaatca

SEQ ID NO: 497989 - DNA, 75 bp, synthetic construct
  source 1..75: mol_type = other DNA
actacacagaacatgcaatcagggcaaaccgtcacagataatgtgcaaagagcacccagaacaatcactattagt

SEQ ID NO: 497990 - DNA, 75 bp, synthetic construct
  source 1..75: mol_type = other DNA
ctggtaaaacagcaactaccaaagacgatggggtaacctccaaaaagagcattggtaacacaacgacagaccgta

SEQ ID NO: 497991 - DNA, 75 bp, synthetic construct
  source 1..75: mol_type = other DNA
tccggtagtatcctcatctcaagagatactaagttggtagagaacttcatcgacactcttgaaagatggcgtgac

SEQ ID NO: 497992 - DNA, 75 bp, synthetic construct
  source 1..75: mol_type = other DNA
tccaaagatgttggtatttcaaatggtctaagaatccagctaacttttcaggaaattaacttcaaagctattgtt

SEQ ID NO: 497993 - DNA, 75 bp, synthetic construct
  source 1..75: mol_type = other DNA
cgacactcttgaaagctggcgtgaccagaaacagattatttcggttatctgtaaagacggtatcaagattgatga

SEQ ID NO: 497994 - DNA, 75 bp, synthetic construct
  source 1..75: mol_type = other DNA
gggcagactgtaacagataatgtaatgcgctcaccacgagcaatcactattagtggtgtcgttgtagttggtgaa

SEQ ID NO: 497995 - DNA, 75 bp, synthetic construct
  source 1..75: mol_type = other DNA
ggcaggatcaaacacaagctcagctaaagcagctttagctgaaaatagtgtgaaaatgtttacgggagcaagcac

SEQ ID NO: 497996 - DNA, 75 bp, synthetic construct
  source 1..75: mol_type = other DNA
caaaagaactctgttataagcaatgcaaaccaagctattcaggagcaaagaatgcaaaatatccttaagcgaatt

SEQ ID NO: 497997 - DNA, 75 bp, synthetic construct
  source 1..75: mol_type = other DNA
acgggttcaattctattaaccagacaggggcaacttgtagaaacctttatttctacggttgaacaatggcgagac

SEQ ID NO: 497998 - DNA, 75 bp, synthetic construct
  source 1..75: mol_type = other DNA
aggtgtagagtttcgttcaatcgtagggcaaactgatatttcatctgctactggcaagaccgctaccacgaatga

SEQ ID NO: 497999 - DNA, 75 bp, synthetic construct
  source 1..75: mol_type = other DNA
tggtggagcaacttctaagaagaatacagggaacactacaacaagtttgggtaacggtatgttgatgtgtcagga

SEQ ID NO: 498000 - DNA, 75 bp, synthetic construct
  source 1..75: mol_type = other DNA
tgcgttcacccagaacaattactattagtggtgtcgttgtagttggctatgaaggaagcttattattgactcgtc

SEQ ID NO: 498001 - DNA, 75 bp, synthetic construct
  source 1..75: mol_type = other DNA
cagtgataccacccgtgataactggggagcattctgctacatccgcgatacccagacgggagatgtgtggagcaa

SEQ ID NO: 498002 - DNA, 75 bp, synthetic construct
  source 1..75: mol_type = other DNA
cccagacgggagatgtgtggagcaatacctggcaaccaacaggctacaccagcggacaagacgaggaagtgttgt

SEQ ID NO: 498003 - DNA, 75 bp, synthetic construct
  source 1..75: mol_type = other DNA
tgctgcacgctttggtattgcgaatggcgatctggtgcgtgtctggaacaaacgtggtcagattttgacaggcgc

SEQ ID NO: 498004 - DNA, 75 bp, synthetic construct
  source 1..75: mol_type = other DNA
cccatgactgaacgctttatgtccagcacggtattccggtcagcgagtctgctgttacaggagcgcgtgccggat

SEQ ID NO: 498005 - DNA, 75 bp, synthetic construct
  source 1..75: mol_type = other DNA
gcctgtccgccatgcgtcatcagcctgttttaagcaaccaacagatactggcaggactgaacgatacgctggata

SEQ ID NO: 498006 - DNA, 75 bp, synthetic construct
  source 1..75: mol_type = other DNA
atccgctgaccgcgctttcttactggaaattactcgataatctacgtcgcagtctggtcgccccctccttactga

SEQ ID NO: 498007 - DNA, 75 bp, synthetic construct
  source 1..75: mol_type = other DNA
ataaaaagttttattcctattttatatttaaatatgtgaatgccaatacaaccatcgtagtgcaaacgaattgga

SEQ ID NO: 498008 - DNA, 75 bp, synthetic construct
  source 1..75: mol_type = other DNA
cgacgggcattggcggaaaagctgatccacaccgaggaggacacgcgcaaaaacctggcgcgggagctgcacgac

SEQ ID NO: 498009 - DNA, 75 bp, synthetic construct
  source 1..75: mol_type = other DNA
tttcttattttgcactctcgccgttattggcctgcgttggtgctcccccctttgctgatgatgttctggctgcac

SEQ ID NO: 498010 - DNA, 75 bp, synthetic construct
  source 1..75: mol_type = other DNA
tgcggatttgggtagctccctgggaggacaccaatggtgatctcatcgtgacagggtatgtctataccgaaatcg

SEQ ID NO: 498011 - DNA, 75 bp, synthetic construct
  source 1..75: mol_type = other DNA
gaaagggcagttacagaggcgaggctcaaaaggagcaggcagtaagatccgcaaagatgttgggaatgggagcag

SEQ ID NO: 498012 - DNA, 75 bp, synthetic construct
  source 1..75: mol_type = other DNA
tccaagtgacttttgaaaagaataggtacaaaaattttgataagtttgtgcaattaaataacctaagcaaaaata

SEQ ID NO: 498013 - DNA, 75 bp, synthetic construct
  source 1..75: mol_type = other DNA
cggaagaagtattgacaccttacgtaatgggggcatcccctcaatctatggggaatggaatgattgagacattag

SEQ ID NO: 498014 - DNA, 75 bp, synthetic construct
  source 1..75: mol_type = other DNA
ccaggaacctattccggacgtacagtcagtaactcttcttgcccacctataccgttagagccgtatgatgtgtcc

SEQ ID NO: 498015 - DNA, 75 bp, synthetic construct
  source 1..75: mol_type = other DNA
cacaaaggacgatctggacttgttatgaaatgcgaattgaagtctggaaggaagacacttgcgttcatggctgcc

SEQ ID NO: 498016 - DNA, 75 bp, synthetic construct
  source 1..75: mol_type = other DNA
cgtggttagtgagtatcagagccaccagccaggttgtggtcggttctgttgataaagatatctattatggaccaa

SEQ ID NO: 498017 - DNA, 75 bp, synthetic construct
  source 1..75: mol_type = other DNA
agaccgactgggtctgctacgagatgcctatcgatgtttattatgatgccgacgtgcatggctgcccatggctag

SEQ ID NO: 498018 - DNA, 75 bp, synthetic construct
  source 1..75: mol_type = other DNA
caagatcggtaaatcatcatgctccgggcttgacgagtttgatagtcgttctggttatagtgactggatttgtta

SEQ ID NO: 498019 - DNA, 75 bp, synthetic construct
  source 1..75: mol_type = other DNA
cggcgggataattgaaaaaacgctctccacctacctgatgaaagacggcaaactgtgtgacggcagcaaatttgg

SEQ ID NO: 498020 - DNA, 75 bp, synthetic construct
  source 1..75: mol_type = other DNA
gtctcctgtgcatttaaaagaagatctcgcccaaacgcgcaaacggggttattcatttgacgatgaggaacatgc

SEQ ID NO: 498021 - DNA, 75 bp, synthetic construct
  source 1..75: mol_type = other DNA
gcaacaattgggctttgtccgtcaggttggcgaactggggcactgggcggtaggcgcacatgctttcatggtggg

SEQ ID NO: 498022 - DNA, 75 bp, synthetic construct
  source 1..75: mol_type = other DNA
atttctatttccggaccgatttcacgtattaccgatgaccgcgtgaccgagtttggcgcgatggtgattaaagcg

SEQ ID NO: 498023 - DNA, 75 bp, synthetic construct
  source 1..75: mol_type = other DNA
cgttacagtcgacgggcggcatgattgagaaaacgctcccgaccttcctgatggaaaacgacaagctttgcgacg

SEQ ID NO: 498024 - DNA, 75 bp, synthetic construct
  source 1..75: mol_type = other DNA
tttcgtgcgtcaggttggcgaactgggacactgggcaatcggcgcacatgcctttatggtcggcagcagctttct

SEQ ID NO: 498025 - DNA, 75 bp, synthetic construct
  source 1..75: mol_type = other DNA
ctcgccagtccatctgaaggacgatctcgcccagacgcgtaaacgtggctattcatttgacgatgaagaacatgc

SEQ ID NO: 498026 - DNA, 75 bp, synthetic construct
  source 1..75: mol_type = other DNA
gtttgttcgtgctgatgtttgcgggggcgggcgcgcaggcggcgacaccgattgctaccttgcacacgttaacag

SEQ ID NO: 498027 - DNA, 75 bp, synthetic construct
  source 1..75: mol_type = other DNA
cgatggtcgaagtggtgtatggccgctcgctgtatgcgggcgctgcacacggcccgtcaccgactgccggtgaag

SEQ ID NO: 498028 - DNA, 75 bp, synthetic construct
  source 1..75: mol_type = other DNA
tagcctgaaaatcatgatgccatcagcggtctacgatggtggatataagagtcaaggccttttacgaacaggtga

SEQ ID NO: 498029 - DNA, 75 bp, synthetic construct
  source 1..75: mol_type = other DNA
tttgctctgaagatgatgtgaaatataacagaggtggatgcaatactataggtcagtatcctgataaagataaat

SEQ ID NO: 498030 - DNA, 75 bp, synthetic construct
  source 1..75: mol_type = other DNA
gatgcgatggttgcgcatattgaaaatggcgcggcgttccagtgggcgaacgataagcaagatacggcattcctc

SEQ ID NO: 498031 - DNA, 75 bp, synthetic construct
  source 1..75: mol_type = other DNA
cttatctctcatcaaccgccgggatcacgcttggcgatccgatggcgtatctggtggcaccgccgctggaagcga

SEQ ID NO: 498032 - DNA, 75 bp, synthetic construct
  source 1..75: mol_type = other DNA
cccggcggaagtgcgtgccggtctggatgcgatggttgcacatattgaaaatggtgcagcattccagtgggccaa

SEQ ID NO: 498033 - DNA, 75 bp, synthetic construct
  source 1..75: mol_type = other DNA
tggtaatttagacttaataagttggaacggtccgtcttcaatacctgcacctaccgtatatttggaccattcgga

SEQ ID NO: 498034 - DNA, 75 bp, synthetic construct
  source 1..75: mol_type = other DNA
cagatgtatacgcctatgggggttccaagcttcctggcaaaaatagtgtttagtctggaggttgttacccctgca

SEQ ID NO: 498035 - DNA, 75 bp, synthetic construct
  source 1..75: mol_type = other DNA
tggtcacaacgtataatgagagttctgcgccgttagaaaaaactatgggcccctatatcggcccgcaggcgcgta

SEQ ID NO: 498036 - DNA, 75 bp, synthetic construct
  source 1..75: mol_type = other DNA
gaaagaacagaagacacaaatattttgcttgcggctctgttaggacaacaactgcaaccggttgataagcaaatg

SEQ ID NO: 498037 - DNA, 75 bp, synthetic construct
  source 1..75: mol_type = other DNA
cgaaataaatatgtcaaattgtcccggtcttgctggcgttccctccaccaacggcaaaggatgggattgttatgc

SEQ ID NO: 498038 - DNA, 75 bp, synthetic construct
  source 1..75: mol_type = other DNA
tgtcaagccagattaccactacggacctggggagtgtaggggctacctatgtcggccctaaagtccataactcca

SEQ ID NO: 498039 - DNA, 75 bp, synthetic construct
  source 1..75: mol_type = other DNA
aacggctgcgtctgtggacagtctctgggggaagtgcgtgttccgcaccggggaaatgtcgtggacacagttatt

SEQ ID NO: 498040 - DNA, 75 bp, synthetic construct
  source 1..75: mol_type = other DNA
cgggccattcacagcattgacaccgacattaagctcaaccgggcattgtgggtgatggcagaaacgctgctggag

SEQ ID NO: 498041 - DNA, 75 bp, synthetic construct
  source 1..75: mol_type = other DNA
agtgaacggtatgcgtacattcccaccatcaccgtcctggaaaatctgcagcgggaaggctttcagccgttcttc

SEQ ID NO: 498042 - DNA, 75 bp, synthetic construct
  source 1..75: mol_type = other DNA
aacggctgcgtctgtgggcagtctctgggggaagtgcgtgttccgcaccggggaaatgtcgtggatacagtcatt

SEQ ID NO: 498043 - DNA, 75 bp, synthetic construct
  source 1..75: mol_type = other DNA
aacggctgcgtctgtggccagtctctgggggaagtgcgtgttccgcaccggggaaatgtcgtggaaacagttatt

SEQ ID NO: 498044 - DNA, 75 bp, synthetic construct
  source 1..75: mol_type = other DNA
aacggctgcgtctgtggtcagtctctgggggaagtgcgtgttccgcaccggggaaatgtcgtggagacagtcatt

SEQ ID NO: 498045 - DNA, 75 bp, synthetic construct
  source 1..75: mol_type = other DNA
ggactggtctgcggtcagtctctgggagaattgcgtgttccacaccggggaaatgtggtggagaaagttatcgaa

SEQ ID NO: 498046 - DNA, 75 bp, synthetic construct
  source 1..75: mol_type = other DNA
gagggggcgtatgaggtgctgggtatttttgaccgtgtggaagagaagcgggatgccatgcagtcgctgatgctg

SEQ ID NO: 498047 - DNA, 75 bp, synthetic construct
  source 1..75: mol_type = other DNA
ggtcgtcgtgaacatacaaagcatatgctgcgtctgcggcgggaagggcagatcaccggtaagcaggtgccggaa

SEQ ID NO: 498048 - DNA, 75 bp, synthetic construct
  source 1..75: mol_type = other DNA
atccatacccgggccattcacagcattgataccgacattaagctcaatcgcgcattgtgggtgatggcagaaacg

SEQ ID NO: 498049 - DNA, 75 bp, synthetic construct
  source 1..75: mol_type = other DNA
aaggctttcagccattcttcgcctgccagccccgtgtgcgcgacccgggccgccggggatacaccaaacacatgc

SEQ ID NO: 498050 - DNA, 75 bp, synthetic construct
  source 1..75: mol_type = other DNA
gattaccggtaaacaggtaccagaaattatcctgctcaactcccatgatggcaccagttcgtaccagatgttgcc

SEQ ID NO: 498051 - DNA, 75 bp, synthetic construct
  source 1..75: mol_type = other DNA
gaaggggcttacgaggtggtgggagtatttgaccggatagaggacaagcgtgatgccatgcagtcgctgctactg

SEQ ID NO: 498052 - DNA, 75 bp, synthetic construct
  source 1..75: mol_type = other DNA
cacaggcggcgctgacttaccgttatggtgatgaacatcaacccgtcaccactgccgacattctgacaccacgac

SEQ ID NO: 498053 - DNA, 75 bp, synthetic construct
  source 1..75: mol_type = other DNA
taaacggtatgcgtacattcccaccatcaccgtgctggaaagtctgcagcgggagggctttcagcccttcttcgc

SEQ ID NO: 498054 - DNA, 75 bp, synthetic construct
  source 1..75: mol_type = other DNA
gaaggggcttacgaggtggtgggggtgtttgaccggatagaggacaagcgtgatgccatgcagtcgctgctactg

SEQ ID NO: 498055 - DNA, 75 bp, synthetic construct
  source 1..75: mol_type = other DNA
cgcagcactattcacaggacaatttattctcaaccttgttgggattaaccggcgtcgagacgaagtattatcagg

SEQ ID NO: 498056 - DNA, 75 bp, synthetic construct
  source 1..75: mol_type = other DNA
gtgattgtcttacacaccatcggtagccacggcccgacctattacaaccgctatccgccgcagttcaggaaattt

SEQ ID NO: 498057 - DNA, 75 bp, synthetic construct
  source 1..75: mol_type = other DNA
cgcaacactattcacaagacaatttattctccacgctattgggattaactggcgttgagacgaagtattaccagg

SEQ ID NO: 498058 - DNA, 75 bp, synthetic construct
  source 1..75: mol_type = other DNA
gaaggggcttacgaggtggtgggcgtatttgaccggatcgaggacaagcgtgatgccatgcagtcgctgctactg

SEQ ID NO: 498059 - DNA, 75 bp, synthetic construct
  source 1..75: mol_type = other DNA
gaaggggcttacgaggtggtgggtgtttttgaccggatagaggacaagcgtgatgccatgcagtcgctgctactg

SEQ ID NO: 498060 - DNA, 75 bp, synthetic construct
  source 1..75: mol_type = other DNA
gaaggggcttacgaggtggtgggtgtatttgaccggattgaggacaagcgtgatgccatgcagtcgctgctactg

SEQ ID NO: 498061 - DNA, 75 bp, synthetic construct
  source 1..75: mol_type = other DNA
gaaggggcttacgaggtggtgggggtttttgaccggattgaggacaagcgtgatgccatgcagtcgctgctactg

SEQ ID NO: 498062 - DNA, 75 bp, synthetic construct
  source 1..75: mol_type = other DNA
gaaggggcttacgaggtggtgggggtatttgaccggatggaggacaagcgtgatgccatgcagtcgctgctactg

SEQ ID NO: 498063 - DNA, 75 bp, synthetic construct
  source 1..75: mol_type = other DNA
gaaggggcttacgaggtggtgggcgtctttgaccggatagaggacaagcgtgatgccatgcagtcgctgctactg

SEQ ID NO: 498064 - DNA, 75 bp, synthetic construct
  source 1..75: mol_type = other DNA
cggggaggaccaccagccggttgcgccgtcacaggtgctctccccgcgccgctggcaggatgagagtaacgacct

SEQ ID NO: 498065 - DNA, 75 bp, synthetic construct
  source 1..75: mol_type = other DNA
gagtgcttatcagaccattcaggagaatatgctgaaaggcggaatttccggtcgcagtgccagaggaaaacgtat

SEQ ID NO: 498066 - DNA, 75 bp, synthetic construct
  source 1..75: mol_type = other DNA
aagagaaacacacatccagaagcgagaactacgcgtacatccccaccatcaccgtgctggaaagcctgcagcggg

SEQ ID NO: 498067 - DNA, 75 bp, synthetic construct
  source 1..75: mol_type = other DNA
ccatccaagagaatatgctgaaaggcgggatttccggtcgcagcgctaaaggaaaacgtatccacacccgtgcca

SEQ ID NO: 498068 - DNA, 75 bp, synthetic construct
  source 1..75: mol_type = other DNA
gacagcggcagagtcattaaaacgcctgcaaacgcgtcaggctgaacgtcaggctcgactggatgccgccgcaca

SEQ ID NO: 498069 - DNA, 75 bp, synthetic construct
  source 1..75: mol_type = other DNA
gatctgctggcgcgagtgaaattaagtaacgataaactgaaagatttacgtgagcgtaaagccactctggaagcc

SEQ ID NO: 498070 - DNA, 75 bp, synthetic construct
  source 1..75: mol_type = other DNA
gacagcagcagaatccttaaaacgcctgcaaacgcgtcaggccgaacgtcaggctcgcctggatgctgccgcaca

SEQ ID NO: 498071 - DNA, 75 bp, synthetic construct
  source 1..75: mol_type = other DNA
aacgtatccatacccgggccattcacagcattgataccgacattaagctcaaccgcgcattgtgggtgatggcag

SEQ ID NO: 498072 - DNA, 75 bp, synthetic construct
  source 1..75: mol_type = other DNA
agattaaagccaatatgcttgatattccggtaaaagttctcgacgatgccgaaacgaccgtcgcaggagctgcgc

SEQ ID NO: 498073 - DNA, 75 bp, synthetic construct
  source 1..75: mol_type = other DNA
ttcttcgcctgccagacccgtgtgcgcgaccagagccgccgggaatataccaaacatatgctgcgtctgcggcgg

SEQ ID NO: 498074 - DNA, 75 bp, synthetic construct
  source 1..75: mol_type = other DNA
ctaaaggaaaacgtatccatacccgtgccattcacagcattgacactgacattaagctcaaccgcgcattgtggg

SEQ ID NO: 498075 - DNA, 75 bp, synthetic construct
  source 1..75: mol_type = other DNA
aatcaccggcaaacaggtgccagaaataattctgcttaacagccatgacggttcaagctcataccaaatgttgcc

SEQ ID NO: 498076 - DNA, 75 bp, synthetic construct
  source 1..75: mol_type = other DNA
atcaccgtactagaaagcctgcagcgggagggctttcagcccttcttcgcctgccagacccgtgtgcgcgacccg

SEQ ID NO: 498077 - DNA, 75 bp, synthetic construct
  source 1..75: mol_type = other DNA
ggtcaatttcccgctgctgctggaaaaagggcttgatggtctgcgcgagaaagtagcggaacgtcgctcgcgcat

SEQ ID NO: 498078 - DNA, 75 bp, synthetic construct
  source 1..75: mol_type = other DNA
accgccgacattctgacgccgcgacgccgggaggattacggtaaggacctgtggagcgcatatcagaccatctag

SEQ ID NO: 498079 - DNA, 75 bp, synthetic construct
  source 1..75: mol_type = other DNA
tatcgtttggtcgtatggaccagtatctctacccgtactatcgccgcgacgttgaactcaaccagacactggatc

SEQ ID NO: 498080 - DNA, 75 bp, synthetic construct
  source 1..75: mol_type = other DNA
gtgaagaaactggtgtttgaacagggcgcgattggtcagcaacagctggctgccgcactggcggatgacttcgat

SEQ ID NO: 498081 - DNA, 75 bp, synthetic construct
  source 1..75: mol_type = other DNA
aacggcctcgtctgcggtgagtcgtttggtgaggtgagggtgccgcataaaggggatgtggtgagtcaggtgatc

SEQ ID NO: 498082 - DNA, 75 bp, synthetic construct
  source 1..75: mol_type = other DNA
gagaagtgcgggtaccgcataaagggaatgttgttgagaaggtgattgaaggggcttacgaagtgctcggtgtgt

SEQ ID NO: 498083 - DNA, 75 bp, synthetic construct
  source 1..75: mol_type = other DNA
gaccgtctaccagcgcgtgcaggagaacctgatgaaaggtggtctgtcagggcgaaccgctcaggggaaaagcag

SEQ ID NO: 498084 - DNA, 75 bp, synthetic construct
  source 1..75: mol_type = other DNA
aaacctatatcgacgaactgaagcagtaccataacccgcgctacggtcgtggtccgattggcggcaactattatg

SEQ ID NO: 498085 - DNA, 75 bp, synthetic construct
  source 1..75: mol_type = other DNA
caatggacgcggtgaatcccctctcttacgcgatccttgagtcctgcggccgtctgcgttcgactcagcctaacc

SEQ ID NO: 498086 - DNA, 75 bp, synthetic construct
  source 1..75: mol_type = other DNA
gggcaaaatctggttgatggtcaaccaatggacgcggtgaatcccctctcttacgcgatcctcgaatcctgcggt

SEQ ID NO: 498087 - DNA, 75 bp, synthetic construct
  source 1..75: mol_type = other DNA
ttacgcgatccttgaatcctgcggtcgtctgcgctccactcagcctaacctcagcgtgcgctaccatgcgggaat

SEQ ID NO: 498088 - DNA, 75 bp, synthetic construct
  source 1..75: mol_type = other DNA
cacaagaaaaagcgttgtcagcgggtaacttcaacaacttcgatgaagtgatggacgcgtgggatacgcaaatcc

SEQ ID NO: 498089 - DNA, 75 bp, synthetic construct
  source 1..75: mol_type = other DNA
atggacgcgtgggatacgcaaatccgttactacacgcgtaaatcaatcgaaatcgaatatgtcgtcgacaccatg

SEQ ID NO: 498090 - DNA, 75 bp, synthetic construct
  source 1..75: mol_type = other DNA
tctgacgcgggaaggcgggcacagccatcgccgcattctccatgccgccgacgctaccgggaaagaagttgaaac

SEQ ID NO: 498091 - DNA, 75 bp, synthetic construct
  source 1..75: mol_type = other DNA
catccgaatattcgcgtgctggagcgcagcaacgcggttgatctgattgtctctgacaaaattggcctgccgggc

SEQ ID NO: 498092 - DNA, 75 bp, synthetic construct
  source 1..75: mol_type = other DNA
ctctgacaaaattggcctgccgggcacgcgacgggttgttggcgcgtgggtatggaaccgaaataaagaaacggt

SEQ ID NO: 498093 - DNA, 75 bp, synthetic construct
  source 1..75: mol_type = other DNA
caaataatttgctggagctgcgtaatctggtacaggttgccgagttgattgttcgctgtgcgatgatgcgcaaag

SEQ ID NO: 498094 - DNA, 75 bp, synthetic construct
  source 1..75: mol_type = other DNA
atgaaacgcctcggcgcggattgtatgtatctcgacatcagccataagcctgccgatttttattcgccagcattt

SEQ ID NO: 498095 - DNA, 75 bp, synthetic construct
  source 1..75: mol_type = other DNA
ggtatttgcgatcgccatgcagttgaatttgtcgccagcaatgcacgatcctgtgtgcaatggctaatcgaccaa

SEQ ID NO: 498096 - DNA, 75 bp, synthetic construct
  source 1..75: mol_type = other DNA
agagccgtggcctgcatttcacgctggattatccggaactgctcacgcattccggtccatcgatcctttctgccg

SEQ ID NO: 498097 - DNA, 75 bp, synthetic construct
  source 1..75: mol_type = other DNA
acgccacaggtaaagaagtagaaaccacgctggtaagcaaggcgcagaaccatccgaacattcgtgtgctggaac

SEQ ID NO: 498098 - DNA, 75 bp, synthetic construct
  source 1..75: mol_type = other DNA
cggaagcactgcgcggcgaaggcgcttatctcaagcgcccggatggcacgcgttttatgcccgattttgatgagc

SEQ ID NO: 498099 - DNA, 75 bp, synthetic construct
  source 1..75: mol_type = other DNA
gtcagctatacaggattacatggcgctaaccgaatggcctctaactcattgctggagtgtctggtctacggctgg

SEQ ID NO: 498100 - DNA, 75 bp, synthetic construct
  source 1..75: mol_type = other DNA
cggaagctttacgtggcgaaggcgcttatttgaagcgcccggacggcacacgctttatgcccgattttgatgagc

SEQ ID NO: 498101 - DNA, 75 bp, synthetic construct
  source 1..75: mol_type = other DNA
tctgacccgtgaaggtggacatagtcaccgtcgtattcttcatgccgccgacgcaactggtagagaagtagaaac

SEQ ID NO: 498102 - DNA, 75 bp, synthetic construct
  source 1..75: mol_type = other DNA
gaatattcgcgtgctggagcgcagcaacgcggttgatctgattatttctgacaaaattggcctgccgggcacgcg

SEQ ID NO: 498103 - DNA, 75 bp, synthetic construct
  source 1..75: mol_type = other DNA
ccgcatcagtgcttcattgggggtgagcagcagtgaagaaaccggtgattatgattttgaacaattgcaatcgct

SEQ ID NO: 498104 - DNA, 75 bp, synthetic construct
  source 1..75: mol_type = other DNA
gcgggcgaccgtgttctttctcatgctgccggattaattagcagttccttgcgtgcgcaggacgttgccgggcgg

SEQ ID NO: 498105 - DNA, 75 bp, synthetic construct
  source 1..75: mol_type = other DNA
gcgtgaagtagtggtgctggaagatgcctatatctccagccagcgtaatcatctggaaaacgtagccaacgcgct

SEQ ID NO: 498106 - DNA, 75 bp, synthetic construct
  source 1..75: mol_type = other DNA
tcgcattagtgcttcgttgggggtgagcagcagcgaggaaaccggcgattatgattttgaacaattgcagtcgct

SEQ ID NO: 498107 - DNA, 75 bp, synthetic construct
  source 1..75: mol_type = other DNA
aacacgccagcaatactgaaccgcaggttaccgtcagtgttccggtagacagtgataactactggtatggcgtgc

SEQ ID NO: 498108 - DNA, 75 bp, synthetic construct
  source 1..75: mol_type = other DNA
atgattttgaacaattgcaatcgctggccgatcgtcggctgtatctcgctaaacaagcaggacgtaatcgggtct

SEQ ID NO: 498109 - DNA, 75 bp, synthetic construct
  source 1..75: mol_type = other DNA
gcgtgccgtcgctgggctgcatattgcgccggaatatgtgttgattgatggtaaccgctgcccgaaattaccgat

SEQ ID NO: 498110 - DNA, 75 bp, synthetic construct
  source 1..75: mol_type = other DNA
aagagatcaaagagaaagcgttgagctggagtctgggccgcgcggaaccccacgaaatcgacgaactgaatattt

SEQ ID NO: 498111 - DNA, 75 bp, synthetic construct
  source 1..75: mol_type = other DNA
cgcagctggttgcgggtgtggatgaagtcggacgcgggccgttagttggcgcggtcgtcaccgctgcggtgatcc

SEQ ID NO: 498112 - DNA, 75 bp, synthetic construct
  source 1..75: mol_type = other DNA
agtcaacatggggcaatggggtgtttttcactttgacgcccagttaatctccatcagcgagcgcaaagtgattga

SEQ ID NO: 498113 - DNA, 75 bp, synthetic construct
  source 1..75: mol_type = other DNA
gacagccgcgtgccggaaatcagtgcggcgtctattctggcgaaagtcacgcgcgacgctgaaatggcggcactg

SEQ ID NO: 498114 - DNA, 75 bp, synthetic construct
  source 1..75: mol_type = other DNA
gttgaatgattccaaaaagctgagcgaaaaacgccgtctggcgctgtacgaagagatcaaagaaaaagcgctaag

SEQ ID NO: 498115 - DNA, 75 bp, synthetic construct
  source 1..75: mol_type = other DNA
gtgatgtgctgattattggtagtggcgcggccgggctttcactggcgttgcgtctggcggataaacatcaggtta

SEQ ID NO: 498116 - DNA, 75 bp, synthetic construct
  source 1..75: mol_type = other DNA
gtcgacctccgcctggggcttctcatccccccggtctatgcaatatacgaaaaaaaagctcgtactttcgtacga

SEQ ID NO: 498117 - DNA, 75 bp, synthetic construct
  source 1..75: mol_type = other DNA
ggaatggcgggcagctgatcagcaaaatactggtaataaccccggataaactggtgctggatttcggcagccagg

SEQ ID NO: 498118 - DNA, 75 bp, synthetic construct
  source 1..75: mol_type = other DNA
tgaatttgcagagcaggaagaaatcgcctttaccagcgggaacgggacgaagaagccgaaaggttttctggcata

SEQ ID NO: 498119 - DNA, 75 bp, synthetic construct
  source 1..75: mol_type = other DNA
accgcagcggcgcgaagttcatgatgaacaacagcagcctgtttgccattcgtctgctgaaggataacgacggaa

SEQ ID NO: 498120 - DNA, 75 bp, synthetic construct
  source 1..75: mol_type = other DNA
ctccggtattctaaaggggaaaataagagtgcgttgcgagagtgctgatgcttttttaaacgttaagcatagtcg

SEQ ID NO: 498121 - DNA, 75 bp, synthetic construct
  source 1..75: mol_type = other DNA
attctgatcctgatgtacaacaagtcggcgcaggtgagcttcacggagaacttgaagacggcactgatgtcgagc

SEQ ID NO: 498122 - DNA, 75 bp, synthetic construct
  source 1..75: mol_type = other DNA
cgtgaccgctgatgcgatcattaaactgatttacaccctgcgcaaggcgcaccgcagcggcgcgaagtttatgat

SEQ ID NO: 498123 - DNA, 75 bp, synthetic construct
  source 1..75: mol_type = other DNA
gtaaaaacctgaccattttgatcgtcggagaaacgtcgcgcgcagagaatttctcgctgaatggttatccacgcg

SEQ ID NO: 498124 - DNA, 75 bp, synthetic construct
  source 1..75: mol_type = other DNA
accgcgtgcctcatcagaacgtcactgccctgaacttacccggtcagtgcatcaacggcgaatgctatgacgaag

SEQ ID NO: 498125 - DNA, 75 bp, synthetic construct
  source 1..75: mol_type = other DNA
gcgtctaaactcggtcagattgagccgttcatgggagaaatttacggtaacccgcaggcgactcaaaccatgctg

SEQ ID NO: 498126 - DNA, 75 bp, synthetic construct
  source 1..75: mol_type = other DNA
tgtaacggctgatgcgatcatcaaactggtctacacgctgcgtaaagtgcatcgtaatggcgctaagttcatgat

SEQ ID NO: 498127 - DNA, 75 bp, synthetic construct
  source 1..75: mol_type = other DNA
cgtggcagacgttccgccgactgtggccaaccattgcgccttttaaagcgggtctgatcgtggcgggcgtagcgt

SEQ ID NO: 498128 - DNA, 75 bp, synthetic construct
  source 1..75: mol_type = other DNA
gccgggaagcgaaatgattcgctggttcgttaccggatgttggaagccgcgaagcaggtcaaatcgggtagagca

SEQ ID NO: 498129 - DNA, 75 bp, synthetic construct
  source 1..75: mol_type = other DNA
ttcaacccaatgcatagagaacaacttataacagagccttatgaaggagaggttgtaaagtatacggatatcaat

SEQ ID NO: 498130 - DNA, 75 bp, synthetic construct
  source 1..75: mol_type = other DNA
atgctgaagatgattaaagattttaaattcaaaaaatacattaaaaaattacgtgaagaaggtttgtttttttat

SEQ ID NO: 498131 - DNA, 75 bp, synthetic construct
  source 1..75: mol_type = other DNA
tcatgagcagaatattccaaaaaatgaaggaatcggactcacatggaaattcaaaaataattcttataattataa

SEQ ID NO: 498132 - DNA, 75 bp, synthetic construct
  source 1..75: mol_type = other DNA
cgaagttcttgtcgttgtttctggttttactggttgtggaaaaagcgccattgccggggaaatagaaatcgcgat

SEQ ID NO: 498133 - DNA, 75 bp, synthetic construct
  source 1..75: mol_type = other DNA
agccggaagagtttaaagcagtgcgtacagtccaggatgtcgtcgaggctgtagaacgcctgctacaagaagcct

SEQ ID NO: 498134 - DNA, 75 bp, synthetic construct
  source 1..75: mol_type = other DNA
ggtattacgctgttatctatggtaactcgcaggcctaatccagatgatttggttagtgctgaacatgaagttcaa

SEQ ID NO: 498135 - DNA, 75 bp, synthetic construct
  source 1..75: mol_type = other DNA
aaacggatgcgcgaacgtattcaggcgctggaatctattcttgatgcagaacatccgaactggagggatcgctaa

SEQ ID NO: 498136 - DNA, 75 bp, synthetic construct
  source 1..75: mol_type = other DNA
catccctcattgaagaggctgtccgtcaggcctggcctctggctcctgaccgtatcgaggttataggcgatccgc

SEQ ID NO: 498137 - DNA, 75 bp, synthetic construct
  source 1..75: mol_type = other DNA
cgctcagtcgcaaattcagcgtctttcatcacaggcgatgagtgataaacgtctcatgctcctgtcagttttacc

SEQ ID NO: 498138 - DNA, 75 bp, synthetic construct
  source 1..75: mol_type = other DNA
caaccaggggagactgacaatcaacggctcggtcacatccgacgtcagtgttcagggggagggtatcatcggcgg

SEQ ID NO: 498139 - DNA, 75 bp, synthetic construct
  source 1..75: mol_type = other DNA
tatctgagaagtttttctctgaagctatggataatttaaaatcattaagtgaaattacatcttgcttagatgaaa

SEQ ID NO: 498140 - DNA, 75 bp, synthetic construct
  source 1..75: mol_type = other DNA
atgaaaaaccgtgtttatgaaagtttaactaccgtgttcagcgtgctggtggtcagcagctttctttatatctgg

SEQ ID NO: 498141 - DNA, 75 bp, synthetic construct
  source 1..75: mol_type = other DNA
atggtggcggccgaactgcattttttgccgtcagcggtaatgactgttctctgacaggggaccgccgggagttta

SEQ ID NO: 498142 - DNA, 75 bp, synthetic construct
  source 1..75: mol_type = other DNA
ttccactgaggcttatattgcgctcaatcgcgccgccatcgacagtggtctggtcgatatgatcgatctggaatt

SEQ ID NO: 498143 - DNA, 75 bp, synthetic construct
  source 1..75: mol_type = other DNA
cactttgccgacctctccagtatggagtctgtcatggcagcggccaggatcctccgtgaagtcatgccggaaaaa

SEQ ID NO: 498144 - DNA, 75 bp, synthetic construct
  source 1..75: mol_type = other DNA
tactgcgactaaaacggatacaccaattgaaaaaacgccgcagtccatttcggttgtgacccgggaagagatgga

SEQ ID NO: 498145 - DNA, 75 bp, synthetic construct
  source 1..75: mol_type = other DNA
gcgctaattctccatctggcgtagggaaaatcacacctgaatcaggaattaacaatgaaacctgtaaaaccacct

SEQ ID NO: 498146 - DNA, 75 bp, synthetic construct
  source 1..75: mol_type = other DNA
aaaaaagcctctgcgccagggcaaatctcggtaaatgatttgcgcacggtattaactattttacaccaggcataa

SEQ ID NO: 498147 - DNA, 75 bp, synthetic construct
  source 1..75: mol_type = other DNA
atgaaaaccgtaactgtaaaagatctcgtcattggtacgggcgcaccaaaaatcatcgtctcgctgatggcgaaa

SEQ ID NO: 498148 - DNA, 75 bp, synthetic construct
  source 1..75: mol_type = other DNA
gagtacaacctgaggatgcgatcagaattatacccatcagtggataatcttattagagaatctggcggggtcacc

SEQ ID NO: 498149 - DNA, 75 bp, synthetic construct
  source 1..75: mol_type = other DNA
aattatctatccctcagagaacaactaaaagagaaagacgcgaagatcaccggattacaggactacatcaaaacg

SEQ ID NO: 498150 - DNA, 75 bp, synthetic construct
  source 1..75: mol_type = other DNA
gcttatctatccctcagagaacaactaaaagagaaagatgcgaagatcgccggacttcagagctatatcaaaacg

SEQ ID NO: 498151 - DNA, 75 bp, synthetic construct
  source 1..75: mol_type = other DNA
tttgcggctgtgtatggttcgatcaggaggaggctggcatattcggaacgctttacattcaccggcaaaaagtgc

SEQ ID NO: 498152 - DNA, 75 bp, synthetic construct
  source 1..75: mol_type = other DNA
tgaaataagagctttggcagctcacctatttgataaacaagggattgatccgcagggacgaatggcacatagcga

SEQ ID NO: 498153 - DNA, 75 bp, synthetic construct
  source 1..75: mol_type = other DNA
actcgaagtatcgcgaatccgttactcaattcgcgaacctaaagacggtttatgtggatgtgtttggttcgaaca

SEQ ID NO: 498154 - DNA, 75 bp, synthetic construct
  source 1..75: mol_type = other DNA
ggcatgtctgtttatgcacaggcagcggttgaaccgaaagaagacactatcaccgttactgctgcacctgcgccg

SEQ ID NO: 498155 - DNA, 75 bp, synthetic construct
  source 1..75: mol_type = other DNA
atgtttaagaatgcatttgctaacctgcaaaaggtcggtaaatcgctgatgctgccagtatccgtactgcctatc

SEQ ID NO: 498156 - DNA, 75 bp, synthetic construct
  source 1..75: mol_type = other DNA
ttatatggcgggtgacccgactgcgggtaaactgtctggaggcttcctgttcaaaatgtacggtctgccagctgc

SEQ ID NO: 498157 - DNA, 75 bp, synthetic construct
  source 1..75: mol_type = other DNA
agacactcggctttctgccggcacagattgcggtcatccacgccatgctcgccagtccggatgccatcatcatca

SEQ ID NO: 498158 - DNA, 75 bp, synthetic construct
  source 1..75: mol_type = other DNA
ttatcaaagtgtgaagatacaaaaaggcgaagtgaaatcatcacggtttgtcatcgctccgctgatgtgattgaa

SEQ ID NO: 498159 - DNA, 75 bp, synthetic construct
  source 1..75: mol_type = other DNA
gcgcagctggacagggccgatccggactttatggcggagcgtgaggatgtggtcagcgacgaaggacgctttgat

SEQ ID NO: 498160 - DNA, 75 bp, synthetic construct
  source 1..75: mol_type = other DNA
atgagaaccgtatccattttcaaaaacggcaacaaccgcgccatccgccttccccgcgatctggattttgagggg

SEQ ID NO: 498161 - DNA, 75 bp, synthetic construct
  source 1..75: mol_type = other DNA
ccttctcgcggtaagcagtacgaagcaggtgtcaaatacgtaccgaaagatacgcctgtcactgtcactgcctcg

SEQ ID NO: 498162 - DNA, 75 bp, synthetic construct
  source 1..75: mol_type = other DNA
tttggtaacgcagagccataccaaatgaatgaaagcaaacaaacaggtatttatgttcaggatcaggcggaatgg

SEQ ID NO: 498163 - DNA, 75 bp, synthetic construct
  source 1..75: mol_type = other DNA
tgaatgaaagcaaacaaacaggtatttatgttcaggatcaggcggaatggaataaatgggtattcactctggggg

SEQ ID NO: 498164 - DNA, 75 bp, synthetic construct
  source 1..75: mol_type = other DNA
caaacgaacagcagaaaaactctgaatctcagcgttataccattgctccatcattctcatggcgtccagacgaca

SEQ ID NO: 498165 - DNA, 75 bp, synthetic construct
  source 1..75: mol_type = other DNA
gcttatctatccctcagagaacaactaaaagagaaagacgcgaagatcaccggattgcaggactacatcaagacg

SEQ ID NO: 498166 - DNA, 75 bp, synthetic construct
  source 1..75: mol_type = other DNA
attaactatatagttagaaaacactggccagcatggattaatccatgtgataagatttgtgcggaactgttactt

SEQ ID NO: 498167 - DNA, 75 bp, synthetic construct
  source 1..75: mol_type = other DNA
gttacatgaacttattaaattgcataatattgtttctaaagatgaacgtaatcctgaaagttggcctggaaaatt

SEQ ID NO: 498168 - DNA, 75 bp, synthetic construct
  source 1..75: mol_type = other DNA
attgaagagttcacgtgtcgctacaacgtggaacacatcggcattgatgtgacgggcgggaacggggaggctgtt

SEQ ID NO: 498169 - DNA, 75 bp, synthetic construct
  source 1..75: mol_type = other DNA
gcatgatggtgtcgagttcgtgtatgcggacaagatggtcagaatggagggagcaaacgttgattgccctgagtg

SEQ ID NO: 498170 - DNA, 75 bp, synthetic construct
  source 1..75: mol_type = other DNA
gaacctggtgccgaagaaatgccgcctttgagtgacgaggacatgatccctgttacagaagaggagggcgcggaa

SEQ ID NO: 498171 - DNA, 75 bp, synthetic construct
  source 1..75: mol_type = other DNA
gggctattgatagaatcgagaaaatccataaagaaaaatcagcgtttgtaaatgagttgtttcgatggatggtta

SEQ ID NO: 498172 - DNA, 75 bp, synthetic construct
  source 1..75: mol_type = other DNA
ggaggctcggtgaagtcacgccgcaagtatgggcactaggagaatgtgagccggggcaggagcaccggaaatcta

SEQ ID NO: 498173 - DNA, 75 bp, synthetic construct
  source 1..75: mol_type = other DNA
cgatggtgcccttcggttagttactaccaactttgaccgcttatttcatgtggcagctaaacgcacggcccaagc

SEQ ID NO: 498174 - DNA, 75 bp, synthetic construct
  source 1..75: mol_type = other DNA
cgctgttgcgtttggcgcgtagtcgcgatggtgcccttcggttagttactaccaactttgaccgcttatttcatg

SEQ ID NO: 498175 - DNA, 75 bp, synthetic construct
  source 1..75: mol_type = other DNA
tttatgatataatatatggtgttagaaataaccaattcgtaggaacaatatggtttataaactgcctttttgtta

SEQ ID NO: 498176 - DNA, 75 bp, synthetic construct
  source 1..75: mol_type = other DNA
tatggacacgatggaaggggcgctggtggagcctgccgcagtcgggatgcatgccgcgatgctggcagatgttaa

SEQ ID NO: 498177 - DNA, 75 bp, synthetic construct
  source 1..75: mol_type = other DNA
ttatccagaggagattgaatcaggacaattcgtaaaaataaaatgtgctattgaaattaatgattataaaaaact

SEQ ID NO: 498178 - DNA, 75 bp, synthetic construct
  source 1..75: mol_type = other DNA
aagccaagagcctttggctattgagcacaaagagcttgacccgatcctaaccaaactcgcaaatcgcgccattgc

SEQ ID NO: 498179 - DNA, 75 bp, synthetic construct
  source 1..75: mol_type = other DNA
atgaagtcgccggattacacaaagaaattgggcgactttccgggatatatgccattggtgatgattttgtcagta

SEQ ID NO: 498180 - DNA, 75 bp, synthetic construct
  source 1..75: mol_type = other DNA
ctcacggggctggaaaaacatatggcacgcctttctgattccggcatcaacggcattctgctatcaggtaccatc

SEQ ID NO: 498181 - DNA, 75 bp, synthetic construct
  source 1..75: mol_type = other DNA
tgtaacgatgttcgttatggttgtctggatggtctgcgtggtgattatcaccattcagatcattcacacgcttta

SEQ ID NO: 498182 - DNA, 75 bp, synthetic construct
  source 1..75: mol_type = other DNA
gacgctgaatcggcttatctatccctcagagaacaactaaaagagaaagacgcgaagatcaccggattgcaggac

SEQ ID NO: 498183 - DNA, 75 bp, synthetic construct
  source 1..75: mol_type = other DNA
gcttatctatccctcagagaacaattaaaagaaaaagacgcgaagatcaccggattgcaggactacatcaatacg

SEQ ID NO: 498184 - DNA, 75 bp, synthetic construct
  source 1..75: mol_type = other DNA
ttggggttggaggcgaacaggctggtgctgtattgatgactgctgaatatgctgagcccaaacgacgtggttttt

SEQ ID NO: 498185 - DNA, 75 bp, synthetic construct
  source 1..75: mol_type = other DNA
cgctgatattatttatgactggcaacagtcagatatgtcagaaaaaatgtttcttgttcggttatatatgaaagc

SEQ ID NO: 498186 - DNA, 75 bp, synthetic construct
  source 1..75: mol_type = other DNA
ggaataagttctcctgtctaagcgagttggctgcaaaggtggccgacattctggagaacaacggcggtcgaatgc

SEQ ID NO: 498187 - DNA, 75 bp, synthetic construct
  source 1..75: mol_type = other DNA
ccttacatagtcgtttcccggtttgccacatatacccctttctttaatctgaactattttgcactggccgcaaag

SEQ ID NO: 498188 - DNA, 75 bp, synthetic construct
  source 1..75: mol_type = other DNA
acgccagcagaaaccgagtggcagggctggataaacaacgccgacgacgctgtgattgaagccagccactggcaa

SEQ ID NO: 498189 - DNA, 75 bp, synthetic construct
  source 1..75: mol_type = other DNA
aagcggcagaaacgtggctcgacaacatcgcgcatctgctgcgtttactgactgagcatacgccgggcgaaagcg

SEQ ID NO: 498190 - DNA, 75 bp, synthetic construct
  source 1..75: mol_type = other DNA
attctcggtgaaaatattcatgaatggcaaaaaacagatatatcagggaaaatatttctcattcgattatatctg

SEQ ID NO: 498191 - DNA, 75 bp, synthetic construct
  source 1..75: mol_type = other DNA
atgaatcattcagagttccgaccagaagttacgccacatggcataaaaattggcaatacaaccattgattatgtt

SEQ ID NO: 498192 - DNA, 75 bp, synthetic construct
  source 1..75: mol_type = other DNA
cgaagggcttgaactccttctggatgaaatgatgaacgacctgaatactcatggtatgccagaagcgccagtgac

SEQ ID NO: 498193 - DNA, 75 bp, synthetic construct
  source 1..75: mol_type = other DNA
gaaccctatcttgtagggtttagtcattattattctgcagcagtgacaaaaattagtatatctaaatccaagaag

SEQ ID NO: 498194 - DNA, 75 bp, synthetic construct
  source 1..75: mol_type = other DNA
gtaacgcatttgtggaaccttattgccattcgttagatgataagcacaaagagttacttgtaattcaggagtata

SEQ ID NO: 498195 - DNA, 75 bp, synthetic construct
  source 1..75: mol_type = other DNA
tgggtaaacttccggttgagatgaaggttgctcagtggcgatggttgtatgtgacgacattcatcaacgaagaag

SEQ ID NO: 498196 - DNA, 75 bp, synthetic construct
  source 1..75: mol_type = other DNA
gtgacaacatttataaatgaagaggaagacaagaacggcactgttgatatccctaacgataatggaactacagct

SEQ ID NO: 498197 - DNA, 75 bp, synthetic construct
  source 1..75: mol_type = other DNA
gttgtggaaaaaatgcgccaggaaaaacggaaaattatcccactgtgcccgtttgcgaaacacgaatttgataaa

SEQ ID NO: 498198 - DNA, 75 bp, synthetic construct
  source 1..75: mol_type = other DNA
aaaattatcccactatgcccatttgcgaaacacgaatttgataaaacgcgggagtatgatgatattcgcagttga

SEQ ID NO: 498199 - DNA, 75 bp, synthetic construct
  source 1..75: mol_type = other DNA
gaaagaaagttgtggcatatctgcacccggcactttatccgcaggacaacctgacacaacaaacaatagactctc

SEQ ID NO: 498200 - DNA, 75 bp, synthetic construct
  source 1..75: mol_type = other DNA
gcgattcagtttgaccgttccggaaccacccacatcggccgcttcgtcatcaaccacagcttcattttgccaggg

SEQ ID NO: 498201 - DNA, 75 bp, synthetic construct
  source 1..75: mol_type = other DNA
atgtctgaaattcagggcgtactgggtgaaatggtgaaagagtatccgtgggcgtatgccattgttctgctgctg

SEQ ID NO: 498202 - DNA, 75 bp, synthetic construct
  source 1..75: mol_type = other DNA
gcgaaatggtgaaagagtatccgtgggcttatgccattgttctgttgctggtctccaagtttgttaactcccagg

SEQ ID NO: 498203 - DNA, 75 bp, synthetic construct
  source 1..75: mol_type = other DNA
ccaattgaaatacgactggttgggtgctgtggggtttgttgttttcaatcgtgggcgagaggataagtatttctg

SEQ ID NO: 498204 - DNA, 75 bp, synthetic construct
  source 1..75: mol_type = other DNA
cgggacacagcacaccaccacaacgcagtctgaagaacaactgcagatctccatggccagcgctgacgactggag

SEQ ID NO: 498205 - DNA, 75 bp, synthetic construct
  source 1..75: mol_type = other DNA
cgttctgttgcatgggtggaaaatgaggttaatgaatggattgaaaaaaacattaaaaatagaaatttgaattcc

SEQ ID NO: 498206 - DNA, 75 bp, synthetic construct
  source 1..75: mol_type = other DNA
cacccaaaaaaaattatagacttctgagaataacagatgtgattaatttgactgggttacctaagtcaacaattt

SEQ ID NO: 498207 - DNA, 75 bp, synthetic construct
  source 1..75: mol_type = other DNA
cgtgaatttgaagccgaactgtcacaaccggaaaaaaacgagttacaacaggagtccggcacttcaccagaaata

SEQ ID NO: 498208 - DNA, 75 bp, synthetic construct
  source 1..75: mol_type = other DNA
taaacgacaaaaatgagctcgttattcctttccgcaaccgtaacggcgcaatacgctcctaccagcgcattccgg

SEQ ID NO: 498209 - DNA, 75 bp, synthetic construct
  source 1..75: mol_type = other DNA
acaacaccgacaacgcggagacaaacacagtttctgaacctgccgggatgcggccagttcagcaggtaaccactg

SEQ ID NO: 498210 - DNA, 75 bp, synthetic construct
  source 1..75: mol_type = other DNA
tcgttatatttctgcttttagatactatatgccatttttcataatatcattatgttgttattttatattcaaaaa

SEQ ID NO: 498211 - DNA, 75 bp, synthetic construct
  source 1..75: mol_type = other DNA
cctggcgttattcgcccggccagttacacgcgctggtttccagcgaatgggagcggggttattcatggcgtggag

SEQ ID NO: 498212 - DNA, 75 bp, synthetic construct
  source 1..75: mol_type = other DNA
gattattttgtggttgatcttttaagattattaaaagaaataaaaccagaaacacatactctcgtgtttgcagga

SEQ ID NO: 498213 - DNA, 75 bp, synthetic construct
  source 1..75: mol_type = other DNA
aacgctccggcacccacaaccagcgataatgcgcgtatggttccgggcaaacctgtcactggccgtctggaggca

SEQ ID NO: 498214 - DNA, 75 bp, synthetic construct
  source 1..75: mol_type = other DNA
cacctggagtccccggggcaccctggtaacaccggcgcccagatttgccgtggtggagggtttatggggagtacg

SEQ ID NO: 498215 - DNA, 75 bp, synthetic construct
  source 1..75: mol_type = other DNA
tgttacagggactggaaagccgggctgtttacgattacgttgccagtcataagggcgtttgcgcactggagcacg

SEQ ID NO: 498216 - DNA, 75 bp, synthetic construct
  source 1..75: mol_type = other DNA
gcgatagaaaatcatatgcctggcgcgttccgtggactgtcaaatgatgagttgcagatgatgaatgaacttttt

SEQ ID NO: 498217 - DNA, 75 bp, synthetic construct
  source 1..75: mol_type = other DNA
ctttataactttgaacaaataagaaagtctatcgaacacacctcaatgaccttcagtattttaattcttatggtc

SEQ ID NO: 498218 - DNA, 75 bp, synthetic construct
  source 1..75: mol_type = other DNA
gtttttcagatgtgtggaacgaacacctgcatatcacccagggaaaaaccggaatgcgtctggcgttaccgctta

SEQ ID NO: 498219 - DNA, 75 bp, synthetic construct
  source 1..75: mol_type = other DNA
aacctgagcgactactttgccaaagcacgggatctggctggggtaattccaccagcaggaaaaactccgccaaca

SEQ ID NO: 498220 - DNA, 75 bp, synthetic construct
  source 1..75: mol_type = other DNA
taatgacatcaacgcctggtttggttacgacgactctgtgccactgctcgatctgtacaatccggtaaataccga

SEQ ID NO: 498221 - DNA, 75 bp, synthetic construct
  source 1..75: mol_type = other DNA
atctaatccatagtaggcaccagaaacaaccaaaaccgatgagtaaagacaacctgagcgattacttcgccaaag

SEQ ID NO: 498222 - DNA, 75 bp, synthetic construct
  source 1..75: mol_type = other DNA
tcagcaacaaaacgtcggggtatcagattaaaagcatgggttgatcgatatctgaaaatacaggactcacgactg

SEQ ID NO: 498223 - DNA, 75 bp, synthetic construct
  source 1..75: mol_type = other DNA
ataataatgccgctgacactcatgttgtagatgtttacgatatgggtactgctattacactggatcaggaagttg

SEQ ID NO: 498224 - DNA, 75 bp, synthetic construct
  source 1..75: mol_type = other DNA
gacagcgacgcattatcacccaggaggacccggtggagggggaggtcgaaggagccatccacacctcggtgaccg

SEQ ID NO: 498225 - DNA, 75 bp, synthetic construct
  source 1..75: mol_type = other DNA
ctgagtcagcatgcccggcatcatgtgctggccggacgggtggacccgtttatggccaatgacatcgtgccgttt

SEQ ID NO: 498226 - DNA, 75 bp, synthetic construct
  source 1..75: mol_type = other DNA
ctggtggaagcctacaccgaataccggcatcactgcgaaatactcgatgttgagggttatacctaccgcacggaa

SEQ ID NO: 498227 - DNA, 75 bp, synthetic construct
  source 1..75: mol_type = other DNA
gtatgatgatattcgcagttgatgggagagtacagagtcacgatatttttcatgctctccgcggagtgatgcagg

SEQ ID NO: 498228 - DNA, 75 bp, synthetic construct
  source 1..75: mol_type = other DNA
cgaagtttaccagagcggtctgttcaatgtgaccctgaataccggttcacagtgggataccaccaaaaacttctc

SEQ ID NO: 498229 - DNA, 75 bp, synthetic construct
  source 1..75: mol_type = other DNA
tggtaatattttcgcaccgtctaaaggtaagcagtatgaagtcggcgtgaaatatgtaccggaagatcgtccgat

SEQ ID NO: 498230 - DNA, 75 bp, synthetic construct
  source 1..75: mol_type = other DNA
agaaatttcgagattactcataagatttttgtaaacggtgtctttgaacctgctcgctatgtactttctcaagaa

SEQ ID NO: 498231 - DNA, 75 bp, synthetic construct
  source 1..75: mol_type = other DNA
caaccctatttgggagcatgagcatgaaaatgttctccgcgccgccatgattgtctttctcatgatgcaggacgc

SEQ ID NO: 498232 - DNA, 75 bp, synthetic construct
  source 1..75: mol_type = other DNA
catggaaagttgaatggagcgacggctgcatttactcctatgcctggaacaacactaattcagcaggatatttgt

SEQ ID NO: 498233 - DNA, 75 bp, synthetic construct
  source 1..75: mol_type = other DNA
gtagaagttgagcgcggatcctttaacccatgcgcaaacccagcagacgcatggccgattattgaaaaatacagg

SEQ ID NO: 498234 - DNA, 75 bp, synthetic construct
  source 1..75: mol_type = other DNA
gattaaaggcatgggttgatcgatatctgaaaatacaggacacgcgactgaaaaatggagatattgcagctacaa

SEQ ID NO: 498235 - DNA, 75 bp, synthetic construct
  source 1..75: mol_type = other DNA
ctactgtaaatctaagcgagctatacatgaaaatcccctccgcgccgccatgattgtctttctcatgatgcagga

SEQ ID NO: 498236 - DNA, 75 bp, synthetic construct
  source 1..75: mol_type = other DNA
cagggcgattcgatgtgaaatcgatggtgacgcatatttacgattatcgggatgtacaacaggcatttgaagagt

SEQ ID NO: 498237 - DNA, 75 bp, synthetic construct
  source 1..75: mol_type = other DNA
tgtacatggtttcgaatcaggcccgtttattccgcctaaagacccaaatcaagaaattggcctgggtcatgaatg

SEQ ID NO: 498238 - DNA, 75 bp, synthetic construct
  source 1..75: mol_type = other DNA
ggatgatgacggcgtttactcttatcgcctgaccggtcttgcgcgttctgccaatgcccagcagaaagggtcaga

SEQ ID NO: 498239 - DNA, 75 bp, synthetic construct
  source 1..75: mol_type = other DNA
ggagcgggttgtattggtttgatgacgttgcaagcgtgcaaatgcctgggagcaacggaaattgccgtcgttgat

SEQ ID NO: 498240 - DNA, 75 bp, synthetic construct
  source 1..75: mol_type = other DNA
atgaaaaattcaaaagcaatattgcaggtgccgggcacaatgaaaattatttcagcagaaataccagtgcctaaa

SEQ ID NO: 498241 - DNA, 75 bp, synthetic construct
  source 1..75: mol_type = other DNA
tttattccgccaaaagatccaaatcaggaaattggactgggtcatgaatgtgccggaacagttgttgcagcagga

SEQ ID NO: 498242 - DNA, 75 bp, synthetic construct
  source 1..75: mol_type = other DNA
atttgcaatttaatctcgtaacgtccttaccggagaattgtgcgcattttttctgtgaaaacctgcggaattcag

SEQ ID NO: 498243 - DNA, 75 bp, synthetic construct
  source 1..75: mol_type = other DNA
gtcggagccgaacggcggatggtaagactggccaatgagatcttccccctatgggaacctgctgcgcagcgggaa

SEQ ID NO: 498244 - DNA, 75 bp, synthetic construct
  source 1..75: mol_type = other DNA
aatggaggagatttaaagcgtcttatttcactgatcacctataaaaacctttatgctgaagactatcacaggata

SEQ ID NO: 498245 - DNA, 75 bp, synthetic construct
  source 1..75: mol_type = other DNA
tagccgcaaaaccgccttcgggcgctcggtttttgctgttggcggtaatgccactgcagcacagttgtgcggtat

SEQ ID NO: 498246 - DNA, 75 bp, synthetic construct
  source 1..75: mol_type = other DNA
tgctggtgttgctgttaggcgcgctgatgggaacgctcgccggggtgctgcgcggcgtgtttaacgtaccaagtt

SEQ ID NO: 498247 - DNA, 75 bp, synthetic construct
  source 1..75: mol_type = other DNA
cttaagcgcggcgacggctgtccaaaatgcgcaaaatacggctttcttcgtcatgagcgcggtaaactttacatc

SEQ ID NO: 498248 - DNA, 75 bp, synthetic construct
  source 1..75: mol_type = other DNA
aatatctggaaacacggtttatcaagcccacccgcgaactgataacccaggtaattcaccatttttgctggcatt

SEQ ID NO: 498249 - DNA, 75 bp, synthetic construct
  source 1..75: mol_type = other DNA
ttgcaaacgcaaggcatcggggcaatccttgcgtttgcaatggcgtaccttcgcggcagatataatggcgggggg

SEQ ID NO: 498250 - DNA, 75 bp, synthetic construct
  source 1..75: mol_type = other DNA
gcaattgcgcgataacctgaaagaacgttatcactacgaagcgtttaccgtgccataccctacgctcaacctcgg

SEQ ID NO: 498251 - DNA, 75 bp, synthetic construct
  source 1..75: mol_type = other DNA
atgaccggcagaagcaggcactgctgatgcaatgtcttaaaaatgacggtgggtcacacaagttcataagacagg

SEQ ID NO: 498252 - DNA, 75 bp, synthetic construct
  source 1..75: mol_type = other DNA
accagtacggcatgaaactgactctgaacagcaaaccgatggacggctggcaaatcacctgggggctggatgctg

SEQ ID NO: 498253 - DNA, 75 bp, synthetic construct
  source 1..75: mol_type = other DNA
aatatctggagacacggtttattaaacccacccgcgagttgatcacccaggtgattcaccatttttgctggcatt

SEQ ID NO: 498254 - DNA, 75 bp, synthetic construct
  source 1..75: mol_type = other DNA
ggtgccgcaaacggtctggagtttgacgtcatcgccgcggtcgtggtcggcggtacggcactttccggcggtcgc

SEQ ID NO: 498255 - DNA, 75 bp, synthetic construct
  source 1..75: mol_type = other DNA
gaaaaaatgctcgatgccctggacgatcaggagctggttaaactggtagccgaacgcagcaaccaaccgctgcat

SEQ ID NO: 498256 - DNA, 75 bp, synthetic construct
  source 1..75: mol_type = other DNA
ggaggacgcgtcggcgacaaagagtattcagaagtgatagtggccctgcgtgagtgcgcggatgcgctgaagaaa

SEQ ID NO: 498257 - DNA, 75 bp, synthetic construct
  source 1..75: mol_type = other DNA
caactcgtttgcgcagattctctgcaatttatcaaaaccatccctgataactcggtcaatttgattgcaacagac

SEQ ID NO: 498258 - DNA, 75 bp, synthetic construct
  source 1..75: mol_type = other DNA
accaggagctggtgaaactggttactgaacgcagtaatcagccactacatgatgtggacctggatagttatttat

SEQ ID NO: 498259 - DNA, 75 bp, synthetic construct
  source 1..75: mol_type = other DNA
gggacgctgttgcgatcctgaaccgaaacgaaccggcgttctattgcgttccaccaaaactttacgcctactatc

SEQ ID NO: 498260 - DNA, 75 bp, synthetic construct
  source 1..75: mol_type = other DNA
gcactatcgacattctgcatgtctctgcgcttggggttcaggcattacgcgtcgcgattccggcgctcatagtct

SEQ ID NO: 498261 - DNA, 75 bp, synthetic construct
  source 1..75: mol_type = other DNA
gttctgacgagtcgcttacgtaaagatcacgatgagcgcattgccggtgctgtctccggcggaaatgaccatatc

SEQ ID NO: 498262 - DNA, 75 bp, synthetic construct
  source 1..75: mol_type = other DNA
acattagctgggtgaaccgccccggttttcctggagagtgttttatctgtgaactcaggctgccagatcattatt

SEQ ID NO: 498263 - DNA, 75 bp, synthetic construct
  source 1..75: mol_type = other DNA
atgagtaaaaaatcggccaaaaagcgccagccagtgaagcctgtagtggcgaaagaacctgctcgtaccgcccaa

SEQ ID NO: 498264 - DNA, 75 bp, synthetic construct
  source 1..75: mol_type = other DNA
caaacaccagaagttaatgatgtagtagatgagagagaattctcagctgttcaagtctcaaccatgtgggatagc

SEQ ID NO: 498265 - DNA, 75 bp, synthetic construct
  source 1..75: mol_type = other DNA
gagccggaaatagttgcgcggcgtattcgctgggcgcgtccagagcagaacaacgcggcgattatgccgaggctg

SEQ ID NO: 498266 - DNA, 75 bp, synthetic construct
  source 1..75: mol_type = other DNA
atctgggcggaacaccgggcagagttctgtgccaatgctcacctgaaaggatggaagccgcctcatgaacgcgaa

SEQ ID NO: 498267 - DNA, 75 bp, synthetic construct
  source 1..75: mol_type = other DNA
tccgctgccaggcatgacactcaatgaacttaatggtttgctcaacgatgcattagctccagtgagcgaacgctg

SEQ ID NO: 498268 - DNA, 75 bp, synthetic construct
  source 1..75: mol_type = other DNA
ggtgagttcggcatgacgccagccagtcgctcgaaagtgaatgcaaaaggccctgatgcggttgacccgctggcc

SEQ ID NO: 498269 - DNA, 75 bp, synthetic construct
  source 1..75: mol_type = other DNA
ctgcaaccctggctgtccgggaccgcccgccaacccttcctcgcatcgccgcaggttcgaaaactttttttggga

SEQ ID NO: 498270 - DNA, 75 bp, synthetic construct
  source 1..75: mol_type = other DNA
ctcagcgttggtgtatatcgaaaaatatacgggcaatgcaccgaagttaacggcgtttgatcagccagctgttca

SEQ ID NO: 498271 - DNA, 75 bp, synthetic construct
  source 1..75: mol_type = other DNA
ggcgatgattgaacgttgccgtcgtcatattgacgcttacaaagcgccaacgccagttgacgtgattgaaggtga

SEQ ID NO: 498272 - DNA, 75 bp, synthetic construct
  source 1..75: mol_type = other DNA
gagcatagcgagctgtggttccagtgctttaactttggttcactggtggcattaaaagcagaggacgctgcatga

SEQ ID NO: 498273 - DNA, 75 bp, synthetic construct
  source 1..75: mol_type = other DNA
cggttattgcaggagttgctcaataacgtctgtaaacacgccgaagccagcgaagtgacgattatcctgcgccag

SEQ ID NO: 498274 - DNA, 75 bp, synthetic construct
  source 1..75: mol_type = other DNA
cgtccagatggaacgctacggccagaagctggcgcagactcataaagtatcaccggataggcatccttattatct

SEQ ID NO: 498275 - DNA, 75 bp, synthetic construct
  source 1..75: mol_type = other DNA
ctatgaaccccgtattttctatagcgtggatacccctgccccggatattcaacttctgtccaacggccattatca

SEQ ID NO: 498276 - DNA, 75 bp, synthetic construct
  source 1..75: mol_type = other DNA
caatgttctcgataaaatcgtagttaacacccccgacacgtccgtaaatttactggttaatggttggctgcttta

SEQ ID NO: 498277 - DNA, 75 bp, synthetic construct
  source 1..75: mol_type = other DNA
aaggagcgtggatgggctatgaacgcaagcggggaaaactggcgttactgaacagctggttgcgccatcccggaa

SEQ ID NO: 498278 - DNA, 75 bp, synthetic construct
  source 1..75: mol_type = other DNA
tcaatcagcagcttgccgccagccagctgtccgtcagtaacagcatcgcgggcctgcgtttattgagtgaaacgg

SEQ ID NO: 498279 - DNA, 75 bp, synthetic construct
  source 1..75: mol_type = other DNA
gcgcagcagcataccgggtaataacccctatactatgatgtcttcggatatctatcaggatctctttggggaagg

SEQ ID NO: 498280 - DNA, 75 bp, synthetic construct
  source 1..75: mol_type = other DNA
catatcgatgcatacaaagcgccgacacctgtagacgtgatcgaaggtgacattcgcgatatcgctattgaaaac

SEQ ID NO: 498281 - DNA, 75 bp, synthetic construct
  source 1..75: mol_type = other DNA
tcatcgttctgctgatgaacataccatcattggctccggttctgtttctccgtaagactcaaaagaacgtgaagg

SEQ ID NO: 498282 - DNA, 75 bp, synthetic construct
  source 1..75: mol_type = other DNA
ttgaccattgtgattattcagagtggattggcactgatgaccattagcccgtcgctaaacagtcagttcaacgtg

SEQ ID NO: 498283 - DNA, 75 bp, synthetic construct
  source 1..75: mol_type = other DNA
cgatgagtcgttgcggttctacccgttcccgacggtaaatgcgagcaaacaggcgacggctttctcttcgtcaca

SEQ ID NO: 498284 - DNA, 75 bp, synthetic construct
  source 1..75: mol_type = other DNA
gcatattcacggtggtgacgcctctaaccgtatttgcgcttgctgcgagttgcatatggatattcgtccgttgcc

SEQ ID NO: 498285 - DNA, 75 bp, synthetic construct
  source 1..75: mol_type = other DNA
ccatggggctgctgctgaacataccatcactggcaccagtgctgtttcttcgtaaggcatcaaagaatgtgaaag

SEQ ID NO: 498286 - DNA, 75 bp, synthetic construct
  source 1..75: mol_type = other DNA
cgccggagaacggcccacagggggtattcctgctgaccggccccagcggcaccggtaaaaccgaaactgcgctca

SEQ ID NO: 498287 - DNA, 75 bp, synthetic construct
  source 1..75: mol_type = other DNA
catgcgtggccgcccgctggttgtcctgattgacggtgtgcgcctcaactcttcacgttccgacagccgacaact

SEQ ID NO: 498288 - DNA, 75 bp, synthetic construct
  source 1..75: mol_type = other DNA
ggcattagttttttgggtaaatggtttgaatcggaatcagctaaagctgagcgccacgccgaaaatcttcgccgg

SEQ ID NO: 498289 - DNA, 75 bp, synthetic construct
  source 1..75: mol_type = other DNA
gaacgcttcgtacaacctggtacgcaggtttacgatctgggctgttctttgggcgcggcgacgctctcggtgcgt

SEQ ID NO: 498290 - DNA, 75 bp, synthetic construct
  source 1..75: mol_type = other DNA
cgtcgattttatcagtagttggctgcttccggtgggaacactcagcttcagcgttgagaacctcttcgaccgtga

SEQ ID NO: 498291 - DNA, 75 bp, synthetic construct
  source 1..75: mol_type = other DNA
ttttatcgactacacgcagcaacagaagattgctgccgggaaggcgatatctgccgacgccattcctggtggttc

SEQ ID NO: 498292 - DNA, 75 bp, synthetic construct
  source 1..75: mol_type = other DNA
caccgcggatctgctcggcagttatcagcttccggtgggtacactcagcttcagcattgaaaacctcttcgaccg

SEQ ID NO: 498293 - DNA, 75 bp, synthetic construct
  source 1..75: mol_type = other DNA
aaaaaaaacatgcgaaaaaaattgcgtaacctatttgcatggagggcaatatggatttggacataataataacat

SEQ ID NO: 498294 - DNA, 75 bp, synthetic construct
  source 1..75: mol_type = other DNA
cgcaacagcctcgttatgtcatgaagctggaccagatgaaaccgggcgccgcctggcaatggttaccaatcaact

SEQ ID NO: 498295 - DNA, 75 bp, synthetic construct
  source 1..75: mol_type = other DNA
agtggtttaagcaaactgctggagccattgttgtttgccgctaccagcgacagccagttaagtaaaacggaaatc

SEQ ID NO: 498296 - DNA, 75 bp, synthetic construct
  source 1..75: mol_type = other DNA
acgtcgggaccgttcgcgaagtcgacgcggcggacgtgggacagagtgatggccgcaactatggacttatttaca

SEQ ID NO: 498297 - DNA, 75 bp, synthetic construct
  source 1..75: mol_type = other DNA
attgcagctgacgttcccgccagtcaggtaggcgtcgccaggacagtaaaccccgatgaagtcgggcagatggac

SEQ ID NO: 498298 - DNA, 75 bp, synthetic construct
  source 1..75: mol_type = other DNA
tttgtctcgaagttagagacaaaaaatgtctccaaattagagacactcaatgtctcgaagttagagacacacaaa

SEQ ID NO: 498299 - DNA, 75 bp, synthetic construct
  source 1..75: mol_type = other DNA
gtattgttgtcagcgccaggttgctggggtttggctaccagcgattaatgccttcttttgctggcgtacgcttcg

SEQ ID NO: 498300 - DNA, 75 bp, synthetic construct
  source 1..75: mol_type = other DNA
gtcgccgctggtggtgcacaacaatctgcaaatcgatctcaatgagccggacctctttctcgacagcgactctct

SEQ ID NO: 498301 - DNA, 75 bp, synthetic construct
  source 1..75: mol_type = other DNA
agaacgtgttttacgcgtggtgcgtcatcgtggtttccacgtctgctcaatgaatatggccgccgccagcgatgc

SEQ ID NO: 498302 - DNA, 75 bp, synthetic construct
  source 1..75: mol_type = other DNA
ggcgaaactgctgcgtaacgaaacgttgaccagtctgccgaagaatctcgaaccggttttttataacgccgcaca

SEQ ID NO: 498303 - DNA, 75 bp, synthetic construct
  source 1..75: mol_type = other DNA
agataagctcttttcgtcactcttagatcagcccgcgcaggcggcgctatggcacgataaacaaggccatctttc

SEQ ID NO: 498304 - DNA, 75 bp, synthetic construct
  source 1..75: mol_type = other DNA
aaatgggtaacgacggctggcacagttttctggcgttaaatgatgaatccgccagcgtagatgccagtttcgatt

SEQ ID NO: 498305 - DNA, 75 bp, synthetic construct
  source 1..75: mol_type = other DNA
aacaacgatattgcgatggctggtggtcagatcaccgaccagaacacggatggaaatatcacgctaagcggcacc

SEQ ID NO: 498306 - DNA, 75 bp, synthetic construct
  source 1..75: mol_type = other DNA
ggtgacgcatttattggttgcttttcccattattatgttcaaagcggtgatgttgaagccgctttgaaaaaagcc

SEQ ID NO: 498307 - DNA, 75 bp, synthetic construct
  source 1..75: mol_type = other DNA
acggtgaagtggcggcaaccaaagtgggcgctctgtctaaaggccaacttaaagagttcctcgacgccaacctgg

SEQ ID NO: 498308 - DNA, 75 bp, synthetic construct
  source 1..75: mol_type = other DNA
aacgaaccaaaacccccttcaggggtacccccaacgccgaagcatttcgacaagcaggggaaatactggtttaaa

SEQ ID NO: 498309 - DNA, 75 bp, synthetic construct
  source 1..75: mol_type = other DNA
tattatctatagtttgttaaatattattgagtcactaaaagataaaagttcaacaacggatgctactttacattc

SEQ ID NO: 498310 - DNA, 75 bp, synthetic construct
  source 1..75: mol_type = other DNA
cgtatacctcacgttatatcggctcactggttgcggatttccaccgtaacctactgaaaggcggtatttatctct

SEQ ID NO: 498311 - DNA, 75 bp, synthetic construct
  source 1..75: mol_type = other DNA
aatgcggcttccagcatatggctgacaaaagcacaatatcaagtatctcctcagaatggaaaatactctccagcc

SEQ ID NO: 498312 - DNA, 75 bp, synthetic construct
  source 1..75: mol_type = other DNA
tcgtggatggtcagcgccagatggtggcgaataacgaatatgttcacgacgcgattgtgctcaacagtgccacgg

SEQ ID NO: 498313 - DNA, 75 bp, synthetic construct
  source 1..75: mol_type = other DNA
acgtcgggaccgtgcgggaagtcgacgcggcggatgtgggccagagtgatggccgcaactatgggatgattttca

SEQ ID NO: 498314 - DNA, 75 bp, synthetic construct
  source 1..75: mol_type = other DNA
ctctcggcagatactgtgaaccgaattaccggacaggagttttcgaaagtgcgtctgatggcgggttacgacggt

SEQ ID NO: 498315 - DNA, 75 bp, synthetic construct
  source 1..75: mol_type = other DNA
gcggcatcttatggataacgtagctggtcaatgtggcgcaacatggcaatttgtggacggtcaacgccagatggt

SEQ ID NO: 498316 - DNA, 75 bp, synthetic construct
  source 1..75: mol_type = other DNA
gcggcatctaatggataacgtagccgggcaatgtggcacaacatggcaattcgtggacggtcagcgccagatggt

SEQ ID NO: 498317 - DNA, 75 bp, synthetic construct
  source 1..75: mol_type = other DNA
tcgtggacggtcaacgccagatggtggagaataatgaatatgttcacaaagcgattgtgctcaacagcgctaccg

SEQ ID NO: 498318 - DNA, 75 bp, synthetic construct
  source 1..75: mol_type = other DNA
ggcttattgataccgggatgatcgaaatggaagagagcgccctgaaagaggcaatgtcgatgatccccatgaaac

SEQ ID NO: 498319 - DNA, 75 bp, synthetic construct
  source 1..75: mol_type = other DNA
taagcgcgaaggtcgaaccagaggcgcgggtgctggcaatgctcaagaatcgcctgccgttcgcggtgccggact

SEQ ID NO: 498320 - DNA, 75 bp, synthetic construct
  source 1..75: mol_type = other DNA
gaatgttctacttaatggcgattttgaattattaaatcaattagttgaaagcaatgaaaaagaattgaatgattg

SEQ ID NO: 498321 - DNA, 75 bp, synthetic construct
  source 1..75: mol_type = other DNA
cccactctcgattaattattatcaataaagaaaatggcggtgtttcgtctgccaggaatacaggtatccgcaagg

SEQ ID NO: 498322 - DNA, 75 bp, synthetic construct
  source 1..75: mol_type = other DNA
cgaatttcagaaattgaagactataattcacacaatacagtaaggctggatgttaaaggaatgaaggaattattg

SEQ ID NO: 498323 - DNA, 75 bp, synthetic construct
  source 1..75: mol_type = other DNA
tccaatggaagctgtcaagactaacgttattggaactgataacgtacttgaagctgcaattgcaaacaaagtttc

SEQ ID NO: 498324 - DNA, 75 bp, synthetic construct
  source 1..75: mol_type = other DNA
cctctgttcattcagcagattcaaacaaatcaaccattaactataacagaccctgaaatgactagattcatgatg

SEQ ID NO: 498325 - DNA, 75 bp, synthetic construct
  source 1..75: mol_type = other DNA
cggataaaagtgccacggtacacatagacgccggaactatggagaagatcgaacgctatcagcagttcatcaaag

SEQ ID NO: 498326 - DNA, 75 bp, synthetic construct
  source 1..75: mol_type = other DNA
gaaaagatgctcgatgccctagacgatcaggaactggttaatctggtcgccgaacgcagcaaccagaagctgcac

SEQ ID NO: 498327 - DNA, 75 bp, synthetic construct
  source 1..75: mol_type = other DNA
gaaaagatgctcgatgccctgaacgatcaggagctggttaaactggtagccgaacgcagcaaccaaccgctgcat

SEQ ID NO: 498328 - DNA, 75 bp, synthetic construct
  source 1..75: mol_type = other DNA
tataaaaaggttagattccatatagggtgcttgtttataagaaaacaacttctggaagagaataatctttttttt

SEQ ID NO: 498329 - DNA, 75 bp, synthetic construct
  source 1..75: mol_type = other DNA
agtatctagtcgagcaattaacaaaaacaaatatcaacgatgtgaattttacaccgtttaaatatcagttgcgtc

SEQ ID NO: 498330 - DNA, 75 bp, synthetic construct
  source 1..75: mol_type = other DNA
atgccagagaacaacagcagaaaaccggataaaagtgcaacagtgcacatagacgccggaactatggagaagctc

SEQ ID NO: 498331 - DNA, 75 bp, synthetic construct
  source 1..75: mol_type = other DNA
aacagtttgaagcattatgcagtagggaagagatgttggtcgcggaagatcaaggccgttattatcgtatacctg

SEQ ID NO: 498332 - DNA, 75 bp, synthetic construct
  source 1..75: mol_type = other DNA
cacttcgtgccgctctgtatcgccgtgccgtagcatgtgcctggctggctctcagcagccagcaggaatgttatt

SEQ ID NO: 498333 - DNA, 75 bp, synthetic construct
  source 1..75: mol_type = other DNA
gaaattgcctgcgcgttgctttcggatctgatggagtcggggccgcttaaagcctgtccggttctctcactgctc

SEQ ID NO: 498334 - DNA, 75 bp, synthetic construct
  source 1..75: mol_type = other DNA
ccggcctgacgctcgctgaacttgaagatgccatagcccgcgagctggaagggttctatctgcgccagcatgggc

SEQ ID NO: 498335 - DNA, 75 bp, synthetic construct
  source 1..75: mol_type = other DNA
aagaggacctgccctataccaacagcttattaatcattagcttaatattgatggtcgtggcagtgatcgtcatgg

SEQ ID NO: 498336 - DNA, 75 bp, synthetic construct
  source 1..75: mol_type = other DNA
aggcgacccgggcgttgctggaatccgccagggaacgcgggctggaagttgaaggcgagttattccggtgcaacc

SEQ ID NO: 498337 - DNA, 75 bp, synthetic construct
  source 1..75: mol_type = other DNA
ctcagcagccagcaggaatgttattccggtctgacgctcgctgaacttgaagatgctatagcccgcgagctggaa

SEQ ID NO: 498338 - DNA, 75 bp, synthetic construct
  source 1..75: mol_type = other DNA
taacggagatatttttgtacaaaaagctccagctgcaactatcgaaacattagcaactgctttaaaggatttact

SEQ ID NO: 498339 - DNA, 75 bp, synthetic construct
  source 1..75: mol_type = other DNA
tgggaatttcaaaagctatgatggaaaaagtcatggttgcgaaatcgcgtaatgttgactgcaacaaaacagtaa

SEQ ID NO: 498340 - DNA, 75 bp, synthetic construct
  source 1..75: mol_type = other DNA
ccattatttgttgatcttattagagcgggcaagccactcacaataactgatcctaatatgacccgctttatgatg

SEQ ID NO: 498341 - DNA, 75 bp, synthetic construct
  source 1..75: mol_type = other DNA
aaacaaaaggcatggaaatcgcctgcgccctgctttcagacctgatggaatccggccctctaatgtcctgtcccg

SEQ ID NO: 498342 - DNA, 75 bp, synthetic construct
  source 1..75: mol_type = other DNA
gctcctgcggcaacaattcaaacattagccattgcacttaaggaattgctaaatgcccatgaacatccaatcaat

SEQ ID NO: 498343 - DNA, 75 bp, synthetic construct
  source 1..75: mol_type = other DNA
attcacataatacacaaaggcttaatgttaatggaatgaaagaactactaatgaaactcaaattatttaataata

SEQ ID NO: 498344 - DNA, 75 bp, synthetic construct
  source 1..75: mol_type = other DNA
ctaaagtaatatccggaccgtatgaagaatacggaaaatggtgggtggatgtagaatatatttcctggggagttc

SEQ ID NO: 498345 - DNA, 75 bp, synthetic construct
  source 1..75: mol_type = other DNA
ttgaaagcctgaaagaacgtccgtttaaattacgcctcagcattatcactggcgatcgtcctgtactggttctgc

SEQ ID NO: 498346 - DNA, 75 bp, synthetic construct
  source 1..75: mol_type = other DNA
gaaccaggtcacgcagataacaccgccactctcaaactgaaaaagacagcaccgttctctgccctgttgtctgtt

SEQ ID NO: 498347 - DNA, 75 bp, synthetic construct
  source 1..75: mol_type = other DNA
caacaaaacgctgcagcaacactggcacaggctcaggccgataaagaggcccaacaaatagtagctgatgaaaaa

SEQ ID NO: 498348 - DNA, 75 bp, synthetic construct
  source 1..75: mol_type = other DNA
caacaaaacgctgcagcaacactggcacaggctcaggcagataaagaatcacaacagatagccgctgatgaaaaa

SEQ ID NO: 498349 - DNA, 75 bp, synthetic construct
  source 1..75: mol_type = other DNA
ccgggaaaacaagactgatgtttgactcaaaggagcaggcactggaagttaaggaagggtacaaatttttaacat

SEQ ID NO: 498350 - DNA, 75 bp, synthetic construct
  source 1..75: mol_type = other DNA
gatgaaggcacccgctgctttatcgatgctgataatatgcgagccgtcagtgtgcttaacctgggtactattgat

SEQ ID NO: 498351 - DNA, 75 bp, synthetic construct
  source 1..75: mol_type = other DNA
tgtcgaagcgaagaccaaagatattatgccagtggcatttgaatttaaatgcgttccgtttgaaggcctgaaaga

SEQ ID NO: 498352 - DNA, 75 bp, synthetic construct
  source 1..75: mol_type = other DNA
agcagtgcaggaagaaatggctaacgaatttcgtgatctgcttgttgaaaaattcaaagacagcaaagtaaaaac

SEQ ID NO: 498353 - DNA, 75 bp, synthetic construct
  source 1..75: mol_type = other DNA
tgaagcaaaccagaccgctgattttgaagataatgacttcagcggcaaacgctccctgatggagtctgtcgaagc

SEQ ID NO: 498354 - DNA, 75 bp, synthetic construct
  source 1..75: mol_type = other DNA
tttccactgccagcatcgatgattttacccgttattctaaagatcttgcagatgaaggcacccgctgctttatcg

SEQ ID NO: 498355 - DNA, 75 bp, synthetic construct
  source 1..75: mol_type = other DNA
ttgttcgcaccttccttagacgcaaccgcaattaatcaaatccatgcccttatttctgctcagagtgttaatgaa

SEQ ID NO: 498356 - DNA, 75 bp, synthetic construct
  source 1..75: mol_type = other DNA
gcggatgcacgccggctgaaaaggcagcgatggaagagaaccgccgcctggcgtcagagtcgcaaaagaaggcca

SEQ ID NO: 498357 - DNA, 75 bp, synthetic construct
  source 1..75: mol_type = other DNA
gtccggacgtggatttacaccgccagcgcagtgaagagtattaccacgaatatatcaggcagcagacacgtttat

SEQ ID NO: 498358 - DNA, 75 bp, synthetic construct
  source 1..75: mol_type = other DNA
ctggcgtatgcagagaaggggaattgatccgtttaaagtggagaaaaccccttccgccgtagacgaaaggggcta

SEQ ID NO: 498359 - DNA, 75 bp, synthetic construct
  source 1..75: mol_type = other DNA
cacaagtgcaagcagataaagaagcccagcaaacagttgctgatcagagagctttatctggtgttaacaccccaa

SEQ ID NO: 498360 - DNA, 75 bp, synthetic construct
  source 1..75: mol_type = other DNA
atgtcatccattgatgccgctgtcgttgttgacgttacgcgtctccagcgggtctttgcccggcttcagtttgtg

SEQ ID NO: 498361 - DNA, 75 bp, synthetic construct
  source 1..75: mol_type = other DNA
taaagtgatggctagcaatgttgctgcggttgccgggaataaagtagttgcttatccaaaagttaacaataaaga

SEQ ID NO: 498362 - DNA, 75 bp, synthetic construct
  source 1..75: mol_type = other DNA
cgttgatatccggccggaaaaagtggcagaaacggagagtctgaaacagtacgcctgccgtcattttgccgaacg

SEQ ID NO: 498363 - DNA, 75 bp, synthetic construct
  source 1..75: mol_type = other DNA
tcgcagaagaaggccaacgacgcgctgtttaagggcctggagcagcagcaagacaatctggaagccgacgcccga

SEQ ID NO: 498364 - DNA, 75 bp, synthetic construct
  source 1..75: mol_type = other DNA
aatctggcggatttgcagagccaggcgagcggcgcaaaagggcagatggaagcaattcaggcggcaaaccagctt

SEQ ID NO: 498365 - DNA, 75 bp, synthetic construct
  source 1..75: mol_type = other DNA
cagctgatgagattaaggcactgcaaaatgccgacaaaaacaactcagaagcccgtaagaaagcaaacgatgctg

SEQ ID NO: 498366 - DNA, 75 bp, synthetic construct
  source 1..75: mol_type = other DNA
ccaggcgaactccacaattaataggctcctgcaggcgcaggacacgctgaactactacaagaatcaggctggtag

SEQ ID NO: 498367 - DNA, 75 bp, synthetic construct
  source 1..75: mol_type = other DNA
aacagttctgaggcacgtaaaaaggccaatgacgccgtgtttaaggctctcgacgaacagcaggaaacactgcaa

SEQ ID NO: 498368 - DNA, 75 bp, synthetic construct
  source 1..75: mol_type = other DNA
atggcattaccggcgacagccggtatccctgtaatcgatggtactaatgtggtgcagaccacaatcagcgcagtc

SEQ ID NO: 498369 - DNA, 75 bp, synthetic construct
  source 1..75: mol_type = other DNA
atgcataactgtggtcgggaattaatgctggctattgttgaaaatcactggcaggacgcgcatttcgacgccttt

SEQ ID NO: 498370 - DNA, 75 bp, synthetic construct
  source 1..75: mol_type = other DNA
caatgctgcaggccttgcggtgcaggcacttagcgactggcgtatccgttcaagtggggaaggtggattactgct

SEQ ID NO: 498371 - DNA, 75 bp, synthetic construct
  source 1..75: mol_type = other DNA
ggcttcgtcggttatgcggtaatgaacctcgcggtaaacttctggttgaccaataaagcattctgccaaccatgg

SEQ ID NO: 498372 - DNA, 75 bp, synthetic construct
  source 1..75: mol_type = other DNA
caggggacaggtcaggacctgatggccgggggtaacgcaaccgtcaaggccaccttcggtaaagactccagtgcg

SEQ ID NO: 498373 - DNA, 75 bp, synthetic construct
  source 1..75: mol_type = other DNA
tttacccgttattctaaagatcttgcagatgaaggcacccgctgctttatcgatgctgataatatgcgtgccgtc

SEQ ID NO: 498374 - DNA, 75 bp, synthetic construct
  source 1..75: mol_type = other DNA
agctataccgctacaccagagcagcttgaacaagcgaaatcctggtataaccagatgatggattccgcagaaaaa

SEQ ID NO: 498375 - DNA, 75 bp, synthetic construct
  source 1..75: mol_type = other DNA
gattgataccactctgaccggaaacgcattatcaagctcatccaagcttattataccgctgtctggtgatttatc

SEQ ID NO: 498376 - DNA, 75 bp, synthetic construct
  source 1..75: mol_type = other DNA
atgtacatgatgaccaaaaacgtcaagttcctggccggttttgccatcatctctgtatttattgctgtgggtatg

SEQ ID NO: 498377 - DNA, 75 bp, synthetic construct
  source 1..75: mol_type = other DNA
gtaacaccacggttaaggcgaccttcggtaaggactccagtgttgttaaatgggttgttctggctgaagttctgg

SEQ ID NO: 498378 - DNA, 75 bp, synthetic construct
  source 1..75: mol_type = other DNA
atgaatacttctgttagtgttccgggggcttttacgcctgttaaaaagaaatcatcttttttctctaaactgaac

SEQ ID NO: 498379 - DNA, 75 bp, synthetic construct
  source 1..75: mol_type = other DNA
gatgaccaagaacgttaagttcctcgccggttttgccattatctccgtgtttattaccgtgggaatggccgtcgt

SEQ ID NO: 498380 - DNA, 75 bp, synthetic construct
  source 1..75: mol_type = other DNA
atgaatgctattataagtgttcagggtgcttctgcgcccgccaaaaagaaatcatcttttttctctaaactgaac

SEQ ID NO: 498381 - DNA, 75 bp, synthetic construct
  source 1..75: mol_type = other DNA
gcttccggtagtcaggacctgatggcaagtggtaactccacggttaaggcgaccttcggtaaggactccagtgtt

SEQ ID NO: 498382 - DNA, 75 bp, synthetic construct
  source 1..75: mol_type = other DNA
aagacagcaccgttctctgctctgttgtctgttaacggcgagcgtaactcccagaagtcactggcagaatggatc

SEQ ID NO: 498383 - DNA, 75 bp, synthetic construct
  source 1..75: mol_type = other DNA
gccgatattttaatcctcatcatcttgttaattcagtgcattctggggttaaccactattcccttttcagcacag

SEQ ID NO: 498384 - DNA, 75 bp, synthetic construct
  source 1..75: mol_type = other DNA
gatgctggataaacgcgggatggtactgtggtcgaatctgtttcatatcggtattctggggatcttctttggtca

SEQ ID NO: 498385 - DNA, 75 bp, synthetic construct
  source 1..75: mol_type = other DNA
tggcgatggtgctcggcggtatttgcggtgtgttgacgttgattggcggcgcaggactgctgtggcgcaggctga

SEQ ID NO: 498386 - DNA, 75 bp, synthetic construct
  source 1..75: mol_type = other DNA
ccgatttaaattggttaatgatacctacgggcatttaatcggcgatgtagtattacgcaccctggcaacttactt

SEQ ID NO: 498387 - DNA, 75 bp, synthetic construct
  source 1..75: mol_type = other DNA
agcagtgcaggaggaaatggctaacgaatttcgtgatctgcttgttgagaaattcaaggacagcaaagtagaaac

SEQ ID NO: 498388 - DNA, 75 bp, synthetic construct
  source 1..75: mol_type = other DNA
gaatttcgtgatctgcttgttgagaaattcaaggacagcaaagtagaaacctttattgggactttcaccgcctga

SEQ ID NO: 498389 - DNA, 75 bp, synthetic construct
  source 1..75: mol_type = other DNA
tctgcgcattattcagctggaagcggtgcaggaagaaatggctaacgaatttcgtgatctgcttgttgagaaatt

SEQ ID NO: 498390 - DNA, 75 bp, synthetic construct
  source 1..75: mol_type = other DNA
attttgaagacaatgacttcagcggcaaacgctccctgatggagtctgtcgaagcgaagaccaaagacattatgc

SEQ ID NO: 498391 - DNA, 75 bp, synthetic construct
  source 1..75: mol_type = other DNA
accaaagacattatgccagtggcatttgaatttaaatgcattccgtttgaaggtctgaaagaacgtccgtttaaa

SEQ ID NO: 498392 - DNA, 75 bp, synthetic construct
  source 1..75: mol_type = other DNA
cgactggtgcatgtgtggagcgcgccgtttgagtactttactcgtcggtatcagattgtgcgttcgcggcgataa

SEQ ID NO: 498393 - DNA, 75 bp, synthetic construct
  source 1..75: mol_type = other DNA
ggccgactaccttgtgggctttgatgctaatggtgacgccattcaggcaacaaaagcggctgcggcggtccgtaa

SEQ ID NO: 498394 - DNA, 75 bp, synthetic construct
  source 1..75: mol_type = other DNA
ttctctgttggggcagatcgtacagccgtggttctacaatcagttgcgtaccgaagaacagttgggctatgccgt

SEQ ID NO: 498395 - DNA, 75 bp, synthetic construct
  source 1..75: mol_type = other DNA
gatatccacattgaaacctatgaaaaaacaatgtcgatccgttttcgcatcgacggcgttttgcggacaatttta

SEQ ID NO: 498396 - DNA, 75 bp, synthetic construct
  source 1..75: mol_type = other DNA
attgtcgcattcgattctgatctgaaaggtattgatactgctactaattcaatttttattcatgattgtgatttt

SEQ ID NO: 498397 - DNA, 75 bp, synthetic construct
  source 1..75: mol_type = other DNA
caatcgtacaagccaggactggcctgcaaacctatatggcacaggtctatggctggatgaccgttggcctgttgt

SEQ ID NO: 498398 - DNA, 75 bp, synthetic construct
  source 1..75: mol_type = other DNA
gttcgtttcacgccagcccacgaacgtttccacctggcattatgttcgccgggagacgtctctcagctctggatg

SEQ ID NO: 498399 - DNA, 75 bp, synthetic construct
  source 1..75: mol_type = other DNA
caccatgattcgcgtgccggttgagcatacgctggatgcggttaatattgccgatcggtacgatgctaaagcagt

SEQ ID NO: 498400 - DNA, 75 bp, synthetic construct
  source 1..75: mol_type = other DNA
gaattccggtggtgagccgttttcgatggttcaggtgcatcgtctgtttacaccggtagctgtcagtcactcact

SEQ ID NO: 498401 - DNA, 75 bp, synthetic construct
  source 1..75: mol_type = other DNA
cagaaattgaaaaatatgggtgagcagattgatacccgcgacacgtcgaacctgcgcaaatattccattcttggt

SEQ ID NO: 498402 - DNA, 75 bp, synthetic construct
  source 1..75: mol_type = other DNA
acctcgaatctgcgtaaatactccattcttggcgcattaaccctgtatctggacttcatcaacctgttcctgatg

SEQ ID NO: 498403 - DNA, 75 bp, synthetic construct
  source 1..75: mol_type = other DNA
tatgctgtttatggcgttaatcggcattgtgctggcatcgctggtcaacttctggctgaaaagcgaagcattgat

SEQ ID NO: 498404 - DNA, 75 bp, synthetic construct
  source 1..75: mol_type = other DNA
ctgcttttcaccaaccgcatctttttaattggtctggtaatagcgcaattagctctggtaattgtgttatcagcg

SEQ ID NO: 498405 - DNA, 75 bp, synthetic construct
  source 1..75: mol_type = other DNA
agcactggttattgtgttatcagcgatgattcaaaagctgagcgcaggtgtaacgacgatgctctttatgcttta

SEQ ID NO: 498406 - DNA, 75 bp, synthetic construct
  source 1..75: mol_type = other DNA
cgaggcccgctgcgtccggcaatttcaccgctcagtacatgcgtttacgctgcgtcgatgcacagcctcatcatt

SEQ ID NO: 498407 - DNA, 75 bp, synthetic construct
  source 1..75: mol_type = other DNA
gacaataaatttaccatgccgtatatgtgggcaaccactggaattggctacaacgttgataaagtcaaagcagtg

SEQ ID NO: 498408 - DNA, 75 bp, synthetic construct
  source 1..75: mol_type = other DNA
tctgggtgcctggtacggcggcgcagggcgaggctgtggttgaagatagcgcgcttgatttacagcactgggaaa

SEQ ID NO: 498409 - DNA, 75 bp, synthetic construct
  source 1..75: mol_type = other DNA
cgatatttgtcaggtgaaaaaaggggaaaaaggaattagccactttattaccgaacatattgcgccattctatga

SEQ ID NO: 498410 - DNA, 75 bp, synthetic construct
  source 1..75: mol_type = other DNA
tgcagcccatgaacgcacaggaatatgaagatatccgtgctgcgggaagcgatatgcgccgtaatctcactcacg

SEQ ID NO: 498411 - DNA, 75 bp, synthetic construct
  source 1..75: mol_type = other DNA
gaaacgcgggaatatatttctacatcaactgaatatctcgctgtcggcgtcggtatcccggcatgttcttgttta

SEQ ID NO: 498412 - DNA, 75 bp, synthetic construct
  source 1..75: mol_type = other DNA
ttacatgagtcacagctgcccggaccggaaatgaacctgcgggagttgatccataagatgcggaattcagttgct

SEQ ID NO: 498413 - DNA, 75 bp, synthetic construct
  source 1..75: mol_type = other DNA
gactttaaacagaatcgaaaaatcaaaaatatgcccccaaaggggcggcattcgggcttacttgctgctctgaag

SEQ ID NO: 498414 - DNA, 75 bp, synthetic construct
  source 1..75: mol_type = other DNA
tcttcccagtacatcaatgacctggcaaatggcgatatttgcgtagctatcggctgggcgggtgatgtctggcag

SEQ ID NO: 498415 - DNA, 75 bp, synthetic construct
  source 1..75: mol_type = other DNA
cccggatacggtggcaaattttgaaaaagagaccggtatcaaagtcgtctacgatgtttttgattccaacgaagt

SEQ ID NO: 498416 - DNA, 75 bp, synthetic construct
  source 1..75: mol_type = other DNA
tgcgaaactgttcactctgaaagtacaggacccgaaaatagaccgtgtacgcacccgcgcatggaccaaagtgaa

SEQ ID NO: 498417 - DNA, 75 bp, synthetic construct
  source 1..75: mol_type = other DNA
tccaggccatgaacgcacaggaatatgaagatatccgtgctgcgggaagcgatatgcgccgtaatctcactcacg

SEQ ID NO: 498418 - DNA, 75 bp, synthetic construct
  source 1..75: mol_type = other DNA
tacagaccatgaacgcacaggaatatgaagatatccgggctgccggaagtgatgaacgccgtgagctgactcacg

SEQ ID NO: 498419 - DNA, 75 bp, synthetic construct
  source 1..75: mol_type = other DNA
gcgcgatgtgcaaaaacagttgggcgctgatggcacagagtggtgtcgtaacaaagatgtgctggttgagaaaaa

SEQ ID NO: 498420 - DNA, 75 bp, synthetic construct
  source 1..75: mol_type = other DNA
ttcggcgctgacgggtcttacgctttccagtatattcattgtctataccgctgcttctatcgccagtactttcgt

SEQ ID NO: 498421 - DNA, 75 bp, synthetic construct
  source 1..75: mol_type = other DNA
cgccgcgctgatgtggccgctgtccgcgtcttcctttggaattatcaatatcgtcgctgtgctgtgacaggtaag

SEQ ID NO: 498422 - DNA, 75 bp, synthetic construct
  source 1..75: mol_type = other DNA
gtcatctgccagcatggaggggatgctgagttgttatcgacaacaatataaaggactcggcattatttatccgaa

SEQ ID NO: 498423 - DNA, 75 bp, synthetic construct
  source 1..75: mol_type = other DNA
tctgacggcggaacaacgcaaaattgcgcctggtctgtacaaggttttaagttcgattgccgacaaattgcaggc

SEQ ID NO: 498424 - DNA, 75 bp, synthetic construct
  source 1..75: mol_type = other DNA
gcgcgtgcgggctgttgtacatcgtgcagcgaactctgccgagggtggctatcgtaccgggcatatggcgaagct

SEQ ID NO: 498425 - DNA, 75 bp, synthetic construct
  source 1..75: mol_type = other DNA
ggcaggaaggtaaattggagggattgcagaaaggtaaagtagaaggtatgcgtgaacaagccattaaaattgctt

SEQ ID NO: 498426 - DNA, 75 bp, synthetic construct
  source 1..75: mol_type = other DNA
taagaaaagctatgaagggctatctggaacaccttggcaacatgccgctggcggaacggattacaaacgctgctg

SEQ ID NO: 498427 - DNA, 75 bp, synthetic construct
  source 1..75: mol_type = other DNA
ttgaagatacggaagttcatgcatggacttccgttattgatgatttgttaagtgatggtgaaacattaatgactg

SEQ ID NO: 498428 - DNA, 75 bp, synthetic construct
  source 1..75: mol_type = other DNA
atcaccagagttgctgaaaaagtacctggatatacagccaaccttccggcggggcttattacagaccttgccagc

SEQ ID NO: 498429 - DNA, 75 bp, synthetic construct
  source 1..75: mol_type = other DNA
taactccgtaagcccatacggcgcgaatattccgttactgatgcaactcggaaacatttatggagcacagaaggg

SEQ ID NO: 498430 - DNA, 75 bp, synthetic construct
  source 1..75: mol_type = other DNA
cgatgcagttcgaccgcccggaagatctggcacgttatccacggaccttgcaagaggactgcgaaaagctgaaca

SEQ ID NO: 498431 - DNA, 75 bp, synthetic construct
  source 1..75: mol_type = other DNA
ttgctggaagtctctgaaaacagcaaacgtgcagtgattctggtagccgcctggcttggcgatgcccgcctgatc

SEQ ID NO: 498432 - DNA, 75 bp, synthetic construct
  source 1..75: mol_type = other DNA
acgcgatgtgcaaaaacagttgggcgctgatggttcagagtggtgtcgtaacaaagatgtagtggtcgataaaaa

SEQ ID NO: 498433 - DNA, 75 bp, synthetic construct
  source 1..75: mol_type = other DNA
cggtgtcgcactacagggccggacaactcgtctcgaaagaggaatttgaggagctacgtgtcggtcgctgtgagt

SEQ ID NO: 498434 - DNA, 75 bp, synthetic construct
  source 1..75: mol_type = other DNA
gaagtcatgagactgctgggccgcggttgctttccgctgttcgggcttgtctggggaatgaacctggcccggcac

SEQ ID NO: 498435 - DNA, 75 bp, synthetic construct
  source 1..75: mol_type = other DNA
agcaaggcgtagccaatgcctggctgtttattcccagcgctatcctgctgggtgcgctgcacggactggagccag

SEQ ID NO: 498436 - DNA, 75 bp, synthetic construct
  source 1..75: mol_type = other DNA
ctgcaaaggttatcgactcggtaacgaagaagcactggcgggggggcacgcggcacatttgcttctaattctgga

SEQ ID NO: 498437 - DNA, 75 bp, synthetic construct
  source 1..75: mol_type = other DNA
attgtcatcgcctcgttggtgaacttctggctgaaaagcgaggcgttgatgtgggtggtgacctatatcggagtg

SEQ ID NO: 498438 - DNA, 75 bp, synthetic construct
  source 1..75: mol_type = other DNA
atgcagactgaagcacaaccgacacggacccggatcctcaatgctgccagagagattttttcagaaaatggattt

SEQ ID NO: 498439 - DNA, 75 bp, synthetic construct
  source 1..75: mol_type = other DNA
cggatatcgggaagcaggtaaagcgattctggccagcgcatttttttgtcctgttttacactattcaccttgcgg

SEQ ID NO: 498440 - DNA, 75 bp, synthetic construct
  source 1..75: mol_type = other DNA
agcgtcatggcacaggcctctacatcgccggacgtgaagtctcacaggctgagtattcagactatcaagctgtga

SEQ ID NO: 498441 - DNA, 75 bp, synthetic construct
  source 1..75: mol_type = other DNA
acaccattcatatcttcggtcaggacatcaccagtcaggacggattgtttcgactggatgagatacgccgggtag

SEQ ID NO: 498442 - DNA, 75 bp, synthetic construct
  source 1..75: mol_type = other DNA
tctaaggcattcattaagaagcacacggtatcgcactacagggctggacaactcgtctcgaaagaggagtttgag

SEQ ID NO: 498443 - DNA, 75 bp, synthetic construct
  source 1..75: mol_type = other DNA
tacgtgtgcgcagttggtgcgtcgtggtgcgaacccggtacgtattcggtggggaaaacccatgtttgcgaacaa

SEQ ID NO: 498444 - DNA, 75 bp, synthetic construct
  source 1..75: mol_type = other DNA
gggcgaatgctgttaagcgccacggctggttacagacctattttgtcctgtctgacaccatgttttatgagcgtt

SEQ ID NO: 498445 - DNA, 75 bp, synthetic construct
  source 1..75: mol_type = other DNA
actgtttgagatgacccttggcgaaacactcttccttaatgccaaattgccaaccggtaaagagtttatgccgcg

SEQ ID NO: 498446 - DNA, 75 bp, synthetic construct
  source 1..75: mol_type = other DNA
cggctggggggtatgcggccattttccggaatgacaggctatgacggcattgtcgcctgtcttcagcaggcaatg

SEQ ID NO: 498447 - DNA, 75 bp, synthetic construct
  source 1..75: mol_type = other DNA
tgaattaatcaatgcgtcggatgccatcagcgtgatggctgcggcgctgaacacacatgatacaggaggcactat

SEQ ID NO: 498448 - DNA, 75 bp, synthetic construct
  source 1..75: mol_type = other DNA
cggacggcaatttccccaacggtattcctaacccgctactgccggaatgccgcgacgacacccgcaatgcggtca

SEQ ID NO: 498449 - DNA, 75 bp, synthetic construct
  source 1..75: mol_type = other DNA
aaaaccatcagcaaacaaagaccggaaacattattactggcgctctcgcctgtgttctcttatgggagttccgaa

SEQ ID NO: 498450 - DNA, 75 bp, synthetic construct
  source 1..75: mol_type = other DNA
atcgatcacctactcggctacatcaacgtcaaaaatctcaccccgctgaagttggtcattaactccggtaacggt

SEQ ID NO: 498451 - DNA, 75 bp, synthetic construct
  source 1..75: mol_type = other DNA
aacacggagccggtggtgcgtctgaacgtggagtccagagcagattctggtctgatggagagtaaaactaaagaa

SEQ ID NO: 498452 - DNA, 75 bp, synthetic construct
  source 1..75: mol_type = other DNA
cagcggcgataccggactgcgcgaagtccagcgtctggcagaagcgaacgactttccccccgtcgatgaaaccaa

SEQ ID NO: 498453 - DNA, 75 bp, synthetic construct
  source 1..75: mol_type = other DNA
cagcggtgataccggactgcgcgaggtccagcgtctggcagaagctaacgactttccccccgtcgatgaaaccaa

SEQ ID NO: 498454 - DNA, 75 bp, synthetic construct
  source 1..75: mol_type = other DNA
cagcggtgataccggactgcgcgatgtccagcgtctggcagaagcaaacgactttccccccgtcgatgaaaccaa

SEQ ID NO: 498455 - DNA, 75 bp, synthetic construct
  source 1..75: mol_type = other DNA
acatcaccaaccagatggtaatttccccaatggtattcctaatccactgctgccagagtgccgccaggataccac

SEQ ID NO: 498456 - DNA, 75 bp, synthetic construct
  source 1..75: mol_type = other DNA
aatttgataaatgaatatatgactgcatatccgtgcagcggagaaatcaatttccgagtacataatgcagaaaat

SEQ ID NO: 498457 - DNA, 75 bp, synthetic construct
  source 1..75: mol_type = other DNA
cagcggggataccggactgcgcgaagtccagcgtctggcagaagccaacgactttccccccgtcgatgaaaccaa

SEQ ID NO: 498458 - DNA, 75 bp, synthetic construct
  source 1..75: mol_type = other DNA
gggctgtctgtggaagctgtcacggggacagaggctgccgtttttgaaggtcagtccggtattgaggccgggctg

SEQ ID NO: 498459 - DNA, 75 bp, synthetic construct
  source 1..75: mol_type = other DNA
gtgaagccagcctgctgggtcacagtggttgtcgtattggcggtaacgatctggatatcgccctggcgtttaaaa

SEQ ID NO: 498460 - DNA, 75 bp, synthetic construct
  source 1..75: mol_type = other DNA
caggcagtaattggtcgtccgatcaacttccagggactgggcggcgatgaagcaaacgcccaggcgcagggaatt

SEQ ID NO: 498461 - DNA, 75 bp, synthetic construct
  source 1..75: mol_type = other DNA
cggtggtgcggttgaatgtggaatcgcgcggtgatgtaccgctgatggaagaaaagacaaaacttatccttgagt

SEQ ID NO: 498462 - DNA, 75 bp, synthetic construct
  source 1..75: mol_type = other DNA
gaagctaccggtggccttgaagcagccattgcctgtaagcttcagtcagaaggatacgatgtggttgtgatcaac

SEQ ID NO: 498463 - DNA, 75 bp, synthetic construct
  source 1..75: mol_type = other DNA
attccgattgcaggcggcgatgactttgggtcggttaccgccgggctggcacgttgggcagaagtggtgtttcgt

SEQ ID NO: 498464 - DNA, 75 bp, synthetic construct
  source 1..75: mol_type = other DNA
gcgcccgttcaccgctgattaaaaaagcgctggcagaacagttgccgggcattccgattgcaggcggcgatgact

SEQ ID NO: 498465 - DNA, 75 bp, synthetic construct
  source 1..75: mol_type = other DNA
tgtgagtaatgtttcagatcgtagtttgattaaaaaaggcattgctactattgcagatagtatttgttataaacg

SEQ ID NO: 498466 - DNA, 75 bp, synthetic construct
  source 1..75: mol_type = other DNA
agcgatgcggggatgtctgcttacacagggagcaacatcaaagagggggagttaggccgatttcttgccgatgta

SEQ ID NO: 498467 - DNA, 75 bp, synthetic construct
  source 1..75: mol_type = other DNA
ttgccgcagcattcaatgaaccgctgcttctggagcccgcctatgcgcgggttttcttttgcgcgctggggcgcg

SEQ ID NO: 498468 - DNA, 75 bp, synthetic construct
  source 1..75: mol_type = other DNA
catgacctttgccgactggcgctttaacctgcgctcctccaacaccgaaccggtggtgcggttgaatgtggaatc

SEQ ID NO: 498469 - DNA, 75 bp, synthetic construct
  source 1..75: mol_type = other DNA
accgaaccggtggtacggttgaatgtggaatcgcgcggtgatgtgccgctgatggaagaaaaaacaaaacttatt

SEQ ID NO: 498470 - DNA, 75 bp, synthetic construct
  source 1..75: mol_type = other DNA
ggtggcgaaatgagcgcccaccattacttccgtgatttcgcttactgcgacagcggcatgatcccatggctgctg

SEQ ID NO: 498471 - DNA, 75 bp, synthetic construct
  source 1..75: mol_type = other DNA
ggcaccgaagagatttatttcgccacgttccatctcggcgtggatggcggcatggaagttaccgccagccataaa

SEQ ID NO: 498472 - DNA, 75 bp, synthetic construct
  source 1..75: mol_type = other DNA
caactgcattcaggcattgccggcaggtgtgtgtgcggattttcaacgacgtattgatgaagcacgccagatgtt

SEQ ID NO: 498473 - DNA, 75 bp, synthetic construct
  source 1..75: mol_type = other DNA
ttgctgcagcattcaatgcaccgcttcttctggaacccgcctatgcgcgggttttcttttgtgcactggggcgtg

SEQ ID NO: 498474 - DNA, 75 bp, synthetic construct
  source 1..75: mol_type = other DNA
gcactggatgaggcaaaaggggctgaggcgcaggctgaacagctggctgcctgcccgggaatgactgtggagagc

SEQ ID NO: 498475 - DNA, 75 bp, synthetic construct
  source 1..75: mol_type = other DNA
ctgcatccacaaccgccctgtttgaacatttcatggcgaaccattcaccggctgcggtccaggggggcgtgtcac

SEQ ID NO: 498476 - DNA, 75 bp, synthetic construct
  source 1..75: mol_type = other DNA
cattcaccggcagcggtacagggtggcgtgccacagacgtcagcagacggtgatgcggacgtgaaaatgctcatg

SEQ ID NO: 498477 - DNA, 75 bp, synthetic construct
  source 1..75: mol_type = other DNA
caacgtgattgccgggattgtgccaaatatggagctggcaaattcaacggcaccatttggtctggccttcgcgca

SEQ ID NO: 498478 - DNA, 75 bp, synthetic construct
  source 1..75: mol_type = other DNA
gtgctggttaacctggccgtggtgaccaatatcatcccgtatattctgtcgatggcggcattagtcattattcag

SEQ ID NO: 498479 - DNA, 75 bp, synthetic construct
  source 1..75: mol_type = other DNA
aagccatgctgtacggttccatcgtgaccttccttggttggacactgtatggtctgctggtatcaccacgctttg

SEQ ID NO: 498480 - DNA, 75 bp, synthetic construct
  source 1..75: mol_type = other DNA
ggctggggggtatgcggccattttccggaatgacaggctatgacggcattgtcgcctgtcttcagcaggcaatgg

SEQ ID NO: 498481 - DNA, 75 bp, synthetic construct
  source 1..75: mol_type = other DNA
gaggctaaaggtcgtgaacaactggcggcaacgctggcggcgatgccggagatgacggtggaaaaagcccgcccg

SEQ ID NO: 498482 - DNA, 75 bp, synthetic construct
  source 1..75: mol_type = other DNA
gcaattcaccattgctcaagtgtttaaatcttccgccgatgagggatactttccaaaaatcttctctcgtgtaac

SEQ ID NO: 498483 - DNA, 75 bp, synthetic construct
  source 1..75: mol_type = other DNA
aatgagcgcccaccattacttccgtgatttcgcttactgcgacagcggcatgatcccgtggctgctggtcgccga

SEQ ID NO: 498484 - DNA, 75 bp, synthetic construct
  source 1..75: mol_type = other DNA
ggcaccgaagagatttatttcgccacgttccatctcggcgtggatggcggcatcgaagttacagccagccataag

SEQ ID NO: 498485 - DNA, 75 bp, synthetic construct
  source 1..75: mol_type = other DNA
ggcaccgaagagatttatttcgccacgttccatctcggcgtggatggcggcatagaagttacggccagccataac

SEQ ID NO: 498486 - DNA, 75 bp, synthetic construct
  source 1..75: mol_type = other DNA
ggcaccgaagagatttatttcgccacgttccatctcggcgtggatggcggcatagaagttaccgccagccataag

SEQ ID NO: 498487 - DNA, 75 bp, synthetic construct
  source 1..75: mol_type = other DNA
ggcaccgaagagatttatttcgccacgttccatctcggcgtggatggcggcatggaagttacagccagccataac

SEQ ID NO: 498488 - DNA, 75 bp, synthetic construct
  source 1..75: mol_type = other DNA
ggcaccgaagagatttatttcgccacgttccatctcggcgtggatggcggcatcgaagttacggccagccataaa

SEQ ID NO: 498489 - DNA, 75 bp, synthetic construct
  source 1..75: mol_type = other DNA
ggcaccgaagagatttatttcgccacgttccatctcggcgtggatggcggcatcgaagttactgccagccataat

SEQ ID NO: 498490 - DNA, 75 bp, synthetic construct
  source 1..75: mol_type = other DNA
agttcgccgactataaccagcgcatccgacatcctggaggttttcacctgataaacgcagctgctgaaaggcgct

SEQ ID NO: 498491 - DNA, 75 bp, synthetic construct
  source 1..75: mol_type = other DNA
cttactgcgacagcggcatgatcccgtggctgctggtcgccgaactggtgtgcctgaaaggaaaaacgctgggcg

SEQ ID NO: 498492 - DNA, 75 bp, synthetic construct
  source 1..75: mol_type = other DNA
tgctttaaagcctatgatattcgcgggaaattaggcgaagaactgaatgaagatattgcctggcgcattggtcgc

SEQ ID NO: 498493 - DNA, 75 bp, synthetic construct
  source 1..75: mol_type = other DNA
atttcgccacgttccatctcggcgtggatggcggcattgaagttaccgccagccataacccgatggattataacg

SEQ ID NO: 498494 - DNA, 75 bp, synthetic construct
  source 1..75: mol_type = other DNA
cgtggaacagcattttagccgtgaggcgctggcggtggatcgtaccgatggcatcagtatgacctttgccgactg

SEQ ID NO: 498495 - DNA, 75 bp, synthetic construct
  source 1..75: mol_type = other DNA
cctctttctttgctgagaatacggttcaatcattacttacctggggagatcacgagcttgaggctgcggggcgtc

SEQ ID NO: 498496 - DNA, 75 bp, synthetic construct
  source 1..75: mol_type = other DNA
ccaagcagccatcgaatttgttctatcgtgtgaataatggttgggagaatattaaatttggggcgcaattcaaag

SEQ ID NO: 498497 - DNA, 75 bp, synthetic construct
  source 1..75: mol_type = other DNA
catccggacggcagtgaaatgatgaagctggtgggctgggcgcaaagcattgtcactttccagggcggtgcatct

SEQ ID NO: 498498 - DNA, 75 bp, synthetic construct
  source 1..75: mol_type = other DNA
gcattttggggattttcttcgggcacctgttcggcatgttaacgccgcactggatgtacgcgtggtttctgccgg

SEQ ID NO: 498499 - DNA, 75 bp, synthetic construct
  source 1..75: mol_type = other DNA
aaatcgccttgcgtatgctggagcagggctttgaacgtgagattgtgctggcgacaacccaactcactgatgctg

SEQ ID NO: 498500 - DNA, 75 bp, synthetic construct
  source 1..75: mol_type = other DNA
aaaatggggatgacgccggagcagattaggcaggctaccgggctttccgatgacgaactgaagaaaatcactcac

SEQ ID NO: 498501 - DNA, 75 bp, synthetic construct
  source 1..75: mol_type = other DNA
ttttatcattggggtaacaggtggtgaacctgaagatactgatttaacagtatttggtaacatcgatgatattcc

SEQ ID NO: 498502 - DNA, 75 bp, synthetic construct
  source 1..75: mol_type = other DNA
acaacattcgtacgcttcgtgctcaggcgcgtgagttttctcttgaaactcttgacgaaatgcttgagaagctga

SEQ ID NO: 498503 - DNA, 75 bp, synthetic construct
  source 1..75: mol_type = other DNA
cgccttcaccgatcgttgcccggactattctggagcgcgccgaggcttgtggaaaacccgtggtggtgaatttcc

SEQ ID NO: 498504 - DNA, 75 bp, synthetic construct
  source 1..75: mol_type = other DNA
acgtcccaatatcactgcggccaccacacttgccagcgccgccgacatcgctgtggcgttactgaatgctcagcc

SEQ ID NO: 498505 - DNA, 75 bp, synthetic construct
  source 1..75: mol_type = other DNA
tgctgatccagtgtctgttggggctaagtaccataccgttttcagcacagtatcctgatggtagcgaaatgatga

SEQ ID NO: 498506 - DNA, 75 bp, synthetic construct
  source 1..75: mol_type = other DNA
acacctggcgcgcctcctcaagtcagatgctcgataaacgcgggatggtgatatggtcgaatctgttccatatcg

SEQ ID NO: 498507 - DNA, 75 bp, synthetic construct
  source 1..75: mol_type = other DNA
acaacattcgtactcttcgtgcgcagggccgtgaactgccgttagagatccttgaagaactgctggaaaaattaa

SEQ ID NO: 498508 - DNA, 75 bp, synthetic construct
  source 1..75: mol_type = other DNA
aagcattgtcactttccagggcggtgcatctacgcatcttgatggtgtcgcctttatattccgcgttcatctggt

SEQ ID NO: 498509 - DNA, 75 bp, synthetic construct
  source 1..75: mol_type = other DNA
atagcttcatatgaacgcaattatccagaggaaggcggctttgctcaggggacgcttgagatcctcgaaggcggg

SEQ ID NO: 498510 - DNA, 75 bp, synthetic construct
  source 1..75: mol_type = other DNA
tatcggtggcgcagtggcaaaactcaccagcctggactggcagacatacgattttgtgccgggcagtctgataac

SEQ ID NO: 498511 - DNA, 75 bp, synthetic construct
  source 1..75: mol_type = other DNA
gataaccgttcggcttgataacatgaccaacattcccgacggtatggactggggcgtcattgatggcaacctgat

SEQ ID NO: 498512 - DNA, 75 bp, synthetic construct
  source 1..75: mol_type = other DNA
caaaaacgtcaagttcctggccggttttgccatcatctctgtatttattgctgtaggtatgaccgtcgttggcct

SEQ ID NO: 498513 - DNA, 75 bp, synthetic construct
  source 1..75: mol_type = other DNA
atcacctggaatttcatcgttggattttgtgttttaggcacagcgctagctattcgtgtcgcattagggcacgtc

SEQ ID NO: 498514 - DNA, 75 bp, synthetic construct
  source 1..75: mol_type = other DNA
atgttagcagtgaaactatgccactcaaggacaattccgtggattacgctttcactgaccctcctttcggcgatt

SEQ ID NO: 498515 - DNA, 75 bp, synthetic construct
  source 1..75: mol_type = other DNA
aagaactaaaattcaccagcgtttttgtgacccacgatcaggaagaagcgaccgaagtagctgatcgtgtagttg

SEQ ID NO: 498516 - DNA, 75 bp, synthetic construct
  source 1..75: mol_type = other DNA
gaagataatgctgtcggtgtgcttgaggtttttgctgccggcaattttgcaggcacgcaacgctttatcacgaga

SEQ ID NO: 498517 - DNA, 75 bp, synthetic construct
  source 1..75: mol_type = other DNA
cagcagaaactactaaaggtcgcacgtttgagcgcgtctacgccgggagcaaatggaccgaatggcgagaagtat

SEQ ID NO: 498518 - DNA, 75 bp, synthetic construct
  source 1..75: mol_type = other DNA
cgtgaaccggcgactcgttttgtgctcgaatttatgggcgaagtgaaccgcctgaagggaactattcgcggcggg

SEQ ID NO: 498519 - DNA, 75 bp, synthetic construct
  source 1..75: mol_type = other DNA
agaatgttattttcggacgtaatgcggtatccaccgatggtgctcaggcattgttacgtcaggaccatgctgatc

SEQ ID NO: 498520 - DNA, 75 bp, synthetic construct
  source 1..75: mol_type = other DNA
actgtcgttatctggtggtcaattgaatggtgcactgggtatcggaacatccagtgctcttggcggtaattcgat

SEQ ID NO: 498521 - DNA, 75 bp, synthetic construct
  source 1..75: mol_type = other DNA
gggattcagcgcagcttccaatacgccagttgcgggtaatcgtgctctggcaaatatctggcaaagcgaagatca

SEQ ID NO: 498522 - DNA, 75 bp, synthetic construct
  source 1..75: mol_type = other DNA
ctggagcatcaaaccagcggtcatattcgcttccacggcaccgacgtcagccgcctgcacgcgcgcgaccgtaaa

SEQ ID NO: 498523 - DNA, 75 bp, synthetic construct
  source 1..75: mol_type = other DNA
acggcccggtgattatagagagtagtgatgtgacacagttttaccctgaccatgaaagtggcggggaactcaccg

SEQ ID NO: 498524 - DNA, 75 bp, synthetic construct
  source 1..75: mol_type = other DNA
ggacaaatcgtcgatgctaacctcgccgcgctcaatttctatggttataaccatgaaacgatgtgccagaaacat

SEQ ID NO: 498525 - DNA, 75 bp, synthetic construct
  source 1..75: mol_type = other DNA
atagatatacataaaaagaacaggtatgcgagttatgatcttagaaggaaaatcgaaatgcagcatgaagagttt

SEQ ID NO: 498526 - DNA, 75 bp, synthetic construct
  source 1..75: mol_type = other DNA
aagaaaaatcgaaatgcaacatgaagagtttcagaaaatgacagagcgcgagcaagtacctttattgaaatcgcc

SEQ ID NO: 498527 - DNA, 75 bp, synthetic construct
  source 1..75: mol_type = other DNA
atagatatggatgtatataaaaagaacaggaatgcgagttatgattttagaagaaaaatcgaaatgcaacatgaa

SEQ ID NO: 498528 - DNA, 75 bp, synthetic construct
  source 1..75: mol_type = other DNA
tctggaccaggcctttccgctgctgatgaaacaactggaactcatgttcaccagcagtgaactgaatccccaccg

SEQ ID NO: 498529 - DNA, 75 bp, synthetic construct
  source 1..75: mol_type = other DNA
ccgcctgcacgcgcgcgaccgtaaagtcggtttcgtgtttcagcactacgcgctgttccgccatatgacggtgtt

SEQ ID NO: 498530 - DNA, 75 bp, synthetic construct
  source 1..75: mol_type = other DNA
gagtttgctcagtttactgctggtaacgacaccgatggttttgagctcatcattgctgaattgagaaagcattcg

SEQ ID NO: 498531 - DNA, 75 bp, synthetic construct
  source 1..75: mol_type = other DNA
ttgaagcagttgttgacagaattggttcagaacatcacgaattatcaggcagagcaaaagatatcggttcagccg

SEQ ID NO: 498532 - DNA, 75 bp, synthetic construct
  source 1..75: mol_type = other DNA
aaaacgagtacgacaggctgacctctgatgccgctgttgatgaggcccttctcatcaacgaatacaccttcaccg

SEQ ID NO: 498533 - DNA, 75 bp, synthetic construct
  source 1..75: mol_type = other DNA
tctatacgctggatgagctcacaactgacgccagagagcgggcccggtgctggtaccgagagcatcatccagaca

SEQ ID NO: 498534 - DNA, 75 bp, synthetic construct
  source 1..75: mol_type = other DNA
aaggaaaatcgaaatgaagcatgaagagttaaaaaaaatgacagagagcgagaaagtgcctttattgaaattgcc

SEQ ID NO: 498535 - DNA, 75 bp, synthetic construct
  source 1..75: mol_type = other DNA
atcgatccactcgggatcaccgactggtcaccgctgaaagcgatcctgcgcgatccgtccatcaccaaatttctc

SEQ ID NO: 498536 - DNA, 75 bp, synthetic construct
  source 1..75: mol_type = other DNA
aataaaggttgttatataacatctttgtcgaaaagttatctttataaagcaaaatactttagcaaccggtccgca

SEQ ID NO: 498537 - DNA, 75 bp, synthetic construct
  source 1..75: mol_type = other DNA
gtgcgagctcgggagaacaatgtttattagtgatgttgcttggaattgcagggcatataactgatggttctataa

SEQ ID NO: 498538 - DNA, 75 bp, synthetic construct
  source 1..75: mol_type = other DNA
tgaaatcattgggttactttctgactatctggaagtgctaatcgcgatacctaacactgatcgcctgcgaagaat

SEQ ID NO: 498539 - DNA, 75 bp, synthetic construct
  source 1..75: mol_type = other DNA
gtctactccgatgtttacgatgggaatatcgagcttgaagatacccatcgagcggtatacccgctgaatgtgtca

SEQ ID NO: 498540 - DNA, 75 bp, synthetic construct
  source 1..75: mol_type = other DNA
attctggcagctttctgcggacgcccgatgtcgtggggatttgcctccatggtggaagagtataccggcgttacg

SEQ ID NO: 498541 - DNA, 75 bp, synthetic construct
  source 1..75: mol_type = other DNA
tgcaaacaaccgtgtttgatgcgtatactggcggtctggcaccctcagggcggcgaggcatcaccagcctgttaa

SEQ ID NO: 498542 - DNA, 75 bp, synthetic construct
  source 1..75: mol_type = other DNA
ggagataattcgttgtttatatttaaatctagagctctcagttcctcttttaatatgtattagctcagacctgag

SEQ ID NO: 498543 - DNA, 75 bp, synthetic construct
  source 1..75: mol_type = other DNA
ctaaagccgttgcggaaatgtttcataacgctgcatggggagtgcgaacactgtggtttgatctcgtcacaaata

SEQ ID NO: 498544 - DNA, 75 bp, synthetic construct
  source 1..75: mol_type = other DNA
gtgggggatatagatgtagccacggggatcgtgattgtcaggcagggaaaggggcgcaaaatccgggaaatccac

SEQ ID NO: 498545 - DNA, 75 bp, synthetic construct
  source 1..75: mol_type = other DNA
gacggcctttaacctcaattgtatgaatgccgaaacgctggcacgtatccggtcagttaagcgcgtgagcggcga

SEQ ID NO: 498546 - DNA, 75 bp, synthetic construct
  source 1..75: mol_type = other DNA
ggccacagcgacatatccacgacgacgcgctatgactgtcgtggagatagtatgaaaattagtgccagcagatgg

SEQ ID NO: 498547 - DNA, 75 bp, synthetic construct
  source 1..75: mol_type = other DNA
ccgggcggaggctgacgcaggcagaaaccacccgccttaacgccgtgctggattacactgacgcggtgatggcaa

SEQ ID NO: 498548 - DNA, 75 bp, synthetic construct
  source 1..75: mol_type = other DNA
aaagcctgcagcgggaaggttttcagccattcttcgcctgccagacccgcgtgcgcgacccgggccgccggggat

SEQ ID NO: 498549 - DNA, 75 bp, synthetic construct
  source 1..75: mol_type = other DNA
cagcatcgacaccgatattaagctcaaccgcgcattgtgggtgatggcagaaacgctgctggagagcctgcgctg

SEQ ID NO: 498550 - DNA, 75 bp, synthetic construct
  source 1..75: mol_type = other DNA
cgctgttccgctatacgctggcgataatgctgttagcaataggcggcgcgtggctatttattcgtattcagaacc

SEQ ID NO: 498551 - DNA, 75 bp, synthetic construct
  source 1..75: mol_type = other DNA
aggcggcactgacttaccgttatggtgatgaacatcagccggtcaccaccgctgacattctgacaccacgacgcc

SEQ ID NO: 498552 - DNA, 75 bp, synthetic construct
  source 1..75: mol_type = other DNA
acgtaaatcagatccgccgggagcgcccgctgacacgtgaagaactgatgtaccacgtcccaagtatttttggtg

SEQ ID NO: 498553 - DNA, 75 bp, synthetic construct
  source 1..75: mol_type = other DNA
tgctgcgcctacgatgtgaggggcaaattactggtaaacaggtgccagaaatcattctgctcaactcccatgatg

SEQ ID NO: 498554 - DNA, 75 bp, synthetic construct
  source 1..75: mol_type = other DNA
actgattactgttgtgcgtgaaggtgcgtcgatcatcggcctgttcatcatgatgttctattacagctggcaact

SEQ ID NO: 498555 - DNA, 75 bp, synthetic construct
  source 1..75: mol_type = other DNA
agcattgacactgacattaagctcaaccgcgtattgtgggtgatggcggaaaccctgctggagagcctgcgctga

SEQ ID NO: 498556 - DNA, 75 bp, synthetic construct
  source 1..75: mol_type = other DNA
cggcccgacggaagtccgcgtcgaggtcaacaaaagctcgcctgtcgtctggctgaaaacctggctgtcgcccaa

SEQ ID NO: 498557 - DNA, 75 bp, synthetic construct
  source 1..75: mol_type = other DNA
accgtactggaaagcctgcagcgggagggctttcagcccttcttcgcctgtcagacccgcgtacgtgacccgggc

SEQ ID NO: 498558 - DNA, 75 bp, synthetic construct
  source 1..75: mol_type = other DNA
atcgatggcgatgtgaagcttaaccgtgcgctgtgggtgatggcggaagccatgctcagtggtttccggcctgcg

SEQ ID NO: 498559 - DNA, 75 bp, synthetic construct
  source 1..75: mol_type = other DNA
gttacatcaagacaaaccttctcagtgaaagagaagtgatcaagctgtggcaccgctaccaatccatccgctatc

SEQ ID NO: 498560 - DNA, 75 bp, synthetic construct
  source 1..75: mol_type = other DNA
ccatacccgggccattcacagcattgataccgacattaagctcaaccgtgcattgtgggtgatggcagaaacgat

SEQ ID NO: 498561 - DNA, 75 bp, synthetic construct
  source 1..75: mol_type = other DNA
aaatgtggtggagaaagttatggaaggggcttacgaggtggtgggtgtgtttgaccggattgaggaaaagcgtga

SEQ ID NO: 498562 - DNA, 75 bp, synthetic construct
  source 1..75: mol_type = other DNA
aaatgtggtggagaaagttattgaaggggcttacgaggtggtgggtgtgtttgaccggatggaggagaagcgtga

SEQ ID NO: 498563 - DNA, 75 bp, synthetic construct
  source 1..75: mol_type = other DNA
ggtgcttacgaagtggtgggcgtgtttgacctgattgaggaaaagcgtgatgccatgcagtcgctgttcctgccg

SEQ ID NO: 498564 - DNA, 75 bp, synthetic construct
  source 1..75: mol_type = other DNA
ttacttcagattcgtctgccagaatggctgcgtctgcggtcagtctctgggggaagtacgtgttccgcaccgggg

SEQ ID NO: 498565 - DNA, 75 bp, synthetic construct
  source 1..75: mol_type = other DNA
gtggagcgcatatcagaccatccaggagaatatgctgaaaggcggaatttcaggtcgcagcgctaaaggaaaacg

SEQ ID NO: 498566 - DNA, 75 bp, synthetic construct
  source 1..75: mol_type = other DNA
atgcaccatgtgccggggattttcggtgaagaacggcatacctcccgcagcgagcggtatacgtacatccccacc

SEQ ID NO: 498567 - DNA, 75 bp, synthetic construct
  source 1..75: mol_type = other DNA
ggtgcttacgaagtggtgggcgtttttgaccggattgaggaaaagcgtgatgccatgcagtctctggtcctgccg

SEQ ID NO: 498568 - DNA, 75 bp, synthetic construct
  source 1..75: mol_type = other DNA
tgaaagagaagtgatcaagctgtggcaccgctaccaatccatccgctatcgcaaggtaaaacctacctgttcctg

SEQ ID NO: 498569 - DNA, 75 bp, synthetic construct
  source 1..75: mol_type = other DNA
aaatgtggtggagaaagttattgaaggggcttacgaggtggtgggtgtgtttgaccggatcgaggacaagcgtga

SEQ ID NO: 498570 - DNA, 75 bp, synthetic construct
  source 1..75: mol_type = other DNA
aaatgtggtggagaaagttattgaaggggcttacgaggtggtgggtgtgtttgaccggatagaggaaaagcgtga

SEQ ID NO: 498571 - DNA, 75 bp, synthetic construct
  source 1..75: mol_type = other DNA
aaatgtggtggagaaagttatagaaggggcttacgaggtggtgggtgtgtttgaccggattgaggagaagcgtga

SEQ ID NO: 498572 - DNA, 75 bp, synthetic construct
  source 1..75: mol_type = other DNA
gctgattacagtggtgcgtgaaggcgcatccattattggcctgttcgccatgatgttctattacagctggcagct

SEQ ID NO: 498573 - DNA, 75 bp, synthetic construct
  source 1..75: mol_type = other DNA
ggcacattccaggcagagcatgaggaatttgcattcgatatgagcgacagccacaaagaacggttggctttattt

SEQ ID NO: 498574 - DNA, 75 bp, synthetic construct
  source 1..75: mol_type = other DNA
ggcacattccagtcagagcatgaagaatttgcatttgatatgagtgacagccacaaagagcggcttgcggcgttt

SEQ ID NO: 498575 - DNA, 75 bp, synthetic construct
  source 1..75: mol_type = other DNA
aagacgtaaaaacgggcaaaattccggcctgtaaacggttaaaacaggccgttaaacggtacttttcggacctta

SEQ ID NO: 498576 - DNA, 75 bp, synthetic construct
  source 1..75: mol_type = other DNA
atgaagtatgtgagttttagagtaagtaatgatgattatgaaaaattatttacagcaattaaagatgtttcaaat

SEQ ID NO: 498577 - DNA, 75 bp, synthetic construct
  source 1..75: mol_type = other DNA
ccgccaccggcacgccaggcgaatctgtacaccctgaacaacggtggcgcatttatggcacccgaaccggatgac

SEQ ID NO: 498578 - DNA, 75 bp, synthetic construct
  source 1..75: mol_type = other DNA
cattgtggatgaatatcacctgcaccctgacaacggggtttattccgcgcttgaactgggaatgggggcgcgtcc

SEQ ID NO: 498579 - DNA, 75 bp, synthetic construct
  source 1..75: mol_type = other DNA
aggttaaggccaccgggcggcgcaaatacaccagcgcattcattgaagtaccgcgaaaaaatgccaaatccacgg

SEQ ID NO: 498580 - DNA, 75 bp, synthetic construct
  source 1..75: mol_type = other DNA
gtggtcctgcggcttccggtaagccaatgccaccttcaaatggtgggccaaatcatggcagtcatggtcgctatt

SEQ ID NO: 498581 - DNA, 75 bp, synthetic construct
  source 1..75: mol_type = other DNA
ttaatgcggcaaagaacactgtttttaccgcagccatgcatgcaataaaagacatatattatcaatatcttgaag

SEQ ID NO: 498582 - DNA, 75 bp, synthetic construct
  source 1..75: mol_type = other DNA
tttgaggtggagccgttcccgcaaacctaccttcgattcagtccggcggcgaaatcgttcgaagtttttgttaac

SEQ ID NO: 498583 - DNA, 75 bp, synthetic construct
  source 1..75: mol_type = other DNA
ggagcatgggctgagtgcgccggaaagttcacggaggaagatttacacggtcaggaatgttacgcggggctggat

SEQ ID NO: 498584 - DNA, 75 bp, synthetic construct
  source 1..75: mol_type = other DNA
gagcgttgcggcgctgatggcgtttggcacattccaggcagagcatgaggaatttgcatttgatatgagcgacag

SEQ ID NO: 498585 - DNA, 75 bp, synthetic construct
  source 1..75: mol_type = other DNA
gccgcagtgccagaggaaaacgtatccatacccgtgccattcacaacatcgacaccgatattaagctcaaccgcg

SEQ ID NO: 498586 - DNA, 75 bp, synthetic construct
  source 1..75: mol_type = other DNA
caccgccgacattctgacaccacgacgccgggaggattacggtaaggacctgtggagtgcttatcagaccattca

SEQ ID NO: 498587 - DNA, 75 bp, synthetic construct
  source 1..75: mol_type = other DNA
gccgccaccggcacgccaggcgctggcacaggcggcactgacttaccgttatggtgacgaacatcagcccgtcac

SEQ ID NO: 498588 - DNA, 75 bp, synthetic construct
  source 1..75: mol_type = other DNA
cggcttattgtaagaaatgacgataaaacaaccgcctttggtcttgcaaaaggattacgatttgttcctttgcac

SEQ ID NO: 498589 - DNA, 75 bp, synthetic construct
  source 1..75: mol_type = other DNA
catccagttatcagatgatccccgggatttttcgttttgtctgcacaaatggcctggtgtgcggaaataattttg

SEQ ID NO: 498590 - DNA, 75 bp, synthetic construct
  source 1..75: mol_type = other DNA
cactcgcaaccaggtgccggaaattattctgctcaacagccatgacggttccagttcttatcagatgctgccagg

SEQ ID NO: 498591 - DNA, 75 bp, synthetic construct
  source 1..75: mol_type = other DNA
aaatgtggtggacagagtcattgaaagggcttacgaggtggtgggcgtgtttgaccggatagaggagaagcgtga

SEQ ID NO: 498592 - DNA, 75 bp, synthetic construct
  source 1..75: mol_type = other DNA
accagaccatccaggagaacatgctgaaaggcgggatttccggtcgcagtgcaaaaggaaaacgtatccacaccc

SEQ ID NO: 498593 - DNA, 75 bp, synthetic construct
  source 1..75: mol_type = other DNA
gggaagtgcgtgttccacaccggggaaatgtggtggagaaagttatcgaagggacttacgaggtggtgggcgtgt

SEQ ID NO: 498594 - DNA, 75 bp, synthetic construct
  source 1..75: mol_type = other DNA
cgccaggcgctggcacaggcggcgctgacttaccgttatggtgatgaacatcagcccgtcaccactaccgacatt

SEQ ID NO: 498595 - DNA, 75 bp, synthetic construct
  source 1..75: mol_type = other DNA
gggtgcgtctgtggtcagtctctgggagaggtgcgtgttccgcacaggggaaatgtggtggacagagtcattgaa

SEQ ID NO: 498596 - DNA, 75 bp, synthetic construct
  source 1..75: mol_type = other DNA
tctgagggaaacatgaagttctatgatgaatgccatgctggattaatcagaccaatacccgctccaataggcgcg

SEQ ID NO: 498597 - DNA, 75 bp, synthetic construct
  source 1..75: mol_type = other DNA
cccgggccattcacagcattgataccgacattaagctcaatcgcgcattgtgggtgatggcagaaacgatgctgg

SEQ ID NO: 498598 - DNA, 75 bp, synthetic construct
  source 1..75: mol_type = other DNA
gaactatacgtacatccccacatcaccgtactggaaagcctgcagcgggaaggctttcagccattcttacgcctg

SEQ ID NO: 498599 - DNA, 75 bp, synthetic construct
  source 1..75: mol_type = other DNA
ccatacccgggccattcacagcatcgacacggacattaagctcaatcgcgcattgtgggtgatggcagaaacgat

SEQ ID NO: 498600 - DNA, 75 bp, synthetic construct
  source 1..75: mol_type = other DNA
tatgaaaaggcccgcgatggccgcgcgctgccgctattagtcttcgttcccagcaaactaaaactgcgcggcaca

SEQ ID NO: 498601 - DNA, 75 bp, synthetic construct
  source 1..75: mol_type = other DNA
cacaggcggcactgacttaccgttatggtgacgaacatcagcagccacaacagcggacatcctgacgcaacgacg

SEQ ID NO: 498602 - DNA, 75 bp, synthetic construct
  source 1..75: mol_type = other DNA
ggtgcttacgaagtggtgggcgtgtttgaccggattgaggaaaagcgtgatgccatgcagtcgctggtcctgccg

SEQ ID NO: 498603 - DNA, 75 bp, synthetic construct
  source 1..75: mol_type = other DNA
tctccagctactgtatctcctgggtatcaggaaaggtggtaatgaccatgcgtcgccgcctgtttggtcacatga

SEQ ID NO: 498604 - DNA, 75 bp, synthetic construct
  source 1..75: mol_type = other DNA
gggaagtgagtgttccacaccggggaaatgtggtggacagagtcattgaaggggcttacgaggtggtgggcgtgt

SEQ ID NO: 498605 - DNA, 75 bp, synthetic construct
  source 1..75: mol_type = other DNA
tgcgtctgcggcgggccggggagataaccggacaacatgtccctgaaattattctgctcaactcccatgacggta

SEQ ID NO: 498606 - DNA, 75 bp, synthetic construct
  source 1..75: mol_type = other DNA
ggcctggtctgcggtcagtctctgggagaagtgcgtgttccgcaccggggaaatgtggtggacagagttattgaa

SEQ ID NO: 498607 - DNA, 75 bp, synthetic construct
  source 1..75: mol_type = other DNA
cgactgaaacaagtggtacgcgaagaggatatctggcgcggaggcttttccagttcgtcgggctatgaactggca

SEQ ID NO: 498608 - DNA, 75 bp, synthetic construct
  source 1..75: mol_type = other DNA
tgaggtcgcctttgcggaatatggccgactgaaacaagtggtacgcgaagaggatatctggcgcggcggtttttc

SEQ ID NO: 498609 - DNA, 75 bp, synthetic construct
  source 1..75: mol_type = other DNA
tacgatgcggtagatatcgatctggcacgcatcagtaaagagatcatcgacttctatatcgatcagggcgttaat

SEQ ID NO: 498610 - DNA, 75 bp, synthetic construct
  source 1..75: mol_type = other DNA
atggttatcgtcgggtatgcgaaccagatacgccgtgaccgtccgctgacacacgaagaactgatgcactatgtg

SEQ ID NO: 498611 - DNA, 75 bp, synthetic construct
  source 1..75: mol_type = other DNA
ggaagtgcgtgttccacaccggggagacgtagtggagaaagttattgaaggggcttacgaggtggtgggcgtttt

SEQ ID NO: 498612 - DNA, 75 bp, synthetic construct
  source 1..75: mol_type = other DNA
ttgaccggattgaagaaaagcgtgacgccatgcagtcgctggtcctgccgccactggcacgccaggcgctggcac

SEQ ID NO: 498613 - DNA, 75 bp, synthetic construct
  source 1..75: mol_type = other DNA
tatccacacccgtgccattcacatcatcgacaccgatattaagctcaaccgcgcattgtgggtaatggcagaaac

SEQ ID NO: 498614 - DNA, 75 bp, synthetic construct
  source 1..75: mol_type = other DNA
acctatcagcgtattcaggaaaacctgattaaaggtggcttatccggtcgctctgcacagggtaaacacgccaga

SEQ ID NO: 498615 - DNA, 75 bp, synthetic construct
  source 1..75: mol_type = other DNA
atgcgattagccagtcgttttggttatgctgcaaaccagatacgccgtgaccgtccactgacacatgaagaactg

SEQ ID NO: 498616 - DNA, 75 bp, synthetic construct
  source 1..75: mol_type = other DNA
gcagtgccagaggaaaacgtatccatacccgtgccattcacagcatcgacaccgacattaagctcaaccgcgcat

SEQ ID NO: 498617 - DNA, 75 bp, synthetic construct
  source 1..75: mol_type = other DNA
atgcgattagcaagtcgttttggttatactgcaaaccagatacgtcgtgaccgtccgctgacacacgaagaactg

SEQ ID NO: 498618 - DNA, 75 bp, synthetic construct
  source 1..75: mol_type = other DNA
catttgtaccaatggactggtctgcggtcagtctctgggagaagtgcgtgttccacaccggggaaacgtggtgga

SEQ ID NO: 498619 - DNA, 75 bp, synthetic construct
  source 1..75: mol_type = other DNA
ggcactgacttaccgttatggtgacgaacatcagcccgtcaccaccgccgacattctgacgccacgacgccggga

SEQ ID NO: 498620 - DNA, 75 bp, synthetic construct
  source 1..75: mol_type = other DNA
gagtcattgaaggggcttacgaggtggtgggcgtgtttgaccggatagaggagaagcgtgatgccatgcagtcgc

SEQ ID NO: 498621 - DNA, 75 bp, synthetic construct
  source 1..75: mol_type = other DNA
acccgggccattcacagcattgataccgacattaagctcaatcgcgcattgtgggtgatggcagaaacgctgctg

SEQ ID NO: 498622 - DNA, 75 bp, synthetic construct
  source 1..75: mol_type = other DNA
cggcattgacggcgatgtgaaactcaatcgcgccctgtgggttatggcagaaaacatgctcgaatttttcgggcg

SEQ ID NO: 498623 - DNA, 75 bp, synthetic construct
  source 1..75: mol_type = other DNA
ttatgcctgtcagtgggcttattctggtctggtattcagtaatgaatattattgacaactatcgtaaacggaatt

SEQ ID NO: 498624 - DNA, 75 bp, synthetic construct
  source 1..75: mol_type = other DNA
attgacggcgatgtgaaactcaatcgcgccctgtggattatggcagaaaacatgctcgaatttttcgggcgttaa

SEQ ID NO: 498625 - DNA, 75 bp, synthetic construct
  source 1..75: mol_type = other DNA
tgcaatgcagtcactggcgctgccagaaccagcccgtaacgcgctggcaaatgccgcactgaagtatcgatttgg

SEQ ID NO: 498626 - DNA, 75 bp, synthetic construct
  source 1..75: mol_type = other DNA
tcaggttgcgctggtgtcgcagaatgttcatctgtttaacgatacggttgccaacaacattgcttatgcgcgtac

SEQ ID NO: 498627 - DNA, 75 bp, synthetic construct
  source 1..75: mol_type = other DNA
gacgacataccagaggcttcaggagaacctgctgaaaggcggtctgcccggacgcactgcgaagggcaaacgcag

SEQ ID NO: 498628 - DNA, 75 bp, synthetic construct
  source 1..75: mol_type = other DNA
cacaggtcagcatgtgccggaaatcatcattctcaacagccacgatggtgcatcgagctttcagttacttccggg

SEQ ID NO: 498629 - DNA, 75 bp, synthetic construct
  source 1..75: mol_type = other DNA
aaggctttcagccattctttgcctgccagactcgagtgcgcgaccagagcaagcgagagcacacgaaacacatgc

SEQ ID NO: 498630 - DNA, 75 bp, synthetic construct
  source 1..75: mol_type = other DNA
atcaccgtcctggaaaatctgcagcgggaaggcttccagccgttcttcgcctgccagccccgtgtacgcgaccag

SEQ ID NO: 498631 - DNA, 75 bp, synthetic construct
  source 1..75: mol_type = other DNA
aaacgtggtggacagggtgattgaaggggcttacgaggtggtgggcgtttttgaccggatagaggagaagcgtga

SEQ ID NO: 498632 - DNA, 75 bp, synthetic construct
  source 1..75: mol_type = other DNA
tgatgccatgcagtcgctgctcttaccgccaccggcacgtcagacactggcacaggcggcactgatttaccgtta

SEQ ID NO: 498633 - DNA, 75 bp, synthetic construct
  source 1..75: mol_type = other DNA
taccaggacaagagcaattacaggtattgatggtgatataagaatcaacaaggcgttatgggggattgccgaaca

SEQ ID NO: 498634 - DNA, 75 bp, synthetic construct
  source 1..75: mol_type = other DNA
tatccggggcgtgaagtccctgcgctgcgtaatatcaacctgaagatcccagcagggaaaacagtggctctggta

SEQ ID NO: 498635 - DNA, 75 bp, synthetic construct
  source 1..75: mol_type = other DNA
agtataccctggcgtcgttacgtaaccaggttgctctggtgtcgcagaatgtccatctgtttaacgatacggttg

SEQ ID NO: 498636 - DNA, 75 bp, synthetic construct
  source 1..75: mol_type = other DNA
gaatcaaccagatacgccgtgatcgccctctgacccacgacgaattacaccagcatgttcccagcgtttttggcg

SEQ ID NO: 498637 - DNA, 75 bp, synthetic construct
  source 1..75: mol_type = other DNA
ccatccaggagaatatgctgaaaggcgggatttccggtcgcagtgcaaaaggaaaacgtatccatacccgggcca

SEQ ID NO: 498638 - DNA, 75 bp, synthetic construct
  source 1..75: mol_type = other DNA
atccacacccgtgccattcacagcatcgacaccgatattaagctcaaccgcgcattgtgggtgatggcagaaacg

SEQ ID NO: 498639 - DNA, 75 bp, synthetic construct
  source 1..75: mol_type = other DNA
gatgccatgcagtcgctaattctgccgccaccggcacgccaggcgctggcacaggcggcactgacttaccgttat

SEQ ID NO: 498640 - DNA, 75 bp, synthetic construct
  source 1..75: mol_type = other DNA
cattattctcgccattatggtgttctgcgtaacctggcaagttattgcacgttttatttttaacgctcccagcac

SEQ ID NO: 498641 - DNA, 75 bp, synthetic construct
  source 1..75: mol_type = other DNA
acattctgacgccgcgacgccgggaggattacggtaaagacctgtggagcgcatatcagaccatccaggagaata

SEQ ID NO: 498642 - DNA, 75 bp, synthetic construct
  source 1..75: mol_type = other DNA
cacacccgtgccattcacagcatcgacaccgatattaagctcaaccgcgcattgtgggtaatggcagaaacgctg

SEQ ID NO: 498643 - DNA, 75 bp, synthetic construct
  source 1..75: mol_type = other DNA
aaggttttcagccctttttcgcctgccagacccgtgtgcgcgacccgggccgccggggatacacaaaacacatgc

SEQ ID NO: 498644 - DNA, 75 bp, synthetic construct
  source 1..75: mol_type = other DNA
gacgacctaccagcgtattcaggagaacctgatcaaaggtggtttaaacgggcggacggcaaaaggtggtcgcac

SEQ ID NO: 498645 - DNA, 75 bp, synthetic construct
  source 1..75: mol_type = other DNA
gggggacgtggtgagtcaggtgattgaaggcgcgtatgaggtactggggatttttgaccgggtggaggagaaacg

SEQ ID NO: 498646 - DNA, 75 bp, synthetic construct
  source 1..75: mol_type = other DNA
acattaagggagggcgcaatgctacaaggattccctgtaaactatagattctatggtaaccgtgatgctattagg

SEQ ID NO: 498647 - DNA, 75 bp, synthetic construct
  source 1..75: mol_type = other DNA
actcttagagagggtgcaatgttacaaggattccctgttgactatcggttttatggtaaaagagatgccataaga

SEQ ID NO: 498648 - DNA, 75 bp, synthetic construct
  source 1..75: mol_type = other DNA
caaattgttcaaatgggtggcgcggtaaaccagactacgctcaataatggagtgctacaggtttatggcgctaga

SEQ ID NO: 498649 - DNA, 75 bp, synthetic construct
  source 1..75: mol_type = other DNA
gtgttccgccaacaaccaggtcatgaaggcgtgacgcagcaaacgctgacgttaacctttaatagcagcggcgta

SEQ ID NO: 498650 - DNA, 75 bp, synthetic construct
  source 1..75: mol_type = other DNA
aaggtgtaacgcagcaaacgctgacgctgacctttaatagtagcggggtgttgaccaatattgataataaacctg

SEQ ID NO: 498651 - DNA, 75 bp, synthetic construct
  source 1..75: mol_type = other DNA
acaacatcgtttcccgcgagacgctgctggaggcgaaaaaacatccggatcagtatcgcgatctggtagtgcgcg

SEQ ID NO: 498652 - DNA, 75 bp, synthetic construct
  source 1..75: mol_type = other DNA
atgcattcattagacagttattttcagcgcacgacagcccctaaatcagccgcccaggaacgccgtgaggaattc

SEQ ID NO: 498653 - DNA, 75 bp, synthetic construct
  source 1..75: mol_type = other DNA
aaggtgtaacgcagcaaacgctgacgctgacctttaacagtagcggagtgttgaccaacattgataataaacctg

SEQ ID NO: 498654 - DNA, 75 bp, synthetic construct
  source 1..75: mol_type = other DNA
aaggcgtgacgcagcaaacgctgacgttaacctttaatagcagcggcgtattaaccaatattgataacaaacctg

SEQ ID NO: 498655 - DNA, 75 bp, synthetic construct
  source 1..75: mol_type = other DNA
agtgccgccgatgcgcgacgtatcgtcagccattacgagcgacgctggctgatagaggaataccacaaggcgtgg

SEQ ID NO: 498656 - DNA, 75 bp, synthetic construct
  source 1..75: mol_type = other DNA
ggtaccggtaaaatcggtgtggcgatgctgcgcattctgaaaggttttggtatgcgtctgctggcgttcgatcca

SEQ ID NO: 498657 - DNA, 75 bp, synthetic construct
  source 1..75: mol_type = other DNA
gaaaaagtggcgtgtgccgccgatgcgcggcgtatcgtcagccactacgaacgacgcaggctgatagaggaatat

SEQ ID NO: 498658 - DNA, 75 bp, synthetic construct
  source 1..75: mol_type = other DNA
tgacctccggcgatgcgcacctggcggtcaatttcccgctactgctggaaaaaggtcttgatggtctgcgtgaga

SEQ ID NO: 498659 - DNA, 75 bp, synthetic construct
  source 1..75: mol_type = other DNA
agcggctgattaacggtgcgccgaagtacggcaacgacgatgatactgtcgatacgctgctggctcgcgcttatc

SEQ ID NO: 498660 - DNA, 75 bp, synthetic construct
  source 1..75: mol_type = other DNA
atgaccacactaaaactggatacgctcagcgaccgcattaaagcgcacaaaaatgcgctggtgcatattgtgaaa

SEQ ID NO: 498661 - DNA, 75 bp, synthetic construct
  source 1..75: mol_type = other DNA
cttaaaccaccagtttcatgttatggatttagtcagaagcgagacacggagccgcaatatagtcacagttatggt

SEQ ID NO: 498662 - DNA, 75 bp, synthetic construct
  source 1..75: mol_type = other DNA
ggacgctgaagccgggcgccacaaaatggctggtgaatgccctggtggatattaaggcaaaagcaggctggctga

SEQ ID NO: 498663 - DNA, 75 bp, synthetic construct
  source 1..75: mol_type = other DNA
atgacatgggcgcaacggctcaagcgtgttttcaatatcgacatcgagacctgcagcggctgcggcggcgccatg

SEQ ID NO: 498664 - DNA, 75 bp, synthetic construct
  source 1..75: mol_type = other DNA
cgacaacatccatcgcgccgccgatcgacagaaaatcctgctggtttgtaaaacacctgccgatttcctgacgct

SEQ ID NO: 498665 - DNA, 75 bp, synthetic construct
  source 1..75: mol_type = other DNA
caggagcaaaacgagagctacaacctggtgagaaaaatgatccacccaaagaggtcattattctcaatagtgcgt

SEQ ID NO: 498666 - DNA, 75 bp, synthetic construct
  source 1..75: mol_type = other DNA
tagtctcggtttcatcgactacgtgaacgccttaaaagatgcagggtatacccgtctcttcccggagcttaaacc

SEQ ID NO: 498667 - DNA, 75 bp, synthetic construct
  source 1..75: mol_type = other DNA
tgacggtaagctactgaaatcgccatgcgaaaacttttttccatccgatgataaagatgagcgagatcaggatca

SEQ ID NO: 498668 - DNA, 75 bp, synthetic construct
  source 1..75: mol_type = other DNA
gtaatcaggacatcaaattttccgccgttatcaatgacgatgacagcgccgatctcctgtttacgctccccctgc

SEQ ID NO: 498669 - DNA, 75 bp, synthetic construct
  source 1..75: mol_type = other DNA
tgcgctgcgcagtgcggcactgttattaaaagagaaaatcatcgctcacgccgcagtcatgctacatcagtcagc

SEQ ID NO: 498670 - DNA, 75 bp, synthetic construct
  source 1..75: mol_type = other DNA
aagaatggaaaatcgtggcttagtcagacgtgaacatgacgccgctgacaagcggcgtcgctttgtctggctgac

SEQ ID NO: 498671 - DNA, 75 bp, synthetic construct
  source 1..75: mol_type = other DNA
gatatcgcggcgtttaacgatctgaaaaccgccagagtggaatgcttcgttcagggcgtcccgacagaacctgct

SEQ ID NO: 498672 - DNA, 75 bp, synthetic construct
  source 1..75: mol_type = other DNA
aaaaccgctggggtggaatgcttcgttcagggcgtcccgacagaacctgctgtggacctctttaaattactttga

SEQ ID NO: 498673 - DNA, 75 bp, synthetic construct
  source 1..75: mol_type = other DNA
caccgggtgggtcgctatctggaacggcaaggcctgctggaacgggatgtcgaaaacagctatctggcctcggat

SEQ ID NO: 498674 - DNA, 75 bp, synthetic construct
  source 1..75: mol_type = other DNA
ggagagtccgctcgccgcagccgaacgaccgagcgtagcgagtcagtgagcgaggaagcggaagagcgcctgaac

SEQ ID NO: 498675 - DNA, 75 bp, synthetic construct
  source 1..75: mol_type = other DNA
cgcgcagtgattctggtagccgcctggcttggcgatgctcgcctgatcgacaacaaactggtcgaactggcgtaa

SEQ ID NO: 498676 - DNA, 75 bp, synthetic construct
  source 1..75: mol_type = other DNA
atcgtcaacaacgacggtgacaacgccatcagcaacggcggcaccggcacgcagattaatggcgatgaagccacc

SEQ ID NO: 498677 - DNA, 75 bp, synthetic construct
  source 1..75: mol_type = other DNA
attcagtttttacttataccgagaatgctgacgggactatttctctgcaagatagcaatggtcgtaaggcaacga

SEQ ID NO: 498678 - DNA, 75 bp, synthetic construct
  source 1..75: mol_type = other DNA
aacgggcagtgattctgattgccgcctggcttggcgatgctcgcctgatcgacaataaaatggtcgaactggcgt

SEQ ID NO: 498679 - DNA, 75 bp, synthetic construct
  source 1..75: mol_type = other DNA
ttgctggaagtctctgaaaacagcaaacgcgcagtgattctggtagccgcctggcttggcgatgctcgcctgatc

SEQ ID NO: 498680 - DNA, 75 bp, synthetic construct
  source 1..75: mol_type = other DNA
tccgcaaaatggttgccgatatgggcttcgatattgagattgtcggtgtgccaattatgcgcgccaaagacggtc

SEQ ID NO: 498681 - DNA, 75 bp, synthetic construct
  source 1..75: mol_type = other DNA
aactcattgccataaaagcgggagtcattaccatttataattatgatggtgaaacacgggaatatatttccacat

SEQ ID NO: 498682 - DNA, 75 bp, synthetic construct
  source 1..75: mol_type = other DNA
ggatggtgagaactgggtgacagatacggaacgacagcacactgcagaactggaagctgccggagcgcatcgtca

SEQ ID NO: 498683 - DNA, 75 bp, synthetic construct
  source 1..75: mol_type = other DNA
aaaaatacaaccactatctccccgtcaacaccatacgataaatgggatggtgaaaaatgggtgacagatactgag

SEQ ID NO: 498684 - DNA, 75 bp, synthetic construct
  source 1..75: mol_type = other DNA
cccaactcctggcggagatgagataataccggacgatccggatgatacgcctacaccggtgatgctgccaactta

SEQ ID NO: 498685 - DNA, 75 bp, synthetic construct
  source 1..75: mol_type = other DNA
gaggtagaaaccaccacaggtgaaaagaaaaataccaatgtgacttgtccggcagacccaggaaaactcagtccg

SEQ ID NO: 498686 - DNA, 75 bp, synthetic construct
  source 1..75: mol_type = other DNA
aactgaaatcgcgggtaataacgcggtggtgaaccaggacggcgagctggatgtgagcggcggcggtcacggtat

SEQ ID NO: 498687 - DNA, 75 bp, synthetic construct
  source 1..75: mol_type = other DNA
aaggttgaaccgattccgcaaaatggaccgtgcggtgacaacagcctggtggcgcttaaattgcttagcccggat

SEQ ID NO: 498688 - DNA, 75 bp, synthetic construct
  source 1..75: mol_type = other DNA
aaggtggcatcaagctgtttcagataattggtcgtctggcctccagcttccaggagcacagcgatgtgctggaaa

SEQ ID NO: 498689 - DNA, 75 bp, synthetic construct
  source 1..75: mol_type = other DNA
tggaacgcttatcccgacaccactacatgaagaaaaatcaattccagctgacaatataaaaacaatgctcaacaa

SEQ ID NO: 498690 - DNA, 75 bp, synthetic construct
  source 1..75: mol_type = other DNA
atgactaagaaaataaaatgtgcttaccacctttgcaaaaaagacgttgaagaaagcaaagctattgaaagaatg

SEQ ID NO: 498691 - DNA, 75 bp, synthetic construct
  source 1..75: mol_type = other DNA
agggcttcgccccgacaccccaaaggtcaacggcctgacgcgccctggcgggcttgtctgctcccggcatccgct

SEQ ID NO: 498692 - DNA, 75 bp, synthetic construct
  source 1..75: mol_type = other DNA
accgattccggtgcacaaactgcgactgaagatcctgctggcgaacgaaattgcccgtggcctgctgacggtgga

SEQ ID NO: 498693 - DNA, 75 bp, synthetic construct
  source 1..75: mol_type = other DNA
ccatcggtaaacacctgtcgccgccaccgattccggtgcacaaactgcgactgaagatcctgctggcgaacgaaa

SEQ ID NO: 498694 - DNA, 75 bp, synthetic construct
  source 1..75: mol_type = other DNA
caccggctgcgctgggaattgcgcttgaactggccaaagaacgttttggcagtacgctgactatcaaggggggtg

SEQ ID NO: 498695 - DNA, 75 bp, synthetic construct
  source 1..75: mol_type = other DNA
aaggatattgttgaaaagaatattttgtcaagaaaagatttttatacacatgtatcttcatttggtgatgtccga

SEQ ID NO: 498696 - DNA, 75 bp, synthetic construct
  source 1..75: mol_type = other DNA
gtgacttcattacaactctcaatcgtccatcgactgccgcagaactatcgctggtctgctggtttcgcaggttcg

SEQ ID NO: 498697 - DNA, 75 bp, synthetic construct
  source 1..75: mol_type = other DNA
catcaacgatttttgatgataaaatagtacttccgcatttttataatataatattagacgtttgtaacgacaaat

SEQ ID NO: 498698 - DNA, 75 bp, synthetic construct
  source 1..75: mol_type = other DNA
tgaaggtgtgttacttgatcatggccgggcagcatacaaatttaagcctgatataagtaaaccagaagatgaacg

SEQ ID NO: 498699 - DNA, 75 bp, synthetic construct
  source 1..75: mol_type = other DNA
ggctgttgaccttattcttgctaatccagtattacggcagatggctatgactgcggaacaaaaggaaagagaatt

SEQ ID NO: 498700 - DNA, 75 bp, synthetic construct
  source 1..75: mol_type = other DNA
tggagaagggccagcaggatatctatacggcggcggtgagccgggatcaggcccgaatcgtgttcgacgatgccc

SEQ ID NO: 498701 - DNA, 75 bp, synthetic construct
  source 1..75: mol_type = other DNA
ggggcatgggatgcctgtgcactcgattatgccgaagaagatctggtcgggatggagtgttacgccggatttgac

SEQ ID NO: 498702 - DNA, 75 bp, synthetic construct
  source 1..75: mol_type = other DNA
cgcaaggtggtgcgccatcggggcgatccggttctggcctgggcgattggtaacgtggtgatggagtccgacgct

SEQ ID NO: 498703 - DNA, 75 bp, synthetic construct
  source 1..75: mol_type = other DNA
gaacgccgttatggttctgataaaccggatctgcgtaacccgatggaactgaccgacgttgccgatctgctgaaa

SEQ ID NO: 498704 - DNA, 75 bp, synthetic construct
  source 1..75: mol_type = other DNA
ccgtcgcagtgggtggagatgatgacaaagcgatttaatatctggtgtcaggggactaccccgtggatgggtaat

SEQ ID NO: 498705 - DNA, 75 bp, synthetic construct
  source 1..75: mol_type = other DNA
aaggcgaatcccaatatcgatgtttccgtcgatcgtgaaaaactggcctcaaccatccagaaagcgcggggtatt

SEQ ID NO: 498706 - DNA, 75 bp, synthetic construct
  source 1..75: mol_type = other DNA
cccggtaatgacctttgcggaagccgaacgccgttatggttctgataaaccggatctgcgtaacccgatggaact

SEQ ID NO: 498707 - DNA, 75 bp, synthetic construct
  source 1..75: mol_type = other DNA
tgacgaagacctgcgtgctgaccgtcagcctgaatttacccagatcgatgtggaaacctctttcatgaccgcgcc

SEQ ID NO: 498708 - DNA, 75 bp, synthetic construct
  source 1..75: mol_type = other DNA
gaccactttattgaatcggtcagcccggacatctatacccgttactttatggcggccggggcaattggcgcatta

SEQ ID NO: 498709 - DNA, 75 bp, synthetic construct
  source 1..75: mol_type = other DNA
ttgatacgtggaacgccacgcatctacgcacccagctgcagggggcgggcctcgatgtggagccgttcccgcaaa

SEQ ID NO: 498710 - DNA, 75 bp, synthetic construct
  source 1..75: mol_type = other DNA
aaggggcttacgaggtggtgggcgtgtttgaccggatagaggagatgcgtgatgccatgcagtcgctgattctgc

SEQ ID NO: 498711 - DNA, 75 bp, synthetic construct
  source 1..75: mol_type = other DNA
gctatggcgcgtttcgtatcatcgttgagttcttccgccagcctgacgcgcagtttaccggcgcctgggtacagt

SEQ ID NO: 498712 - DNA, 75 bp, synthetic construct
  source 1..75: mol_type = other DNA
tatttttatcaggggggaacgcttccacgaaagagtgtcatgctcacatttgatgatggttatcttgataactgg

SEQ ID NO: 498713 - DNA, 75 bp, synthetic construct
  source 1..75: mol_type = other DNA
ccggctcatgaaagaagatattctggcgggaaaacaatgtctgacggaaaagctgggttcatgtagttcccattt

SEQ ID NO: 498714 - DNA, 75 bp, synthetic construct
  source 1..75: mol_type = other DNA
ataacgtccgtgagccgtccgtctttcttgagtccgatattcttctcggacaggcgcgaatgaggcaaatgaccg

SEQ ID NO: 498715 - DNA, 75 bp, synthetic construct
  source 1..75: mol_type = other DNA
aaccgctggcatgctcagaaacgtactgtcttagctgtcatgcatgatatcggtctggttagaaatcattttcca

SEQ ID NO: 498716 - DNA, 75 bp, synthetic construct
  source 1..75: mol_type = other DNA
ccggctcatgaaagaagatattctggtgggaaaacaatgtctgacggaaaagctggggttctgtagttcccatct

SEQ ID NO: 498717 - DNA, 75 bp, synthetic construct
  source 1..75: mol_type = other DNA
agcatcgacaccgatattaagctcaaccgggcgttgtgggtgatggcagaaacgatgctgaagagcctgcactga

SEQ ID NO: 498718 - DNA, 75 bp, synthetic construct
  source 1..75: mol_type = other DNA
gctgccgcgccacccatcacagctttacgagctgctgctggaaggtgtggtgctgtttattatcctcaacctgta

SEQ ID NO: 498719 - DNA, 75 bp, synthetic construct
  source 1..75: mol_type = other DNA
tttggttatgcgaaccagatacgccgtgaccgccccttaactcgcgaagaactgatgcaggtcgtccccagcgta

SEQ ID NO: 498720 - DNA, 75 bp, synthetic construct
  source 1..75: mol_type = other DNA
ttcgcctgccagacccgcgtacgtgacccggaccgccgggaatacaccaaacacatgctgcgtctgcggcgggcc

SEQ ID NO: 498721 - DNA, 75 bp, synthetic construct
  source 1..75: mol_type = other DNA
tggtgacgaacatcagccggtcaccaccgctgacattctgaccccacgacgccgggaggattacggtgaggacct

SEQ ID NO: 498722 - DNA, 75 bp, synthetic construct
  source 1..75: mol_type = other DNA
tggtgacgaacatcagcccgtcaccaccgctgacattctgaccccccgacgcagggaggattacggtgaggacct

SEQ ID NO: 498723 - DNA, 75 bp, synthetic construct
  source 1..75: mol_type = other DNA
tggtgacgaacatcagccagtcaccaccgctgacattctgaccccgcgacgccgggaggattacggtgaggacct

SEQ ID NO: 498724 - DNA, 75 bp, synthetic construct
  source 1..75: mol_type = other DNA
atgatgcgcacggggctggttactgtttttttcctcaccttactgctggtgggatgcgttgtatatcctgggatt

SEQ ID NO: 498725 - DNA, 75 bp, synthetic construct
  source 1..75: mol_type = other DNA
gagtgcaacgccatcattgagcagtttatcgactacctgcgcaccgggcaggagatgccgatggaaatggcggat

SEQ ID NO: 498726 - DNA, 75 bp, synthetic construct
  source 1..75: mol_type = other DNA
cggcgacagtgcgcgcaccattagcggcacgggattagggctggcgattgtgcagcgtatcgtggataaccataa

SEQ ID NO: 498727 - DNA, 75 bp, synthetic construct
  source 1..75: mol_type = other DNA
tcttcgagggttgatatcagaattcggcgtcattgccccacaaagtacagatgctttgcggcacatggtttctgc

SEQ ID NO: 498728 - DNA, 75 bp, synthetic construct
  source 1..75: mol_type = other DNA
tgcgtgttattgccattgtaggatgtgatggttcgggtaaatcgacgcttactgcgagtctggtcaatgaactgg

SEQ ID NO: 498729 - DNA, 75 bp, synthetic construct
  source 1..75: mol_type = other DNA
caacggcgtttgcgcgtaaacctgaccaccaactggcagcgttacaggaaaaaatcgccgttacgccgcaactga

SEQ ID NO: 498730 - DNA, 75 bp, synthetic construct
  source 1..75: mol_type = other DNA
ggaaattgaaactgcgctttaccccggtagcattgaagtgaaaatgcatccattgtcgattaaacgcgcagtggc

SEQ ID NO: 498731 - DNA, 75 bp, synthetic construct
  source 1..75: mol_type = other DNA
ctttgaagataaatccaacgatgtgattcaggatgacgtgttccgtcgtctgtctgcctgccataacgtactgtt

SEQ ID NO: 498732 - DNA, 75 bp, synthetic construct
  source 1..75: mol_type = other DNA
gaaagtggtgcgcgttccagcctacgacccggaagccgtcgctgaacatgctatcggcatgatgatgacgctaaa

SEQ ID NO: 498733 - DNA, 75 bp, synthetic construct
  source 1..75: mol_type = other DNA
tatgcgtctgctggcgttcgatccgtacccaagtgcggcggcgctggagctcggcgtggagtatgtcgatctgcc

SEQ ID NO: 498734 - DNA, 75 bp, synthetic construct
  source 1..75: mol_type = other DNA
cacagcttattgatgtttataacgcagaagctgatagccataactccctggtcgatgcagctgaaaatatgcagt

SEQ ID NO: 498735 - DNA, 75 bp, synthetic construct
  source 1..75: mol_type = other DNA
ttaatgaatgcgaaggaagaaatcctcataaggcatcataagcagatgttggcattgcatctttcactattaata

SEQ ID NO: 498736 - DNA, 75 bp, synthetic construct
  source 1..75: mol_type = other DNA
atcgggtactgaaagaagttatgagactgggggcgttacagaaaaaactctttatcgacggcaagcgtgtcgggg

SEQ ID NO: 498737 - DNA, 75 bp, synthetic construct
  source 1..75: mol_type = other DNA
acattcaatggcgccaggatccttgagcggggggggcccccccccgccgatgaaattctgcaagcgtcactacgc

SEQ ID NO: 498738 - DNA, 75 bp, synthetic construct
  source 1..75: mol_type = other DNA
ttgaccggattgaggaaaagcgtgatgccatgcagtcgctgattctgccgccaccggtacgccaggcgctggcac

SEQ ID NO: 498739 - DNA, 75 bp, synthetic construct
  source 1..75: mol_type = other DNA
ctggtgcgtcatctgtggctggaagtgaagggcgtggatctgggcgatttcccggtaatgacctttgcggaagcc

SEQ ID NO: 498740 - DNA, 75 bp, synthetic construct
  source 1..75: mol_type = other DNA
gggaaggttttcagccattcttcgcctgccagacccgtgtgcgcgacccgggccgccggggatacacaaaacaca

SEQ ID NO: 498741 - DNA, 75 bp, synthetic construct
  source 1..75: mol_type = other DNA
gccaatgaaagttactttatgcggcgtggcgctatcggcgttcgtgtcctcaataacggctgcaatcctgattct

SEQ ID NO: 498742 - DNA, 75 bp, synthetic construct
  source 1..75: mol_type = other DNA
cggggcaggattgggcgacgctgggtacgtccgcctggttttctctggggggagttgtgttagccatttaccttg

SEQ ID NO: 498743 - DNA, 75 bp, synthetic construct
  source 1..75: mol_type = other DNA
gggcgcagcaagcagcgaagatttgttagcggtcataagtcgtcagggatataccgcgcgtcacgtagtgattac

SEQ ID NO: 498744 - DNA, 75 bp, synthetic construct
  source 1..75: mol_type = other DNA
cttatgggatctcatcgcctaaagagttcaataacgagcgtccttatatcgtttctaagctggactttgcttatc

SEQ ID NO: 498745 - DNA, 75 bp, synthetic construct
  source 1..75: mol_type = other DNA
accgcagtcagcggctgatgaagctaaaaggagttggtcctacaactgcctgtgcgctggttgcctgtatcggta

SEQ ID NO: 498746 - DNA, 75 bp, synthetic construct
  source 1..75: mol_type = other DNA
tgcaagtttaccgccctgtgttatcgggatggaggcgtgctccggggctcattactgggcaagattgtttctgca

SEQ ID NO: 498747 - DNA, 75 bp, synthetic construct
  source 1..75: mol_type = other DNA
aagagaaaacagcaacatataatcgcctgagagggttgatctctgaattcggcgtcattgctccacaaagtacag

SEQ ID NO: 498748 - DNA, 75 bp, synthetic construct
  source 1..75: mol_type = other DNA
tgtaagttggttgagcgcagggggtactggcgggctgttgtagccatcgccgccaaaaacgcgaggctgtgctgg

SEQ ID NO: 498749 - DNA, 75 bp, synthetic construct
  source 1..75: mol_type = other DNA
agaaacgctataacaaagccaaaagcgagcgacaggaactgcgtaagcagattgtcgaccttaaccaacagctca

SEQ ID NO: 498750 - DNA, 75 bp, synthetic construct
  source 1..75: mol_type = other DNA
agtcaggtaagacgacagttgagaataatttccttggaacaacatcttcagacaagctcgacaaagccgttgaga

SEQ ID NO: 498751 - DNA, 75 bp, synthetic construct
  source 1..75: mol_type = other DNA
aactggacggtgacctgtttaacagcggcaagctggccgggaagcaaaccgtgcagctcagtgcggaaaacattc

SEQ ID NO: 498752 - DNA, 75 bp, synthetic construct
  source 1..75: mol_type = other DNA
cgggaacaggggatttttcgctgagtctgccgggaagcgtggataaccgggaagggctgcttgcggcaaatggcg

SEQ ID NO: 498753 - DNA, 75 bp, synthetic construct
  source 1..75: mol_type = other DNA
ctggcaggcagccggcttgacctgaacagcatccgccttgaaaacacagagaaaggtgaaatcagtgccgggcag

SEQ ID NO: 498754 - DNA, 75 bp, synthetic construct
  source 1..75: mol_type = other DNA
tgcttttgtcgggagatgctctgtccctgactgcaggcgtggttaacaatacatccggtcaggtggtggcaaacg

SEQ ID NO: 498755 - DNA, 75 bp, synthetic construct
  source 1..75: mol_type = other DNA
tccggcagactgctttcacagaaaacgctgtctgtgtcaggcagcgaactggtctctgatgatggtctgattcag

SEQ ID NO: 498756 - DNA, 75 bp, synthetic construct
  source 1..75: mol_type = other DNA
caaaaccatctgacactggcgctgttcaataccgctcccggagatattaatgcgggagaatggggattatccgcc

SEQ ID NO: 498757 - DNA, 75 bp, synthetic construct
  source 1..75: mol_type = other DNA
tgcgggcacctatgcaatcgccaacgtcctgctgacgctggcagggacaatcatcgtcatggtatggccaggatt

SEQ ID NO: 498758 - DNA, 75 bp, synthetic construct
  source 1..75: mol_type = other DNA
atcatcatattaaaaatggaatgagccgtgatgaagccgaggcacttgtttcaatggatcttgggcatggcgatg

SEQ ID NO: 498759 - DNA, 75 bp, synthetic construct
  source 1..75: mol_type = other DNA
cggtgctgcaggtgcagccaccggcgaggtggtgggaatgatagccacacagatgtacggtaagccggtgagtga

SEQ ID NO: 498760 - DNA, 75 bp, synthetic construct
  source 1..75: mol_type = other DNA
gacgtagtacgcgttgacgctgagcgcaacctgctgctggtgaaaggtgctgtcccgggtgcaaccggtagcgac

SEQ ID NO: 498761 - DNA, 75 bp, synthetic construct
  source 1..75: mol_type = other DNA
ctccgctacgctgccgatagctttgcgccgcacggcaagcgagttttggttgaagcactcagcccagccgttaaa

SEQ ID NO: 498762 - DNA, 75 bp, synthetic construct
  source 1..75: mol_type = other DNA
agttgatggttataaagatggtgtattgattgcaggagcctggtatttgggacctgcagcatcaacaggtaaagt

SEQ ID NO: 498763 - DNA, 75 bp, synthetic construct
  source 1..75: mol_type = other DNA
gcgatatgcatatcggtggcacgctggatgcgaatggcagcgccacaggtaaagccggtgtactgaataatcaca

SEQ ID NO: 498764 - DNA, 75 bp, synthetic construct
  source 1..75: mol_type = other DNA
gcgggacgtgtggccgcccatgccgtggtgaatgccgcactggcggtggtacagggaaataacgcccgtgccagt

SEQ ID NO: 498765 - DNA, 75 bp, synthetic construct
  source 1..75: mol_type = other DNA
ggatttatggcgggtcagaaggatgtgaccctgaacaccggaacgctcgataaccgtcagggcgcgctggggagc

SEQ ID NO: 498766 - DNA, 75 bp, synthetic construct
  source 1..75: mol_type = other DNA
atgtcggataaattcagattcagccgtcggagcgagaaaaatctggagggcgtaaaaccacagctggttgctgtc

SEQ ID NO: 498767 - DNA, 75 bp, synthetic construct
  source 1..75: mol_type = other DNA
gcaggtgaatattcagatgccttctgccggcggggtgtcacataacacatacagccagttcgacgtcggtaacca

SEQ ID NO: 498768 - DNA, 75 bp, synthetic construct
  source 1..75: mol_type = other DNA
atacggagggacgaatggagtccgccggcaggctggatatttcggcagggagtctgaataaccaccagggtacgg

SEQ ID NO: 498769 - DNA, 75 bp, synthetic construct
  source 1..75: mol_type = other DNA
gcaggtgaatattcagacgccttctgccggcggggtttcacataacacatacagccagttcgacgtcggtaacaa

SEQ ID NO: 498770 - DNA, 75 bp, synthetic construct
  source 1..75: mol_type = other DNA
tgaccattccgtcaggaagcgtggaaaacgtcagtgtcagtggcgagcggcatgttacggactcaggcacatcca

SEQ ID NO: 498771 - DNA, 75 bp, synthetic construct
  source 1..75: mol_type = other DNA
attattggtaatattgggggatcagttactggtgaagctatcgggaatgtaacaaaaggaacactagatgaagct

SEQ ID NO: 498772 - DNA, 75 bp, synthetic construct
  source 1..75: mol_type = other DNA
cagcgactgcagcaggcgcaactcattggtgagattggtaaccaggtggcagatattgccagaacggaaggacag

SEQ ID NO: 498773 - DNA, 75 bp, synthetic construct
  source 1..75: mol_type = other DNA
ggctggaagcgcagacaatacacatcacaacgcaggaccttgataaccagacgggcagtattctggcagacaggg

SEQ ID NO: 498774 - DNA, 75 bp, synthetic construct
  source 1..75: mol_type = other DNA
tgaatggcgacaatacagacgaaaacaaacagccgaatctgggcaaagacgtagcgagtgctacggataaggata

SEQ ID NO: 498775 - DNA, 75 bp, synthetic construct
  source 1..75: mol_type = other DNA
tcaatggatcttgggcatggcgatggaagaggacgatatataaaacaagtttatttcagggaagatgtgtccgat

SEQ ID NO: 498776 - DNA, 75 bp, synthetic construct
  source 1..75: mol_type = other DNA
tcgatctgaccgatgatgatatcgctgcattcagaaaagagcgcgcacgttcacaccgtttcacctcgattccag

SEQ ID NO: 498777 - DNA, 75 bp, synthetic construct
  source 1..75: mol_type = other DNA
ttaagctggtgcccatcgcgcccagtcgcggcattatctatgaccgtaacggtattcctctggcgctcaaccgca

SEQ ID NO: 498778 - DNA, 75 bp, synthetic construct
  source 1..75: mol_type = other DNA
ctatcaggtggcctacgatatggggatcgatcgtctttccgaatggatgggtaaattcggttatggccattacac

SEQ ID NO: 498779 - DNA, 75 bp, synthetic construct
  source 1..75: mol_type = other DNA
atgacggggatgttatccatctggtgccccggacggagggggctaaaaaacggcggtgttcttcaggtggtggcc

SEQ ID NO: 498780 - DNA, 75 bp, synthetic construct
  source 1..75: mol_type = other DNA
cttcatgagccactgagcgggagggccgtgattcatattgtaccgcggctggcaggggccgggggaaatggtgtt

SEQ ID NO: 498781 - DNA, 75 bp, synthetic construct
  source 1..75: mol_type = other DNA
aaactgatgtgttaccaacagtgagtattagcgttgagacaacatcaacagatgtcaatggtgatggttttactg

SEQ ID NO: 498782 - DNA, 75 bp, synthetic construct
  source 1..75: mol_type = other DNA
tgatttaggtgctggtgatgatctaatggtcattcgtggtaacatgctggctaatacaagagtatacactggtga

SEQ ID NO: 498783 - DNA, 75 bp, synthetic construct
  source 1..75: mol_type = other DNA
aagatgcctttaatgccgagggtatggaaaaagttgttgcgaccattacgggaacatctgataacgttacggcag

SEQ ID NO: 498784 - DNA, 75 bp, synthetic construct
  source 1..75: mol_type = other DNA
tggagcattgcttcaattctgcttctctggactgcgattaatcgttgtcggagtgtgctcctgatgagtgctgaa

SEQ ID NO: 498785 - DNA, 75 bp, synthetic construct
  source 1..75: mol_type = other DNA
ttaagctggtgcctatcgcgcccagccgcggcattatctacgaccgtaacggtatccctctggcactcaaccgca

SEQ ID NO: 498786 - DNA, 75 bp, synthetic construct
  source 1..75: mol_type = other DNA
gcaggggctggcatggtttcgctatcgcctgacgccgtcaggtgaagcgcatcgtcaggcgattcatcctggtga

SEQ ID NO: 498787 - DNA, 75 bp, synthetic construct
  source 1..75: mol_type = other DNA
catacttatacgctttacagcagtgtaagtggcgcaaatgtgtatattgataataatattattgatgcgaatggt

SEQ ID NO: 498788 - DNA, 75 bp, synthetic construct
  source 1..75: mol_type = other DNA
tgtctggcgtcaccgccactggtccgcatctgccttcacggggatttacaacgatttggtcgccgcatcagtctg

SEQ ID NO: 498789 - DNA, 75 bp, synthetic construct
  source 1..75: mol_type = other DNA
gattggcattgcccacccgttagaaatgacagtagaaatgcgcagtgaatttgcacagctttttgccgattacga

SEQ ID NO: 498790 - DNA, 75 bp, synthetic construct
  source 1..75: mol_type = other DNA
attttcattctctgtttgttaatcatccctttacccgtctggttacccagcgattaatatggggggtttatccgg

SEQ ID NO: 498791 - DNA, 75 bp, synthetic construct
  source 1..75: mol_type = other DNA
gatgatgcggtattcttctttggcaaagagaatgactggaaggtcaaagtcggtcgtttcgaagcctatgatatg

SEQ ID NO: 498792 - DNA, 75 bp, synthetic construct
  source 1..75: mol_type = other DNA
aattatatatgaacagcaggagtgacgtttcaaagcggaccagagaaaatgaaatgtctgcaatacgggttatgt

SEQ ID NO: 498793 - DNA, 75 bp, synthetic construct
  source 1..75: mol_type = other DNA
acactgggtcttgatgatccgcaggcgttgatttttgattttggtccccggcagtttaccgttcgcttcgatgaa

SEQ ID NO: 498794 - DNA, 75 bp, synthetic construct
  source 1..75: mol_type = other DNA
acactgggtcttgatgatccgcaggcgttgagttttgattttggtccacggcaatttaccgttcgctttgatgaa

SEQ ID NO: 498795 - DNA, 75 bp, synthetic construct
  source 1..75: mol_type = other DNA
ctaacgatatttatgctgatggccgtggttatatctatatgatgaaagaggggcgtggtcgctctaacgctggcg

SEQ ID NO: 498796 - DNA, 75 bp, synthetic construct
  source 1..75: mol_type = other DNA
atgaacagtggaatctcaatggccgtattctgttaggctttgacggtatgcgaaagctggataacggttattttg

SEQ ID NO: 498797 - DNA, 75 bp, synthetic construct
  source 1..75: mol_type = other DNA
taacccgatgccggtgccttacggtgaaatgctggttggttcacgacggatatcccaggacatcagcacccgtga

SEQ ID NO: 498798 - DNA, 75 bp, synthetic construct
  source 1..75: mol_type = other DNA
ggcgatttaaaaatctacggcgacgtagaatttaatatggatgcggaaagtaatcatggcctgctggcaatgacc

SEQ ID NO: 498799 - DNA, 75 bp, synthetic construct
  source 1..75: mol_type = other DNA
ctggaatggcctgaaaacggatccggaaaatggcgtcgtggttaatcttaataccgcctatttagatgctaataa

SEQ ID NO: 498800 - DNA, 75 bp, synthetic construct
  source 1..75: mol_type = other DNA
tccgcagcgatggaagcgaacgtggtaaataatgcttatggttataccgatagcaagggtaattttgtcgatcag

SEQ ID NO: 498801 - DNA, 75 bp, synthetic construct
  source 1..75: mol_type = other DNA
tgttctgaataatgcggccaatatcggtgacctgaaaaatgctctccgtgacagcagtgcggcactggtgaatac

SEQ ID NO: 498802 - DNA, 75 bp, synthetic construct
  source 1..75: mol_type = other DNA
gctgacagtgaaaatggtgggaaagttgagggggataataaagaggagctaattaatcccggtgatacagttaca

SEQ ID NO: 498803 - DNA, 75 bp, synthetic construct
  source 1..75: mol_type = other DNA
ccggagcggcaatggcgctctcgtcgatcaccgtagtgagtaacgccaaccgattgctgcggtttaaaccgaagg

SEQ ID NO: 498804 - DNA, 75 bp, synthetic construct
  source 1..75: mol_type = other DNA
agtaaacaatggtgatggtgataaacttgttactgctaaaaatattactgaagccataaaccagtctggctggaa

SEQ ID NO: 498805 - DNA, 75 bp, synthetic construct
  source 1..75: mol_type = other DNA
gggagccagctggcatctgcagccagaattgctggcggtgataatgttgtctggaaagacggaaaagcagcgctg

SEQ ID NO: 498806 - DNA, 75 bp, synthetic construct
  source 1..75: mol_type = other DNA
cgtttcacaactgaaccgtgaaatcagtcaggcaacggcagcaacgacctgggcactgaagactgaatccggtga

SEQ ID NO: 498807 - DNA, 75 bp, synthetic construct
  source 1..75: mol_type = other DNA
taaactaaaagcatgtaaaatatatgatttccagtcattattaaaagaaaacaataaatggagattactcgcaaa

SEQ ID NO: 498808 - DNA, 75 bp, synthetic construct
  source 1..75: mol_type = other DNA
ttttatttactggtttattctcatcggcacaatcttttgcaaccaattgtattattgatgctgtttttcaaaaga

SEQ ID NO: 498809 - DNA, 75 bp, synthetic construct
  source 1..75: mol_type = other DNA
tgtgctggaaaacaatccccaattgcatgaaaaaatggtaaatgcggacgaactggcgcgacttaacgttgaacg

SEQ ID NO: 498810 - DNA, 75 bp, synthetic construct
  source 1..75: mol_type = other DNA
gatgagcgtcaacctgtggcctcagtggttcccgatggaagcgcggcatctttactatgaagccagtgcgatgat

SEQ ID NO: 498811 - DNA, 75 bp, synthetic construct
  source 1..75: mol_type = other DNA
tatcatttggattaacacctaaacaaggaggtgcattgggtaatatgagtctcagaaaaatggattatagtgcta

SEQ ID NO: 498812 - DNA, 75 bp, synthetic construct
  source 1..75: mol_type = other DNA
ttgcaataaatgcttatctgttttcgacacagactctggcaaaagactgtatcattgataatttctttcagaaaa

SEQ ID NO: 498813 - DNA, 75 bp, synthetic construct
  source 1..75: mol_type = other DNA
gccatcgcaataggggtgtcccgaatctccgataacggtaaggtgataatgaagctgaatgccggtcagaacacc

SEQ ID NO: 498814 - DNA, 75 bp, synthetic construct
  source 1..75: mol_type = other DNA
tttaccgccttgagctggcgatggtcgggcgactgtttgctcaggatccgcagctttatgccgacattattatgt

SEQ ID NO: 498815 - DNA, 75 bp, synthetic construct
  source 1..75: mol_type = other DNA
ccctggaaacgtttcgctggcaccagtcagcaacggtagatgaagaaacctatcgcgccttgcacaacgaacatc

SEQ ID NO: 498816 - DNA, 75 bp, synthetic construct
  source 1..75: mol_type = other DNA
ccctcgaagcccatgaagacggcgcacagacggtgtgggtcggcgaaacggagccgatgcacggtttacaggtga

SEQ ID NO: 498817 - DNA, 75 bp, synthetic construct
  source 1..75: mol_type = other DNA
gcatggataccagcaatatggatgtttttgttcagcagtatgctgatacagtgaaatatctgtccgagaaaaata

SEQ ID NO: 498818 - DNA, 75 bp, synthetic construct
  source 1..75: mol_type = other DNA
tcaggcatgggctgtggcgatggcgctgggcgtggaagacaaagtcactgttccgctgtttgaaggcgtacagaa

SEQ ID NO: 498819 - DNA, 75 bp, synthetic construct
  source 1..75: mol_type = other DNA
agattgtattctggttgatctggcatcggtgaaaaatggaccattacaggccatgctggcggcgcacgatggccc

SEQ ID NO: 498820 - DNA, 75 bp, synthetic construct
  source 1..75: mol_type = other DNA
cggcagcatcaaagttaacggggctgatggtaaggaggctgtgagtctgaatggtcaggatggcacgattaaact

SEQ ID NO: 498821 - DNA, 75 bp, synthetic construct
  source 1..75: mol_type = other DNA
ctgcgaaaaacattgctgaagccataaaccagtctggctggaaaattaaagcggataaagataccggtggtgtta

SEQ ID NO: 498822 - DNA, 75 bp, synthetic construct
  source 1..75: mol_type = other DNA
agtgaaaatggtgggaaggttgaggaaggggggaaagaagagctgattaatcccggtgatacagttacgctgaaa

SEQ ID NO: 498823 - DNA, 75 bp, synthetic construct
  source 1..75: mol_type = other DNA
acctgtcaccattgtttctaccggaccgcaaactaacgttgccttgctgctcaatagccacccggaactgcatag

SEQ ID NO: 498824 - DNA, 75 bp, synthetic construct
  source 1..75: mol_type = other DNA
ccggtcaggaacgccagcttcagcatgttgcaccgggggtattatccgctgaatcaacagatgccgtgaacggaa

SEQ ID NO: 498825 - DNA, 75 bp, synthetic construct
  source 1..75: mol_type = other DNA
gtatcagcctgaacggaggggacgggacaatttctctgacctcacccgcagcttccggtgatacatccaccacag

SEQ ID NO: 498826 - DNA, 75 bp, synthetic construct
  source 1..75: mol_type = other DNA
aaaagagcctacaagcacaaggctgattacttagaagagcgcaaactaatgcttcaatggtgggcagattatctg

SEQ ID NO: 498827 - DNA, 75 bp, synthetic construct
  source 1..75: mol_type = other DNA
tgcaacgtctgcataaagcgggatatcgtctggtgatgctaaccggggataacccgaccaccgccaatgcgatcg

SEQ ID NO: 498828 - DNA, 75 bp, synthetic construct
  source 1..75: mol_type = other DNA
aaagccgaagcgatcaaacgtctgcaaagtgaaggacgtcaggtggcaatggtgggcgacggcattaacgacgcg

SEQ ID NO: 498829 - DNA, 75 bp, synthetic construct
  source 1..75: mol_type = other DNA
cgtctggcggcggcactggaacaaggttccagccatccgctggcacgagcgatcctcgataaagcaggcgatatg

SEQ ID NO: 498830 - DNA, 75 bp, synthetic construct
  source 1..75: mol_type = other DNA
cgcatggggataactaaaggcggcctgtcacactggctgaacggtcgccgcgagccaaatcttgaagatattgcg

SEQ ID NO: 498831 - DNA, 75 bp, synthetic construct
  source 1..75: mol_type = other DNA
cgccttctatgctggtgggcgaagtctttaccttccaacaggcagatcacttttcgcagcattgcgcgaatacga

SEQ ID NO: 498832 - DNA, 75 bp, synthetic construct
  source 1..75: mol_type = other DNA
tccgcccgcgtggccatgccttatttttcagcaaaatattctgcttatctgtcgataccccagcacgccagcgcg

SEQ ID NO: 498833 - DNA, 75 bp, synthetic construct
  source 1..75: mol_type = other DNA
gtcggagcgagaaaaatctggagggcgtcaaaccacagctggttgctgtcgttcgccgtgcgctggagctgacgg

SEQ ID NO: 498834 - DNA, 75 bp, synthetic construct
  source 1..75: mol_type = other DNA
tccggtgagctattatgatctctcgcaggcaggcgtgccggttcattccacggcctttcgtcctgtcgacgatgc

SEQ ID NO: 498835 - DNA, 75 bp, synthetic construct
  source 1..75: mol_type = other DNA
tctgcgcacgaaagagtgccagaaacaactggtcgcggaagggaaaagccagaccatgaacagccgtcacctgac

SEQ ID NO: 498836 - DNA, 75 bp, synthetic construct
  source 1..75: mol_type = other DNA
gtgaaattacccagggcgaagcgtggctggatgaagcaatgctgacgggcgaacctatcccacagcaaaaaggcg

SEQ ID NO: 498837 - DNA, 75 bp, synthetic construct
  source 1..75: mol_type = other DNA
cctggtgattgccaccacggtgctgattatcgcctgtccgtgtgcgctgggactggcgacgccgatgtcgattat

SEQ ID NO: 498838 - DNA, 75 bp, synthetic construct
  source 1..75: mol_type = other DNA
gccagtgcattgctgaactcctcggtaccgggttgttgattttcttcggtgtgggttgcgttgcagcactaaaag

SEQ ID NO: 498839 - DNA, 75 bp, synthetic construct
  source 1..75: mol_type = other DNA
atgaaaacaaaatggtatgacttagcaaaacaactcatgcgggcgcagggcatgagtcaggactcattggcagat

SEQ ID NO: 498840 - DNA, 75 bp, synthetic construct
  source 1..75: mol_type = other DNA
gggctggcggtgatgatattatccgcctggctgattgccgcgagcgtcattgacctcgataaccaatggctgccc

SEQ ID NO: 498841 - DNA, 75 bp, synthetic construct
  source 1..75: mol_type = other DNA
aaccgtcggaggattaatcatcggcagttttttgaatgtggtgatttggcgttaccccatcatgctgcgccaaca

SEQ ID NO: 498842 - DNA, 75 bp, synthetic construct
  source 1..75: mol_type = other DNA
gttaccccatcatgctgcgccaacaaatggcggagtttcacggtgaaatgccgagtacgcagtcaaaaataagcc

SEQ ID NO: 498843 - DNA, 75 bp, synthetic construct
  source 1..75: mol_type = other DNA
actgagccattcagaacgtaataatgttcgggctgcctacattcacacttcagagcatttagatgagcgtaggct

SEQ ID NO: 498844 - DNA, 75 bp, synthetic construct
  source 1..75: mol_type = other DNA
atgattattttatatttatttcatgtagttaatacatactacgattccgagtccggcaccaaattcatatcaacg

SEQ ID NO: 498845 - DNA, 75 bp, synthetic construct
  source 1..75: mol_type = other DNA
cggaagacgtggtgttgtgcctgtccgggatgatcgaagctgttcgtccggatactgatattactgaagtggcga

SEQ ID NO: 498846 - DNA, 75 bp, synthetic construct
  source 1..75: mol_type = other DNA
gaagagattctcaagcttgaaggagaagaaactgaagaaatcaaaccactaccacgtggtactttactagaaaaa

SEQ ID NO: 498847 - DNA, 75 bp, synthetic construct
  source 1..75: mol_type = other DNA
tgggacgatgatacttgtcgatccgcacgcgccagctattgacggaaaactggttatagcccaattggaggaagg

SEQ ID NO: 498848 - DNA, 75 bp, synthetic construct
  source 1..75: mol_type = other DNA
aatggtcattgatgattctgtttctaacacgttgcctggagcgccaccgcgtgatttaggcagttacccggttgt

SEQ ID NO: 498849 - DNA, 75 bp, synthetic construct
  source 1..75: mol_type = other DNA
ctgtattacgcagtcaggtacttgagctacatggcatcagccacggttcggccggagcaagaagcatcgccacaa

SEQ ID NO: 498850 - DNA, 75 bp, synthetic construct
  source 1..75: mol_type = other DNA
tgctggcagactcatgaaagagctggggctggtcagttgccagcagccgactcaccggtataagcgtggcggtca

SEQ ID NO: 498851 - DNA, 75 bp, synthetic construct
  source 1..75: mol_type = other DNA
tagtgagaaggggtggaggatggactacaaccaagatgagcactccgtactacttacagactatgagtttttagc

SEQ ID NO: 498852 - DNA, 75 bp, synthetic construct
  source 1..75: mol_type = other DNA
cctacacctccgtacaccattcccttttgatttcgaattctttgttgtcgctataccgcttaacgttcccggtat

SEQ ID NO: 498853 - DNA, 75 bp, synthetic construct
  source 1..75: mol_type = other DNA
ggaaaatcacgagattaaaacattagacttcccagaaggaaaaatgaccatcgttattactcgtgacgatgaatt

SEQ ID NO: 498854 - DNA, 75 bp, synthetic construct
  source 1..75: mol_type = other DNA
ggaaaatcacgagattaaaacgttagactttccagaagggaagatgaccattgttattactcttgatgaagaact

SEQ ID NO: 498855 - DNA, 75 bp, synthetic construct
  source 1..75: mol_type = other DNA
tagtgagtatgccatcgcaactcttcactatggctcgttcttttaaagccgtagccaatggcaaaatttatatcg

SEQ ID NO: 498856 - DNA, 75 bp, synthetic construct
  source 1..75: mol_type = other DNA
gtaaaattgacactgacccggtaaatcctgaaaaccagattcaggtttatgtggagaatgaagacggttctcacg

SEQ ID NO: 498857 - DNA, 75 bp, synthetic construct
  source 1..75: mol_type = other DNA
tctatcaggggaagacggtcttaaatacatcgggacatgccctgatatagcaatgttaaggacaattgagcctga

SEQ ID NO: 498858 - DNA, 75 bp, synthetic construct
  source 1..75: mol_type = other DNA
tggcatcacaacctggagcttgtgttgcacagattgcacgagaaaatggcgtcaatgataatgttattttcaaat

SEQ ID NO: 498859 - DNA, 75 bp, synthetic construct
  source 1..75: mol_type = other DNA
tgtcgctggagctgggtggccgcgtgatgggcctgtgtcagccgatgatggccacttaccgcccgcataataacc

SEQ ID NO: 498860 - DNA, 75 bp, synthetic construct
  source 1..75: mol_type = other DNA
gcgagtttctccatcctcgctactggctcacgtggtttggtctgggcgtactctggctttgggtacaacttcctt

SEQ ID NO: 498861 - DNA, 75 bp, synthetic construct
  source 1..75: mol_type = other DNA
ttgggtgttctccagcaattgaagactgattatgaacgtcagttatctaaattaattcaagccgaacgacgtaaa

SEQ ID NO: 498862 - DNA, 75 bp, synthetic construct
  source 1..75: mol_type = other DNA
caatgaaaaaatacaaaaaccaaaaaaaagtgcgaagaaaaaaattcctgcacctgtaattgagttagataaata

SEQ ID NO: 498863 - DNA, 75 bp, synthetic construct
  source 1..75: mol_type = other DNA
ccttcgctatcttactgaaaatgtgccatttgcaggaaccagcggtcaatcctgtatgcaggatttgtatcacag

SEQ ID NO: 498864 - DNA, 75 bp, synthetic construct
  source 1..75: mol_type = other DNA
aatggtttgggaaggggggactccgccgacgttcacgctgcctgtaactttcattgctttgaacaatccattcat

SEQ ID NO: 498865 - DNA, 75 bp, synthetic construct
  source 1..75: mol_type = other DNA
gtcgtaccgctgagcgtggttaacccgcgtcaggggcgcgtactatcgatgctgccagccatgctgctgtatctg

SEQ ID NO: 498866 - DNA, 75 bp, synthetic construct
  source 1..75: mol_type = other DNA
acctcagttgttttatttttggtataaaaacgctgagcaaaatatagtttttgcgtgtgttgctcaggtgtacat

SEQ ID NO: 498867 - DNA, 75 bp, synthetic construct
  source 1..75: mol_type = other DNA
tattatggcctgggaccacttttattaggttatgcaaaatggttggtagaatcagcaataaaggataaagtcgaa

SEQ ID NO: 498868 - DNA, 75 bp, synthetic construct
  source 1..75: mol_type = other DNA
caccaatgatatcgaggatcaagtatgtcgatggcttttattcgtaagtatgttacatgctctgatgattcccct

SEQ ID NO: 498869 - DNA, 75 bp, synthetic construct
  source 1..75: mol_type = other DNA
agttttttgaatgtggtgatttggcgttaccccatcatgctgcgccaacaaatggcggagtttcacggtgaaacg

SEQ ID NO: 498870 - DNA, 75 bp, synthetic construct
  source 1..75: mol_type = other DNA
cccgaacgataccgaccagatggacatgcgcacattgtggaacactgacaccgatcgtgcccgcgcagaactgaa

SEQ ID NO: 498871 - DNA, 75 bp, synthetic construct
  source 1..75: mol_type = other DNA
gatgttgttgttgcatgcgctttggacactggggtgtctttacgttggttggcaacagggaaggggaacaagttt

SEQ ID NO: 498872 - DNA, 75 bp, synthetic construct
  source 1..75: mol_type = other DNA
ctggaatggttagcgaccggaaaggggaaaatgcgagaaagtaaggaggctagcttttcggacattttaacgata

SEQ ID NO: 498873 - DNA, 75 bp, synthetic construct
  source 1..75: mol_type = other DNA
gatgcaatacctggcaacatcatagttaggtgttgtcttgacacgggcgctgatattaattggcttgtaagtggt

SEQ ID NO: 498874 - DNA, 75 bp, synthetic construct
  source 1..75: mol_type = other DNA
tgctggaaagaaaaacaaaaccggtagattatattattgatgatggtgagttatcagattttgaaaaattaagag

SEQ ID NO: 498875 - DNA, 75 bp, synthetic construct
  source 1..75: mol_type = other DNA
ggagaagggtattttcctcgatcgctgcgccatcaatctaggaattatttcgatggggaactattgaatataaaa

SEQ ID NO: 498876 - DNA, 75 bp, synthetic construct
  source 1..75: mol_type = other DNA
ttctgcttcgaacataagtaatgggcgttggttaattgatattgacggcgctcttgatgtttttgatgtaattcg

SEQ ID NO: 498877 - DNA, 75 bp, synthetic construct
  source 1..75: mol_type = other DNA
gtcacggtaacatgacgctggaaaatccatcgccagagctgctcacagtgttgatccgtgaactgaccgggaggg

SEQ ID NO: 498878 - DNA, 75 bp, synthetic construct
  source 1..75: mol_type = other DNA
tgggacggggttatcgattgctctaatggcaaatacagttgataaattagatgttcttactaaggaacgcaggta

SEQ ID NO: 498879 - DNA, 75 bp, synthetic construct
  source 1..75: mol_type = other DNA
atttttcgaattgcttttatcactggcgattttctggctggtgcgccgggtacttgtgccaacaggtatttacga

SEQ ID NO: 498880 - DNA, 75 bp, synthetic construct
  source 1..75: mol_type = other DNA
tgctgcagaaaagtgctctgcttaataatgaacagttaggcttactgctgacagcgattagtgaagctttgctca

SEQ ID NO: 498881 - DNA, 75 bp, synthetic construct
  source 1..75: mol_type = other DNA
ttcttcgcagtcttcctggcgctgttcctgaccgctgggctgggtagtggttccactttccagatgatttccgtg

SEQ ID NO: 498882 - DNA, 75 bp, synthetic construct
  source 1..75: mol_type = other DNA
tactgggtatgacgacgtgacatctgtgtcaacagccctgacaggaggacagtccagatatgttaacgctggacg

SEQ ID NO: 498883 - DNA, 75 bp, synthetic construct
  source 1..75: mol_type = other DNA
catatgcaagggaaacgatggtggcagagttgttggtacaaccctgacacagacaaggttgtctttattatttat

SEQ ID NO: 498884 - DNA, 75 bp, synthetic construct
  source 1..75: mol_type = other DNA
gctgatctactttgcagttgcgacggtactggagttagtgtttggtattctggcgagcattattaccatgtggtt

SEQ ID NO: 498885 - DNA, 75 bp, synthetic construct
  source 1..75: mol_type = other DNA
tgttcaggcgtttaaagacaatgtcaaaaatgaagtgactggcgctgatggaggaccagtcagaacagaaattac

SEQ ID NO: 498886 - DNA, 75 bp, synthetic construct
  source 1..75: mol_type = other DNA
cgggataggtgactggaaatcaggttcttcaagcttgtgtaaaatatttccggatacctggtgcgaagctttgtt

SEQ ID NO: 498887 - DNA, 75 bp, synthetic construct
  source 1..75: mol_type = other DNA
atgtcgtggagatggtatccgcagatagcgccgcacttctgaagaaaatcaaatggcctgataaggttaaaaacc

SEQ ID NO: 498888 - DNA, 75 bp, synthetic construct
  source 1..75: mol_type = other DNA
tggcgagcattatcaccatgtggttctcgcgtcatcgtgaattccatgctgatgccggttcggcaaaactggttg

SEQ ID NO: 498889 - DNA, 75 bp, synthetic construct
  source 1..75: mol_type = other DNA
cttctgatgtccaaatggatggcattacgatctgttggcggggaagtgatcgagcaaccgcgtaacgaaagggaa

SEQ ID NO: 498890 - DNA, 75 bp, synthetic construct
  source 1..75: mol_type = other DNA
cgaacgtgcgatgcgtgaagcggcaaccgacacggcagcggcgctgggtttcatctctgcgattggcgcgattgg

SEQ ID NO: 498891 - DNA, 75 bp, synthetic construct
  source 1..75: mol_type = other DNA
ctcaggctttggcagaacgaagggcgtatatcgcggcgtcttccggtaacaacctcttctggcgctggcgttgaa

SEQ ID NO: 498892 - DNA, 75 bp, synthetic construct
  source 1..75: mol_type = other DNA
ttgacggggatgtgttattcagctggcagtgctatgcgccacggaagcagttcgctgagtgggatcgcttattca

SEQ ID NO: 498893 - DNA, 75 bp, synthetic construct
  source 1..75: mol_type = other DNA
aacacgcagtcatcgtccatgaaccgcttatggcgatgatcccgcacgatcatcccctggcaaataacccgagtg

SEQ ID NO: 498894 - DNA, 75 bp, synthetic construct
  source 1..75: mol_type = other DNA
aatggcgtcaatgataatgttattttcaaatggctcaggctctggcagaacgaagggcgtgtttcgcggcgtctt

SEQ ID NO: 498895 - DNA, 75 bp, synthetic construct
  source 1..75: mol_type = other DNA
aacctcgtaaaaactattcgaatgaattcaaatttcgtatggtggaactggcatcacaacctggagcttgtgttg

SEQ ID NO: 498896 - DNA, 75 bp, synthetic construct
  source 1..75: mol_type = other DNA
tcgaatgaattcaaacttcgtatggtggaactggcatcacaacctggaggtttatcccaagaatattgcctttga

SEQ ID NO: 498897 - DNA, 75 bp, synthetic construct
  source 1..75: mol_type = other DNA
agtcaatgcggcctggaaacgcctttatccgggcgttatgccggtcagcctggggaaagggggcgggctgctaaa

SEQ ID NO: 498898 - DNA, 75 bp, synthetic construct
  source 1..75: mol_type = other DNA
ggtctggatccgctgacggtgctggggattgaagcacggacggatgcggaacgccggcagctggctgaaaaatgg

SEQ ID NO: 498899 - DNA, 75 bp, synthetic construct
  source 1..75: mol_type = other DNA
tgctcatgctgctcatttccctgcagacggtggctgccgtacgggagagtgcgcctgagggcacacgcacgcagg

SEQ ID NO: 498900 - DNA, 75 bp, synthetic construct
  source 1..75: mol_type = other DNA
ggtttctgagatgtggctggtttggccaaaacatcatgaacaaagcccggcagcacgtaactttcgtattcagct

SEQ ID NO: 498901 - DNA, 75 bp, synthetic construct
  source 1..75: mol_type = other DNA
cggtgaattgttgattcgtcagtatgaatttattcagtcttttttaggcagcgaagcggattttatttatcagga

SEQ ID NO: 498902 - DNA, 75 bp, synthetic construct
  source 1..75: mol_type = other DNA
caacgccttgagcaaaaagcggaacgctgcaaagcctacaacgataaaaacggcgagctgttgattcgccagtat

SEQ ID NO: 498903 - DNA, 75 bp, synthetic construct
  source 1..75: mol_type = other DNA
ctcagctgctcagcttgctggaaaagatcctttcagttatgtggatgcgataatggctggggtgacagctgcagc

SEQ ID NO: 498904 - DNA, 75 bp, synthetic construct
  source 1..75: mol_type = other DNA
aatggcaaaggctcaaagcattatgaatacctgggggtatcataagtctaatgcaagtattggtgatgctccttt

SEQ ID NO: 498905 - DNA, 75 bp, synthetic construct
  source 1..75: mol_type = other DNA
ttatcagcgggcgggacaccacgcttaccggcgcgcaggctggcggtgaaacggtgaaagtggatgccggtcgtc

SEQ ID NO: 498906 - DNA, 75 bp, synthetic construct
  source 1..75: mol_type = other DNA
ttcctactctaagaactttggcctgtacaacgaacgcgtaggcgcctgcaccctggttgccgcagacagtgaaac

SEQ ID NO: 498907 - DNA, 75 bp, synthetic construct
  source 1..75: mol_type = other DNA
gccgcaggcgcagccaccggcgaggtggtgggaatgatagccacacagatgtacggtaagccggtgagtgaactg

SEQ ID NO: 498908 - DNA, 75 bp, synthetic construct
  source 1..75: mol_type = other DNA
cggcgaactggcggcacacggacaggttctgtccggtggggacatgcaactgaaggggcaggggctggatttaag

SEQ ID NO: 498909 - DNA, 75 bp, synthetic construct
  source 1..75: mol_type = other DNA
gtaacggtgatgtcacgctgaccgccggacgggatatgacgtcacaggcggcatcgctgtcagctcagaaaggcc

SEQ ID NO: 498910 - DNA, 75 bp, synthetic construct
  source 1..75: mol_type = other DNA
aatctgacggctgcaacggtggtgaatcagggtaaggacagcctgacgcaactcagtgcgggcagggatatgacg

SEQ ID NO: 498911 - DNA, 75 bp, synthetic construct
  source 1..75: mol_type = other DNA
gctgaagccgggagagctcaccagccacggacaggttcagggcagccaggtcacgctttctcccctgaagccaca

SEQ ID NO: 498912 - DNA, 75 bp, synthetic construct
  source 1..75: mol_type = other DNA
acgtgcagggcgccgatgccggaaataataacacggtgggcatcagcctctcttacggcagccagtcttcgaaat

SEQ ID NO: 498913 - DNA, 75 bp, synthetic construct
  source 1..75: mol_type = other DNA
cagtatcggcgccggacataatctgaacgtcacgggcagcagtgtggccggggataaccgtgtctccctggctgc

SEQ ID NO: 498914 - DNA, 75 bp, synthetic construct
  source 1..75: mol_type = other DNA
actcagtgccggcagggatatgacgctttccacagtgaccacatccgcgcaggacaatattacctgggataaaaa

SEQ ID NO: 498915 - DNA, 75 bp, synthetic construct
  source 1..75: mol_type = other DNA
ttttgatatctccctgacaggattcagcccgacagaaattgatgaactgttgacggatgttttgccaggtacagg

SEQ ID NO: 498916 - DNA, 75 bp, synthetic construct
  source 1..75: mol_type = other DNA
gttcggtattaatcttgatatgaacgccgataaatcgcgccaggcgctggatgagttaggtgtttgtttcctctt

SEQ ID NO: 498917 - DNA, 75 bp, synthetic construct
  source 1..75: mol_type = other DNA
ttaacatgaatgaaaatattgtgttaattgccgaagagaaattttattcgtccagaaagagagctttggttacag

SEQ ID NO: 498918 - DNA, 75 bp, synthetic construct
  source 1..75: mol_type = other DNA
tgctgagaaagactttcgtagcaaagcagccatattacatgcgaaaataagaaaattttccaataaaggacgcaa

SEQ ID NO: 498919 - DNA, 75 bp, synthetic construct
  source 1..75: mol_type = other DNA
gttattttgcaccatattgactgagttttgcggtttactcgcgcagacgattaacggtattcgcagttatgccgg

SEQ ID NO: 498920 - DNA, 75 bp, synthetic construct
  source 1..75: mol_type = other DNA
ttttcaaataaaacccgtgagttatggcaccggaattacgcgttacagtggatagtcacactttggcaggctttc

SEQ ID NO: 498921 - DNA, 75 bp, synthetic construct
  source 1..75: mol_type = other DNA
ctgcgaacgtcgccatgttaatgcgcctgcatggccatgaagatctgcaagccaatgcgcaaaccgttcttgagg

SEQ ID NO: 498922 - DNA, 75 bp, synthetic construct
  source 1..75: mol_type = other DNA
attcgtgaaaaggaagaaacactgaaacaacgcgtgatccgcgcgctggcggttttttcgggttacgggcgggtg

SEQ ID NO: 498923 - DNA, 75 bp, synthetic construct
  source 1..75: mol_type = other DNA
catcaaccgcaaaaaagcgaacgttatgcgcccggtggagtatcagaacagtgaggcattcactatccgtaacgt

SEQ ID NO: 498924 - DNA, 75 bp, synthetic construct
  source 1..75: mol_type = other DNA
attatcagcaagccatcgaaaatggttttgtccggatgacgcagcgcatggtggagatcatgcatggcggggagg

SEQ ID NO: 498925 - DNA, 75 bp, synthetic construct
  source 1..75: mol_type = other DNA
ttacggcctcaacgcaaacattcacacaacaccggagccacagtttgccctggttaatggactccatgatatgga

SEQ ID NO: 498926 - DNA, 75 bp, synthetic construct
  source 1..75: mol_type = other DNA
cattccggctggctttaaagcactggctgacatgagtccgtttgaatccctgctgattgtggatttgggcggaac

SEQ ID NO: 498927 - DNA, 75 bp, synthetic construct
  source 1..75: mol_type = other DNA
tcagcgatcgctttgtccagacgaccgacacgcaataccagtacagcgatgtgaacgtaattgccattcatcacg

SEQ ID NO: 498928 - DNA, 75 bp, synthetic construct
  source 1..75: mol_type = other DNA
aataacgtcaatgaccatttcaccacggagcgcgtggtggtttccacggaaaaggtgactgagtatcagcaccgt

SEQ ID NO: 498929 - DNA, 75 bp, synthetic construct
  source 1..75: mol_type = other DNA
acgccggacatgattgtctttgtagacgataagggaaaacctgaagcgggtaaaataccatcaagtgaatggtta

SEQ ID NO: 498930 - DNA, 75 bp, synthetic construct
  source 1..75: mol_type = other DNA
gatatcgacttccgtcaacttagccgtcacacctggaccgtgcgtgcgctggcttccatcgaagatttcaacgaa

SEQ ID NO: 498931 - DNA, 75 bp, synthetic construct
  source 1..75: mol_type = other DNA
cacccgtgtaacgctggtgaactttgtcctgatggcgattttcagcggcctgctgttcctcaccttaccgactga

SEQ ID NO: 498932 - DNA, 75 bp, synthetic construct
  source 1..75: mol_type = other DNA
cggagtctgctggccgccggggtgaaagatgacggacgtctggcggaagcgggcaacctgaccgtcagtaccacc

SEQ ID NO: 498933 - DNA, 75 bp, synthetic construct
  source 1..75: mol_type = other DNA
gcagacaaactgcttaatgataagagtcaggttgttgcaggtggcctgctggatatgcaggccggtgatgtggaa

SEQ ID NO: 498934 - DNA, 75 bp, synthetic construct
  source 1..75: mol_type = other DNA
aattcaaaagtcctgatgctgactaaagtaggtgatgatatttttgcggataatactattcgggtgatgctgcca

SEQ ID NO: 498935 - DNA, 75 bp, synthetic construct
  source 1..75: mol_type = other DNA
gcgaaccggatctgctgctgctctcttatcatggcattccccagcgttatgcagatgaaggcgatgattatccgc

SEQ ID NO: 498936 - DNA, 75 bp, synthetic construct
  source 1..75: mol_type = other DNA
actcgcttctgcactggggctggcgccggaaaaagtgatgatgacgttccagtcgcgtttcggacgcgaaccctg

SEQ ID NO: 498937 - DNA, 75 bp, synthetic construct
  source 1..75: mol_type = other DNA
ctgaaaatgctgggagaaaaaggtgtcggccatattcaggtgatgtgtccgggctttgctgcggattgtctggaa

SEQ ID NO: 498938 - DNA, 75 bp, synthetic construct
  source 1..75: mol_type = other DNA
ggcgtaacacagccggatggcaccgagctgtatctggctaacgcgtcctgggtatgggtgccgttcctcgccatc

SEQ ID NO: 498939 - DNA, 75 bp, synthetic construct
  source 1..75: mol_type = other DNA
tgtgtgctgacgctggtggccattagcgtgattgctattctgctttccgccgtagttccaaaagtggttgagcag

SEQ ID NO: 498940 - DNA, 75 bp, synthetic construct
  source 1..75: mol_type = other DNA
ctgccgggcagttcagcaataatgacggcacgataaatgccgacacactgcagatatcggcacaaagcctgtcaa

SEQ ID NO: 498941 - DNA, 75 bp, synthetic construct
  source 1..75: mol_type = other DNA
atttattccacttgctgaaaaatccggattaatcgttccgcttacgcaaagcctgatgaatcaggttgccagaca

SEQ ID NO: 498942 - DNA, 75 bp, synthetic construct
  source 1..75: mol_type = other DNA
agtggcgcgatatagcagaattcgacaaggcagcggcgcaggcttccagagatggcaaacccgaaccggaatatg

SEQ ID NO: 498943 - DNA, 75 bp, synthetic construct
  source 1..75: mol_type = other DNA
attggaaaaattgctacagaacaactgaaaccggttattaaagaaggtagtgctgaggtaattggggcagttacg

SEQ ID NO: 498944 - DNA, 75 bp, synthetic construct
  source 1..75: mol_type = other DNA
agtagccggatacagggacaacatactgagctggatgcgaccagcggaaacctgtccacacaaaatgcgcaactg

SEQ ID NO: 498945 - DNA, 75 bp, synthetic construct
  source 1..75: mol_type = other DNA
gccaaggagcatggtgctgatgttctctcctgtagtgaaaatccttccggtgaagcctgtaagcgggggcaggct

SEQ ID NO: 498946 - DNA, 75 bp, synthetic construct
  source 1..75: mol_type = other DNA
gatagccactgaaacagcggctaatacggcagcagcaatagctggtgctacaggtaatgccagtagggataccgg

SEQ ID NO: 498947 - DNA, 75 bp, synthetic construct
  source 1..75: mol_type = other DNA
aaataccagcaggcgatacaggccgcaacggcagcagtacagggactggccggcggaaatctgagtgcagccctg

SEQ ID NO: 498948 - DNA, 75 bp, synthetic construct
  source 1..75: mol_type = other DNA
taatcgtcagggtgtgctgggaagccagacgtcactgcgggtatcatccgacacgttgatgaaccagaaagggac

SEQ ID NO: 498949 - DNA, 75 bp, synthetic construct
  source 1..75: mol_type = other DNA
aacattcacaaccaggccggctccattcagggagcaaatgtcagcctgacggcccggacggatattaacagtacc

SEQ ID NO: 498950 - DNA, 75 bp, synthetic construct
  source 1..75: mol_type = other DNA
ggatggatgcctcgcgcacggattataccgatatcattgcccggtcagtgaagattaatgcgggtatctgggcgc

SEQ ID NO: 498951 - DNA, 75 bp, synthetic construct
  source 1..75: mol_type = other DNA
catacgcaggtggatatgtgggagaatatttccctgtgatattgaggccagtgttaggtaactctgcaagtactg

SEQ ID NO: 498952 - DNA, 75 bp, synthetic construct
  source 1..75: mol_type = other DNA
agcaggcaggactggataaacttgccaaaggtgagttacctgaaggagccaatataagcaaagttatagttgatg

SEQ ID NO: 498953 - DNA, 75 bp, synthetic construct
  source 1..75: mol_type = other DNA
ccgtgaagttgaacaagtggtaaatcgattagttgaacgttataactcccctacgatgctgtcccatgcatggga

SEQ ID NO: 498954 - DNA, 75 bp, synthetic construct
  source 1..75: mol_type = other DNA
tactggtaccgcccgacagaagtcagggatgaacataccggggctttgctgggatatcgcaagcgttttcagggg

SEQ ID NO: 498955 - DNA, 75 bp, synthetic construct
  source 1..75: mol_type = other DNA
taacctcaggaaataactatgtcagatgctttaaaacagaaccatttgtaaaagtgtccatctttcacggggtca

SEQ ID NO: 498956 - DNA, 75 bp, synthetic construct
  source 1..75: mol_type = other DNA
tgttgtcggatcctgatttttgcgattacacgctggtctgcatccgcaaccaccaggcgaaggatgctgacggct

SEQ ID NO: 498957 - DNA, 75 bp, synthetic construct
  source 1..75: mol_type = other DNA
attcatcgtgtgattttcagtgaaatgcacgtacttatccagcgcaacagtccccttgacctgatcacgttgtcc

SEQ ID NO: 498958 - DNA, 75 bp, synthetic construct
  source 1..75: mol_type = other DNA
tgagggggtaaaccccgaaaccatgctggaaggtgtgaaacgctatgcgggctgggtatctgcgatgggtaacag

SEQ ID NO: 498959 - DNA, 75 bp, synthetic construct
  source 1..75: mol_type = other DNA
acacccgaaaccatgcttgatggcgtgaggcgttatgccgcctgggtacgtgccacaggaaataccggcacacaa

SEQ ID NO: 498960 - DNA, 75 bp, synthetic construct
  source 1..75: mol_type = other DNA
aacgcaggctacccaattactgaaactctgagcggcagcggcgatctgggtcaggttctggttgatgcgatcaag

SEQ ID NO: 498961 - DNA, 75 bp, synthetic construct
  source 1..75: mol_type = other DNA
ggcgatcctcatcgtgacgcagttcaggttaacccagggccagcccggtacagacagcgccccgcgacttgatgc

SEQ ID NO: 498962 - DNA, 75 bp, synthetic construct
  source 1..75: mol_type = other DNA
taaatctgaattaaagaaaaaatttataatctacggccctcaaattatctcgtcagccaatagtagccttttgat

SEQ ID NO: 498963 - DNA, 75 bp, synthetic construct
  source 1..75: mol_type = other DNA
atgccgactcttgatgtaacaggcgtgcttttcgaccccgatttttgcgacttcaacctgtgggtaacgcgtcgc

SEQ ID NO: 498964 - DNA, 75 bp, synthetic construct
  source 1..75: mol_type = other DNA
tgcaggcagggcaggtaatcagcggtgcaattctgattgtgacgactgaacgactgacgcagggacagacttgcc

SEQ ID NO: 498965 - DNA, 75 bp, synthetic construct
  source 1..75: mol_type = other DNA
gtcgacccgtatacggcgtacggtgccgggttcgttcaggcgcattgcgagcttctggaattcgacgggggaacg

SEQ ID NO: 498966 - DNA, 75 bp, synthetic construct
  source 1..75: mol_type = other DNA
taatgggggatatcaaagcgtcagcttcggtgacggacaaaataattaccgtattgtggacagaaacaaccagtc

SEQ ID NO: 498967 - DNA, 75 bp, synthetic construct
  source 1..75: mol_type = other DNA
gtgcagaagaccgtgaacgcttccagcatgcggttgagcgtctgaaactgaaacaaccggcgaacgccaccgtta

SEQ ID NO: 498968 - DNA, 75 bp, synthetic construct
  source 1..75: mol_type = other DNA
aaaacgcaaaggctttgctgatgcgcgtctggcaaaactggcgggcgtgcgtgaagcggaaatccgcaagctgcg

SEQ ID NO: 498969 - DNA, 75 bp, synthetic construct
  source 1..75: mol_type = other DNA
actatggaagaggcgctggcggttgccgctgaagttggcttcccgtgcatcattcgacctagctttactatgggc

SEQ ID NO: 498970 - DNA, 75 bp, synthetic construct
  source 1..75: mol_type = other DNA
tacaaacgtgtggatacctgtgcggcagaatttgccaccgacaccgcgtatatgtactccacctatgaagaagag

SEQ ID NO: 498971 - DNA, 75 bp, synthetic construct
  source 1..75: mol_type = other DNA
taccggttatcggtaccagcccggatgccatcgaccgtgcggaagaccgtgaacgcttccagcatgcggttgacc

SEQ ID NO: 498972 - DNA, 75 bp, synthetic construct
  source 1..75: mol_type = other DNA
cgttggcgaaagtggcggcacgcgtgatggcaggtaaatcgctggctgagcagggcgtgactaaagaagttatcc

SEQ ID NO: 498973 - DNA, 75 bp, synthetic construct
  source 1..75: mol_type = other DNA
ggaggtgggcgaactaccggcctcccgatctcgggattcagtgagcaggactacggttcaacgaacttcaactgg

SEQ ID NO: 498974 - DNA, 75 bp, synthetic construct
  source 1..75: mol_type = other DNA
aacacgggttgtgggattcagtgatgtcacccccacccttagtgtcagaaaagaggacgggaaaaaagagtgggt

SEQ ID NO: 498975 - DNA, 75 bp, synthetic construct
  source 1..75: mol_type = other DNA
ttggtcatttctcacaaatccgcccagaatcacactaaatcaccacaccccgcgccacacaaggcttgctggttc

SEQ ID NO: 498976 - DNA, 75 bp, synthetic construct
  source 1..75: mol_type = other DNA
ttgctggaccacttcctcgatgacgcggtagaagtggatgtggacgccatctgcgacggcgaaatggtgctgatt

SEQ ID NO: 498977 - DNA, 75 bp, synthetic construct
  source 1..75: mol_type = other DNA
gggggaacgccgccgtataaatacgcctggaagaaggatggtcagccggttgacgggcagacgacagacaccttc

SEQ ID NO: 498978 - DNA, 75 bp, synthetic construct
  source 1..75: mol_type = other DNA
agttcgggtggtgcagtgtatctggacgtcggtaatgactccaacttactgatagtgttttatgttcagataatg

SEQ ID NO: 498979 - DNA, 75 bp, synthetic construct
  source 1..75: mol_type = other DNA
gatgcaaaacagcagcctttcgtgaccaatacggtggatgccgaaggtctggccctgacacacaatggtaagtca

SEQ ID NO: 498980 - DNA, 75 bp, synthetic construct
  source 1..75: mol_type = other DNA
cgatgaaatagcgttggtaggctaccccgacgcccacgcccgactcgatcccagtttccgtaatggcaaagaagt

SEQ ID NO: 498981 - DNA, 75 bp, synthetic construct
  source 1..75: mol_type = other DNA
ccagcttccgtaacggtaaagaagtttttgatcgtgaccttctcgatatgcgtatcgtcactgaagaggtagtag

SEQ ID NO: 498982 - DNA, 75 bp, synthetic construct
  source 1..75: mol_type = other DNA
tttcgcgccagtgcggttggtagccataccacgctatcaaggatcattcgtatggtgcgccaggcccagagcagc

SEQ ID NO: 498983 - DNA, 75 bp, synthetic construct
  source 1..75: mol_type = other DNA
gctatgcgggcacctacgcaatcgccaacgtcctgctgacgctggcagggacaatcatcgtcatggtatggccag

SEQ ID NO: 498984 - DNA, 75 bp, synthetic construct
  source 1..75: mol_type = other DNA
cgtatcgtcactgaagaagtggtcgttaaaaaccataacgctgtaggcaaacgtctcgcacaactgaagttgacc

SEQ ID NO: 498985 - DNA, 75 bp, synthetic construct
  source 1..75: mol_type = other DNA
tttaatcggtctggtgagtttgattgttggtgcgcgttacttgccgaaattgcagcatcaggacttacagaccag

SEQ ID NO: 498986 - DNA, 75 bp, synthetic construct
  source 1..75: mol_type = other DNA
cgtctggcggcggcgctggagcaaggttccagccatccattggcacgagcgatccttgataaagcaggcgatatg

SEQ ID NO: 498987 - DNA, 75 bp, synthetic construct
  source 1..75: mol_type = other DNA
cgatttaactccgccgacagcgcgcctggttactgatgacggtgaaaagaacgtaccgctggtggaagtgcagcc

SEQ ID NO: 498988 - DNA, 75 bp, synthetic construct
  source 1..75: mol_type = other DNA
gattgcgggtgtattgccggatggtaaagccgaagcgattaaacgtctgcaaagcgagggacgccaggtggcgat

SEQ ID NO: 498989 - DNA, 75 bp, synthetic construct
  source 1..75: mol_type = other DNA
cgcctggttactgacgaaggtgaaaaaagcgtgccgctggcagatgttcagccaggtatgttactgcgcctgacg

SEQ ID NO: 498990 - DNA, 75 bp, synthetic construct
  source 1..75: mol_type = other DNA
gggcagtgtctccccacaagatttagtgcaggcggtggaaaaagcgggctacggcgcggaagcgattgaagatga

SEQ ID NO: 498991 - DNA, 75 bp, synthetic construct
  source 1..75: mol_type = other DNA
cagtgcctccccacaagatttagtgcaggcggtggaaaaagcgggctacggcgcagaggcgattgaagatgatgc

SEQ ID NO: 498992 - DNA, 75 bp, synthetic construct
  source 1..75: mol_type = other DNA
acgccactctggtatagaaagcgggcagctctccgcggcactggataatttaagccttgggtatgcattaaccta

SEQ ID NO: 498993 - DNA, 75 bp, synthetic construct
  source 1..75: mol_type = other DNA
cggttccgctatggttaaggtgaaaggaactaacaaacggcctaaccaatatcgttattcatgcgatgcaatgcg

SEQ ID NO: 498994 - DNA, 75 bp, synthetic construct
  source 1..75: mol_type = other DNA
cggttgcgctatggttaaagtgaagggaacgaacaaacgttctgaccagtatcgttatacatgtgatgcgacccg

SEQ ID NO: 498995 - DNA, 75 bp, synthetic construct
  source 1..75: mol_type = other DNA
atccatgtttagacatgctgacagataagaactggaaaccggaggaagaaataccaggtccattacaggaatttg

SEQ ID NO: 498996 - DNA, 75 bp, synthetic construct
  source 1..75: mol_type = other DNA
accgtggtgtgcactaccgttatgacgaatttggccgtgcggtggaaaaggaggggcggagcggaacacagagtt

SEQ ID NO: 498997 - DNA, 75 bp, synthetic construct
  source 1..75: mol_type = other DNA
tgtttgcaagcttaggggggacagaaacagtaggggaactatttacttattctattaaattaaaaactcctgaca

SEQ ID NO: 498998 - DNA, 75 bp, synthetic construct
  source 1..75: mol_type = other DNA
ttgaaaaagaagccgctattcaggtttccaacgtagcaatcttcaatgcgacaaccggcaaggctgaccgtgtag

SEQ ID NO: 498999 - DNA, 75 bp, synthetic construct
  source 1..75: mol_type = other DNA
tgaccctgtggctggcgattccggtcatggtgttctcgttcaaccactctccgatcatctcttctttcgccgttg

SEQ ID NO: 499000 - DNA, 75 bp, synthetic construct
  source 1..75: mol_type = other DNA
atggaaacgactcaaaccagcacgattgtgtcgaaagactcacgtagtgcatggcgcaagacagacaccatgtgg

SEQ ID NO: 499001 - DNA, 75 bp, synthetic construct
  source 1..75: mol_type = other DNA
ttgattgctgggttaattgtcagtctggtgcctgttgttatttgcttcctgtttggcgcttacgtgctgcgcatg

SEQ ID NO: 499002 - DNA, 75 bp, synthetic construct
  source 1..75: mol_type = other DNA
cgtaaatacagcggccacatcagcaacgtcttcgttgtgattatgggtctgattgctatctccgctatcttctac

SEQ ID NO: 499003 - DNA, 75 bp, synthetic construct
  source 1..75: mol_type = other DNA
ggctaaccactttaacgcgccgatcatcgcgtggatggctccgattatcgcgattatcgctatcaccaaatcctt

SEQ ID NO: 499004 - DNA, 75 bp, synthetic construct
  source 1..75: mol_type = other DNA
atcccgctgattatcatggcaatccttgccttcccgatgaccttcttcgcacaccgcggcctgacccgcttcgtg

SEQ ID NO: 499005 - DNA, 75 bp, synthetic construct
  source 1..75: mol_type = other DNA
gccgcgctgtgaaatttactcgatagacgaggcattttgtgacctcactggtgtacgtaactgtcgtgatctgac

SEQ ID NO: 499006 - DNA, 75 bp, synthetic construct
  source 1..75: mol_type = other DNA
atctgttcgatgataatgcgctgcgcgctggcagtgagaagctgatggaagtgctggatcatctcaatgccaaag

SEQ ID NO: 499007 - DNA, 75 bp, synthetic construct
  source 1..75: mol_type = other DNA
cgttttatgccagttgcgaaactgcgtttcgaccagatctgaaaggcagaccggttgttgttctgtcaaataacg

SEQ ID NO: 499008 - DNA, 75 bp, synthetic construct
  source 1..75: mol_type = other DNA
attagtcccggttgattatgtttggggcgttggtagacggctttctaagcgtttaaatgcgttgggtatcaccac

SEQ ID NO: 499009 - DNA, 75 bp, synthetic construct
  source 1..75: mol_type = other DNA
gttgtatcgacctggaggatgccccgccaccaaaacaacagatcatatgcagcaggagctttgggcagcgtataa

SEQ ID NO: 499010 - DNA, 75 bp, synthetic construct
  source 1..75: mol_type = other DNA
accgtcgcgtgcgctatctcactaaatgcatggaaaatctcaaaatcgtcgattactcccctcagcaggaaggca

SEQ ID NO: 499011 - DNA, 75 bp, synthetic construct
  source 1..75: mol_type = other DNA
cgcggacattatccggcgtaatgccattacacatcccggctttgtgccggtgatccctctgaaggtgccagtgca

SEQ ID NO: 499012 - DNA, 75 bp, synthetic construct
  source 1..75: mol_type = other DNA
gggtatgtttctgatgcgatgaaagtggtggattctgctgtatcggatgccgccaggctgttgcagggggatatc

SEQ ID NO: 499013 - DNA, 75 bp, synthetic construct
  source 1..75: mol_type = other DNA
atgcgtcatttcgcggcgtaccgtttaaggttgaagaagaaagtgcgggaaccggtcgccgtgtggaaacacatg

SEQ ID NO: 499014 - DNA, 75 bp, synthetic construct
  source 1..75: mol_type = other DNA
gaggaaagggcacactctactttgcagggcagggaattcagcaacaatggcagatgaagcgagaaatgctttctc

SEQ ID NO: 499015 - DNA, 75 bp, synthetic construct
  source 1..75: mol_type = other DNA
agcaggaatcatgcttggggattttttcagccatggtgtggctcagctcaacttgttcgatgagaacgcgccgcg

SEQ ID NO: 499016 - DNA, 75 bp, synthetic construct
  source 1..75: mol_type = other DNA
acagcaggacgacgcagaaccagaagcagcaaagtaattatgttgccagtgcgattcgcacaacagcaataagcg

SEQ ID NO: 499017 - DNA, 75 bp, synthetic construct
  source 1..75: mol_type = other DNA
gcaatacagcaactccgcatcgggcgagttgttgatacccagttgtgatacgcgggattttatcgagctggccaa

SEQ ID NO: 499018 - DNA, 75 bp, synthetic construct
  source 1..75: mol_type = other DNA
tatgtggcttgccagcggtggcgactggttctttgagttaagtgatacggaacaaaaagaagcaatagacctgtt

SEQ ID NO: 499019 - DNA, 75 bp, synthetic construct
  source 1..75: mol_type = other DNA
tggtttttcgatttaaatgattcagagcaacaagaggcaatagatctgttgctgaaattccatcaccttccacat

SEQ ID NO: 499020 - DNA, 75 bp, synthetic construct
  source 1..75: mol_type = other DNA
gataatattgatcgtgggccgaagagtcttaacgtgctgcgcctgctaaaccaaccctggtttacgtcggttaaa

SEQ ID NO: 499021 - DNA, 75 bp, synthetic construct
  source 1..75: mol_type = other DNA
ccgacttacttatttctgtcggcgataatattgatcgtgggccggagagtcttgacgtcctgcgcctgctaaacc

SEQ ID NO: 499022 - DNA, 75 bp, synthetic construct
  source 1..75: mol_type = other DNA
tgatcgcgtgcagaaatcactcaaaggcgagttaggtaatgactccaacttattgatagtgttttatgttcagat

SEQ ID NO: 499023 - DNA, 75 bp, synthetic construct
  source 1..75: mol_type = other DNA
cattcagacgttcgctaaccagatttatattgataccggctcaccgaaaagcggacggttatcgttttataaaat

SEQ ID NO: 499024 - DNA, 75 bp, synthetic construct
  source 1..75: mol_type = other DNA
ccgctggcgtttgtgaaaaatctggagaagacacttaccgtgaataccggtgcgctgctgacaatgtcagtcagt

SEQ ID NO: 499025 - DNA, 75 bp, synthetic construct
  source 1..75: mol_type = other DNA
cgggattaagcgtattcgcgtttttgctgaccgcgataaaaatttcaccaaaatgtcggaggcaattatcaggcg

SEQ ID NO: 499026 - DNA, 75 bp, synthetic construct
  source 1..75: mol_type = other DNA
tcgctgcgaaatatactcaattgatgagctcttttgtgacctcaccggtgtacgtaactgtcgcgatctttccga

SEQ ID NO: 499027 - DNA, 75 bp, synthetic construct
  source 1..75: mol_type = other DNA
cttatttctataatgccgcttctgagtatttaatctccacccgacagatgtcgtgccgttttatcaaatcaacaa

SEQ ID NO: 499028 - DNA, 75 bp, synthetic construct
  source 1..75: mol_type = other DNA
cactcagtacacattatgggacaaaggtgtattttccggccaacttccggtttcaacggggtctcatcttctgac

SEQ ID NO: 499029 - DNA, 75 bp, synthetic construct
  source 1..75: mol_type = other DNA
atgtaaaaaaattacgtttaaaagcaggattaacacagaaagaatgcagtcatatttatggtgttgggctaagaa

SEQ ID NO: 499030 - DNA, 75 bp, synthetic construct
  source 1..75: mol_type = other DNA
gggtatgtttctgatgcgatgaaagtggtggattttgccgtatcggatgccgccaggctgttgcagggggatatc

SEQ ID NO: 499031 - DNA, 75 bp, synthetic construct
  source 1..75: mol_type = other DNA
ttggctatatgggttctttcaagaatctgtgtgacaagcgcggcgacagcgtaagcttcgatgaatactggaaga

SEQ ID NO: 499032 - DNA, 75 bp, synthetic construct
  source 1..75: mol_type = other DNA
cagaactgacctggcatggtatccagcaaccgctgttgggccataaagtgaatccgttcaaggcgctgtataacc

SEQ ID NO: 499033 - DNA, 75 bp, synthetic construct
  source 1..75: mol_type = other DNA
aggagcaggtggcaaacaaaatgcaggagtggtttgaatctggtctgcaacagtgggatatctcccgcgacgcac

SEQ ID NO: 499034 - DNA, 75 bp, synthetic construct
  source 1..75: mol_type = other DNA
tataaagaaataataataagaaaaggcgataagcttgacgctgtatgcttgagatttataaatgatgactacaag

SEQ ID NO: 499035 - DNA, 75 bp, synthetic construct
  source 1..75: mol_type = other DNA
ttttattaatagctgcatgtttcttttgttttgctccaccacgaagaggatatgacagaaatgagatcattccat

SEQ ID NO: 499036 - DNA, 75 bp, synthetic construct
  source 1..75: mol_type = other DNA
gctgttcgagtgaatctacacttaaataagcaaattgagctatctgaagctctacagtatggctttgatcatgat

SEQ ID NO: 499037 - DNA, 75 bp, synthetic construct
  source 1..75: mol_type = other DNA
tccgttttccggtggtggacgaagccaaagaacgcgagcagcgtaaatttttacagcacgcgcggacgtcaaaca

SEQ ID NO: 499038 - DNA, 75 bp, synthetic construct
  source 1..75: mol_type = other DNA
aacccgcgcgtgtcgcgttcttcggcgctggcgtcgaaagcgaccggcttcccgattgctaaagtggcggcgaaa

SEQ ID NO: 499039 - DNA, 75 bp, synthetic construct
  source 1..75: mol_type = other DNA
accatggaagaagcgctggcggttgccgccgacgtgggcttcccatgcattattcgtccatcctttaccatgggc

SEQ ID NO: 499040 - DNA, 75 bp, synthetic construct
  source 1..75: mol_type = other DNA
gccacattcttcgtatggcgtcaccgcgcctgcgcattatcagcggacaacgccttctggccattctcgccggtc

SEQ ID NO: 499041 - DNA, 75 bp, synthetic construct
  source 1..75: mol_type = other DNA
gcggggagggtactgaataagcttaacagcctgccgggagacgggcagcgcctgacttatctgcgcaaaatcagc

SEQ ID NO: 499042 - DNA, 75 bp, synthetic construct
  source 1..75: mol_type = other DNA
catattaatcgttcagcaattaacgtgttgttattgcgccatgaacgcagttctctgccgctcggcaagtttttg

SEQ ID NO: 499043 - DNA, 75 bp, synthetic construct
  source 1..75: mol_type = other DNA
agcttcctcgcgatgctggtgatgatccagcttttgctgttgctggcgtatgaaagtttgtggcccgatgcctag

SEQ ID NO: 499044 - DNA, 75 bp, synthetic construct
  source 1..75: mol_type = other DNA
aatcagacaaagcacaaatgccggaaaaacaacagcaaacgctcaatcgctatggctctgcatcaaagttatcaa

SEQ ID NO: 499045 - DNA, 75 bp, synthetic construct
  source 1..75: mol_type = other DNA
cgcctatgaagcaccgtcggttaaacgctcatggtatcagtgccagaatcttgaatgttcctgcacatttaccgc

SEQ ID NO: 499046 - DNA, 75 bp, synthetic construct
  source 1..75: mol_type = other DNA
gctgaagaactgttggttcaccgcaaagccgatctggtgatcacccaaatgccagtgatcagccgttccgtcatt

SEQ ID NO: 499047 - DNA, 75 bp, synthetic construct
  source 1..75: mol_type = other DNA
actggaaagcgtggatacgataattatgaagcctcggtgcaatgaacaggaatcagacaaagcaaaaataccgga

SEQ ID NO: 499048 - DNA, 75 bp, synthetic construct
  source 1..75: mol_type = other DNA
ttaaatgagccggttacatttacggcactggagagtgtggataagataatcatgaaaccccggcgcaatgaacag

SEQ ID NO: 499049 - DNA, 75 bp, synthetic construct
  source 1..75: mol_type = other DNA
gaaaaacaacagcaaacgctcaatcgctatggctccgcgtcaaaactgtcaagccgtcagcagattcctgtctga

SEQ ID NO: 499050 - DNA, 75 bp, synthetic construct
  source 1..75: mol_type = other DNA
gggagtctggtcgtcgtaagatcagtcagtacacccgttacggtactctggtgctggcaatattccagtcgatcg

SEQ ID NO: 499051 - DNA, 75 bp, synthetic construct
  source 1..75: mol_type = other DNA
taaacaaagtactagcttaccttaataaccttaagggatatcacacaatagtttttaatatgggaaaacagatta

SEQ ID NO: 499052 - DNA, 75 bp, synthetic construct
  source 1..75: mol_type = other DNA
gccaactggcgcgcgttaaaacaggtacttcaacacggcgatccgcgtcgagtggcgtgggataaaacaacgcat

SEQ ID NO: 499053 - DNA, 75 bp, synthetic construct
  source 1..75: mol_type = other DNA
cattcagacgttcgctaaccagatttatatagataccggatcgccgaaaagcggaaagcgggcggctgtcatttt

SEQ ID NO: 499054 - DNA, 75 bp, synthetic construct
  source 1..75: mol_type = other DNA
gtataccttcactaaagatcagatcgaagaagagctgctgtttatgccggaaggcggtatgccggatatgcaggt

SEQ ID NO: 499055 - DNA, 75 bp, synthetic construct
  source 1..75: mol_type = other DNA
tcagcagcatccggtgatgccggtgcgtatacctgcgagatttctgattcagcaagccctgttaacaaggtgacc

SEQ ID NO: 499056 - DNA, 75 bp, synthetic construct
  source 1..75: mol_type = other DNA
gaagggatgacactgcattttgtcactgaccgtaagccgctatcgcgcgaggatattttgcagatggtggcgcaa

SEQ ID NO: 499057 - DNA, 75 bp, synthetic construct
  source 1..75: mol_type = other DNA
ggaattgatgagctgctgctggaggcgttcagcagttttacagagataatgtctaagcaatatcaggcatttttt

SEQ ID NO: 499058 - DNA, 75 bp, synthetic construct
  source 1..75: mol_type = other DNA
ggtcaggcgtttgctgcaagccaatttacgcaacgatgtctccgcagtcgaagaagtggaaacattaatgcgcaa

SEQ ID NO: 499059 - DNA, 75 bp, synthetic construct
  source 1..75: mol_type = other DNA
agctgcgctttaccggctctatccagcgtgacgataccggggaagtgcaggccgtggagcttgtggtgcgtggac

SEQ ID NO: 499060 - DNA, 75 bp, synthetic construct
  source 1..75: mol_type = other DNA
tcatcaccgccggtgcgttagaagcgcttaatctgagcttacaggcggtcaccgagcccggcgactgggtgattg

SEQ ID NO: 499061 - DNA, 75 bp, synthetic construct
  source 1..75: mol_type = other DNA
gcagccaaagatgctgaggagaaagcaaaggctgattccgaagcagaagaacagcgtaaggccgacgaggaggca

SEQ ID NO: 499062 - DNA, 75 bp, synthetic construct
  source 1..75: mol_type = other DNA
ggttattcaatactggcagaccacgggggatgaaagtttcattgcgcatgaaggcatggcgctacttctggaaac

SEQ ID NO: 499063 - DNA, 75 bp, synthetic construct
  source 1..75: mol_type = other DNA
tattcacaacagccttgatgatgaaaagaaagggaatcaagtgcatacccgtgcattgcacgcagaggagaatgc

SEQ ID NO: 499064 - DNA, 75 bp, synthetic construct
  source 1..75: mol_type = other DNA
gattttgaagataaagagtttatgcctaaatctgtttttcatttgccggaaactattaatagggttattaaatta

SEQ ID NO: 499065 - DNA, 75 bp, synthetic construct
  source 1..75: mol_type = other DNA
accagacctaaaaacaaaagatggttaccctgttgaggtgaaggtagatactttttctccttcagcattaaaaca

SEQ ID NO: 499066 - DNA, 75 bp, synthetic construct
  source 1..75: mol_type = other DNA
ttctggcgattacaaggcgacggattctggcaattacgcaatgccgagctttgctcaacagcaggtagcagccga

SEQ ID NO: 499067 - DNA, 75 bp, synthetic construct
  source 1..75: mol_type = other DNA
cagccgacaaagaaagagctgattgataatcaggtagcggggggttttgatgaaacagcttaccagcaactgctt

SEQ ID NO: 499068 - DNA, 75 bp, synthetic construct
  source 1..75: mol_type = other DNA
gtgtagctgttgtatctgtatttggtttccttttttggaatggatttaatctaattgcatttaaagtatatgagc

SEQ ID NO: 499069 - DNA, 75 bp, synthetic construct
  source 1..75: mol_type = other DNA
cctccgcctgatccgactcccgatcctgaccccacgccagatcctgaccctgacccaactcccgacccaacgccg

SEQ ID NO: 499070 - DNA, 75 bp, synthetic construct
  source 1..75: mol_type = other DNA
gacggtaaatggtgattataccggcggcggtacgctactgctcgacagcgaattaaacggcgatgactcggcaag

SEQ ID NO: 499071 - DNA, 75 bp, synthetic construct
  source 1..75: mol_type = other DNA
ttctggtggcagagcggcggcgttcaggagaccgtcgacccgcgccagcatgacttatctgatgcgttcgccatc

SEQ ID NO: 499072 - DNA, 75 bp, synthetic construct
  source 1..75: mol_type = other DNA
acggtgtcgcggcggtcattgattcatgtcagggatatgatatcaaagcgagttgtcacgccagcaggcaaagcc

SEQ ID NO: 499073 - DNA, 75 bp, synthetic construct
  source 1..75: mol_type = other DNA
gactaaaagtggcggcggggcgccgggggttggcgccccccgggccgcgccgcgccgggggcggggggggggggg

SEQ ID NO: 499074 - DNA, 75 bp, synthetic construct
  source 1..75: mol_type = other DNA
atttacatattggcggcagtgatgccagccagaatggcgtttatgtcgtcattaatgcgggggatcagcgcgtaa

SEQ ID NO: 499075 - DNA, 75 bp, synthetic construct
  source 1..75: mol_type = other DNA
cgctaacgttcccggttaaaactggtgatgaatgtctggtaattttcgccgatcgctgcatcgatttctggtggc

SEQ ID NO: 499076 - DNA, 75 bp, synthetic construct
  source 1..75: mol_type = other DNA
tgagtttttgggtagcgtgaaggctaacggcaagccaatcgatgatacgcacactcatggtggtgttcagcgcgg

SEQ ID NO: 499077 - DNA, 75 bp, synthetic construct
  source 1..75: mol_type = other DNA
aacggcaagccaatcgatgatacgcacactcatggcggtgttcagcgcggtggaagcaataccgatggggtaaac

SEQ ID NO: 499078 - DNA, 75 bp, synthetic construct
  source 1..75: mol_type = other DNA
attaaaggctatgagccggactcaaatggaatcaaccagtcgacgacattacccctgctggtggatgtgccggtg

SEQ ID NO: 499079 - DNA, 75 bp, synthetic construct
  source 1..75: mol_type = other DNA
gcggcggcaccgcgacgatgcttggccctgtcacggtgactaacgatgtaaaagctggtggtaagagcctgatga

SEQ ID NO: 499080 - DNA, 75 bp, synthetic construct
  source 1..75: mol_type = other DNA
cgcagcctgattcgctttctcgaagagggtgataaagccaaaattacgctgcgtttccgcggtcgtgagatggcg

SEQ ID NO: 499081 - DNA, 75 bp, synthetic construct
  source 1..75: mol_type = other DNA
aacttttggtgtattctcagataatctcattttgacaagatttaaaaatgtaattgagaatttgcttgatcataa

SEQ ID NO: 499082 - DNA, 75 bp, synthetic construct
  source 1..75: mol_type = other DNA
gggattttatctcttgcggttggtgcagtcagtcatgcaactggcatgggtgcaaatgcttttggtgcaacagct

SEQ ID NO: 499083 - DNA, 75 bp, synthetic construct
  source 1..75: mol_type = other DNA
gatagctaaacgtttgaaagatgaccttgatgccataaatccagcgtgggtgctaaaggatgaaaaaggaggtaa

SEQ ID NO: 499084 - DNA, 75 bp, synthetic construct
  source 1..75: mol_type = other DNA
gtcttgctgttttgctatcgttaagcccaactcttgttcctcttgccagtgttgcgcaaaataacgaaaagattg

SEQ ID NO: 499085 - DNA, 75 bp, synthetic construct
  source 1..75: mol_type = other DNA
gggtaatgaccttgatgtcattaatcctaggtggatacttcaggataaagacggaagttcggcaacgattaatac

SEQ ID NO: 499086 - DNA, 75 bp, synthetic construct
  source 1..75: mol_type = other DNA
aaaagtgttttttctgttggaaatgtaaataatgaacggcagatagttaatgttgctgctggttctatatctgcg

SEQ ID NO: 499087 - DNA, 75 bp, synthetic construct
  source 1..75: mol_type = other DNA
ttggcggagatgaccttacgccaataggagggcaacaatttggcggaattacaattcctaaaacttatgaaaaat

SEQ ID NO: 499088 - DNA, 75 bp, synthetic construct
  source 1..75: mol_type = other DNA
cccgggtttcagccatcagtaaggatgataagggaaattacagctatgagattgatgtgacggggattccggtgg

SEQ ID NO: 499089 - DNA, 75 bp, synthetic construct
  source 1..75: mol_type = other DNA
atcatgtgggacatcatctaaacggtggacgcaagtatatgcaactaatggggcaataaatacttcagaccagac

SEQ ID NO: 499090 - DNA, 75 bp, synthetic construct
  source 1..75: mol_type = other DNA
aaatatcatgaattgcagatgtctcggtggcgtgatgacgctgaccctcgcggatggggagcaaaaggtgatggc

SEQ ID NO: 499091 - DNA, 75 bp, synthetic construct
  source 1..75: mol_type = other DNA
accgaagacgctgcgaccgggaaactgacaatgacgccggctgaaccggcccgtgtcagaataagcagtgagcag

SEQ ID NO: 499092 - DNA, 75 bp, synthetic construct
  source 1..75: mol_type = other DNA
ataaaaaactgaatgaaaaactgaccatcaaaggtggtgctggtgataatgaggatgtaacagacagtaacattc

SEQ ID NO: 499093 - DNA, 75 bp, synthetic construct
  source 1..75: mol_type = other DNA
atcatattgagattgatgaaacttcatatggaaataatatatatagcgatgattggcttagcatagaaataggta

SEQ ID NO: 499094 - DNA, 75 bp, synthetic construct
  source 1..75: mol_type = other DNA
ggatacttttggtcagaactggaagagcattgaaatcggtacaactaaagaggttatggctgccgatacaaatgg

SEQ ID NO: 499095 - DNA, 75 bp, synthetic construct
  source 1..75: mol_type = other DNA
ttgttacagataatgataattcaattaaatcagttggttggaatgatgtagctaaagggcagataccatgttcaa

SEQ ID NO: 499096 - DNA, 75 bp, synthetic construct
  source 1..75: mol_type = other DNA
tgcatggtatatcgctctaatgaagcatcctggattgatcactcctacagcgatggagcgagttatgcaggtcgc

SEQ ID NO: 499097 - DNA, 75 bp, synthetic construct
  source 1..75: mol_type = other DNA
cggcctgaataacggtggaaatcagataaccagtgtggccagtggtctgaacggcactgcgcttgctgacgccgg

SEQ ID NO: 499098 - DNA, 75 bp, synthetic construct
  source 1..75: mol_type = other DNA
cagcattccatcttgtttcaattaatgctccagatgagaatcgcagagactatcttaattcctataaatttagtg

SEQ ID NO: 499099 - DNA, 75 bp, synthetic construct
  source 1..75: mol_type = other DNA
aatgcaccagatgaacatcgaaccagatatttaaagaaattacataagttctcagaggaacagataaaaaaaatt

SEQ ID NO: 499100 - DNA, 75 bp, synthetic construct
  source 1..75: mol_type = other DNA
atgctgcattccatttggtatcaattaatgctcctgatgagcataggaaaaaatatttacagaagctacacaagt

SEQ ID NO: 499101 - DNA, 75 bp, synthetic construct
  source 1..75: mol_type = other DNA
taggcgacaacaatgttgctattggtgggaactctgtagataaaagagcagaaaacattctaaatgccactataa

SEQ ID NO: 499102 - DNA, 75 bp, synthetic construct
  source 1..75: mol_type = other DNA
ttgcgataggcacaagtgctgaggctggtactgctattgtaggcgataaaggattgaagactggcgagtcgatag

SEQ ID NO: 499103 - DNA, 75 bp, synthetic construct
  source 1..75: mol_type = other DNA
cgaacggaaagtctgcatcagcaaccattgctgtcaatgcaggtaaaggtggattaacagatgttgccggtacca

SEQ ID NO: 499104 - DNA, 75 bp, synthetic construct
  source 1..75: mol_type = other DNA
ggcgatactaaagctagtggttggggagctattgtcattggcggcgatgatctcacaccattaataaaccagaaa

SEQ ID NO: 499105 - DNA, 75 bp, synthetic construct
  source 1..75: mol_type = other DNA
tcatacaactggcggcgatgaggtgacttattctgattttgcagggggaacacctacttctgttctctctgtcgg

SEQ ID NO: 499106 - DNA, 75 bp, synthetic construct
  source 1..75: mol_type = other DNA
ccaatagctgtattatctgtggggaatgttggtcatgagcgacaaattgttaatgttgccgctggtgatatatct

SEQ ID NO: 499107 - DNA, 75 bp, synthetic construct
  source 1..75: mol_type = other DNA
aaaaactggtttctgggcattgggcgttttaccgctgatgagcaggagcaatccgatgcgatccggtatgagacg

SEQ ID NO: 499108 - DNA, 75 bp, synthetic construct
  source 1..75: mol_type = other DNA
aaatggatcaatacacgacaaaaagagttcaatggtttatcggcactgactgaggattacattcgtgcctcccga

SEQ ID NO: 499109 - DNA, 75 bp, synthetic construct
  source 1..75: mol_type = other DNA
ctgctcattattccgcagtttttgctgacggtaacgcaggctgcttgtgtggaagaagaatcagtagcgggacga

SEQ ID NO: 499110 - DNA, 75 bp, synthetic construct
  source 1..75: mol_type = other DNA
gtacgtgggtttgatagcaccggtaattctctcgcgtgggcgttgggttcatcagtcggcgtaagtaagatgctg

SEQ ID NO: 499111 - DNA, 75 bp, synthetic construct
  source 1..75: mol_type = other DNA
aaactggagcactcaacatacagagaatgtaaataagtttaagccaatagcagggagcgcaggcggtcctgacgg

SEQ ID NO: 499112 - DNA, 75 bp, synthetic construct
  source 1..75: mol_type = other DNA
tgacccttaatgcccctggtggtgcagtggatggcaaatactaccctgtcataatagacacatccgcaatgaatg

SEQ ID NO: 499113 - DNA, 75 bp, synthetic construct
  source 1..75: mol_type = other DNA
gtctctgacatgagcacatttgttcatgtgggagatttagtcacctttaatctactggatggcttccagctcgtg

SEQ ID NO: 499114 - DNA, 75 bp, synthetic construct
  source 1..75: mol_type = other DNA
aaatgattcattctttgaccctttgtctcgaccatttatgagtttgcatctgccaactgaaatgctctccgatct

SEQ ID NO: 499115 - DNA, 75 bp, synthetic construct
  source 1..75: mol_type = other DNA
gctggcgcgattgctgattgcctggaagctggagcagcagcaacaggaaaatagcgcagtgctgaaatcgcagcg

SEQ ID NO: 499116 - DNA, 75 bp, synthetic construct
  source 1..75: mol_type = other DNA
ggggccgggcggtcaacatgttaataagaccgactcggcggtgcgcgccacgcatctggcaaccgggattagcgt

SEQ ID NO: 499117 - DNA, 75 bp, synthetic construct
  source 1..75: mol_type = other DNA
ttcaccgaccgcagcggcggcgtgtcacgccggcgggtgattattcacttcccggaacagatagccccgcaggag

SEQ ID NO: 499118 - DNA, 75 bp, synthetic construct
  source 1..75: mol_type = other DNA
aattaccgtaaatacctctatcacgcctatctggcctacatggaggcaaacggctaccggaatgtactcagtctg

SEQ ID NO: 499119 - DNA, 75 bp, synthetic construct
  source 1..75: mol_type = other DNA
ccctgccaccttatggcgtggccagccataaaattccttaaacgatcagcaatctatcacgcacaccagaaacag

SEQ ID NO: 499120 - DNA, 75 bp, synthetic construct
  source 1..75: mol_type = other DNA
tttttctggttttcctgtttattagcgtaagtcctgacacaaacgccgccactgtaaatcagccccttaaatgtg

SEQ ID NO: 499121 - DNA, 75 bp, synthetic construct
  source 1..75: mol_type = other DNA
tagttcgttgatggattgggccttcatgcgtgactactgccgtcagcttgggcaggaactgggcataccaatgtt

SEQ ID NO: 499122 - DNA, 75 bp, synthetic construct
  source 1..75: mol_type = other DNA
agattacacgctcccgatttttgtgccggaggggcagaagtgggttctccctggtggcgcatttggccgagaggc

SEQ ID NO: 499123 - DNA, 75 bp, synthetic construct
  source 1..75: mol_type = other DNA
tttcgcgccagtgcggttggcagccataccacgctatcaaggattattcgtatggtgcgccaggcccagagcagc

SEQ ID NO: 499124 - DNA, 75 bp, synthetic construct
  source 1..75: mol_type = other DNA
aagccagaaatcggtcagctggcggataaaatctcagccgtatttgtacctgtggtggtggtgattgcgctggtc

SEQ ID NO: 499125 - DNA, 75 bp, synthetic construct
  source 1..75: mol_type = other DNA
tgatggtcaccgctgacaaccgcagcctgtggttggttatcggcctgataaccctggcggtgatggttttcgccg

SEQ ID NO: 499126 - DNA, 75 bp, synthetic construct
  source 1..75: mol_type = other DNA
tcggcaaattaccgcctttaccgaaagattgtattctggtcgatctggcatcagtgaaaaatgggccattacagg

SEQ ID NO: 499127 - DNA, 75 bp, synthetic construct
  source 1..75: mol_type = other DNA
ggcagaagaaaatgttcagcttgagcaacttctggcgctctcttcgccgatttaccgccttgagctggcgatggt

SEQ ID NO: 499128 - DNA, 75 bp, synthetic construct
  source 1..75: mol_type = other DNA
cggattctggagcaacatgactgggaacgtgcggctgatattgttgccgatgccggaatggtgattgtcagtgtg

SEQ ID NO: 499129 - DNA, 75 bp, synthetic construct
  source 1..75: mol_type = other DNA
cccggaagtacaagggcaagcaaaagaacaaggaacttcatagcaaaattatcgatatgttacaggctgggaaga

SEQ ID NO: 499130 - DNA, 75 bp, synthetic construct
  source 1..75: mol_type = other DNA
tgccctgttggtcagcagtgaactggcaccgaaaaaagcctggaccgccgtggcgatgaaaacggcaacccacaa

SEQ ID NO: 499131 - DNA, 75 bp, synthetic construct
  source 1..75: mol_type = other DNA
ggcgccggcaaagaaggcaaggcacctgatctgacgtttacagatgagcagacagatgcggcgctgcgctatatg

SEQ ID NO: 499132 - DNA, 75 bp, synthetic construct
  source 1..75: mol_type = other DNA
gagccgattttaacggcacggtacttggcacgcgcgtgacagaacatcacgaaacgccagggcttggcgataaaa

SEQ ID NO: 499133 - DNA, 75 bp, synthetic construct
  source 1..75: mol_type = other DNA
tggtaaggactggagtctgacagcccgtgccggcctgcattatgagttcgatctgacggacagtgctgacgttca

SEQ ID NO: 499134 - DNA, 75 bp, synthetic construct
  source 1..75: mol_type = other DNA
gatttcagtgctgtggattcggaaatcggtgtggcgacactgataaacccgcagtatatcgccagcgtgaaacat

SEQ ID NO: 499135 - DNA, 75 bp, synthetic construct
  source 1..75: mol_type = other DNA
tgaattcatatgaaaaggcgctatctttttcttatgaaaatgttaaaaataaatttgataaaatatttaaaatgg

SEQ ID NO: 499136 - DNA, 75 bp, synthetic construct
  source 1..75: mol_type = other DNA
atgacaagccgcagccgccaggctgcctactcgagcagtgttaatattgccagtggccggccgaccgtggtactg

SEQ ID NO: 499137 - DNA, 75 bp, synthetic construct
  source 1..75: mol_type = other DNA
gaacaacagtaccgtgaatatctcctcagacagtgccgttctggggaactcaacactgaccagtaccgccctgaa

SEQ ID NO: 499138 - DNA, 75 bp, synthetic construct
  source 1..75: mol_type = other DNA
gggcgataacctgcataaaattggtgaaggtacgctgacggtacagggtacaggtattaatgaaggtggcctgaa

SEQ ID NO: 499139 - DNA, 75 bp, synthetic construct
  source 1..75: mol_type = other DNA
cgtatgctgaccctacttaatcgcaccgatattccggtggctggtggcgcagtaaaaccgttaatgcgtgacttg

SEQ ID NO: 499140 - DNA, 75 bp, synthetic construct
  source 1..75: mol_type = other DNA
atgcaacagaatcttcatgtttacgacgatcacgcaggcatcatctatctggctgatggacgcgaggtgaaattt

SEQ ID NO: 499141 - DNA, 75 bp, synthetic construct
  source 1..75: mol_type = other DNA
gatctttgccgaccgttgcatcgatttctggtggcagagcggcggcgttcaggagaccgtcgacccgcgtcagca

SEQ ID NO: 499142 - DNA, 75 bp, synthetic construct
  source 1..75: mol_type = other DNA
attcattgaaacatttgatgatgcattatttttatcattaatacccgagtcagaatacaaaacaattattgttag

SEQ ID NO: 499143 - DNA, 75 bp, synthetic construct
  source 1..75: mol_type = other DNA
aagatattgatgcattggccaaagcgattgatcgggcaatacacttaaacaaaagcgatttgtataatgaaaaga

SEQ ID NO: 499144 - DNA, 75 bp, synthetic construct
  source 1..75: mol_type = other DNA
attaatagagcaatttttaaatctaaagttatttatgggtgtggtgcgttggattatattgttaactctttaatt

SEQ ID NO: 499145 - DNA, 75 bp, synthetic construct
  source 1..75: mol_type = other DNA
gtcgtcggtagatatccccgtgccaccaaatggattaattcaacgcagtccccgaattaaacacattcaaaccac

SEQ ID NO: 499146 - DNA, 75 bp, synthetic construct
  source 1..75: mol_type = other DNA
agccaagtatggggatgagatcgtcatgacaaacctcgggcgcgagcctgtaactgtcgtcgttgaagttaagga

SEQ ID NO: 499147 - DNA, 75 bp, synthetic construct
  source 1..75: mol_type = other DNA
gctggaagatgtgagtagagaattatttgaaaaagttattgaaactgccagtaaggactacgtcgtgaaggcaga

SEQ ID NO: 499148 - DNA, 75 bp, synthetic construct
  source 1..75: mol_type = other DNA
tcagactgtgaaactatgtgcgatgtattagctgcttatgctgaccatccgaatgtaatcggtatgacggtattc

SEQ ID NO: 499149 - DNA, 75 bp, synthetic construct
  source 1..75: mol_type = other DNA
acgcctcgcgcggtggtgaacgcggtaaaacgcgccggattgtatgcccaaacgttaccagcacaactttctcaa

SEQ ID NO: 499150 - DNA, 75 bp, synthetic construct
  source 1..75: mol_type = other DNA
cctggctggtggaacgtcgtggcgctacggtgacgcagttccgcgcacgctcaaacggtggtgttgagtcggtga

SEQ ID NO: 499151 - DNA, 75 bp, synthetic construct
  source 1..75: mol_type = other DNA
ctgcaccgacacgagctcctgcacaggccaaagcgcctgttcagcaagggcccatgaaggtaaataacaaggtcc

SEQ ID NO: 499152 - DNA, 75 bp, synthetic construct
  source 1..75: mol_type = other DNA
cgtgaagaattgggattaagtgccaccgaaatcggcgctttgctctccgtgttttcactcgcttacggcattgcg

SEQ ID NO: 499153 - DNA, 75 bp, synthetic construct
  source 1..75: mol_type = other DNA
agcacaactgccttgcggcccgctacttgatcgtaaaggcccgcgcattatgctgggtctggggatgttcttctg

SEQ ID NO: 499154 - DNA, 75 bp, synthetic construct
  source 1..75: mol_type = other DNA
aaaaagcacagggttgatggcggctatccctttcctgtttggggctgccgggatgctggtcaacggttacgttac

SEQ ID NO: 499155 - DNA, 75 bp, synthetic construct
  source 1..75: mol_type = other DNA
ggtcttggtacgcccaccggtaacccgattgttccggtgttaaaaatatccaccaacagcacgattgccagacga

SEQ ID NO: 499156 - DNA, 75 bp, synthetic construct
  source 1..75: mol_type = other DNA
ctgccttcactttgctggaacctcctgctgggggctggttcacgtagcggtcgcttctcgcatggctgcgtcagt

SEQ ID NO: 499157 - DNA, 75 bp, synthetic construct
  source 1..75: mol_type = other DNA
caagcgacaacatccatgacggcggttctgctgattggcatggcactgttctgtattcactttgccggaacatcc

SEQ ID NO: 499158 - DNA, 75 bp, synthetic construct
  source 1..75: mol_type = other DNA
atcaccgcgactgttacatttgccactttttgcttcatttgccatttactggccgggaagatgaattaaaaattt

SEQ ID NO: 499159 - DNA, 75 bp, synthetic construct
  source 1..75: mol_type = other DNA
acactgaacggcggtaaccagtatgtgcacaacggcggtacagcctctgacactgttgtgaacagtgacggctgg

SEQ ID NO: 499160 - DNA, 75 bp, synthetic construct
  source 1..75: mol_type = other DNA
ccacactttggcgtggtaaagatgcttttacagaagttaaaaaactgaatggcgaagtctttcgcgaactagaga

SEQ ID NO: 499161 - DNA, 75 bp, synthetic construct
  source 1..75: mol_type = other DNA
aaacggtctacaggatgtcatggcaggtggcagtacctcggatacggttatcagtaccgggggagggcagaattt

SEQ ID NO: 499162 - DNA, 75 bp, synthetic construct
  source 1..75: mol_type = other DNA
ttaaaaattttaacgatcgcttattgtaaaaataatagcaaagaaaattgtaagatacagaccgtaaataaaaac

SEQ ID NO: 499163 - DNA, 75 bp, synthetic construct
  source 1..75: mol_type = other DNA
gaagttcgggcatggcagtgcacaacatgtgcgtgccggcttccgtctgggcagccacaacgatatgaactttgg

SEQ ID NO: 499164 - DNA, 75 bp, synthetic construct
  source 1..75: mol_type = other DNA
gaagtgcgtcttgaaccccgtatggcgctgctggcccgcagtcgccagaacgccatctaccagaatctgacggtg

SEQ ID NO: 499165 - DNA, 75 bp, synthetic construct
  source 1..75: mol_type = other DNA
gtaccccgttccgctacgatatccagtttaccagtaccgataaagccatcgcgccggagtcggtgctgatgcagg

SEQ ID NO: 499166 - DNA, 75 bp, synthetic construct
  source 1..75: mol_type = other DNA
gttatcgaattttatgacgaccagagcggctatgagcgcggactgacgctgccgcttcgccatccttcagggctg

SEQ ID NO: 499167 - DNA, 75 bp, synthetic construct
  source 1..75: mol_type = other DNA
gaccggtgtaaacggtgaaaataacagcgtccgtctcagcattcagggcggtcatctcggtcacgataacaacgg

SEQ ID NO: 499168 - DNA, 75 bp, synthetic construct
  source 1..75: mol_type = other DNA
tccccggtaacgttccataaactgaccaccagtaacctcaccggtcagggtggcaccatcaatatgcgtgttcgc

SEQ ID NO: 499169 - DNA, 75 bp, synthetic construct
  source 1..75: mol_type = other DNA
ttcaggccggttatgcccacagtgtcagcggcagcagcgctgaaggttataacggtcaggccacactgaacgtga

SEQ ID NO: 499170 - DNA, 75 bp, synthetic construct
  source 1..75: mol_type = other DNA
gcactggcgcagtatgacgaacaactggcggaatattacctcacacgtggcagcaataatcgccgggatacctag

SEQ ID NO: 499171 - DNA, 75 bp, synthetic construct
  source 1..75: mol_type = other DNA
cgcggtggaaaacggtaaggctgacggtgttgttctggaatccggcggtcgtctggatgtactggagagccattc

SEQ ID NO: 499172 - DNA, 75 bp, synthetic construct
  source 1..75: mol_type = other DNA
cttcagctcccggggagacatgagcatgggtacagccgcagccggcagtaacatgacgttctcaccgtcccggaa

SEQ ID NO: 499173 - DNA, 75 bp, synthetic construct
  source 1..75: mol_type = other DNA
cgatgatggcgcaaaacgccttaaccgcagcggaatcgctggggttgggcggtgtatatattggcggcctgcgca

SEQ ID NO: 499174 - DNA, 75 bp, synthetic construct
  source 1..75: mol_type = other DNA
ttgcagtgcagtagcattattcgcattaccgacaaagcgttacgtgatgaactggtgacgctgaccggcgggcaa

SEQ ID NO: 499175 - DNA, 75 bp, synthetic construct
  source 1..75: mol_type = other DNA
acggataccgttgttaataccggggcggaagggggaccggatgcagaaaacggtgataccgggcagtttgttcgc

SEQ ID NO: 499176 - DNA, 75 bp, synthetic construct
  source 1..75: mol_type = other DNA
ggaaaaatcaggaagtggcacactcactgtcagcaacaccactctcacccagaaagccgtcaacctgaatgaagg

SEQ ID NO: 499177 - DNA, 75 bp, synthetic construct
  source 1..75: mol_type = other DNA
ctgagaataccaccgttaatcagaagggcagactgcaggtgaacgccggtggtaaagcgactgatgtcacccaga

SEQ ID NO: 499178 - DNA, 75 bp, synthetic construct
  source 1..75: mol_type = other DNA
atcaccctgggcgttcaggccggttatgcccacagcgtcagcggcagcagcgctgaagggtataacggtcaggcc

SEQ ID NO: 499179 - DNA, 75 bp, synthetic construct
  source 1..75: mol_type = other DNA
ttgtggccctgggaacccgccacagcatgaaagcgtcaacggacaataacgacttccgcgcccggggttggggct

SEQ ID NO: 499180 - DNA, 75 bp, synthetic construct
  source 1..75: mol_type = other DNA
tagagggtagcggcattgagccgggaacgccgggggattataacgtcaaagcggtgcactacggacgccagccga

SEQ ID NO: 499181 - DNA, 75 bp, synthetic construct
  source 1..75: mol_type = other DNA
aggaaattgttggcatatcttaaagaaaaaaaaataatggcgagtaagctccattatctgaataatcgatattct

SEQ ID NO: 499182 - DNA, 75 bp, synthetic construct
  source 1..75: mol_type = other DNA
agcggtggcaacacaaaccagccagcgaacattagattatgcagtagcaggaaactctgtggcatttagaccatc

SEQ ID NO: 499183 - DNA, 75 bp, synthetic construct
  source 1..75: mol_type = other DNA
cttaatttgggggattgttgtcagcgtgccacctcagcagcctgtggcaaagttagatattaacgccgataaaaa

SEQ ID NO: 499184 - DNA, 75 bp, synthetic construct
  source 1..75: mol_type = other DNA
ttgccgttgctccaggccaacgccacgcagtagctgaagcggtaacaatttggctatcacctgcgccaatttttt

SEQ ID NO: 499185 - DNA, 75 bp, synthetic construct
  source 1..75: mol_type = other DNA
tccgtcgcacgatatcctggcagggcaacgatcaatggccttatgtcctggataaaatgcttcgcaactacggtc

SEQ ID NO: 499186 - DNA, 75 bp, synthetic construct
  source 1..75: mol_type = other DNA
aattaataaaatctaattgcaagtatttcatgagcaatataaaaaacaatagtttaaaaacaattgactttaata

SEQ ID NO: 499187 - DNA, 75 bp, synthetic construct
  source 1..75: mol_type = other DNA
ggtcgaatgaattcaaagctccaatgacggttggtaaaacatttgctatgagagcatggtatgctagttactatc

SEQ ID NO: 499188 - DNA, 75 bp, synthetic construct
  source 1..75: mol_type = other DNA
aaacaagatcccgtgtgcactttaaccttcaatcgtgttagaaactctttattacatttgacgcaattaaatgcg

SEQ ID NO: 499189 - DNA, 75 bp, synthetic construct
  source 1..75: mol_type = other DNA
aacggtactcatgttcgagggggttgctgaaagcaactttaaagatatcgccaatcattccagcgaatgtttttc

SEQ ID NO: 499190 - DNA, 75 bp, synthetic construct
  source 1..75: mol_type = other DNA
catcagtgaaacaggtgaattcacttgatactgagcatgagcgcaaacaactcaacaacaaagattttgaagctg

SEQ ID NO: 499191 - DNA, 75 bp, synthetic construct
  source 1..75: mol_type = other DNA
gccgtttcaaacaggaagtagcacgcagactgaaggattccctcaacctacaccgtcagttagcagaagaggttg

SEQ ID NO: 499192 - DNA, 75 bp, synthetic construct
  source 1..75: mol_type = other DNA
gacggttggtaaaacatttgctatgagagcatggtatgctagttactatcatattaataaagcactgaaacacta

SEQ ID NO: 499193 - DNA, 75 bp, synthetic construct
  source 1..75: mol_type = other DNA
aaaagcgataaacctttatcttaaacatatcaacagaatggatcatatcactgcccccagttttgtggctttagg

SEQ ID NO: 499194 - DNA, 75 bp, synthetic construct
  source 1..75: mol_type = other DNA
atgacgccaccgggggcgataacaccacttacggcgaagcctaccactatgccgacaacttcctgcaacaaggcg

SEQ ID NO: 499195 - DNA, 75 bp, synthetic construct
  source 1..75: mol_type = other DNA
tgttttacccaacattcgcggcaccttgctcaccgttatcgccctcgcctatacatcaatgctggaaggcgcggt

SEQ ID NO: 499196 - DNA, 75 bp, synthetic construct
  source 1..75: mol_type = other DNA
ttgcaaatcgttggcgatcacgccagccagtccacctatactcaggtgcgccaccagttagggttggatcagcca

SEQ ID NO: 499197 - DNA, 75 bp, synthetic construct
  source 1..75: mol_type = other DNA
ggcgacgacgcgcctgcggtattccgcaagggcgtgctgattaccggcgtgacggccagcgcggcccgtgaccgc

SEQ ID NO: 499198 - DNA, 75 bp, synthetic construct
  source 1..75: mol_type = other DNA
cctgacgtttatttcacgcctgctgtcggaagtgggtatctggttccgctttgccactgacgcgcggctgaaaat

SEQ ID NO: 499199 - DNA, 75 bp, synthetic construct
  source 1..75: mol_type = other DNA
tacgacgaccagagcggctatgagcgcgggctgacgctgccgcttcgccatccttctgggctgtttgatggttaa

SEQ ID NO: 499200 - DNA, 75 bp, synthetic construct
  source 1..75: mol_type = other DNA
agtgaatgcagcaaagggacaacgggggttcgggttgcatttaacggtattgaggatgcagaaaataatactttg

SEQ ID NO: 499201 - DNA, 75 bp, synthetic construct
  source 1..75: mol_type = other DNA
cagcagcaacttgaggaaataaaagagcgtatcgaaaccgttatacaaggaatcaaaactgagtctactcatcca

SEQ ID NO: 499202 - DNA, 75 bp, synthetic construct
  source 1..75: mol_type = other DNA
cgcccggcagcaattaaaaccagaccaaatgaagtatggcaggaccagttaattctgaacaaagtcagcggtggg

SEQ ID NO: 499203 - DNA, 75 bp, synthetic construct
  source 1..75: mol_type = other DNA
ttgctcaccgttatcgctctcgcctatacatcgatgctggaaggcgcggtactgacagaaactgtcttttcatgg

SEQ ID NO: 499204 - DNA, 75 bp, synthetic construct
  source 1..75: mol_type = other DNA
tattttgccttactccgctcgtctgaagtcaactcagaagtccgtcaatccgggactggtgagggcttcggcaac

SEQ ID NO: 499205 - DNA, 75 bp, synthetic construct
  source 1..75: mol_type = other DNA
aaactgaatgaccttcatgccgggatgcagtggatcccactggtaccagaacagaacaatattttgccttactcc

SEQ ID NO: 499206 - DNA, 75 bp, synthetic construct
  source 1..75: mol_type = other DNA
cgcgcctttcaaagcagagtttccgcgcccgcaggcttttcccaactggcaaacgctggagctgcgtaacgtgac

SEQ ID NO: 499207 - DNA, 75 bp, synthetic construct
  source 1..75: mol_type = other DNA
atgagggggcgatagccacaggaaccgtcattaatgataagggctggcaggtcgtcaagccaggtacagtggcaa

SEQ ID NO: 499208 - DNA, 75 bp, synthetic construct
  source 1..75: mol_type = other DNA
ctggatctgcaggccggactggaagcccgtgtccgggaaaatatcaccctgggcgttcaggccggttatgcccac

SEQ ID NO: 499209 - DNA, 75 bp, synthetic construct
  source 1..75: mol_type = other DNA
tggaaaacggtaaggctgacggtgttgttctggaatccggcggtcgtctggatgtactggagagccattcagcac

SEQ ID NO: 499210 - DNA, 75 bp, synthetic construct
  source 1..75: mol_type = other DNA
tacggatgatcgcgtaatgtgggtgaaatcggttgatgaagccatcgctgcctgtggtgacgtaccggagattat

SEQ ID NO: 499211 - DNA, 75 bp, synthetic construct
  source 1..75: mol_type = other DNA
ggatgactgggaatcggtattcagcgaattccacgacgccgatgcgcagaactctcacagctattgctttgagat

SEQ ID NO: 499212 - DNA, 75 bp, synthetic construct
  source 1..75: mol_type = other DNA
ctgcgcagtgaagaacgttatcgtgctgaagtccccctgtacgcctccatgctgacacaggcaatggactatgac

SEQ ID NO: 499213 - DNA, 75 bp, synthetic construct
  source 1..75: mol_type = other DNA
cgtactggaaaatggcggccgtctggatgtgctgaccggacacacagccaccagaacccgtgtggatgatggcgg

SEQ ID NO: 499214 - DNA, 75 bp, synthetic construct
  source 1..75: mol_type = other DNA
gcaaccgttaccggcataaaccgcctgggagcattctctgttgtggagggtaaagctgataatgtcgtactggaa

SEQ ID NO: 499215 - DNA, 75 bp, synthetic construct
  source 1..75: mol_type = other DNA
acatgacgttctcaccgtcacagaatggcacgtcactggacctgcaggccggactggaagcccgtgtccgggaaa

SEQ ID NO: 499216 - DNA, 75 bp, synthetic construct
  source 1..75: mol_type = other DNA
tttgtccaggggaacaggttgcaggccggggcctttaactacaccctcaaccgggacagtgatgagagctggtat

SEQ ID NO: 499217 - DNA, 75 bp, synthetic construct
  source 1..75: mol_type = other DNA
gtgccgtgaactggtcaaacatcatgatgctgggcgcaatcggcctggtgttctggatggcgaacagtctcggtt

SEQ ID NO: 499218 - DNA, 75 bp, synthetic construct
  source 1..75: mol_type = other DNA
ttctggcaggctcccgcagccatcagaccggtgtaaacggtgaaaataacagcgtccgtctcagcattcagggcg

SEQ ID NO: 499219 - DNA, 75 bp, synthetic construct
  source 1..75: mol_type = other DNA
cgtcattaatgagaagggctggcaggccgtcaaatccggcgcagtggcaaccgacacggttgtgaataccggcgc

SEQ ID NO: 499220 - DNA, 75 bp, synthetic construct
  source 1..75: mol_type = other DNA
gcaaaccgcctggggcatttctccgtgggaaatggcatggcagataacgtcgttctggaaaatggcggtcgcctg

SEQ ID NO: 499221 - DNA, 75 bp, synthetic construct
  source 1..75: mol_type = other DNA
tgcgcagcgatctgatgcccatccgcgaagaacgcccgacggatgttgtctttgcgggggcgaaaaaagcgccac

SEQ ID NO: 499222 - DNA, 75 bp, synthetic construct
  source 1..75: mol_type = other DNA
tttgcgggtgcgaaaaaagcgccactaacggccgagggaaaagccagtgcagagaaactgttcgcgatggcagaa

SEQ ID NO: 499223 - DNA, 75 bp, synthetic construct
  source 1..75: mol_type = other DNA
aaccgcctggtactacatggcgatgaggtgccagaacgcctggtggattatgcgacattccagtggcagcgagcg

SEQ ID NO: 499224 - DNA, 75 bp, synthetic construct
  source 1..75: mol_type = other DNA
agcagggaggcgcactggtcaccagtacggcggcaaccgtcaccggcagcaaccgtctgggcaatttcacggtgg

SEQ ID NO: 499225 - DNA, 75 bp, synthetic construct
  source 1..75: mol_type = other DNA
ggcagtatcgctggccatttatcagtgtgatggcgctaagcctcgccagtgcggcattaggcattggcttaattg

SEQ ID NO: 499226 - DNA, 75 bp, synthetic construct
  source 1..75: mol_type = other DNA
ggggaacagcagaatccaccaccatcaacaaaaatgggcggcaggttatctggtcttcaggggtagcccgagata

SEQ ID NO: 499227 - DNA, 75 bp, synthetic construct
  source 1..75: mol_type = other DNA
cgtgacagcgatgaagactggtaccagatgctgccgggttacttcagattcgtctgccagaatggctgcgtctgc

SEQ ID NO: 499228 - DNA, 75 bp, synthetic construct
  source 1..75: mol_type = other DNA
gtgcgtgccggcttccgtctgggcagccacaacgatatgacctttggcgaaggcacctcatcccgtgacactctg

SEQ ID NO: 499229 - DNA, 75 bp, synthetic construct
  source 1..75: mol_type = other DNA
ccgggacagtgatgagagctggtatctgcgcagtgaaaatgcttatcgtgcagaagtccccctgtatgcctccat

SEQ ID NO: 499230 - DNA, 75 bp, synthetic construct
  source 1..75: mol_type = other DNA
cgtgacagcgatgaagactggtacctgcgcagtgaaaatgcttatcgtgctgaagtccccctgtatacatccatg

SEQ ID NO: 499231 - DNA, 75 bp, synthetic construct
  source 1..75: mol_type = other DNA
tcaccatctggggtggttttgtgctggtggcgcgggtgtacaaacatatggcgaccctgcgtgaaaccgaagaca

SEQ ID NO: 499232 - DNA, 75 bp, synthetic construct
  source 1..75: mol_type = other DNA
taatccggatcttaagccgcgtttaccggcctccattttggtgcatgaaaacagctatcaaccgctggataaagg

SEQ ID NO: 499233 - DNA, 75 bp, synthetic construct
  source 1..75: mol_type = other DNA
ggtacagccacgaatgttaccctgaagcagggcggcgcactggtcaccagtactgcagcaactgttcttggcagc

SEQ ID NO: 499234 - DNA, 75 bp, synthetic construct
  source 1..75: mol_type = other DNA
agtgatgctcgacgaaccgcaatactggaaaaaatattatcgtacgggttttaacgattcattactggatattcg

SEQ ID NO: 499235 - DNA, 75 bp, synthetic construct
  source 1..75: mol_type = other DNA
tcagaccggtgtaaacggtgaaaataacagcgtccgtctcagcattcagggcggtcatctcgggcacgataacaa

SEQ ID NO: 499236 - DNA, 75 bp, synthetic construct
  source 1..75: mol_type = other DNA
caactcggtagcgcctcattgctggcggggttaaccagcgatgtgcgcaatatcaccattgcttttgttcgtttg

SEQ ID NO: 499237 - DNA, 75 bp, synthetic construct
  source 1..75: mol_type = other DNA
cgccggttatgtgaagttcgggcatggcagtgcacaacatgtgcgtgccggtttccgtctgggcagccacaacga

SEQ ID NO: 499238 - DNA, 75 bp, synthetic construct
  source 1..75: mol_type = other DNA
cggataccgttgttaataccggggcggaaggggggccggatgcagaaaacggtgataccgggcagtttgttcgcg

SEQ ID NO: 499239 - DNA, 75 bp, synthetic construct
  source 1..75: mol_type = other DNA
gggacacctggagcgaccatattcgccggacgattattaaagagagccgtccttttattcttgattatttacata

SEQ ID NO: 499240 - DNA, 75 bp, synthetic construct
  source 1..75: mol_type = other DNA
tgcgtgaactgccggtgaactggtgggtacagccttctgttatccgcaccttcagctcccggggtgacatgagca

SEQ ID NO: 499241 - DNA, 75 bp, synthetic construct
  source 1..75: mol_type = other DNA
gttttgagcgcggagaatacgccaccataatggcgttgaccgcaggggtcagcatgaccgtttcattctccacgc

SEQ ID NO: 499242 - DNA, 75 bp, synthetic construct
  source 1..75: mol_type = other DNA
accggcaaaacctggcttgcgtttacaaatgtcggaaacagtaacctcggggtggcaacctccggacagggtatc

SEQ ID NO: 499243 - DNA, 75 bp, synthetic construct
  source 1..75: mol_type = other DNA
aacaatttgaacgcattcagtccggggaattatcagcaataccgcatcagcttattatggataaaatttatgatg

SEQ ID NO: 499244 - DNA, 75 bp, synthetic construct
  source 1..75: mol_type = other DNA
aaccgtgacagcgatgaagactggtacctgcgcagtgaaaatgcgtatcgttctgaagtcccccagtatgcctcc

SEQ ID NO: 499245 - DNA, 75 bp, synthetic construct
  source 1..75: mol_type = other DNA
aaccgtgacagcgatgaagactggtacctgcgcagtgaaaatgcttatcgttctgaagtccccctgtatgcctcc

SEQ ID NO: 499246 - DNA, 75 bp, synthetic construct
  source 1..75: mol_type = other DNA
aaccgtgacagcgatgaagactggtacctgcgcagtgaaaatgcatatcgttctgaagtcccccggtatgcctcc

SEQ ID NO: 499247 - DNA, 75 bp, synthetic construct
  source 1..75: mol_type = other DNA
tccataaactgacaaccagtaacctcaccggtcagggtggcaccatcaatatgcgtgttcgccttgatggcagca

SEQ ID NO: 499248 - DNA, 75 bp, synthetic construct
  source 1..75: mol_type = other DNA
aaccgtgacagcgatgaagactggtacctgcgcagtgaagatgcatatcgttctgaagtcccccagtatgcctcc

SEQ ID NO: 499249 - DNA, 75 bp, synthetic construct
  source 1..75: mol_type = other DNA
aaccgtgacagcgatgaagactggtacctgcgcagtgaacatgcctatcgttctgaagtccccccgtatgcctcc

SEQ ID NO: 499250 - DNA, 75 bp, synthetic construct
  source 1..75: mol_type = other DNA
aagacgaaccggatctgcgcgcgccgattgtttctgtttctctgggcttacccgcgatttttcaatttggcggcc

SEQ ID NO: 499251 - DNA, 75 bp, synthetic construct
  source 1..75: mol_type = other DNA
tttacgtacgcatcaaaaggcctttattgcccgtgggctggcagaggcgttaacacgcgtgattgccatcgtggt

SEQ ID NO: 499252 - DNA, 75 bp, synthetic construct
  source 1..75: mol_type = other DNA
tggcagaggcgttaacacgcgtgattgccatcgtggtgcagccgggtgtggaatttgaccatagcaatattattc

SEQ ID NO: 499253 - DNA, 75 bp, synthetic construct
  source 1..75: mol_type = other DNA
tgcgtgaactgccggtgaactggtgggtacagccttctgttatccgtaccctgcgccaacagcagcttctgcaac

SEQ ID NO: 499254 - DNA, 75 bp, synthetic construct
  source 1..75: mol_type = other DNA
gtgagtgaattaccggtgaactggtgggtacagccttctgttatccgcaccttcagctcccggggagatatgcgt

SEQ ID NO: 499255 - DNA, 75 bp, synthetic construct
  source 1..75: mol_type = other DNA
gaacacggtaattaacgaggggggctggcaggtgattaaggaaggaggaactgccgcgcataccaccatcaacca

SEQ ID NO: 499256 - DNA, 75 bp, synthetic construct
  source 1..75: mol_type = other DNA
cccgttgtcagtctgttcaggtttatcgtcatggacagaatccgaaaggacatgcccggtttcgttgccgtgact

SEQ ID NO: 499257 - DNA, 75 bp, synthetic construct
  source 1..75: mol_type = other DNA
atggtcacagttaactttcattgcccccgttgccagtccgttcaggtttaccgtcacgggcagaacccaaaagga

SEQ ID NO: 499258 - DNA, 75 bp, synthetic construct
  source 1..75: mol_type = other DNA
gcacggtatagggtttggtgaaaaagggttaaatccattaacccgtacatcatttattattaccgaagatcttac

SEQ ID NO: 499259 - DNA, 75 bp, synthetic construct
  source 1..75: mol_type = other DNA
gttaaagaccaaatcactgaaatggctttcaacggtgccggagttcgcgatactgcccgtacgctgaaaatcggc

SEQ ID NO: 499260 - DNA, 75 bp, synthetic construct
  source 1..75: mol_type = other DNA
ctttcaacggagccggaattcgtgataccgccagaacactgaaggtcggcgtcaacaccgttatccggactttaa

SEQ ID NO: 499261 - DNA, 75 bp, synthetic construct
  source 1..75: mol_type = other DNA
gccatcgtgtgtttcagctcacttatacttatcaagcacgtaagccgggtatgaaagagctgatcactgaaatgg

SEQ ID NO: 499262 - DNA, 75 bp, synthetic construct
  source 1..75: mol_type = other DNA
aaacgcctggagcggggccgcttcgtctggccagtcacccgtgacggcaaggtgcaccttactccggctcagtta

SEQ ID NO: 499263 - DNA, 75 bp, synthetic construct
  source 1..75: mol_type = other DNA
catcaaaagttcagaacgtcctgaaggatgacccgttctccggacacctgttcatcttccgcggacgccggggtg

SEQ ID NO: 499264 - DNA, 75 bp, synthetic construct
  source 1..75: mol_type = other DNA
gccgcttcgcctggccgtcagcccgggatggcaaagtgttcctcacaccggcacagctggcgatgctccttgaag

SEQ ID NO: 499265 - DNA, 75 bp, synthetic construct
  source 1..75: mol_type = other DNA
ctttttgcttcatttaccgttcactggccgggaagatgaattaaaaatttcggtaatagacctgcatcgcgcgca

SEQ ID NO: 499266 - DNA, 75 bp, synthetic construct
  source 1..75: mol_type = other DNA
gcaaggtgcaccttactccggctcagttgtccatgcttctcgagggcatcgactggaagcacccgaaacgaacgg

SEQ ID NO: 499267 - DNA, 75 bp, synthetic construct
  source 1..75: mol_type = other DNA
agtgttcctcacaccggcacagctggcgatgctccttgaaggtatcgactggcggcagcctaaaagactgcttac

SEQ ID NO: 499268 - DNA, 75 bp, synthetic construct
  source 1..75: mol_type = other DNA
agaataagctgcactggcatctggacgtggtaatgaataaagacgacttcaaaataagaagaggaaatgcagcat

SEQ ID NO: 499269 - DNA, 75 bp, synthetic construct
  source 1..75: mol_type = other DNA
gacccccagagcgatatccgcgaccgtacaccgggcaggctggcactgtccggtatgcatgggttcggtcaggca

SEQ ID NO: 499270 - DNA, 75 bp, synthetic construct
  source 1..75: mol_type = other DNA
atcaggtattggttgcaaaatcaatgtcttcggcgacacttcccggggcatggtcgcggctattctggtcacgcg

SEQ ID NO: 499271 - DNA, 75 bp, synthetic construct
  source 1..75: mol_type = other DNA
gccgaatttcttaaatgggtatttgaggtcacaccagggcgttatgcggtaacgcagtacggtggttctggtaat

SEQ ID NO: 499272 - DNA, 75 bp, synthetic construct
  source 1..75: mol_type = other DNA
aaaagcaggtggcacagctggcatcatctgccacacaggatgccgcccgcgcagagcaggctgtcaaggatgctg

SEQ ID NO: 499273 - DNA, 75 bp, synthetic construct
  source 1..75: mol_type = other DNA
gtccggatgccacataattctgaaatcccgggtaaacacctcagaagtagtgatgtgcactaaggctgatgtggt

SEQ ID NO: 499274 - DNA, 75 bp, synthetic construct
  source 1..75: mol_type = other DNA
atggctgaaagagtccaccccggggcgttatgcggtcagtattgcggactcttccacactactggtgggcaccac

SEQ ID NO: 499275 - DNA, 75 bp, synthetic construct
  source 1..75: mol_type = other DNA
tcagaatatgtcaccggaacagcaacaaattttgctgcaggcttcagcggcgtccactttttcaggattaatcgg

SEQ ID NO: 499276 - DNA, 75 bp, synthetic construct
  source 1..75: mol_type = other DNA
agcaaacatgaaattaaagtgaagttgttatttgcgaatgatgattttctctcaatggaaggacactatggacga

SEQ ID NO: 499277 - DNA, 75 bp, synthetic construct
  source 1..75: mol_type = other DNA
atccctggtggtggcaaatgaccggaaagtgacggttgaaggtaaacaggaccataaaaccaccaaagaccatgt

SEQ ID NO: 499278 - DNA, 75 bp, synthetic construct
  source 1..75: mol_type = other DNA
accagtattacgaaggtgagcacagtattcatcgcctgacttatcgctggagtggaaacaactggaatgcaacag

SEQ ID NO: 499279 - DNA, 75 bp, synthetic construct
  source 1..75: mol_type = other DNA
tgcggaaaatcacgctgataatgcagcacaaagcgcacagcagaccgcgcaggatgtgcaggcaacggtcacagc

SEQ ID NO: 499280 - DNA, 75 bp, synthetic construct
  source 1..75: mol_type = other DNA
gttacaaggcgctttcgggcctgggtaacaattatggtactcagcgtggctttatcggtctttttgtacgcattg

SEQ ID NO: 499281 - DNA, 75 bp, synthetic construct
  source 1..75: mol_type = other DNA
catatggcgattatggaaggggagacggagatctacctgaccgaacaacaggcgctggcggagcgttttaacgat

SEQ ID NO: 499282 - DNA, 75 bp, synthetic construct
  source 1..75: mol_type = other DNA
cgctggggccgtacattggcgcgcaggtgtcgggcctggatgtgacccgtccgctgagcgataaccagttcgagc

SEQ ID NO: 499283 - DNA, 75 bp, synthetic construct
  source 1..75: mol_type = other DNA
ggtgaccagataaaagtgctgtgggctgacagcgacggactgtgcctcttcaccaaacgcctggagcggggccgc

SEQ ID NO: 499284 - DNA, 75 bp, synthetic construct
  source 1..75: mol_type = other DNA
agccagctatttctctggcgtaagcaataccaggagggaagtcttactgctgtggctgccggagaacaggtcgtt

SEQ ID NO: 499285 - DNA, 75 bp, synthetic construct
  source 1..75: mol_type = other DNA
cgcgtgactcagcactatgccaatgccgattacctgccacagcggcggattatgcatcgggcgacgattcttggg

SEQ ID NO: 499286 - DNA, 75 bp, synthetic construct
  source 1..75: mol_type = other DNA
gatgtgacatttattgaaacgcctcctgctggggcgattctggcggcgaaagagttaccctcgactggcggcgat

SEQ ID NO: 499287 - DNA, 75 bp, synthetic construct
  source 1..75: mol_type = other DNA
gcggagcatgatttccgtaaatcgttcccggaatacaaataccgcaaaaccgaggaggagcatcaacgctggcgc

SEQ ID NO: 499288 - DNA, 75 bp, synthetic construct
  source 1..75: mol_type = other DNA
gccgcgttcgcggttgccgcaataccactactgacccgtcaggctattgtgaaagccataaaagcgaaggctgga

SEQ ID NO: 499289 - DNA, 75 bp, synthetic construct
  source 1..75: mol_type = other DNA
tgaggcagacaataatctgcagagtctgtgctggccgtgtcataaggcgaagacggcccgtgaacggctaaagtg

SEQ ID NO: 499290 - DNA, 75 bp, synthetic construct
  source 1..75: mol_type = other DNA
cacgactgacccgtcaggctattgcgaaagccacaaaagcgaaggctggaagcaatacaagccaggccagtcccg

SEQ ID NO: 499291 - DNA, 75 bp, synthetic construct
  source 1..75: mol_type = other DNA
ccgatattccggtagcaggcggcgcggtaaaaccgttaatgcgtgagttgattatcgcggacaatgtgcacggcg

SEQ ID NO: 499292 - DNA, 75 bp, synthetic construct
  source 1..75: mol_type = other DNA
agtctggcgacgtggttgcttccggcactggctcctgtgttggctgattcgcctatccgcctcaacttgcaggta

SEQ ID NO: 499293 - DNA, 75 bp, synthetic construct
  source 1..75: mol_type = other DNA
ggtgctgtacctcaaggtggacatcatggcgatggcgattttcggcacctgcgtggccttcctgattaaaggcct

SEQ ID NO: 499294 - DNA, 75 bp, synthetic construct
  source 1..75: mol_type = other DNA
cgaggaggaacatcaacgctggcgcgaggcggtcgcgaaaaatccgccgttgctacatccggtggtgcgaacgca

SEQ ID NO: 499295 - DNA, 75 bp, synthetic construct
  source 1..75: mol_type = other DNA
ccaccggtgacgggctgtgcctcctgaccaaacggctggagcgtgggcgcttcgcctggccgtcagcctgtgatg

SEQ ID NO: 499296 - DNA, 75 bp, synthetic construct
  source 1..75: mol_type = other DNA
gactggcggcagcctaaaaagactgcttacgtccctgactatgttgtaagcctctttatcctggtcgacgctgaa

SEQ ID NO: 499297 - DNA, 75 bp, synthetic construct
  source 1..75: mol_type = other DNA
gcaaagcgttcctcacaccggcacagctggcgatgctgctggaaggtatcgactggcggcagcctaaaagactgc

SEQ ID NO: 499298 - DNA, 75 bp, synthetic construct
  source 1..75: mol_type = other DNA
ctcatttgcgcccgtttttgcggcgctaaaaccgtttatcgcccgtgcggggctgacaccctacaacgtggcgcg

SEQ ID NO: 499299 - DNA, 75 bp, synthetic construct
  source 1..75: mol_type = other DNA
attgaacgggtgcagcttttcgatatgttcccacacaccgcacactatgaagtgctgaccctgctggtgaagcaa

SEQ ID NO: 499300 - DNA, 75 bp, synthetic construct
  source 1..75: mol_type = other DNA
ctgaccaaacggctggagcgtgggcgcttcgcctggccgtcagcccgtgatggcaaagtgttccttacgcaggcg

SEQ ID NO: 499301 - DNA, 75 bp, synthetic construct
  source 1..75: mol_type = other DNA
tggcggcaaaggtgcagacgacgctgaaagacgatccgatgtcaggtcacgtttttatcttccgtgggcgtaatg

SEQ ID NO: 499302 - DNA, 75 bp, synthetic construct
  source 1..75: mol_type = other DNA
ttcaggtgcgctggcgctggcagccaaatgatatcgcgatttgggataaccgcgtgacccagcactatgccaatg

SEQ ID NO: 499303 - DNA, 75 bp, synthetic construct
  source 1..75: mol_type = other DNA
ttgcaatatgtggtggacccatacaccgacttaacgcgcccgttaagcgataatcagtttgaacagctttaccat

SEQ ID NO: 499304 - DNA, 75 bp, synthetic construct
  source 1..75: mol_type = other DNA
gcgcacccgcgagcttcttgccgcgctcaatcaccacgaaactgcactgcgcgtcaccgccgaacgcgccatgaa

SEQ ID NO: 499305 - DNA, 75 bp, synthetic construct
  source 1..75: mol_type = other DNA
aatggggatttcgctggcagaagagctactgaataacggcgcgcgcgagatcctcgctgaagtctataacggaga

SEQ ID NO: 499306 - DNA, 75 bp, synthetic construct
  source 1..75: mol_type = other DNA
gcaaagtgttcctgacgccggcgcagctggcgatgctgatggaaggtatcgactggcgacagccaaagcggctac

SEQ ID NO: 499307 - DNA, 75 bp, synthetic construct
  source 1..75: mol_type = other DNA
aaggaaaaagaggcatataacgccagtttggccgaactgaaagctattatggtgcagtgggcagaagataagcat

SEQ ID NO: 499308 - DNA, 75 bp, synthetic construct
  source 1..75: mol_type = other DNA
caactcaaacgttacctgacgatagggaggggctgtatcaccttgtctggcgcgagcctgaggagcgtattactt

SEQ ID NO: 499309 - DNA, 75 bp, synthetic construct
  source 1..75: mol_type = other DNA
acggttatccgtcactgaaacaggttgttggtaaggtcgtgaaagtggttcatagtgataatgttacttgcatga

SEQ ID NO: 499310 - DNA, 75 bp, synthetic construct
  source 1..75: mol_type = other DNA
tgcacaacttacctcaaaccaaaactgtgctgtatgggataaagaggtgctgatagcattgttgccagaactgcg

SEQ ID NO: 499311 - DNA, 75 bp, synthetic construct
  source 1..75: mol_type = other DNA
cctccttatgatgaaacagacagcgatattaaattgtttgttccaacaatatttaaaggatacttgcctcctaaa

SEQ ID NO: 499312 - DNA, 75 bp, synthetic construct
  source 1..75: mol_type = other DNA
ccgcgatgcgtgatgctgttccgttgattaagaaacagcaggaagaggcgagagtcaaagctgaagtccggcgta

SEQ ID NO: 499313 - DNA, 75 bp, synthetic construct
  source 1..75: mol_type = other DNA
ggtgttctatcaaataccggagaatccgcataaatatcccatagttatgctgcatggcgcgggccagtcttctcg

SEQ ID NO: 499314 - DNA, 75 bp, synthetic construct
  source 1..75: mol_type = other DNA
gctcgtctgaagtcaactcagaagtccgtcaatccgggactggtgagggcttcggcaacctttacccttgaattt

SEQ ID NO: 499315 - DNA, 75 bp, synthetic construct
  source 1..75: mol_type = other DNA
acctcgcttgcggctctgcttgatgggttgagcgtatatccgagcgcttttttacggtctgaagaaggaagtcgc

SEQ ID NO: 499316 - DNA, 75 bp, synthetic construct
  source 1..75: mol_type = other DNA
tgttcgcaatactgggcctgcgtactctgtattttgtactggaagccctgaaacagtatctgtcccagctggaga

SEQ ID NO: 499317 - DNA, 75 bp, synthetic construct
  source 1..75: mol_type = other DNA
cttatgtcgagctgatctttgccgttgttgttgcctggactgcggtcatgatgctcaaaggcggtggggatgatg

SEQ ID NO: 499318 - DNA, 75 bp, synthetic construct
  source 1..75: mol_type = other DNA
atgaaattgaggattactcccagcatctggcttaccgtatggttaaacgcttcttccctatctggccgaagctca

SEQ ID NO: 499319 - DNA, 75 bp, synthetic construct
  source 1..75: mol_type = other DNA
tcaaaagcggttatcaccggcgacgtcacgcagatcgacctgccgcgtaataccaagtcaggcttacgtcatgcc

SEQ ID NO: 499320 - DNA, 75 bp, synthetic construct
  source 1..75: mol_type = other DNA
gccgggctgaaagcggctgtagcagggcaattgagtagcggtgcatctaagaccaatacaggcagtgactcgctt

SEQ ID NO: 499321 - DNA, 75 bp, synthetic construct
  source 1..75: mol_type = other DNA
cgctttgggcctcagaaagcagatgaattcattcagtacatgaagtcagagctgagcaacacaaatgagccttac

SEQ ID NO: 499322 - DNA, 75 bp, synthetic construct
  source 1..75: mol_type = other DNA
tggtacaaaaccaacaaaatgctaaccagcatgttggtggacaaactgagtctggtgtaacgccgtacaatgtgg

SEQ ID NO: 499323 - DNA, 75 bp, synthetic construct
  source 1..75: mol_type = other DNA
aaatcaataactcgggaaaaaattgcggaagaaattgcgaaaaaaaactgcggaaataattgcgaaacaaaatgc

SEQ ID NO: 499324 - DNA, 75 bp, synthetic construct
  source 1..75: mol_type = other DNA
gtcttaaaattctcaccggaagaaatcaatgagatgctcctggattacagcgatgaagaacaaaaaaaattaaga

SEQ ID NO: 499325 - DNA, 75 bp, synthetic construct
  source 1..75: mol_type = other DNA
atgacaatttcaaattcgaatttattgaaaccgtttattactggtactgagttgccaccttttaaagaggatgtt

SEQ ID NO: 499326 - DNA, 75 bp, synthetic construct
  source 1..75: mol_type = other DNA
agaggcaagctggaaactgcccgtaatatgctgaatgccgggatagcccgcaaaatggtgctggaactgacagga

SEQ ID NO: 499327 - DNA, 75 bp, synthetic construct
  source 1..75: mol_type = other DNA
ttccatctggtggatgtgacggtgatggatgatgatgaaatcgtgcaccaccgccgtctgggggcactgacgctg

SEQ ID NO: 499328 - DNA, 75 bp, synthetic construct
  source 1..75: mol_type = other DNA
gtgagctaccgctggtgataccgctgctgttctatcatggtgagcgcagcccgtatccgtacagcatgaactggc

SEQ ID NO: 499329 - DNA, 75 bp, synthetic construct
  source 1..75: mol_type = other DNA
acagcagatcttgatacatggagcacattgaatagtcagagtaacgcggtgacatggatgggtttgccagggctt

SEQ ID NO: 499330 - DNA, 75 bp, synthetic construct
  source 1..75: mol_type = other DNA
ttgggagaagaacgtcctttccgcttcgttgaagaagaaaagaaaggcttcctcaaacgcttgttcggaggataa

SEQ ID NO: 499331 - DNA, 75 bp, synthetic construct
  source 1..75: mol_type = other DNA
gaaaccggtgcgttaatggcactctattttgcagacgaagccattattaccaccaacccggaagtctcctcagta

SEQ ID NO: 499332 - DNA, 75 bp, synthetic construct
  source 1..75: mol_type = other DNA
gtatgagcataatcgtcatcagcgtgccacccagagctttaaaccgacgctgacggtgtccttaatgttacagcc

SEQ ID NO: 499333 - DNA, 75 bp, synthetic construct
  source 1..75: mol_type = other DNA
cgacagaaaaaggtctggtgcaactgtgtagtgacacggataacgacagcgaggaactggctgccacgccaaagg

SEQ ID NO: 499334 - DNA, 75 bp, synthetic construct
  source 1..75: mol_type = other DNA
caatcaatgcagcaacatctgcggcggttcgtaaggatgaggcagaagagctaaaaaatcagacacagcagagcg

SEQ ID NO: 499335 - DNA, 75 bp, synthetic construct
  source 1..75: mol_type = other DNA
caatacgcaaattcaaaacactgctgtgttttaaccagtattacgaaggtgagcatagtattcatttcctgactt

SEQ ID NO: 499336 - DNA, 75 bp, synthetic construct
  source 1..75: mol_type = other DNA
aagctgtttgcttctcactccaccatcgaactgccgaaaggtatgccgggtgaagtgctgcaacactttacgcgc

SEQ ID NO: 499337 - DNA, 75 bp, synthetic construct
  source 1..75: mol_type = other DNA
gatgctgccggtctggaaacagcgaacgcggcatttgttcgcaaactgcttgctgcgctggttgactcgtcaccg

SEQ ID NO: 499338 - DNA, 75 bp, synthetic construct
  source 1..75: mol_type = other DNA
acgacagcgaggaactggcagccacaccaaaagccgtcaaaaccgtcatggacgagacgaaaacaaaagcgccgc

SEQ ID NO: 499339 - DNA, 75 bp, synthetic construct
  source 1..75: mol_type = other DNA
gcacactgaatgattttctgaccgctctcgatgaaggcgacctcaaacccgacgtggtgaaacgctttgaggaaa

SEQ ID NO: 499340 - DNA, 75 bp, synthetic construct
  source 1..75: mol_type = other DNA
acacgatagtccagaaagcggtcgataaactcggtgaagccgcaacgctgagcggcgaggcaaaggccagtgcag

SEQ ID NO: 499341 - DNA, 75 bp, synthetic construct
  source 1..75: mol_type = other DNA
ccgctgaacgacgtgctgacggcaatcagtgaactgacgcaacgggcagataatcttctgtgctttaatcaggac

SEQ ID NO: 499342 - DNA, 75 bp, synthetic construct
  source 1..75: mol_type = other DNA
tcgcaggggaaatacggcaggatgcagaagaaattgcgggtaatgtgcagaaagctgaagagctggcctctgaaa

SEQ ID NO: 499343 - DNA, 75 bp, synthetic construct
  source 1..75: mol_type = other DNA
tgtcatcagatggtggttatctggttggctgggaaaacctgaaggttgatgaggcttcactcagggcactgattg

SEQ ID NO: 499344 - DNA, 75 bp, synthetic construct
  source 1..75: mol_type = other DNA
catgcgcacggagcttgaactgaaagcggctgcgacgatggaaccccagagcgatatccgcgaccgcacaccggg

SEQ ID NO: 499345 - DNA, 75 bp, synthetic construct
  source 1..75: mol_type = other DNA
actgtgtggggtatgcgtaaaaacgaagcactggtacgtttcctggaagcggaagattttgatgcggcgattatc

SEQ ID NO: 499346 - DNA, 75 bp, synthetic construct
  source 1..75: mol_type = other DNA
gaatttatgtcaaacctgaccttcccgaggcgtatcgacaatatttactggccgctggcgcagggaattaccccc

SEQ ID NO: 499347 - DNA, 75 bp, synthetic construct
  source 1..75: mol_type = other DNA
gatgcggtgcaccgtgcggggttgcgcgtactggaagtgatgcgctacacccagcagcatgagagcgatgaattg

SEQ ID NO: 499348 - DNA, 75 bp, synthetic construct
  source 1..75: mol_type = other DNA
atgagtagtttgttgttgtttaacgataagagcagggcactgcaggcggatatcgtcgccgtgcagtcgcaggta

SEQ ID NO: 499349 - DNA, 75 bp, synthetic construct
  source 1..75: mol_type = other DNA
acctgaagcccaataaacctgtattgctcacccttgtctacaacgatgcttcggtagctgcactcattgaaggat

SEQ ID NO: 499350 - DNA, 75 bp, synthetic construct
  source 1..75: mol_type = other DNA
gcgtactggaagtgatgcgctatacccagcagcatgagagcgatgaattgattttgccgcctctggctgaagcat

SEQ ID NO: 499351 - DNA, 75 bp, synthetic construct
  source 1..75: mol_type = other DNA
gtgtgctggaggtgatgcgctatacccagcagcatggtagcgatgaattgattttgccgccgctggcggaagcat

SEQ ID NO: 499352 - DNA, 75 bp, synthetic construct
  source 1..75: mol_type = other DNA
atgagcactgaacttgaaacaaaaattatcaatatccttgaacttgatggcatcgcaacaatgcaccagttacgc

SEQ ID NO: 499353 - DNA, 75 bp, synthetic construct
  source 1..75: mol_type = other DNA
cgtcatatacgtgaaacaccagtctttgaacgtcaaaaagcccttctgcaggctgaacgagaaaaggttattcgt

SEQ ID NO: 499354 - DNA, 75 bp, synthetic construct
  source 1..75: mol_type = other DNA
gttgagcgtatcagcctggtagttaactacgatatcccgatggattctgagtcttacgttcaccgtatcggtcgt

SEQ ID NO: 499355 - DNA, 75 bp, synthetic construct
  source 1..75: mol_type = other DNA
tcaaccacaaggctgaatgcaagccgcgagcgagcactgaagcagatggagcctctatcccgagaggaagcagag

SEQ ID NO: 499356 - DNA, 75 bp, synthetic construct
  source 1..75: mol_type = other DNA
atgccgcgacggttgcgaatggtgtacttaacggagaatttgacagccagcaaacccacgcggtccgtaaaatgc

SEQ ID NO: 499357 - DNA, 75 bp, synthetic construct
  source 1..75: mol_type = other DNA
tggtcacgctaatgatctcgcgtttgattttgacagccgcctgaacgaataccggaaaaataacggcctgctacc

SEQ ID NO: 499358 - DNA, 75 bp, synthetic construct
  source 1..75: mol_type = other DNA
gattatgcagcattccagtggcagagggcttcagttcagcgttttattgcactttcggcgaagcaatctggctga

SEQ ID NO: 499359 - DNA, 75 bp, synthetic construct
  source 1..75: mol_type = other DNA
cccgcgtatcgctgaggaactgtcttccctgaccgaagatgacaccgatgcgattattcatccctgtcttgcggt

SEQ ID NO: 499360 - DNA, 75 bp, synthetic construct
  source 1..75: mol_type = other DNA
gttccatcacagtagaataactgtggaaaacccgtcaccaaaactggtcactatggaacatcaccccttctggtt

SEQ ID NO: 499361 - DNA, 75 bp, synthetic construct
  source 1..75: mol_type = other DNA
agaatcgttatggcgtgagtaatagtgagcttggcggaggacgttatgccgtggctcgtcatgttggcgaactgg

SEQ ID NO: 499362 - DNA, 75 bp, synthetic construct
  source 1..75: mol_type = other DNA
atggcgtttgacgatatcgacctgcttaccatgctgcaactggtggcgcgggtggtcgccgactcgctgggaaat

SEQ ID NO: 499363 - DNA, 75 bp, synthetic construct
  source 1..75: mol_type = other DNA
agtaccgtatcgctaagctgagcgtgttcgagcaattgaaagtatcccgcaagctattgccggtgctggcaggtc

SEQ ID NO: 499364 - DNA, 75 bp, synthetic construct
  source 1..75: mol_type = other DNA
tgatgtcagatttcgggagcattcgctcccttctgcctgctgatggcaaaatcgacaccgtgaaattcgatcagc

SEQ ID NO: 499365 - DNA, 75 bp, synthetic construct
  source 1..75: mol_type = other DNA
tggctgggcaaaaaaaatggagtctggtgaacgcgtggtgattaaaaaccctgaatacttctcgtcttatatgca

SEQ ID NO: 499366 - DNA, 75 bp, synthetic construct
  source 1..75: mol_type = other DNA
ctcaggctctggcagaacgaagggcgtatatcgcggcgtcttccggtaacaacctcttctggcgctgaagtggca

SEQ ID NO: 499367 - DNA, 75 bp, synthetic construct
  source 1..75: mol_type = other DNA
ctttacatgccagaggagggcttttcgatctgcatgcgaataaaaggttagctcttctcgattgcgccctaaacg

SEQ ID NO: 499368 - DNA, 75 bp, synthetic construct
  source 1..75: mol_type = other DNA
agaagcgtttcgctttgatatctgcggcagcgttagcgaagcgattccggagaatcgttatggcgtgagtaatag

SEQ ID NO: 499369 - DNA, 75 bp, synthetic construct
  source 1..75: mol_type = other DNA
accaccgcaccggaagcgtttcgctttgatatctgcggcagcgttagcgaaccgatccccgataatcgttatggt

SEQ ID NO: 499370 - DNA, 75 bp, synthetic construct
  source 1..75: mol_type = other DNA
tggatttcattagtgccatggatatatcagcatcaatacccagctccatgaatgaaagcacagcgaagggaatat

SEQ ID NO: 499371 - DNA, 75 bp, synthetic construct
  source 1..75: mol_type = other DNA
atggagttcgaaatcaaaggcgtgaaatatcgcgtggcaaaactcagcgtttttgaccaactgaaagtgacccgc

SEQ ID NO: 499372 - DNA, 75 bp, synthetic construct
  source 1..75: mol_type = other DNA
tttgacgccgaaggtttaaccaagctgacgcaggagacggagcgccgtcgtcgcgaacgtaacgaagttgaacag

SEQ ID NO: 499373 - DNA, 75 bp, synthetic construct
  source 1..75: mol_type = other DNA
gttccgccacggtaacatgacgctggaaaatccttcaccagagctgctcacggtgttgatccgtgaactgaccgg

SEQ ID NO: 499374 - DNA, 75 bp, synthetic construct
  source 1..75: mol_type = other DNA
taacataacgctggaaaatccatcgccagagctgctcacggtgctgatccgcgaactgagcgggaggggaagatg

SEQ ID NO: 499375 - DNA, 75 bp, synthetic construct
  source 1..75: mol_type = other DNA
ttctttgtgcgggtaaaaccttcagtagaagggattgccaccgctgcccagacgctggggcaacgcaccctgtcg

SEQ ID NO: 499376 - DNA, 75 bp, synthetic construct
  source 1..75: mol_type = other DNA
atggtcggtcaggagcaactggagtcgtcaccattatgccagcatagtgacaatgacacagaaacgaaacgggaa

SEQ ID NO: 499377 - DNA, 75 bp, synthetic construct
  source 1..75: mol_type = other DNA
ggcaccactgattgactccttgctcaatgaaatcggtgtttctggcggctcgctggcggcattgacttcaccctt

SEQ ID NO: 499378 - DNA, 75 bp, synthetic construct
  source 1..75: mol_type = other DNA
tattgcgtttgcaaccgctgctggccgagggggtcacctgccttgaaattaagtcaggctacgggctgaccctgg

SEQ ID NO: 499379 - DNA, 75 bp, synthetic construct
  source 1..75: mol_type = other DNA
gcgaagtcaccagcggtacgccaggttgctatcgtcaggctgtatgtatcggttctgcgcttaacatcacggcga

SEQ ID NO: 499380 - DNA, 75 bp, synthetic construct
  source 1..75: mol_type = other DNA
tcggcaaaccgttccgcgatctcggtgaagtcagtggcgattcttgccaggcctccaatcaggactctccgccga

SEQ ID NO: 499381 - DNA, 75 bp, synthetic construct
  source 1..75: mol_type = other DNA
ttgttccgggctggtgggttcaaagctggctcaggttactggctacagtgataaaccactggatgccattggcgc

SEQ ID NO: 499382 - DNA, 75 bp, synthetic construct
  source 1..75: mol_type = other DNA
ggaactgattacggcgttgtatttggcgcatttgcaggggctgtattctacatagcaacagctgcagatctgagt

SEQ ID NO: 499383 - DNA, 75 bp, synthetic construct
  source 1..75: mol_type = other DNA
gcagcgcgccgactggcatattttctggtgtcgtatatcgcggggatcctttgttccgggctggtgggttcaaag

SEQ ID NO: 499384 - DNA, 75 bp, synthetic construct
  source 1..75: mol_type = other DNA
cagcaggcaaccgaaatcgccagccaggccagagccattgccgtggcggcaaaatcggaagagcagtcacaggca

SEQ ID NO: 499385 - DNA, 75 bp, synthetic construct
  source 1..75: mol_type = other DNA
acaaacgcgacccgctcaccattgatgcttttaatggccgtgctgatggggaagaaggtgaaagtagcgaagaca

SEQ ID NO: 499386 - DNA, 75 bp, synthetic construct
  source 1..75: mol_type = other DNA
gccggaaaaaaacaaatccccgcgtttattgataatgattacagtgacgatgaccaggtgatcgagaacattcaa

SEQ ID NO: 499387 - DNA, 75 bp, synthetic construct
  source 1..75: mol_type = other DNA
gatggaaagaatattaagcgtaatactgccgttgtagttatgcaatggttaacatcacttagaaatggaaacagc

SEQ ID NO: 499388 - DNA, 75 bp, synthetic construct
  source 1..75: mol_type = other DNA
ctgaaataccgtatttcgagtgctacacagatattccggcgatggcacgaaaactggctgcccgctttgattatg

SEQ ID NO: 499389 - DNA, 75 bp, synthetic construct
  source 1..75: mol_type = other DNA
caatcaattgtgatgattacgataatcttgagctcgcctgccagcatcatttaatgctgacacttgagctgaaag

SEQ ID NO: 499390 - DNA, 75 bp, synthetic construct
  source 1..75: mol_type = other DNA
atgtcaatgaatgatacgtatcaaccaatcaattgtgatgattacgataatcttgagctcgcctgccagcatcat

SEQ ID NO: 499391 - DNA, 75 bp, synthetic construct
  source 1..75: mol_type = other DNA
cctaaggcttgacttttatactaaagacaacgacttcacaaagggactaagcgttctttcagaggtaaacaaacg

SEQ ID NO: 499392 - DNA, 75 bp, synthetic construct
  source 1..75: mol_type = other DNA
gaagaaatgatgtcacaagccatatatagaaaagaatacgcaacaagtaatgagaagataaaaaactatgctcta

SEQ ID NO: 499393 - DNA, 75 bp, synthetic construct
  source 1..75: mol_type = other DNA
attgattataacaaaattatcataattagttctatttatcttttaagttgtattttggtttttatttatgctata

SEQ ID NO: 499394 - DNA, 75 bp, synthetic construct
  source 1..75: mol_type = other DNA
gaagcagatggattttttcagaaacgcagcaataattatgatgggacttatcttcatgtggatagtttctggtat

SEQ ID NO: 499395 - DNA, 75 bp, synthetic construct
  source 1..75: mol_type = other DNA
tttcggtacacaagttgttcctgcattcgcaggtattttacctgttgaggaatggcagggcgctggtaagatgat

SEQ ID NO: 499396 - DNA, 75 bp, synthetic construct
  source 1..75: mol_type = other DNA
tggcgttataaaagacaaggatgaactgcttagaaatccctgcctgaatattcagactggagcctggatactggc

SEQ ID NO: 499397 - DNA, 75 bp, synthetic construct
  source 1..75: mol_type = other DNA
tggaccactggctgggctggtgatgagctgggcgggcgtaccggtgatttatctggcggcggcgggactggtcgc

SEQ ID NO: 499398 - DNA, 75 bp, synthetic construct
  source 1..75: mol_type = other DNA
atcagataagaacttccaagacctcggaatatctgcatttaaagaaggaaaccgtccttcgctcggagatatgct

SEQ ID NO: 499399 - DNA, 75 bp, synthetic construct
  source 1..75: mol_type = other DNA
gcgatcagtgcgtggtatttactgcgcggacgggagcgcgatttcgcgctacgctcgtttgccatcggttccgtc

SEQ ID NO: 499400 - DNA, 75 bp, synthetic construct
  source 1..75: mol_type = other DNA
agcatttcatgagctggaaaacgatctcggttatggcatgttgctctcccgctatgcgccggatatgaatcatgt

SEQ ID NO: 499401 - DNA, 75 bp, synthetic construct
  source 1..75: mol_type = other DNA
gtaacagcaaaaaaaaaggcgctaaagattttgcgttggtggaaccgttatatcagtccattgaaatctgcgctt

SEQ ID NO: 499402 - DNA, 75 bp, synthetic construct
  source 1..75: mol_type = other DNA
cgtgcaggaaaagcgagcaaagacccggaaaagcgtagagccagtgcatggcggttcaaccccctgctgcctgtg

SEQ ID NO: 499403 - DNA, 75 bp, synthetic construct
  source 1..75: mol_type = other DNA
gtgagtactgaaaaggattatccagtgaagatccctaagtgggtttatgaccgtattactgaaataacggattat

SEQ ID NO: 499404 - DNA, 75 bp, synthetic construct
  source 1..75: mol_type = other DNA
gaggctggctgctgtctatgcctgtatttatgttatttcatccagtgtggctcagatgcccctgcatgtgatgcg

SEQ ID NO: 499405 - DNA, 75 bp, synthetic construct
  source 1..75: mol_type = other DNA
atgatgtggcggcacagcaagctacaaacgcgaaacttaaagcgcgaaacgatcaactttttgccgaaattgacg

SEQ ID NO: 499406 - DNA, 75 bp, synthetic construct
  source 1..75: mol_type = other DNA
agtcggtctgctgacgtgggtgattagtttctggctggcgggaatgattattcgtcgtcgcgaagaggatactga

SEQ ID NO: 499407 - DNA, 75 bp, synthetic construct
  source 1..75: mol_type = other DNA
gttggcagtttgctctgaccgcgctgtaccattttttattcgtgccacttactttggggctgatttttttgctgg

SEQ ID NO: 499408 - DNA, 75 bp, synthetic construct
  source 1..75: mol_type = other DNA
ggcattccgggagttggaaagcgaccttggttacggcatgttgctctcccgctatgcgccggatatgaatcatgt

SEQ ID NO: 499409 - DNA, 75 bp, synthetic construct
  source 1..75: mol_type = other DNA
ggggcaatggttatacgtgggtaaaacgtaatcgtcgtggcgaggttaccagtcttgaatgctgtatgccatggg

SEQ ID NO: 499410 - DNA, 75 bp, synthetic construct
  source 1..75: mol_type = other DNA
atgaaaaaatggctattcagactgctgctgtggctcccggccctgtctgcatatgccgatctgccagagatggaa

SEQ ID NO: 499411 - DNA, 75 bp, synthetic construct
  source 1..75: mol_type = other DNA
gggattgccaccgctgcccagacgctggggcaacgcaccctgtcgcctgaagacttacgtatgttggttgaagat

SEQ ID NO: 499412 - DNA, 75 bp, synthetic construct
  source 1..75: mol_type = other DNA
taagcgcccaacaaaacgtagaaaccactcgccagaccgcagaagccgatcgtgctaaacaagttgccctaatcg

SEQ ID NO: 499413 - DNA, 75 bp, synthetic construct
  source 1..75: mol_type = other DNA
gctccgcacgcatcgtcgccctggcttccctgccggcgtttgccatgctgagttcgctcgctcaggcccagggcc

SEQ ID NO: 499414 - DNA, 75 bp, synthetic construct
  source 1..75: mol_type = other DNA
ctcggagatccagagcgggcgcaagcagtggaaagatctgggctcgatggcaggcgtcggcagcattcttctggt

SEQ ID NO: 499415 - DNA, 75 bp, synthetic construct
  source 1..75: mol_type = other DNA
catcgtggtgctgctggcgctggccatctgcgccgtcggttttctggtggtggcgaacaactgcattgccaccta

SEQ ID NO: 499416 - DNA, 75 bp, synthetic construct
  source 1..75: mol_type = other DNA
aggaaagccggttttcctcgataaaaatttgccatcattttcaatatcctatgccggaaatatggtcggcgtagc

SEQ ID NO: 499417 - DNA, 75 bp, synthetic construct
  source 1..75: mol_type = other DNA
cacgcgggtttcatagtccccacgcacccgataaccctattttttccagcaatgaatcgttatggatcagtaagc

SEQ ID NO: 499418 - DNA, 75 bp, synthetic construct
  source 1..75: mol_type = other DNA
cgcgccaacaaccccaccagccggatgatgcgttttgcccagctctctaccgtgaagtctttttcgccaaattga

SEQ ID NO: 499419 - DNA, 75 bp, synthetic construct
  source 1..75: mol_type = other DNA
gttggagattgaacaacaagaagcgtttatgacgcttgagcaggagcagcaggttaaaacccgtaccgctgagca

SEQ ID NO: 499420 - DNA, 75 bp, synthetic construct
  source 1..75: mol_type = other DNA
actggagagcgtttcacttaccaactttaaccagacctcgaaagaacatttcaatccgaacaatgcctttgacgc

SEQ ID NO: 499421 - DNA, 75 bp, synthetic construct
  source 1..75: mol_type = other DNA
agtttgccatcattttcaatatcctatgccggaaatatcgtcggtgtggcgttaacaaccgaaggcgaatgcggc

SEQ ID NO: 499422 - DNA, 75 bp, synthetic construct
  source 1..75: mol_type = other DNA
gaaaacccgcgcggtattaccgacaaaatgaccagcgccgatatgctgcgtatgggtgaagcgctgaatgcgaaa

SEQ ID NO: 499423 - DNA, 75 bp, synthetic construct
  source 1..75: mol_type = other DNA
taatgaacacggaaagataatgaaagccatccgtaaacaactcaacgaaatacaccatatactgaaaagaatgac

SEQ ID NO: 499424 - DNA, 75 bp, synthetic construct
  source 1..75: mol_type = other DNA
aataaaggaaaacatattgctcgaagaaacctctggatatcagtcagttgtctacttcttgccttctgtgtctgg

SEQ ID NO: 499425 - DNA, 75 bp, synthetic construct
  source 1..75: mol_type = other DNA
acgggcaggtgttgcacgcaacgtcggagcagatcctgaaagacgattatatggtctgggccggcaatatgttcc

SEQ ID NO: 499426 - DNA, 75 bp, synthetic construct
  source 1..75: mol_type = other DNA
gaactcaatcacaaattgggtgaagtcaccgctgaatatcttatgcaatctcttcatgaagatatgaaagtgggg

SEQ ID NO: 499427 - DNA, 75 bp, synthetic construct
  source 1..75: mol_type = other DNA
actatacggtaaacctgagatacgcgcccgtattaacgagctaaagcaggagcgtattgatcaactgggcattga

SEQ ID NO: 499428 - DNA, 69 bp, synthetic construct
  source 1..69: mol_type = other DNA
agtgtggatgaacacaaaaaggcaaatgcctttgccggcagtgccctgagtcacgcggcgctgccgtaa

SEQ ID NO: 499429 - DNA, 75 bp, synthetic construct
  source 1..75: mol_type = other DNA
cgatgtggcgttaggatcgtacggtgagaacccacgcggtattaccgacaaaatgaccagcgccgatatgctgcg

SEQ ID NO: 499430 - DNA, 75 bp, synthetic construct
  source 1..75: mol_type = other DNA
aacgttgctgccgccgtgatgcaaaactgcgctgacgacgtaccgttcatcggtccgaaaacctgcgtggatctg

SEQ ID NO: 499431 - DNA, 75 bp, synthetic construct
  source 1..75: mol_type = other DNA
gttctagatccgtttgctattcgccaaatcgacgccgtgctggcgacgcacgatcacaacgatcatatcgacgtg

SEQ ID NO: 499432 - DNA, 75 bp, synthetic construct
  source 1..75: mol_type = other DNA
agcaacctggtggaagagaaggtggaaaagaccgccatctccatccgcagtgtgctgaccaactatgtcaaggca

SEQ ID NO: 499433 - DNA, 75 bp, synthetic construct
  source 1..75: mol_type = other DNA
ctggcctttctgattttccgttttctgcgtcgtctgggtgaaaaacaggcacaggatgaacgtatcgggggacgt

SEQ ID NO: 499434 - DNA, 75 bp, synthetic construct
  source 1..75: mol_type = other DNA
tgaagcctcatccatctgtatcgataagttacctctgctgctgaacagtgaagtgcagtatctgatgatgtacgg

SEQ ID NO: 499435 - DNA, 75 bp, synthetic construct
  source 1..75: mol_type = other DNA
ttattacctgtagagataacgtctgatgagccgaaagaaccgatggcgactcttcccctgcttttatccactcct

SEQ ID NO: 499436 - DNA, 75 bp, synthetic construct
  source 1..75: mol_type = other DNA
ttcagggcctggctacaggcgaaaagcggtcgggaagtaacgatgggcgattttaccgccaacctgacggcaacc

SEQ ID NO: 499437 - DNA, 75 bp, synthetic construct
  source 1..75: mol_type = other DNA
cgccggggaatccccacgcgttccggtggtgtttaagttgaaggattgtaaggggccagcgagttaccaggtgca

SEQ ID NO: 499438 - DNA, 75 bp, synthetic construct
  source 1..75: mol_type = other DNA
tgtcaattttaatacgtggttacaggccgtaaatggacgagatgttacgtccggagatttcaccgccacgatgac

SEQ ID NO: 499439 - DNA, 75 bp, synthetic construct
  source 1..75: mol_type = other DNA
aaatagcgttaaggtgacatttacgggcacagaggataccggacaacctggatttttagctcttgattcagactc

SEQ ID NO: 499440 - DNA, 75 bp, synthetic construct
  source 1..75: mol_type = other DNA
cagcctaaattttaatgcctggttacaggcgaagagcgggcgaaatgtaacgtccggtgactttaacgccactgt

SEQ ID NO: 499441 - DNA, 75 bp, synthetic construct
  source 1..75: mol_type = other DNA
cagcctaaattttaatacctggttacaggcaaagagcgggcgagatgtaacgtccggagactttagtgccatagt

SEQ ID NO: 499442 - DNA, 75 bp, synthetic construct
  source 1..75: mol_type = other DNA
caggcaaaagaggggcgtgatgtaacacccggtgattttaccgcccagttaaccgcaacgtttgagtatatttaa

SEQ ID NO: 499443 - DNA, 75 bp, synthetic construct
  source 1..75: mol_type = other DNA
ttctgacgaacaaaccagccttaaattcaagctggcactattgcagtctctgcctgctgtaatcgagaaatccgt

SEQ ID NO: 499444 - DNA, 75 bp, synthetic construct
  source 1..75: mol_type = other DNA
aaagcagagaaagaagctgcagaaatgcaggcggcagccattgttgagttagccgaagctacgcgtaaaaaaggc

SEQ ID NO: 499445 - DNA, 75 bp, synthetic construct
  source 1..75: mol_type = other DNA
taacctcaattttaatgcttggttgcaggcgaaaagcggtcgtgatgtaacctccggtgacttcaccgccagcct

SEQ ID NO: 499446 - DNA, 75 bp, synthetic construct
  source 1..75: mol_type = other DNA
cagggtgccggtagtctttaagctgaaagactgcaaaggtccggcgaattaccaggtcaaaatcaccctgaccgg

SEQ ID NO: 499447 - DNA, 75 bp, synthetic construct
  source 1..75: mol_type = other DNA
cattttccgaccgtcagcagtcaggatttaatggtcgcagggcagtctgccagggtgccggtggtctttaagctg

SEQ ID NO: 499448 - DNA, 75 bp, synthetic construct
  source 1..75: mol_type = other DNA
aatctggcagaaatccattttcccaccgtcagcaaccgggatttgatagtcgccggacagtctgtgcatctgccg

SEQ ID NO: 499449 - DNA, 75 bp, synthetic construct
  source 1..75: mol_type = other DNA
agtcatgaaagtcttcgagtttttcgaagcctgggccgaagaacgcaatatcacgctcaaatttaacgggatgcc

SEQ ID NO: 499450 - DNA, 75 bp, synthetic construct
  source 1..75: mol_type = other DNA
gggtggatccgtccagacaacgaaaaggagaaggcagcggcatcggccttgcgattgtgaagtcaatcgtggaag

SEQ ID NO: 499451 - DNA, 75 bp, synthetic construct
  source 1..75: mol_type = other DNA
tccgcagggaaatatcctgttcacttcggcacagggggcggcattacgtccggcgatgaagacggcggacttcgg

SEQ ID NO: 499452 - DNA, 75 bp, synthetic construct
  source 1..75: mol_type = other DNA
ccgccacggtaacatgacgctggaaaatccttcaccagagctgctcacggtgttgatccgtgaactgaccgggag

SEQ ID NO: 499453 - DNA, 75 bp, synthetic construct
  source 1..75: mol_type = other DNA
gcaacgtgaaaaacagcggcaaaaatatctttcattgctggaagatgctaaacgaattaagcaacagcaactgga

SEQ ID NO: 499454 - DNA, 75 bp, synthetic construct
  source 1..75: mol_type = other DNA
ttgtcggcaattcgactggcactgtatgggcgtttagcgtttggcccggcaatgcagcagcaggagtatgttgaa

SEQ ID NO: 499455 - DNA, 75 bp, synthetic construct
  source 1..75: mol_type = other DNA
gctgatgccccacgtgcaggcggcagacaatctgcatttctacggcaatttactcagtaaatcctgcacgctggt

SEQ ID NO: 499456 - DNA, 75 bp, synthetic construct
  source 1..75: mol_type = other DNA
atggaaacgtaccggattatcgcctcctctggccaggcgacatttcagggcaaacagcagaactatgtcatgctg

SEQ ID NO: 499457 - DNA, 75 bp, synthetic construct
  source 1..75: mol_type = other DNA
atgaaaacagcacgcacttatttgcccggttacgcgctgctggcgggcctgctgctgaccgccagcacgggtgca

SEQ ID NO: 499458 - DNA, 75 bp, synthetic construct
  source 1..75: mol_type = other DNA
ttgaccttgtgattgaaaatccagggaaaccgatccctgaagaacatttatcaaggctgtttgaccgtttttatc

SEQ ID NO: 499459 - DNA, 75 bp, synthetic construct
  source 1..75: mol_type = other DNA
ggcgtacggcggcatggcgcaggcggctgacaacctgcatttctacggcaatttactcagtaaatcctgcacgct

SEQ ID NO: 499460 - DNA, 75 bp, synthetic construct
  source 1..75: mol_type = other DNA
aagacctgatggtgaccgggcagtcggcgcgggtgccggtggtgtttcagctgaaagattgtaaagggccagccg

SEQ ID NO: 499461 - DNA, 75 bp, synthetic construct
  source 1..75: mol_type = other DNA
aacagcgtccgtctcagcattcagggcggtcatctcgggcacgataacaacggtggtattgcccgtggggccacg

SEQ ID NO: 499462 - DNA, 75 bp, synthetic construct
  source 1..75: mol_type = other DNA
aaatatcaccctgggcgttcaggccggttatgcccacagcgtcagcagcgctgaaggctataacggtcaggctac

SEQ ID NO: 499463 - DNA, 75 bp, synthetic construct
  source 1..75: mol_type = other DNA
caggtgattaaggaaggaggaagtgccgcgcataccaccatcaatcagaaaggaaagctgcaggtgaacgccggt

SEQ ID NO: 499464 - DNA, 75 bp, synthetic construct
  source 1..75: mol_type = other DNA
atgaaagcgtcaacggacaataacgacttccgcgcccgggggggggctggctgggttcgctggaaaccggtctgc

SEQ ID NO: 499465 - DNA, 75 bp, synthetic construct
  source 1..75: mol_type = other DNA
aacaccaccagcgtcgataccaatcacgccgaacgtgataagcatcttcgcagcgcagatttcctcaacaccgca

SEQ ID NO: 499466 - DNA, 75 bp, synthetic construct
  source 1..75: mol_type = other DNA
gtcagggtggcaccatcaatatgcgtgttcgccttgatggcagcaatgcctctgaccagctggtgattaatggtg

SEQ ID NO: 499467 - DNA, 75 bp, synthetic construct
  source 1..75: mol_type = other DNA
gtgcacaacggaggcacagcctctgacacggttgtaaacagtgacggctggcagattgtcaaggaaggtggtctg

SEQ ID NO: 499468 - DNA, 75 bp, synthetic construct
  source 1..75: mol_type = other DNA
ctggtgggtacagccttctgctatccgcaccttcagctcccggggggacatgagcatgggtacagccgcagccgg

SEQ ID NO: 499469 - DNA, 75 bp, synthetic construct
  source 1..75: mol_type = other DNA
gcaggccggactggaagcccgtgtccgggaaaatatcaccctgggcgttcaggccggttatgcccacagcgtcag

SEQ ID NO: 499470 - DNA, 75 bp, synthetic construct
  source 1..75: mol_type = other DNA
ctaatacccgtgtggatgatggcggaacgctggatgtccgcaacggtggtgccgccaccaccgtatccatgggga

SEQ ID NO: 499471 - DNA, 75 bp, synthetic construct
  source 1..75: mol_type = other DNA
gcagtgcacaacatgtgcgtgccggtttccgtctgggcagccacaacgatatgacctttggcgaaggcacctcat

SEQ ID NO: 499472 - DNA, 75 bp, synthetic construct
  source 1..75: mol_type = other DNA
gttcaggccggttatgcccacagcgtcagcggcagcagcgctgaaggctataacggtcaggctacgctgaatatg

SEQ ID NO: 499473 - DNA, 75 bp, synthetic construct
  source 1..75: mol_type = other DNA
ggtggccaaatttactgtgccactacaagttcgggcatggcagtgcacaacatgtgcgtgccggcttccgtctgg

SEQ ID NO: 499474 - DNA, 75 bp, synthetic construct
  source 1..75: mol_type = other DNA
cggttatgcccacagcgtcagcggcagcagcgctgaaggttataacggtcaggccacgctgaatgtgactttctg

SEQ ID NO: 499475 - DNA, 75 bp, synthetic construct
  source 1..75: mol_type = other DNA
agcgtcatcggacaataacgacttccgcgcccggggctggggctggctgggctcactggaaaccggtctgccctt

SEQ ID NO: 499476 - DNA, 75 bp, synthetic construct
  source 1..75: mol_type = other DNA
tctgagtggcagaacacagctcagtaaaggcgccagcatggtactgaatggtgatgtggtcagtaccggcgatat

SEQ ID NO: 499477 - DNA, 75 bp, synthetic construct
  source 1..75: mol_type = other DNA
ccctggcagtgtctgccggtggtaaggcaacagatgtcaccatgacatccggtagtgccctgattgcagacagtg

SEQ ID NO: 499478 - DNA, 75 bp, synthetic construct
  source 1..75: mol_type = other DNA
agaataccctagtggatgacggcggtaccctggcagtgtctgccggcggtaaggcgacaagtgtcaccataacat

SEQ ID NO: 499479 - DNA, 75 bp, synthetic construct
  source 1..75: mol_type = other DNA
aagcccgtgtccgggaaaatatcaccctgggcgttcaggccggttatgcccacagcgtcagcggcagcagcgctg

SEQ ID NO: 499480 - DNA, 75 bp, synthetic construct
  source 1..75: mol_type = other DNA
ttatccgcaccttcagctcccggggtgatatgcgtgtggggacctccactgcaggcagcgggatgacgttctctc

SEQ ID NO: 499481 - DNA, 75 bp, synthetic construct
  source 1..75: mol_type = other DNA
gagccacaactgcagtatacctggcagggactttccctggatgacggtaaggacaacgccggttatgtgaagttc

SEQ ID NO: 499482 - DNA, 75 bp, synthetic construct
  source 1..75: mol_type = other DNA
aacatgacgttctcaccgtcccagaatggcacgtcactggacctgcaggccggactggaagcccgtgtccgggaa

SEQ ID NO: 499483 - DNA, 75 bp, synthetic construct
  source 1..75: mol_type = other DNA
gccagcggtaagttcagtattgatggcacatccggtcaggccagcggcctgctgctggaaaatggcggcagcttt

SEQ ID NO: 499484 - DNA, 75 bp, synthetic construct
  source 1..75: mol_type = other DNA
caacggtggtattgcccgtggggccacgccggaaagcagcggcagctatggcttcgtccgtctggagagtgacct

SEQ ID NO: 499485 - DNA, 75 bp, synthetic construct
  source 1..75: mol_type = other DNA
gacagtgcaaaacacagtgtgcgtgaactgccggtgaactggtgggtacagccttccgttatccgcaccttcagc

SEQ ID NO: 499486 - DNA, 75 bp, synthetic construct
  source 1..75: mol_type = other DNA
tctttctagctgcctgtgccgggctgggcgtgccgccgcaggcatgtatcggcattgaagatgcgcaggcgggca

SEQ ID NO: 499487 - DNA, 75 bp, synthetic construct
  source 1..75: mol_type = other DNA
caggccggttatgcccacagcgtcagcggcagcagcgctgaaggctataacggtcaggccacgctgaatgtgact

SEQ ID NO: 499488 - DNA, 75 bp, synthetic construct
  source 1..75: mol_type = other DNA
acaggctggtatggaatcacattacgggcaccctggtggtggcctccgaactggcccgctcacggggaaaacgca

SEQ ID NO: 499489 - DNA, 75 bp, synthetic construct
  source 1..75: mol_type = other DNA
tgctgctgtcacatcagttccggcactggctgctgacacggttgtacaggcgggagaaaccgtgagcggcggaac

SEQ ID NO: 499490 - DNA, 75 bp, synthetic construct
  source 1..75: mol_type = other DNA
gtcactggacctgcaggccggactggaagcccgtgtccgggaaaatatcaccctgggcgttcaggccggttatgc

SEQ ID NO: 499491 - DNA, 75 bp, synthetic construct
  source 1..75: mol_type = other DNA
ccggttatgtgaagttcgggcatggcagtgcacaacatgtgcgtgccggcttccgtctgggcagccaccacgata

SEQ ID NO: 499492 - DNA, 75 bp, synthetic construct
  source 1..75: mol_type = other DNA
tccgcttgatttacaacaccgggcgcgggcacggcagattcaggcctggctacgcagcgatctgatgcccatccg

SEQ ID NO: 499493 - DNA, 75 bp, synthetic construct
  source 1..75: mol_type = other DNA
cgcacatctgcacttccaggcatggcagcagattgccgccgaaatcggcatcagcatcgatgcgcaatttaacga

SEQ ID NO: 499494 - DNA, 75 bp, synthetic construct
  source 1..75: mol_type = other DNA
tcaccttctgcgcggacgcttcccaacttaaaaactcgaaaccggacccggaaatctttctcgccgcctgtgccg

SEQ ID NO: 499495 - DNA, 75 bp, synthetic construct
  source 1..75: mol_type = other DNA
tatcgcaaaaatctgctctacgtccactcactgcgcgaactgacggttaatgctgtgctgcccggcattcgctct

SEQ ID NO: 499496 - DNA, 75 bp, synthetic construct
  source 1..75: mol_type = other DNA
gcgtccgtctcagcattcagggcggtcatctcggtcacgataacaacggcggtattgcccgtggagccacgccgg

SEQ ID NO: 499497 - DNA, 75 bp, synthetic construct
  source 1..75: mol_type = other DNA
acgggggtgtggccgggaataccaccgttaatcagaagggcagactgcaggtggacgccggtggtacagccacga

SEQ ID NO: 499498 - DNA, 75 bp, synthetic construct
  source 1..75: mol_type = other DNA
ggtacatggtcacgcactggataccacgctgaatggggggtaccagtatgtgcacaacggcggtacagcgtctgg

SEQ ID NO: 499499 - DNA, 75 bp, synthetic construct
  source 1..75: mol_type = other DNA
acctggcagggactctccctggatgacggccaggataacgccggttatgtgaagttcgggcatggcagtacacaa

SEQ ID NO: 499500 - DNA, 75 bp, synthetic construct
  source 1..75: mol_type = other DNA
ggcggggaagccactgcagtcacccagaacacgggcggtgcactggtcaccagtactgctgcaactgtcaccggc

SEQ ID NO: 499501 - DNA, 75 bp, synthetic construct
  source 1..75: mol_type = other DNA
agctggtatctgcgcagtgaaaatgcttatcgtgcagaagtccccctgtatgcctccatgctgacacaggcaatg

SEQ ID NO: 499502 - DNA, 75 bp, synthetic construct
  source 1..75: mol_type = other DNA
gcgtgtacgcccggatatggcacagaacaatgctgacagactggtcattgacggcggcagggcaaccggaaaaac

SEQ ID NO: 499503 - DNA, 75 bp, synthetic construct
  source 1..75: mol_type = other DNA
actggaaaatggcggacgcctggatgtgctgaccggacacacagccactaatacccgtgtggatgatggcggaac

SEQ ID NO: 499504 - DNA, 75 bp, synthetic construct
  source 1..75: mol_type = other DNA
aggcagactgcaggtggacgccggtggtacagccacgaatgtcaccctgaagcagggcggcgcactggttaccag

SEQ ID NO: 499505 - DNA, 75 bp, synthetic construct
  source 1..75: mol_type = other DNA
atgaaacgacatctgaacaccagctacaggctggtatggaatcacattacgggtaccctggtggtggcttccgaa

SEQ ID NO: 499506 - DNA, 75 bp, synthetic construct
  source 1..75: mol_type = other DNA
ggcgttcaggccggttatgcccacagcgtcagcggcagcagtgctgaaggttataacggtcaggccacactgaat

SEQ ID NO: 499507 - DNA, 75 bp, synthetic construct
  source 1..75: mol_type = other DNA
ggagccgcaactgcagtacacctggcagggactctccctggatgacggccaggataacgccggttatgtgaagtt

SEQ ID NO: 499508 - DNA, 75 bp, synthetic construct
  source 1..75: mol_type = other DNA
actgacaaatcatgacaaccagattgtttccggtacggctgatggcgtgactgtcagcaccgggctggagctggg

SEQ ID NO: 499509 - DNA, 75 bp, synthetic construct
  source 1..75: mol_type = other DNA
atatcaccctgggcgttcaggccggttatgcccacagcatcaacggcagcagcgctgaaagttataacagtcagg

SEQ ID NO: 499510 - DNA, 75 bp, synthetic construct
  source 1..75: mol_type = other DNA
tttatgcgtcccgtctgttgagtatggctatgatttacctggaaaagctgccgctgaaagatcgtccggtattca

SEQ ID NO: 499511 - DNA, 75 bp, synthetic construct
  source 1..75: mol_type = other DNA
atggcggtgtactgctggccgattccggtgccgctgtcagtggtacccggagcgacggaacggcattccgtatcg

SEQ ID NO: 499512 - DNA, 75 bp, synthetic construct
  source 1..75: mol_type = other DNA
gacacaggcaatggactatgaccgaattgtggcaggctcccgcagccatcagaccggtgtaaatggtgaaaacaa

SEQ ID NO: 499513 - DNA, 75 bp, synthetic construct
  source 1..75: mol_type = other DNA
cagctcccggggtgatatgcgtgtggggacctccaccgcaggcagcgggatgacgttctctccctcacagaatgg

SEQ ID NO: 499514 - DNA, 75 bp, synthetic construct
  source 1..75: mol_type = other DNA
acggccctgaagctgaccggcagcacagtgctgaacggtgccattgaccccacgaatgtcaccctgacatccggt

SEQ ID NO: 499515 - DNA, 75 bp, synthetic construct
  source 1..75: mol_type = other DNA
ggagggaggaaaccagtatgtgcacaaatacggacttgcgctgaacacggtaattaacgaggggggctggcaggt

SEQ ID NO: 499516 - DNA, 75 bp, synthetic construct
  source 1..75: mol_type = other DNA
tcaccctgggcgttcaggcgggttatggccacagcgtcagcggcagcagcgctgaaggctataacggtcaggcca

SEQ ID NO: 499517 - DNA, 75 bp, synthetic construct
  source 1..75: mol_type = other DNA
cgctggttgaagaagatcgcgtcaaaattctggcaatgattcaggagcaggtgacatggcttgccggcagtttcc

SEQ ID NO: 499518 - DNA, 75 bp, synthetic construct
  source 1..75: mol_type = other DNA
cgggtcagtggcgggcggggtattgttcagtccactgggaccatttggtgcactgacagggcgtgtggttggcgg

SEQ ID NO: 499519 - DNA, 75 bp, synthetic construct
  source 1..75: mol_type = other DNA
tatggaatcacattacgggcaccctggtggtggcttccgaactggcccgctcacggggaaaacgcgccggtgtgg

SEQ ID NO: 499520 - DNA, 75 bp, synthetic construct
  source 1..75: mol_type = other DNA
atgttcgctaattttggcagcaaggtaaccattttagaagcagcttcgctgtttttgcctcgggaagatcgggat

SEQ ID NO: 499521 - DNA, 75 bp, synthetic construct
  source 1..75: mol_type = other DNA
atttcattggcgtgcaacttggcggcgcggtgaaaaacgtcattgccattggcgcggggatgtccgacggtatcg

SEQ ID NO: 499522 - DNA, 75 bp, synthetic construct
  source 1..75: mol_type = other DNA
ccgacggccatttcgctggcctctaccgaccagacctttgctgatgatctccagcaactgctgcactgcggcaaa

SEQ ID NO: 499523 - DNA, 75 bp, synthetic construct
  source 1..75: mol_type = other DNA
ggtgccggcatgtccgacggtatcggcttcggggcgaatgcgcgaacggcgctgatcacccgtggtctggctgaa

SEQ ID NO: 499524 - DNA, 75 bp, synthetic construct
  source 1..75: mol_type = other DNA
atagcaataataactaacgcgttgatggcgattgttgtatatattacagcggattatataatatctatatatggc

SEQ ID NO: 499525 - DNA, 75 bp, synthetic construct
  source 1..75: mol_type = other DNA
gccttgcgcggccggcccgtgctgttccccaacttttcgctcggcgaagagtatgaacatgcgccgccggcgacg

SEQ ID NO: 499526 - DNA, 75 bp, synthetic construct
  source 1..75: mol_type = other DNA
gttgtcggcgttcatctcacgcagggtctgcacggctgccagcacgccttgcgcggccggcccgtgctgttcccc

SEQ ID NO: 499527 - DNA, 75 bp, synthetic construct
  source 1..75: mol_type = other DNA
gctgatgcacgcacttattgatattgaatgcacagcagtgcttgcacaaaaggaagaacgggaagaatacacatt

SEQ ID NO: 499528 - DNA, 75 bp, synthetic construct
  source 1..75: mol_type = other DNA
ttgggaattacagctaagtctttagctgacatcgccccactaccagaacaatttggtatagatttccccaaggaa

SEQ ID NO: 499529 - DNA, 75 bp, synthetic construct
  source 1..75: mol_type = other DNA
gggacaatcatcgttccaactcctgtattggcggagtttttagttggaatccataaagattaccaacaagaaaaa

SEQ ID NO: 499530 - DNA, 75 bp, synthetic construct
  source 1..75: mol_type = other DNA
cgcggtgaaaaacgtcattgccattggtgcggggatgtccgacggtatcggttttggtgcgaatgcgcgtacggc

SEQ ID NO: 499531 - DNA, 75 bp, synthetic construct
  source 1..75: mol_type = other DNA
cgttattatggaaaattaccttaccgcgcgagaatccgcgcaatatcttggcgtttgtctatcacgcttttacca

SEQ ID NO: 499532 - DNA, 75 bp, synthetic construct
  source 1..75: mol_type = other DNA
tgcactgcagagcttgcgcagggagaagaacagaaagaccggacacagttcgccctggaatgtatccgatacatc

SEQ ID NO: 499533 - DNA, 75 bp, synthetic construct
  source 1..75: mol_type = other DNA
tcaccctgggcgttcaggcaggttatgaccacagcgtcagcggcagcagcgctgaagggtataacggtcaggcca

SEQ ID NO: 499534 - DNA, 75 bp, synthetic construct
  source 1..75: mol_type = other DNA
acctgcaggccggactggaagcccgtgtccgggaaaatatcaccctgggcgttcaggccggttatgcccacagcg

SEQ ID NO: 499535 - DNA, 75 bp, synthetic construct
  source 1..75: mol_type = other DNA
gggctagccaacaaggcactggcagtggcgcgtaccctcgccgactcgccggaaatccgtcagggcttgcagaaa

SEQ ID NO: 499536 - DNA, 75 bp, synthetic construct
  source 1..75: mol_type = other DNA
aaatggtcgtcaggtcgtgctggagggggaacagccagtgatacggttattcgtgacggcgggggacagagcctg

SEQ ID NO: 499537 - DNA, 75 bp, synthetic construct
  source 1..75: mol_type = other DNA
tctcttgctgctgtcacatcagtcccggcactggctgctgacacggttgtacaggcgggagaaaccgtgaacggc

SEQ ID NO: 499538 - DNA, 75 bp, synthetic construct
  source 1..75: mol_type = other DNA
aaatggtcgtcaggtcgtgctggagggggtacagccagtgatacggttatccgtgacggcggggggcagagcctg

SEQ ID NO: 499539 - DNA, 75 bp, synthetic construct
  source 1..75: mol_type = other DNA
ttaatcagcaagattaaccgcgcgaccgatttaggccatacgctgattttaaacagtgaaagccagctgccagac

SEQ ID NO: 499540 - DNA, 75 bp, synthetic construct
  source 1..75: mol_type = other DNA
ctccacgctgtttgagcaacgccaggccatgttgcagtctatcaaagaaggcgtcgttgccgtggacgatcgcgg

SEQ ID NO: 499541 - DNA, 75 bp, synthetic construct
  source 1..75: mol_type = other DNA
tgttacgcaaacgtccgatgaaattgagtaccacagtgatcttaatggtcagcgcggtactgttctcggtgctat

SEQ ID NO: 499542 - DNA, 75 bp, synthetic construct
  source 1..75: mol_type = other DNA
cattgccgtggaatcggaacccggggttttcacacaattttttgtccagttaccctgggatggggagaggtcgag

SEQ ID NO: 499543 - DNA, 75 bp, synthetic construct
  source 1..75: mol_type = other DNA
gggccgcaacctggtggcgaaatcagcgtcacgttacactaccgtcacggcttgctgcactgtgaaattaacgat

SEQ ID NO: 499544 - DNA, 75 bp, synthetic construct
  source 1..75: mol_type = other DNA
gatagaaaacgcgctggaggcattagggccgcaacctggtggcgaaatcagcgtcacgttacactaccgtcacgg

SEQ ID NO: 499545 - DNA, 75 bp, synthetic construct
  source 1..75: mol_type = other DNA
agactggtcattgacggtggcagggcaaccggaaaaaccatcctgaatctggtgaacgccggcaacagtggtacg

SEQ ID NO: 499546 - DNA, 75 bp, synthetic construct
  source 1..75: mol_type = other DNA
ggggaacagcagaatccaccaccatcaacaaaaatgggcggcaggttatctggtcttcaggggtggcccgggata

SEQ ID NO: 499547 - DNA, 75 bp, synthetic construct
  source 1..75: mol_type = other DNA
atcagggaggggcactggttaccagtactgcagcaacggttcttggcagcaaccgtctgggcaatttcgcggtgg

SEQ ID NO: 499548 - DNA, 75 bp, synthetic construct
  source 1..75: mol_type = other DNA
gtctggatatactggagagccattcagcacagaataccctggtggatgacggcggtaccctggcagtgtctgccg

SEQ ID NO: 499549 - DNA, 75 bp, synthetic construct
  source 1..75: mol_type = other DNA
cacgctgaacgagctggctgcggcgctgggcaacgacccgaattttgcgaccaccatgactaacgcgcttgcggg

SEQ ID NO: 499550 - DNA, 75 bp, synthetic construct
  source 1..75: mol_type = other DNA
tgaacggcggtaaccagtatgtgcacaacggcggtacagcgtctgacactgttgtgaacagtgacggctggcaga

SEQ ID NO: 499551 - DNA, 75 bp, synthetic construct
  source 1..75: mol_type = other DNA
tcgtccgtctggagggtgacctgctcagaacagaggttgccggtatgtcactgacgacaggagtgtatggtgctg

SEQ ID NO: 499552 - DNA, 75 bp, synthetic construct
  source 1..75: mol_type = other DNA
gttaacgcaggggagattcgctttgataatcagacaacaccggatgccgcgctgagccgtgctgttgcaaaaagt

SEQ ID NO: 499553 - DNA, 75 bp, synthetic construct
  source 1..75: mol_type = other DNA
accgtcacagaatggtacgtcactggacctgcaggccggactggaagcccgtgtccgggaaaatatcaccctggg

SEQ ID NO: 499554 - DNA, 75 bp, synthetic construct
  source 1..75: mol_type = other DNA
taaaaatggtcgtcagattgtggtagccaccggagtggcaaacaccacggtggtttatgccggcggcgaccagac

SEQ ID NO: 499555 - DNA, 75 bp, synthetic construct
  source 1..75: mol_type = other DNA
tacagcctgacactggcagaagaagaacacgcactggaagcaaaagatgcgctgctggcagaactgagagagaag

SEQ ID NO: 499556 - DNA, 75 bp, synthetic construct
  source 1..75: mol_type = other DNA
agagatttttctgcctgcagcaatcagtacccgtgttgaagagtttatcactaatgttcaacgttatgatgagtt

SEQ ID NO: 499557 - DNA, 75 bp, synthetic construct
  source 1..75: mol_type = other DNA
gataacattgatcgtgggccggagagtcttaacgtgctacgcctgttaaaccagccctggtttacatcggttaaa

SEQ ID NO: 499558 - DNA, 75 bp, synthetic construct
  source 1..75: mol_type = other DNA
ggtgaacgcaaggaaaccggaaaatacacgtctgttgttgatctcgcccgcgccagagccaatcaacagaacact

SEQ ID NO: 499559 - DNA, 75 bp, synthetic construct
  source 1..75: mol_type = other DNA
ggatattattgactgcattcgtgctgaactgggtgtcggaaccacgaaaaacgccgtttttcagcatatccagag

SEQ ID NO: 499560 - DNA, 75 bp, synthetic construct
  source 1..75: mol_type = other DNA
gctgcccctgctgttccgtccccgtgaggttcaggggacaatgttcggtgatggtggtatgggaggatggcgaaa

SEQ ID NO: 499561 - DNA, 75 bp, synthetic construct
  source 1..75: mol_type = other DNA
atcgatacgaaaaaggcggggaagatggtataacaatggtatttattgagacctctcactctgcgcaggacaaac

SEQ ID NO: 499562 - DNA, 75 bp, synthetic construct
  source 1..75: mol_type = other DNA
ggaaccggatacaactgaacatagccaggacgcgcagtcgctggatgctcagtcgcaggtgagttccgctaacca

SEQ ID NO: 499563 - DNA, 75 bp, synthetic construct
  source 1..75: mol_type = other DNA
agccaatatcagccagcctgacgccgatgaactgcttgaaccgccccggaaatcctggagactaaactccctgag

SEQ ID NO: 499564 - DNA, 75 bp, synthetic construct
  source 1..75: mol_type = other DNA
aaggtgagcgccataatgcacttgatgacgcccgttaccaggcaaaatacgtttcagctatctggcaaaaactga

SEQ ID NO: 499565 - DNA, 75 bp, synthetic construct
  source 1..75: mol_type = other DNA
tgatgtggatgccggaagtattgacggcagcataaatcgctgggcaaaaaatgaagctatcgacaactgccgcga

SEQ ID NO: 499566 - DNA, 75 bp, synthetic construct
  source 1..75: mol_type = other DNA
tgtacgcacaatcgttgagctggggaaagccatagacttcgatgccagaacggctattccattcgaaggtgagcg

SEQ ID NO: 499567 - DNA, 75 bp, synthetic construct
  source 1..75: mol_type = other DNA
atttccaatcgatgtaaaagaaacggttataaaactacaagggcaaaaattcacatgcattgaagatttttataa

SEQ ID NO: 499568 - DNA, 75 bp, synthetic construct
  source 1..75: mol_type = other DNA
ggcactgacccggtcagaggcggtattgcagaaaagcctggatataacggaagaggcagatttggcactgagaaa

SEQ ID NO: 499569 - DNA, 75 bp, synthetic construct
  source 1..75: mol_type = other DNA
tctgaacgatgcacgttaccaggcgaaatacgtttcagccatctggcaaaaactgctcccgagtcaggctgattt

SEQ ID NO: 499570 - DNA, 75 bp, synthetic construct
  source 1..75: mol_type = other DNA
ggattagcgacccgaatgatccgaaatgggtgaaggggattgaaacccgcgattcagtgaatcagaaccagcaag

SEQ ID NO: 499571 - DNA, 75 bp, synthetic construct
  source 1..75: mol_type = other DNA
accgccagactatttttggccttgtccgtgaacgtccgatcgacattcacaaagatcccgtagcactgaacaaat

SEQ ID NO: 499572 - DNA, 75 bp, synthetic construct
  source 1..75: mol_type = other DNA
aatcggaacggaactaccaaaaagcggaacaaaacagtccaaatgcgttacaaaacgagccagaaacgaaacagc

SEQ ID NO: 499573 - DNA, 75 bp, synthetic construct
  source 1..75: mol_type = other DNA
tcagaccgtttcgcgcgtggtgaatcaggccagccacgtttcagcgaaaacgcgggaaaaagtggaagcggcgat

SEQ ID NO: 499574 - DNA, 75 bp, synthetic construct
  source 1..75: mol_type = other DNA
atgatgccggaaattggaaacgggctgctgtgcctggcgttagggattgcgctgctgctgtccgtgtatccgcta

SEQ ID NO: 499575 - DNA, 75 bp, synthetic construct
  source 1..75: mol_type = other DNA
aacggcaggagatcccctgcccgtggcgttacaccaatgatcgtgatgtaagaacgattgttgccctggggctgg

SEQ ID NO: 499576 - DNA, 75 bp, synthetic construct
  source 1..75: mol_type = other DNA
caatatcagccagcctgacgccgataagttgcttgctgcctctcgcggagaatttgttgcagggattagcgaccc

SEQ ID NO: 499577 - DNA, 75 bp, synthetic construct
  source 1..75: mol_type = other DNA
gacgaagactccggtgaattttttgttcaggtctggggaaatggagccaacttcgacaacacgattttgcgccgt

SEQ ID NO: 499578 - DNA, 75 bp, synthetic construct
  source 1..75: mol_type = other DNA
ttgcagggattagcgacccgaatgatccgaaatgggtgaaggggattgaaacccgcgattcagtgaatcagaacc

SEQ ID NO: 499579 - DNA, 75 bp, synthetic construct
  source 1..75: mol_type = other DNA
gtgaattttttgttcaggtctggggaaatggagccaactttgacaacgtaattttacgccgttcatatgaacggc

SEQ ID NO: 499580 - DNA, 75 bp, synthetic construct
  source 1..75: mol_type = other DNA
gacagggagctggcctactatctctggcctggtgatgcggatgccggaaacattgacggcagcatccttcgctgg

SEQ ID NO: 499581 - DNA, 75 bp, synthetic construct
  source 1..75: mol_type = other DNA
gaaaaagatattcttgcatgtagcccccgaaattatgggctgcatcataacataaaaacatgggaccccttggtt

SEQ ID NO: 499582 - DNA, 75 bp, synthetic construct
  source 1..75: mol_type = other DNA
gaaggtgagcgccataatgcacttgatgacgcccgttaccaggcaaaatacgtttcagctatctggcaaaaactg

SEQ ID NO: 499583 - DNA, 75 bp, synthetic construct
  source 1..75: mol_type = other DNA
aggaagatgatccggagaaaatggaaggcgctgaacatccacacaaggagaacactggcggcaatcagcatcacg

SEQ ID NO: 499584 - DNA, 75 bp, synthetic construct
  source 1..75: mol_type = other DNA
gaatattttgcccgaaaaaatggcacatacacgggcttaccgcaaaatgtagataccgctgaagatttagaacaa

SEQ ID NO: 499585 - DNA, 75 bp, synthetic construct
  source 1..75: mol_type = other DNA
acctgactacaaagggcatgtttgaagatgaaggaacaaatcagagcacaactgatactctcccgtcgccagtac

SEQ ID NO: 499586 - DNA, 75 bp, synthetic construct
  source 1..75: mol_type = other DNA
catggcaacattcgacgggcatatcgttgaggcattgatgaaaatgcctgaagttaacgtcatgtattcagaact

SEQ ID NO: 499587 - DNA, 75 bp, synthetic construct
  source 1..75: mol_type = other DNA
ggtgatgggcgacgcaacataccaagaaacattcgatgaagagtatcaggttgaagttcaggaagatgatccgga

SEQ ID NO: 499588 - DNA, 75 bp, synthetic construct
  source 1..75: mol_type = other DNA
tctaatgatcgaccttgaaaccatgggaaaaaatcccgatgccccgatcatctcaataggtgcaatatttttcga

SEQ ID NO: 499589 - DNA, 75 bp, synthetic construct
  source 1..75: mol_type = other DNA
gggatccagacccgcgattctgtaaaccagaaccagcatgaatcggaacggaactaccaaaagcggaacaaaaca

SEQ ID NO: 499590 - DNA, 75 bp, synthetic construct
  source 1..75: mol_type = other DNA
aaaccgcaggcggggtcatcgatcggggcaccattaagtggtggctgaaacagtcacgcgaagcacaatccgcca

SEQ ID NO: 499591 - DNA, 75 bp, synthetic construct
  source 1..75: mol_type = other DNA
acgttttatatcgttatcagcctagctgacgcaatgaccacaggtgctgttccggatggttccaccattgaatgg

SEQ ID NO: 499592 - DNA, 75 bp, synthetic construct
  source 1..75: mol_type = other DNA
tgcaggggctactgaaatcacgaaagaagaatattttgcccgcaaaaacggtacatactcaggttcacaacaaaa

SEQ ID NO: 499593 - DNA, 75 bp, synthetic construct
  source 1..75: mol_type = other DNA
gtcatgcagctggtggagacagacaaggaacggcatcacatcacgatgcgacggctggaatgttcaaggaaggca

SEQ ID NO: 499594 - DNA, 75 bp, synthetic construct
  source 1..75: mol_type = other DNA
gaaaattcaacaggaaaaatcaacccggtcattgctgccactcatcgcgaatacaagcagacatggaaaacactg

SEQ ID NO: 499595 - DNA, 75 bp, synthetic construct
  source 1..75: mol_type = other DNA
acggcaactgtcctgactgtggcgcggtaatgggcgacgcaacataccaggaaacattcgatgaaaaaaataggg

SEQ ID NO: 499596 - DNA, 75 bp, synthetic construct
  source 1..75: mol_type = other DNA
aatggcccgaaatccaggcagagatgcgcatctggaaaaaacgtcgcgaaggtgaacgcaaggaaaccggaaata

SEQ ID NO: 499597 - DNA, 75 bp, synthetic construct
  source 1..75: mol_type = other DNA
gaaacactcgatgaagaaaatcaggctgcagctcaggaggaaatggaaggctctggcggcgatcactaccacacc

SEQ ID NO: 499598 - DNA, 75 bp, synthetic construct
  source 1..75: mol_type = other DNA
gccagaatcagcccggcgtgaaacaaaatgagccagaagcggaacaaaacagcccggatacgcaacaaaacgggc

SEQ ID NO: 499599 - DNA, 75 bp, synthetic construct
  source 1..75: mol_type = other DNA
cggcaggggagcccctgcccgtggcgttactacaacgatcgcgatgtacgcacaatcgttgagctggggaaagcc

SEQ ID NO: 499600 - DNA, 75 bp, synthetic construct
  source 1..75: mol_type = other DNA
tattccggtcgaaccagaatccgatcctattaacgtcaattttgacaagctgtcccttgaagtacagaacgcggt

SEQ ID NO: 499601 - DNA, 75 bp, synthetic construct
  source 1..75: mol_type = other DNA
gaaaactcagcagcaaaaatcaaccctgtcactactgccattcgtcgcgaatacaagcagacatggaaaaccctg

SEQ ID NO: 499602 - DNA, 75 bp, synthetic construct
  source 1..75: mol_type = other DNA
tctcaataggtgcaatatttttcgatccgcaaaccggagagatggggccagaattcagcaaaactatcgatctgg

SEQ ID NO: 499603 - DNA, 75 bp, synthetic construct
  source 1..75: mol_type = other DNA
ccattcctgacgcactggcaacaagggaagaaggcgctgtggctgtagccacagctattgaagctggcgacgaac

SEQ ID NO: 499604 - DNA, 75 bp, synthetic construct
  source 1..75: mol_type = other DNA
gctcaggactgcgcttataaatttcttgtctgcgaggataaacccggtataccccgccctgccctcgattcctgg

SEQ ID NO: 499605 - DNA, 75 bp, synthetic construct
  source 1..75: mol_type = other DNA
ataatgcacttgatgacgcccgttaccaggcaaaatacgtttcagcaatctggcaaaaactgatcccgagtcagg

SEQ ID NO: 499606 - DNA, 75 bp, synthetic construct
  source 1..75: mol_type = other DNA
ttatcacgctgtgttctggtttgcgatggtgatgattatcgccactctgttttgcttactgcggattaaagatgt

SEQ ID NO: 499607 - DNA, 75 bp, synthetic construct
  source 1..75: mol_type = other DNA
gcgcgaaatcgtttgacctgacatcaacggcattcttaattgttgcctttctcaccggcattgcaggcgctctgc

SEQ ID NO: 499608 - DNA, 75 bp, synthetic construct
  source 1..75: mol_type = other DNA
gatggcgtttttaatcgttgcctttctcaccggtattgcgggcgctctgcaaaccccgacactcagtatttttct

SEQ ID NO: 499609 - DNA, 75 bp, synthetic construct
  source 1..75: mol_type = other DNA
gttagtaatagccgaactaatctgagtctcggctcatacccttcgcttacgctcgcagcagctcgccagatacgc

SEQ ID NO: 499610 - DNA, 75 bp, synthetic construct
  source 1..75: mol_type = other DNA
agaattgccgaagctgatgcgttctttagctatgtcaaacctatctgttccgactcgctgtctcattgaatggca

SEQ ID NO: 499611 - DNA, 75 bp, synthetic construct
  source 1..75: mol_type = other DNA
tgaagttcggagagcatacaatagatctacatacttagagcaacgaattgaactcatggaatggtggggaaacaa

SEQ ID NO: 499612 - DNA, 75 bp, synthetic construct
  source 1..75: mol_type = other DNA
agaattaccgaaactcatgcgttcaataacaatgtctaatttatctattccaactcgttgtttgattgaatggca

SEQ ID NO: 499613 - DNA, 75 bp, synthetic construct
  source 1..75: mol_type = other DNA
cagcggtgaggcgaagcagatcgaaattctctacatcgaaccgattgatggatatcgtattcagttcgactggta

SEQ ID NO: 499614 - DNA, 75 bp, synthetic construct
  source 1..75: mol_type = other DNA
gtaagtaatagccgaactaacctgagtctcggctcataccctgcccttacactcgcagcagctcgtcagatacgc

SEQ ID NO: 499615 - DNA, 75 bp, synthetic construct
  source 1..75: mol_type = other DNA
gtgaatttgttgaagggattagcgatccgaatgatccgaaatgggtgaaggggattgaaacctgcgattctgtga

SEQ ID NO: 499616 - DNA, 75 bp, synthetic construct
  source 1..75: mol_type = other DNA
gataagttgcttgctgcctctcgcggagaatttgttgcagggattagcgatccgaatgatccgaaatgggtgaag

SEQ ID NO: 499617 - DNA, 75 bp, synthetic construct
  source 1..75: mol_type = other DNA
ggaaaaaatcccgatgccccgattatctcaataggcgcaatatttttcgatccacaaaccggagatatgggaccg

SEQ ID NO: 499618 - DNA, 75 bp, synthetic construct
  source 1..75: mol_type = other DNA
cagaacgattgttgaagcattggagccaatcaaagcacgtggcgcattagagacggttcgtcgcctagttcagcg

SEQ ID NO: 499619 - DNA, 75 bp, synthetic construct
  source 1..75: mol_type = other DNA
aaaaagcagaagcgtcacagaagattatgcgaaagatatctggcgctcattagataaggacgtgttccctgcaat

SEQ ID NO: 499620 - DNA, 75 bp, synthetic construct
  source 1..75: mol_type = other DNA
agcgcaacaggaagaggaaaaagtctgtaccgcctgcggtcagagtggtggcggcaactgccctgattgtggcgc

SEQ ID NO: 499621 - DNA, 75 bp, synthetic construct
  source 1..75: mol_type = other DNA
tatgatggtgacgggcttactctgttaatcaagtccagtggtagtaagctctggcagttccgttactatcgacct

SEQ ID NO: 499622 - DNA, 75 bp, synthetic construct
  source 1..75: mol_type = other DNA
ccgatgaacatcacttttgacaatctggcccctgaagtacagaacgccgtcatggttaagttcgacgcatgtgaa

SEQ ID NO: 499623 - DNA, 75 bp, synthetic construct
  source 1..75: mol_type = other DNA
tctggtctggataaggcactggctgctggcgccactgaaatcacaaaagaagaatattttgcccgaaaaaatggc

SEQ ID NO: 499624 - DNA, 75 bp, synthetic construct
  source 1..75: mol_type = other DNA
tgaacggtcatcacgttatcacatccaccagcaggacgtgtgaccatctaatgatcgaccttgaaaccatgggaa

SEQ ID NO: 499625 - DNA, 75 bp, synthetic construct
  source 1..75: mol_type = other DNA
tcgggcgtgttcgttatttccctgtcccgaatcaggctggttgaggtattaccggatacaacgtttgagatcgat

SEQ ID NO: 499626 - DNA, 75 bp, synthetic construct
  source 1..75: mol_type = other DNA
tcgacgaaaactccggtgaatcttttgttcaggtctggggaaatggagccaacttcgacaacgtgattttacgcc

SEQ ID NO: 499627 - DNA, 75 bp, synthetic construct
  source 1..75: mol_type = other DNA
atggaaagtgccggactcccgaacaaggtgtgcaccgaaggcgatcaacatgccaatggcaataatgaaacaggc

SEQ ID NO: 499628 - DNA, 75 bp, synthetic construct
  source 1..75: mol_type = other DNA
cgctcaagttgcagaacagcaacaaattgctgttgatagtatattttcaaatgttgcagcaaactggtttgctat

SEQ ID NO: 499629 - DNA, 75 bp, synthetic construct
  source 1..75: mol_type = other DNA
caatgatgcaatggtgggctgattttgttatcaaggccgacagcgggagcatcgttgaaaacggaaaaagggagt

SEQ ID NO: 499630 - DNA, 75 bp, synthetic construct
  source 1..75: mol_type = other DNA
aaaagaacagataagaaattctcaggaggccaaaaccaacactttcttgttagttgccgagcgttggtggaatgt

SEQ ID NO: 499631 - DNA, 75 bp, synthetic construct
  source 1..75: mol_type = other DNA
gattcacagcagcgttgcaggaactgatttacgaggcgcttagtgaacttggaactgatgacagggcatccgccg

SEQ ID NO: 499632 - DNA, 75 bp, synthetic construct
  source 1..75: mol_type = other DNA
tgcatgaagcaattgcgaagaactgtaacaacattgattcgattatatttattgttgaaaaaatattggattctg

SEQ ID NO: 499633 - DNA, 75 bp, synthetic construct
  source 1..75: mol_type = other DNA
agaattaccaatgcttatgcgttctttaattatgtcaaacctttcaattccaacacgctgccttattgaatggca

SEQ ID NO: 499634 - DNA, 75 bp, synthetic construct
  source 1..75: mol_type = other DNA
cgaatacaagcagacatggaaaacgctggatgaagaactggcctacgctctgtggcctggcgatattgatgccgg

SEQ ID NO: 499635 - DNA, 75 bp, synthetic construct
  source 1..75: mol_type = other DNA
acagaacgaccagaaagcggaacaaaacagcccaaatacgcaacaaaacgagccagaaacgaaacaacctgaacc

SEQ ID NO: 499636 - DNA, 75 bp, synthetic construct
  source 1..75: mol_type = other DNA
tgatcgtgatgtaagaacgattgttgccctggggctggtgatggatttcgatgctcgaagtgtcatcacatttga

SEQ ID NO: 499637 - DNA, 75 bp, synthetic construct
  source 1..75: mol_type = other DNA
acctgactacaaagggcgtgtttgaagatgaaggaacaaatcagagcacaactaatactctcccgtcgccagtac

SEQ ID NO: 499638 - DNA, 75 bp, synthetic construct
  source 1..75: mol_type = other DNA
tagagaaggacattttccctgctatcggagagattcctgttcaggaaataaaagcacgtatattaattgaagccc

SEQ ID NO: 499639 - DNA, 75 bp, synthetic construct
  source 1..75: mol_type = other DNA
gcaggcagccaatatcagccagcctgacgccgataagttgcttgctgcatcacgtggtgaatttgttgaagggat

SEQ ID NO: 499640 - DNA, 75 bp, synthetic construct
  source 1..75: mol_type = other DNA
ctggtctggataaggcactggctgcaggcgccactgaaatcacaaaagaagaatatttcgcccgaaaaaacggca

SEQ ID NO: 499641 - DNA, 75 bp, synthetic construct
  source 1..75: mol_type = other DNA
ggatcgaaaaactggaacataatccaggcaaatatatcccggaagagctgcgcaaagcgggagaaggcgaagcgg

SEQ ID NO: 499642 - DNA, 75 bp, synthetic construct
  source 1..75: mol_type = other DNA
tcatgctggcgaaaggcaatcgcagccagcaggtgacggatgcctgtaaaaaacacggcggcttctacctcggca

SEQ ID NO: 499643 - DNA, 75 bp, synthetic construct
  source 1..75: mol_type = other DNA
cgccagagtcaaccggcagaacactgaaaactcaacaggaaaaatccaccctgtcactgccgccattcgtcgcga

SEQ ID NO: 499644 - DNA, 75 bp, synthetic construct
  source 1..75: mol_type = other DNA
cggacggatggattcttatgtcgatcaactgcaagcgcagggcggaagtatgatcatgctggcgaaaggcaaccg

SEQ ID NO: 499645 - DNA, 75 bp, synthetic construct
  source 1..75: mol_type = other DNA
atccttgtggatgataaaggaaatgacttcttccagcagatacaactcacacaatgcacccgctgtgtgaaataa

SEQ ID NO: 499646 - DNA, 75 bp, synthetic construct
  source 1..75: mol_type = other DNA
ttatctttcccagccgcatcaagccaaaccagccgatgaacagtcagaccgtaaacgcatcgctaaaacgcgcag

SEQ ID NO: 499647 - DNA, 75 bp, synthetic construct
  source 1..75: mol_type = other DNA
tggaaaaagacgtattccctgtcatcggggagatccctgtccagcaaatcaaagcccgaacactagttgaaaccc

SEQ ID NO: 499648 - DNA, 75 bp, synthetic construct
  source 1..75: mol_type = other DNA
tacgcaaaagacatttggcgctcactggagaaagacgtatttcctgcaatcggtgaaatccctgttcagcaaatc

SEQ ID NO: 499649 - DNA, 75 bp, synthetic construct
  source 1..75: mol_type = other DNA
gaggcgtccggtactcggtgggcagagatcgatctcgactcaaatctctggacaattccagccgaacggatgaag

SEQ ID NO: 499650 - DNA, 75 bp, synthetic construct
  source 1..75: mol_type = other DNA
agctcgatctcgatgcaaagctctggactatcccagctgaacgaatgaaggctaagcgggaacacatagtccctc

SEQ ID NO: 499651 - DNA, 75 bp, synthetic construct
  source 1..75: mol_type = other DNA
gtggcacggacaacacgcccccttaccaacaccgaagttctgcgcgctaaagcgttagagaaggatctaacgctg

SEQ ID NO: 499652 - DNA, 75 bp, synthetic construct
  source 1..75: mol_type = other DNA
cggcacttgctcacagtgataaaaatgaagttcgaagagcatacaatcgttcaacttaccttgaacaacgtatag

SEQ ID NO: 499653 - DNA, 75 bp, synthetic construct
  source 1..75: mol_type = other DNA
gctcctgacccttgtgcgcccttccgaggcttccggtgctcggtgggcagagatcgatctcgatgcaaagctctg

SEQ ID NO: 499654 - DNA, 75 bp, synthetic construct
  source 1..75: mol_type = other DNA
atcgcactggacagtattttttcaaccgtcgccgctaactggttccagcttaaaagcaaaagcgttacccctgat

SEQ ID NO: 499655 - DNA, 75 bp, synthetic construct
  source 1..75: mol_type = other DNA
aaatagatctcaacacgaagttatggactattcccgctgaacgaatgaagtctaagcgtgaacatattgtccctt

SEQ ID NO: 499656 - DNA, 75 bp, synthetic construct
  source 1..75: mol_type = other DNA
cagtcgccgctaactggtttctgctcaaaagcaaaagcgttacccctgattacgcaaaagacatttggcgttcac

SEQ ID NO: 499657 - DNA, 75 bp, synthetic construct
  source 1..75: mol_type = other DNA
tgaagtgcgtagggcttataaccgctcaacctacctagagcaaaggttagatctaatgcactggtggggtaatgc

SEQ ID NO: 499658 - DNA, 75 bp, synthetic construct
  source 1..75: mol_type = other DNA
gctagagacggtacgtcgtctggtgcagcgtattaatgagataatgatttacgccgtaaacacaggtctgattga

SEQ ID NO: 499659 - DNA, 75 bp, synthetic construct
  source 1..75: mol_type = other DNA
cagctgaaatttataataaagacagtaacaagctggatctgtacgggaaagttaatgctaagcactacttctcct

SEQ ID NO: 499660 - DNA, 75 bp, synthetic construct
  source 1..75: mol_type = other DNA
caaaacgatccgcattgaaccgccactgacgctgaccattgaacagtgtgaactggtgattaaagcggcgcataa

SEQ ID NO: 499661 - DNA, 75 bp, synthetic construct
  source 1..75: mol_type = other DNA
gcccgtgcgccccatgcccgtttgtacttcatcgaggatcatcagtgcgccgaactcatcgcacagcttacgcac

SEQ ID NO: 499662 - DNA, 75 bp, synthetic construct
  source 1..75: mol_type = other DNA
gaacggtgattctactatcagcggctctttgccgttatgctatgccaacattcttcagctaagcaataaggcggc

SEQ ID NO: 499663 - DNA, 75 bp, synthetic construct
  source 1..75: mol_type = other DNA
atggcgaccatgctgctgctgggtatcgttacctgggaagacgtggttaaaaataaaggcggctggaatacctta

SEQ ID NO: 499664 - DNA, 75 bp, synthetic construct
  source 1..75: mol_type = other DNA
tgaggtaactttagccttaccccgccttgtaagcggcggattcttagtccctcatggtgagaagaggaataaatc

SEQ ID NO: 499665 - DNA, 75 bp, synthetic construct
  source 1..75: mol_type = other DNA
gcttgtagaaaacctgcgttatgccgcgaatatgctgatgaaagaagatattttattactgattgaacctattaa

SEQ ID NO: 499666 - DNA, 75 bp, synthetic construct
  source 1..75: mol_type = other DNA
attcctggccgtgaagaagagtttcgggatggcgtagcagcagcgattcgttatgcccgtgcgctgggtaataaa

SEQ ID NO: 499667 - DNA, 75 bp, synthetic construct
  source 1..75: mol_type = other DNA
tgaaagaagatattttattactgattgaacctattaaccattttgatattcctggtttccatctcaccggaactc

SEQ ID NO: 499668 - DNA, 75 bp, synthetic construct
  source 1..75: mol_type = other DNA
gccggacatcctgtgtctggcaaaagccctcggcggcggcgtgatgccgattggcgcaaccatcgccactgaaga

SEQ ID NO: 499669 - DNA, 75 bp, synthetic construct
  source 1..75: mol_type = other DNA
ggcaccgtaatccagttgtggtttccgccgtacagaatcaacttgcgaaacaaccgctgcacagccaggagctgc

SEQ ID NO: 499670 - DNA, 75 bp, synthetic construct
  source 1..75: mol_type = other DNA
cgattttcgcgatcgcagccggagtggcgcaatccctgcaatacttaaatcggtatcatgtgatacgcgagcctc

SEQ ID NO: 499671 - DNA, 75 bp, synthetic construct
  source 1..75: mol_type = other DNA
taataacgccaccgttactcaggaaggtgaactcacggttagcagcggcggccgcggtatcgacattacaggcaa

SEQ ID NO: 499672 - DNA, 75 bp, synthetic construct
  source 1..75: mol_type = other DNA
cgaccggaactgaaatcgcgggtaataacgcggtggtgaatcaggacggcgagctggatgtgagcggcggcggtc

SEQ ID NO: 499673 - DNA, 75 bp, synthetic construct
  source 1..75: mol_type = other DNA
tgagtgacggttctttatgggatcgccgggcttttccggacaccacaatccttgaaatccgtccccggaaaaggc

SEQ ID NO: 499674 - DNA, 75 bp, synthetic construct
  source 1..75: mol_type = other DNA
cgacgcttcttcgccatatatcgatactcaacgggtttgacaatctgatggctcagccgttgttgtcagatgagc

SEQ ID NO: 499675 - DNA, 75 bp, synthetic construct
  source 1..75: mol_type = other DNA
tgaaactggcgagacggcagatcccttaattgcggtgaacggtcatcacgttatcacatccaccagcagagtgtg

SEQ ID NO: 499676 - DNA, 75 bp, synthetic construct
  source 1..75: mol_type = other DNA
ggcgaaaaatacagtcgcgcaaacaaactttctggtctggaaaaagcactggccctgggagctacggaaatcaca

SEQ ID NO: 499677 - DNA, 75 bp, synthetic construct
  source 1..75: mol_type = other DNA
aggaccacgccagcgataatgaaactggcgagacggcagatcccttaattgcggtgaacggtcatcacgttatca

SEQ ID NO: 499678 - DNA, 75 bp, synthetic construct
  source 1..75: mol_type = other DNA
aggccagcgcgtgtggaccggcggcggtgatgaagaagcgctgtcgaaaggcgtctataacacctatatcgaaga

SEQ ID NO: 499679 - DNA, 75 bp, synthetic construct
  source 1..75: mol_type = other DNA
ggcgatgaagaagcgctgtcgaaaggtgtctataacacttatatcgaagataacctgcgttactcacaaaacgcg

SEQ ID NO: 499680 - DNA, 75 bp, synthetic construct
  source 1..75: mol_type = other DNA
gcgatggagcatatccggaaaccgctggcagcacgtcaggcactgacccggtcagaggcggtattgcagaaaagc

SEQ ID NO: 499681 - DNA, 75 bp, synthetic construct
  source 1..75: mol_type = other DNA
atgagtacagaaatgcaaacggggctggtgctgtccggcggcggagcggtgggcgcttatcaggcgggggtggtt

SEQ ID NO: 499682 - DNA, 75 bp, synthetic construct
  source 1..75: mol_type = other DNA
ctaaaggcggcggctctgccaacaaaacctatctctaccaggaaaccaaagccctgctgacgcccggcaaactga

SEQ ID NO: 499683 - DNA, 75 bp, synthetic construct
  source 1..75: mol_type = other DNA
ccgtaccatatcgcgtttgtgattggcggtacgtctgcggaaaccaacctgaaaaccgttaagttagcaagcgct

SEQ ID NO: 499684 - DNA, 75 bp, synthetic construct
  source 1..75: mol_type = other DNA
gattcacgcaacgcttgtagaaaacctgcgttatgccgcgaatatgctgatgaaagaagatattttattactgat

SEQ ID NO: 499685 - DNA, 75 bp, synthetic construct
  source 1..75: mol_type = other DNA
actagcccagttacaggcaaacttatacagctaaaaattggaagctttccgcaaactacacttgcaatagcaagg

SEQ ID NO: 499686 - DNA, 75 bp, synthetic construct
  source 1..75: mol_type = other DNA
cttaaactcgaaaagcagaaagttaagcagaagcctgtaacagtcaaagatgtagtcgagttatatctgacggag

SEQ ID NO: 499687 - DNA, 75 bp, synthetic construct
  source 1..75: mol_type = other DNA
tttgtgccgctggaagctggtgatgatatcgacgatgttgacggtatcttcattcgcccatacccgaccaccaac

SEQ ID NO: 499688 - DNA, 75 bp, synthetic construct
  source 1..75: mol_type = other DNA
ttttcgattgtctggctgtatgcgtcaacgtgaaaccagcgccggaagtgcgtgagttctggggttggtggatgg

SEQ ID NO: 499689 - DNA, 75 bp, synthetic construct
  source 1..75: mol_type = other DNA
aggatgggaggattattcccggtgccagaaagccgaaagggcaggccgaggttcgtcgtactctctatggtgatg

SEQ ID NO: 499690 - DNA, 75 bp, synthetic construct
  source 1..75: mol_type = other DNA
cttatacagcgacgattaaaaatgtgttgcgtatgaccttgtggacgggatgccgtactggagaggtctgctcga

SEQ ID NO: 499691 - DNA, 75 bp, synthetic construct
  source 1..75: mol_type = other DNA
aagccacatcccgaagcaactctgaaaatgaggctcaacgtgcattagttttaccgcaagaactaggaacactcg

SEQ ID NO: 499692 - DNA, 75 bp, synthetic construct
  source 1..75: mol_type = other DNA
tttggtatactgcaccagactttgtttctttgggagcaggaacgcgagcggggaaaggggctgcaatcggaatcc

SEQ ID NO: 499693 - DNA, 75 bp, synthetic construct
  source 1..75: mol_type = other DNA
tcttagcgtatgattttctgaatctgttttttaacctggttgtagaggtgacgctaagagaaaaccctgactttg

SEQ ID NO: 499694 - DNA, 75 bp, synthetic construct
  source 1..75: mol_type = other DNA
taaacttaaactgctgacgatttatcaaaatatcagtcagctaaatgaatctatggtattgagggagccaaaacg

SEQ ID NO: 499695 - DNA, 75 bp, synthetic construct
  source 1..75: mol_type = other DNA
ctctggcttacgattttctgaacctgttttttaacttcgttgttgaagtgacattgcgtgaaaatcctgattttg

SEQ ID NO: 499696 - DNA, 75 bp, synthetic construct
  source 1..75: mol_type = other DNA
tcatgcatggattggattactgtttctgtacgctatcttatgaacatccctgaaatatctgaagacattgatatt

SEQ ID NO: 499697 - DNA, 75 bp, synthetic construct
  source 1..75: mol_type = other DNA
atgacgttaccgagtgggcacccgaaaagcagattgatcaaaaaatttaccgcgcttggcccgtatatccgtgaa

SEQ ID NO: 499698 - DNA, 75 bp, synthetic construct
  source 1..75: mol_type = other DNA
aggcagctgaaatttataataaagacagtaacaagctggatctatacgggaaagttaatgccaagcactacttct

SEQ ID NO: 499699 - DNA, 75 bp, synthetic construct
  source 1..75: mol_type = other DNA
aaatatgacgcaaacaacatttacctggctgcaacttattctgaaactcagaatatgacagtcttcggtgatgac

SEQ ID NO: 499700 - DNA, 75 bp, synthetic construct
  source 1..75: mol_type = other DNA
atgaaaaaaatcacagtggcactttctgcggttgcagcatcagtcctgatggcaatgtctgcacaagcggcagaa

SEQ ID NO: 499701 - DNA, 75 bp, synthetic construct
  source 1..75: mol_type = other DNA
ctgggctgggcaagagcgacaaaaacactgatgcaggcgcagggcctgctggcgagatggttcaggtttcagccg

SEQ ID NO: 499702 - DNA, 75 bp, synthetic construct
  source 1..75: mol_type = other DNA
ttacagaaacgatttcagctcatcacggggatgggtgagagcaaccagggcgctgacgcaggcgcaggggctgct

SEQ ID NO: 499703 - DNA, 75 bp, synthetic construct
  source 1..75: mol_type = other DNA
aaaggtgaaacccaaatcaacgatcaactgactggtttcggtcagtgggaatatgaattcaaaggcaaccgtgct

SEQ ID NO: 499704 - DNA, 75 bp, synthetic construct
  source 1..75: mol_type = other DNA
tggcctgaactttgctgctcagtatcagggtaaaaatgaccgcactgacgtaactgaagccaatggtgatggttt

SEQ ID NO: 499705 - DNA, 75 bp, synthetic construct
  source 1..75: mol_type = other DNA
ttaacgataaaacattagcattacatatattgcaaccctttattgcttttatgaaccatcgtgcacatatcgatc

SEQ ID NO: 499706 - DNA, 75 bp, synthetic construct
  source 1..75: mol_type = other DNA
atatcctgccgctaaaattgcacaagaattaggcgatacgattcctgtcacaatgcaaaacgaactggtctatga

SEQ ID NO: 499707 - DNA, 75 bp, synthetic construct
  source 1..75: mol_type = other DNA
acaaaaatgacttcactaaagcactcggtgtaagcactgatgacatcgttgctgtaggtctggtttaccagttct

SEQ ID NO: 499708 - DNA, 75 bp, synthetic construct
  source 1..75: mol_type = other DNA
agctggaagcgcaggaatcccgttttacctacagttaccagtttggtctgttcgataaagcaggcgactggaaga

SEQ ID NO: 499709 - DNA, 75 bp, synthetic construct
  source 1..75: mol_type = other DNA
cctgcattctaaaggaaaagacttgggtgtttggggtgatcaggacctggttgaatatgttgatgtaggtgcaac

SEQ ID NO: 499710 - DNA, 75 bp, synthetic construct
  source 1..75: mol_type = other DNA
gcggcggaaaatgtccggactgcgggcctgttatgggtaacacaacatatcaggaaacattcgatgaagaaaatc

SEQ ID NO: 499711 - DNA, 75 bp, synthetic construct
  source 1..75: mol_type = other DNA
aatatcagccagcctgacgccgataagttgcttgctgcctctcgcggagaatttgttgcagggattagcgacccg

SEQ ID NO: 499712 - DNA, 75 bp, synthetic construct
  source 1..75: mol_type = other DNA
gatcgacattcacaaagatcccatagcactgaacaaatatatctgcgaatacctgacgacaaagggcgtgtttga

SEQ ID NO: 499713 - DNA, 75 bp, synthetic construct
  source 1..75: mol_type = other DNA
ttgctgcatcacgtggtgaatttgttgaagggattagcgatccgaatgatccgaaatgggtgaaggggattgaaa

SEQ ID NO: 499714 - DNA, 75 bp, synthetic construct
  source 1..75: mol_type = other DNA
gaacgaccagaaaacggaacaaaacagcccaaatgcgcaacaaaacgagccagaaacgaaacaggttgaaccagt

SEQ ID NO: 499715 - DNA, 75 bp, synthetic construct
  source 1..75: mol_type = other DNA
cagaaacgaaacaacctgaaccagtagtgcaacaggaaccggaaaaaatctgcaccgcctgcgatcagagcggtg

SEQ ID NO: 499716 - DNA, 75 bp, synthetic construct
  source 1..75: mol_type = other DNA
atacactgtttggtgcgatttcaggttcagccgttgcgtcagccgccgcggtaggtgggattatgtcaccactgc

SEQ ID NO: 499717 - DNA, 75 bp, synthetic construct
  source 1..75: mol_type = other DNA
accaccatggacccggaaagccgtcgtatgctgcgcgttaccgttaaagatgcgattgctgccgaccagttgttc

SEQ ID NO: 499718 - DNA, 75 bp, synthetic construct
  source 1..75: mol_type = other DNA
cgcgatgtacgcacaatcgttgagctggggaaagccatagacttcgatgccagaacggctattccattcgaaggt

SEQ ID NO: 499719 - DNA, 75 bp, synthetic construct
  source 1..75: mol_type = other DNA
acgtaactggaaaaaacggcaggacgcagagcgcaaagagactggaaaatacacgtctgttgttgatctcgcccg

SEQ ID NO: 499720 - DNA, 75 bp, synthetic construct
  source 1..75: mol_type = other DNA
gcacttgatgacgcccgttaccaggcaaaatacgtttcagttatctggcaaaaactgatcccgagtcaggctgat

SEQ ID NO: 499721 - DNA, 75 bp, synthetic construct
  source 1..75: mol_type = other DNA
aggtgagcgccataatgcacttgatgacgcccgttatcaggcaaaatacgtttcagctatctggcaaaaactgat

SEQ ID NO: 499722 - DNA, 75 bp, synthetic construct
  source 1..75: mol_type = other DNA
accatgggaaaaaatcccgatgccccgattatctcaataggtgcaatatttttcgatccgcaaaccggagatatg

SEQ ID NO: 499723 - DNA, 75 bp, synthetic construct
  source 1..75: mol_type = other DNA
aggaccacgccagcgatagtgaaactggcgagacggcagatcccttaattacggtgaacggtcatcacgttatca

SEQ ID NO: 499724 - DNA, 75 bp, synthetic construct
  source 1..75: mol_type = other DNA
tgtggtgcggtgatgggcgacgcaacgtatcaggaaacctttaatgaagaaaatctggatgaatctcaggaaaaa

SEQ ID NO: 499725 - DNA, 75 bp, synthetic construct
  source 1..75: mol_type = other DNA
ccagcagagtgtggtaccacctgatgatcgaccttgaaacgatgggtaaaaaaagtaatgcccccatcgtggtta

SEQ ID NO: 499726 - DNA, 75 bp, synthetic construct
  source 1..75: mol_type = other DNA
ttgtctgtgaggataaacccggtacaccccgcccagccctcgactcctgggatgctgaatatatgctggaaaacc

SEQ ID NO: 499727 - DNA, 75 bp, synthetic construct
  source 1..75: mol_type = other DNA
cgttatcacatccaccagcagagtgtggtaccacctgatgatcgaccttgaaacgatgggtaaaaaaagtaatgc

SEQ ID NO: 499728 - DNA, 75 bp, synthetic construct
  source 1..75: mol_type = other DNA
cacgtctgttgttgatcttgcccgcgccagagtcaaccgacatagcactgaaaactcagcagaaaaaatcaattc

SEQ ID NO: 499729 - DNA, 75 bp, synthetic construct
  source 1..75: mol_type = other DNA
catccaccagcagagtatggaatcacctgtcagtcgaccttgaaacaatgggagccaacaccaatgcacccatag

SEQ ID NO: 499730 - DNA, 75 bp, synthetic construct
  source 1..75: mol_type = other DNA
gtcattgatcgtggcaccattaaatggtggcttaagcaatcacgggaggcgcaatctgccattctgaccgatgaa

SEQ ID NO: 499731 - DNA, 75 bp, synthetic construct
  source 1..75: mol_type = other DNA
ggtgatgggtgacgcaacataccaggaaatattcgatgaagagaatcagcctgaagttcaggaaaatgatccgga

SEQ ID NO: 499732 - DNA, 75 bp, synthetic construct
  source 1..75: mol_type = other DNA
catggcaacattcggcggacatatcgttgaagcgtttatgaaaatgccagaagttaactccatgtatcctgaact

SEQ ID NO: 499733 - DNA, 75 bp, synthetic construct
  source 1..75: mol_type = other DNA
gaaaactcagcagaaaaaatcacccctgtcactagtgccattcgtcgcgaatacaagcagacatggaaaacgctg

SEQ ID NO: 499734 - DNA, 75 bp, synthetic construct
  source 1..75: mol_type = other DNA
accgcgaagactggaagcgtatctcagcatcaatgcgcaaacagcctgatgcccttcgctacgaccgccagacta

SEQ ID NO: 499735 - DNA, 75 bp, synthetic construct
  source 1..75: mol_type = other DNA
caatgcgctggacgatgcccgtcaccaggcaaaacaagtttcagcaatctggcaaagactgatcccgcgtcaggc

SEQ ID NO: 499736 - DNA, 75 bp, synthetic construct
  source 1..75: mol_type = other DNA
acggggctggtgctgtccggtggcggggcggtgggcgcttatcaggcaggtgtggttaaggctctggcagagtgc

SEQ ID NO: 499737 - DNA, 75 bp, synthetic construct
  source 1..75: mol_type = other DNA
tgttgttccgtccccgtgaggttcaggggacaatgttcggtgatggtggtatgggaggatggcgaaatatgcagg

SEQ ID NO: 499738 - DNA, 75 bp, synthetic construct
  source 1..75: mol_type = other DNA
gccccacgggcagcagaaagaagccttactggcgtcagcagcactgcccctgctgttccgtccccgtgaggtaca

SEQ ID NO: 499739 - DNA, 75 bp, synthetic construct
  source 1..75: mol_type = other DNA
tggaaggcgctgaacatccacacaaggagaacactggcggcaatcagcatcacgatagcgataatgaaactggcg

SEQ ID NO: 499740 - DNA, 75 bp, synthetic construct
  source 1..75: mol_type = other DNA
tggcgaaaaggttatccggttttgatgttgagcttttagcttttgacaaacaacccgactatcaggttgctgaca

SEQ ID NO: 499741 - DNA, 75 bp, synthetic construct
  source 1..75: mol_type = other DNA
agattcgggacagggattgataatattgatcttcatacggctcgacaatcaggtattgtggtcaataatgctgtt

SEQ ID NO: 499742 - DNA, 75 bp, synthetic construct
  source 1..75: mol_type = other DNA
aacaaaaatatgtctactttcgttgattacaaaatcaacctgcttgacaaaaatgacttcactaaggaaggtgcg

SEQ ID NO: 499743 - DNA, 75 bp, synthetic construct
  source 1..75: mol_type = other DNA
caacgacggtgacaacgccatcagcaacggcggcaccggcacacaggcaaagattccaccggcacggaaatcgcg

SEQ ID NO: 499744 - DNA, 75 bp, synthetic construct
  source 1..75: mol_type = other DNA
aaggagcgcaaagaaggtggagcatataattccgtcgtcgatcttgcccgcgccagagtcaaccggcaaggcact

SEQ ID NO: 499745 - DNA, 75 bp, synthetic construct
  source 1..75: mol_type = other DNA
acgcgcaggaattactgcaggaagacgttgctacctttgacgggcatatcgttgaagcactgatgaaaacgcctg

SEQ ID NO: 499746 - DNA, 75 bp, synthetic construct
  source 1..75: mol_type = other DNA
gccgttcgctacgaccgtcagactatttttggccttgtccgtgagcgtccgatcgacattcacaaagatcccgta

SEQ ID NO: 499747 - DNA, 75 bp, synthetic construct
  source 1..75: mol_type = other DNA
cagggtaagaatgatcgtaatggtgcagataactacaccaaaggtaacggcgatggcttcggtttctctgcaact

SEQ ID NO: 499748 - DNA, 75 bp, synthetic construct
  source 1..75: mol_type = other DNA
atatcagccagcctgacgccgatgaactgcttgcagtatcacgtggtgaatttgttgaagggattagcgacccga

SEQ ID NO: 499749 - DNA, 75 bp, synthetic construct
  source 1..75: mol_type = other DNA
agcccaaatgcgttacaaaacgagccagaaacgaaacaacctgaaccagtagcgcaacaggaaccggaaaaagtc

SEQ ID NO: 499750 - DNA, 75 bp, synthetic construct
  source 1..75: mol_type = other DNA
tactcaggttcacaacaaaatactggtgcatctgacacgaccgcacaaccagggtcagtaaaagttaccgctgac

SEQ ID NO: 499751 - DNA, 75 bp, synthetic construct
  source 1..75: mol_type = other DNA
gtgcaatatttttcgatccgcaaaccggagatatgggaccggaatttagtaagactatcgatctggaaactgctg

SEQ ID NO: 499752 - DNA, 75 bp, synthetic construct
  source 1..75: mol_type = other DNA
gtaaattttttgatccggcaaccggagagatggggcctgaattcagtaaagctatcgatctggaaacctccggcg

SEQ ID NO: 499753 - DNA, 75 bp, synthetic construct
  source 1..75: mol_type = other DNA
gaaatatcagaaactgcgggcagaactccatgaagcaaggaaaaacattccaccccaaaatcctgttgatgccga

SEQ ID NO: 499754 - DNA, 75 bp, synthetic construct
  source 1..75: mol_type = other DNA
gaaaactcagtagcgaaaatccccccagccactgccaccattcgtcgcgaatacaagcagacatggaaaacactg

SEQ ID NO: 499755 - DNA, 75 bp, synthetic construct
  source 1..75: mol_type = other DNA
cgaaacagcctgaaccagaagagcaacaagaaccggaaaaagtctgcaccgcctgcggtcagaccggtggcggca

SEQ ID NO: 499756 - DNA, 75 bp, synthetic construct
  source 1..75: mol_type = other DNA
ctatttaacggagactgatcacgagaaccctaccgaggaaactctcactgctgcacgacatacaccggaaaaaga

SEQ ID NO: 499757 - DNA, 75 bp, synthetic construct
  source 1..75: mol_type = other DNA
acggtgacaaagctatcgtcaataacgacggcgacagcacgatccttgatggcggcaccggaacccgcattacgg

SEQ ID NO: 499758 - DNA, 75 bp, synthetic construct
  source 1..75: mol_type = other DNA
cggctattccattcgaaggtgagcgccataatgcacttgatgacgcccgttaccaggcaaaatacgtttcagcta

SEQ ID NO: 499759 - DNA, 75 bp, synthetic construct
  source 1..75: mol_type = other DNA
cccgaatgatccgaaatgggttaaggggctccagacccgcgattctgtgaaccagaaccagcatgaatcggaacg

SEQ ID NO: 499760 - DNA, 75 bp, synthetic construct
  source 1..75: mol_type = other DNA
gcaggctacgaagcagatgatttcaaaaaaccagtccgcgtccatttacccgttgtgaatgaccttccaccagaa

SEQ ID NO: 499761 - DNA, 75 bp, synthetic construct
  source 1..75: mol_type = other DNA
aatgagctaacagtatcaggtaagagcattactgctgtcgaggagaaatctgaacctggagcattgtcaatgatg

SEQ ID NO: 499762 - DNA, 75 bp, synthetic construct
  source 1..75: mol_type = other DNA
gcgctggtcaccgtggcgtcgtcgccatgttttagtgctcgtgacgattggccggggataaaaccggacgtgctg

SEQ ID NO: 499763 - DNA, 75 bp, synthetic construct
  source 1..75: mol_type = other DNA
ggtgttccttttttattactatgttctctaggatttaccggcatgatgcttacagagccatatatagaaacagat

SEQ ID NO: 499764 - DNA, 75 bp, synthetic construct
  source 1..75: mol_type = other DNA
cacgtggatatgagtacaaagaacgtttcccgcagatgatccggtatcgggttaaagagtgggaaaaagttgccg

SEQ ID NO: 499765 - DNA, 75 bp, synthetic construct
  source 1..75: mol_type = other DNA
cgtgctgcgacaggcacctgataaagccatttggttaggctggagtctgggcgggctggtggcaagccagattgc

SEQ ID NO: 499766 - DNA, 75 bp, synthetic construct
  source 1..75: mol_type = other DNA
gttaacccatcccgagcgtgttcaggcgctggttaccgtagcttcgtcaccgtgtttcagtgctcgtgatgagtg

SEQ ID NO: 499767 - DNA, 75 bp, synthetic construct
  source 1..75: mol_type = other DNA
gcgggatttcagcagcaactcagtgatgattttcagcgtacagtggaacggttccttgcgttacaaaccatgggt

SEQ ID NO: 499768 - DNA, 75 bp, synthetic construct
  source 1..75: mol_type = other DNA
gcagatctgctgattgtgctcggtgcacgttttgatgatcgggcgataggcaaaaccgaggagttctgcccgaac

SEQ ID NO: 499769 - DNA, 75 bp, synthetic construct
  source 1..75: mol_type = other DNA
ataagattgtcaccaccccggcatatatgctggcgcagaacattgcagaagcggcgagcggcattgataagctgg

SEQ ID NO: 499770 - DNA, 75 bp, synthetic construct
  source 1..75: mol_type = other DNA
tatgttggcacagaacattgcggaagcggcgaacggcattgataagctggtttctcgcgtgctggttctggctga

SEQ ID NO: 499771 - DNA, 75 bp, synthetic construct
  source 1..75: mol_type = other DNA
tttaatgttaatgtggtctcttgcgataacattcaaacgacacagtcgcaaatgaaattagattttcagccgcag

SEQ ID NO: 499772 - DNA, 75 bp, synthetic construct
  source 1..75: mol_type = other DNA
tcagacaactgaacgactggcagacgtttattgagactgtgcgggccgagcactaccccactggcagcgctcagt

SEQ ID NO: 499773 - DNA, 75 bp, synthetic construct
  source 1..75: mol_type = other DNA
caggcgctcgtaggatgggatgatgccagaaaagcgtggcttgaacaggttgccatcacggagcaaggctcaggc

SEQ ID NO: 499774 - DNA, 75 bp, synthetic construct
  source 1..75: mol_type = other DNA
gcaaaacgtacccatgccgtttttgcgactgtatggctatctcgatggtctggtgccgcgcaaagtggtgccgat

SEQ ID NO: 499775 - DNA, 75 bp, synthetic construct
  source 1..75: mol_type = other DNA
ccaggctctatctgtacgactcgtatcgtgactggcgtcggtgttccgcagatcaccgccgttgctgatgcagta

SEQ ID NO: 499776 - DNA, 75 bp, synthetic construct
  source 1..75: mol_type = other DNA
gcaggtgcgggtaacgaagagcgtgttgacgcgctggttgccgctggcgttgacgttctgctgatcgactcctcc

SEQ ID NO: 499777 - DNA, 75 bp, synthetic construct
  source 1..75: mol_type = other DNA
cgcgatgtctaaaggctcttctgaccgttacttccagagcgacaacgctgccgacaaactggtgccggaaggtat

SEQ ID NO: 499778 - DNA, 75 bp, synthetic construct
  source 1..75: mol_type = other DNA
cggtcgcgcaaacaaactttctggtctggataaggcgctggctgccggggctactgaaatcacgaaagaagaata

SEQ ID NO: 499779 - DNA, 75 bp, synthetic construct
  source 1..75: mol_type = other DNA
ctgtgacggtaaaactgcgcctgactgtggctgcactcctgctgtttctggtggtgatggtggatttcaccagca

SEQ ID NO: 499780 - DNA, 75 bp, synthetic construct
  source 1..75: mol_type = other DNA
tggtaggttccatgctggcgggtactgaagaatctccgggtgaaatcgaactctaccagggccgttcttataaat

SEQ ID NO: 499781 - DNA, 75 bp, synthetic construct
  source 1..75: mol_type = other DNA
acggtttctggcaactgcaaaacgcggagcgctgttccacatttggcagcagtcgacgacctcccgcaggtgagc

SEQ ID NO: 499782 - DNA, 75 bp, synthetic construct
  source 1..75: mol_type = other DNA
cgattgtatggctatctcgatggtctggtgccgcgcaaagtggtgccgatgctggataaactctggccgcacagc

SEQ ID NO: 499783 - DNA, 75 bp, synthetic construct
  source 1..75: mol_type = other DNA
attagcctatcccgagcgtgttcaggcgctggtcactgtagcatcgtcgccatgttttcgtgcccgtgatgggtg

SEQ ID NO: 499784 - DNA, 75 bp, synthetic construct
  source 1..75: mol_type = other DNA
ctgccatcctgctgtttctggtagtggcggtggatttcaccggacggctgatgtcggtgctggcagatggtgtgc

SEQ ID NO: 499785 - DNA, 75 bp, synthetic construct
  source 1..75: mol_type = other DNA
gttaagtgaattactgtgcgaagaagaaatactcgaacaactcttaaccgcatcatcagaaaaacaattagcgga

SEQ ID NO: 499786 - DNA, 75 bp, synthetic construct
  source 1..75: mol_type = other DNA
aattactcatcggactttctgctgccgatgccgattcgcacattggcgctattcaggcgttaagtgaattactgt

SEQ ID NO: 499787 - DNA, 75 bp, synthetic construct
  source 1..75: mol_type = other DNA
tagggttttatgtgaggtttataaaatttgggatgtttttagaaactcttttaaagataatgaatcagagtttat

SEQ ID NO: 499788 - DNA, 75 bp, synthetic construct
  source 1..75: mol_type = other DNA
gctggttgcgctgaaaaaagcaaaaccgactcaggcgaaaggtgtgtacatcaagaaagttagcatctctaccac

SEQ ID NO: 499789 - DNA, 75 bp, synthetic construct
  source 1..75: mol_type = other DNA
ctgaagctgctaaagctgcaggcgctgaactggtaggtatggaagatctggctgatcagatcaagaaaggcgaaa

SEQ ID NO: 499790 - DNA, 75 bp, synthetic construct
  source 1..75: mol_type = other DNA
gctatcgcactgctgaaagagctggcgactgctaaattcgtagaaagtgtggacgtagctgttaacctcggcatc

SEQ ID NO: 499791 - DNA, 75 bp, synthetic construct
  source 1..75: mol_type = other DNA
tgctggcggaagaaaaagatctgatcctgctgccggacgcgctgagctatgaagatggtgcgtttatcagttgcg

SEQ ID NO: 499792 - DNA, 75 bp, synthetic construct
  source 1..75: mol_type = other DNA
cctcctgccggatgcactgagttacgaagatggtgcgtttatcagttgcggcgttggtacagcgtatgaagggat

SEQ ID NO: 499793 - DNA, 75 bp, synthetic construct
  source 1..75: mol_type = other DNA
gcggattattggctcctgggtaaccagtttattccatatggaaaaatgcgcccacgatttgaccgactggaaact

SEQ ID NO: 499794 - DNA, 75 bp, synthetic construct
  source 1..75: mol_type = other DNA
cgatctagcaggttataccggcagtatcatcacaaaaacagcgactcagatcatcatgttaactggcgtacgcac

SEQ ID NO: 499795 - DNA, 75 bp, synthetic construct
  source 1..75: mol_type = other DNA
acagggttttaattcatcgtggatcgaaacacagttagcccatgtagataaaaatgctatcaggggaacttataa

SEQ ID NO: 499796 - DNA, 75 bp, synthetic construct
  source 1..75: mol_type = other DNA
agactcacagggcacggtttcagacaaaccatgagtaccattctgcacgaacagggctttaattctgcctggatt

SEQ ID NO: 499797 - DNA, 75 bp, synthetic construct
  source 1..75: mol_type = other DNA
gctggttgcgctgaaaaaagcaaaaccgactcaggcgaaaggcgtgtacatcaaaaaagttagcatctccaccac

SEQ ID NO: 499798 - DNA, 75 bp, synthetic construct
  source 1..75: mol_type = other DNA
aacgtattcgcgaaacccgagccaaatacccggatctgcaaatcatcggcggtaacgtcgccactgctgcaggcg

SEQ ID NO: 499799 - DNA, 75 bp, synthetic construct
  source 1..75: mol_type = other DNA
tgtgggaaattccagcagaagtgatgaagatgaaacgtcctcatattgtgccgctttcagaacaagtcattactc

SEQ ID NO: 499800 - DNA, 75 bp, synthetic construct
  source 1..75: mol_type = other DNA
ccctgttcaaaccccgctttaaacaccctgaaacctcgacgctagtccgccgttttaaccgcggtacgcaaccgt

SEQ ID NO: 499801 - DNA, 75 bp, synthetic construct
  source 1..75: mol_type = other DNA
atgatgatccacttcatcatgaccctttccttatttatggccccttcctcgggaggggctttcccgtttcagcgt

SEQ ID NO: 499802 - DNA, 75 bp, synthetic construct
  source 1..75: mol_type = other DNA
agatgggcggcctgcgctcctgtatgggcctgaccggctgtggtactatcgacgaactgcgtactaaagcggagt

SEQ ID NO: 499803 - DNA, 75 bp, synthetic construct
  source 1..75: mol_type = other DNA
gatcggcatgatcactgtgaaggacttccagaaagcggaacgtaaaccgaacgcctgtaaagacgagcaaggccg

SEQ ID NO: 499804 - DNA, 75 bp, synthetic construct
  source 1..75: mol_type = other DNA
aaaattttttggactcagatcatcgggttgctgtcataaaaggaaattggggagtaggtaaaacgcattattgga

SEQ ID NO: 499805 - DNA, 75 bp, synthetic construct
  source 1..75: mol_type = other DNA
taaagcaatagaagctttggaggaagttgcttcaaaatcaacacttaataagctgcgtgttaataaaatactcaa

SEQ ID NO: 499806 - DNA, 75 bp, synthetic construct
  source 1..75: mol_type = other DNA
ccgttggtgccgtggggcgaactgaccatgcctgtgccgggactggaactggcctcctggattgaagcgcgtctg

SEQ ID NO: 499807 - DNA, 75 bp, synthetic construct
  source 1..75: mol_type = other DNA
gctgaaaccggaagtggatatcgatgccctttcgcctgaccttgctgcgctgaccgctatcagtaaacagattgg

SEQ ID NO: 499808 - DNA, 75 bp, synthetic construct
  source 1..75: mol_type = other DNA
gccccacgatggcaacgtgttgcgtgttaaaggccatcaggggcgcgcattggggcgtgacggtatgattgaagt

SEQ ID NO: 499809 - DNA, 75 bp, synthetic construct
  source 1..75: mol_type = other DNA
ttctccatatgccaaaaggcgatggtccgttcccgacagtattaatgtgtggtggtctggatgcgatgcaaacgg

SEQ ID NO: 499810 - DNA, 75 bp, synthetic construct
  source 1..75: mol_type = other DNA
cctggttctatttgtactacccgcattgttactggcgtcggtgttccgcagatcactgccgttgctgacgcagta

SEQ ID NO: 499811 - DNA, 75 bp, synthetic construct
  source 1..75: mol_type = other DNA
gacgaactgcgaactaaagcggagtttgtacgtatcagcggtgcgggcattcaggaaagccacgttcacgacgtg

SEQ ID NO: 499812 - DNA, 75 bp, synthetic construct
  source 1..75: mol_type = other DNA
tggtgggttccatgctggcaggtactgaagaatctccgggtgaaattgaactctaccagggccgttcttacaaat

SEQ ID NO: 499813 - DNA, 75 bp, synthetic construct
  source 1..75: mol_type = other DNA
gtgtgatttggataaagtggaatacaccaatgcaaaccttagaaatgccaacataatcgatgcaaaaaatattga

SEQ ID NO: 499814 - DNA, 75 bp, synthetic construct
  source 1..75: mol_type = other DNA
gcacgttaatgttgatttgaaaatacaaaaaataaaaataataagacagctcaacaataaaggtgtcttcaatat

SEQ ID NO: 499815 - DNA, 75 bp, synthetic construct
  source 1..75: mol_type = other DNA
tgcctttgatggattacgggctcttgctcgtcagttaatgctgtacgccggacggggaataaacagtgtggagaa

SEQ ID NO: 499816 - DNA, 75 bp, synthetic construct
  source 1..75: mol_type = other DNA
tggataatgcaaccggcccccgactggcagacacagttgaacgggattatttcactctcagagagcggttgatga

SEQ ID NO: 499817 - DNA, 75 bp, synthetic construct
  source 1..75: mol_type = other DNA
ccgctggtcgtaagcgcctgcggatcaacgccacctgccccggtaccgtgcgtgaagccaccggcacctccggcg

SEQ ID NO: 499818 - DNA, 75 bp, synthetic construct
  source 1..75: mol_type = other DNA
taccgtgataacgccatgacttacaaagagcagcgcgacaaaaacaccagagaactgaaactggcgaacgccacc

SEQ ID NO: 499819 - DNA, 75 bp, synthetic construct
  source 1..75: mol_type = other DNA
cgctggcaacgtcaaaggcgctgtttattcatcgtaatactctggagtatcggcttaatcgtatatcggaactga

SEQ ID NO: 499820 - DNA, 75 bp, synthetic construct
  source 1..75: mol_type = other DNA
gactacgcccgagcgtaataatctggtggcgattgtctcgctgaccgaaatggtggtgttgaaaccggcgttgaa

SEQ ID NO: 499821 - DNA, 75 bp, synthetic construct
  source 1..75: mol_type = other DNA
aaatggcgcaggatatcgtggcgcgcaccatgcgcattatcgataccaatatcaatgtaatggatgctcgcgggc

SEQ ID NO: 499822 - DNA, 75 bp, synthetic construct
  source 1..75: mol_type = other DNA
ttctgcttatttcccccagcactcacaaaatcctgtaattaggccaaataggaaatactcgatatctccttcagg

SEQ ID NO: 499823 - DNA, 75 bp, synthetic construct
  source 1..75: mol_type = other DNA
gttaataagaatacaattatatatggaaataaaatagagtatgtatcagatggtacatatcaatctgtttctggt

SEQ ID NO: 499824 - DNA, 75 bp, synthetic construct
  source 1..75: mol_type = other DNA
aatttggcgacctgcataaagctgttaccgaaacgcaacaccgcatggggatagcgcaaccgaacggtaacgcct

SEQ ID NO: 499825 - DNA, 75 bp, synthetic construct
  source 1..75: mol_type = other DNA
aagcgcaacgcgataatgtgacggaaaaactcaaccaggcgaccgcaatcattactgacatgcagatacgccagc

SEQ ID NO: 499826 - DNA, 75 bp, synthetic construct
  source 1..75: mol_type = other DNA
agtgatggtctgtgggggagacgtcttctgtctcgatggcgaatgcgataaggctcagagagggaagagtaatga

SEQ ID NO: 499827 - DNA, 75 bp, synthetic construct
  source 1..75: mol_type = other DNA
cggaattatttcactctcagcgaccggctgatgacgatgcagaagcagctggaaggggcgcaggaatatatccgc

SEQ ID NO: 499828 - DNA, 75 bp, synthetic construct
  source 1..75: mol_type = other DNA
gcgaggaacggatggttcctcaacagcaatttattcggtcgcgcctggcaatgctgttccctcaacctggacctt

SEQ ID NO: 499829 - DNA, 75 bp, synthetic construct
  source 1..75: mol_type = other DNA
taccgtctccgaagtggaatcgacaagataaccgcacaggtcaactacctgcaggaatacatcagggcgcaatgc

SEQ ID NO: 499830 - DNA, 75 bp, synthetic construct
  source 1..75: mol_type = other DNA
gaacgggattatttcaccctcagagagcggttgatgacgatgcagaagcagctggaaggggcacaggaatatatc

SEQ ID NO: 499831 - DNA, 75 bp, synthetic construct
  source 1..75: mol_type = other DNA
tccggtaccgtgcgtgaagccaccggcacctccggcatggataatgcaaccggcccccgactggcagacaccgct

SEQ ID NO: 499832 - DNA, 75 bp, synthetic construct
  source 1..75: mol_type = other DNA
atgcagaagcgtcaacgtgatgtagctgaactcgatgccagatatacaaaggaacttgctgatgctaacgcgact

SEQ ID NO: 499833 - DNA, 75 bp, synthetic construct
  source 1..75: mol_type = other DNA
atgcaaccattactgatatgcagcagcgccagcgtgatgttgctgcacttgatgccagatactcgagggaattag

SEQ ID NO: 499834 - DNA, 75 bp, synthetic construct
  source 1..75: mol_type = other DNA
taccatgcgcatcatcgatactaatatcaacgtaatggatgcccgcgggcgaattatcggcagcggcgatcgtga

SEQ ID NO: 499835 - DNA, 75 bp, synthetic construct
  source 1..75: mol_type = other DNA
gattgtggcgcggtgatgggcgacgcaacataccaggaaacattcgatgaagagaatcaggttgaagttcaggaa

SEQ ID NO: 499836 - DNA, 75 bp, synthetic construct
  source 1..75: mol_type = other DNA
gagcgtgaggggccgttctacttcctcttcaccgacaaggatggcgaaaaatacggtcgcgcaaacaaactttct

SEQ ID NO: 499837 - DNA, 75 bp, synthetic construct
  source 1..75: mol_type = other DNA
tgaattttatcactacccgggacgccttcaggggtatatcaacgcctatttgacggaaactgatcacgagaaccc

SEQ ID NO: 499838 - DNA, 75 bp, synthetic construct
  source 1..75: mol_type = other DNA
tttttggtcttgttcgtgaacgcccgatcgacattcacaaagatcccgtggcactgaacaaatacatcaccgaat

SEQ ID NO: 499839 - DNA, 75 bp, synthetic construct
  source 1..75: mol_type = other DNA
ggtgaacgcaaggaaaccggaaaatacacttctgttgttgatctcgcccgtgccacaatcaaccgacagcacact

SEQ ID NO: 499840 - DNA, 75 bp, synthetic construct
  source 1..75: mol_type = other DNA
tgcaattgcgggaatttatcgccgaaaactccggtgaattttttgttcaggtctggggaaatggagccaacttcg

SEQ ID NO: 499841 - DNA, 75 bp, synthetic construct
  source 1..75: mol_type = other DNA
gtgaacggtcatcacgttatcacatccaccagcagagtgtggtaccacctgatgatcgaccttgaaacaatggga

SEQ ID NO: 499842 - DNA, 75 bp, synthetic construct
  source 1..75: mol_type = other DNA
gaacggccagaaagcggatcaaaacagcccaaatacgcaacaaaacgagccagaaacgaaacaatccgaaccagt

SEQ ID NO: 499843 - DNA, 75 bp, synthetic construct
  source 1..75: mol_type = other DNA
accgatgaaatcccgttagatgatgcactgttacaattgcgggaatttatcgacgaaaactccggcgaatttttt

SEQ ID NO: 499844 - DNA, 75 bp, synthetic construct
  source 1..75: mol_type = other DNA
aatgatccgaaatgggttaaggggctccagacccgcgattctgtgaaccagaaccagcatgaatcggaacggaac

SEQ ID NO: 499845 - DNA, 75 bp, synthetic construct
  source 1..75: mol_type = other DNA
atgttctccagtcatcagaaacacaaactgatgcagtggaaaactgaggtatctgatatcccaaaaaatgaaacc

SEQ ID NO: 499846 - DNA, 75 bp, synthetic construct
  source 1..75: mol_type = other DNA
gatcgacattcacaaagatcccgtggcgctgaacaaatacatcactgaatacctgactacaaagggcgtgtttga

SEQ ID NO: 499847 - DNA, 75 bp, synthetic construct
  source 1..75: mol_type = other DNA
tacagaacgctgtcatggttaagttcgacacatgtgaaaacatcaccgttgatatggttattagcgcacaggaat

SEQ ID NO: 499848 - DNA, 75 bp, synthetic construct
  source 1..75: mol_type = other DNA
acagcatcagacatgtcatcatcaaccatcagcacgtcccgctggaagaacgccaccgtcgggtatttcgcattt

SEQ ID NO: 499849 - DNA, 75 bp, synthetic construct
  source 1..75: mol_type = other DNA
aacccgagcccgctaccagtcgattattgccagccacctgctggcccgtacccgcaaactgtggattcatgtttt

SEQ ID NO: 499850 - DNA, 75 bp, synthetic construct
  source 1..75: mol_type = other DNA
gcttattctggagaagaaaggcgcgtcgggatggattaacggcgaccgggccacctttctcagccagtatcaggt

SEQ ID NO: 499851 - DNA, 75 bp, synthetic construct
  source 1..75: mol_type = other DNA
tgcgttgatgaaccctttgcgcgatgctactcctcatgagcaacgattgaattacgctgcatggtatcgcaaaaa

SEQ ID NO: 499852 - DNA, 75 bp, synthetic construct
  source 1..75: mol_type = other DNA
gacgttacaggcacatgaacatcaggcgctggtctggtgctcacctgaagaggcgctgcaatatccgctggcccc

SEQ ID NO: 499853 - DNA, 75 bp, synthetic construct
  source 1..75: mol_type = other DNA
cgctgatgctgctatttggtttccgggatcataaatcgctttattcgctgttggcaaaaactgagcaaatggggt

SEQ ID NO: 499854 - DNA, 75 bp, synthetic construct
  source 1..75: mol_type = other DNA
caacgctggcgtcgcagtctgaacagcggacaagggcatcaggcctgtggctggatattcgacgctgatacggta

SEQ ID NO: 499855 - DNA, 75 bp, synthetic construct
  source 1..75: mol_type = other DNA
gatagcggtgcgttgctaaaagagatccccggcggttgcatgtgttgcgttaatggattacctatgcaggtggga

SEQ ID NO: 499856 - DNA, 75 bp, synthetic construct
  source 1..75: mol_type = other DNA
atcatgtcggtgctggcggatggagtgctggtctgcggcattgtggtattgctgtggccggtgataaaaagaaac

SEQ ID NO: 499857 - DNA, 75 bp, synthetic construct
  source 1..75: mol_type = other DNA
tttcccgccccgctttgaaccctcaaaactaacgggctggacgctcgaacatcatctggacaatcaactggtgcg

SEQ ID NO: 499858 - DNA, 75 bp, synthetic construct
  source 1..75: mol_type = other DNA
acgcacagctggcggcgttactggggatcacggtcatgggcgaaattgagccgttggtgccgtggggcgaactga

SEQ ID NO: 499859 - DNA, 75 bp, synthetic construct
  source 1..75: mol_type = other DNA
gacagcggtgcattactaaaagagatccccggcggctgcatgtgctgcgttaatggcttaccgatgcaggtgggg

SEQ ID NO: 499860 - DNA, 75 bp, synthetic construct
  source 1..75: mol_type = other DNA
agccctgtgggcgcgtccggcagaaagttttgttccgcataatttagcgggagaaggaccgcgcggcggtgcgcc

SEQ ID NO: 499861 - DNA, 75 bp, synthetic construct
  source 1..75: mol_type = other DNA
cgcagaacgttggcgcagtggtaagcgcgtgctcatcgcctgtgaagatgaaaagcaggcttaccggctggatga

SEQ ID NO: 499862 - DNA, 75 bp, synthetic construct
  source 1..75: mol_type = other DNA
atgaatgcagattaccaaatcacctggctgtaagtaaccacagagaactttacctgactgtggggggcgagttgt

SEQ ID NO: 499863 - DNA, 75 bp, synthetic construct
  source 1..75: mol_type = other DNA
cgaaatttctttctgacgtttgtctggcttcccctgaatttttcccctttttggccgcagccttggactgatttt

SEQ ID NO: 499864 - DNA, 75 bp, synthetic construct
  source 1..75: mol_type = other DNA
ggcggtgcgccggtggagatcgcctggccgcaaaaacgcagcagcagcccgcgcgatatattgattagtctgcga

SEQ ID NO: 499865 - DNA, 75 bp, synthetic construct
  source 1..75: mol_type = other DNA
atgaaaaacgcaacgttctaccttctggacaatgacaccaccgtcgatggcttaagcgccgttgagcagctggtg

SEQ ID NO: 499866 - DNA, 75 bp, synthetic construct
  source 1..75: mol_type = other DNA
cccttctgtactggtgagccgctttctgaccggcgcgcctaccgtacttatcgcctggtttgtctccggttttat

SEQ ID NO: 499867 - DNA, 75 bp, synthetic construct
  source 1..75: mol_type = other DNA
gtggaagatatttatgtctctggcgtaaaagaagaaaacatcactgtagtgggtgatgcgacaccacaaccctct

SEQ ID NO: 499868 - DNA, 75 bp, synthetic construct
  source 1..75: mol_type = other DNA
cgaccctctgctgtgggccgtgactacgataccagtaagaaaatcaccgaacaaagcgatggtttactggcgaaa

SEQ ID NO: 499869 - DNA, 75 bp, synthetic construct
  source 1..75: mol_type = other DNA
tattgtgccgttgttggtgtggccgatggtggttgcgctggctgcttgtattatcacgctgagttttctggggga

SEQ ID NO: 499870 - DNA, 75 bp, synthetic construct
  source 1..75: mol_type = other DNA
aatactgttctcaatcccgctcatgcacaggcgtatttcccttctgcaattacaactatggttatcggctgaata

SEQ ID NO: 499871 - DNA, 75 bp, synthetic construct
  source 1..75: mol_type = other DNA
tgccatcaacgcgcaggcggcctgcgacttcatcccggtcggtttgtcgctggcggaagcccgtcaggacacggt

SEQ ID NO: 499872 - DNA, 75 bp, synthetic construct
  source 1..75: mol_type = other DNA
atcggttggcaattctcccgcagaacgcctcctgaattaaaaaacagactgcattgctggctggtcttttcgccg

SEQ ID NO: 499873 - DNA, 75 bp, synthetic construct
  source 1..75: mol_type = other DNA
gcagctcggtgtgcgcaccacgctttctgatgtgggggctaccgtgtgtgaatttttccgcgcgccaccgccaca

SEQ ID NO: 499874 - DNA, 75 bp, synthetic construct
  source 1..75: mol_type = other DNA
cgaagatgacccattacagatggtgggtcatgagttttatctttgtaacctacaccgtggctaatgccgaccgcg

SEQ ID NO: 499875 - DNA, 75 bp, synthetic construct
  source 1..75: mol_type = other DNA
gcatcctcactttattttacctgcatggcaaacggtaacagccgtttctatagtgcagagaaattttacgactat

SEQ ID NO: 499876 - DNA, 75 bp, synthetic construct
  source 1..75: mol_type = other DNA
ttttttgcaggaatcggagtttggagctatgcacttagaaaagcaggatggccagacaacaagagtatctggaca

SEQ ID NO: 499877 - DNA, 63 bp, synthetic construct
  source 1..63: mol_type = other DNA
atgagtttaagatactacataaaaaacattttgtttggcctatattgcacacttatatatata

SEQ ID NO: 499878 - DNA, 75 bp, synthetic construct
  source 1..75: mol_type = other DNA
ggtcatgcagaagacgtcgcacgttatgccgaacgtttgcaggtcgttgaccgtaaccttactcgccttgttgag

SEQ ID NO: 499879 - DNA, 75 bp, synthetic construct
  source 1..75: mol_type = other DNA
ccgcacggtgacagcgcctgctatgaagcgatggtactgatggcgcagccgttttcttaccgttatccgctggtt

SEQ ID NO: 499880 - DNA, 75 bp, synthetic construct
  source 1..75: mol_type = other DNA
tcgctcaccagattcaatggtagtaattaaagccattggcgaagaaagtggtaattatgaagtaaaacgccgcgt

SEQ ID NO: 499881 - DNA, 75 bp, synthetic construct
  source 1..75: mol_type = other DNA
tggccgcagccttggactgattttgtcggcccgattagtgcacagcttggttttgcattgggatattattgccat

SEQ ID NO: 499882 - DNA, 75 bp, synthetic construct
  source 1..75: mol_type = other DNA
ggtagctgcaaagaaacttctctcacaaagtatttttccaggactataccagagcgtatttcaattgaagaaatt

SEQ ID NO: 499883 - DNA, 75 bp, synthetic construct
  source 1..75: mol_type = other DNA
cacccgaacaaataattagcatactcagcaaaatcgccagcgtaatgaagcctggcgcaaaagtttgcatcatgg

SEQ ID NO: 499884 - DNA, 75 bp, synthetic construct
  source 1..75: mol_type = other DNA
catcgacgcaccaggcctgaactataaagcgggcgatagcttcaaagcggcggtgaaaggcaagagcaaccaacc

SEQ ID NO: 499885 - DNA, 75 bp, synthetic construct
  source 1..75: mol_type = other DNA
atgtgattttcatctccaatcttaaaggcggtgtgtcaaaaactgtatcgacggtttctctggcgcatgcaatgc

SEQ ID NO: 499886 - DNA, 75 bp, synthetic construct
  source 1..75: mol_type = other DNA
aatgtagtttaggccatccagtgaaatatgctgctaatccggtacagatagttgatgaggtggaagatatgaacc

SEQ ID NO: 499887 - DNA, 75 bp, synthetic construct
  source 1..75: mol_type = other DNA
cagtcttgccctggtgaaatacacgcaaaaggtttcccggctgacgatccagaagcaaaacgcgaatacgaaaaa

SEQ ID NO: 499888 - DNA, 75 bp, synthetic construct
  source 1..75: mol_type = other DNA
ccagtgaactgaacgaagttcatatcatcatggaagccactggggtatatcatgaacctctagcttatggccttc

SEQ ID NO: 499889 - DNA, 75 bp, synthetic construct
  source 1..75: mol_type = other DNA
agcggcgcaatctcttattttgtgcagcaggcagcccgcgccggattgattggcatttcgatgtgccagtccgat

SEQ ID NO: 499890 - DNA, 75 bp, synthetic construct
  source 1..75: mol_type = other DNA
atggctacagtcccaacttccccattccttaaaatcgaagtcgtcaacggcaaagctgttattttctccctgcat

SEQ ID NO: 499891 - DNA, 75 bp, synthetic construct
  source 1..75: mol_type = other DNA
ggactgataaatgtgaatgggaatgcatgggcctatttgacacatatgctgcggcgcgtgatgaaggtcgcgaat

SEQ ID NO: 499892 - DNA, 75 bp, synthetic construct
  source 1..75: mol_type = other DNA
ggtggtctgggcggcatcaccgttccgctggtggtggggtacctggcgcagggttacggtttcgcacctgcactg

SEQ ID NO: 499893 - DNA, 75 bp, synthetic construct
  source 1..75: mol_type = other DNA
ctgggtcgcggatctgctggtacgtaagggcttttcactgggctttgcgcgtaaaacgccgattatctgcggctt

SEQ ID NO: 499894 - DNA, 75 bp, synthetic construct
  source 1..75: mol_type = other DNA
ttagtcttcctgctggagcaggtagtgttgttgagtggtcggtgataactgactatggttcaagttcagggaaac

SEQ ID NO: 499895 - DNA, 75 bp, synthetic construct
  source 1..75: mol_type = other DNA
catcatggaagccactggggtatatcatgaacctctagcttatggccttcactttgctggcgctcagtggcagtt

SEQ ID NO: 499896 - DNA, 75 bp, synthetic construct
  source 1..75: mol_type = other DNA
agtgggtactgagacgctgaaaaagcagcttgctggtccgttaaatcagaaaaaaatcgctgattttatagcgaa

SEQ ID NO: 499897 - DNA, 75 bp, synthetic construct
  source 1..75: mol_type = other DNA
aggtgacaaacttgcatctggagttgtgaaagctgtttataattccgcaacagcaggctgggaagttcagttcag

SEQ ID NO: 499898 - DNA, 75 bp, synthetic construct
  source 1..75: mol_type = other DNA
cgccgtcgaaggcatcgaaattgttgatgatatttaccagtatttaatttccgacgcgctttataacacgtcata

SEQ ID NO: 499899 - DNA, 75 bp, synthetic construct
  source 1..75: mol_type = other DNA
ttcgctttacagcacacattccatgagaagaacaaaaccttaccttatctacaagaaaactaagaatctcagggt

SEQ ID NO: 499900 - DNA, 75 bp, synthetic construct
  source 1..75: mol_type = other DNA
atgtgtatctaccttaacttaatgattttgataaaaatcattaggggattcatcagtgttgagcctgttgtatct

SEQ ID NO: 499901 - DNA, 75 bp, synthetic construct
  source 1..75: mol_type = other DNA
aaactggaaagcacagtccgttatctgggtattgaagtagatgatgcattagagatctttgaatcgattgaagtc

SEQ ID NO: 499902 - DNA, 75 bp, synthetic construct
  source 1..75: mol_type = other DNA
tgttcctgagccatgagaattcagtgggcttggttgaaaatacggctgctcaggccatgctccagaacgtgtctc

SEQ ID NO: 499903 - DNA, 75 bp, synthetic construct
  source 1..75: mol_type = other DNA
gatagcggtcctcaccttgatgcattcctgaaaaactgtattggtgcggcagacctgatgttgaccccccttcca

SEQ ID NO: 499904 - DNA, 75 bp, synthetic construct
  source 1..75: mol_type = other DNA
tcagtcataaactgattaatattgttgtttttgttgcagttgtagaatatgcctatttattcctccatttctatt

SEQ ID NO: 499905 - DNA, 75 bp, synthetic construct
  source 1..75: mol_type = other DNA
gccgaaaaatcgctctggcataacgttgagaaccgtcaactggacgctcagtttttccatatgggaatgggattc

SEQ ID NO: 499906 - DNA, 75 bp, synthetic construct
  source 1..75: mol_type = other DNA
cctgctggaaattctctccgaatggctggtgttccgccgcgataccgtgcgccgccgactgaactatcgtctgga

SEQ ID NO: 499907 - DNA, 75 bp, synthetic construct
  source 1..75: mol_type = other DNA
agttggggatcgcgccgatgaccagcatgtttagctgcggcaccaatgagcgccggatgtgcgacaccattcatc

SEQ ID NO: 499908 - DNA, 75 bp, synthetic construct
  source 1..75: mol_type = other DNA
aagcttagtaatttgcatagtaaagactacttgttccgatctcgggtcggtactaaccggcacatatcaacccgg

SEQ ID NO: 499909 - DNA, 75 bp, synthetic construct
  source 1..75: mol_type = other DNA
gagtatttataaggatatacagggggcagcattcctcctgaatatggctgcacttctgaaagccaaaatgacaac

SEQ ID NO: 499910 - DNA, 75 bp, synthetic construct
  source 1..75: mol_type = other DNA
tggagcggtggatggtgccgaacaaactccgggaggcagcgtgatgcggcaacaatcacacggatttcccgtgaa

SEQ ID NO: 499911 - DNA, 75 bp, synthetic construct
  source 1..75: mol_type = other DNA
aacatgcgtctgatggctgtggccgggcgaattgaaattaaagtcacagaaaagtacctgattgatcgaggcatt

SEQ ID NO: 499912 - DNA, 75 bp, synthetic construct
  source 1..75: mol_type = other DNA
gaattcgctttatgccgaagggtcgggcgctatcttttatggtggtttgccgacgaatgttgcgcaatctgaact

SEQ ID NO: 499913 - DNA, 75 bp, synthetic construct
  source 1..75: mol_type = other DNA
gggtggtggcggcaaagccgaagtggagatgcgtcaacgtgtgggtcgcggtcttcgagccaaaaagaatcaggc

SEQ ID NO: 499914 - DNA, 75 bp, synthetic construct
  source 1..75: mol_type = other DNA
ggaagcattaaaacttactaatcaaagcaaaaatctaccctatctggcgcaaacatggatagaagatacgaaagg

SEQ ID NO: 499915 - DNA, 75 bp, synthetic construct
  source 1..75: mol_type = other DNA
ccctgttgctggtggtgttggcgcaattcctcagattgcgtttactgattttcaaggaaatgctattcaagtaaa

SEQ ID NO: 499916 - DNA, 75 bp, synthetic construct
  source 1..75: mol_type = other DNA
cagtggctgcctctgctgtatctggtatggcacatgcctggacgaatggtgatttcaatggttcggttgatatcg

SEQ ID NO: 499917 - DNA, 75 bp, synthetic construct
  source 1..75: mol_type = other DNA
tggggcgtgacggcgtgattgatgtgacggtgactattcgggacaaccaaccggagaaagtcaccatttctggcg

SEQ ID NO: 499918 - DNA, 75 bp, synthetic construct
  source 1..75: mol_type = other DNA
caggatgtcccggtaatacgtttctggtccgaggccggctgccccacctgcgcggaatttgtctacagcggtttt

SEQ ID NO: 499919 - DNA, 75 bp, synthetic construct
  source 1..75: mol_type = other DNA
caggatgtcccgttaatacgtttctggtccgaggctggatgccctacctgtgcggaatttgtctacagcggtttt

SEQ ID NO: 499920 - DNA, 75 bp, synthetic construct
  source 1..75: mol_type = other DNA
caggagatgttgagctatgaagtggaggctggtgactggaaagggaccagcacgatgttcaactggagtaaaaac

SEQ ID NO: 499921 - DNA, 75 bp, synthetic construct
  source 1..75: mol_type = other DNA
gggaatgccaatggtccgatgggagcatggttagtacatcacaacgtattatcccacgatggcaacgtgttgcgt

SEQ ID NO: 499922 - DNA, 75 bp, synthetic construct
  source 1..75: mol_type = other DNA
gacggtgacaattcgagataaccaaccggagaaagtcaccatttctggcacagcggtgattcttttccatgctga

SEQ ID NO: 499923 - DNA, 75 bp, synthetic construct
  source 1..75: mol_type = other DNA
cagaagcaacgcctgacggcgtaaacatcatgtaccgcagcaacgatggcatgacagaacgcgttgaggccgttt

SEQ ID NO: 499924 - DNA, 75 bp, synthetic construct
  source 1..75: mol_type = other DNA
tgccagtgctttagctacaccgaaaaaagtacattttccctttcttactgctaatgaacttccccacttcctcaa

SEQ ID NO: 499925 - DNA, 75 bp, synthetic construct
  source 1..75: mol_type = other DNA
tttctaaagaaagtgtatcccaagtaatagaattacttggctataaaggaagagctacgggccacggattccgcc

SEQ ID NO: 499926 - DNA, 75 bp, synthetic construct
  source 1..75: mol_type = other DNA
cagcgaccaggaaaagcaaatacggcaataaaaaaactgttgtcgatgatatcgcttttgatagcaaaaaagagg

SEQ ID NO: 499927 - DNA, 75 bp, synthetic construct
  source 1..75: mol_type = other DNA
atgtgggggcgaggcctgtaggggaaattaaaccgctagaattactaaatgtactgcgtaaaattgagaagcgcg

SEQ ID NO: 499928 - DNA, 75 bp, synthetic construct
  source 1..75: mol_type = other DNA
ccgctctctgagcaggtcattgccctatttaagcaacttgaacccatcacaaaacatcatcctctggtctttatc

SEQ ID NO: 499929 - DNA, 75 bp, synthetic construct
  source 1..75: mol_type = other DNA
agactcacagggcacggtttcagacacaccatgagtacaattctgcatgaacaaggctttaattccgcctggatt

SEQ ID NO: 499930 - DNA, 75 bp, synthetic construct
  source 1..75: mol_type = other DNA
tctgttttcatggatgattggtgcgctggccggacagttttcttgtacaggggagctatggcttaatgagcaacg

SEQ ID NO: 499931 - DNA, 75 bp, synthetic construct
  source 1..75: mol_type = other DNA
gcttgaacggacagggcttggcggaacttttcatcaggatccggcgacattatcgggcggccagcgagcgcgggt

SEQ ID NO: 499932 - DNA, 75 bp, synthetic construct
  source 1..75: mol_type = other DNA
tacgtttaccagaaagccgcttgctgacaaacgttaactttacggttgataaaggtgacattgtcacgttaatgg

SEQ ID NO: 499933 - DNA, 75 bp, synthetic construct
  source 1..75: mol_type = other DNA
catcgtgaaaagttaacgcctgagcatctgagcgcgctgaccgactgctgcccaactcaggcactgaccgtatgc

SEQ ID NO: 499934 - DNA, 75 bp, synthetic construct
  source 1..75: mol_type = other DNA
ctggaaaaagccattactcagcaccaccagcaacttacacagtggacacagaaagttgatgttgccctgaataac

SEQ ID NO: 499935 - DNA, 75 bp, synthetic construct
  source 1..75: mol_type = other DNA
ggtgaaatgcgtcgcggatgtcagcaggcggaagaacaactcaaaatgttgatcgattatcagaatgaatatcgc

SEQ ID NO: 499936 - DNA, 75 bp, synthetic construct
  source 1..75: mol_type = other DNA
ttgaggccgggaatttgagcgaaactcgtattaagagcatgatccaacaaggtttgggggaggatgaaaaggctg

SEQ ID NO: 499937 - DNA, 75 bp, synthetic construct
  source 1..75: mol_type = other DNA
tctcatctgttaaagaccttgtaattcaggctcagcagcaggccaccgcagcaggtaactatcaaggggtagtat

SEQ ID NO: 499938 - DNA, 75 bp, synthetic construct
  source 1..75: mol_type = other DNA
atgaaaaagttaacgtttaccgcactggcactgatgatgtgcggcgcggcatgggctgcggccataccgcaggca

SEQ ID NO: 499939 - DNA, 75 bp, synthetic construct
  source 1..75: mol_type = other DNA
atgaaaaatcgccacaacagcccgcatacctagtgagttaccgctatccaggagacgaacgtaacagagctaata

SEQ ID NO: 499940 - DNA, 75 bp, synthetic construct
  source 1..75: mol_type = other DNA
ttgattacttaaattttggcgaagtttcaagtctcgcagtagatatattgaagtctgaaaatatgttgccagtgt

SEQ ID NO: 499941 - DNA, 75 bp, synthetic construct
  source 1..75: mol_type = other DNA
ttatgttgttcagtagttatggtattaatatgcaggatctccagaaatggcggaagtcaggtaaccgactgttcc

SEQ ID NO: 499942 - DNA, 75 bp, synthetic construct
  source 1..75: mol_type = other DNA
attcctgtttctgtgaatttcgcaggagaaaaactgaccacagcaggcattaccatcgcatccaataaactgaac

SEQ ID NO: 499943 - DNA, 75 bp, synthetic construct
  source 1..75: mol_type = other DNA
gcgtgaactggaggaagaagaaaaaaggctgatacgtgaatatcagcctgagttttactttgacaactgcattca

SEQ ID NO: 499944 - DNA, 75 bp, synthetic construct
  source 1..75: mol_type = other DNA
ggcgcactgaaatctctgtcattaaattcgatgacattcaggtgcgcatagtgagtatcaacggcgatccgtggt

SEQ ID NO: 499945 - DNA, 75 bp, synthetic construct
  source 1..75: mol_type = other DNA
gtcgttctgcgctttgatggcgtggatgttcgtgtggtgtatctgaacggcgatccgtggtttgttgcaaaggat

SEQ ID NO: 499946 - DNA, 75 bp, synthetic construct
  source 1..75: mol_type = other DNA
cgcagacgccccgcaactggagttacaccaaatatccgggcacaggcagcttcaacattgttcctgattttgctt

SEQ ID NO: 499947 - DNA, 75 bp, synthetic construct
  source 1..75: mol_type = other DNA
caccgtcgttaacaccaaacccggctttatgacaacgctggtctttgataacgatgaggcggtcataagcgccaa

SEQ ID NO: 499948 - DNA, 75 bp, synthetic construct
  source 1..75: mol_type = other DNA
aagcgatggtgctgatggcgcagccattctcttatcgttatccgctggtggacgggcaggggaactggggcgcac

SEQ ID NO: 499949 - DNA, 75 bp, synthetic construct
  source 1..75: mol_type = other DNA
tatcatacaccgactcatagataataatgcccgtgatgcattaaatacggtgaaacctttatcggaagcaaaaag

SEQ ID NO: 499950 - DNA, 75 bp, synthetic construct
  source 1..75: mol_type = other DNA
ggtatgtctggcttcatgtgtccggtctgaaaaattttgtgaaaaacaggtctgattataacagaatggcacttg

SEQ ID NO: 499951 - DNA, 75 bp, synthetic construct
  source 1..75: mol_type = other DNA
cgagcctttatctcacccctttaaagctgctggactgcatgacgcattgcaggacctgacctgggaagactgcat

SEQ ID NO: 499952 - DNA, 75 bp, synthetic construct
  source 1..75: mol_type = other DNA
atgcagattgccgccggattcggcctcgaaacctgtgatttgaataacgaagccgatccgcaggctgcattgcag

SEQ ID NO: 499953 - DNA, 75 bp, synthetic construct
  source 1..75: mol_type = other DNA
atggcatctaatcaaaccaccctgccgaacgtcagtgaaaacgtgtatgaagatcagagcattggcgcggagctg

SEQ ID NO: 499954 - DNA, 75 bp, synthetic construct
  source 1..75: mol_type = other DNA
tttgtggcgggattggagccagtctggcattgcaaggctccattcttggcgcagtcgtctttattgtgctgttca

SEQ ID NO: 499955 - DNA, 75 bp, synthetic construct
  source 1..75: mol_type = other DNA
ccctgaccatgttctggctggtacgtcgcggctggagtccgctgcgcctgattgcaatcactgtggttctcggca

SEQ ID NO: 499956 - DNA, 75 bp, synthetic construct
  source 1..75: mol_type = other DNA
ggctatatcggcactaatggcaagacactgatgcctggtgcggacagtattatggtggcaccatttgcttctgcg

SEQ ID NO: 499957 - DNA, 75 bp, synthetic construct
  source 1..75: mol_type = other DNA
ataacgtgcgggaaattccgccgcgtgccaaagaacagaatgtcatgcaaatcgccatgcaaagccgtctgaaac

SEQ ID NO: 499958 - DNA, 75 bp, synthetic construct
  source 1..75: mol_type = other DNA
atgaaattaccattaatcacaacaggaatgatttgttttctggggatctgcaactttgcccaggctactgtctcc

SEQ ID NO: 499959 - DNA, 75 bp, synthetic construct
  source 1..75: mol_type = other DNA
acgccgccaaacgcccggtgctctatctgggcggcggtgtcattaacgcgcccgcgcgggtgcgtgaactggcgg

SEQ ID NO: 499960 - DNA, 75 bp, synthetic construct
  source 1..75: mol_type = other DNA
gtccaatcccgaaagcgtgcgatccgttaacgcattacggcctgatcaacgccgttgccgcctgtgtcgatgaca

SEQ ID NO: 499961 - DNA, 75 bp, synthetic construct
  source 1..75: mol_type = other DNA
agaaagcgcaattgccaactaccatgaccttaatggcgctgggcatgctgccaaaagcgcatccgctgtcgctgg

SEQ ID NO: 499962 - DNA, 75 bp, synthetic construct
  source 1..75: mol_type = other DNA
gttgaatacgggcgtgcaaaaaagtggattgaaccgccccgggaatcctggagactaaactccctgagaaagagg

SEQ ID NO: 499963 - DNA, 75 bp, synthetic construct
  source 1..75: mol_type = other DNA
gttgcccggcaacatggtgtagcagccagccagttatttctctggcgtaagcaataccaggaaggaagtcttact

SEQ ID NO: 499964 - DNA, 75 bp, synthetic construct
  source 1..75: mol_type = other DNA
gatgttgttcctgcctcagaactggctgccgctataaaaataaaagagttacagcccttgctgggtaaaaaaaca

SEQ ID NO: 499965 - DNA, 75 bp, synthetic construct
  source 1..75: mol_type = other DNA
ggaaaatgaactcattaaagaagcggttgaagatgggcgtgcaaaaaagtggataacgcacgtgtccttattgcc

SEQ ID NO: 499966 - DNA, 75 bp, synthetic construct
  source 1..75: mol_type = other DNA
attatggcctgcttcgcattctgtggtgcggtggtttccgtaatgctggttaagcgtattagccaacgtaagaaa

SEQ ID NO: 499967 - DNA, 75 bp, synthetic construct
  source 1..75: mol_type = other DNA
ttgggttttaaagcaggcatctggttctattcccttattgtgattgccgtaggcattattattttctttgtcctg

SEQ ID NO: 499968 - DNA, 75 bp, synthetic construct
  source 1..75: mol_type = other DNA
gtgatggctgccggtcctggcgggaaagatattttcctgctaagcccggatgctggtgctaaaccgggtcatcag

SEQ ID NO: 499969 - DNA, 75 bp, synthetic construct
  source 1..75: mol_type = other DNA
ctgattggtcgtcacaccattatggtggctaacctggctccgcgtaaaatgcgcttcggtatctccgaaggcatg

SEQ ID NO: 499970 - DNA, 75 bp, synthetic construct
  source 1..75: mol_type = other DNA
gaaatgagtcaggagcatcagactgatttcgcaggctttaacatcagctatgacaactatcactcgacgcacagc

SEQ ID NO: 499971 - DNA, 75 bp, synthetic construct
  source 1..75: mol_type = other DNA
atcaacaagcgttttgacggtgtgctggcaagcgaactggctgacccgcaactgtacaaaaccttcactgatgcc

SEQ ID NO: 499972 - DNA, 75 bp, synthetic construct
  source 1..75: mol_type = other DNA
cattgatgatatcgatctcaacctggaagatttcgttcagcgtgtgaatgccgatatcgtgaacaaagtggttaa

SEQ ID NO: 499973 - DNA, 75 bp, synthetic construct
  source 1..75: mol_type = other DNA
gtaatggctgctggtcctggtgggaaagatatcttcctgctaagcccggatgccggtgctaaaccgggtcatcag

SEQ ID NO: 499974 - DNA, 75 bp, synthetic construct
  source 1..75: mol_type = other DNA
tgttcctgcctctgaacttgctgccgccatgaagcagattaaagaactccagcgcctgctcggcaaaaaaacgat

SEQ ID NO: 499975 - DNA, 75 bp, synthetic construct
  source 1..75: mol_type = other DNA
taaccagtgggatgcggtgattgaaattctcaaagcccgcgagcttatcccatttcttgatattgcctatcaagg

SEQ ID NO: 499976 - DNA, 75 bp, synthetic construct
  source 1..75: mol_type = other DNA
tggcagaagtagaagaaatgcgtacccgtattctggcaatgcgtcagcaactggtgcgggtgttgagcactgaga

SEQ ID NO: 499977 - DNA, 75 bp, synthetic construct
  source 1..75: mol_type = other DNA
acccttggcggctcaggggcattgaaagtgggcgcggatttcctgaaacgctacttcccggaatcaggcgtctgg

SEQ ID NO: 499978 - DNA, 75 bp, synthetic construct
  source 1..75: mol_type = other DNA
agttcagctgatgctttggctggatatctaagggttgcgttacccaaagatatcgcgtgggaggaatttcaacaa

SEQ ID NO: 499979 - DNA, 75 bp, synthetic construct
  source 1..75: mol_type = other DNA
atgattgatgtcttagggccggagaaacgcagacggcgtactacacaggaaaagatcgcaattgttcagcagagc

SEQ ID NO: 499980 - DNA, 75 bp, synthetic construct
  source 1..75: mol_type = other DNA
aaaaacattacctgcccgcagtattgtgttgctgcatccatgttgccacaacccaacgggtgccgatctcactaa

SEQ ID NO: 499981 - DNA, 75 bp, synthetic construct
  source 1..75: mol_type = other DNA
gagaacaggttgttcctgcctctgaacttgctgccgccatgaagcagattaaagaactccagcgcctgctcggca

SEQ ID NO: 499982 - DNA, 75 bp, synthetic construct
  source 1..75: mol_type = other DNA
cgttcctgcctctgaacttgctgccgccatgaagcagattaaagaactccagcgtctgctcggcaagaaaacgat

SEQ ID NO: 499983 - DNA, 75 bp, synthetic construct
  source 1..75: mol_type = other DNA
gcaggagaacaggtcgttcctgcctctgaacttgctgctgccatgaagcagattaaagaactccagcgcctgctc

SEQ ID NO: 499984 - DNA, 75 bp, synthetic construct
  source 1..75: mol_type = other DNA
tggctcagccgtttacgcgaagcgaatgttcccgtcattctctgtagcagtaaaacttcagcggaaatgctgtac

SEQ ID NO: 499985 - DNA, 75 bp, synthetic construct
  source 1..75: mol_type = other DNA
gattaaagaactccagcgcctgctcggaaaaaaacgatggaaaatgaactccttaaagaagccgttgaatatggg

SEQ ID NO: 499986 - DNA, 75 bp, synthetic construct
  source 1..75: mol_type = other DNA
ttgttcagcaaagttttgaaccgggaatgacagtctcccttgttgcccggcaacacggtgtggcagccagccagt

SEQ ID NO: 499987 - DNA, 75 bp, synthetic construct
  source 1..75: mol_type = other DNA
aacgcagacggcgtactacacaggaaaagatcgctattgttcagcagagctttgaaccggggatgacggtctccc

SEQ ID NO: 499988 - DNA, 75 bp, synthetic construct
  source 1..75: mol_type = other DNA
ctggcccccggcgtctatcccgacgtctcccttgctgaagccagaatcaaacgcgacgatgcccgaaaaattatc

SEQ ID NO: 499989 - DNA, 75 bp, synthetic construct
  source 1..75: mol_type = other DNA
ccactgtcacgacaggccactgacattctgctgcagctcaaaactttctccggacaataccggctggttttcccg

SEQ ID NO: 499990 - DNA, 75 bp, synthetic construct
  source 1..75: mol_type = other DNA
ggatcttgccagtgtgatgcaaggacatgaagcagtccactatccattcctcaaagccaacgaactaccggagtt

SEQ ID NO: 499991 - DNA, 75 bp, synthetic construct
  source 1..75: mol_type = other DNA
gatgcagaaatcttatcgcgcatcctggatatcattggcgatatgctaggatacgggtatcgccgtgtctgggcg

SEQ ID NO: 499992 - DNA, 75 bp, synthetic construct
  source 1..75: mol_type = other DNA
atcgcgttcatgccgaaaccgaatgtaagaacggcattgcataaccttgcagtggcgatcgagcattacaatgaa

SEQ ID NO: 499993 - DNA, 75 bp, synthetic construct
  source 1..75: mol_type = other DNA
atggaaaaagaacagaaacaatgtggcctgcagctccccttgcatcaggatgtatctctccctgtaccccgtgac

SEQ ID NO: 499994 - DNA, 75 bp, synthetic construct
  source 1..75: mol_type = other DNA
ggacgtaatgatccccgcaagacgatgagtgaagcgagtattaatcaggtttttaagcggattggatatacgggg

SEQ ID NO: 499995 - DNA, 75 bp, synthetic construct
  source 1..75: mol_type = other DNA
cgcatagccagacgggcagcattagcacgctgtatgctggcacggaattctgcaacaatatttctcgctttttct

SEQ ID NO: 499996 - DNA, 75 bp, synthetic construct
  source 1..75: mol_type = other DNA
aacgaaaaattgagaaacttagtcgtcaacaagacgcagaaaactcttttgaggctatcacgcgggagtggtatc

SEQ ID NO: 499997 - DNA, 75 bp, synthetic construct
  source 1..75: mol_type = other DNA
gtgttgctgcatccatgttgccacaacccaacgggtgccgatctcactaatgagcagtgggatgcggtgattgaa

SEQ ID NO: 499998 - DNA, 75 bp, synthetic construct
  source 1..75: mol_type = other DNA
atttggtgccggtatggaagaggatgcctacgccattcgcgccattgccagcgctggattacccgctctggtgag

SEQ ID NO: 499999 - DNA, 75 bp, synthetic construct
  source 1..75: mol_type = other DNA
agcctcatggtgcttcgctttatttaccgatggaagggcttaacagctatcgccatgccattgcgccgctgctgt

SEQ ID NO: 500000 - DNA, 75 bp, synthetic construct
  source 1..75: mol_type = other DNA
tttaccgaataatgagcgaaaataacctgttattgttacatgacaaaccatcacgacagcagcgagaacataaag

SEQ ID NO: 500001 - DNA, 75 bp, synthetic construct
  source 1..75: mol_type = other DNA
agccagccagctatttctctggcgtaagcaataccaggagggaagtcttactgctgtggctgccggagaacaggt

SEQ ID NO: 500002 - DNA, 75 bp, synthetic construct
  source 1..75: mol_type = other DNA
gaagcagattaaagaactccagcgcctgctcggcaaaaaaacgatggaaaatgaactccttaaagaagccgttga

SEQ ID NO: 500003 - DNA, 75 bp, synthetic construct
  source 1..75: mol_type = other DNA
ttactacgggcggcttcgacagtgaaacagtacaggacgtcatgctgggagcggtggtacgccccttcggcagcg

SEQ ID NO: 500004 - DNA, 75 bp, synthetic construct
  source 1..75: mol_type = other DNA
tgttcctgcctctgaacttgctgccgccatgaagcagattaaagaatctccagcgcctgctcggcaagaaaacga

SEQ ID NO: 500005 - DNA, 75 bp, synthetic construct
  source 1..75: mol_type = other DNA
tggaaaaagccagaaatgcgctcgaacagctcttttctgccgggacgttgcgtaaacgcagtagtcgttatcgtc

SEQ ID NO: 500006 - DNA, 75 bp, synthetic construct
  source 1..75: mol_type = other DNA
ggcaacacggtgtggcagccagccagttatttctctggcgcaagcaataccaggagggaagtcttactgctgtgg

SEQ ID NO: 500007 - DNA, 75 bp, synthetic construct
  source 1..75: mol_type = other DNA
ggaaaatgaactcattaaagaagccgttgaatacgggcgtgcaaaaaagtggatagcgcacgcgcccttattgcc

SEQ ID NO: 500008 - DNA, 75 bp, synthetic construct
  source 1..75: mol_type = other DNA
cgaaaaactgcgggtaacgttcgcgctggactgctgcgaccgtgaggccatagactgggcagcaagcacgggagg

SEQ ID NO: 500009 - DNA, 75 bp, synthetic construct
  source 1..75: mol_type = other DNA
gcttcagcgtttactgggtaagaaaaccatggaagttgagatcctcaaagaagcggtggagtatgcacaatcgcg

SEQ ID NO: 500010 - DNA, 75 bp, synthetic construct
  source 1..75: mol_type = other DNA
agcgcctgctcggcaaaaaaaacgatggtgctctgacgggttcgagttccgctgtgataacggagaaaaactgcg

SEQ ID NO: 500011 - DNA, 75 bp, synthetic construct
  source 1..75: mol_type = other DNA
ctcgttgcccggcaacatggtgtagcagccagccagttatttctctggcgtaagcaataccaggaaggaagtctt

SEQ ID NO: 500012 - DNA, 75 bp, synthetic construct
  source 1..75: mol_type = other DNA
aacgcagacggcgtactacacaggaaaagatcgcaattgttcagcagagttttgaaccgggaatgacggtctccc

SEQ ID NO: 500013 - DNA, 75 bp, synthetic construct
  source 1..75: mol_type = other DNA
tgacgggctttcagaatggcactttaaatatcgatgctggtggcaacgttactgttaatcaaggcagttttgctg

SEQ ID NO: 500014 - DNA, 75 bp, synthetic construct
  source 1..75: mol_type = other DNA
cgtctgcggtacgtgtggaggacggaacgctaaaaggtgaagcggagaatattattccttatgtttcttcactgt

SEQ ID NO: 500015 - DNA, 75 bp, synthetic construct
  source 1..75: mol_type = other DNA
tctcggcttaagtgaagttacctttgatattgccgacggaaaaacgctggttattggcaatacagagaatgacgg

SEQ ID NO: 500016 - DNA, 75 bp, synthetic construct
  source 1..75: mol_type = other DNA
cgtggtaattaatcccattacgggtattggtgagccgacatctacaggcattaaagtggttgatttcgcagctga

SEQ ID NO: 500017 - DNA, 75 bp, synthetic construct
  source 1..75: mol_type = other DNA
caactccctgatgaatgtcggcgatacgcattgccaggacgatccgcaagactgctacggtctgacgatagggag

SEQ ID NO: 500018 - DNA, 75 bp, synthetic construct
  source 1..75: mol_type = other DNA
gtgtcgaagaaggcaccctgaaaggcgatgttgcggatatctttccttatgcttcgtcactgtgggtcggtgatg

SEQ ID NO: 500019 - DNA, 75 bp, synthetic construct
  source 1..75: mol_type = other DNA
gcgcgctgctggcaacctggatgcgtgggctggaaaacgacgtttacttccaggtgggtttattaacggtcattg

SEQ ID NO: 500020 - DNA, 75 bp, synthetic construct
  source 1..75: mol_type = other DNA
ttggcggcacgaccggagctatctatcgccagttctctattaccattgttgcggcgatggtgctgtcggtgctgg

SEQ ID NO: 500021 - DNA, 75 bp, synthetic construct
  source 1..75: mol_type = other DNA
gtacggcgatggatattatggaatcgttagtgaagcagttgccaaacggctttggtctggagtggacggcgatgt

SEQ ID NO: 500022 - DNA, 75 bp, synthetic construct
  source 1..75: mol_type = other DNA
attgaaaacggtgaagttaccctgggtcgcagcaactccctgatgaatgtcggcgatacgcattgccaggacgat

SEQ ID NO: 500023 - DNA, 75 bp, synthetic construct
  source 1..75: mol_type = other DNA
ataaataacactgcctttacaaataacactgccgaaggttatggcggggcgatatataccaatagcgcgacggct

SEQ ID NO: 500024 - DNA, 75 bp, synthetic construct
  source 1..75: mol_type = other DNA
ctatatcgttggatattacagcgcactaagaccgcacgaatataatggtgggttaccaccaaacgaatcagaaaa

SEQ ID NO: 500025 - DNA, 75 bp, synthetic construct
  source 1..75: mol_type = other DNA
gataatcaacaaagcagtgcgatggaaattaccgccgacgttgacacccgctcagagacgacaggtcatggtcgg

SEQ ID NO: 500026 - DNA, 75 bp, synthetic construct
  source 1..75: mol_type = other DNA
acgtgtttgccgaatctgctcgagcgtcagttcgctgtaccggagccagacagggtatggtgcggagatattacg

SEQ ID NO: 500027 - DNA, 75 bp, synthetic construct
  source 1..75: mol_type = other DNA
ggagcatcgcggatgggcaatggttgattttttcgggtatggccaataatgccagcggtggcgcagtatttttgc

SEQ ID NO: 500028 - DNA, 75 bp, synthetic construct
  source 1..75: mol_type = other DNA
ttcgggtatggccaataatgccagcggtggcgccgtatttttgcagcaaagtgctgaatttacgatatcaccaca

SEQ ID NO: 500029 - DNA, 75 bp, synthetic construct
  source 1..75: mol_type = other DNA
acgagtgggcaccagtgactggttactttagccttaacgaaggtgtccatacaataacagagtatataattgaat

SEQ ID NO: 500030 - DNA, 75 bp, synthetic construct
  source 1..75: mol_type = other DNA
caaatcaggtgtggtgcggtgatgttacttatagtgtgcccggagttcagggcgggcatggatgcttaaatgaac

SEQ ID NO: 500031 - DNA, 75 bp, synthetic construct
  source 1..75: mol_type = other DNA
gcccggcggggtgatgttccacagcgatagtaataatgccgatgtcagtctttaccaccacttagtttgccgttt

SEQ ID NO: 500032 - DNA, 75 bp, synthetic construct
  source 1..75: mol_type = other DNA
gcagtcagcggcagcggcggtacggttatcggcagtcaggatgtggtggatctcgcaggtggcgacaatttgcat

SEQ ID NO: 500033 - DNA, 75 bp, synthetic construct
  source 1..75: mol_type = other DNA
gatgatattcagacgcggctgggtttacacagcgaatggcgtaccgcggttggtgtcacaccaacattagatctg

SEQ ID NO: 500034 - DNA, 75 bp, synthetic construct
  source 1..75: mol_type = other DNA
ttcagaggcagcaggtcacgggcgtgatattgaaatgcgcgccgacggtgaagtggcagttgatgcgggggtaga

SEQ ID NO: 500035 - DNA, 75 bp, synthetic construct
  source 1..75: mol_type = other DNA
ggagtgtcgccgatgggcaatggctggttttttcggatatgaccaataacgccagcggaggagccgtatttttgc

SEQ ID NO: 500036 - DNA, 75 bp, synthetic construct
  source 1..75: mol_type = other DNA
gcttcgtcactgtgggtcggtgatggggcgacgttcgttactggcgcggatcaggatattcagtcaattgatgct

SEQ ID NO: 500037 - DNA, 75 bp, synthetic construct
  source 1..75: mol_type = other DNA
tggctacgtcaatatgggagcgtatgactacacgctggtggaagataacaacgactggtatctgcgatcgcaaga

SEQ ID NO: 500038 - DNA, 75 bp, synthetic construct
  source 1..75: mol_type = other DNA
tctgcgggttttgatatggagttgcaggaccacgctggagcaggtcacgatgcgctgatggcagcacgtaaccag

SEQ ID NO: 500039 - DNA, 75 bp, synthetic construct
  source 1..75: mol_type = other DNA
cggttggctgggcgatgtcatttttcccggactctgtactgacaacgaaagcgctgtccatggcctgggaagcgc

SEQ ID NO: 500040 - DNA, 75 bp, synthetic construct
  source 1..75: mol_type = other DNA
aacagtgagttgccacaaaacgaatcagaaaatagatactggaaaaaatctaatgcagtggtcagttttagttgg

SEQ ID NO: 500041 - DNA, 75 bp, synthetic construct
  source 1..75: mol_type = other DNA
tataaacgaggtggtcgtgaacatgtcactatcccgaatcaccttgggcggcagttcgcagtgacagagccaaat

SEQ ID NO: 500042 - DNA, 75 bp, synthetic construct
  source 1..75: mol_type = other DNA
cggcaggccatttgtagttacgctgcccgggcggcggaaaaacttcgcagcgagcatcaatattgtcggtttatc

SEQ ID NO: 500043 - DNA, 75 bp, synthetic construct
  source 1..75: mol_type = other DNA
aaactcgcgtttatgacggaaaagtcagcgatgactatggactactgcaatggcgacgaaacctcgccatcccag

SEQ ID NO: 500044 - DNA, 75 bp, synthetic construct
  source 1..75: mol_type = other DNA
aacaacatccggccgttgcaccgctgatcgcgggtggcaagctggtggaatattccgctcacgtagtgccggaag

SEQ ID NO: 500045 - DNA, 75 bp, synthetic construct
  source 1..75: mol_type = other DNA
catcttaaccataagataatgatcgcgtttatcgatctggataacttcaaattaatcaatgaccgttttggtcat

SEQ ID NO: 500046 - DNA, 75 bp, synthetic construct
  source 1..75: mol_type = other DNA
gttacgattttccgtgcatctttccgctggaaaggttcgttaaagagttcactttcgttagctgggggctgaaag

SEQ ID NO: 500047 - DNA, 75 bp, synthetic construct
  source 1..75: mol_type = other DNA
ggtgtggtgcggtgatgtgacctatatctggacgggtaagcgctgggcgtacctcgccgttgttctcgacctgtt

SEQ ID NO: 500048 - DNA, 75 bp, synthetic construct
  source 1..75: mol_type = other DNA
cgcactaagaccgcacgaatataacggtgggttacccccaaacgaatcggaaaatcgatactggaaaaactctaa

SEQ ID NO: 500049 - DNA, 75 bp, synthetic construct
  source 1..75: mol_type = other DNA
tcaggcagagtatgagccgtcgcagaaactgctgggataacagcccaatggagcgcttcttccggagtctgaaga

SEQ ID NO: 500050 - DNA, 75 bp, synthetic construct
  source 1..75: mol_type = other DNA
agctccggatgtatggtgatgaacggattgcagagccgttgcgatacagggataaggtgaagggaaggcgcaaaa

SEQ ID NO: 500051 - DNA, 75 bp, synthetic construct
  source 1..75: mol_type = other DNA
gctctccccgtggatgaagtctgggggattggacggcggatcagcaaaaaactggacgcgatggggatcaaaacc

SEQ ID NO: 500052 - DNA, 75 bp, synthetic construct
  source 1..75: mol_type = other DNA
tgcataacatcagccatggctctgctggcgcaagaagtatcgcgattatggcaaccctgaaaggcttcagaatgg

SEQ ID NO: 500053 - DNA, 75 bp, synthetic construct
  source 1..75: mol_type = other DNA
gttcgcagtgacagagcctaatcaggtatggtgcggcgatgtgacgtatagtgtgcccggagttcagggcgggca

SEQ ID NO: 500054 - DNA, 75 bp, synthetic construct
  source 1..75: mol_type = other DNA
gcggtatttgtgccaatggccttcttcggcggcaccaccggagctatctatcgccagttctctattaccattgtt

SEQ ID NO: 500055 - DNA, 75 bp, synthetic construct
  source 1..75: mol_type = other DNA
cgaatataacggtggattacccccaaacgaatcggaaaatcgatactggaaaaactctaactcggtggccagttt

SEQ ID NO: 500056 - DNA, 75 bp, synthetic construct
  source 1..75: mol_type = other DNA
cgacagttcgccgtaacggaaccaaatcaggtgtggtgcggtgatgtgacctatagtgtgcccggagttcagggc

SEQ ID NO: 500057 - DNA, 75 bp, synthetic construct
  source 1..75: mol_type = other DNA
cgaatataacggtgggttgccaccaaatgaatctgaaaaccgatactggaaaaactctaaagcggtggccagttt

SEQ ID NO: 500058 - DNA, 75 bp, synthetic construct
  source 1..75: mol_type = other DNA
gcagagtatgagtcggcgtggaaactgctgggataacagcccaatggagcgcttcttcaggagtctgaagaacga

SEQ ID NO: 500059 - DNA, 75 bp, synthetic construct
  source 1..75: mol_type = other DNA
atcttactgttggtgtggggatcgcccagaccaaaacgctggctaagcttgccaatcatgcggcaaaaaaatggc

SEQ ID NO: 500060 - DNA, 75 bp, synthetic construct
  source 1..75: mol_type = other DNA
catcttgagcgacagttcgccgtaacggaaccaaatcaggtgtggtgcggtgatgtgacctatatctggacgggt

SEQ ID NO: 500061 - DNA, 75 bp, synthetic construct
  source 1..75: mol_type = other DNA
gtctgttatttcatggatgagttatccgtacgacttgctgacggggtctgaatcgctttttttgtatataatgcg

SEQ ID NO: 500062 - DNA, 75 bp, synthetic construct
  source 1..75: mol_type = other DNA
ccgggtgtggttactgttggtctgtttgccaaccgtggcgcggacgtcgcgctgattggcacgcctgacggcgtt

SEQ ID NO: 500063 - DNA, 75 bp, synthetic construct
  source 1..75: mol_type = other DNA
tggtgccacttttagcgctaaaactgacttgattgatggcacgaatatactgccgttccaggctcgttatattgc

SEQ ID NO: 500064 - DNA, 75 bp, synthetic construct
  source 1..75: mol_type = other DNA
gatggcacgaatatactgccattccaggctcgttatattgctctcgggcagtccgtagctggtactgcaaacgct

SEQ ID NO: 500065 - DNA, 75 bp, synthetic construct
  source 1..75: mol_type = other DNA
ggctctgcccaaaatgtcggtattcaaattttggaccgtacgggtgaggtattaatacttgatggggccactttt

SEQ ID NO: 500066 - DNA, 75 bp, synthetic construct
  source 1..75: mol_type = other DNA
tacgtaatcgcgtcgaaggtttacgtttgggcggctcgatgctgatgcaagggctgattagcgcagaacaactgg

SEQ ID NO: 500067 - DNA, 75 bp, synthetic construct
  source 1..75: mol_type = other DNA
gcatggttaatgaccctgctgtggctaaactttggcttgatggttaaccgcatcgtgcagcgggtgattttcgtc

SEQ ID NO: 500068 - DNA, 75 bp, synthetic construct
  source 1..75: mol_type = other DNA
atcacccagtttgaacgtagcgccaatttcgcttttgctggttttattctgcatgacgccgaagatgtgatttca

SEQ ID NO: 500069 - DNA, 75 bp, synthetic construct
  source 1..75: mol_type = other DNA
tcattttctttgtcctgaatgacaaagaagaggcaccgtccgttgaggtgaaaaaagaagacggagcatcgcaaa

SEQ ID NO: 500070 - DNA, 75 bp, synthetic construct
  source 1..75: mol_type = other DNA
ttcttctcgcctggctaaagcgggtgacctcagctccgccgttggcttcaatatcaagctgaatgattgtgatac

SEQ ID NO: 500071 - DNA, 75 bp, synthetic construct
  source 1..75: mol_type = other DNA
gtaatgacgatacattagcgctgcagaggcttgccatagcaccattgccaacgcagctgtcgcacttggtgcgac

SEQ ID NO: 500072 - DNA, 75 bp, synthetic construct
  source 1..75: mol_type = other DNA
gtgttattcattttaaaggtgaagtggtaaatgccgcttgtgcaattgattcagaatcaatgaaccaaacggttg

SEQ ID NO: 500073 - DNA, 75 bp, synthetic construct
  source 1..75: mol_type = other DNA
ggtcaaaaatgaagagaaaaatgccagtgagacaggctcgatttattcttccatgactctgaaagatttcagtaa

SEQ ID NO: 500074 - DNA, 75 bp, synthetic construct
  source 1..75: mol_type = other DNA
ttcgtcgaatagttacactgacagcaaaatcagtgacacgaagacagaactgaacgccagtatcgacaaggcaaa

SEQ ID NO: 500075 - DNA, 75 bp, synthetic construct
  source 1..75: mol_type = other DNA
cggtttacgtcactggtatgcgcgtcgtcgcggttatgacccacgagcaatgttgcacaatgcggttcagcagca

SEQ ID NO: 500076 - DNA, 75 bp, synthetic construct
  source 1..75: mol_type = other DNA
ctgattgatgatgcctcattccagtccacgttagatgttaagcgtcaatataccatcggcgaagatggcgtaatt

SEQ ID NO: 500077 - DNA, 75 bp, synthetic construct
  source 1..75: mol_type = other DNA
ccagtttatgcagaattactattctgtcgaaattcttcctgtcagcatggatggcagaccatttacaaaatgggt

SEQ ID NO: 500078 - DNA, 75 bp, synthetic construct
  source 1..75: mol_type = other DNA
cgagcaaccagatgttccgcaacacgcgtcttataccgtattgcgtaatcgtctggacccgtggttgatggaaca

SEQ ID NO: 500079 - DNA, 75 bp, synthetic construct
  source 1..75: mol_type = other DNA
ggatcgctgcgcatgcaaagttaccgtctgttggcggcagtgccattaagcgagaaagacaagcccttaattaaa

SEQ ID NO: 500080 - DNA, 75 bp, synthetic construct
  source 1..75: mol_type = other DNA
tgaaagccgccattagttcgttgctggtgctttccactatgagcctggcggatacgcagaaagttgagaacacac

SEQ ID NO: 500081 - DNA, 75 bp, synthetic construct
  source 1..75: mol_type = other DNA
gcgcagattattgatcaatttaaaattcgcgaagtgccaactattttccttgtgtcgaaagacgggtcatcagcg

SEQ ID NO: 500082 - DNA, 75 bp, synthetic construct
  source 1..75: mol_type = other DNA
tatgaaagtttgtggcccaatgcctggcatttcctttctatttttagcggcagcgcatggttaatgaccctgctg

SEQ ID NO: 500083 - DNA, 75 bp, synthetic construct
  source 1..75: mol_type = other DNA
ggtgcgtgaagccctcgccggacaagtgcccagcgcaggcgtcggcacctgtttcagccgccgcgccgtgaccgc

SEQ ID NO: 500084 - DNA, 75 bp, synthetic construct
  source 1..75: mol_type = other DNA
tctgcaattaacgtgttgttattgcgccatgaacgcagctcactgccgctcggtaaatttttggtcaccgaaggc

SEQ ID NO: 500085 - DNA, 75 bp, synthetic construct
  source 1..75: mol_type = other DNA
gcatcagcagcagtgggagcacagagcgggaagaatgctgttgagaataatgcgttgtctgagcttgtgccgcct

SEQ ID NO: 500086 - DNA, 75 bp, synthetic construct
  source 1..75: mol_type = other DNA
cgattgccggaatgctgtatccgggagtgaagcagtcagacctcagtgaagagcagaagcagacgataagtacgc

SEQ ID NO: 500087 - DNA, 75 bp, synthetic construct
  source 1..75: mol_type = other DNA
gatgtacggtaagccggtgagtgaactgagcgagacagagaagcagactgtttcgacactggcaacggttgctgc

SEQ ID NO: 500088 - DNA, 75 bp, synthetic construct
  source 1..75: mol_type = other DNA
gcgttacccactcgcgcaaaacccgaaaaattcaaacgctaattgtcttaccaatcagctctggaaacaaggaaa

SEQ ID NO: 500089 - DNA, 75 bp, synthetic construct
  source 1..75: mol_type = other DNA
aggtaagcaaaaccgccacggcgatgagcgtgattgaaaacttaccgccaggaaacgcagaactgcgtcaggcta

SEQ ID NO: 500090 - DNA, 75 bp, synthetic construct
  source 1..75: mol_type = other DNA
tatttttgatatgttgcaggccagtcgcgatccgtcggtcgttccgtttgcctcggcctttcccgacccgcgact

SEQ ID NO: 500091 - DNA, 75 bp, synthetic construct
  source 1..75: mol_type = other DNA
gctggttttaaatccgcaatgcaaattcaggacaacaaagcgcgggacgaggccttacaaagtctggctaaaaac

SEQ ID NO: 500092 - DNA, 75 bp, synthetic construct
  source 1..75: mol_type = other DNA
gatacgacgcccatcttcgtcgcctgcgtcgccagcttgcggaacgtaaacaacgtgcctggcaggcactgctgc

SEQ ID NO: 500093 - DNA, 75 bp, synthetic construct
  source 1..75: mol_type = other DNA
gtaaacaacgtgcctggcaggcactgctgcgttatctgcctgcggaagtgaaaattcatcataatgacagcggtt

SEQ ID NO: 500094 - DNA, 75 bp, synthetic construct
  source 1..75: mol_type = other DNA
tgtcagccatgcctatcagttgctcgaaagtcagggacatattatcgcgcgaccgcagtcgggttattacgttgc

SEQ ID NO: 500095 - DNA, 75 bp, synthetic construct
  source 1..75: mol_type = other DNA
gcggtaaactccgctggctggtgacaggctttggtgccgtcgccagaggagccagaacactggggggggtgctct

SEQ ID NO: 500096 - DNA, 75 bp, synthetic construct
  source 1..75: mol_type = other DNA
aaaataatcctcattaccgtatgatcggaaaaaactgtgcggatattgttggcagagtacttactgaaggtgctt

SEQ ID NO: 500097 - DNA, 75 bp, synthetic construct
  source 1..75: mol_type = other DNA
attatcgaattgagtaacgattttataaaatatgtcatcgcacatgcagattatccgggtaatgaatatcacttt

SEQ ID NO: 500098 - DNA, 75 bp, synthetic construct
  source 1..75: mol_type = other DNA
aaactgctggttaactggtctccggctggtctgctttataaagcctttgcggctgcgctgaaatatctcggcgtt

SEQ ID NO: 500099 - DNA, 75 bp, synthetic construct
  source 1..75: mol_type = other DNA
gagtcgctcaaaaccaccgtcacagatatgggcgacagcgtcggcggttggttcaaggaaaagctgggcattcat

SEQ ID NO: 500100 - DNA, 75 bp, synthetic construct
  source 1..75: mol_type = other DNA
acgtcagaacgctttaacccgtgcaacagaacgttatggtcagttgggttcttcccggatgcagcgtctcaacag

SEQ ID NO: 500101 - DNA, 75 bp, synthetic construct
  source 1..75: mol_type = other DNA
gcaacacgcacgtctgctcaggactgggcaaaagtggccgcagtctggcaaaactccctgaaaggtgcggccaga

SEQ ID NO: 500102 - DNA, 75 bp, synthetic construct
  source 1..75: mol_type = other DNA
acttttagtgctaaaaccgacttgattgatggcacgaatatactgccattccaggctcgttatattgctctcggg

SEQ ID NO: 500103 - DNA, 75 bp, synthetic construct
  source 1..75: mol_type = other DNA
ggcagcctcgttcgcggttttatgagcgctgcacgtgccgttctctggattgggcgagcgctgatgatgaatccc

SEQ ID NO: 500104 - DNA, 75 bp, synthetic construct
  source 1..75: mol_type = other DNA
ttcaggccgtggtgcagctgcaaccggcggtggaacgtctggtggtatccaggtcagctttaatcctcagttttt

SEQ ID NO: 500105 - DNA, 75 bp, synthetic construct
  source 1..75: mol_type = other DNA
acgggctttcgcactttgatgccctgaaagataacgtccggatctcgctgatgcacacgcgcctgtttttcggca

SEQ ID NO: 500106 - DNA, 75 bp, synthetic construct
  source 1..75: mol_type = other DNA
atgtcggtaaacttttctccctgcgtgttgatcccctgctacaaccacggtgcgatgatgccgggcgtgctggcg

SEQ ID NO: 500107 - DNA, 75 bp, synthetic construct
  source 1..75: mol_type = other DNA
ccaggctcgttatattgctctcgggcagtccgtagctggtactgcaaacgctgatgcgaccttcaaagttcaata

SEQ ID NO: 500108 - DNA, 75 bp, synthetic construct
  source 1..75: mol_type = other DNA
atcctggacagaacgggtgctgcgctggcgctggacggtgcgacatttagttcagaaacaaccctgaataacgga

SEQ ID NO: 500109 - DNA, 75 bp, synthetic construct
  source 1..75: mol_type = other DNA
cgcgcagggggccgccattggcctgcagcggaccactccgcttgcagctctggccgggcagcgaatggccagtga

SEQ ID NO: 500110 - DNA, 75 bp, synthetic construct
  source 1..75: mol_type = other DNA
ggtttaaacagcgctgggcagacattcaggaagcctttaacggcggcattgtgggaattggtaagttactgatta

SEQ ID NO: 500111 - DNA, 75 bp, synthetic construct
  source 1..75: mol_type = other DNA
ggctattacgctgggcgatcagctcgccccctcttttatttctctgactcaggagctgatcccactcattcaggg

SEQ ID NO: 500112 - DNA, 75 bp, synthetic construct
  source 1..75: mol_type = other DNA
ctccagatagcaaaaatcggtgcaggttccaccgacgaagcagccaataattttaaaaactttcttaccaaaatt

SEQ ID NO: 500113 - DNA, 75 bp, synthetic construct
  source 1..75: mol_type = other DNA
taagatagcgactgttggtctcaaactggggctgaatctccttatttccccctttgtaagtgtctggaaaaatgc

SEQ ID NO: 500114 - DNA, 75 bp, synthetic construct
  source 1..75: mol_type = other DNA
aacgcagttaccattcgacgctgaacacaaccaacaaagttattataaaacaacatgttattcaacaccatcgga

SEQ ID NO: 500115 - DNA, 75 bp, synthetic construct
  source 1..75: mol_type = other DNA
gattgagaagaacgtgcaggattcccgccaacgcctgtggcaaggggcaccagactttcaaagccttgctgattt

SEQ ID NO: 500116 - DNA, 75 bp, synthetic construct
  source 1..75: mol_type = other DNA
gtgccaccatcgctcgttttttgtaccgtggtgccagtgccaccatcgctcgttttttgtaccgtggtggcagtg

SEQ ID NO: 500117 - DNA, 75 bp, synthetic construct
  source 1..75: mol_type = other DNA
tgtgtggtgtggcaggagaagtagtgattggcaactcattgtgtaatgagcgacgccgggtgctgctgacgcccg

SEQ ID NO: 500118 - DNA, 75 bp, synthetic construct
  source 1..75: mol_type = other DNA
cagtatgattctggctatggctgacaccctgaaccgttcggggtatccggcataccgcaggatgtgggtgtcagc

SEQ ID NO: 500119 - DNA, 75 bp, synthetic construct
  source 1..75: mol_type = other DNA
cgacgccgggtgctgctgacgcccgggcattacctcggaaactggtcatatcgtctgcgtcattctcaggagcag

SEQ ID NO: 500120 - DNA, 75 bp, synthetic construct
  source 1..75: mol_type = other DNA
atgattgcgattgccgacatcttgcaagcaggagaaaaactaactgctgtggcaccttttctggcggatattcag

SEQ ID NO: 500121 - DNA, 75 bp, synthetic construct
  source 1..75: mol_type = other DNA
atgattgcgctttccaacatcttgcaggcaggagaacagctaaccgctgtggcaccttttctggcgggtattcag

SEQ ID NO: 500122 - DNA, 75 bp, synthetic construct
  source 1..75: mol_type = other DNA
atgcacctgataactcaaaaagcattgaaagatgctgcggaaaaatacccgcaacataaaacggagttggtggct

SEQ ID NO: 500123 - DNA, 75 bp, synthetic construct
  source 1..75: mol_type = other DNA
gacaccgccacccgagccagtccctgtggcagcacatctgcaactgagcattgaacccatcagcgataccagccg

SEQ ID NO: 500124 - DNA, 69 bp, synthetic construct
  source 1..69: mol_type = other DNA
atgcgttttcatccgctggctgagcgcgtggccctaaatggctgtaattatgttaacctgtcgggcgcc

SEQ ID NO: 500125 - DNA, 75 bp, synthetic construct
  source 1..75: mol_type = other DNA
atgcgttttcacccgctggctgagcgcgtggccctaaacggcagtaattatgttaacctgtcggccatctcagat

SEQ ID NO: 500126 - DNA, 75 bp, synthetic construct
  source 1..75: mol_type = other DNA
cgacgccgggtgctgctgacgcccgggcattacttcggaaactggtcatatcgcctgcgtcattctcaggagcag

SEQ ID NO: 500127 - DNA, 75 bp, synthetic construct
  source 1..75: mol_type = other DNA
cgatgttgtaggtaacaaaagtcagatcatgagtgctctgacaacatttcttgagtttaatgaaacaccagaacc

SEQ ID NO: 500128 - DNA, 75 bp, synthetic construct
  source 1..75: mol_type = other DNA
atgacgctgtcgtattgggaaaggcacttggcatatctcctcctgagctcctctttggagaacaggaatcttctg

SEQ ID NO: 500129 - DNA, 75 bp, synthetic construct
  source 1..75: mol_type = other DNA
agtttgtgcgcgatgctttcctctatgagtcaaaatggccccaaatgtttcatcttttgggggaaaactgtgcag

SEQ ID NO: 500130 - DNA, 75 bp, synthetic construct
  source 1..75: mol_type = other DNA
gcagggctataacaccgcgtggatagaaacgcagcttgcacacgttgataagaactcaattcgtggcacgtacaa

SEQ ID NO: 500131 - DNA, 75 bp, synthetic construct
  source 1..75: mol_type = other DNA
cggtacgcaataattaccggacgcgctgaatataaccccgctcctgatctggcaagcgcatttgcaccacacaaa

SEQ ID NO: 500132 - DNA, 75 bp, synthetic construct
  source 1..75: mol_type = other DNA
ggaacgagtatgaattaatgattcagaccagcaccccgccttcaatacttttcgctaactttcatgaacctgccg

SEQ ID NO: 500133 - DNA, 75 bp, synthetic construct
  source 1..75: mol_type = other DNA
aagcttttattttgctgtttaatcagactgcccgttatcacaaacgtcataaggtgtttgaggactttgtcagct

SEQ ID NO: 500134 - DNA, 75 bp, synthetic construct
  source 1..75: mol_type = other DNA
gcttcagttcagtgaggcccgggaacagaagtatctgcgaatcgtcagtggttatgaaaagcaggatgttatcca

SEQ ID NO: 500135 - DNA, 75 bp, synthetic construct
  source 1..75: mol_type = other DNA
cggcgccgggtgctgctgacgcccgggcattacctcggaaactggtcatatcgtctgcgccatgctcaagaacag

SEQ ID NO: 500136 - DNA, 75 bp, synthetic construct
  source 1..75: mol_type = other DNA
agaaggcgatggcgaaagagctaaacgaaaagcatccagaatggtgcttgcggacttgtgagagcaggatcgatg

SEQ ID NO: 500137 - DNA, 75 bp, synthetic construct
  source 1..75: mol_type = other DNA
ctatcaatgatgctctgcgcagaatgaagaaatcaggaatcaccaagcctgaacttgaagcgtaccttcgtgaaa

SEQ ID NO: 500138 - DNA, 75 bp, synthetic construct
  source 1..75: mol_type = other DNA
aacggatattgacccgctggcagccggcatggcgtatatacaactgtcgttgtgtggtgtggccggagaagtggt

SEQ ID NO: 500139 - DNA, 75 bp, synthetic construct
  source 1..75: mol_type = other DNA
acagtgatggcgatggaggggcaatcgatgtcaccgataataatagcgatatcacgcatccgtcaggtttcacaa

SEQ ID NO: 500140 - DNA, 75 bp, synthetic construct
  source 1..75: mol_type = other DNA
ggtgtcgatcctcgtactgctggctttgatgtagaaggatttaagaaacgttttggtgggtcttataaaacttca

SEQ ID NO: 500141 - DNA, 75 bp, synthetic construct
  source 1..75: mol_type = other DNA
atgggtgatgcatgggctaacggtggtggtattgccgatgacttagaatcggttggccttaagttagaaaactat

SEQ ID NO: 500142 - DNA, 75 bp, synthetic construct
  source 1..75: mol_type = other DNA
aaggggataataaaggtctaaggagaagcaccaatgaagccgccgaccttctcgatagtttgtctgaaaaggcaa

SEQ ID NO: 500143 - DNA, 75 bp, synthetic construct
  source 1..75: mol_type = other DNA
aagtatgtgtttaagcagtcacaggcggcccttgaaagagcaggacaacttcaggatatggatgttttgtctctt

SEQ ID NO: 500144 - DNA, 75 bp, synthetic construct
  source 1..75: mol_type = other DNA
cctccgacgcctcagatatcccggaagggcaggtccgcattgcgtttgacggtgatgccgtgcttttctctgatg

SEQ ID NO: 500145 - DNA, 75 bp, synthetic construct
  source 1..75: mol_type = other DNA
tgatggaatctttagccagtgattcaagccatatgaccagccagcttgagaaatataatagtgctcaagaggcga

SEQ ID NO: 500146 - DNA, 75 bp, synthetic construct
  source 1..75: mol_type = other DNA
tgaagtcattgttacggtggcgcaaaacgataatcaggtcaaactgaccgtccaggataacggctgcggagtgtc

SEQ ID NO: 500147 - DNA, 75 bp, synthetic construct
  source 1..75: mol_type = other DNA
aattgctggcgatggcgagtgcggtaagtcaccgtgattttagccagcgggcacatatcagcggtcgcaatgaaa

SEQ ID NO: 500148 - DNA, 75 bp, synthetic construct
  source 1..75: mol_type = other DNA
agcagccgcgaactgttaagtcagatccgtaacgaactgaatgcatcctgggcgcagttgcgtgaattgctcacc

SEQ ID NO: 500149 - DNA, 75 bp, synthetic construct
  source 1..75: mol_type = other DNA
ttgggaaaagaccgctttattcaacgcattaaagacttttaatgaaaggtttgaaaaagctcgccagaatatggc

SEQ ID NO: 500150 - DNA, 75 bp, synthetic construct
  source 1..75: mol_type = other DNA
gtatgtcatcagcagggtgagtgaaacagggagtattttctttgcagacggcacaccccggaaaattgattttac

SEQ ID NO: 500151 - DNA, 75 bp, synthetic construct
  source 1..75: mol_type = other DNA
aactgaccggcggaaagctgacgatgaccacgctcaggctgatggcagaggaaggccgggcgtggccgttgctgg

SEQ ID NO: 500152 - DNA, 75 bp, synthetic construct
  source 1..75: mol_type = other DNA
atgctgactactatgacgctaggggctgttggtccggataaaatgctggattatcaggacaagatggttggtcgc

SEQ ID NO: 500153 - DNA, 75 bp, synthetic construct
  source 1..75: mol_type = other DNA
gtttcagcacggtaaccagaagcagggggcctggctggatagctggctgcagtatgcgtggtttaacaatgatgt

SEQ ID NO: 500154 - DNA, 75 bp, synthetic construct
  source 1..75: mol_type = other DNA
atatccagtctattgatgcgacttccagcggcactatcgacatcagtgatggcaccgttttgcgcctgacgagtc

SEQ ID NO: 500155 - DNA, 75 bp, synthetic construct
  source 1..75: mol_type = other DNA
ctataaccgccaggttatctttaccgataagcaacaagaaagcgtgatggagattacctccgacgttgacacgcg

SEQ ID NO: 500156 - DNA, 75 bp, synthetic construct
  source 1..75: mol_type = other DNA
tactgctcgatagcgaattaaacggcgatgactcggcaagcgaccaactggtattgaacggtaatactgctggca

SEQ ID NO: 500157 - DNA, 75 bp, synthetic construct
  source 1..75: mol_type = other DNA
tggcagcgtggtgtggcagaaaggagacaatgattttgcccagacggcagggtttttgtcgatgacggtgaaatg

SEQ ID NO: 500158 - DNA, 75 bp, synthetic construct
  source 1..75: mol_type = other DNA
tcgatgagaacaatagcgcagcaggctatggagatggtccttcctctgcggcgggtggctttatgtatctcggct

SEQ ID NO: 500159 - DNA, 75 bp, synthetic construct
  source 1..75: mol_type = other DNA
aggcattaaagtggttgatttcgcagctgatcccacgcagtttcaaaacaatgcgcagttcagtctggcaggcag

SEQ ID NO: 500160 - DNA, 75 bp, synthetic construct
  source 1..75: mol_type = other DNA
taatgacggcaaaggtggtgcaatttataccatcaataatgatatctatttaagtgatgatgtttttaacaataa

SEQ ID NO: 500161 - DNA, 75 bp, synthetic construct
  source 1..75: mol_type = other DNA
tgaactggcagcctacaaaaaaatggcaaatgcatttctggcctttagcaataagcaaatagaggatttgatcga

SEQ ID NO: 500162 - DNA, 75 bp, synthetic construct
  source 1..75: mol_type = other DNA
cgctgaccggcgatattgtggtggaagatggcgcaatgctctcgctgacgggaaacgcggcggacctggcggcga

SEQ ID NO: 500163 - DNA, 75 bp, synthetic construct
  source 1..75: mol_type = other DNA
catcgattcaagccaggtcagatttgatatcgcggccaataaaactctggtcatcggtaacctgagtaacgatgg

SEQ ID NO: 500164 - DNA, 75 bp, synthetic construct
  source 1..75: mol_type = other DNA
ggcaaatcaggcgtttatgatggagcgacgcgatcacgcaggtggcgatggtcagacgctgaatttacgtgttat

SEQ ID NO: 500165 - DNA, 75 bp, synthetic construct
  source 1..75: mol_type = other DNA
actataacggtggattacctccaaacgaatcggaaaaccgatactggaaaaactctaaaaccgtggccagtttta

SEQ ID NO: 500166 - DNA, 75 bp, synthetic construct
  source 1..75: mol_type = other DNA
ttgggattgccggacgaactgtcgcgctttacgccattctgtctggcgctgccgattatcgcgctggcctggcac

SEQ ID NO: 500167 - DNA, 75 bp, synthetic construct
  source 1..75: mol_type = other DNA
gctgccgctcggtccgtcactggtttctcagccaatcaactggcgcgggcgacatctggtctggtacttgctgct

SEQ ID NO: 500168 - DNA, 75 bp, synthetic construct
  source 1..75: mol_type = other DNA
ttactattattgcctgcttttttatcttctctgccgcgtggttttgtctgtggagtatcagcctgcatctggttg

SEQ ID NO: 500169 - DNA, 75 bp, synthetic construct
  source 1..75: mol_type = other DNA
ttgctgggggctatggcggagcaatctattctgccggtaccaacgatactggtgtcgccgatttacgtatcacta

SEQ ID NO: 500170 - DNA, 75 bp, synthetic construct
  source 1..75: mol_type = other DNA
cttgctgctgtttgttatcagtctctggctccagttgggattgccggacgaactgtcgcgctttacgccattctg

SEQ ID NO: 500171 - DNA, 75 bp, synthetic construct
  source 1..75: mol_type = other DNA
ctgatgttgcaatgcccgcgcggatactggcccgtattgctgggcgcggaatggttgctgatttactggttgatg

SEQ ID NO: 500172 - DNA, 75 bp, synthetic construct
  source 1..75: mol_type = other DNA
ttaaggagcgggtgatccgtaacagtctgcggccccctgccgtgcccggtatcggacgcaccgagaaatacggaa

SEQ ID NO: 500173 - DNA, 75 bp, synthetic construct
  source 1..75: mol_type = other DNA
ttaaggagcgggtgatccgtaacagtctgcggccccctgccgtgcccggtatcggacgcacagagaaatacggca

SEQ ID NO: 500174 - DNA, 75 bp, synthetic construct
  source 1..75: mol_type = other DNA
gactaccattggttcttatagaggctaaatcttttggattagcagcagtcgcttttgattgtaaaacaggtcctg

SEQ ID NO: 500175 - DNA, 75 bp, synthetic construct
  source 1..75: mol_type = other DNA
gtaatgttgcaggaggctatggcggagcaatctattctgccggtaccaatgataccggtgccgccgatttacgtg

SEQ ID NO: 500176 - DNA, 75 bp, synthetic construct
  source 1..75: mol_type = other DNA
ttaaggagcgggtgatccgcaacagtctgcggccccctgccgtgcccggtatcggacgcacggagaaatacggta

SEQ ID NO: 500177 - DNA, 75 bp, synthetic construct
  source 1..75: mol_type = other DNA
ttaaggagcgggtgatccgcaacagtctgcggccccctgccgtgcccggtatcggacgcactgagaaatacggga

SEQ ID NO: 500178 - DNA, 75 bp, synthetic construct
  source 1..75: mol_type = other DNA
gagatgggccggaaaatggatgcctttaaggcgcgggtgatccgcaacagcctgcggccccctgccgtgcccggt

SEQ ID NO: 500179 - DNA, 75 bp, synthetic construct
  source 1..75: mol_type = other DNA
ttcatcaacggcgatgatccggcgcaggtggcatggatgaaacgccagacgcctcccacactggagagcaaaatt

SEQ ID NO: 500180 - DNA, 75 bp, synthetic construct
  source 1..75: mol_type = other DNA
tgctgatatgggggcagagtgtgtccgcagccgatcttggcacctggggggatttgtggccggtaaaggagccgg

SEQ ID NO: 500181 - DNA, 75 bp, synthetic construct
  source 1..75: mol_type = other DNA
aaatgccggtggttccactgcacggttggttgccagatgcccactcccaggcaccgactgccggttccgttgacc

SEQ ID NO: 500182 - DNA, 75 bp, synthetic construct
  source 1..75: mol_type = other DNA
gttcgagcgcgccctgatccgcgagcgtcagcgcgagggtattgcgctcgccaagcaacgcggggcttaccgtgg

SEQ ID NO: 500183 - DNA, 75 bp, synthetic construct
  source 1..75: mol_type = other DNA
aggttccggcacgggtgacagccgcctccggcgaacgttttctgaaagtggagtttataccggcagaggaggcca

SEQ ID NO: 500184 - DNA, 75 bp, synthetic construct
  source 1..75: mol_type = other DNA
tgtttactttgaccagaacggtgcgctctgccagcgtctcggcattgatcaggttccggcacgggtgacagccgc

SEQ ID NO: 500185 - DNA, 75 bp, synthetic construct
  source 1..75: mol_type = other DNA
ggcaatgcccgggtggagccgaaaggtaacgccatccttattaccaaacaggccagcgggcgggggaaaattgac

SEQ ID NO: 500186 - DNA, 75 bp, synthetic construct
  source 1..75: mol_type = other DNA
aactgcagtacgcccgggatgtgcgtgacggcaaaattcatgatccgcactttctgccggtgatttttgagcatc

SEQ ID NO: 500187 - DNA, 75 bp, synthetic construct
  source 1..75: mol_type = other DNA
tctggatgacctctgtcaggtgcagacacatatccggaccatcacccacagggtgacggacaccacccttaaggt

SEQ ID NO: 500188 - DNA, 75 bp, synthetic construct
  source 1..75: mol_type = other DNA
ttccctttattggcggcttcctgtgctggcagaccgaacactttgacgtcaaggtgccacgctggatcgcgctga

SEQ ID NO: 500189 - DNA, 75 bp, synthetic construct
  source 1..75: mol_type = other DNA
tcggcggcgggtctgtttattctctgcggtcagctctatgaacgtatccatacccgcgacatgcgcatgatgggc

SEQ ID NO: 500190 - DNA, 75 bp, synthetic construct
  source 1..75: mol_type = other DNA
tatttactttgaccagaacggtgtgctctgccagcgcctcggcattgatcaggtcccggcacgggtgagcgccgt

SEQ ID NO: 500191 - DNA, 75 bp, synthetic construct
  source 1..75: mol_type = other DNA
agaaagtcaaagaccgggctgatagcgctgatgaagagttctggggactgataatcgaaacatgcaaaaggaaaa

SEQ ID NO: 500192 - DNA, 75 bp, synthetic construct
  source 1..75: mol_type = other DNA
cgtgaacgggcgaacgggctgcttttgcaagggcaatggctggatgcgtccattcagctcaccggtgcgctgggt

SEQ ID NO: 500193 - DNA, 75 bp, synthetic construct
  source 1..75: mol_type = other DNA
aaagtcagcttcctgatgaactgggttattccttgttggcacgcagagctgacttacaggcggcgcactggtatg

SEQ ID NO: 500194 - DNA, 75 bp, synthetic construct
  source 1..75: mol_type = other DNA
gcgaaaatcaaccgcgaaggtatctggatcgaaaaactggaacacaacccaggccagtacattccacaagaactg

SEQ ID NO: 500195 - DNA, 75 bp, synthetic construct
  source 1..75: mol_type = other DNA
gaaatgccgcgtctcggctgtatcaacgttcatggttcactactgccacgctggcgcggagccgcaccgattcaa

SEQ ID NO: 500196 - DNA, 75 bp, synthetic construct
  source 1..75: mol_type = other DNA
ggagattccctaattgtaaaattgttaatgagaaaactgaaacagtactggaaatgtctggtagttataaacctg

SEQ ID NO: 500197 - DNA, 75 bp, synthetic construct
  source 1..75: mol_type = other DNA
cgatgttattccaggaatatgattttcttgagcgctttgataaagcggcgcagtgcggatttcgcgctgtagaat

SEQ ID NO: 500198 - DNA, 75 bp, synthetic construct
  source 1..75: mol_type = other DNA
tgttaactcattgctacccgttcgccacgctggcagaaacttacgagcgcgatgtgattaacaatcgtgagttga

SEQ ID NO: 500199 - DNA, 75 bp, synthetic construct
  source 1..75: mol_type = other DNA
tgttgatttggtgatgagcaacggcaaagtgctgcgctataccgatccgcgccgctttggtgcctggctgtggac

SEQ ID NO: 500200 - DNA, 75 bp, synthetic construct
  source 1..75: mol_type = other DNA
aaaccgggctatttcgctcaggaattgcaggtttacgggcgaaaaggtgagccgtgtcgggtgtgcggtacgccg

SEQ ID NO: 500201 - DNA, 75 bp, synthetic construct
  source 1..75: mol_type = other DNA
gcggcttctacctcggcagtatcggtggtccggcagctgtattggcgcagggaagtattaagagcctggaatgtg

SEQ ID NO: 500202 - DNA, 75 bp, synthetic construct
  source 1..75: mol_type = other DNA
ccgctggacatgtataaagaggtcaacaccggcacgaacctgcctgcgcaaatcgacctgtacgcggtagatggc

SEQ ID NO: 500203 - DNA, 75 bp, synthetic construct
  source 1..75: mol_type = other DNA
gcggcacgtctgctgaaactaacctgaaaactgttaagttagcgagcgctcactattacgatgaactgccgaccg

SEQ ID NO: 500204 - DNA, 75 bp, synthetic construct
  source 1..75: mol_type = other DNA
ttccctgcgtccacaagaaaaccagcaactggtcgccgatctgcaggctgatgttatggtcgtcgtcgcctatgg

SEQ ID NO: 500205 - DNA, 75 bp, synthetic construct
  source 1..75: mol_type = other DNA
tatgtgcgtcgtattcatgaggctgagttactggatcatatcggtattgacccgtcaggtgtggggcagattctg

SEQ ID NO: 500206 - DNA, 75 bp, synthetic construct
  source 1..75: mol_type = other DNA
ttacgtgaagccatcggcgggctggcttcacgtccggaagggtttgtggtgtacacaaccacccagtcgaatgaa

SEQ ID NO: 500207 - DNA, 75 bp, synthetic construct
  source 1..75: mol_type = other DNA
ggtggaaaaaggaatggcctggatccgctggcagggtagcgcctgggcagtacgggaaggtgacaggctggggaa

SEQ ID NO: 500208 - DNA, 75 bp, synthetic construct
  source 1..75: mol_type = other DNA
tcttggctgagctgaaagaacgcggatgtgctgatgaatctgctctggcgcaggttatgcagcctggatgccgaa

SEQ ID NO: 500209 - DNA, 75 bp, synthetic construct
  source 1..75: mol_type = other DNA
atgatctgtgacctctgccaggtacagacccatatccggaccatcacccaccgggtgacagacaccaccctgaag

SEQ ID NO: 500210 - DNA, 75 bp, synthetic construct
  source 1..75: mol_type = other DNA
tataggtgatgttatcgatggtcaacacagattatggggaattaaaaattcctctaatgctaaactttttgaact

SEQ ID NO: 500211 - DNA, 75 bp, synthetic construct
  source 1..75: mol_type = other DNA
cttgtcacttacgccgaaaagttgagtaaagaagaagcgcgtattgactggtcgctttcggcagcgcagcttgaa

SEQ ID NO: 500212 - DNA, 75 bp, synthetic construct
  source 1..75: mol_type = other DNA
taaaacaactggcagacggcacggcgaaaccagaagttcaggacgaaactcttgtcacttacgccgaaaagttga

SEQ ID NO: 500213 - DNA, 75 bp, synthetic construct
  source 1..75: mol_type = other DNA
cggtcattgatacggcaaccaacgctgcaccaggaacgatccttgaagccaacaaacaaggcattcaggttgcga

SEQ ID NO: 500214 - DNA, 75 bp, synthetic construct
  source 1..75: mol_type = other DNA
atgtttttagttgctcccaacaatatattaactcgggattctgaggtaagcagaaacctgtcgtgttacgaattt

SEQ ID NO: 500215 - DNA, 75 bp, synthetic construct
  source 1..75: mol_type = other DNA
gcgtcggtcattgatacggtgacaaagtctgcgccaggaacaatccttgaagccagcaaacaaggcattcaggtc

SEQ ID NO: 500216 - DNA, 75 bp, synthetic construct
  source 1..75: mol_type = other DNA
gcgtcatcttgacgcgctgttgtcttctggacataacgttgttggcgtgtttacccaacccgaccgaccagcagg

SEQ ID NO: 500217 - DNA, 75 bp, synthetic construct
  source 1..75: mol_type = other DNA
tggtgagagacgctgatgattttgtcgcagtggcaatcgccggtttcaatcagatgaaccgtggtggcccggcag

SEQ ID NO: 500218 - DNA, 75 bp, synthetic construct
  source 1..75: mol_type = other DNA
tatggcggaaatcccctcgccgctgggcaatatcaccgtgatcaacggttacttcccgcagggtgaaagccgcga

SEQ ID NO: 500219 - DNA, 75 bp, synthetic construct
  source 1..75: mol_type = other DNA
agaaaccggcatcgactatgaaatccgcagcatggaaaaaccgtccgatcacgcgcctgtgtgggcgaccttccg

SEQ ID NO: 500220 - DNA, 75 bp, synthetic construct
  source 1..75: mol_type = other DNA
ttgttaccggcgatcgaaaaagcaatgccgcctccgctggtggcccgaatgcgcagccacagttcggaatatcac

SEQ ID NO: 500221 - DNA, 75 bp, synthetic construct
  source 1..75: mol_type = other DNA
gctggaataacccaggcttattttgagttgggtatgacgtttcctgaactgtatgacgacagccatccggaagcc

SEQ ID NO: 500222 - DNA, 75 bp, synthetic construct
  source 1..75: mol_type = other DNA
tgttgcggcagcgatcgtgttgttcgatcagatgaatcgtggtggtccggcgggaaatgccgtgtggcgcattga

SEQ ID NO: 500223 - DNA, 75 bp, synthetic construct
  source 1..75: mol_type = other DNA
catcagctatttacgcgaacatatccgcgcaatgggcgaagcgattgcagatggcattccgctgatgggctacac

SEQ ID NO: 500224 - DNA, 75 bp, synthetic construct
  source 1..75: mol_type = other DNA
aatatgtcgctggcgattgccatcgcgggtgtgctggtacatccgagttttattgaactaatggcgaaagcggcc

SEQ ID NO: 500225 - DNA, 75 bp, synthetic construct
  source 1..75: mol_type = other DNA
gatatcgccctgatggcagagatgggattcaaggttttccgtacctcaattgcctggagccgcctctttccgcag

SEQ ID NO: 500226 - DNA, 75 bp, synthetic construct
  source 1..75: mol_type = other DNA
gcgcagttttatcagaacctgcaaaactacctggaaaccgaactcaagcgtgaaaatccggtgctgattatgggc

SEQ ID NO: 500227 - DNA, 75 bp, synthetic construct
  source 1..75: mol_type = other DNA
gcttgaagccatcgtcgaaaagcaccaaccggatgtgattggcctgcaggagacaaaagttcatgacgatatgtt

SEQ ID NO: 500228 - DNA, 75 bp, synthetic construct
  source 1..75: mol_type = other DNA
tgcctggagccgcctatttccgcagggcgatgaactgacgcccaaccagcagggcattgctttttaccgcacggt

SEQ ID NO: 500229 - DNA, 75 bp, synthetic construct
  source 1..75: mol_type = other DNA
ctgccgacgcggtgttccagcaatttggcggtggtgatgtcagcggaacgttgcaggatatcgacctgattatgg

SEQ ID NO: 500230 - DNA, 75 bp, synthetic construct
  source 1..75: mol_type = other DNA
gcgcaatccaggtgaagggcgttaacccgcaacaggaacagcgtctgagcgcattaccctcgtttgttcaggggg

SEQ ID NO: 500231 - DNA, 75 bp, synthetic construct
  source 1..75: mol_type = other DNA
actgcaacttaccccgattattgagtggattgaaaagctgatcggtcatcagttcctctccagcgatatctattt

SEQ ID NO: 500232 - DNA, 75 bp, synthetic construct
  source 1..75: mol_type = other DNA
tcggcgtggcggtattgatcgtcggcttaagcgcgatgaacggctttgaacgcgaactgaataaccgcattctgg

SEQ ID NO: 500233 - DNA, 75 bp, synthetic construct
  source 1..75: mol_type = other DNA
gtttttcaacttcgttgttgaagtgacattgcgtgaaaatcctgattttgatcccaccctgaaacatgactgcct

SEQ ID NO: 500234 - DNA, 75 bp, synthetic construct
  source 1..75: mol_type = other DNA
gagtggggctaaggatctgcttaaactgattgaaattctgtttccgtcttatggcatgacaggggcagaagcgca

SEQ ID NO: 500235 - DNA, 75 bp, synthetic construct
  source 1..75: mol_type = other DNA
ctagctcgcaatactcagaaaattttccgctgggtggagaaagacacccctgatgcggttaaaaaaattcaggcg

SEQ ID NO: 500236 - DNA, 75 bp, synthetic construct
  source 1..75: mol_type = other DNA
atgaaaatcaagcatgagcatattcgcatggcgatgaatgcctgggcgcgtccggatggtgaaaaagttccggta

SEQ ID NO: 500237 - DNA, 75 bp, synthetic construct
  source 1..75: mol_type = other DNA
gtacggctacagccatccggaagccctggctcgcaatactcagaaaatattccgctgggtggagaaagacacccc

SEQ ID NO: 500238 - DNA, 75 bp, synthetic construct
  source 1..75: mol_type = other DNA
ctggctcgcaatactcagaagattttccgctgggtggagaaagacacccctgatgcggttaaaaaaattcaggcg

SEQ ID NO: 500239 - DNA, 75 bp, synthetic construct
  source 1..75: mol_type = other DNA
tgcgttttagtcgcggacggcggcgcggcggcatggtgtcgctaatctctgtcatttctaccattggcattgccc

SEQ ID NO: 500240 - DNA, 75 bp, synthetic construct
  source 1..75: mol_type = other DNA
gatcccgaactcaaaccctgagcataagctgatgcagccgaaacgtgtgcgcttgcaaattaccggaattttgca

SEQ ID NO: 500241 - DNA, 75 bp, synthetic construct
  source 1..75: mol_type = other DNA
cggctggtgaaggatgtcgatgattttgttgcgtcagcggttgttttgtatgaccagatgaatcgcggcggcccg

SEQ ID NO: 500242 - DNA, 75 bp, synthetic construct
  source 1..75: mol_type = other DNA
aagccaatgctgattgtgttgattgccgcaccgctggcaatcctgctgattggcccgattggtatctggatcggt

SEQ ID NO: 500243 - DNA, 75 bp, synthetic construct
  source 1..75: mol_type = other DNA
tctccctgatgtccttaacccggaaccgaaaaagaaagaatatgcggttttttcatataaccctgttcacactgt

SEQ ID NO: 500244 - DNA, 75 bp, synthetic construct
  source 1..75: mol_type = other DNA
caagcagtacaaagcggaggacatgttacgtgaagccataggcggccttgcctcccgcccggaagggtttgtggt

SEQ ID NO: 500245 - DNA, 75 bp, synthetic construct
  source 1..75: mol_type = other DNA
cctcatttccatgaacttcctcatcagtgggaaatgtttatcgtcatgcagggccagcttcaggtttgtttgcat

SEQ ID NO: 500246 - DNA, 75 bp, synthetic construct
  source 1..75: mol_type = other DNA
gttgctctgtttattaacttgcgtggcctttgtaatcaaccttttaaatatgaagttattaaaatataggaacta

SEQ ID NO: 500247 - DNA, 75 bp, synthetic construct
  source 1..75: mol_type = other DNA
tgtcaaaacacgccaatgtggaaatcggtcttgccctgcgttctgaccgctgggcgggtgcggatttctgggagc

SEQ ID NO: 500248 - DNA, 75 bp, synthetic construct
  source 1..75: mol_type = other DNA
gatttctgggagcagcagggcaggcgcgtcagcctggacgatatcctgcagcgcgctgatgtggtgacggtgggg

SEQ ID NO: 500249 - DNA, 75 bp, synthetic construct
  source 1..75: mol_type = other DNA
tagttctgtcgtggaatttgctccgggagatatacatagcgtagagtgtatctctgagcaagcactgatgatgga

SEQ ID NO: 500250 - DNA, 75 bp, synthetic construct
  source 1..75: mol_type = other DNA
ggcgatatacacagtgtcgaatgcctatctcctcgtgctcttatggtggaagttaaagaggggccgtttgactct

SEQ ID NO: 500251 - DNA, 75 bp, synthetic construct
  source 1..75: mol_type = other DNA
gggaatagaaggcgctgagacacgtgatatgcagttgctggagtcgcacttaaatgttgatgatatagaactaga

SEQ ID NO: 500252 - DNA, 75 bp, synthetic construct
  source 1..75: mol_type = other DNA
tagataaattattcaatcaggcaaaagatagtgatagaaaaagagcacattatcttctacatcaatcctatgaag

SEQ ID NO: 500253 - DNA, 75 bp, synthetic construct
  source 1..75: mol_type = other DNA
tggatgaactttttcgcactgcagtaaattctgaacgtttgcgcgctcattatttattgcacgcatctcatcagg

SEQ ID NO: 500254 - DNA, 75 bp, synthetic construct
  source 1..75: mol_type = other DNA
aggttccggcacgggtgagcgcggtccccggcgatcgcttcctgaaggtggaatttattccggcagaggagagca

SEQ ID NO: 500255 - DNA, 75 bp, synthetic construct
  source 1..75: mol_type = other DNA
tcaacattgcaggcaaccatttcgatttcaccaaaacaccctctgacaaagcgattcgcgatttgcgtcgtaacg

SEQ ID NO: 500256 - DNA, 75 bp, synthetic construct
  source 1..75: mol_type = other DNA
ctggcgggctggcataaatatctcacacgcaatcaaattcagccgatagcggaacgggaaggcgactggagtgcc

SEQ ID NO: 500257 - DNA, 75 bp, synthetic construct
  source 1..75: mol_type = other DNA
aagttctgtctcggcgcgtctgcgtctggcaggctggcataaatatctcacacgcaatcaaattcagccgataac

SEQ ID NO: 500258 - DNA, 75 bp, synthetic construct
  source 1..75: mol_type = other DNA
gcagttgaaaaaattcaggcgttgttaccagcgatcgaaaaggcaatgccacctttgctggtggccagaatgcgc

SEQ ID NO: 500259 - DNA, 75 bp, synthetic construct
  source 1..75: mol_type = other DNA
atgaaaatcaagcatgaacacatccgcatggcaatgaatgcctgggcgtacccagacggtgagaaagttccagca

SEQ ID NO: 500260 - DNA, 75 bp, synthetic construct
  source 1..75: mol_type = other DNA
tccgctgggtggagaaagacacccctgatgcggttaaaaaaattcaggcgttgttaccagcgatcgaaaaggcaa

SEQ ID NO: 500261 - DNA, 75 bp, synthetic construct
  source 1..75: mol_type = other DNA
gcgcagccacagttcggaatatcaccgggagcttgtcgagcgacgggatcggctgatgaaagatatagatgagct

SEQ ID NO: 500262 - DNA, 75 bp, synthetic construct
  source 1..75: mol_type = other DNA
ttgctggtggcccgtatgcgcagccacagttctgaatattaccgtgagatcgtcgaacggagggatcggctggtg

SEQ ID NO: 500263 - DNA, 75 bp, synthetic construct
  source 1..75: mol_type = other DNA
acagccatccggaagccctggctcgtaatacccagaaaattttccgttggctggataaagacacccctgatgctg

SEQ ID NO: 500264 - DNA, 75 bp, synthetic construct
  source 1..75: mol_type = other DNA
ttctggtggccagcaacaacgtgtcgctattgcccgtgcgctgatgatggagccgcaggtactgctgtttgatga

SEQ ID NO: 500265 - DNA, 75 bp, synthetic construct
  source 1..75: mol_type = other DNA
tccgctggatagagaaagacacccctgatgcagttgaaaaaattcaggcgttgttaccagcgatcgaaaaggcaa

SEQ ID NO: 500266 - DNA, 75 bp, synthetic construct
  source 1..75: mol_type = other DNA
agcctttcaggcaatatgcaggactggagcatcgcggatgggcaatggttgattttttcgggtatggccaataat

SEQ ID NO: 500267 - DNA, 75 bp, synthetic construct
  source 1..75: mol_type = other DNA
gcctggtgaaagatatcgatgagtttgttgcatcagcgatcgttctgttcgatcagatgaatcgcggtggtccgg

SEQ ID NO: 500268 - DNA, 75 bp, synthetic construct
  source 1..75: mol_type = other DNA
gcttctccgtgttttcttacaccattgacggacagggtgatgatgcgtttcctgaagcgctgccggcgcctcctg

SEQ ID NO: 500269 - DNA, 75 bp, synthetic construct
  source 1..75: mol_type = other DNA
gttacgactcagcaacggaaagcaggtggacctgcgcgactggaaagtggtgctgttcatgcaggggcactgtcc

SEQ ID NO: 500270 - DNA, 75 bp, synthetic construct
  source 1..75: mol_type = other DNA
cgtgcaggcctccaccctgaatgagattgagcgactctggaatccgcagggtatggccgcacagcctgcagcaga

SEQ ID NO: 500271 - DNA, 75 bp, synthetic construct
  source 1..75: mol_type = other DNA
gcatattgaaggtcattatcaggtcgatccttccttgttcaagccgaatgccgatttcctgctgcgcgtcagcgg

SEQ ID NO: 500272 - DNA, 75 bp, synthetic construct
  source 1..75: mol_type = other DNA
ggctgaagaacatctgaaggcgctggcacgcaaaggcgttattgaaattgtttccggcgcatcacgcgggattcg

SEQ ID NO: 500273 - DNA, 75 bp, synthetic construct
  source 1..75: mol_type = other DNA
accgcgcgcggccggtaatgcttttcttcgtcctgctgctgtcaacatttgctcaggccggcacgcttgatgagg

SEQ ID NO: 500274 - DNA, 75 bp, synthetic construct
  source 1..75: mol_type = other DNA
ggtcattcgggccggtgagtatgacgacggggcgcttcctgcccgggtgcaggagattgcacttcaggccgggtt

SEQ ID NO: 500275 - DNA, 75 bp, synthetic construct
  source 1..75: mol_type = other DNA
atggagaaaaaagaacattatcgtgaactccggatgtatggcgatgaacggattgcagagccgttgcgatacagg

SEQ ID NO: 500276 - DNA, 75 bp, synthetic construct
  source 1..75: mol_type = other DNA
aatgcgccatcaaaacgttcagggtacgcttgaagaacgggccagggggccgggtacaaactccccaatgggaaa

SEQ ID NO: 500277 - DNA, 75 bp, synthetic construct
  source 1..75: mol_type = other DNA
gtggtgggtggtattcgcgctaacattttcaccccaacagaagcaggtgcagtagcggtgctaatcgtgctggcg

SEQ ID NO: 500278 - DNA, 75 bp, synthetic construct
  source 1..75: mol_type = other DNA
gcgtgagcgccagcagccacagtcacgatgtgactggtgttcaaagcggtggcagtacgatcacgtcgaagaaac

SEQ ID NO: 500279 - DNA, 75 bp, synthetic construct
  source 1..75: mol_type = other DNA
agcagagcgcggaaccagtacaaaaagcagtaaagcagcaaaagagaaaaaagccacgaccagtaaagagggctg

SEQ ID NO: 500280 - DNA, 75 bp, synthetic construct
  source 1..75: mol_type = other DNA
ctgatttcctgctacgcgtgagtgggatgtcgatgaaagatatcggcattatggatggcgatttgctggcggtgc

SEQ ID NO: 500281 - DNA, 75 bp, synthetic construct
  source 1..75: mol_type = other DNA
gcagatgggactcatttatgtcaatccggaaggtccaggtgggaagccggatcccatggcttcagcgaaagatat

SEQ ID NO: 500282 - DNA, 75 bp, synthetic construct
  source 1..75: mol_type = other DNA
tacccctggtgttctggataacaagttttttgttaatctgctggatatgtcaacacgatggagtaaagcagataa

SEQ ID NO: 500283 - DNA, 75 bp, synthetic construct
  source 1..75: mol_type = other DNA
gcagataaccgggataaaaacgggaaacttcagaaacctcttgccgccacgcagatgggacttatttatgtcaat

SEQ ID NO: 500284 - DNA, 75 bp, synthetic construct
  source 1..75: mol_type = other DNA
gcgctgggcggcacattgaccatttcctgtctgcacggcacgcgtgtcagcgtttctctacctcaacgctatgtc

SEQ ID NO: 500285 - DNA, 75 bp, synthetic construct
  source 1..75: mol_type = other DNA
caggcgggcattgtccagcgactggcggcagataacgccagtgtgaagcagagcgggcagctcatcgaacaactg

SEQ ID NO: 500286 - DNA, 75 bp, synthetic construct
  source 1..75: mol_type = other DNA
ttagggcggttacgtccgcgccagttggatgatctcaccctggagcaggccatccgctcactgatgcgggaaatg

SEQ ID NO: 500287 - DNA, 75 bp, synthetic construct
  source 1..75: mol_type = other DNA
tgccgtgattttccggtcgttcacccgctcagatttcgctgtctcaccctccaactcccgtcagccgtgtgcgtc

SEQ ID NO: 500288 - DNA, 75 bp, synthetic construct
  source 1..75: mol_type = other DNA
aactggcagccaccagcacaaggcgatattgacgctggattggatctggcatcgttgctacgtcatcccttggta

SEQ ID NO: 500289 - DNA, 75 bp, synthetic construct
  source 1..75: mol_type = other DNA
tgagaagaagagcgcggtggcgcgcccgtgggagcggaagttcctcgggtacagtgtgacatggcacaaacaggc

SEQ ID NO: 500290 - DNA, 75 bp, synthetic construct
  source 1..75: mol_type = other DNA
atcgatctgaaattcgcgattgcggattctggtctgtctgttagtgagctggtatcggtggcctgggcttctgct

SEQ ID NO: 500291 - DNA, 75 bp, synthetic construct
  source 1..75: mol_type = other DNA
ggtccgacatcaaacgtaggtcctgatccagaagctgcaccgattgaagaacaaggtttaggctgggcgagcact

SEQ ID NO: 500292 - DNA, 75 bp, synthetic construct
  source 1..75: mol_type = other DNA
ggcgataatgaagcattaattaaaattaaaactgtcgggatttgcggtacagatattcatgcctgggcgggcaat

SEQ ID NO: 500293 - DNA, 75 bp, synthetic construct
  source 1..75: mol_type = other DNA
tatttatggctgggactgttaatgcagcatcaagcgtaaaggagatttgtaccgattatacgaaataccttgggc

SEQ ID NO: 500294 - DNA, 75 bp, synthetic construct
  source 1..75: mol_type = other DNA
ttgccgtcctgggtcagaggccagcatttttacctctatatgatcgtcgatatttacagtcgcaagattattgct

SEQ ID NO: 500295 - DNA, 75 bp, synthetic construct
  source 1..75: mol_type = other DNA
tgagcgccatgtcatgatacctaaggaaaatggcagctggatttatctggctgatttagagcgcgcactacgtgt

SEQ ID NO: 500296 - DNA, 75 bp, synthetic construct
  source 1..75: mol_type = other DNA
aacgtgaagacagaatgatgcccactaaagatccaatgattttcgagcaaggtatgtgtgaagaagagttgattg

SEQ ID NO: 500297 - DNA, 75 bp, synthetic construct
  source 1..75: mol_type = other DNA
atggaaatggtttatagcgcctcaaataatagttttttcgctaaaaatgatgtggcgaaacatgaacaggccgga

SEQ ID NO: 500298 - DNA, 75 bp, synthetic construct
  source 1..75: mol_type = other DNA
gcgtagggaacaaaacaggcaaaggcctgagcggcaagctggccaatggcgcattcgaggggaaaataactttgg

SEQ ID NO: 500299 - DNA, 75 bp, synthetic construct
  source 1..75: mol_type = other DNA
gtgtactgaaatcagccaaccagttgaagaaacgctcccgtgaatgtcagtataaacggcctgatgtactcaggg

SEQ ID NO: 500300 - DNA, 75 bp, synthetic construct
  source 1..75: mol_type = other DNA
tattgtcgccgtattcccgtattaacagagaccgcagcccgacagggagactcctctgcgcgagtgtgcggggat

SEQ ID NO: 500301 - DNA, 75 bp, synthetic construct
  source 1..75: mol_type = other DNA
ccgccctgtttgaacggttcatggcgaaccattcaccggcagcggtgcagggtggcgtgtcacaggcgtcagcag

SEQ ID NO: 500302 - DNA, 75 bp, synthetic construct
  source 1..75: mol_type = other DNA
gtattttgcagcgtggtcgtgttcttgttgaaggttcgttcagtggtaaatgtacgcaattacactcccggacct

SEQ ID NO: 500303 - DNA, 75 bp, synthetic construct
  source 1..75: mol_type = other DNA
gcagcgcaacctggctctggttctttttcagcgcgtcatggcgcactgccccgatcagtatctgaagatggccgc

SEQ ID NO: 500304 - DNA, 75 bp, synthetic construct
  source 1..75: mol_type = other DNA
accgggattggacaactcaacgcggcctgtccggtcagtattattccggcgccgcttcgtgcctcttctgcggag

SEQ ID NO: 500305 - DNA, 75 bp, synthetic construct
  source 1..75: mol_type = other DNA
cgatcgccgccgcgatgaaaggaggttatatcaacgcactggtcaccgaccaggaaactgccgccgccattgtca

SEQ ID NO: 500306 - DNA, 75 bp, synthetic construct
  source 1..75: mol_type = other DNA
ttatccacaatgaattagttttacaagatctgaaatctttaagttctcttaatggtttcagattccaagatttac

SEQ ID NO: 500307 - DNA, 75 bp, synthetic construct
  source 1..75: mol_type = other DNA
acgacgtgctgaaaaaactgttcgatgatgctggtctgattctggtcgacttcaagctggagtttggcctgtaca

SEQ ID NO: 500308 - DNA, 75 bp, synthetic construct
  source 1..75: mol_type = other DNA
tggacaaagaccgtttccgtcagagcctcggtggtttgattgaagcttatgaagccgtcgcccgccgcctgggtg

SEQ ID NO: 500309 - DNA, 75 bp, synthetic construct
  source 1..75: mol_type = other DNA
gcaaactggctgaagcgggtatcccgactcaaatggagcgtctgctctccgatactgaatgtctggtgaaaaagc

SEQ ID NO: 500310 - DNA, 75 bp, synthetic construct
  source 1..75: mol_type = other DNA
tgtgcctgtcagtgatgtcaggcggtccttttctgtcgtggtgaaagcgatagttcaggtactggaaacctggcc

SEQ ID NO: 500311 - DNA, 75 bp, synthetic construct
  source 1..75: mol_type = other DNA
gtgtcggcatttctggcattaccaccgccagttgcagaaggcgaaatggatgcacatgagcgcaaagcctggtat

SEQ ID NO: 500312 - DNA, 75 bp, synthetic construct
  source 1..75: mol_type = other DNA
ctgattactgcgctgctggcaaaaacaccatccaccgaagatgaggagatgaatccacacgatcgcaaggcatgg

SEQ ID NO: 500313 - DNA, 75 bp, synthetic construct
  source 1..75: mol_type = other DNA
gccattttgaaaaatatcggctacagcgaaaacgacattcaggagttggtcagcaaaggtctggccaaagttgag

SEQ ID NO: 500314 - DNA, 75 bp, synthetic construct
  source 1..75: mol_type = other DNA
cgccgattacttttctggcctgaccgcaaccacggcggcgctggcagcactgcataaagtgcgtgaaaccggtaa

SEQ ID NO: 500315 - DNA, 75 bp, synthetic construct
  source 1..75: mol_type = other DNA
ggttatgtggcgttaaatctccccgccgctgataaaccaagccgctatttgttaaccgtctccgccagtgacggt

SEQ ID NO: 500316 - DNA, 75 bp, synthetic construct
  source 1..75: mol_type = other DNA
atgactacaacgcttttagccgttaacggaacgctgatgcgcggcctggaactcaacccaaatatgcaaaaagcg

SEQ ID NO: 500317 - DNA, 75 bp, synthetic construct
  source 1..75: mol_type = other DNA
cagtggttacctgattcagaacggtgatgttgaccagccaatgcctgccttcccgtataccgccgattacttttc

SEQ ID NO: 500318 - DNA, 75 bp, synthetic construct
  source 1..75: mol_type = other DNA
tgtcttctccggtatcgaaatcgccgggccgttcgccgggcaaatgttcgcagaatggggcgcggaagttatctg

SEQ ID NO: 500319 - DNA, 75 bp, synthetic construct
  source 1..75: mol_type = other DNA
ggtactgaagcagctggcacagcagtacggcttttccgtttttccctacaccctggatggtcagggggataccgc

SEQ ID NO: 500320 - DNA, 75 bp, synthetic construct
  source 1..75: mol_type = other DNA
atgcagaccttcttcccgaatatcccggtggccacaccgactaccttcctggtcaacgtcaacacacttgaggca

SEQ ID NO: 500321 - DNA, 75 bp, synthetic construct
  source 1..75: mol_type = other DNA
tcaggcattacgcaggactggagtgtcgccgatgggcaatggctggttttttcggatatgaccaataatgccagc

SEQ ID NO: 500322 - DNA, 75 bp, synthetic construct
  source 1..75: mol_type = other DNA
ctttaagccatgaggaggaaatcgcagcagctgaagctgaaaaacagtatcgtatcgatcaggctaatgagtata

SEQ ID NO: 500323 - DNA, 75 bp, synthetic construct
  source 1..75: mol_type = other DNA
tagcctggtgagttcggttgcaggtatcagtgaactgctaaaaaacgtatcacaggatactcccaaagttgatat

SEQ ID NO: 500324 - DNA, 75 bp, synthetic construct
  source 1..75: mol_type = other DNA
tcccgattagacgtgctgatcacaccgctggtcgcctttgatgagtacggtcagcgcctgggaatgggcggtggt

SEQ ID NO: 500325 - DNA, 75 bp, synthetic construct
  source 1..75: mol_type = other DNA
tgcaaaccattcttgatgaagtgaaccgccccggttttcctggagagtgttttatctgtgaactcaggctgccag

SEQ ID NO: 500326 - DNA, 75 bp, synthetic construct
  source 1..75: mol_type = other DNA
cgatggtgcgattgattctcttgccggaacgggagtcatcgtgaaagagggagcgggagagttagtcctcaatgc

SEQ ID NO: 500327 - DNA, 75 bp, synthetic construct
  source 1..75: mol_type = other DNA
gaaaagccggccccccgctggttccgcctcagcaacggcaggcaggttaacctggctgactggaaggtggtgctg

SEQ ID NO: 500328 - DNA, 75 bp, synthetic construct
  source 1..75: mol_type = other DNA
gctggttccgcctcagcaacggaactcaggtcaatcttgctgactggaaagtggtgctgttcatgcaggggcgat

SEQ ID NO: 500329 - DNA, 75 bp, synthetic construct
  source 1..75: mol_type = other DNA
gcaaagccggctccccgctggttccgcctcagtaatggcaggcaggttaacctggccgactggaaggtggtgctg

SEQ ID NO: 500330 - DNA, 75 bp, synthetic construct
  source 1..75: mol_type = other DNA
ggcagcagacacatcagccagaacagaaaagccggctccccgctggttccgcctcagcaacggcaggcaggttaa

SEQ ID NO: 500331 - DNA, 75 bp, synthetic construct
  source 1..75: mol_type = other DNA
actgccaccggcgctgccggggaagggtgtaacgaaaaaagcagccttcattactccagggattcagaaggctga

SEQ ID NO: 500332 - DNA, 75 bp, synthetic construct
  source 1..75: mol_type = other DNA
acactgaactgaacgccgaggtaccgctgtcggatgatctcaatgtcagtctgaacgccatgacacagcatcgca

SEQ ID NO: 500333 - DNA, 75 bp, synthetic construct
  source 1..75: mol_type = other DNA
ggctgttatgccagattgacagcgccaccgtttatctgcgtgaagagtttggccttgctgtcgaaccacgcagtg

SEQ ID NO: 500334 - DNA, 75 bp, synthetic construct
  source 1..75: mol_type = other DNA
gtgtttataacacttatatcgaggataatctgcgctactcgcaaaacgcgccgctggatatgtataaagaggtga

SEQ ID NO: 500335 - DNA, 75 bp, synthetic construct
  source 1..75: mol_type = other DNA
tctcgttggtgcaaccattcttcatgcggtggtgcgcaacggacgcttgcgctggccggtttcagaagagatcta

SEQ ID NO: 500336 - DNA, 75 bp, synthetic construct
  source 1..75: mol_type = other DNA
aagcacagcgcgtagcctgcgctccacatttgacctgccggacgagccaacaggcaatgccgcgccttcatggct

SEQ ID NO: 500337 - DNA, 75 bp, synthetic construct
  source 1..75: mol_type = other DNA
atgcggattatttttctacgcaaggagtatttatctttactcccgtcaatgattgcgtctcttttctctgctaac

SEQ ID NO: 500338 - DNA, 75 bp, synthetic construct
  source 1..75: mol_type = other DNA
caggtgggcatgattaaccaggcctttgaagctgctgcaaaaactgaagcgcactcgccaatgctgccgatgtct

SEQ ID NO: 500339 - DNA, 75 bp, synthetic construct
  source 1..75: mol_type = other DNA
gctggatgccgtagataaagcaatcgcaaaagaattagagtcgtccaccgctcgccgggagagcgatacctcaga

SEQ ID NO: 500340 - DNA, 75 bp, synthetic construct
  source 1..75: mol_type = other DNA
tgcaggaagcagggcggtcaggctggaactcagggaacaatggatggaagccgctgaagcatggcgaagggcggc

SEQ ID NO: 500341 - DNA, 75 bp, synthetic construct
  source 1..75: mol_type = other DNA
taacctgcgctattcacagaacgcgccgctggacatgtataaagaggtcaacaccggcacgaacctgcctgcgca

SEQ ID NO: 500342 - DNA, 75 bp, synthetic construct
  source 1..75: mol_type = other DNA
ctgcgcggtgccagcgcggttatcgataaagactgggccagcgcccgtctggcagaaatgatcgatgccgatatg

SEQ ID NO: 500343 - DNA, 75 bp, synthetic construct
  source 1..75: mol_type = other DNA
atgagtaagaaaattgttctcgccctgggcgggaatgcgctgggcgacgatctggccgggcaaatgaaagcggta

SEQ ID NO: 500344 - DNA, 75 bp, synthetic construct
  source 1..75: mol_type = other DNA
ccgtggcgctcatgtccctctgcctggccacacaggcttccacaatggacgagatcaaatcgttatggcatccac

SEQ ID NO: 500345 - DNA, 75 bp, synthetic construct
  source 1..75: mol_type = other DNA
tatccagacagcgatccttttataggtcttatagcttcctttgcgacctttggtgtcggttttctgactcgtcct

SEQ ID NO: 500346 - DNA, 75 bp, synthetic construct
  source 1..75: mol_type = other DNA
ctgtttatggaaacctcaccggaggttcctgttgtgaaataccgataatcacgaaaggtggatttgtcggtgatg

SEQ ID NO: 500347 - DNA, 75 bp, synthetic construct
  source 1..75: mol_type = other DNA
agacctcaacagaactggcaatggcactgtggcccgttgtgaaaaaacagattgatgaggatccggaagtccatc

SEQ ID NO: 500348 - DNA, 75 bp, synthetic construct
  source 1..75: mol_type = other DNA
ctgacaccataacagaggccaccctgtacgaaaacgggctgtatacgcgccacatcagactcagtcgcccagtat

SEQ ID NO: 500349 - DNA, 75 bp, synthetic construct
  source 1..75: mol_type = other DNA
taagttcctgtctacgccagagggaaaagcctggctagagcgtaaacagcgagagaacgaagatgtgatggagaa

SEQ ID NO: 500350 - DNA, 75 bp, synthetic construct
  source 1..75: mol_type = other DNA
ttggcactgggtgcgaggctggcggaaagtgtctcctctaatattattaacgcctttggggtaatgactccaact

SEQ ID NO: 500351 - DNA, 75 bp, synthetic construct
  source 1..75: mol_type = other DNA
gttctccccggacggcagccgcctgtgggacaaagaaacgctggagaaaatggacaaagaccgtttccgccagag

SEQ ID NO: 500352 - DNA, 75 bp, synthetic construct
  source 1..75: mol_type = other DNA
tgaatccatgggatttaaaacgctgggatttgctggcggaagagaagatgactgggagtcggacctggtatactg

SEQ ID NO: 500353 - DNA, 75 bp, synthetic construct
  source 1..75: mol_type = other DNA
gggatggaaaaataaatgtggtacaggaaacggcaaatataccatcaccagtggcctggaaggagcctggtcgac

SEQ ID NO: 500354 - DNA, 75 bp, synthetic construct
  source 1..75: mol_type = other DNA
tcattgctggcgggcacacgttcggaaaagcacatggtgccgcttctcctgaaaaatgcattggtgctgcacctg

SEQ ID NO: 500355 - DNA, 75 bp, synthetic construct
  source 1..75: mol_type = other DNA
cggtgttgacatccctggtttcattacagtcagaatttaataaaaagcagtctaatgggaagaaagtctcactat

SEQ ID NO: 500356 - DNA, 75 bp, synthetic construct
  source 1..75: mol_type = other DNA
ttatggccctttctttattcgaatggcgtggcatggtgccgggacatatcggacatatgatggacgaggaggagc

SEQ ID NO: 500357 - DNA, 75 bp, synthetic construct
  source 1..75: mol_type = other DNA
tccgatacggacagtataacgaaacgggtatttacatctcgatcgagaagaccattatcattacaatcaccgttt

SEQ ID NO: 500358 - DNA, 75 bp, synthetic construct
  source 1..75: mol_type = other DNA
cacactgggaaggcgatatcaaacgcgggaagggaacagtatccaccgagagcggcgtgctgaaccaacagccgt

SEQ ID NO: 500359 - DNA, 75 bp, synthetic construct
  source 1..75: mol_type = other DNA
gaaccacactcgatgacggaaatgagcagtggaaatatttcatgtctaacaatcagttcagtgcaacgactttca

SEQ ID NO: 500360 - DNA, 75 bp, synthetic construct
  source 1..75: mol_type = other DNA
cggcattatgagcacttaaactattttaaatcaatattatgttttgtttcatacgcaagaaatgccatatttaga

SEQ ID NO: 500361 - DNA, 75 bp, synthetic construct
  source 1..75: mol_type = other DNA
ctcgaaatcgacttcaaaggagaaaccgtaagcaaatggacattctctactgacaataacaacaccaaaacgggc

SEQ ID NO: 500362 - DNA, 75 bp, synthetic construct
  source 1..75: mol_type = other DNA
tggttcacagacacaatctaaaacacttgatattgagtttaatggtcaaacagtcagtaaatggactttatcttc

SEQ ID NO: 500363 - DNA, 75 bp, synthetic construct
  source 1..75: mol_type = other DNA
cgaaaaaggaactaaccctgaagaactgattggcgcagcgcatgccgcatgtttctcaatggcgctttcattaat

SEQ ID NO: 500364 - DNA, 75 bp, synthetic construct
  source 1..75: mol_type = other DNA
tccagccgaatgcgagaaaacgttcgcagattttgcccgtattgtcggctttaagtatctgcgcgggatgcacct

SEQ ID NO: 500365 - DNA, 75 bp, synthetic construct
  source 1..75: mol_type = other DNA
accatcaacccggatatctgggcagaagaaatcgcctggctgaaagcgcaacaaactgaaaaagcggtagcctga

SEQ ID NO: 500366 - DNA, 75 bp, synthetic construct
  source 1..75: mol_type = other DNA
tcctcgaaactattaacccggatatctgggcagaagaaatcgcctggctaaaagcgcaacaaactgaaaaagcgg

SEQ ID NO: 500367 - DNA, 75 bp, synthetic construct
  source 1..75: mol_type = other DNA
agtaaaaaaagctctgaggcaatggtctatttatcgtaatctagaaaatattaatttaatagaatcactgtggta

SEQ ID NO: 500368 - DNA, 75 bp, synthetic construct
  source 1..75: mol_type = other DNA
cttgaagagataagcgcagcggatccaaaagtaagaatttataggaataaagagaatagtggtgctgcagtatcg

SEQ ID NO: 500369 - DNA, 75 bp, synthetic construct
  source 1..75: mol_type = other DNA
tccttgaaaccatcaacccggatatctgggcagaagagattgcctggctaaaagcacaacaaactgaaaaagcgg

SEQ ID NO: 500370 - DNA, 75 bp, synthetic construct
  source 1..75: mol_type = other DNA
taatgtcaggcactagtctggatggtgtcgatgttgtactggcgactatcgatgaacacagggtggcgcagttgg

SEQ ID NO: 500371 - DNA, 75 bp, synthetic construct
  source 1..75: mol_type = other DNA
ggccacactggcagaactcaccgccgtgaccatttctgaacaagttttgttgagcggtggctgcgaacgattgat

SEQ ID NO: 500372 - DNA, 75 bp, synthetic construct
  source 1..75: mol_type = other DNA
ttcattcactgccataagggcactataggcgcaatccggcgtgtggtggagccgctcggctatctgattgaggtg

SEQ ID NO: 500373 - DNA, 75 bp, synthetic construct
  source 1..75: mol_type = other DNA
acgcgctgttatccgcgatgcgtatttcattcactgccataagggcactataggcgcaatccggcgtgtggtgga

SEQ ID NO: 500374 - DNA, 75 bp, synthetic construct
  source 1..75: mol_type = other DNA
aatgcccgtctgtccgcaccgggaaaagaccgcgcgccggtggcgctgaaaggggccgcgctcacgcgccgtccc

SEQ ID NO: 500375 - DNA, 75 bp, synthetic construct
  source 1..75: mol_type = other DNA
gcagggggcgccgctggtgccagcttttcatcatgcattgctggcgcaccccacggagcgacgaatggtgctcaa

SEQ ID NO: 500376 - DNA, 75 bp, synthetic construct
  source 1..75: mol_type = other DNA
aagcatacgcaaaacgcgcggagataacacctaaaccactatatgccgcgccgccagtttcggtaactccggatg

SEQ ID NO: 500377 - DNA, 75 bp, synthetic construct
  source 1..75: mol_type = other DNA
aagttagcgatgaggcagccttttgtcttattcaaaggccttacatttcaaaaactctgcttaccaggcgcattt

SEQ ID NO: 500378 - DNA, 75 bp, synthetic construct
  source 1..75: mol_type = other DNA
ccgatgagatcagacgtattgcgccgctcttagacgccctgtccgaccagatgcaccgtgtttggcactgttgca

SEQ ID NO: 500379 - DNA, 75 bp, synthetic construct
  source 1..75: mol_type = other DNA
ttgtctgttactgatgatgttgttgttcctgctactgctactgctactgctactgctactgttcttctttttcct

SEQ ID NO: 500380 - DNA, 75 bp, synthetic construct
  source 1..75: mol_type = other DNA
tttcaggttgagctggaagtgagtgagttgaaaacagaacagattgctaccgtcaataaaatagtggagctcatt

SEQ ID NO: 500381 - DNA, 75 bp, synthetic construct
  source 1..75: mol_type = other DNA
tgaagcacttatcaggtttcatgtcggtgatgaaaaccatgaaacattattgctgcgggccaacgaagggatgaa

SEQ ID NO: 500382 - DNA, 75 bp, synthetic construct
  source 1..75: mol_type = other DNA
gggcttctgtcttttcagacctgtcatttgcctgttactgatgatgttgttgttcatgctactgctactgttctt

SEQ ID NO: 500383 - DNA, 75 bp, synthetic construct
  source 1..75: mol_type = other DNA
aatgtaattgatgaatatggtactttaattaaaaagtcaaatcttaacaaagaagaattaatacatatattatct

SEQ ID NO: 500384 - DNA, 75 bp, synthetic construct
  source 1..75: mol_type = other DNA
gcaaaggaattacaggcgatggatttaagcacgattactgataaagccacatataacgccatcgactggccggag

SEQ ID NO: 500385 - DNA, 75 bp, synthetic construct
  source 1..75: mol_type = other DNA
gctgagtgcgcatacacacttgaacatcatgatcacgcagtagcttttgccgctgagcttcgtacaggagctaaa

SEQ ID NO: 500386 - DNA, 75 bp, synthetic construct
  source 1..75: mol_type = other DNA
gaattcctcgtcgtttcaatgaagatctgatggataaattcagaaaatccagactggagacagaagattttgcca

SEQ ID NO: 500387 - DNA, 75 bp, synthetic construct
  source 1..75: mol_type = other DNA
ctgaattctaatttatgcgtaaaaggtattcctcatcgtttcaatgaagatctgatggataaattcagtaaatcc

SEQ ID NO: 500388 - DNA, 75 bp, synthetic construct
  source 1..75: mol_type = other DNA
ctggattattttctgcatttaaaaatggtcatgcagacgcaataaaagcatattgtggcgtacttggcaatagta

SEQ ID NO: 500389 - DNA, 75 bp, synthetic construct
  source 1..75: mol_type = other DNA
atgacacagggctggcgggaggataaatgcccgtctgtccgcgcagggaaaaaaccgcgcgtcggtggcgctgaa

SEQ ID NO: 500390 - DNA, 75 bp, synthetic construct
  source 1..75: mol_type = other DNA
gatggcggatgagcgaatggaaaccatgcctgacgtcccgacgttaaaagagaaaggcgttgatctctccatcgg

SEQ ID NO: 500391 - DNA, 75 bp, synthetic construct
  source 1..75: mol_type = other DNA
atttgtctgttactgatgttgttgttcctgctactgctactgctactgctactgctactgttcttctttttcctg

SEQ ID NO: 500392 - DNA, 75 bp, synthetic construct
  source 1..75: mol_type = other DNA
ctgtgtccactattggtgggtaagatcagatatcttacctggatagttctcggttttaccatggtttacgttctt

SEQ ID NO: 500393 - DNA, 75 bp, synthetic construct
  source 1..75: mol_type = other DNA
atgacacagggctggcgggaggataaatgcccgtctggccgcgctgggaaaaaaccgcgcgtcggtggcgctgaa

SEQ ID NO: 500394 - DNA, 75 bp, synthetic construct
  source 1..75: mol_type = other DNA
atgacacagggctggcgggaggataaatgcccgtctggccgcgcagggaaaataccgcgcgtcggtggcgctgaa

SEQ ID NO: 500395 - DNA, 75 bp, synthetic construct
  source 1..75: mol_type = other DNA
ggttatgatcacagctattattttgtctccagttttattggcgagcatattgcgtaccacgccaataaactgaat

SEQ ID NO: 500396 - DNA, 75 bp, synthetic construct
  source 1..75: mol_type = other DNA
actatgattgataccaacaacaaaggcctggtgtatatgacccgcgctgtcctgcctggcatggtcgagcgtaat

SEQ ID NO: 500397 - DNA, 75 bp, synthetic construct
  source 1..75: mol_type = other DNA
taaacatatattcgatattaaaaattttgtctttattattgctactgacacagatcaattacaacattcaatcaa

SEQ ID NO: 500398 - DNA, 75 bp, synthetic construct
  source 1..75: mol_type = other DNA
tgatgatgcatttttaacccttttttcttctttgtcacaacaattgcaaacatatgcaggaaaacttgatgctcg

SEQ ID NO: 500399 - DNA, 75 bp, synthetic construct
  source 1..75: mol_type = other DNA
atgactaaacactatgattacatcgccatcggcggcggcagcggcggtatcgcctccatcaaccgcgcggctatg

SEQ ID NO: 500400 - DNA, 75 bp, synthetic construct
  source 1..75: mol_type = other DNA
gcacagcttgatgtccgtaaccgcgccgccattgaagagatgctgacatcgctccctgtcgagtggcgtaatatt

SEQ ID NO: 500401 - DNA, 75 bp, synthetic construct
  source 1..75: mol_type = other DNA
aaagcgtttgttcgtcagttcagcctgaatctgcgcactgacttgcatggtacggcagtacgtgtcaccgacatc

SEQ ID NO: 500402 - DNA, 75 bp, synthetic construct
  source 1..75: mol_type = other DNA
ctgaacagataccggagcggacactcatccagctgaccaatgaagagctggatttcagtgtcccggctgcggtga

SEQ ID NO: 500403 - DNA, 75 bp, synthetic construct
  source 1..75: mol_type = other DNA
tgcctgagtccggtgaaatccgggcgcgggcacgtcgccccacctttggcgggcgcgatggcttactggagaaat

SEQ ID NO: 500404 - DNA, 75 bp, synthetic construct
  source 1..75: mol_type = other DNA
gtccgttaccggctctacgcccgccgcccggaaggtgacctcccggatacggtgaaggatgaccacaaagaagcg

SEQ ID NO: 500405 - DNA, 75 bp, synthetic construct
  source 1..75: mol_type = other DNA
catttctggcattggggcttggacttggcttctggctacaatctggtaagaatgctgatgagatttcggctatta

SEQ ID NO: 500406 - DNA, 75 bp, synthetic construct
  source 1..75: mol_type = other DNA
taattgggccatgtcgagggattcttgtaggaacggcacttgatccagtaccatcaaatgatgatgaggtatcaa

SEQ ID NO: 500407 - DNA, 75 bp, synthetic construct
  source 1..75: mol_type = other DNA
ggtgagatttacgaatatgctccgggaattacaggtcttgccgatgggttttcggtatcagcatcacagttatat

SEQ ID NO: 500408 - DNA, 75 bp, synthetic construct
  source 1..75: mol_type = other DNA
gcgtgattaacggcctcggcgcgaaaacgcatctgtttgtgcgtaaacacgcaccactgcgcagctttgatccga

SEQ ID NO: 500409 - DNA, 75 bp, synthetic construct
  source 1..75: mol_type = other DNA
ctgaccgcgccgtcaaagtatcacccgacacgtcaggtcggaaaaggcgaaagtaaaaccgttcagcttaatcac

SEQ ID NO: 500410 - DNA, 75 bp, synthetic construct
  source 1..75: mol_type = other DNA
atcacccgacacgtcaggtcggaaaaggcgaaagtaaaaccgttcagcttaatcacggctggaacgatgaggcat

SEQ ID NO: 500411 - DNA, 75 bp, synthetic construct
  source 1..75: mol_type = other DNA
ctttaactttaaaaagcggcatcgccgcgcctcggagtcctgtcaataactgtggaaagcttaccggtggtgatt

SEQ ID NO: 500412 - DNA, 75 bp, synthetic construct
  source 1..75: mol_type = other DNA
gggttttacctgaacgcgacgcaagcgccgtggaatgaacattacaaaatgtatgactatatccgcaacgagctg

SEQ ID NO: 500413 - DNA, 75 bp, synthetic construct
  source 1..75: mol_type = other DNA
ggaatgacccggaggtcgtgagggcgctcaggggcgcattaaaacacggcctgagaacatcaaatcgtcagcaaa

SEQ ID NO: 500414 - DNA, 75 bp, synthetic construct
  source 1..75: mol_type = other DNA
caaccgtaaattatggcgggaaaaaattcacgtatccaatcattgatgagtggccggggttcataaccaagtgtg

SEQ ID NO: 500415 - DNA, 75 bp, synthetic construct
  source 1..75: mol_type = other DNA
atattctgatcgccaccggcggtcgtccgagccacccggatattccaggcgtggaatacggtattgattccgatg

SEQ ID NO: 500416 - DNA, 75 bp, synthetic construct
  source 1..75: mol_type = other DNA
gggtcgccgtctctctgaacgcctgtttaataacaagccggatgagcatctggattacagcaacattccgaccgt

SEQ ID NO: 500417 - DNA, 75 bp, synthetic construct
  source 1..75: mol_type = other DNA
atattctgatcgctactggtggccgcccgagccatccagacattccgggcgtggaatacggtattgattctgatg

SEQ ID NO: 500418 - DNA, 75 bp, synthetic construct
  source 1..75: mol_type = other DNA
cgttactgattgctgtcggggaggtgaataaagaccgttctccttatgccagtaaacatgccattcgtgatgtgc

SEQ ID NO: 500419 - DNA, 75 bp, synthetic construct
  source 1..75: mol_type = other DNA
ctgccattgcccgtctgtttaacgatgagtggtggactcatcagctcaaaggccagcgtatgcgctggcatgagg

SEQ ID NO: 500420 - DNA, 75 bp, synthetic construct
  source 1..75: mol_type = other DNA
atctgtatgtgggtggtggtgttcaggttgctgtatctgtattagaagagttaactaaaggtgggcaacatttca

SEQ ID NO: 500421 - DNA, 75 bp, synthetic construct
  source 1..75: mol_type = other DNA
ttttgcaatcagcagaacagggatatttacatgcgcaatatcatactgccaggttgtatagcggaagtgagagta

SEQ ID NO: 500422 - DNA, 75 bp, synthetic construct
  source 1..75: mol_type = other DNA
gggtattgttcatcctcgtcctgtgatgacatttcgcgcacccaacaccttttctggtcatccacttcctgatgt

SEQ ID NO: 500423 - DNA, 75 bp, synthetic construct
  source 1..75: mol_type = other DNA
gccgccacacaaggacatgagcttgcccagtatgagttgggacaaatgtatatacaagggattggcgtggagcgc

SEQ ID NO: 500424 - DNA, 75 bp, synthetic construct
  source 1..75: mol_type = other DNA
cagatgaatatgtcagcgtctcggcgttttcgcccattgtctccccatcgcaagtaccgtggggacagcaagcct

SEQ ID NO: 500425 - DNA, 75 bp, synthetic construct
  source 1..75: mol_type = other DNA
tatcgcactacttgagttagataaggtgttatctattatggttagtgcgttaggaacatctcttgggtttataat

SEQ ID NO: 500426 - DNA, 75 bp, synthetic construct
  source 1..75: mol_type = other DNA
accaaaatcagttatggctggatacgaaaagggcaccggaaagcaatagaaacaacaggtagccgtacacggctg

SEQ ID NO: 500427 - DNA, 75 bp, synthetic construct
  source 1..75: mol_type = other DNA
agctgtggcaaaactatctgaatactgttgccgctaaccgccagatccctgctcagcaggtattccctggcgcgc

SEQ ID NO: 500428 - DNA, 75 bp, synthetic construct
  source 1..75: mol_type = other DNA
gccgctgggctatctgattgaggttaaggagtggtgggaactcaacgaagagcccggaactttccggcttgttgt

SEQ ID NO: 500429 - DNA, 75 bp, synthetic construct
  source 1..75: mol_type = other DNA
gaactgcgttcgggggatgtgctggcgggcgttgctgcggcaagctcacaggagcgcgtggcggcaaagcaggtg

SEQ ID NO: 500430 - DNA, 75 bp, synthetic construct
  source 1..75: mol_type = other DNA
aattgggaaaatattatttaaccaacaatgatgatcctgaaaataacgctgaggctattcaatggcttactggtg

SEQ ID NO: 500431 - DNA, 75 bp, synthetic construct
  source 1..75: mol_type = other DNA
tccatttacagccttgacgtgcgacgaaactctaatttttagtggtgcggtgcttaacttagtggcacattctgt

SEQ ID NO: 500432 - DNA, 75 bp, synthetic construct
  source 1..75: mol_type = other DNA
agaaccgtcctgtacaaactggatggcaaaccagccttcattgaccgggtaaaccggctggaaatggtcgacggt

SEQ ID NO: 500433 - DNA, 75 bp, synthetic construct
  source 1..75: mol_type = other DNA
acgtaacccagatgaatatgtcagcgtctcggcgttttcgcccattgtctccccatcgcaagtaccgtggggaca

SEQ ID NO: 500434 - DNA, 75 bp, synthetic construct
  source 1..75: mol_type = other DNA
taaccggaatacccctgaacaaccagctgtccctgaccccgttcaggaaaaagaagccacacaatccccggcgtc

SEQ ID NO: 500435 - DNA, 75 bp, synthetic construct
  source 1..75: mol_type = other DNA
tgaagtgcagtctatttgtccgccacacgtgactattatgcaagttcgtcaggggctggcgaaaggcctgggaca

SEQ ID NO: 500436 - DNA, 75 bp, synthetic construct
  source 1..75: mol_type = other DNA
gcggaaagtgagtttgaagtgttggtttcttattaccccggcccgcaggcgcgtatttactatgcggaaatgctg

SEQ ID NO: 500437 - DNA, 75 bp, synthetic construct
  source 1..75: mol_type = other DNA
ggaaagatgaatgtatcgacgtacttgaacgatggggctattccaaaggaatcaaaagcaagccccgatttgagt

SEQ ID NO: 500438 - DNA, 75 bp, synthetic construct
  source 1..75: mol_type = other DNA
gaaattgtcgatgccggtggcgctaggtccggtaggtttgtgtggcatgtatgcgcgacgcggcgaagttcaggc

SEQ ID NO: 500439 - DNA, 75 bp, synthetic construct
  source 1..75: mol_type = other DNA
gtgaatttgaagccgaactgtcacaaccggaaaaaaacgagttacaacaggagtccggcacttcaccagaaatac

SEQ ID NO: 500440 - DNA, 75 bp, synthetic construct
  source 1..75: mol_type = other DNA
tcattactaaatcggggatgcagcgttacgcggctgaacacaacattattgttgttgcgccggacaccagtccgc

SEQ ID NO: 500441 - DNA, 75 bp, synthetic construct
  source 1..75: mol_type = other DNA
gtatgactatatccgcaacgagctgccggatttagtgatgcatcattttccggcaacggccagaaagtctatctc

SEQ ID NO: 500442 - DNA, 75 bp, synthetic construct
  source 1..75: mol_type = other DNA
gctttggcggctggcaaaatgtgtatcggcattattccccatcactgaaatgtgaaatgaatgtcggcgtctatc

SEQ ID NO: 500443 - DNA, 75 bp, synthetic construct
  source 1..75: mol_type = other DNA
ggcgcgagccgcaaccgacgccggcatcccttataccctttccacggtatcggtatgcccgatagaagaagttgc

SEQ ID NO: 500444 - DNA, 75 bp, synthetic construct
  source 1..75: mol_type = other DNA
gaacagctgcggactccaaatcttgaaaagatctgccaggagatgaatatcaagacgttggtaatgactccaact

SEQ ID NO: 500445 - DNA, 75 bp, synthetic construct
  source 1..75: mol_type = other DNA
caagtgccgtgggggcaacaggcctttgccgcgtatctgggtgaaaataaagaaagctggttgaactatgatcca

SEQ ID NO: 500446 - DNA, 75 bp, synthetic construct
  source 1..75: mol_type = other DNA
tgcaggcatacgcggccatgcagcaggcagccgcgatgcagcaggcagaggcggaagccggaacggagacagaac

SEQ ID NO: 500447 - DNA, 75 bp, synthetic construct
  source 1..75: mol_type = other DNA
ttgctgaatatccggaagcgatcacctatctgctggaacagtacgatcgtgttgaagcagaagaagcgcgtctgt

SEQ ID NO: 500448 - DNA, 75 bp, synthetic construct
  source 1..75: mol_type = other DNA
tacgtctggttatttctatcgctaagaaatacaccaaccgtggcttgcagttcctcgatctgattcaggaaggca

SEQ ID NO: 500449 - DNA, 75 bp, synthetic construct
  source 1..75: mol_type = other DNA
gcttccggaacttcatgaagcgatgggcggtcaggggcgtctgtttgcccaggtaatggctaccactgccgaagg

SEQ ID NO: 500450 - DNA, 75 bp, synthetic construct
  source 1..75: mol_type = other DNA
atcgaagcaaaggcgctgcgtaaactgcgtcacccgagccgttctgaagtactgcgtagcttcctggacgattaa

SEQ ID NO: 500451 - DNA, 75 bp, synthetic construct
  source 1..75: mol_type = other DNA
accggcctgaccattgagcaggttaaagacatcaaccgccgtatgtccatcggtgaagcgaaagcccgccgtgcg

SEQ ID NO: 500452 - DNA, 75 bp, synthetic construct
  source 1..75: mol_type = other DNA
gtgcaaaatgccgaagaaaaacttcattaccctgtttaccggcaacgaaaccagcgatacctggttcaacgcggc

SEQ ID NO: 500453 - DNA, 75 bp, synthetic construct
  source 1..75: mol_type = other DNA
cgggtaaaaaaccgctggaggttgtgctgccggaacttcacgacgcgatgggcgggcaggggcgtctgtttgccc

SEQ ID NO: 500454 - DNA, 75 bp, synthetic construct
  source 1..75: mol_type = other DNA
gaacggacgcgtatggcgctgaaccgatgagcgaaaatctggtggaagtgaaatctgataccgctgttttttccc

SEQ ID NO: 500455 - DNA, 75 bp, synthetic construct
  source 1..75: mol_type = other DNA
aaaagatttaggactacaaaaatctaatgtttcaagagcatttaaagaactatttgaaaagaaaatacttattcg

SEQ ID NO: 500456 - DNA, 75 bp, synthetic construct
  source 1..75: mol_type = other DNA
tctgctgtcagcgctggcgggtgcggaatatgttgcgccttacgtgaaccgtattgatgcccagggcggaagtgg

SEQ ID NO: 500457 - DNA, 75 bp, synthetic construct
  source 1..75: mol_type = other DNA
tgaaagttccggtgaccgccgaggggctggcagctattaagatgttaaaagcggaagggattccgacgctgggaa

SEQ ID NO: 500458 - DNA, 75 bp, synthetic construct
  source 1..75: mol_type = other DNA
acagatgattagctatccggctgttgacgccgccgtagcgaagtttgagcaggactggcaaggggcgtttggcag

SEQ ID NO: 500459 - DNA, 75 bp, synthetic construct
  source 1..75: mol_type = other DNA
atgggcattcaggtgatggaagaagcgccggatgccgatgacctgatgctggctgaaaacacagcagacgaagat

SEQ ID NO: 500460 - DNA, 75 bp, synthetic construct
  source 1..75: mol_type = other DNA
ggcgccgcgctcaggagcgactgcgtattctggcaaataccgacagtatcaccggactgccgaatcgtaacgcaa

SEQ ID NO: 500461 - DNA, 75 bp, synthetic construct
  source 1..75: mol_type = other DNA
agcaaaagcccctgaatggtcaggatggtaacaaccagcagaatgctggtggcaaccaacctcagaacagtcagg

SEQ ID NO: 500462 - DNA, 75 bp, synthetic construct
  source 1..75: mol_type = other DNA
aaagaggcccctgcctccattctgacagggttttgtttgtactggttgcaaaccaaggctgtagggcaatccgtc

SEQ ID NO: 500463 - DNA, 75 bp, synthetic construct
  source 1..75: mol_type = other DNA
cacggatatcgacaaactggtccgcagtctccagaccagagagcagtctgaccatacactgcagtatcaccttcc

SEQ ID NO: 500464 - DNA, 75 bp, synthetic construct
  source 1..75: mol_type = other DNA
ttgcaggtgccgctacgtgacttgtggaatccggcgacctgtccggtcagtttcctgccttatctcgcctgggcg

SEQ ID NO: 500465 - DNA, 75 bp, synthetic construct
  source 1..75: mol_type = other DNA
ggctttcctttgctgagcaggtagtttctgaagcacattctgaaccgccccggttttcctggagagtgttttatc

SEQ ID NO: 500466 - DNA, 75 bp, synthetic construct
  source 1..75: mol_type = other DNA
cggaagacgttgtgacctatgatgacggcgcaatcgacgtctacactgcatgggaagagatgggtaaagtccgcg

SEQ ID NO: 500467 - DNA, 75 bp, synthetic construct
  source 1..75: mol_type = other DNA
acaacatgacccgtgacactctgaaccgcgcaattgcacgtggtgtgggcggtgatgatgatgcaaacatggaaa

SEQ ID NO: 500468 - DNA, 75 bp, synthetic construct
  source 1..75: mol_type = other DNA
gctcctgccattcgcctgacgctccatcatgaaatcgctgatttctgcgcgacgttggaggcgccgggcgaaccg

SEQ ID NO: 500469 - DNA, 75 bp, synthetic construct
  source 1..75: mol_type = other DNA
catctgccgtgctggcactgctggatgagctggagcacgccagaaccatggctcctgccattcgtctgacgctcc

SEQ ID NO: 500470 - DNA, 75 bp, synthetic construct
  source 1..75: mol_type = other DNA
gcgtctgatcgacatgctggaagattgcgacgatgttcaggaagtttaccataacggtgaaatctctgatgaggt

SEQ ID NO: 500471 - DNA, 75 bp, synthetic construct
  source 1..75: mol_type = other DNA
tagcctacgtgaatatgtttatttgacggaggctggatacaaggagtccaggaaagtaccaaatcgcccacaacg

SEQ ID NO: 500472 - DNA, 75 bp, synthetic construct
  source 1..75: mol_type = other DNA
gattttacatctgtagattttgaagttgcctttggcgatctcgaaaaaagcaaactaatcaaaactggccccatg

SEQ ID NO: 500473 - DNA, 75 bp, synthetic construct
  source 1..75: mol_type = other DNA
tttgaactccctcggaggtgattgtaatggtgaaaatagcatagctggttttgatggtggcggtggaggaggtga

SEQ ID NO: 500474 - DNA, 75 bp, synthetic construct
  source 1..75: mol_type = other DNA
aacacaaaacgtttagtaaaatatgccaatcaatatttttcaataaatttatttttaaaaaaataatacaatttt

SEQ ID NO: 500475 - DNA, 75 bp, synthetic construct
  source 1..75: mol_type = other DNA
actatcgctacaggaactctttacaccctaagtttagtgatagtcctgatatctctatgaatgcctggacttttg

SEQ ID NO: 500476 - DNA, 75 bp, synthetic construct
  source 1..75: mol_type = other DNA
atgctggatttaacctcagagatataatcgcctggatgagaacaaaagctcctcatcgcgcacaaaggctaagct

SEQ ID NO: 500477 - DNA, 75 bp, synthetic construct
  source 1..75: mol_type = other DNA
gtactacataaaaactcaaacaatgcctacctaggttcaagccctgcacaaaaatcggctggagccattttcaaa

SEQ ID NO: 500478 - DNA, 75 bp, synthetic construct
  source 1..75: mol_type = other DNA
gtgccttagggcaactttggcttacagcactttgcaaacagggacatgaagttcagggctggctgcgtgtaccgc

SEQ ID NO: 500479 - DNA, 75 bp, synthetic construct
  source 1..75: mol_type = other DNA
ccagaggctgtcgcgcaggccataaaaacgcgatttctgctttggtacgggcagtggtttctggacaccacagaa

SEQ ID NO: 500480 - DNA, 75 bp, synthetic construct
  source 1..75: mol_type = other DNA
ataaatcagatagctcagttctgttatcgtatggaaaatgaatgggcattcacctttgataatatccacgttcca

SEQ ID NO: 500481 - DNA, 75 bp, synthetic construct
  source 1..75: mol_type = other DNA
catatcgttatgttgcgcaaaagcagcacgctggatcccagcgccctggacgcacaaatttatcagtacgagcga

SEQ ID NO: 500482 - DNA, 75 bp, synthetic construct
  source 1..75: mol_type = other DNA
tctccccgttatccgaaaaactggaagacatccggcgcgagagttcaccatgattcagtcagcaccgctgatgct

SEQ ID NO: 500483 - DNA, 75 bp, synthetic construct
  source 1..75: mol_type = other DNA
atttgccgattgagaatttcggatattgatcttaaggcaaagtgtatatatatccatcgattaaaaaaaggcttt

SEQ ID NO: 500484 - DNA, 75 bp, synthetic construct
  source 1..75: mol_type = other DNA
catcgatacatcgagtcaggcgatggacgagcttgtaaagcgtctctcagccatcagaaagccccgtgacgaggt

SEQ ID NO: 500485 - DNA, 75 bp, synthetic construct
  source 1..75: mol_type = other DNA
ccagcggcgtcgcatccgatggatgtcatgcgcaccggcgtttccgcgctcggctgcacgctgccagaaaaagag

SEQ ID NO: 500486 - DNA, 75 bp, synthetic construct
  source 1..75: mol_type = other DNA
tatcactacagccacaacggcgaacgcatccagccggaaaccgatgacgactccatcggcggtcacttcctgcat

SEQ ID NO: 500487 - DNA, 75 bp, synthetic construct
  source 1..75: mol_type = other DNA
tgccggaggtgcagcttaccgtgaatggctgtcccagagtgacgcagtgccgcctggaaaggtcagcgccgcgca

SEQ ID NO: 500488 - DNA, 75 bp, synthetic construct
  source 1..75: mol_type = other DNA
ctcatttaatgcaagagttttgcaaggctatatgcttagcaaataatgttaaagaaactttgccgagtaagttag

SEQ ID NO: 500489 - DNA, 75 bp, synthetic construct
  source 1..75: mol_type = other DNA
gggaaaatagtatttgataagttagctagtggccctaatcagcgaactgacagaattcctagaaaactgaaaagt

SEQ ID NO: 500490 - DNA, 75 bp, synthetic construct
  source 1..75: mol_type = other DNA
acctcgaaacaatagaccgcgcatttagtgcccttgcttacgctgaaggtatgtacgaaatattgcaaatgtgtc

SEQ ID NO: 500491 - DNA, 75 bp, synthetic construct
  source 1..75: mol_type = other DNA
tgacgcgtcgcagttaacggttgaggaaatacgcgcaacaacggaacgcatgaaacaggatcacccaaatttggg

SEQ ID NO: 500492 - DNA, 75 bp, synthetic construct
  source 1..75: mol_type = other DNA
gatggtcggtgatgaaatcggtaacgaaaattttgtcccgctaatgcaaacggcgcgatcgtgtccatctgccgc

SEQ ID NO: 500493 - DNA, 75 bp, synthetic construct
  source 1..75: mol_type = other DNA
cactggcgcaattatcccgccgcgttgaggaacgaccgaacaagcgcccgaacaattctgatctgcgtgattccg

SEQ ID NO: 500494 - DNA, 75 bp, synthetic construct
  source 1..75: mol_type = other DNA
ccggcacggcaacaggacggggattacagttatctggcggatattttgcaaaccgtgttgcctgacgttgcctag

SEQ ID NO: 500495 - DNA, 75 bp, synthetic construct
  source 1..75: mol_type = other DNA
ccaggctaacgcccacctcagagcgctgctaaaggcgcagggatttgcacttagtcacagttttatgtcggtgct

SEQ ID NO: 500496 - DNA, 75 bp, synthetic construct
  source 1..75: mol_type = other DNA
ggtatcattacccgtatggaagacgtttttcatcaggatccggtctccgtactgaatctgtttatgcgtagtttt

SEQ ID NO: 500497 - DNA, 75 bp, synthetic construct
  source 1..75: mol_type = other DNA
gatgtgttcaaagaagaaaggttggtgctaaataaacataaggctggactgtccgaaactaacattaataaaata

SEQ ID NO: 500498 - DNA, 75 bp, synthetic construct
  source 1..75: mol_type = other DNA
tatttggcgttggcattgacgtaacacctccgccggtagtcctgctggatgaagtacacacctatgtggggaata

SEQ ID NO: 500499 - DNA, 75 bp, synthetic construct
  source 1..75: mol_type = other DNA
atcagcatcagcgagagcgattggttagcgcagttacatcacgccattacccaacacggctttgcagaactgcat

SEQ ID NO: 500500 - DNA, 75 bp, synthetic construct
  source 1..75: mol_type = other DNA
ccgtcggtcggttctcagctattacaatccgtttaagtccggtaacaacctgactgaacgactgctgctaagctc

SEQ ID NO: 500501 - DNA, 75 bp, synthetic construct
  source 1..75: mol_type = other DNA
acatcttcaccaccgtcacccgtgctgctgggggaagccgccatgctgccggtactcactccggagttgcgcccg

SEQ ID NO: 500502 - DNA, 75 bp, synthetic construct
  source 1..75: mol_type = other DNA
cccccggttacggcgcctctgccggcgcagggagagacgttggtgctgcccgtgaccacgccggaaatgacgccg

SEQ ID NO: 500503 - DNA, 75 bp, synthetic construct
  source 1..75: mol_type = other DNA
cgcagctctgcgtggaaggtgaactgggccatctggcagatgcgccgcgttatgaccaggccgccaatgcagaca

SEQ ID NO: 500504 - DNA, 75 bp, synthetic construct
  source 1..75: mol_type = other DNA
caccattatcggtgggctgttaatgatgacgctgattggtaaacccatcgcctggttacaagaagcactgattca

SEQ ID NO: 500505 - DNA, 75 bp, synthetic construct
  source 1..75: mol_type = other DNA
ggtcagtggcgtctacggaccagaagccgtgaaatttgtcggctcaatcatccctccgtttggcatcacactttc

SEQ ID NO: 500506 - DNA, 75 bp, synthetic construct
  source 1..75: mol_type = other DNA
tgctacctagcggcggttacgcgggaattggccacacagtcgtctctggcagactctatcgcggaattaaaaacc

SEQ ID NO: 500507 - DNA, 75 bp, synthetic construct
  source 1..75: mol_type = other DNA
ttttagtggcagtggttctacattggtagctgcgaaagatttaggtagggattatattggtttcgaaataaaccc

SEQ ID NO: 500508 - DNA, 75 bp, synthetic construct
  source 1..75: mol_type = other DNA
tgctatctggctgcggttacgcgggaactggtcacacagtcgtctctggcagattctatcgcggaattaaaaact

SEQ ID NO: 500509 - DNA, 75 bp, synthetic construct
  source 1..75: mol_type = other DNA
aaagcaactcgcaactgtactggcatacccgttttaacccagacgatcaggccgttccgctccccattcctaccg

SEQ ID NO: 500510 - DNA, 75 bp, synthetic construct
  source 1..75: mol_type = other DNA
gagattgaggcgctggcgcgtggggcaaccgtaaattatgacgggaaaaatttcacgtatatggttactaatgag

SEQ ID NO: 500511 - DNA, 75 bp, synthetic construct
  source 1..75: mol_type = other DNA
taaccggggcggtgctgcgggatatatcgcgaaatacatttcaaaaaacatcgacggctatgcactggatggtca

SEQ ID NO: 500512 - DNA, 75 bp, synthetic construct
  source 1..75: mol_type = other DNA
tactgtctggtataccgccagcaatgcagggcgtttttacggcatctgggatagagccagaggacgacagcgtca

SEQ ID NO: 500513 - DNA, 75 bp, synthetic construct
  source 1..75: mol_type = other DNA
gtggggcaaatgtcccgcgcgattgtcagactgtcagggttgcccgtagcccgtcggatgacgttaacgagtacg

SEQ ID NO: 500514 - DNA, 75 bp, synthetic construct
  source 1..75: mol_type = other DNA
ccaataccaaaaccagagaatgacaaatttaccgtatcgatcccggacccaaaggagtatttcattaacggcgta

SEQ ID NO: 500515 - DNA, 75 bp, synthetic construct
  source 1..75: mol_type = other DNA
ggagcatacaaaatcaacaacgaagacgattatcaccgcaaagtgccgaacaagtcagctcagtggctaaaacaa

SEQ ID NO: 500516 - DNA, 75 bp, synthetic construct
  source 1..75: mol_type = other DNA
cagccgggcacatgccggaatgggattacatcagcccaatggtaaggcattcaggaaataccctggatcgaaaaa

SEQ ID NO: 500517 - DNA, 75 bp, synthetic construct
  source 1..75: mol_type = other DNA
cagtttgtttatctcgtgaaaggggaaaaattagcgtctgcgttgggttatggctttggcgaatatgttggcgag

SEQ ID NO: 500518 - DNA, 75 bp, synthetic construct
  source 1..75: mol_type = other DNA
cactggaagcgcgtggactgtaccggagagcggcggcgcggtgggctgaggtcatcatgctggcgaatgatgaca

SEQ ID NO: 500519 - DNA, 75 bp, synthetic construct
  source 1..75: mol_type = other DNA
caaagtgtatatatatccatcgattaaaaaaaggcttttcaacaacgcacccgctattgaacaaagaagttcagg

SEQ ID NO: 500520 - DNA, 75 bp, synthetic construct
  source 1..75: mol_type = other DNA
agtcatacacagcatttagttattattccttatatcagtgggtatcgtgataaagataccctgctgttttgtgaa

SEQ ID NO: 500521 - DNA, 75 bp, synthetic construct
  source 1..75: mol_type = other DNA
catgtaatcccaatggatcaggttgagagtatttcaatatttgatactgaaacttataaatctttcgaagatttt

SEQ ID NO: 500522 - DNA, 75 bp, synthetic construct
  source 1..75: mol_type = other DNA
taatgatttacaggtctacggtttgcgtgtcgtcgagccacaccacgacggaacgccgcactggcatatgatgct

SEQ ID NO: 500523 - DNA, 75 bp, synthetic construct
  source 1..75: mol_type = other DNA
ctgtcaattgttgatgttaacgcgggtgcgcagcctctctacaatcaatcaaaaacccacgtactggcagtgaac

SEQ ID NO: 500524 - DNA, 75 bp, synthetic construct
  source 1..75: mol_type = other DNA
gcttcccatacaatacgccgacctcaaaagaagcgtatctgtatcgcgaaatctttgaagaactgttcccgctcc

SEQ ID NO: 500525 - DNA, 75 bp, synthetic construct
  source 1..75: mol_type = other DNA
gcttcccgtacaacactccgacctcaaaagaagcgtatctgtatcgcgaaatctttgaagaattgttcccacttc

SEQ ID NO: 500526 - DNA, 75 bp, synthetic construct
  source 1..75: mol_type = other DNA
tacctgcgcgggcgctacacgctgccgctaccggaagtgccaacagtgatccatgacgtagccgtgtcgattacc

SEQ ID NO: 500527 - DNA, 75 bp, synthetic construct
  source 1..75: mol_type = other DNA
aaaggacgactacaaagacgccctgaagcaactggcggatatccgcgataacaaaatgacgctcggcctgccatc

SEQ ID NO: 500528 - DNA, 75 bp, synthetic construct
  source 1..75: mol_type = other DNA
cccgtatccgcgttgaccttgctcagaacggtatcaggccgcagcgatgggagcttgaggcgctggcgcgtggag

SEQ ID NO: 500529 - DNA, 75 bp, synthetic construct
  source 1..75: mol_type = other DNA
tgccaggcacagaagtcaccaccaccgatgccgttggcattagtggcgatgacatggaagcattggctttcgcct

SEQ ID NO: 500530 - DNA, 75 bp, synthetic construct
  source 1..75: mol_type = other DNA
ggctcaggagggcattaccccggaacggtgggcgctcgaagcgctggcgcgtggggcaacggtgatttatggcga

SEQ ID NO: 500531 - DNA, 75 bp, synthetic construct
  source 1..75: mol_type = other DNA
gctggcgcacctcgcaataatcgccagcaaagaagcaatgcgccactcaaaacgagcgagcaagctccatcagcc

SEQ ID NO: 500532 - DNA, 75 bp, synthetic construct
  source 1..75: mol_type = other DNA
ggaatgacccggtggtcgtgagggcgctcagaggcgcattaaaatacggcctgagaagaccaaaccgtcagcaaa

SEQ ID NO: 500533 - DNA, 75 bp, synthetic construct
  source 1..75: mol_type = other DNA
cgaccgtaaattatgacgggaaaaaattcacgtatccggtcgctgatgagtggccggggttctcgttacccattt

SEQ ID NO: 500534 - DNA, 75 bp, synthetic construct
  source 1..75: mol_type = other DNA
cgtactggaaagcggcatcacggaggagatgtatctggaaatggaacggcttattgccgatgccaaacccgcaag

SEQ ID NO: 500535 - DNA, 75 bp, synthetic construct
  source 1..75: mol_type = other DNA
ctactataaagcatcttttggaattgaaagttcacgatgagattgaggggaatatttcactgaacaatatggttg

SEQ ID NO: 500536 - DNA, 75 bp, synthetic construct
  source 1..75: mol_type = other DNA
cggtctgtgcagacaaagtggacatgattattgcgtgtcaggagcgaaacagtgaacaaaccacaatccctgcgc

SEQ ID NO: 500537 - DNA, 75 bp, synthetic construct
  source 1..75: mol_type = other DNA
ctggcagacgtggcggctggctgacgccagccagaccatcagcacgcaggcagacgagctgcagagcaaaagcca

SEQ ID NO: 500538 - DNA, 75 bp, synthetic construct
  source 1..75: mol_type = other DNA
gctctatgccgaagcagaacagaccagtgtactgctgagacaacgactacaccggattgaggaactgaaacgtga

SEQ ID NO: 500539 - DNA, 75 bp, synthetic construct
  source 1..75: mol_type = other DNA
atggtgtcacaggaatttcttttaaacggtgcttttgataagtggagcgacagagtacataccgcttacgagaat

SEQ ID NO: 500540 - DNA, 75 bp, synthetic construct
  source 1..75: mol_type = other DNA
cagacgagcttcggagcaaaagccaggcactggtaaagagcaacagccagctgatcagcctgtccattctggctg

SEQ ID NO: 500541 - DNA, 75 bp, synthetic construct
  source 1..75: mol_type = other DNA
gctctatgccgaagcagaacagaccagtgcactgctgagacaacgacaacgccggattgaggaactgaaacgtga

SEQ ID NO: 500542 - DNA, 75 bp, synthetic construct
  source 1..75: mol_type = other DNA
gtgcctcagaagataaaaacatgtattttttcgacgcgtaatattaacgtcatccccataaaaataaatcaggaa

SEQ ID NO: 500543 - DNA, 75 bp, synthetic construct
  source 1..75: mol_type = other DNA
acaatgaagcggggtctgtgggcagataaaaaacctgttcctccatggctgtggcgaaaagaaaataaaaatgac

SEQ ID NO: 500544 - DNA, 75 bp, synthetic construct
  source 1..75: mol_type = other DNA
gctctacgccgaagcagaacagaccagcgcactgctgagacaacgacaacgccggattgaggaactgaaacgtga

SEQ ID NO: 500545 - DNA, 75 bp, synthetic construct
  source 1..75: mol_type = other DNA
atgaaccggttgctgctggttatgctggcgttattactggcgtcgctgggctggcagacgtggcggttggctgat

SEQ ID NO: 500546 - DNA, 75 bp, synthetic construct
  source 1..75: mol_type = other DNA
gccagccagaccatcagcacgcaggcagacgagctgcagagcaaaagtcaggcactggcaaagagcaacagccag

SEQ ID NO: 500547 - DNA, 75 bp, synthetic construct
  source 1..75: mol_type = other DNA
caccggaggtatggcttaccgtcagtggttgtccgcgagtgacgccgtgtcggctggatcaggcaacgccgcgca

SEQ ID NO: 500548 - DNA, 75 bp, synthetic construct
  source 1..75: mol_type = other DNA
cggtgaagacagtcatgatgtatgggaagagttcgaatggggaaacttccttatatccagagaagaaagtatttt

SEQ ID NO: 500549 - DNA, 75 bp, synthetic construct
  source 1..75: mol_type = other DNA
aagttatgggtatactattgggttaccaaaagaattacatatatttgaacgtgaccaagatcggatggaggtttt

SEQ ID NO: 500550 - DNA, 75 bp, synthetic construct
  source 1..75: mol_type = other DNA
aactggtaatcaccgagcctggtgcttacccggaagggacaaccacgtcagccccggctaatgcctggcaaaaat

SEQ ID NO: 500551 - DNA, 75 bp, synthetic construct
  source 1..75: mol_type = other DNA
tcgtcgttttattcaacaagggcataaagttatcgccactggccgtcgccaggaacggttgcaggagttaaaaga

SEQ ID NO: 500552 - DNA, 75 bp, synthetic construct
  source 1..75: mol_type = other DNA
tatgtctgtagacacacctaatattttgaagttctgtttagatattaaatcagaactggtgaatttaggagcaaa

SEQ ID NO: 500553 - DNA, 75 bp, synthetic construct
  source 1..75: mol_type = other DNA
cgtatttggaatatttatcaagattatcagtctgctttattggaaagtggtggtgtggattttgatgatatactt

SEQ ID NO: 500554 - DNA, 75 bp, synthetic construct
  source 1..75: mol_type = other DNA
ttgaggacgttagagaaaagcgcaatcgtgaaaaaattataagtcaatatcttaatgtattctctattattaaaa

SEQ ID NO: 500555 - DNA, 75 bp, synthetic construct
  source 1..75: mol_type = other DNA
aattcgtcgcggatgataaaaacgcggtgctcgccgcatctccagaacgtgtagattctctggtggcggacggga

SEQ ID NO: 500556 - DNA, 75 bp, synthetic construct
  source 1..75: mol_type = other DNA
gtgacgctgactgccagctcggaaaatttagttctggatcctaaagggacggcgaaaactaatgagcaaggacag

SEQ ID NO: 500557 - DNA, 75 bp, synthetic construct
  source 1..75: mol_type = other DNA
ttatatccagagaagaaagtattttacttcacacaattcagtctgaacgattaaacaccgatttctctttattca

SEQ ID NO: 500558 - DNA, 75 bp, synthetic construct
  source 1..75: mol_type = other DNA
cagttactcgcaccaccgataaagattctgaaaaaacttttgttcaggagacgctgaaagatacctgggagtctg

SEQ ID NO: 500559 - DNA, 75 bp, synthetic construct
  source 1..75: mol_type = other DNA
gctgtagataaagaatccgcgcacgaatttgtacaggaaacactgcaggaagcctgggaaaccgctgacgactgg

SEQ ID NO: 500560 - DNA, 75 bp, synthetic construct
  source 1..75: mol_type = other DNA
ccttctggcatgatttagcggccccggtcattgctggcatttttgccagtctgatcgtgaactcgctgaacaagc

SEQ ID NO: 500561 - DNA, 75 bp, synthetic construct
  source 1..75: mol_type = other DNA
gcccccagacgagagcttgaggatgacgactatgaaccaatcctcactggaaccaaaaccgcagaactgttcgct

SEQ ID NO: 500562 - DNA, 75 bp, synthetic construct
  source 1..75: mol_type = other DNA
cttggtttaagagaactcggtaccagtggtgaaaagatccccctgttgagcacggctaacacatggagtgcacac

SEQ ID NO: 500563 - DNA, 75 bp, synthetic construct
  source 1..75: mol_type = other DNA
acagaaaaaccagaacggcgcagatattccgggaaaagataccttcaccaaaaatattggtgcctgccgcgcata

SEQ ID NO: 500564 - DNA, 75 bp, synthetic construct
  source 1..75: mol_type = other DNA
ggtggtcttgaccgagaggctgtcaaactgatgcgatcacttgagaagtgcgatccttgtgttggggcaggcgtt

SEQ ID NO: 500565 - DNA, 75 bp, synthetic construct
  source 1..75: mol_type = other DNA
cggtatttattatcgttctgcgcgtgacggttatggttttgaagccgactggtcggaattttatactacaacacg

SEQ ID NO: 500566 - DNA, 75 bp, synthetic construct
  source 1..75: mol_type = other DNA
ttcgtttgatggttctaaaaatattgagctaacggctgaaaatttaaatcttgagcaaaccgtagaactagccgc

SEQ ID NO: 500567 - DNA, 75 bp, synthetic construct
  source 1..75: mol_type = other DNA
gccttggcggtctgtcatctgttcagacatggaatggtcccggctggtctgacaggtcaggttatgtcgttacgg

SEQ ID NO: 500568 - DNA, 75 bp, synthetic construct
  source 1..75: mol_type = other DNA
ctgtcgagtggcagaagggcgggcgcgcttaccccgcgcttgactgctttggcatcgtcaacgaaatcaggcgcg

SEQ ID NO: 500569 - DNA, 75 bp, synthetic construct
  source 1..75: mol_type = other DNA
cgagattattttaagcgctgtagataaaaaactgagggatgatggatttttatttagacgttatatagatgacta

SEQ ID NO: 500570 - DNA, 75 bp, synthetic construct
  source 1..75: mol_type = other DNA
ttttaacacggcgaaaccgtgggccgatgcggtgatttccaatcgtccgtttgcgggtaatactggcaacgttga

SEQ ID NO: 500571 - DNA, 75 bp, synthetic construct
  source 1..75: mol_type = other DNA
ctgttaaatggcagaagggcggtagagcctacccgctactcgactgcttcggcattgtgaatgaaatacgcagcg

SEQ ID NO: 500572 - DNA, 75 bp, synthetic construct
  source 1..75: mol_type = other DNA
tgcaacccaggagtgaacgttaccttccttcctgtctcgcgtttcaaacgtcgttttgtcaaagtggagttctgg

SEQ ID NO: 500573 - DNA, 75 bp, synthetic construct
  source 1..75: mol_type = other DNA
ctgtcgagtggcagaagggcggacgcgcttaccccgcgctggactgttttggcatcgtcaacgaaatcaggcgcg

SEQ ID NO: 500574 - DNA, 75 bp, synthetic construct
  source 1..75: mol_type = other DNA
cgcgccagactttcaacggcgggatcaccggggcgctgacagggaacgccgataccgcgacgaaattgaaaacag

SEQ ID NO: 500575 - DNA, 75 bp, synthetic construct
  source 1..75: mol_type = other DNA
atgccgttgctgggtaataacgcgacctttggcactcatcagttctctattaaggtaaacgtaaaagaatgcatt

SEQ ID NO: 500576 - DNA, 75 bp, synthetic construct
  source 1..75: mol_type = other DNA
atttgctttagggcaaacaggaagcactgtcggaaatgataaagctgttggctggaactggaatagcggggtcta

SEQ ID NO: 500577 - DNA, 75 bp, synthetic construct
  source 1..75: mol_type = other DNA
ggagcggtacaagtggcgctcatgcacctgtacatgtacgttcgcgacgagatactgatacagccagttggtcag

SEQ ID NO: 500578 - DNA, 75 bp, synthetic construct
  source 1..75: mol_type = other DNA
atgccattgctgggtaataatgcaacttttggcattcataagttttctattcaggtaaacgtaaaagaatgcatt

SEQ ID NO: 500579 - DNA, 75 bp, synthetic construct
  source 1..75: mol_type = other DNA
ccatggttcctttcatcattgtgattggtattatgattgcgccagtatttcagcaggtaatgatgatgaccatgt

SEQ ID NO: 500580 - DNA, 75 bp, synthetic construct
  source 1..75: mol_type = other DNA
ggagttaaccaatgatgacaaaccgcaggatagcggtccgttaatgtggatatctcgcggtattatgccgtatgt

SEQ ID NO: 500581 - DNA, 75 bp, synthetic construct
  source 1..75: mol_type = other DNA
actctgccgataatattggtggtgtttattacagaccaattcaaaaaaatattaatggcacatggtataacgtat

SEQ ID NO: 500582 - DNA, 75 bp, synthetic construct
  source 1..75: mol_type = other DNA
actcaattagtggcgtttataatgcgactattggtggagcatcaacattgattcttcactttaatatgaatgcgg

SEQ ID NO: 500583 - DNA, 75 bp, synthetic construct
  source 1..75: mol_type = other DNA
gcacgagcggtgaccatgcgcccgtacatatccgttcgcggcgggatactgattctgccaactggtctgaatggg

SEQ ID NO: 500584 - DNA, 75 bp, synthetic construct
  source 1..75: mol_type = other DNA
ctgatttaacgtcagtcggtcgcgatattctggctaaaacaagcacactggccgttatccaataccttggtttaa

SEQ ID NO: 500585 - DNA, 75 bp, synthetic construct
  source 1..75: mol_type = other DNA
aacacgcagattgctacgaccgcttatgtaagagctgccatatccgcattggttggttcatcaccagaagctctt

SEQ ID NO: 500586 - DNA, 75 bp, synthetic construct
  source 1..75: mol_type = other DNA
cgaaattgaaaacagccagaaacattaatggcgtcaggttcgatggttctggtgacattaatatcaatactctgg

SEQ ID NO: 500587 - DNA, 75 bp, synthetic construct
  source 1..75: mol_type = other DNA
tccgtgatagcgccatcaacgaaggttttaacacagccaaaccctgggctgatgcggtgatctctaatcgtccgt

SEQ ID NO: 500588 - DNA, 75 bp, synthetic construct
  source 1..75: mol_type = other DNA
ccgaagaggtgatcccgctggataacgcctcggcctcggaaattgcccgcgtgctggaaagcctgactaaaaaca

SEQ ID NO: 500589 - DNA, 75 bp, synthetic construct
  source 1..75: mol_type = other DNA
acaccgcgcagccggtactgccagcgcaaaaccaggccttaccgccggaagttcgcgcattcctcaatgccggga

SEQ ID NO: 500590 - DNA, 75 bp, synthetic construct
  source 1..75: mol_type = other DNA
ggaagtgtcgaaggtggaaggacagaccagcctcgacgtggtgtttggtgagcgcaaactgaaaaccaccgtgtt

SEQ ID NO: 500591 - DNA, 75 bp, synthetic construct
  source 1..75: mol_type = other DNA
aaaacttaacaagaaaattccagaagcaaaaaaaataaaagacaaattgaggcactcaatcaaatcggtaataaa

SEQ ID NO: 500592 - DNA, 75 bp, synthetic construct
  source 1..75: mol_type = other DNA
acaatcaggatgccatggcagtagaaaaactttctgagggtatccgtctgtttgccgttgaccaacgaaaactgg

SEQ ID NO: 500593 - DNA, 75 bp, synthetic construct
  source 1..75: mol_type = other DNA
agaagcaggcgtttttctgatttcaccgtttgtgggccgtatttatgactggtatcaggcgcgcaaaccaatgga

SEQ ID NO: 500594 - DNA, 75 bp, synthetic construct
  source 1..75: mol_type = other DNA
aaagcagccggagtatcagcagaaacggcacagcaacgcataaaagaattccactctgaagaattccttcagtca

SEQ ID NO: 500595 - DNA, 75 bp, synthetic construct
  source 1..75: mol_type = other DNA
atgaaaaaagttaacattggaaacgtaccaaagatgctcgtaccgctctttgagagcggtacaattgtgttttgt

SEQ ID NO: 500596 - DNA, 75 bp, synthetic construct
  source 1..75: mol_type = other DNA
cagagttgtgaaaatggagaattaataacccgaacacgaggcactccgcagggtggggtcattagtccgctactt

SEQ ID NO: 500597 - DNA, 75 bp, synthetic construct
  source 1..75: mol_type = other DNA
tgattcaggcattgctgcgggaaattggtgccggacgtccggggctttttacccacgttggcctgggatcatttg

SEQ ID NO: 500598 - DNA, 75 bp, synthetic construct
  source 1..75: mol_type = other DNA
cgcttctaccaactttggctttggtattccgggtggtattcctggggttgcactgcgcgaaggtgttccttatca

SEQ ID NO: 500599 - DNA, 75 bp, synthetic construct
  source 1..75: mol_type = other DNA
ttctggtcgatggcatcgttgagcaccgcgaacaaccgcaaacctatcttggcggctacgacctgacaattagcg

SEQ ID NO: 500600 - DNA, 75 bp, synthetic construct
  source 1..75: mol_type = other DNA
gctgccactgagcgcgaagcacgtgcacagctgccgcacgcacatcttatttttgtcgcccgtattcgccagggg

SEQ ID NO: 500601 - DNA, 75 bp, synthetic construct
  source 1..75: mol_type = other DNA
atgcaggaaaatagtcctttgcttcagctacaaaacgtaggatatctggcgggtgatgcgaagattcttaataac

SEQ ID NO: 500602 - DNA, 75 bp, synthetic construct
  source 1..75: mol_type = other DNA
tctaaagaagcgtttggcgttgctatgcttgagcgccattacgccgcatatcaccagcgactgactgagttgctg

SEQ ID NO: 500603 - DNA, 75 bp, synthetic construct
  source 1..75: mol_type = other DNA
ttctattcagggcaactcatttctgtgatggggcacggaatgggaattccatcaatgacattatatgcccatgaa

SEQ ID NO: 500604 - DNA, 75 bp, synthetic construct
  source 1..75: mol_type = other DNA
cagaatttcgatgctcaacactattttgcatccctgacaccaggtgctgcagcgtggaatccttccccgattacc

SEQ ID NO: 500605 - DNA, 75 bp, synthetic construct
  source 1..75: mol_type = other DNA
gtgagcaagattgactatcaggcactgcgtgaggcggcagaagcaataaaagtcgtggcaacgccgcaaaaattg

SEQ ID NO: 500606 - DNA, 75 bp, synthetic construct
  source 1..75: mol_type = other DNA
aaatgggcgattttgctgacgtagttttgatgccaggcgacccgctgcgtgcgaagtatattgctgaaactttcc

SEQ ID NO: 500607 - DNA, 75 bp, synthetic construct
  source 1..75: mol_type = other DNA
aacgcgaagcccgcacacagttgccgcacgcccatcttgtttttgttgcccgtattcgtcagggggtgcgccatg

SEQ ID NO: 500608 - DNA, 75 bp, synthetic construct
  source 1..75: mol_type = other DNA
ccaaagtgccagtctgctaaccctgttacgtctcgccaccccgtttagcagcgtagtagcgagactccttaattt

SEQ ID NO: 500609 - DNA, 75 bp, synthetic construct
  source 1..75: mol_type = other DNA
gccacggtaaaaatatccgccttcataccgttaccgctgccagtgagcgcgaagcgcgcgccctgcttccggcat

SEQ ID NO: 500610 - DNA, 75 bp, synthetic construct
  source 1..75: mol_type = other DNA
atggaaatcacgaaaaagagtttactgtgaatatgcagtgtccttataatctgggaacaatgaaggttacgataa

SEQ ID NO: 500611 - DNA, 75 bp, synthetic construct
  source 1..75: mol_type = other DNA
agtatgcacatgcagctgataatctgacttttcggggaaaactgattattcctgcctgcactgtacaaaatgctg

SEQ ID NO: 500612 - DNA, 75 bp, synthetic construct
  source 1..75: mol_type = other DNA
cggcaaggagatacaaatgaagcaatggatagccgcactactgttgatgctgatacccggcgtacaggcggcaaa

SEQ ID NO: 500613 - DNA, 75 bp, synthetic construct
  source 1..75: mol_type = other DNA
cgcaaagttcgcgtagcgctattttccaccggtgatgagttacagttgccaggccagccgctgggtgacggccaa

SEQ ID NO: 500614 - DNA, 75 bp, synthetic construct
  source 1..75: mol_type = other DNA
cttgagtaatggcaaaccggtgaccaaagccctgttccgccagatgctgggggaagagatgaaggtcattgccag

SEQ ID NO: 500615 - DNA, 75 bp, synthetic construct
  source 1..75: mol_type = other DNA
acgatggcacatggatcgctcacccaggccttgcggacacggcaatggcggtattcaacgacattctcggctccc

SEQ ID NO: 500616 - DNA, 75 bp, synthetic construct
  source 1..75: mol_type = other DNA
cgctcgacaccgcgcttaataagatgctttctcgcgtcaccccactcaccgcccaggaaacgctgccactggtac

SEQ ID NO: 500617 - DNA, 75 bp, synthetic construct
  source 1..75: mol_type = other DNA
tcgtgctggaacgcgatcgcggaaatgtagaagcgggcgaatgggtagaagtcgagccatttaacgcgttgttcg

SEQ ID NO: 500618 - DNA, 75 bp, synthetic construct
  source 1..75: mol_type = other DNA
gccaggacgccttgatttccagcgcggcgtgctgcaacgcaacgccgatggcgaactggaagtgacgaccaccgg

SEQ ID NO: 500619 - DNA, 75 bp, synthetic construct
  source 1..75: mol_type = other DNA
tgcaggtcaacactttgcgctcggtttattcctgtttgctctcttgatctgcggtattccttgcatggcagtgaa

SEQ ID NO: 500620 - DNA, 75 bp, synthetic construct
  source 1..75: mol_type = other DNA
atggtgggttatgttaggtctgccagttttgttggcattagctttttggctcgcactgtaccttattgcgcaagt

SEQ ID NO: 500621 - DNA, 75 bp, synthetic construct
  source 1..75: mol_type = other DNA
gagcctgcagtatcaggcgaacatgacctcactgaatgacattcgctttggctttaactgctcaatgatgcgtgc

SEQ ID NO: 500622 - DNA, 75 bp, synthetic construct
  source 1..75: mol_type = other DNA
cgcattcagcagcagcaagatattgataacggaacgttgcctgattttatttcggaaatagcttccattcgcgat

SEQ ID NO: 500623 - DNA, 75 bp, synthetic construct
  source 1..75: mol_type = other DNA
ttccgagcaaagatgaagagcgcaataaccaggtgctcaacaaagtaaaagcggataaatcgctggaagctaata

SEQ ID NO: 500624 - DNA, 75 bp, synthetic construct
  source 1..75: mol_type = other DNA
tggaacaaagtgatcgatgggcaaattaacctgcgcgatgcggttaacggcaccatcagttacaccaatgaagca

SEQ ID NO: 500625 - DNA, 75 bp, synthetic construct
  source 1..75: mol_type = other DNA
gccatcgcgtcggtgaaaaatggcaatctgctattcatccggcaggggcagggcaaaagcgccactggtaaacca

SEQ ID NO: 500626 - DNA, 75 bp, synthetic construct
  source 1..75: mol_type = other DNA
aatttcgcgcagtttcgagccactggaaaacgcgctggcccatgtaaaaaacattattgcgacgcctgccgttta

SEQ ID NO: 500627 - DNA, 75 bp, synthetic construct
  source 1..75: mol_type = other DNA
aaaatcccgcaggtcaccataacccgcagcgacggcgaccgccatcattttgcgattgctgaccgtggagcctat

SEQ ID NO: 500628 - DNA, 75 bp, synthetic construct
  source 1..75: mol_type = other DNA
tgtagcggagttctccatcagtctggctactggtcgggcagatatttacacggaaacgccggtcaaagttcaggc

SEQ ID NO: 500629 - DNA, 75 bp, synthetic construct
  source 1..75: mol_type = other DNA
ccgtgaaggctcatggcatgacaccacgctcggtgcgattgttgaggcgatagcctcccgtaacaggctggaagc

SEQ ID NO: 500630 - DNA, 75 bp, synthetic construct
  source 1..75: mol_type = other DNA
cttaatcgcacatatgccaaccggagcaacgccgaacgggcagcgaaaatgcagtgggaacgcctgcaacgcggc

SEQ ID NO: 500631 - DNA, 75 bp, synthetic construct
  source 1..75: mol_type = other DNA
gctgggcgccaatctgcaggccaaaatttcgcgcagttccgggccgctggaaaacgcgctaacacatgtaaaaac

SEQ ID NO: 500632 - DNA, 75 bp, synthetic construct
  source 1..75: mol_type = other DNA
ctaccggtgatcactatcacacgtaaggacggcgacagtcaccgctttaccctggcagatcgcggagcttacacg

SEQ ID NO: 500633 - DNA, 75 bp, synthetic construct
  source 1..75: mol_type = other DNA
agcatggcgtgcactacggtcagggctggctctacagcaaggcattaccgaaagaggatttcttacgctgggccg

SEQ ID NO: 500634 - DNA, 75 bp, synthetic construct
  source 1..75: mol_type = other DNA
aagcgaagcagggcgattacctggtgggtacggatgaaaacgttctggtacttaatcgcacttatgccaaccgga

SEQ ID NO: 500635 - DNA, 75 bp, synthetic construct
  source 1..75: mol_type = other DNA
cgcagacagacggtagttggttgtcgccagatagttttattccgctggcacagcaaacgggtctttctgagccac

SEQ ID NO: 500636 - DNA, 75 bp, synthetic construct
  source 1..75: mol_type = other DNA
ttacggtcagggctggctgtacagcaaagcgttgccaaaagaagatttcatacgctgggcagaataccatctgta

SEQ ID NO: 500637 - DNA, 75 bp, synthetic construct
  source 1..75: mol_type = other DNA
gtgagaacacgacatctggtcagcctgatttcgggagtactgattctttcagtattactgcctgtcggcttaagc

SEQ ID NO: 500638 - DNA, 75 bp, synthetic construct
  source 1..75: mol_type = other DNA
gtttctcaaagcggggcagggggtgacggccagcggtaaaaaaatcccgcagattaccatcacccgcagcgacgg

SEQ ID NO: 500639 - DNA, 75 bp, synthetic construct
  source 1..75: mol_type = other DNA
ccggtgccagccttgcaccggcatttatgttgacgctgaacagccaggacattaccagcaattttagtgaccgat

SEQ ID NO: 500640 - DNA, 75 bp, synthetic construct
  source 1..75: mol_type = other DNA
ctcacaatctgaataataatggcttcacgacggggctagagcttgaggttcagctttcggaagtggagtacagtt

SEQ ID NO: 500641 - DNA, 75 bp, synthetic construct
  source 1..75: mol_type = other DNA
atcacgcagaatttcagcgaccggctcatcggcctgaccatgaccgacaatcgcggatttgaggctgaccagctc

SEQ ID NO: 500642 - DNA, 75 bp, synthetic construct
  source 1..75: mol_type = other DNA
aaggcgcaggcgatgcgcgccgctcaggctaagtgggataagctgcagcgaggcgttgcggagttttcaattacg

SEQ ID NO: 500643 - DNA, 75 bp, synthetic construct
  source 1..75: mol_type = other DNA
tgatttctcttaccatgaccgacaaccggggctttgaagctgaccaactcgacattgagctcgacgactctgacg

SEQ ID NO: 500644 - DNA, 75 bp, synthetic construct
  source 1..75: mol_type = other DNA
gatattgagcttgatgataccgacgggaaagttgagttacccctgcgcggggcagtgctgacgctgtggcttggc

SEQ ID NO: 500645 - DNA, 75 bp, synthetic construct
  source 1..75: mol_type = other DNA
gcgaagtatattgctgaaactttccttgaagatgcccgtgaagtgaacaacgttcgcggtatgctgggcttcacc

SEQ ID NO: 500646 - DNA, 75 bp, synthetic construct
  source 1..75: mol_type = other DNA
tgggacgaactgatgcgggtggcgagctcattatgcaatattactcgcagatcatggcttcctattttctttatt

SEQ ID NO: 500647 - DNA, 75 bp, synthetic construct
  source 1..75: mol_type = other DNA
atgtgcagggtgaccttgattcactggcgttagcgaatgatgaaaaaccgcaggatagcggtccgttaatgtgga

SEQ ID NO: 500648 - DNA, 75 bp, synthetic construct
  source 1..75: mol_type = other DNA
taaagcactgggcattgatgctcgcgttggtaacctgttctccgctgacctgttttactctccggacggcgaaat

SEQ ID NO: 500649 - DNA, 75 bp, synthetic construct
  source 1..75: mol_type = other DNA
agaaaatcattcgcgttggttcctgtggtgcagttctgccgcacgtaaaactgcgtgacgtagtgattggtatgg

SEQ ID NO: 500650 - DNA, 75 bp, synthetic construct
  source 1..75: mol_type = other DNA
tttgccgctatcgctgactttgacatggtgcgtaacgcggtagatgcggctaaagcactgggcgttgatgctcgc

SEQ ID NO: 500651 - DNA, 75 bp, synthetic construct
  source 1..75: mol_type = other DNA
gggaagaacggcaagcggcaagccgctgccggttatcaccatcacacgcaaagccggtgacggtcatcggttcac

SEQ ID NO: 500652 - DNA, 75 bp, synthetic construct
  source 1..75: mol_type = other DNA
caacaacgttaacattctcggtcgtcagaataccttctttgtcaccaacagcggtgtgcaaaaccgtctggaaac

SEQ ID NO: 500653 - DNA, 75 bp, synthetic construct
  source 1..75: mol_type = other DNA
ggcaaaacgccggtatttttgaagtacgaggatcagctaatgtcatgcctgatgctgctcccggtggtactgctg

SEQ ID NO: 500654 - DNA, 75 bp, synthetic construct
  source 1..75: mol_type = other DNA
gggtcagctatattcaggggcgatggctgggcaatacccgcaccgtacaaaactggctatctcatttacccgcgc

SEQ ID NO: 500655 - DNA, 75 bp, synthetic construct
  source 1..75: mol_type = other DNA
cattttctgaataatagcggcttcacgacgtccttagagcttgaggtcaggctttctgatgtggagtacgaaaca

SEQ ID NO: 500656 - DNA, 75 bp, synthetic construct
  source 1..75: mol_type = other DNA
taaaaacagcccccgttgcggttgcggagcgaagggggctgaaaaggggaattaaggatgattgttattatggtg

SEQ ID NO: 500657 - DNA, 75 bp, synthetic construct
  source 1..75: mol_type = other DNA
tggatatcgtttccggtcgtggcgcagtggtgttcgataacaccgaattccgcgtggtgaactctcgtacccagc

SEQ ID NO: 500658 - DNA, 75 bp, synthetic construct
  source 1..75: mol_type = other DNA
atgactcaaaactatgaactgattgtgaaagggatccgcaattttgagaataaagttacggtaaccttagcgtta

SEQ ID NO: 500659 - DNA, 75 bp, synthetic construct
  source 1..75: mol_type = other DNA
tgaaagggatccgcaattttgagaataaagttgcggtaactttagcgttacgggacaaaaaacgctttgacggtg

SEQ ID NO: 500660 - DNA, 75 bp, synthetic construct
  source 1..75: mol_type = other DNA
aaacccgtggatcatatagaccagaccaatgaaagtgacggcagttttttgatgcggctggcgcgccagtacggt

SEQ ID NO: 500661 - DNA, 75 bp, synthetic construct
  source 1..75: mol_type = other DNA
gcggtatcggtcaaagcgggtaaattgttgatgctcaaagcgggaagtggtacgacggccagcggaaaagctatc

SEQ ID NO: 500662 - DNA, 75 bp, synthetic construct
  source 1..75: mol_type = other DNA
ctgccggtgatcactatcacacgcaaggacggtgacagtcaccgctttatcctggcagatcgcggagcctacacg

SEQ ID NO: 500663 - DNA, 75 bp, synthetic construct
  source 1..75: mol_type = other DNA
gaaggtgacgggcaagcgtcgctgttgtcgcaatatgtggtgattgatcttgatcgtgttgaaggtgccccgctg

SEQ ID NO: 500664 - DNA, 75 bp, synthetic construct
  source 1..75: mol_type = other DNA
atgttaatggcgacctacagacaaattgccgatgatgttaaatcccgaacggggagaacagtcaaaacatgttgg

SEQ ID NO: 500665 - DNA, 75 bp, synthetic construct
  source 1..75: mol_type = other DNA
aggctgcaagggatgatatccgtattaaacggctgatggaaatagagagttttggcccgatagtagcgagcgctt

SEQ ID NO: 500666 - DNA, 75 bp, synthetic construct
  source 1..75: mol_type = other DNA
aaagttgcgaccaatctggcacgtaacatggtgacccagtggggcttctctgagaaattgggtccactgctgtac

SEQ ID NO: 500667 - DNA, 75 bp, synthetic construct
  source 1..75: mol_type = other DNA
gatgatgaaacacgcacaaaatctggaattcgaggaggctgcgcaaattcgcgatcaactgcatcaattgcgaga

SEQ ID NO: 500668 - DNA, 75 bp, synthetic construct
  source 1..75: mol_type = other DNA
ttttcccacagggcatgccggaggagttgtacaactggccacagcgcgaagcgcagtatgtaacagaccggcagc

SEQ ID NO: 500669 - DNA, 75 bp, synthetic construct
  source 1..75: mol_type = other DNA
atggcggctaatacaggtatgcttacaattgattttaagagctttgcagaatccattaaaataactgaaggtgag

SEQ ID NO: 500670 - DNA, 75 bp, synthetic construct
  source 1..75: mol_type = other DNA
aattacgcactcaaagaccatagaattagagtattccagaataacataaactctggtgctggcctgactagaaat

SEQ ID NO: 500671 - DNA, 75 bp, synthetic construct
  source 1..75: mol_type = other DNA
tcaggtattaaaaggcgtctataacgttaaaaatgtgattgttgccgatcgcattgatgaacgactggaaaaagc

SEQ ID NO: 500672 - DNA, 75 bp, synthetic construct
  source 1..75: mol_type = other DNA
ccagccgccatctgattattgctgaaattgttcacggcaaagttggcagaccgcaacgtatataccacagtgggt

SEQ ID NO: 500673 - DNA, 75 bp, synthetic construct
  source 1..75: mol_type = other DNA
agacaggacatggcactatggctgagcattttagataaaattgattatgcatattgtttgaacgaaatactggcc

SEQ ID NO: 500674 - DNA, 75 bp, synthetic construct
  source 1..75: mol_type = other DNA
cttagaaaggggcgcaaatgtttctctggcaaccagtcgttgttttatcacatggctgacagaccaacacgactt

SEQ ID NO: 500675 - DNA, 75 bp, synthetic construct
  source 1..75: mol_type = other DNA
agccagcaagagaaattacgtatccccagtccattgaaaccgttcaactgttcatgccctttcaaggagccagcg

SEQ ID NO: 500676 - DNA, 75 bp, synthetic construct
  source 1..75: mol_type = other DNA
ttaacgccggaagggagttgtttgaactctggcaatccaactttattcagtatcacgccatgaacgcttacacca

SEQ ID NO: 500677 - DNA, 75 bp, synthetic construct
  source 1..75: mol_type = other DNA
tgcaagttcgtcaggggctggcgaaaggcctgggacacgcggtattgtgtgctcacccggtagtgggtgatgaac

SEQ ID NO: 500678 - DNA, 75 bp, synthetic construct
  source 1..75: mol_type = other DNA
ggtgcgaaagcaggttaataccaattacaacgacacgctttcttcgcgcctggctgtgcaaacaacgccagtgat

SEQ ID NO: 500679 - DNA, 75 bp, synthetic construct
  source 1..75: mol_type = other DNA
aaccgcgatcgcaacaatcaacatgatggcgcggtccctcgcaataagtccccgcacacgatttcttcacgtttc

SEQ ID NO: 500680 - DNA, 75 bp, synthetic construct
  source 1..75: mol_type = other DNA
tcgcatcgcttatctctgttctctcacaggcgcactgccgaagcgcagtatatgcagaagcctcgcagatttaat

SEQ ID NO: 500681 - DNA, 75 bp, synthetic construct
  source 1..75: mol_type = other DNA
tgaatctgccggtactcatcaacaacagtcaggcatacgccgaccagtacccggaaaacacccacgccatcccgg

SEQ ID NO: 500682 - DNA, 75 bp, synthetic construct
  source 1..75: mol_type = other DNA
gaaaaaccgaaagcagatgttgcaccgtctaatctcgctattgttggtcgttacgtacttagcgccgatatttgg

SEQ ID NO: 500683 - DNA, 75 bp, synthetic construct
  source 1..75: mol_type = other DNA
atgagtgttatccatcaggaagggctggctatgcccgtcgagcaggaattgataaatatcataataaatgaagcg

SEQ ID NO: 500684 - DNA, 75 bp, synthetic construct
  source 1..75: mol_type = other DNA
ttcagttatatgggtgtggtttaccccgaactggaaaaggaaattgattttagctggagtcagcaatatgtcttt

SEQ ID NO: 500685 - DNA, 75 bp, synthetic construct
  source 1..75: mol_type = other DNA
ggagtcagcaatatgtctttctggctcatgttggtgatctgtctgttaacgccggaagggagttgtttgaactct

SEQ ID NO: 500686 - DNA, 75 bp, synthetic construct
  source 1..75: mol_type = other DNA
gtatggggtattaccgaactaagccagccacaggcgatgggcctcatgttaccgaagcgcctgcgcggattttaa

SEQ ID NO: 500687 - DNA, 75 bp, synthetic construct
  source 1..75: mol_type = other DNA
cggctacctgctacgcggtgggagtggtgagaaatggtatcaccttaacctgccagtgaagatagacaatagcct

SEQ ID NO: 500688 - DNA, 75 bp, synthetic construct
  source 1..75: mol_type = other DNA
catctgatgagtcagacgaaacagggattgtagcctgttcagcctatggtggcggcaagtacgcacagtattctg

SEQ ID NO: 500689 - DNA, 75 bp, synthetic construct
  source 1..75: mol_type = other DNA
tgcacatctaccgcgactgcgggcactgggcgcagtgggaacatgcggatgcctttaaccaactggtgctgaatt

SEQ ID NO: 500690 - DNA, 75 bp, synthetic construct
  source 1..75: mol_type = other DNA
cgaccataaattatggcggggaaaaagtcacgtatccggtcactgatgagtggccgggattctcaacagtaatgg

SEQ ID NO: 500691 - DNA, 75 bp, synthetic construct
  source 1..75: mol_type = other DNA
caaccgtaaattatggcggaaaaaaattcacgtatctggttgctaatgagtggttcgggtttcaagatgacgtgt

SEQ ID NO: 500692 - DNA, 75 bp, synthetic construct
  source 1..75: mol_type = other DNA
gccagcgtaaccagattatcgaaatcatgcgtcgctatgcgctcaaagaggatggcgacgaaagaggagctgcgc

SEQ ID NO: 500693 - DNA, 75 bp, synthetic construct
  source 1..75: mol_type = other DNA
cgccagccaaagcgggctgatgaatattgagacgcgctatcgctataacccggacgtaaaaagcctgccagcgat

SEQ ID NO: 500694 - DNA, 75 bp, synthetic construct
  source 1..75: mol_type = other DNA
tggcgtggtcaacgacaacccggagatcattactaacgtttatcgcgatgatgaatggtttatgaatcgccatcg

SEQ ID NO: 500695 - DNA, 75 bp, synthetic construct
  source 1..75: mol_type = other DNA
ctggaaaaaataccgtaaaggacagatgaccacgaggcaggcatattctgccattgcccgtctgtttaacgatga

SEQ ID NO: 500696 - DNA, 75 bp, synthetic construct
  source 1..75: mol_type = other DNA
ctgcccctacaccgccaccaccatttgcaaaaggcaccggcaaagagtttgccggtgtttactcatggaacgcgc

SEQ ID NO: 500697 - DNA, 75 bp, synthetic construct
  source 1..75: mol_type = other DNA
ccgtatctggagcctgatgcgcacggcattcaaggataatgatttacaggtctacggtttgcgtgtcgtcgagcc

SEQ ID NO: 500698 - DNA, 75 bp, synthetic construct
  source 1..75: mol_type = other DNA
tgcactgtccttgcggggctgacctcattcacacgccgaagaacgatccggatctgtttgagatggaggctgtgc

SEQ ID NO: 500699 - DNA, 75 bp, synthetic construct
  source 1..75: mol_type = other DNA
tgcaggtctacggtatgcgtgttgtcgaaccgcaccacgacgggacgccgcactggcacatgatgttgttttgca

SEQ ID NO: 500700 - DNA, 75 bp, synthetic construct
  source 1..75: mol_type = other DNA
ggtcgttgagcctttgactttaaaaagcggcatcgccgcgcctcggagtcctgtcaataactgtggaaagctcac

SEQ ID NO: 500701 - DNA, 75 bp, synthetic construct
  source 1..75: mol_type = other DNA
gagcttgaggcgctggcgcgtggggcaactgtaaattacgacgggagaagattcagttatcctgttatatgtgat

SEQ ID NO: 500702 - DNA, 75 bp, synthetic construct
  source 1..75: mol_type = other DNA
aagtcgagtttgttgtcgttgatttccggtgcccgcgtcattgagcagggcaatgtgatggtgctgggcggcgat

SEQ ID NO: 500703 - DNA, 75 bp, synthetic construct
  source 1..75: mol_type = other DNA
tccgcagggcgcgttacgcaaatactgctttctctggctcaggattacaacaactgcgccagccggttaatatcc

SEQ ID NO: 500704 - DNA, 75 bp, synthetic construct
  source 1..75: mol_type = other DNA
cctgcaagtcgtttggttgccgtaatttagggcagccaacatctaaagattatagctggcccgactatcgactgg

SEQ ID NO: 500705 - DNA, 75 bp, synthetic construct
  source 1..75: mol_type = other DNA
tacaacgcgttgatatgcgcgaagcacaatttctacgccgcagtcagtttgatgaaattcagtatggcagcgcag

SEQ ID NO: 500706 - DNA, 75 bp, synthetic construct
  source 1..75: mol_type = other DNA
tggggcaaaagcgatgggatcgttaaccgcggttcgcgatccgatctcaacgcccgcatcctgaaaagcgtggtc

SEQ ID NO: 500707 - DNA, 75 bp, synthetic construct
  source 1..75: mol_type = other DNA
atagtggttcacgatcggatcttaatgcgcgaatcctgaaaagcgtggtggatcaactggatatcgccaaaatcc

SEQ ID NO: 500708 - DNA, 75 bp, synthetic construct
  source 1..75: mol_type = other DNA
tacgatcgtgttgaagcagaagaagcgcgtctgtccgatctgatcaccggctttgttgacccgaacgcagaagaa

SEQ ID NO: 500709 - DNA, 75 bp, synthetic construct
  source 1..75: mol_type = other DNA
gtcattgccgctcggcattcgccagcggctttcgctggcggtggcggtgattcatcgcccggagatgttaatcct

SEQ ID NO: 500710 - DNA, 75 bp, synthetic construct
  source 1..75: mol_type = other DNA
gctcaccagttatgacgagcttgatcgtcggatgcgtgcgggcgatatcacggtggcaattgagatcccacccaa

SEQ ID NO: 500711 - DNA, 75 bp, synthetic construct
  source 1..75: mol_type = other DNA
gggatgaagcaaaaacttgggctgtgctgtgcgttaatccacgacccggaactgttgattcttgatgagccaaca

SEQ ID NO: 500712 - DNA, 75 bp, synthetic construct
  source 1..75: mol_type = other DNA
gctgcgcgttaatccacgacccggaactgttgattcttgatgagccaacgacgggggttgatccgctctctcgcg

SEQ ID NO: 500713 - DNA, 75 bp, synthetic construct
  source 1..75: mol_type = other DNA
atgcgcgacccgaagcatcgccgcgacgtctgcccgcggatcgcctggatgccgcaggggctgggcaaaaatctc

SEQ ID NO: 500714 - DNA, 75 bp, synthetic construct
  source 1..75: mol_type = other DNA
cctatttgcaggaagcggcagggcagagcaacgaagccgaagcgccgcccgtggtacacgacaccacccacgcgc

SEQ ID NO: 500715 - DNA, 75 bp, synthetic construct
  source 1..75: mol_type = other DNA
tctgtcgctttgctggccatctttcgcacttctacagggtcgcccaacatgcggtactttgcagccagctcgtgc

SEQ ID NO: 500716 - DNA, 75 bp, synthetic construct
  source 1..75: mol_type = other DNA
tctgtcgctttgcaggccatctttcgcacttctacagggtcgcccaacatgcggtgctttgcagccagcttgtgc

SEQ ID NO: 500717 - DNA, 75 bp, synthetic construct
  source 1..75: mol_type = other DNA
tctgtcgctttgcaggccatctttcgcacttctacagggtcgcccaacatgcggttctttgcagccagctagtgc

SEQ ID NO: 500718 - DNA, 75 bp, synthetic construct
  source 1..75: mol_type = other DNA
ccctgaccggagaaggccatgaaaattatgtcggtgatgaaatggttacccggattgtgccggtacgtaatgttt

SEQ ID NO: 500719 - DNA, 75 bp, synthetic construct
  source 1..75: mol_type = other DNA
atcctttcaatacagtagaaaggaaaaaagtggggatcatgctgaaagtgacaccacagatcaacgaaggtaatg

SEQ ID NO: 500720 - DNA, 75 bp, synthetic construct
  source 1..75: mol_type = other DNA
tgattccagcacaaatgtactctccacgccaagcattactaccctggataaccaggaagccttcttcatggtggg

SEQ ID NO: 500721 - DNA, 75 bp, synthetic construct
  source 1..75: mol_type = other DNA
ctggtgctgtggcgtagcgatgaagatgcgcagcaacgcctgaatatggtgaaagagttcaacgaactgtgccat

SEQ ID NO: 500722 - DNA, 75 bp, synthetic construct
  source 1..75: mol_type = other DNA
aacgtgattccactggcaccgggccatgcctacgggatatttatggaacgcttcaacgagttatcggaattacgc

SEQ ID NO: 500723 - DNA, 75 bp, synthetic construct
  source 1..75: mol_type = other DNA
ctggcacctagccatgcctacgggatgtttatggaacgttttaacgagttatcggagttacgcaaatgcgcatga

SEQ ID NO: 500724 - DNA, 75 bp, synthetic construct
  source 1..75: mol_type = other DNA
ggaagcatttttattatgacaggataaataaagacgacatcgtgattaacgatatcgcagtttccctctcaaata

SEQ ID NO: 500725 - DNA, 75 bp, synthetic construct
  source 1..75: mol_type = other DNA
aaatcaacccattacagatcaaacaggacggcggcaaagctctgaaactgctggtgctctggcgtagtgatgaag

SEQ ID NO: 500726 - DNA, 75 bp, synthetic construct
  source 1..75: mol_type = other DNA
gtttattccaggcaacggtattccggtggatagcgtggtgattgaccgcaaaatcaacccattacagatcaaaca

SEQ ID NO: 500727 - DNA, 75 bp, synthetic construct
  source 1..75: mol_type = other DNA
tggcctaaaagaatggggaattggtatcagtatttataccaacggccttcatcaagagtcttgcatttatttgcc

SEQ ID NO: 500728 - DNA, 75 bp, synthetic construct
  source 1..75: mol_type = other DNA
agaagaagctagacaagaagcccagacacaacaagaagctaccgttaaagctgttcctgatcagcttccccctac

SEQ ID NO: 500729 - DNA, 75 bp, synthetic construct
  source 1..75: mol_type = other DNA
atcgaaaaagagatgaaagtggcgatgacgctgactggcgcgaaatcgattagcgaaattacgcaagattcgctg

SEQ ID NO: 500730 - DNA, 75 bp, synthetic construct
  source 1..75: mol_type = other DNA
tctcttccgctcgtgcactgcctgctattgcagatgcggtgaaaggtgatatcgccattctggcggatagcggaa

SEQ ID NO: 500731 - DNA, 75 bp, synthetic construct
  source 1..75: mol_type = other DNA
cggctatgttcgggaacatggtttccgccaccagtgcttgaaaaacggatcccgaagtcgaatggcaaggaacgc

SEQ ID NO: 500732 - DNA, 75 bp, synthetic construct
  source 1..75: mol_type = other DNA
cccgaagccgaatggcaaggagcgcattctggggatcccaacagtatccgatcgaattgctcagggagcgataaa

SEQ ID NO: 500733 - DNA, 75 bp, synthetic construct
  source 1..75: mol_type = other DNA
tcggcggcgttatagaacagtacaatattccgctgtcggagtggacgacatcaatgtatgtgattcagtcatcga

SEQ ID NO: 500734 - DNA, 75 bp, synthetic construct
  source 1..75: mol_type = other DNA
ttccagctttacgtactgcgcgatcgcggttttatgcgtaacgcgctggagcgtgcaaaagcggcgggttgttcg

SEQ ID NO: 500735 - DNA, 75 bp, synthetic construct
  source 1..75: mol_type = other DNA
gcggctttatgcgtaacgcgctggagcgagcaaaagcggcaggctgctcgacgctggttttcaccgtggatatgc

SEQ ID NO: 500736 - DNA, 75 bp, synthetic construct
  source 1..75: mol_type = other DNA
gcgagcaaaagcagcgggttgttcgacgctggttttcaccgtggatatgccgacaccgggcgcacgctaccgtga

SEQ ID NO: 500737 - DNA, 75 bp, synthetic construct
  source 1..75: mol_type = other DNA
tctcttctgcccgtgcgctgcctgctattgcagatgccgtgaaaggtgatatcgccattctggcagatagcggga

SEQ ID NO: 500738 - DNA, 75 bp, synthetic construct
  source 1..75: mol_type = other DNA
cagcgaaattacgcaagattcgctggtgcaagagctgggtaaagagttgcctgcggcactagctccgatagcgaa

SEQ ID NO: 500739 - DNA, 75 bp, synthetic construct
  source 1..75: mol_type = other DNA
aaagggatcctcgatccagaagatgcacgtgatgccgttcgttttggcgctgacgggattgtggtttctaaccac

SEQ ID NO: 500740 - DNA, 75 bp, synthetic construct
  source 1..75: mol_type = other DNA
ccggggcttatcttgctggataactatcttcctgacggtagaggcattaatttgctgcacgaattagtgcagaca

SEQ ID NO: 500741 - DNA, 75 bp, synthetic construct
  source 1..75: mol_type = other DNA
tcagcgtcagtcggtggggattgttgaaacctggagcgtggctgcctgcatcagcgctgcagaccgagccattaa

SEQ ID NO: 500742 - DNA, 75 bp, synthetic construct
  source 1..75: mol_type = other DNA
atgttgtttgcattaaaatcgctgattaaaacactaactggatgcaatcaattgaaaacagtatttgaagatatc

SEQ ID NO: 500743 - DNA, 75 bp, synthetic construct
  source 1..75: mol_type = other DNA
gaacgccgcgatctcgggcttgatgatggctctttctggccagtactggaaggtatcccggcaacagaaatgttc

SEQ ID NO: 500744 - DNA, 75 bp, synthetic construct
  source 1..75: mol_type = other DNA
cgcgatgtcgatttaacgttagtcggcagctgcgatgaaaacggtcagccgcgcgtgggccagtgggtactggta

SEQ ID NO: 500745 - DNA, 75 bp, synthetic construct
  source 1..75: mol_type = other DNA
cgacgccgaaatgctgtcgatggcggggaaaggctgcattatgggcagcgcgcatcaacggctgaaagatctgca

SEQ ID NO: 500746 - DNA, 75 bp, synthetic construct
  source 1..75: mol_type = other DNA
ccatgcgctggaagcggtggcgaagaaactgggctacagcctgaaggattgtattgcgtttggtgacgggatgaa

SEQ ID NO: 500747 - DNA, 75 bp, synthetic construct
  source 1..75: mol_type = other DNA
cgctgaaagatatctcccgcccaggtggtggattcgccatgttagctgtcgatcagcgtgaggccatgcgcttga

SEQ ID NO: 500748 - DNA, 75 bp, synthetic construct
  source 1..75: mol_type = other DNA
tgttggctatgatggcggctgctgggagtacatcacatatgaaaacggcgcgtgtgcgttcatcgcgccggatgg

SEQ ID NO: 500749 - DNA, 75 bp, synthetic construct
  source 1..75: mol_type = other DNA
cgatgcaatggtttacgcactgactgaactgaatggatcgcaacctgtggggatgatgattccgaaacgccttcg

SEQ ID NO: 500750 - DNA, 75 bp, synthetic construct
  source 1..75: mol_type = other DNA
atgattgatatagttgcatgtgtaatggatgctgattttgataatataatcaaaatagcctcagatatggattta

SEQ ID NO: 500751 - DNA, 75 bp, synthetic construct
  source 1..75: mol_type = other DNA
ataacgttaaaaatgtgattgttgccgatcgcattgatgaacgactggaaaaagcgaaagagagcgggggcagac

SEQ ID NO: 500752 - DNA, 75 bp, synthetic construct
  source 1..75: mol_type = other DNA
aactgcgccaggccgcggagtcgatgaaacgttcctacgtcgcaaacgatcctgaaaaggtgagtgatgaagcgc

SEQ ID NO: 500753 - DNA, 75 bp, synthetic construct
  source 1..75: mol_type = other DNA
gagtggtcagttatggtgacggggcatatcgactgagagggaacgcattctctaatgtcacagaaggacggatac

SEQ ID NO: 500754 - DNA, 75 bp, synthetic construct
  source 1..75: mol_type = other DNA
aaagttattccactgtcaccaggccatgcctacgggatgtttatggaacgttttaacgagttatcggggttacgc

SEQ ID NO: 500755 - DNA, 75 bp, synthetic construct
  source 1..75: mol_type = other DNA
aatgcatgatgcaacagaagcgtattgccaggacattcccgcaccactgaaacgccttcttcctgactataaacg

SEQ ID NO: 500756 - DNA, 75 bp, synthetic construct
  source 1..75: mol_type = other DNA
ttgcaaacaaagcacaaaactttgaagcagtagcacaatatcagtttgacttcggtctgcgtccatctgttgctt

SEQ ID NO: 500757 - DNA, 75 bp, synthetic construct
  source 1..75: mol_type = other DNA
cattatcccggcgatgtggtgtttactactgctgccagcgatatggaaacggtgtctgaagcagtacgctgcggt

SEQ ID NO: 500758 - DNA, 75 bp, synthetic construct
  source 1..75: mol_type = other DNA
atgacagctccattaaccctattgatcgttgaggacgaaacgccgctggcagagatgcatgcggaatatattcgt

SEQ ID NO: 500759 - DNA, 75 bp, synthetic construct
  source 1..75: mol_type = other DNA
aacgccttcttcctgactataaacggatggaagaaaaaatagatgcagtaatccgtgagaaatacgagttgcccc

SEQ ID NO: 500760 - DNA, 75 bp, synthetic construct
  source 1..75: mol_type = other DNA
gatggaagaaaaaatagacgccgtaatccgtgagaaatacgggttacccccggttatgagtacacccgtgaaata

SEQ ID NO: 500761 - DNA, 75 bp, synthetic construct
  source 1..75: mol_type = other DNA
gagaaaaaggtttgttggtctatcactcggtgattgcctgtccgcatgaagccatgtggcgtcagatggtggagg

SEQ ID NO: 500762 - DNA, 75 bp, synthetic construct
  source 1..75: mol_type = other DNA
aggcatcccggcaacagagatgttcaacgtgattccactggcaccgggtcatgcctacgggatgtttatggaacg

SEQ ID NO: 500763 - DNA, 75 bp, synthetic construct
  source 1..75: mol_type = other DNA
gatgcgcgaacaagacgcgccgattactgccgatcagctgctggcaccttgtgatggtgaacgcaccgaagaagg

SEQ ID NO: 500764 - DNA, 75 bp, synthetic construct
  source 1..75: mol_type = other DNA
cgctggagtcgttgcgagtgcgcaaaattgaggcgctggcagatggcattatggatgccgggctggtgtcggtgc

SEQ ID NO: 500765 - DNA, 75 bp, synthetic construct
  source 1..75: mol_type = other DNA
aaagaaacggccagtcgtggcgcactgctgctggacatttctggtgtgatcgtcgataaacccgacagttctcag

SEQ ID NO: 500766 - DNA, 75 bp, synthetic construct
  source 1..75: mol_type = other DNA
ttctggcggatgcgcatatccgctacagcaagccgattagcggtaaacctcatgcggtagccgacctcggtgcct

SEQ ID NO: 500767 - DNA, 75 bp, synthetic construct
  source 1..75: mol_type = other DNA
ggagaaatcaccacgccaaccaccacgccgattcgccattttttgatgataaaacctgtcgccactctggatgac

SEQ ID NO: 500768 - DNA, 75 bp, synthetic construct
  source 1..75: mol_type = other DNA
ggcgttaagcgcgtgacctgtagcgcccgcgaagacgcggtggagtttttcgccaagctggggtttgttaatcag

SEQ ID NO: 500769 - DNA, 75 bp, synthetic construct
  source 1..75: mol_type = other DNA
tatgactgcgtgatgcctgtttatcagttccggcgtgatttttcactgatacaggccacaccacgcaaacagccc

SEQ ID NO: 500770 - DNA, 75 bp, synthetic construct
  source 1..75: mol_type = other DNA
ggtgtgcgcattcagcaatataccgggcaaaaatttatcaccaccatgccggaaaccggcaatcagaatccgcat

SEQ ID NO: 500771 - DNA, 75 bp, synthetic construct
  source 1..75: mol_type = other DNA
gccgactgtatattaatgccgacaatgaagcgtccattcgctttatggccgttcatcccgacgtgcaggacaaag

SEQ ID NO: 500772 - DNA, 75 bp, synthetic construct
  source 1..75: mol_type = other DNA
cgctgtctgtagtggaggtcctgagcctcaattatcagtaacctttccagctcgcgtacaactctatattaaatt

SEQ ID NO: 500773 - DNA, 75 bp, synthetic construct
  source 1..75: mol_type = other DNA
tccagcacgatgacctgcaaattgtggtggcgacggtggcgttcggcatgggcatcaataaaccaaacgttcgct

SEQ ID NO: 500774 - DNA, 75 bp, synthetic construct
  source 1..75: mol_type = other DNA
ggatattgtccgcctgttggggctgaacgatccgctgattcaaatcagcagttttgaccgcccgaacattcgcta

SEQ ID NO: 500775 - DNA, 75 bp, synthetic construct
  source 1..75: mol_type = other DNA
ccggattctgtttacgagtttaaacgtacccgcagctggtggaagttaaaagacgaagattcagaagatggtgaa

SEQ ID NO: 500776 - DNA, 75 bp, synthetic construct
  source 1..75: mol_type = other DNA
ttggtaaaataaattcccgaacaattaaaaataccagcgtgagtgagacgtttagcgtagtcatgaccaaagatc

SEQ ID NO: 500777 - DNA, 75 bp, synthetic construct
  source 1..75: mol_type = other DNA
ggcagaactgagtgcgaatccggcagagactgttgttgaggggccgtttagtaaagacgtaatcctgaaaatcac

SEQ ID NO: 500778 - DNA, 75 bp, synthetic construct
  source 1..75: mol_type = other DNA
tctgagaacggcgacgcttgacgtcacaaaagggggaaagatgagcggcaatatcacgcacagcggcggcaattt

SEQ ID NO: 500779 - DNA, 75 bp, synthetic construct
  source 1..75: mol_type = other DNA
aaccgccatgataattggcagcctgtggagtgatgccagtccggcccccggcaaaagcctgaaagaaatcgtggt

SEQ ID NO: 500780 - DNA, 75 bp, synthetic construct
  source 1..75: mol_type = other DNA
tgtaaaaacccctgaagcagtaaggaaattaacgcgcgaccgggcgctggcaattgcgcgtagtcatggaattgc

SEQ ID NO: 500781 - DNA, 75 bp, synthetic construct
  source 1..75: mol_type = other DNA
tgcacaacattgtccgcattggcgtggtcacagaaatcaacaccgacaactgggaggttcgcgtgcagagcggcg

SEQ ID NO: 500782 - DNA, 75 bp, synthetic construct
  source 1..75: mol_type = other DNA
ctgcgggaagttgtccgggaagcccgggccgaaatccgcagcatggcggatgccctgacaaaaatcaggggctga

SEQ ID NO: 500783 - DNA, 75 bp, synthetic construct
  source 1..75: mol_type = other DNA
tctgagaacagcgacgcttgacgtcacaaaagggggaaagatgagcggcaatatcacgcacagcggcggcgattt

SEQ ID NO: 500784 - DNA, 75 bp, synthetic construct
  source 1..75: mol_type = other DNA
ggcggcgctgaccacaaccggtcagacgttgctgacccgccagacgcgccgctttcgcctggttgtgaaggaaag

SEQ ID NO: 500785 - DNA, 75 bp, synthetic construct
  source 1..75: mol_type = other DNA
atgtatcaccttcgggttccacaaacagaagaagaattagagcgctactatcagttccgttgggagatgttgcgt

SEQ ID NO: 500786 - DNA, 75 bp, synthetic construct
  source 1..75: mol_type = other DNA
ggcgcatcaccagatggtcgtcgacgagcagggtaatctggtggcggtaggtcggctgtatatcaatgccgataa

SEQ ID NO: 500787 - DNA, 75 bp, synthetic construct
  source 1..75: mol_type = other DNA
atgcaagttgaaatctttggcgacgagacgccgggtgcagtgtttgaaggcacgtatatcgttctgcccgcgaag

SEQ ID NO: 500788 - DNA, 75 bp, synthetic construct
  source 1..75: mol_type = other DNA
cgactctcctgctaaccagcgatttttctcgcgcggcggcgagtgagtataaacctcttagtaatagtgaatggg

SEQ ID NO: 500789 - DNA, 75 bp, synthetic construct
  source 1..75: mol_type = other DNA
tgcaatcagccaattcacgattagtagaaaatggggcgtcatggagtgctgaacaggctgagaatgtgacgatca

SEQ ID NO: 500790 - DNA, 75 bp, synthetic construct
  source 1..75: mol_type = other DNA
tatttattgccttgctgaaagcgcaatggttgtacgtgcgggaatgaccggtggaacgataaccggggcgatgga

SEQ ID NO: 500791 - DNA, 75 bp, synthetic construct
  source 1..75: mol_type = other DNA
ctggtgacgcaaaacatcgcccagcattcggcattacaactgacagaagccgcacggcctgtgttgcgcggcgaa

SEQ ID NO: 500792 - DNA, 75 bp, synthetic construct
  source 1..75: mol_type = other DNA
ttctgcgacatactgggatatttttatttatggcgttctgccaatgctgtttctttggctatgtttgtttggtat

SEQ ID NO: 500793 - DNA, 75 bp, synthetic construct
  source 1..75: mol_type = other DNA
aggtgtcacctcattaaaaccaggcgatcgtgccagcgtggcgtggttttacgaaggatgcggtcattgcgaata

SEQ ID NO: 500794 - DNA, 75 bp, synthetic construct
  source 1..75: mol_type = other DNA
tgattgccaataaaagatatagacacatcttcttgaagataaataatagtgagagtacacaaaaacaaggagaaa

SEQ ID NO: 500795 - DNA, 75 bp, synthetic construct
  source 1..75: mol_type = other DNA
cagcgcctataccgatgctaactacctcggtggtggtgacgtagatcaagactggtccgcgaatgtgggtgttaa

SEQ ID NO: 500796 - DNA, 75 bp, synthetic construct
  source 1..75: mol_type = other DNA
aactaacggtggtgtactggatgtgaacgttgatcagtttgatactgaagctttccgtactgacaaactggaact

SEQ ID NO: 500797 - DNA, 75 bp, synthetic construct
  source 1..75: mol_type = other DNA
ttctttggctatgtttatttggtattgcgctaaacaaatatgaacaatccgttgccgcctgtataagttgggaat

SEQ ID NO: 500798 - DNA, 75 bp, synthetic construct
  source 1..75: mol_type = other DNA
tcatttatcaccgcacttagcggagatttaatatcaaaaacctttctattcatagggtttagttttaccgaccca

SEQ ID NO: 500799 - DNA, 75 bp, synthetic construct
  source 1..75: mol_type = other DNA
atgtctaaatatatatttgaacaaatatcacaagatcctaagaaatattatggaagtaatgaatggatatataat

SEQ ID NO: 500800 - DNA, 75 bp, synthetic construct
  source 1..75: mol_type = other DNA
aatcttcaggtgatcgccgaaggtgtagagagtgcaaaggaagatgcttttttaaccaagaatgggatcaatgag

SEQ ID NO: 500801 - DNA, 75 bp, synthetic construct
  source 1..75: mol_type = other DNA
atatatacgaaaagggttattaatccaggaacaaaagaagagcaagaggttgatataaaaaattgggatggaggt

SEQ ID NO: 500802 - DNA, 75 bp, synthetic construct
  source 1..75: mol_type = other DNA
ttatacaaaatggattctcgcatatttttatcgatagtgttgatggaagcgcgggcaagcaaggaaagcgaatgc

SEQ ID NO: 500803 - DNA, 75 bp, synthetic construct
  source 1..75: mol_type = other DNA
aaaatcaaaagagatacaatatataaaaatatatacaaaaaagattattaatcccggtacaactgaagaacatga

SEQ ID NO: 500804 - DNA, 75 bp, synthetic construct
  source 1..75: mol_type = other DNA
ttgttgctatgaactctgatggtcacctgactatcaatggtaacggcgacgtagacaacggtactgaactggata

SEQ ID NO: 500805 - DNA, 75 bp, synthetic construct
  source 1..75: mol_type = other DNA
gcgctgccgccactgaacgggtttgccggggaatgggttatctatcaatccttcttcaaactgagcaatagcggc

SEQ ID NO: 500806 - DNA, 75 bp, synthetic construct
  source 1..75: mol_type = other DNA
catcattatggcgatttgcaaaggcgatcgtttgccatcgcgttcccgcggcgcggcctgggtgtgcggctacga

SEQ ID NO: 500807 - DNA, 75 bp, synthetic construct
  source 1..75: mol_type = other DNA
tatttaaaaccatactgcttaccgcagctctggcggtttcatttaccgcttctgcatttaccgaaggcacggatt

SEQ ID NO: 500808 - DNA, 75 bp, synthetic construct
  source 1..75: mol_type = other DNA
actggtggcggaaaatccctttgctatcaaattcctgccttattgctaaacggccttaccgtggttgtttcaccg

SEQ ID NO: 500809 - DNA, 75 bp, synthetic construct
  source 1..75: mol_type = other DNA
ggggaattgcacttctggtactcggcatgatcaccgcgttcgtcggcggtctgtatgcgctgatggagcacaaca

SEQ ID NO: 500810 - DNA, 75 bp, synthetic construct
  source 1..75: mol_type = other DNA
taccggtgcgctggcggtgatgtgtatggcgaaagtctatggcgtcacgttcctcggcgcgccgcgtaccaaaga

SEQ ID NO: 500811 - DNA, 75 bp, synthetic construct
  source 1..75: mol_type = other DNA
aagcgggcggcgaactggaagtttatgagtacgatcccggtgagctgaagccacaagatgttgaagtgcaggtgg

SEQ ID NO: 500812 - DNA, 75 bp, synthetic construct
  source 1..75: mol_type = other DNA
aagtggggattctcacagtacccactggttgcctgtcatgaagtgattggtcgcgtggttgcgctgggtagcgcc

SEQ ID NO: 500813 - DNA, 75 bp, synthetic construct
  source 1..75: mol_type = other DNA
atgtcgaaattagggatctcatcactatttaaaagcatactgcttaccgcagctttggctgtttcatttaccgct

SEQ ID NO: 500814 - DNA, 75 bp, synthetic construct
  source 1..75: mol_type = other DNA
tcaggtcgtcgattccgtcatgtacattgacaagaaagcctttggcatcctcctcagctactacgcccacggttc

SEQ ID NO: 500815 - DNA, 75 bp, synthetic construct
  source 1..75: mol_type = other DNA
cctgatccgctactacgacgatccccccggacggctgaaccgtcgggatatctgtaccggtctgctctggtgcgc

SEQ ID NO: 500816 - DNA, 75 bp, synthetic construct
  source 1..75: mol_type = other DNA
tgtcgctgagcatggggttactgtgtgcatgcaccgtgaccgatgccctgcgtacctggctgcctgccgagctga

SEQ ID NO: 500817 - DNA, 75 bp, synthetic construct
  source 1..75: mol_type = other DNA
catcatccacgttccttttaacgatctccacgcagtgaaagcggtgatggatgatcacacctgtgcggtggtggt

SEQ ID NO: 500818 - DNA, 75 bp, synthetic construct
  source 1..75: mol_type = other DNA
gcggcttcccgattagcgccatgctgaccacggcggaaattgcttccgcgtttcatcctggttctcacggttcca

SEQ ID NO: 500819 - DNA, 75 bp, synthetic construct
  source 1..75: mol_type = other DNA
gtgacggctgcgacgccagagtttttgcagggcttgcgcgaactctgtgatgagcatcaggcattattggtgttt

SEQ ID NO: 500820 - DNA, 75 bp, synthetic construct
  source 1..75: mol_type = other DNA
aatgtgtggttgccgccatcacccggcgaacaggtggtaattgcctgcatcggcggcaacccggaaaccgccatg

SEQ ID NO: 500821 - DNA, 75 bp, synthetic construct
  source 1..75: mol_type = other DNA
tgaaacaggaatttgatggcgcaccggaacatacaggcgatgcgttgttatgcgttgccgacatgatgaaagccg

SEQ ID NO: 500822 - DNA, 75 bp, synthetic construct
  source 1..75: mol_type = other DNA
atgcgctttgcaccgtcgctggtggtggaagatgcggatatcgacgaagggatgcaacgttttgtccgcgccgtg

SEQ ID NO: 500823 - DNA, 75 bp, synthetic construct
  source 1..75: mol_type = other DNA
tttgttgagcgcagctggttatggtccgcaaaaaccgctgaagctgacgcttttgtataacacttcagaaaacca

SEQ ID NO: 500824 - DNA, 75 bp, synthetic construct
  source 1..75: mol_type = other DNA
gtgccgaatactcattattgggataacgccaaaacggtgctgcaaaaagtcactttcttgccgattaaccaggaa

SEQ ID NO: 500825 - DNA, 75 bp, synthetic construct
  source 1..75: mol_type = other DNA
gcagtacgctgtgtcagttaccaggtggcagaagatacgcggcgtatccgggcggcgctgaccaccaccggtcag

SEQ ID NO: 500826 - DNA, 75 bp, synthetic construct
  source 1..75: mol_type = other DNA
gttctgcgggaagttgtccgggaagcccgggccgaaatccgtagcgtggcggatgccctggcaaaaatcaggggc

SEQ ID NO: 500827 - DNA, 75 bp, synthetic construct
  source 1..75: mol_type = other DNA
catctggacttttaccctgcgcgataacgccaaatgggccgatggtacaccggtaacggcacaggattttgtcta

SEQ ID NO: 500828 - DNA, 75 bp, synthetic construct
  source 1..75: mol_type = other DNA
tatataacacttcggaaaatcaccagaaaattgccatcgctgtggcgtcgatgtggaaaaagaatcttggcgtag

SEQ ID NO: 500829 - DNA, 75 bp, synthetic construct
  source 1..75: mol_type = other DNA
tcagttgctggctgtgggagcggctgatgtcgtcctcacggaaaaaacgctctgtctgctcaatgccatgccgac

SEQ ID NO: 500830 - DNA, 75 bp, synthetic construct
  source 1..75: mol_type = other DNA
attcctgcgcattgtcgatcgtaaaaaagacatgattctggtttccggttttaacgtctatcccaacgagattga

SEQ ID NO: 500831 - DNA, 75 bp, synthetic construct
  source 1..75: mol_type = other DNA
ctggaagaacgcagtcgcgcgtttgccgcttatttgcaacaagggttggggctgaagaaaggcgatcgcgttgcg

SEQ ID NO: 500832 - DNA, 75 bp, synthetic construct
  source 1..75: mol_type = other DNA
gcgtggaaatcatctatcctgacgtcgcccctttcaaagaaaaagccttaaaagtctatcaacaattcccggaat

SEQ ID NO: 500833 - DNA, 75 bp, synthetic construct
  source 1..75: mol_type = other DNA
gtatgatattgattatcatagcggtagcattggtttgccggtgccgtcgaccgaagccaagttggttgatgacga

SEQ ID NO: 500834 - DNA, 75 bp, synthetic construct
  source 1..75: mol_type = other DNA
atattccggggctggtcaaagaattagcgaaatacccgtttaccgctattaccggcgtcaacacattgtttaacg

SEQ ID NO: 500835 - DNA, 75 bp, synthetic construct
  source 1..75: mol_type = other DNA
aagtggttgataaaaccgccgttcagcacgtaattctgacccgtatgggcgatcagctatctacggcaaaaggca

SEQ ID NO: 500836 - DNA, 75 bp, synthetic construct
  source 1..75: mol_type = other DNA
cgatgacctgcaaattgtggtggcgacggtggcgttcggcatgggcatcaataaaccaaacgttcgcttcgtggt

SEQ ID NO: 500837 - DNA, 75 bp, synthetic construct
  source 1..75: mol_type = other DNA
cgccgctgtctggaagaaaagccgcaggggcagctacaggatatcgagcgccataaactgaatgcgatgggcgcg

SEQ ID NO: 500838 - DNA, 75 bp, synthetic construct
  source 1..75: mol_type = other DNA
atcgcaaactgttcgccaaattacgcaaactgcgtaaatcgatagccgatgaaagtaatgtcccgccgtacgtgg

SEQ ID NO: 500839 - DNA, 75 bp, synthetic construct
  source 1..75: mol_type = other DNA
accgccaccgccgacgacaccacgcgccaggatattgtgcgcctgctggggctgaacgatccgctgattcaaatc

SEQ ID NO: 500840 - DNA, 75 bp, synthetic construct
  source 1..75: mol_type = other DNA
aaagcaagggaattagcgcggcggcctatcatgccgggctggaaaataatgttcgcgccgacgtgcaggaaaaat

SEQ ID NO: 500841 - DNA, 75 bp, synthetic construct
  source 1..75: mol_type = other DNA
ggtgttattagccgttgatgaagcgcactgtatctcccaatggggtcacgatttccgcccggaatacgctgccct

SEQ ID NO: 500842 - DNA, 75 bp, synthetic construct
  source 1..75: mol_type = other DNA
ccccggctggcgacgttgctcgtcaacctccacgatggcgtactgccgccggtcctggcttccgccatgcaaaaa

SEQ ID NO: 500843 - DNA, 75 bp, synthetic construct
  source 1..75: mol_type = other DNA
ccatcgtgaaccggggagcacgtttttcgtcggtggaaatgtacctggtcagcgattgtattgagcatatcctgt

SEQ ID NO: 500844 - DNA, 75 bp, synthetic construct
  source 1..75: mol_type = other DNA
cgtgcggctggatgcgccccggctggcgacgttacttatcaagcgtcacggcggcgtactgccgccgctcctggc

SEQ ID NO: 500845 - DNA, 75 bp, synthetic construct
  source 1..75: mol_type = other DNA
gaacaccacgcgcgcgggagccttcaatgtgtggctgccgccatcaccaggcgaacaggtggtaattgcctgcat

SEQ ID NO: 500846 - DNA, 75 bp, synthetic construct
  source 1..75: mol_type = other DNA
gatgacgaaaatctgcccgtggtgctcgatgccatcgtgaaccggggagcacgtttttcgtcggtggaaatgtac

SEQ ID NO: 500847 - DNA, 75 bp, synthetic construct
  source 1..75: mol_type = other DNA
gccggtacttccggcagacggaacgcaggtgtctttcccgtatgccggtgaatggctgacggaggaagaaatcag

SEQ ID NO: 500848 - DNA, 75 bp, synthetic construct
  source 1..75: mol_type = other DNA
cgcctggtcgtgaaggaaagcgatcacccctgctggctcgatgaagatgacgaaaacctgcccgtggtgctcgat

SEQ ID NO: 500849 - DNA, 75 bp, synthetic construct
  source 1..75: mol_type = other DNA
actatccgggctggatcagcatttatgtgcgactggatgtatcccggctggcgacgttacttatcagccgccatg

SEQ ID NO: 500850 - DNA, 75 bp, synthetic construct
  source 1..75: mol_type = other DNA
cgtcgctggtttgaccgggatattctgcgggaggttgttctggaggcacgggatgaaatccgcagcatggcggat

SEQ ID NO: 500851 - DNA, 75 bp, synthetic construct
  source 1..75: mol_type = other DNA
gtgtctttcccgtatgccggtgagtggctggcagaggacgaaatcagggccgttcttggtgcggtacgcgatgca

SEQ ID NO: 500852 - DNA, 75 bp, synthetic construct
  source 1..75: mol_type = other DNA
cggtggtttgaccgttgtgttctgcgggaagttgtccgggaagcccgggccgaaatccgtagcgtggcggaagcc

SEQ ID NO: 500853 - DNA, 75 bp, synthetic construct
  source 1..75: mol_type = other DNA
tctttcccgtatgccggtgagtggctggcagaggacgaaatcagggccgttcttggtgcggtacgcgatgcagta

SEQ ID NO: 500854 - DNA, 75 bp, synthetic construct
  source 1..75: mol_type = other DNA
gcgtataccggatgaaccgccccgccgctggtttgaccgggatattctgcgggaggtggtcctggaagcccggag

SEQ ID NO: 500855 - DNA, 75 bp, synthetic construct
  source 1..75: mol_type = other DNA
ctcgaagagatcctctacggcgtgctgccgcaagtgatgccgctgctgatttcctattctctctatcgcttcgaa

SEQ ID NO: 500856 - DNA, 75 bp, synthetic construct
  source 1..75: mol_type = other DNA
tggcagaagatacacggcgtatccgggcggcgctgaccacaaccgggcagacgttgctgacccgccagacccgcc

SEQ ID NO: 500857 - DNA, 75 bp, synthetic construct
  source 1..75: mol_type = other DNA
cagacgcgccgctttcgcctggtggtgaaggaaagcgatcacccctgctggctcgatgaggacgacgaaaacctg

SEQ ID NO: 500858 - DNA, 75 bp, synthetic construct
  source 1..75: mol_type = other DNA
agacggaacgcaggtgtctttcccgtatgccggtgaatggctgaccgaagacgaaatcagggccgttcttgatgc

SEQ ID NO: 500859 - DNA, 75 bp, synthetic construct
  source 1..75: mol_type = other DNA
gcggcgtactgccgccgctcctggcctccgccattcagaaactgaccggaaccggggcggaacttgttctgtccg

SEQ ID NO: 500860 - DNA, 75 bp, synthetic construct
  source 1..75: mol_type = other DNA
gcagtatgcagtgtcagttgccgggtggcagaagatgcgcggcgtatccgggcggcgctgaccaccaccggtcag

SEQ ID NO: 500861 - DNA, 75 bp, synthetic construct
  source 1..75: mol_type = other DNA
gaatggctgaccgaagacgaaatcagggctgttcttgatgcggtgcacgatgcggtacgaagcatctgttaccag

SEQ ID NO: 500862 - DNA, 75 bp, synthetic construct
  source 1..75: mol_type = other DNA
accgtggtgttctgcgggaagttgtccgggaagcccgggccgaaatccgcagcatggcggatgccctggcaaaaa

SEQ ID NO: 500863 - DNA, 75 bp, synthetic construct
  source 1..75: mol_type = other DNA
ctggtcgtctcgtggcagggcgcggaaatggccccgctcacgctgatcaaagacggcggcaacatggcaaccttc

SEQ ID NO: 500864 - DNA, 75 bp, synthetic construct
  source 1..75: mol_type = other DNA
tggcgtgctggcgctgtttatccacaccaccggcgtgctctccaagctgctttccgaagcggtggaagcgattga

SEQ ID NO: 500865 - DNA, 75 bp, synthetic construct
  source 1..75: mol_type = other DNA
acggatgttgaccagcgtaacccgaagtatccgggctggatcagcatttatgttctgctggatgcgccccggctg

SEQ ID NO: 500866 - DNA, 75 bp, synthetic construct
  source 1..75: mol_type = other DNA
gccccgccggtggtttgaccgtggtgttctgcgggaagttgtccgggaagcccgggccgaaatccgcagcatggc

SEQ ID NO: 500867 - DNA, 75 bp, synthetic construct
  source 1..75: mol_type = other DNA
tgtccggcagtcagtggcagtcgctgccggtacttccggcagacggaacgcaggtgtcttttccgtatgccggtg

SEQ ID NO: 500868 - DNA, 75 bp, synthetic construct
  source 1..75: mol_type = other DNA
catctcaccccgattgagttccgcctgctggcggtgctgctgaataacgccgggaaagtgctcacccagcgccag

SEQ ID NO: 500869 - DNA, 75 bp, synthetic construct
  source 1..75: mol_type = other DNA
cgcagttggtttacctccagcccacaacttgccgaagaaacagcgtttcgcaacagttccatgcaggcggcctat

SEQ ID NO: 500870 - DNA, 75 bp, synthetic construct
  source 1..75: mol_type = other DNA
aaaagagaactaagggaagtcagctggattggcacagagcagatattgtggctgctttgcataaacgtgggctca

SEQ ID NO: 500871 - DNA, 75 bp, synthetic construct
  source 1..75: mol_type = other DNA
tggtggagtggtttttaacaccgcaggggcagagtttggtggaagatgtgggctatgtgccgatggataaaacgt

SEQ ID NO: 500872 - DNA, 75 bp, synthetic construct
  source 1..75: mol_type = other DNA
atgaacaggctattcgtcgctttctgcgcacggcgctggagggtgacggtatgcgcgtttttgaagccgaaacgc

SEQ ID NO: 500873 - DNA, 75 bp, synthetic construct
  source 1..75: mol_type = other DNA
caaaaactggaacaggatcccgcccgcccccgccacttcattactgaaaccggtattgggtatcggtttatgctt

SEQ ID NO: 500874 - DNA, 75 bp, synthetic construct
  source 1..75: mol_type = other DNA
gtgcccatcgcatcactacaaattctggcaattgcgtacgtggtaacggcaagttatttaacctcaaacgtacgt

SEQ ID NO: 500875 - DNA, 75 bp, synthetic construct
  source 1..75: mol_type = other DNA
tacaaggatgcgtactccacccacattccggcggtgattctggccgtgaacaataatccgatgcgctttactgac

SEQ ID NO: 500876 - DNA, 75 bp, synthetic construct
  source 1..75: mol_type = other DNA
cacgtgagcgcgcggcgctgattggcttctcgctgattcgcctgcctgaccaggaaaagtggagcggtgacgggg

SEQ ID NO: 500877 - DNA, 75 bp, synthetic construct
  source 1..75: mol_type = other DNA
gtctcgccaccccgagattctcaactctggatggtgagctatttctatcaccgagcaaagaggccacaccatggc

SEQ ID NO: 500878 - DNA, 75 bp, synthetic construct
  source 1..75: mol_type = other DNA
catttccgctgcacctcataaaacgggtgccgggattctcaacctgctgacaaacgaagcgcacaaccgcgccag

SEQ ID NO: 500879 - DNA, 75 bp, synthetic construct
  source 1..75: mol_type = other DNA
tggtgagttttcaaaacttgcaactacagaggccacaccatggcaaaccgcaaacaacagcgcgcatacgctgca

SEQ ID NO: 500880 - DNA, 75 bp, synthetic construct
  source 1..75: mol_type = other DNA
atattcagcccgcactggatgcggtctttgccgccggtcacaacattctgatttgtccgttcagtaccacgccag

SEQ ID NO: 500881 - DNA, 75 bp, synthetic construct
  source 1..75: mol_type = other DNA
agcctgagagagcgtctgttagcttctctattcagcttccttgctctggcttaactttcctgcgctggcggcgtt

SEQ ID NO: 500882 - DNA, 75 bp, synthetic construct
  source 1..75: mol_type = other DNA
attaagttgctgcgacttgttgttagttgaactcgttgccattactggatctcctcgcgttaggtgcgattcagt

SEQ ID NO: 500883 - DNA, 75 bp, synthetic construct
  source 1..75: mol_type = other DNA
acgcggtcgaacacagtcactatttgcgtatttatatgggacatctgcgacaaaaactggaacaggatcccgccc

SEQ ID NO: 500884 - DNA, 75 bp, synthetic construct
  source 1..75: mol_type = other DNA
tggcagaacagcgatattaatagcgcgatgtatcagaatttagagaagttgttaaatactgtgcagaaatgctga

SEQ ID NO: 500885 - DNA, 75 bp, synthetic construct
  source 1..75: mol_type = other DNA
aggcaaatatgattgcctagaaaacttgtcggataaagatctatttcgccaattatattggcgacaagatgattt

SEQ ID NO: 500886 - DNA, 75 bp, synthetic construct
  source 1..75: mol_type = other DNA
ctttaaggcttgtgatttagcattctttgtaccggtagccattactgaatctccgtatgtttggtgggccacagt

SEQ ID NO: 500887 - DNA, 75 bp, synthetic construct
  source 1..75: mol_type = other DNA
ctggccgttaacacgctgccgggtaatgaacagcgtgttctggtgattggcccgatgctgtcaggcggcaccgcc

SEQ ID NO: 500888 - DNA, 75 bp, synthetic construct
  source 1..75: mol_type = other DNA
gatcaccctggcagccggtgtgaacagcgggcgcgtgtctgtcccctggtatcgtggttctgtgatgcttcctgc

SEQ ID NO: 500889 - DNA, 75 bp, synthetic construct
  source 1..75: mol_type = other DNA
ggaaaagcagcaacaggcgcagttaaagtcaccggcactgcaaccagcagcggtacgctgtcggtatggattgct

SEQ ID NO: 500890 - DNA, 75 bp, synthetic construct
  source 1..75: mol_type = other DNA
atgaacaggctattcgtcgctttctgcgcacggcgctggagggcgacgggatgcgcgtctatgaggccgaaacgc

SEQ ID NO: 500891 - DNA, 75 bp, synthetic construct
  source 1..75: mol_type = other DNA
caagaaaggctatatgtgcaataaagagtatgtggattgggtagaagacgtcgcgccacctgtcacagagtactc

SEQ ID NO: 500892 - DNA, 75 bp, synthetic construct
  source 1..75: mol_type = other DNA
gtgagcagtcctaatatcagctttgacactatcggtacgaaccgcaagccgggtcagtatattgagttcaacacc

SEQ ID NO: 500893 - DNA, 75 bp, synthetic construct
  source 1..75: mol_type = other DNA
ttctggcgctggcttgaccgtgccgccggtggccgtgcggaaaaacgcgacgtgattctggccgcactgtttatg

SEQ ID NO: 500894 - DNA, 75 bp, synthetic construct
  source 1..75: mol_type = other DNA
caggagaaatggagcggtgacggggctggacttaaggccatcactggcggtgatgcggtatcggtcgacccgaaa

SEQ ID NO: 500895 - DNA, 75 bp, synthetic construct
  source 1..75: mol_type = other DNA
gaattacgccaggcggcgaacaaatcaggggatgcagacgaaccttgcgctcagggaggaaagcaacgccgactg

SEQ ID NO: 500896 - DNA, 75 bp, synthetic construct
  source 1..75: mol_type = other DNA
tatgcagaaattcagcgacccgatggccgcacgcgcactgctccagtcgcaacagaactccgacgaggcgctcag

SEQ ID NO: 500897 - DNA, 75 bp, synthetic construct
  source 1..75: mol_type = other DNA
gaatttaccgcgctgagcgtcagcgaaaaagcgcagagggtagtggatcactataaaaattcactggcagtagac

SEQ ID NO: 500898 - DNA, 75 bp, synthetic construct
  source 1..75: mol_type = other DNA
ccccttcgacacaatgagcgaagctgaatttaccgcgctgagcgtcagcgaaaaagcgcagagggtagtggatca

SEQ ID NO: 500899 - DNA, 75 bp, synthetic construct
  source 1..75: mol_type = other DNA
ggtggattacacacagcctgttgacggtgaggcactggaaacccatgctccggcattctggcgctggctggatcg

SEQ ID NO: 500900 - DNA, 75 bp, synthetic construct
  source 1..75: mol_type = other DNA
cctgtccggtgtgtggcggctctgaccgttttcgctttgacgataaagaagggcgcgggacgtggttctgcaatc

SEQ ID NO: 500901 - DNA, 75 bp, synthetic construct
  source 1..75: mol_type = other DNA
cgacagccgcgcctgtacctgtatcacgcctatctggtgtacatggaggcgcacggctataagaacacactcagc

SEQ ID NO: 500902 - DNA, 75 bp, synthetic construct
  source 1..75: mol_type = other DNA
tgccgccgggcgtaacgcggagaaacgcgacatcattctggccgcgctgtttatggtgctggcgaaccgctacga

SEQ ID NO: 500903 - DNA, 75 bp, synthetic construct
  source 1..75: mol_type = other DNA
caataacccgatgcgctttaccgaccgtagcggcggtgtctcacggcgccgggtgattctgcatttcccggaaca

SEQ ID NO: 500904 - DNA, 75 bp, synthetic construct
  source 1..75: mol_type = other DNA
gccaccatcgagacgctggaatccccgcgtgagcgtgccgcgttaactggcttctcactgatacgcctgccggac

SEQ ID NO: 500905 - DNA, 75 bp, synthetic construct
  source 1..75: mol_type = other DNA
gacggcactcaccgtacatcacctgaccagcgaaaccgtcatggtggcgctgtcctccgtgaacctcttttctct

SEQ ID NO: 500906 - DNA, 75 bp, synthetic construct
  source 1..75: mol_type = other DNA
acgcacctttttcatccgcgaaaattgcgtctctcgtggaaaccctcaaactgatcgttccgcaacagcagaatc

SEQ ID NO: 500907 - DNA, 75 bp, synthetic construct
  source 1..75: mol_type = other DNA
ggtatgacctttgtgatcctctctggcggtatcgatctctccgtcggttcggtgatcgcctttactggcgtgttt

SEQ ID NO: 500908 - DNA, 75 bp, synthetic construct
  source 1..75: mol_type = other DNA
acgtcggcgaacctgatggggatttccactcgcagcaccactattcgcatttatatgctctccaccggactggca

SEQ ID NO: 500909 - DNA, 75 bp, synthetic construct
  source 1..75: mol_type = other DNA
aatgtgtggctgccgccatcaccaggcgaacaggtggcaattgcctgcatcggcggcaacccggaaaccgccatg

SEQ ID NO: 500910 - DNA, 75 bp, synthetic construct
  source 1..75: mol_type = other DNA
cagggcatacaaaccaatctcacgctaagagaggaaagcaacgccgactggctgccgaaatgtgatgaccccata

SEQ ID NO: 500911 - DNA, 75 bp, synthetic construct
  source 1..75: mol_type = other DNA
tcctcaggttaagaaggcgtttttcttcttttttaataaagaatttgacagccatgatttagctcatgaggagtg

SEQ ID NO: 500912 - DNA, 75 bp, synthetic construct
  source 1..75: mol_type = other DNA
cagtaagccggatatgggcttaaccagctataaaggcgatgaagtgcgcaagacagacgttactgttgccaagaa

SEQ ID NO: 500913 - DNA, 75 bp, synthetic construct
  source 1..75: mol_type = other DNA
gtggattaacggtgctgtgggaaaatcgtcagagttcgccagtaatgagagtgagtccggaaattagaccaaaag

SEQ ID NO: 500914 - DNA, 75 bp, synthetic construct
  source 1..75: mol_type = other DNA
cggtgatgctgaaggaatacgggctgaattacgagaagcgccataccaaacaggggatacagaccaacctgacgc

SEQ ID NO: 500915 - DNA, 75 bp, synthetic construct
  source 1..75: mol_type = other DNA
tgcaccgttcgtgacaaatacggagaggaatccacccggaaggcaattcttgaggctttgaagccacataacgcc

SEQ ID NO: 500916 - DNA, 75 bp, synthetic construct
  source 1..75: mol_type = other DNA
ggtatttttctcgcacatcgcacccgctttggtaatcaggtgtatgccattggtggcaacgctacatcagcgaat

SEQ ID NO: 500917 - DNA, 75 bp, synthetic construct
  source 1..75: mol_type = other DNA
ggtattttccttgcgcatcgtacccgttttggcaatcaggtgtacgctattggcggcaacgcgacgtcggcgaac

SEQ ID NO: 500918 - DNA, 75 bp, synthetic construct
  source 1..75: mol_type = other DNA
tacagcgtggattaacggtgctgtgggagaatcgtcagagttcgccagtgacaagagtcaacattgcgcagcgat

SEQ ID NO: 500919 - DNA, 75 bp, synthetic construct
  source 1..75: mol_type = other DNA
gactattaactcctacagtactgttgcgttgaccgaatctactgggtggggggctgattacaacctgtacgccaa

SEQ ID NO: 500920 - DNA, 75 bp, synthetic construct
  source 1..75: mol_type = other DNA
cgctcaaaaatagattaaggggaaacaaattgcgcagcccgaaaattatctgtccggaatgcaacggcaattcaa

SEQ ID NO: 500921 - DNA, 75 bp, synthetic construct
  source 1..75: mol_type = other DNA
gattagcagggcttttaagtatgcgcttgatggactcaccaataaaaaacgcccggcggcaaccgagcgttctga

SEQ ID NO: 500922 - DNA, 75 bp, synthetic construct
  source 1..75: mol_type = other DNA
tgatggtcacctgactatcaatggtaacggcgacgtagacaacggtactgaactggataacagctctgttgataa

SEQ ID NO: 500923 - DNA, 75 bp, synthetic construct
  source 1..75: mol_type = other DNA
tactgtagcgctgtctagtgatgacaattcaagtatctataatggttattacactctgtcgctgttagcaaatac

SEQ ID NO: 500924 - DNA, 75 bp, synthetic construct
  source 1..75: mol_type = other DNA
agtactttcaacgcaaacttctatccgcatggtcatgacagtaatgccgatggcgtactggacaccaatggtggc

SEQ ID NO: 500925 - DNA, 75 bp, synthetic construct
  source 1..75: mol_type = other DNA
attttatcatctttggtatctttattagggcaatttacattttatagattcattttaattacagacaaaaaagaa

SEQ ID NO: 500926 - DNA, 75 bp, synthetic construct
  source 1..75: mol_type = other DNA
accagtatctggaacgcgtacttaatgcagtgagagacggtcttaagcaaatagatgcaggagagcaaagcgatg

SEQ ID NO: 500927 - DNA, 75 bp, synthetic construct
  source 1..75: mol_type = other DNA
gtgagtgtaacggttgaaaagattgatgtgttgtcattcgttataaccggtgcagagcgactagatccggttcga

SEQ ID NO: 500928 - DNA, 75 bp, synthetic construct
  source 1..75: mol_type = other DNA
aattcaggcgctccagttctctggagacgcttgaaaaggtatatgaacatatgcgcgataacgtagcaccacagg

SEQ ID NO: 500929 - DNA, 75 bp, synthetic construct
  source 1..75: mol_type = other DNA
ataaaaaacatgcgcgagattaacagcgatgcattatcatatagcgccaacgtaacaaaaaatagtttcgttgct

SEQ ID NO: 500930 - DNA, 75 bp, synthetic construct
  source 1..75: mol_type = other DNA
aacattagcacaagcaatttacttattctatttccagttgttttattcagctttaatttttcaccatgtatccaa

SEQ ID NO: 500931 - DNA, 75 bp, synthetic construct
  source 1..75: mol_type = other DNA
tagccagactgcctacatctactcttctgctcacttcgcgaacaacgtctttgttgatggtagcttgagctactc

SEQ ID NO: 500932 - DNA, 75 bp, synthetic construct
  source 1..75: mol_type = other DNA
ccagcttctgcaaaacagcatggatgcgccgaaaatcatcggatcattcccttgtaaaaaagtggctgggcgatg

SEQ ID NO: 500933 - DNA, 75 bp, synthetic construct
  source 1..75: mol_type = other DNA
ggtaactttcgtatggacgcgatccctgactcattgtttaaaatcaatggcgaaaccgtaacatcccaaaaggtt

SEQ ID NO: 500934 - DNA, 75 bp, synthetic construct
  source 1..75: mol_type = other DNA
tggcgttagcgtctgttggcgcaagtgcaaacactataacgatgcaatgtggtaactttcgtatggacgcgatcc

SEQ ID NO: 500935 - DNA, 75 bp, synthetic construct
  source 1..75: mol_type = other DNA
ttttggacgacctaagcaagaatagaatgaccttagaagtgcctgatgacacgatatgggtttattctgacgaaa

SEQ ID NO: 500936 - DNA, 75 bp, synthetic construct
  source 1..75: mol_type = other DNA
gatcgtgcggatgactactaccatgatcgtctggcgctgaccgttgataattcaacgatcgatgacaactacgaa

SEQ ID NO: 500937 - DNA, 75 bp, synthetic construct
  source 1..75: mol_type = other DNA
gcaacaattatggctttgaatacattcgccgtccgggtaccgaaacgcgattcctgaatgtccaactgctgcaga

SEQ ID NO: 500938 - DNA, 75 bp, synthetic construct
  source 1..75: mol_type = other DNA
atgctggctggtttgcacatcctgatgatcttctgaaggatgttgcagaaccagaaccagaaccagaaccagaac

SEQ ID NO: 500939 - DNA, 75 bp, synthetic construct
  source 1..75: mol_type = other DNA
aaaactgcgaatgacttctacattccagaagatgaacctttcaagataattggcgcactgccttatctttatgag

SEQ ID NO: 500940 - DNA, 75 bp, synthetic construct
  source 1..75: mol_type = other DNA
gaaatcgagtctgttgaacaagaccattttccatcttatgccttgtgccgagcagaaactaaccatctgtacgcc

SEQ ID NO: 500941 - DNA, 75 bp, synthetic construct
  source 1..75: mol_type = other DNA
gtaatggaatgaaggcggatatgggtcttatgccagccaaagacggtaacaattacgctttcgagttcattcgtc

SEQ ID NO: 500942 - DNA, 75 bp, synthetic construct
  source 1..75: mol_type = other DNA
tcacatctcagaaaattacaaatcttggtgctgatggcattaagattgatatggggctaatgcctgccaaagacg

SEQ ID NO: 500943 - DNA, 75 bp, synthetic construct
  source 1..75: mol_type = other DNA
ccagagccagagccagaagaaaaacagcgtaaaaagcctggtcgaaaacctaaggcggcagcagatgaacctgac

SEQ ID NO: 500944 - DNA, 75 bp, synthetic construct
  source 1..75: mol_type = other DNA
ggacgccaggtggcggcctacctcaatgatgctggcttatgggtaattctttgcccgcgcgtggcgaaaactcat

SEQ ID NO: 500945 - DNA, 75 bp, synthetic construct
  source 1..75: mol_type = other DNA
acaggtagaggcgttccgctacaattctgaaggcgttaaagcactacaacacctgctacatggctcaaatgtggc

SEQ ID NO: 500946 - DNA, 75 bp, synthetic construct
  source 1..75: mol_type = other DNA
cttgaaagtatgcaggaagcgcacattaaaagcggtaaatcagcgagtggacttgttgagtatcgtcaagcgcga

SEQ ID NO: 500947 - DNA, 75 bp, synthetic construct
  source 1..75: mol_type = other DNA
gtatcgtcaagcgcgaacactgaaaatgacggttgaagctgttaccaatctgttcgatctgatgccaaatcttgc

SEQ ID NO: 500948 - DNA, 75 bp, synthetic construct
  source 1..75: mol_type = other DNA
gtaagaaaaagattatcgtacttgatgaacccacggcctctattggcgaagaactcgcgataaagatcattacct

SEQ ID NO: 500949 - DNA, 75 bp, synthetic construct
  source 1..75: mol_type = other DNA
tttgtgcactcctgccagatccggctcctgatgtccccaaaaactcaacgaattatctagtagaagaaaatccac

SEQ ID NO: 500950 - DNA, 75 bp, synthetic construct
  source 1..75: mol_type = other DNA
aaactatggagccgggcatgacggtgtcccacgtggcgcgtttgcatggaattcagcccagtctgttgtttaagt

SEQ ID NO: 500951 - DNA, 75 bp, synthetic construct
  source 1..75: mol_type = other DNA
cccaatgtataaaactgtctggagtacagtatacttataacagcagttcctcagtatgtatgcaaggccttaatg

SEQ ID NO: 500952 - DNA, 75 bp, synthetic construct
  source 1..75: mol_type = other DNA
gtaacggtaaagcacggaataccagcctttggtactgtatgcaactggcttgaaaaatatagaaaatatatagcg

SEQ ID NO: 500953 - DNA, 75 bp, synthetic construct
  source 1..75: mol_type = other DNA
attctgctgagttaaaactcacagtagtaaaagaagtcgtggatgactgtttttctgttcgtgaagtagcggtaa

SEQ ID NO: 500954 - DNA, 75 bp, synthetic construct
  source 1..75: mol_type = other DNA
aataaaaatcagcccactgatggataagagtgtggacatcagcgtccaggataacagcgtttctttggtggtcag

SEQ ID NO: 500955 - DNA, 75 bp, synthetic construct
  source 1..75: mol_type = other DNA
catcaaacgggatgccgacccgacgtttgattttatcggctatctggaaaccctgccgcagaccagcggcatgta

SEQ ID NO: 500956 - DNA, 75 bp, synthetic construct
  source 1..75: mol_type = other DNA
gcattgagctaactgacagccagatcggcgtaaagccagtgatgacgaggcctgtggcgaaatcgaaacggctca

SEQ ID NO: 500957 - DNA, 75 bp, synthetic construct
  source 1..75: mol_type = other DNA
agtcacgttcgcgctggactgctgtgaccgtgaggcactgtactgggcggtcactacgggcggcttcgacagtga

SEQ ID NO: 500958 - DNA, 75 bp, synthetic construct
  source 1..75: mol_type = other DNA
agtcggtcgcgtcgagcgcaccctgttcatgatcgactggattctggatgccgaactccaacggcgtgcccagat

SEQ ID NO: 500959 - DNA, 75 bp, synthetic construct
  source 1..75: mol_type = other DNA
ggcaagcgaagcgccttacatcctcgatggcctgctgatgaacgatgctggacgccatatccgcgagcagttcac

SEQ ID NO: 500960 - DNA, 75 bp, synthetic construct
  source 1..75: mol_type = other DNA
ccaggtgattcctgcaacggcaagcgaagcgccttacatcctcgatggcctgctgatgaacgatgctggacgcca

SEQ ID NO: 500961 - DNA, 75 bp, synthetic construct
  source 1..75: mol_type = other DNA
aaaacaaccttgcagttgcgcttcgtgaagttggtcgtattgaacggacccttttcattattgagtggatcctgg

SEQ ID NO: 500962 - DNA, 75 bp, synthetic construct
  source 1..75: mol_type = other DNA
aagctcgaagccgcgccggtcgccggaccattggtagcagcagctttgtcgatcggagagatgaaaggtgttgca

SEQ ID NO: 500963 - DNA, 75 bp, synthetic construct
  source 1..75: mol_type = other DNA
gcgatccttgccgtctgtgttgtggagtgggaagcggcgattgctgatgccatagtcgaaacccatgacaggatc

SEQ ID NO: 500964 - DNA, 75 bp, synthetic construct
  source 1..75: mol_type = other DNA
tttatctccggcagtggtgcccgttctgtctggttacgccataaccttgagaatttcaaaaaacgtctgaaagca

SEQ ID NO: 500965 - DNA, 75 bp, synthetic construct
  source 1..75: mol_type = other DNA
ggtttcgtcgggcttaccgccttgcacgcatgtgtgcccacctgccccggtatcagccccgactggcgtttacgc

SEQ ID NO: 500966 - DNA, 75 bp, synthetic construct
  source 1..75: mol_type = other DNA
aactggaaacaggctggttgcgctggaacaccacgcgcgcgggagccttcaatgtgtggttgccgccatcacccg

SEQ ID NO: 500967 - DNA, 75 bp, synthetic construct
  source 1..75: mol_type = other DNA
accggtttgaacgatgccgcgatgaccagcttcttgcggcccagctcgaaatggcatcgccaccttcgggcccag

SEQ ID NO: 500968 - DNA, 75 bp, synthetic construct
  source 1..75: mol_type = other DNA
gcggaaggcggtcgtctcgctgtgccattgcggccggaggaatggctggcagaccggcaagctcgcctcgacatg

SEQ ID NO: 500969 - DNA, 75 bp, synthetic construct
  source 1..75: mol_type = other DNA
aacggcattaccgtgcatacgcataaacacggtggcgtgaaaggtggcagcgattcgacaggaggcccgcagtga

SEQ ID NO: 500970 - DNA, 75 bp, synthetic construct
  source 1..75: mol_type = other DNA
cggaagccaaactggtggatgacgacgataatgaagtatcgccaggtcagccaggtgaactttgcgtcagaggtc

SEQ ID NO: 500971 - DNA, 75 bp, synthetic construct
  source 1..75: mol_type = other DNA
ttgccgcgaaaaagcatttctgggtacgcctgtcattttacaggatcgttgtgttggggtgataagtttgattgc

SEQ ID NO: 500972 - DNA, 75 bp, synthetic construct
  source 1..75: mol_type = other DNA
catctctgaagttgatgaggaatcctggtgcgtgcgcgttcgcagcggcgaactggaaacaggctggttgcgctg

SEQ ID NO: 500973 - DNA, 75 bp, synthetic construct
  source 1..75: mol_type = other DNA
cctatttgcaggaagcggcagggcagagcagcgaagccgaagcgccgcccgtgatacacgacaccacccacgcgc

SEQ ID NO: 500974 - DNA, 75 bp, synthetic construct
  source 1..75: mol_type = other DNA
taacttacaacccagattatgagttgttacctcatgtggtggagcaaatcacgcaacaagtagactctgtcattt

SEQ ID NO: 500975 - DNA, 75 bp, synthetic construct
  source 1..75: mol_type = other DNA
actgatttcagtcaaaagacactacaactgcttggtgatgcaggtgccgatacaatgcaaattgtaatggggatt

SEQ ID NO: 500976 - DNA, 75 bp, synthetic construct
  source 1..75: mol_type = other DNA
caaaggttaagcctgcgcctttgctggaaaaagatgcaattactaggctaatgaggggagatgtcaaaatgaaaa

SEQ ID NO: 500977 - DNA, 75 bp, synthetic construct
  source 1..75: mol_type = other DNA
gcatctgccccgcttgcaaaactgatctgttagcaaagcagggggaggtcaagctttggcatttctcacacagta

SEQ ID NO: 500978 - DNA, 75 bp, synthetic construct
  source 1..75: mol_type = other DNA
atgtcagtatttcagatgttaaaaaccatgacacaggaaaggagagcggcagggtagagccacaaaactattcac

SEQ ID NO: 500979 - DNA, 75 bp, synthetic construct
  source 1..75: mol_type = other DNA
gcggtatatgaaaactggggaacgccgcagcaacgtgccattcgccatgccacaccggatgagttagcgccattt

SEQ ID NO: 500980 - DNA, 75 bp, synthetic construct
  source 1..75: mol_type = other DNA
gtggtacacgacaccacccacgcgccacgtcagggattcagcctgcgccgtctgtttagctacagccgccgcgaa

SEQ ID NO: 500981 - DNA, 75 bp, synthetic construct
  source 1..75: mol_type = other DNA
gctgattggaccggatggtgtcggtaaatcgagcttgttgtcgttgatttccggtgcccgcgtcattgagcaggg

SEQ ID NO: 500982 - DNA, 75 bp, synthetic construct
  source 1..75: mol_type = other DNA
aacattattacattatgttatgtcggctttagaacatgaaaaacacagagcatttacttatccgaatgaagctta

SEQ ID NO: 500983 - DNA, 75 bp, synthetic construct
  source 1..75: mol_type = other DNA
agcctcgcctcggctttctctccggatctgcaaactctggtcttcctgcgctttctcaccggcctgggtctgggc

SEQ ID NO: 500984 - DNA, 75 bp, synthetic construct
  source 1..75: mol_type = other DNA
gtggtcgaaaaatgcatcatgatggcaccggaacagtatatgtggctgcatcgtcgctttaaaacgcgcccggaa

SEQ ID NO: 500985 - DNA, 75 bp, synthetic construct
  source 1..75: mol_type = other DNA
aaccggcatggcatggttctggccgaaccgccgtattgcccgctggacggaaataatcggcttagaaaatattcg

SEQ ID NO: 500986 - DNA, 75 bp, synthetic construct
  source 1..75: mol_type = other DNA
tttatgaaacgacgcgcccaaattgcatatcgcaatctggagttgtgcttcccggagatgagcgagcaagaacgc

SEQ ID NO: 500987 - DNA, 75 bp, synthetic construct
  source 1..75: mol_type = other DNA
tcatgcgcacaggcgtttctgcgctcggctgtacgctgccggaaaaagaggggcacaccgtctcaggcgcgcggg

SEQ ID NO: 500988 - DNA, 75 bp, synthetic construct
  source 1..75: mol_type = other DNA
aaagctgggaaaaggcgatgcatatttcactggtgctgtacgccgagcacgagtttaacgcctccacttttacca

SEQ ID NO: 500989 - DNA, 75 bp, synthetic construct
  source 1..75: mol_type = other DNA
cccggaaatgagcgaacaagaacgccgtgaaatggtggtgaagaatttcgaatctgttggtatggggctgatgga

SEQ ID NO: 500990 - DNA, 75 bp, synthetic construct
  source 1..75: mol_type = other DNA
cagctctccgataacatggtgtatacggagaagaacatccgtatcatcagtgtgacgactgcggcggccatccat

SEQ ID NO: 500991 - DNA, 75 bp, synthetic construct
  source 1..75: mol_type = other DNA
atgatatttaaacaatgtaatctgttatataccagtaagggaaaatatgaaaaaatattgttagcccgcgctgcg

SEQ ID NO: 500992 - DNA, 75 bp, synthetic construct
  source 1..75: mol_type = other DNA
ctgcgggcatgtcaaccagtatgctggttaaacgtatgattgatcatgctaacgctatttcacttgaagttaata

SEQ ID NO: 500993 - DNA, 75 bp, synthetic construct
  source 1..75: mol_type = other DNA
aagtcgggccgattgaactgtcggatcgtattaaaaacggcaaagctcagggcgaggtagtattcaaaaaacgca

SEQ ID NO: 500994 - DNA, 75 bp, synthetic construct
  source 1..75: mol_type = other DNA
agcagttgaatcaaatgcaaaagcaaattccatttgcgacagctcaggctatgaccaaagttgtacgccagatag

SEQ ID NO: 500995 - DNA, 75 bp, synthetic construct
  source 1..75: mol_type = other DNA
tacgtgggcagctctccgataacatggtgtatacggagaagcacatccgtatcatcagtgtgacgactgcggcgg

SEQ ID NO: 500996 - DNA, 75 bp, synthetic construct
  source 1..75: mol_type = other DNA
ccggtttatcagccagaagaacaagaggcactggaagcggcttacggctggcagatgaaacgtgatggtaaatat

SEQ ID NO: 500997 - DNA, 75 bp, synthetic construct
  source 1..75: mol_type = other DNA
ggctggatacggataacaacaacctctccgtcaccggtacctccgggggcggtaagtcattcctgatgcagggca

SEQ ID NO: 500998 - DNA, 75 bp, synthetic construct
  source 1..75: mol_type = other DNA
agtggcattgccccgattgtgaatcaggctgcttaacgggtaaagtgagtcgctatgataaaaaattctatgtct

SEQ ID NO: 500999 - DNA, 75 bp, synthetic construct
  source 1..75: mol_type = other DNA
agctctgcctttgtcacccgtaatccagcacaattgaagaaagagattactacgctctcacaggtggagcatgct

SEQ ID NO: 501000 - DNA, 75 bp, synthetic construct
  source 1..75: mol_type = other DNA
atgagaactattgttctcattgtcaatgaggtttatgtgaattttgattctctttgcgcgtcgcggttcaaagct

SEQ ID NO: 501001 - DNA, 75 bp, synthetic construct
  source 1..75: mol_type = other DNA
ttgtaatgacgctggcgctggaagtggaggagcaggccggtacccagcgggaggccaaccgcaaatttatccagc

SEQ ID NO: 501002 - DNA, 75 bp, synthetic construct
  source 1..75: mol_type = other DNA
cttccgtaccgtcagtacgacccggacagcgagctgtttatcaatgcaaaaaccgccggttttgtcctggaatgc

SEQ ID NO: 501003 - DNA, 75 bp, synthetic construct
  source 1..75: mol_type = other DNA
aacggtactggtctggcgaaaggattcttgcgattcccgacggcgaaacaattccgtatctcgtctaactttaac

SEQ ID NO: 501004 - DNA, 75 bp, synthetic construct
  source 1..75: mol_type = other DNA
atggcgaattaccgtcttatatcactggcgctgacaacgtaaacccgcctctcaaagaagcaaacttccccgcta

SEQ ID NO: 501005 - DNA, 75 bp, synthetic construct
  source 1..75: mol_type = other DNA
cctcgctcgcttgcattgccgccagctacggcgctttggcttgataaccagagcgccggaagcgataacccctta

SEQ ID NO: 501006 - DNA, 75 bp, synthetic construct
  source 1..75: mol_type = other DNA
gagttgccaactatttatatttgtattctgttccattcgaatacgaagcgaattatgaggtaaatacagcaacga

SEQ ID NO: 501007 - DNA, 75 bp, synthetic construct
  source 1..75: mol_type = other DNA
cgtcatggtcgcagctataccacgcgttatatgcacctgcgtaaaattctggtgaaacaggggcagaaggtgaaa

SEQ ID NO: 501008 - DNA, 75 bp, synthetic construct
  source 1..75: mol_type = other DNA
tgatttcgccatgccacaaggtacgccagtgctttcagtgggtgacggtgaagtggtggttgccaaacgcagtgg

SEQ ID NO: 501009 - DNA, 75 bp, synthetic construct
  source 1..75: mol_type = other DNA
ccgcaatggcggcgcctcgcgctatgcggggtttcgtgaagggcagaacgtcagactgcaccgcccggtcagtgg

SEQ ID NO: 501010 - DNA, 75 bp, synthetic construct
  source 1..75: mol_type = other DNA
tgccgttacgaagaagatgttgctcagttgcgtcagttactgaagcagctgaagcgttatttgcaggataaccgc

SEQ ID NO: 501011 - DNA, 75 bp, synthetic construct
  source 1..75: mol_type = other DNA
tgccgttacgaagaagatatcgcgcaactgcgccagctactgaaacaattgaagcgttatttgcaggataaccgc

SEQ ID NO: 501012 - DNA, 75 bp, synthetic construct
  source 1..75: mol_type = other DNA
tgccggaaccctgcgcggggtgtcgctggcctcgctggcgaattctgacgttgatgcgctgattaaagtgctgcc

SEQ ID NO: 501013 - DNA, 75 bp, synthetic construct
  source 1..75: mol_type = other DNA
tcaaaaagcgtattattgccggtgatgtttcttatgagcagggccgcgcagaaatttttcagcattatgcccacc

SEQ ID NO: 501014 - DNA, 75 bp, synthetic construct
  source 1..75: mol_type = other DNA
tacgctgaccgaatttgctgaacaatgccgttacgaagaagacattgcacaactgcgccagttactgaaacagct

SEQ ID NO: 501015 - DNA, 75 bp, synthetic construct
  source 1..75: mol_type = other DNA
aacccgcgttatcggtcgccctgaagaaaggcgcacaactcagtgagaacaagaaactcaccctcacctcgcgcg

SEQ ID NO: 501016 - DNA, 75 bp, synthetic construct
  source 1..75: mol_type = other DNA
cgtcaacctgcttgatggcaagttaagtttctcgctgccagcggatatgaccgaccagagcggtaagctgggaac

SEQ ID NO: 501017 - DNA, 75 bp, synthetic construct
  source 1..75: mol_type = other DNA
ggattaaaaacacgacaaaaaccagccgtggcgaccagttcgcggaaggctgggtgttagctgtccacagtgaaa

SEQ ID NO: 501018 - DNA, 75 bp, synthetic construct
  source 1..75: mol_type = other DNA
ccaacctgtcactacatgatgggcggtattccgaccaaagtgaccggtcaggcgctgacggtgaacgagaaaggc

SEQ ID NO: 501019 - DNA, 75 bp, synthetic construct
  source 1..75: mol_type = other DNA
agaatttttccgcgtgaagcttgagaaaatcattaatgaagtggagcgtcaccacgggcaggtggaatatgtggc

SEQ ID NO: 501020 - DNA, 75 bp, synthetic construct
  source 1..75: mol_type = other DNA
aaccaataaagccattgagctgaaaggtcacaaaatgcagcagttagacagcattatctccgcgaaaggccagac

SEQ ID NO: 501021 - DNA, 75 bp, synthetic construct
  source 1..75: mol_type = other DNA
aaacgtctggaagaccagcaacgtagccgcgatccacaactgcaagtagtgaccaacaaagccattgagctgaaa

SEQ ID NO: 501022 - DNA, 75 bp, synthetic construct
  source 1..75: mol_type = other DNA
ccagaaagagctggtgtgggtagggcgtgtgatggtgctggtggtggcgctggtggcgattgcgctggcggcaaa

SEQ ID NO: 501023 - DNA, 75 bp, synthetic construct
  source 1..75: mol_type = other DNA
tttattggcggtttcctcgcggtgagctggactgacactgtacaggccagcctgatgatttttgccctgatcctg

SEQ ID NO: 501024 - DNA, 75 bp, synthetic construct
  source 1..75: mol_type = other DNA
atgagcggctggctgttaatggggttgccgggcgctgtttttctttccgggatttccgaaagctggatcgccatt

SEQ ID NO: 501025 - DNA, 75 bp, synthetic construct
  source 1..75: mol_type = other DNA
atgctgaacgcgtatttatcgaactggcgcaaattctgtttaatccgtggattgccggaattctgttgtcagcga

SEQ ID NO: 501026 - DNA, 75 bp, synthetic construct
  source 1..75: mol_type = other DNA
agtgatcaaacaaaagagcattgaaaacgtggatatgctcaaagggctgaattttgtcgccattatctcgctgat

SEQ ID NO: 501027 - DNA, 75 bp, synthetic construct
  source 1..75: mol_type = other DNA
tcggtggctttggtgactcgctggaagtgatcaaacaaaagagcatcgaaaacgtggatatgctcaaagggctga

SEQ ID NO: 501028 - DNA, 75 bp, synthetic construct
  source 1..75: mol_type = other DNA
cggttcaaaatgatgttgatgcgcaatttttgcttggagagatgtatgacgatggtctcggggtaggccaagact

SEQ ID NO: 501029 - DNA, 75 bp, synthetic construct
  source 1..75: mol_type = other DNA
tttccgtttccggtctggatgcggcacgccagatgatgcgtctgcagaaagaaggcgatcgtgcgctgaatatcc

SEQ ID NO: 501030 - DNA, 75 bp, synthetic construct
  source 1..75: mol_type = other DNA
cgccatgctggcggatgagacctggatgtccggtgccgagtgtctggcacacggatttgcagaccaggtgacgcc

SEQ ID NO: 501031 - DNA, 75 bp, synthetic construct
  source 1..75: mol_type = other DNA
cgtctggaaacagttcggctggctgggtctgtacgaaattattccgggctttatcttcggcagcattgggattgt

SEQ ID NO: 501032 - DNA, 75 bp, synthetic construct
  source 1..75: mol_type = other DNA
atgctcagtataatttaggtcagatctattattacggtcagggcgtgactcagagctatcgacaggcgaaagaat

SEQ ID NO: 501033 - DNA, 75 bp, synthetic construct
  source 1..75: mol_type = other DNA
aaaagctgctgctcaaaatgatgagcgtgctcaggttaatctcgctgttctatacgcaaagggtaaaggggtaga

SEQ ID NO: 501034 - DNA, 75 bp, synthetic construct
  source 1..75: mol_type = other DNA
caaagctttcatttaatgaattatacaaaatgacaataagcttagatatattgaagaaatatattgatacgaact

SEQ ID NO: 501035 - DNA, 75 bp, synthetic construct
  source 1..75: mol_type = other DNA
cagtaagggaagtcgctggtataaacttatctccacagcccttgcagtaaccacttccgttatcaaccctattgt

SEQ ID NO: 501036 - DNA, 75 bp, synthetic construct
  source 1..75: mol_type = other DNA
ggtcgcgtaagccttcgttatctgatgtacaaaaccgaccaggttcgtgaatccctcggtcattccaacttccgc

SEQ ID NO: 501037 - DNA, 75 bp, synthetic construct
  source 1..75: mol_type = other DNA
taccaaaagagatggcaacgcctgctgagttcgctgaatgggaaggtatctcccgcggctctgtgtatcaaaaaa

SEQ ID NO: 501038 - DNA, 75 bp, synthetic construct
  source 1..75: mol_type = other DNA
agattgttgatgaaatttgcgattttgtggcgaatcagcaggcggttttcttgggcggtcactacatcctgcagg

SEQ ID NO: 501039 - DNA, 75 bp, synthetic construct
  source 1..75: mol_type = other DNA
ctcggtggtcactatatccttacatcttacagggcagcagaaacaggtgatacagggcaggcggtggaggccgcc

SEQ ID NO: 501040 - DNA, 75 bp, synthetic construct
  source 1..75: mol_type = other DNA
agtaagcttcaaattcaagaagaatcagtttcggggatcttaagtgctattcaccagaaaatatcagagaaatta

SEQ ID NO: 501041 - DNA, 75 bp, synthetic construct
  source 1..75: mol_type = other DNA
tgccagaaaatctcaagccaaaagatattaccgaacgcgcgctggctgacagctgcaccgattgccgccgcgcgt

SEQ ID NO: 501042 - DNA, 75 bp, synthetic construct
  source 1..75: mol_type = other DNA
aatctcgggacatttggcggcgtgtttattgcgggcggtatcgtgccgcgcttccttgagttcttcaaagcctct

SEQ ID NO: 501043 - DNA, 75 bp, synthetic construct
  source 1..75: mol_type = other DNA
agattgttgatgaaatctgcgattttgtggtgaatcagcaggctgttttcctgggcggtcactatatccttcagg

SEQ ID NO: 501044 - DNA, 75 bp, synthetic construct
  source 1..75: mol_type = other DNA
gcgcggtattggggtggccagttataaccccatgcagatggtcgggctggcgcttacgcacagcacctctgattt

SEQ ID NO: 501045 - DNA, 75 bp, synthetic construct
  source 1..75: mol_type = other DNA
agttgagatcccggctgccgtgcgtcaggcactggcgaaagatccgcagaaaatttttaactatatccagcttac

SEQ ID NO: 501046 - DNA, 75 bp, synthetic construct
  source 1..75: mol_type = other DNA
agcaagctgttgctgagcctgctgccagtgcgccagttgagatcccggctgccgtgcgtcaggcactggcgaaag

SEQ ID NO: 501047 - DNA, 75 bp, synthetic construct
  source 1..75: mol_type = other DNA
gcgcgatgtttgtcagcaatgttcagccttatgaagagatgaagttacgcatgttaaatggtagccattcatttc

SEQ ID NO: 501048 - DNA, 75 bp, synthetic construct
  source 1..75: mol_type = other DNA
gccgtgaccaacaaaaaagccgtcagtgacgaagcaaagcaagctgttgctgagcctgctgccagtgcgccagtt

SEQ ID NO: 501049 - DNA, 75 bp, synthetic construct
  source 1..75: mol_type = other DNA
tggtgctgcgcgggatcgcctttggtgccagacccggcgcggttattgaagaaggcggcaaacagcaggtctatt

SEQ ID NO: 501050 - DNA, 75 bp, synthetic construct
  source 1..75: mol_type = other DNA
aaaaacgtttgagcaaaaagacgtgcaattaatcagccagcaaaactggtttggcaaatatcagcccgtcgccgc

SEQ ID NO: 501051 - DNA, 75 bp, synthetic construct
  source 1..75: mol_type = other DNA
acagtcagtgcggcaggttgtggctgtctatgcccccggcgacagggactcatacgggtgtgtggcacccggcag

SEQ ID NO: 501052 - DNA, 75 bp, synthetic construct
  source 1..75: mol_type = other DNA
cagaaaaataacatcagaaaaaaacattccggacacatcacaaacgggaagggtaacgggcgacgcgtcagcgtg

SEQ ID NO: 501053 - DNA, 75 bp, synthetic construct
  source 1..75: mol_type = other DNA
cgtgcgtaccgtgctggaagccttaccggcggcgtcacacccgatggatgttatgcgcaccggcgtttccgcgct

SEQ ID NO: 501054 - DNA, 75 bp, synthetic construct
  source 1..75: mol_type = other DNA
gatctacaaaacccggatgcgcctctgtcagctattggcgtgatcgtctgtgctttgcaacaacgtaaagcggca

SEQ ID NO: 501055 - DNA, 75 bp, synthetic construct
  source 1..75: mol_type = other DNA
tattgagctggcgaatggtttccatgaattgacggatgcccgtgagcagcaacaacgttttgaacaagataaccg

SEQ ID NO: 501056 - DNA, 75 bp, synthetic construct
  source 1..75: mol_type = other DNA
gacaataatcagggcagcagtaatcagagtcagagcagtaatcagagtcagagcaggaggaaaaagagaataatc

SEQ ID NO: 501057 - DNA, 75 bp, synthetic construct
  source 1..75: mol_type = other DNA
ttattaaggataataagcctgcagatcttgtggcgtatctagaaaaaaacagcgcccatactcccgaaactgctg

SEQ ID NO: 501058 - DNA, 75 bp, synthetic construct
  source 1..75: mol_type = other DNA
taaaatccagcactcacattgctctcctttttatggtttctatgggtacacaaaaattaaaagctcaaggctttt

SEQ ID NO: 501059 - DNA, 75 bp, synthetic construct
  source 1..75: mol_type = other DNA
atggcttctatgggtacacaaaaattaaaagctcaaggcttttttattttcagcttattgctgacgttaatttta

SEQ ID NO: 501060 - DNA, 75 bp, synthetic construct
  source 1..75: mol_type = other DNA
aagaaaataaatcatatacctgcatccaaccacaaagaaactattgattttgcaaaaaaaatacttccccaagtt

SEQ ID NO: 501061 - DNA, 75 bp, synthetic construct
  source 1..75: mol_type = other DNA
tgaaacgatcgttattattcacaagcctatcagcgatagtacgctgatccagacgaaatcgaatgacgtttccat

SEQ ID NO: 501062 - DNA, 75 bp, synthetic construct
  source 1..75: mol_type = other DNA
atatttcactaacaaacaaattttaccaacactcattttaagccttgcatttttaagtggccttatctatttagt

SEQ ID NO: 501063 - DNA, 75 bp, synthetic construct
  source 1..75: mol_type = other DNA
tatcgttaacgaaaattgatcctggtcaaaactatatatctctgccatcaataaaatccagcactcacattgctc

SEQ ID NO: 501064 - DNA, 75 bp, synthetic construct
  source 1..75: mol_type = other DNA
cgatatcaccgtaacggcaggggcgacggaagcgttatacgcggcgattaccgcactggtgcgcaatggcgatga

SEQ ID NO: 501065 - DNA, 75 bp, synthetic construct
  source 1..75: mol_type = other DNA
tccggcctttatgctggtaccggtggcactggagacggtggcgaaccagaccatcaaatcggccagtgtgaaagg

SEQ ID NO: 501066 - DNA, 75 bp, synthetic construct
  source 1..75: mol_type = other DNA
acaaggggctgatccagggctgggaggaatcagaagaaaccttccagaagtggacccgtaagggacgcctgtcag

SEQ ID NO: 501067 - DNA, 75 bp, synthetic construct
  source 1..75: mol_type = other DNA
aagaaaataaatcatatacctgcatccagccacaaagaaactattgattttgcaaaaaaaatacttcctcaagtc

SEQ ID NO: 501068 - DNA, 75 bp, synthetic construct
  source 1..75: mol_type = other DNA
gtacttctgtgcgcgccaaaagaaaattactttgatttccagctcacaaagcgaaatgactctcgtgtaaagaat

SEQ ID NO: 501069 - DNA, 75 bp, synthetic construct
  source 1..75: mol_type = other DNA
agtgatttgttttgatcccagctatgacagttacgcccccgccatcgcgctttctgggggaatagtgaagcgtat

SEQ ID NO: 501070 - DNA, 75 bp, synthetic construct
  source 1..75: mol_type = other DNA
ggtggcgctcacgctgcggtggtaacagcagtagctaaagctgcgtttaactcggcagttgatgctgtccgtgca

SEQ ID NO: 501071 - DNA, 75 bp, synthetic construct
  source 1..75: mol_type = other DNA
agccttccagtttgccgccgaaggcaaagtggtaccgaaggtcgccctgcgtccgttagcggacatcaacaccat

SEQ ID NO: 501072 - DNA, 75 bp, synthetic construct
  source 1..75: mol_type = other DNA
gcggtaaaagtgccagatggtctggactcggcggcggccagcagcattacctgtgcgggggtcaccacctacaaa

SEQ ID NO: 501073 - DNA, 75 bp, synthetic construct
  source 1..75: mol_type = other DNA
ctttctggcggtgaactgaaagttaaaggactggcaatgacccgcatgatgtgtgccaacccacagcttaacgaa

SEQ ID NO: 501074 - DNA, 75 bp, synthetic construct
  source 1..75: mol_type = other DNA
aacgcagtcaactggccgttcaattttcatgactgaacagattataagtcgattagggggtattattgaacctgc

SEQ ID NO: 501075 - DNA, 75 bp, synthetic construct
  source 1..75: mol_type = other DNA
tccgccgctcagaggcctttgctgcgactgccagtcctggtgtcgcagcatcgcacactctccaacatgaaatgg

SEQ ID NO: 501076 - DNA, 75 bp, synthetic construct
  source 1..75: mol_type = other DNA
aactcaggttgcgaccgttatcccctattttgaacgctttatggcgcgcttcccgacggtgaccgatctcgccaa

SEQ ID NO: 501077 - DNA, 75 bp, synthetic construct
  source 1..75: mol_type = other DNA
caatctgcataaagcggcacagcaagttgccaccttacacaacggtaaattcccggaaacctttgaggaagtcgc

SEQ ID NO: 501078 - DNA, 75 bp, synthetic construct
  source 1..75: mol_type = other DNA
ttaccgacgacgccgtttatcctgctggcggcctggtgctttgctcgttcttccccgcgctttcacgcctggttg

SEQ ID NO: 501079 - DNA, 75 bp, synthetic construct
  source 1..75: mol_type = other DNA
cggtaacaatggggcacatcaaaaaaggagatttaagtaactctttctgtctaattcctacttcatcgttgatta

SEQ ID NO: 501080 - DNA, 75 bp, synthetic construct
  source 1..75: mol_type = other DNA
actttctgctgttacagcacgaagatgaagtattgctggcgcagcgtccgccgagcggattgtggggcggtttat

SEQ ID NO: 501081 - DNA, 75 bp, synthetic construct
  source 1..75: mol_type = other DNA
aggttctggactggtacgataaatacgggcgaaaaacgctgccctggcaaattgacaagacgccctacaaagtat

SEQ ID NO: 501082 - DNA, 75 bp, synthetic construct
  source 1..75: mol_type = other DNA
aaaaatccgccagaaatcagctttggtgaaaaaatgatgatttccggcagcatgtgtaaccgctttagcggtgaa

SEQ ID NO: 501083 - DNA, 75 bp, synthetic construct
  source 1..75: mol_type = other DNA
tcgttttgtggcaaccagtggagaagaagaagggaaattaggcgctgagaatttactcaagcgcatgagcgatac

SEQ ID NO: 501084 - DNA, 75 bp, synthetic construct
  source 1..75: mol_type = other DNA
atgctggaattggcagaacgcctgaaaaatacgcctaccgagtatggtattcgatttgtggcgaccagtggtgaa

SEQ ID NO: 501085 - DNA, 75 bp, synthetic construct
  source 1..75: mol_type = other DNA
tgtggcaggcggaaaaagcttggagcagccgttgtttgactctgtgattgtggtcaccgatagacgcctattgga

SEQ ID NO: 501086 - DNA, 75 bp, synthetic construct
  source 1..75: mol_type = other DNA
gcaggaaggcaagaccggctatccgattgttgatgctgccatgcgccagcttaatggcactggctggatgcataa

SEQ ID NO: 501087 - DNA, 75 bp, synthetic construct
  source 1..75: mol_type = other DNA
tatctggatggcgctgcgcactgaaggggcggcgaaatttatcgctatctggtggtgtctgctggcatttatcgc

SEQ ID NO: 501088 - DNA, 75 bp, synthetic construct
  source 1..75: mol_type = other DNA
tacgctgctggtgattaatctcgataacttaattgttggcgataaattgtatttcaacagcggtgtaaaaacccc

SEQ ID NO: 501089 - DNA, 75 bp, synthetic construct
  source 1..75: mol_type = other DNA
tcaatgggtaatgaaaaagccgctgattcaacgtatgttgggtaaagagctcactctgccgcagccggtatggtc

SEQ ID NO: 501090 - DNA, 75 bp, synthetic construct
  source 1..75: mol_type = other DNA
cgggacattctgctgacgccgcagggtagccgcattgctcgtcgtgaatatggttccctgctgtcgtcgctaata

SEQ ID NO: 501091 - DNA, 75 bp, synthetic construct
  source 1..75: mol_type = other DNA
tgaaagaaggtgcgcaagcagatctgaccgcgaaccaattaacgctggcgaccgcaaaacagacattaatctata

SEQ ID NO: 501092 - DNA, 75 bp, synthetic construct
  source 1..75: mol_type = other DNA
gattaagaagcatggcattcttcatttacttaagaaagggctaagcgtagacgatgctcatttcaatttgctcta

SEQ ID NO: 501093 - DNA, 75 bp, synthetic construct
  source 1..75: mol_type = other DNA
gtgccgtttattatggttcccattgttaactgtgccattggttacttctttgtttcgatggaaattattccaccg

SEQ ID NO: 501094 - DNA, 75 bp, synthetic construct
  source 1..75: mol_type = other DNA
ccccgcgtcaccctgtcatctgtcaccacggcgcgcagttttgacgggcgaatgacggtcacgttaaccggccag

SEQ ID NO: 501095 - DNA, 75 bp, synthetic construct
  source 1..75: mol_type = other DNA
gtggttcgtccagatgccatgggtgcgcatcatgttgctggtaattctcgcctgtttgcttttctatatgtggcg

SEQ ID NO: 501096 - DNA, 75 bp, synthetic construct
  source 1..75: mol_type = other DNA
tgcaatatagcttatgcgttggcatagcaagttggttattagcaataggcctgattcaatatgctgagaaacaac

SEQ ID NO: 501097 - DNA, 75 bp, synthetic construct
  source 1..75: mol_type = other DNA
tccattcggttgaataaagatcacgaacttcgcacatgggcagacctgagactcctgacggagtttcttctggat

SEQ ID NO: 501098 - DNA, 75 bp, synthetic construct
  source 1..75: mol_type = other DNA
tggcgcgaaagccgaaatttacaaagtgatgcgccaactggcggacgacggaaaagtcatcctgatggtgtcatc

SEQ ID NO: 501099 - DNA, 75 bp, synthetic construct
  source 1..75: mol_type = other DNA
ggtgaaagagccgattccggtaattccaacctgtcactacatgatgggcggtattccgaccaaagtgaccggtca

SEQ ID NO: 501100 - DNA, 75 bp, synthetic construct
  source 1..75: mol_type = other DNA
cgcggctgtgatggtccgtgggggccacacgcaaaactgaaacttgaccatctggggaaagaagttctcgaatcc

SEQ ID NO: 501101 - DNA, 75 bp, synthetic construct
  source 1..75: mol_type = other DNA
gtactggtcaccgaaggttgccgtggtgaaggcggttatctgctgaacaaacatggcgaacgctttatggagcgt

SEQ ID NO: 501102 - DNA, 75 bp, synthetic construct
  source 1..75: mol_type = other DNA
ggtgaaactgaccggacagtatctgctggaaggttatggcctgaccgagtgtgcgccgctggtcagcgttaaccc

SEQ ID NO: 501103 - DNA, 75 bp, synthetic construct
  source 1..75: mol_type = other DNA
ggcgaaaggcgcgatgctgactcaccgcaatatgctggcgaacctggaacaggtcaacgccacctatggtccgct

SEQ ID NO: 501104 - DNA, 75 bp, synthetic construct
  source 1..75: mol_type = other DNA
tgataacgaagtaccaccggggcaaccgggcgaactttgtgtcagaggtcctcaggtgatgttgggctactggca

SEQ ID NO: 501105 - DNA, 75 bp, synthetic construct
  source 1..75: mol_type = other DNA
atgacgatatcgtccgtctgatggtaggccgcgaactgcaaaaccgttttaacgcgatgaaggagaatgtcagca

SEQ ID NO: 501106 - DNA, 75 bp, synthetic construct
  source 1..75: mol_type = other DNA
tgaacagcgaaatcgtcgcaggtgacaccaccactgaaaacatcgatgtggcagaggaaaaaacgggggtgaagt

SEQ ID NO: 501107 - DNA, 75 bp, synthetic construct
  source 1..75: mol_type = other DNA
atgcagttgtgattggtgctggcggcgcaggtatgtgcgcggcgctgcaaatttcccagagtggccagacctgtg

SEQ ID NO: 501108 - DNA, 75 bp, synthetic construct
  source 1..75: mol_type = other DNA
agcgtaagggccgcgccgggcgtccacgtggtatgcgtccttggatgctggtggtgctgtcagaattcgggcgcg

SEQ ID NO: 501109 - DNA, 75 bp, synthetic construct
  source 1..75: mol_type = other DNA
aattatacttactcgtaattcccagcaggccaaggacaacgggccagatattctgtttaccaccacggaaatgct

SEQ ID NO: 501110 - DNA, 75 bp, synthetic construct
  source 1..75: mol_type = other DNA
cagccccatccgaaggatcatcagcagcaatgcggtggcgtactggagtggcggcgtgatgatatctttgctctt

SEQ ID NO: 501111 - DNA, 75 bp, synthetic construct
  source 1..75: mol_type = other DNA
gccgtcctccatcactgcgccagcgtcgtgatcttatacttctagcgcatatacgtgagcagcatcggttgtgtt

SEQ ID NO: 501112 - DNA, 75 bp, synthetic construct
  source 1..75: mol_type = other DNA
atcttcgaatatataaatggcttttataatccacgccgaagacattcaacactcggctctgatgaatcccctaat

SEQ ID NO: 501113 - DNA, 75 bp, synthetic construct
  source 1..75: mol_type = other DNA
atgaagggctaatgagcccggagatcaaacgtcagggtctgccgctggacaaccagcacgtacagaaaatgcagg

SEQ ID NO: 501114 - DNA, 75 bp, synthetic construct
  source 1..75: mol_type = other DNA
gctgattgccgccaccgatcatgcggtacaactggcaaaagagaccggcctggggtttgttggtatcaacaatac

SEQ ID NO: 501115 - DNA, 75 bp, synthetic construct
  source 1..75: mol_type = other DNA
tggcgcatgccatcagaggaattaggaatactagcgcatcgaattattgacggcttagcagatcactctctaatt

SEQ ID NO: 501116 - DNA, 75 bp, synthetic construct
  source 1..75: mol_type = other DNA
gaggcgctgttttagttccgaggcacagagaatcggtaacgagaaaacaaagtatcaacaaagacagaccactca

SEQ ID NO: 501117 - DNA, 75 bp, synthetic construct
  source 1..75: mol_type = other DNA
acatctcttgcgtaacctccggcaatggatgtcccacaagtcgcttgaagaaagtaaaacgctggtctctgacta

SEQ ID NO: 501118 - DNA, 75 bp, synthetic construct
  source 1..75: mol_type = other DNA
agcccgatttacctgccatattctccatgttgctgattattagtggcggcattattatgaatgtattttcaaaca

SEQ ID NO: 501119 - DNA, 75 bp, synthetic construct
  source 1..75: mol_type = other DNA
tggcactttccatcggttctgaaataaccggtacgtcaatgatcaaaaaaaccaatggttttaggcgactgtggc

SEQ ID NO: 501120 - DNA, 75 bp, synthetic construct
  source 1..75: mol_type = other DNA
ctggcaggtagcgccagccgactgccggaagctggtgaagacttagagctgaaaatgggcgagaactggcgtcgt

SEQ ID NO: 501121 - DNA, 75 bp, synthetic construct
  source 1..75: mol_type = other DNA
gcgaactgccttcgaaagaaaaacaggtagttaaagaaggtgcgactactctgctatggtttgaacatccggcgg

SEQ ID NO: 501122 - DNA, 75 bp, synthetic construct
  source 1..75: mol_type = other DNA
aaaggctgttataccggacaagagatggtggcgcgagcaaaattccgtggtgccaacaaacgcgcgctctggttg

SEQ ID NO: 501123 - DNA, 75 bp, synthetic construct
  source 1..75: mol_type = other DNA
ggattgaacggcgcagcgtgcgcgagtcgcagcttaccgaactgaaaaaatatgcggtattttctaaagtgacca

SEQ ID NO: 501124 - DNA, 75 bp, synthetic construct
  source 1..75: mol_type = other DNA
gaaccggacagcgttttccgcgttcgtgacgatgcgaatacattgcatatcgagccgctgccgtattcgctggaa

SEQ ID NO: 501125 - DNA, 75 bp, synthetic construct
  source 1..75: mol_type = other DNA
cagatgacagaagatcagcacctgctcgccgcacattgcgatgctaaaggtaagatgtggagcaatttgcgtctg

SEQ ID NO: 501126 - DNA, 75 bp, synthetic construct
  source 1..75: mol_type = other DNA
agcaagagtcctttattcaccatatccagattggccgcgaactgaacaaaccggttatcgttcatacgcgcgatg

SEQ ID NO: 501127 - DNA, 75 bp, synthetic construct
  source 1..75: mol_type = other DNA
ctggtagaaactgactcaccttaccttgcgccggtgccgcatcgaggaaaagagaatcaacctgcgatggttcgt

SEQ ID NO: 501128 - DNA, 75 bp, synthetic construct
  source 1..75: mol_type = other DNA
atgtttttagtcgactcacactgccatctcgatggtctggattatgaatctttgcataaggacgtggatgacgtt

SEQ ID NO: 501129 - DNA, 75 bp, synthetic construct
  source 1..75: mol_type = other DNA
gaaaatgggcgaaaactggcgccgtacaggaattgtgctggctgcggtaaaacgggaagatggtcaggtcgtggt

SEQ ID NO: 501130 - DNA, 75 bp, synthetic construct
  source 1..75: mol_type = other DNA
atggcttttacaccttttcctccccgtcagcctacggcttctgcccgtttaccgctgacgctgatgacgcttgat

SEQ ID NO: 501131 - DNA, 75 bp, synthetic construct
  source 1..75: mol_type = other DNA
tccgctaaatcagaatgatccctacgatgtggaagatttacgccgtctggcaacagaagagggcgttgttgcgct

SEQ ID NO: 501132 - DNA, 75 bp, synthetic construct
  source 1..75: mol_type = other DNA
tctgcctgacggccagcatcctggccggttgtacccaaaagctccagcaacctgatacgcaacctcatccatcgg

SEQ ID NO: 501133 - DNA, 75 bp, synthetic construct
  source 1..75: mol_type = other DNA
gaacctggcattatcctttctcccctggcaccaccagcgatgaccgcattaacgccgattactggcaggatttac

SEQ ID NO: 501134 - DNA, 75 bp, synthetic construct
  source 1..75: mol_type = other DNA
aacgccagttactggcaagatatgcaggcaatttcgcaactggtacatactgaaaaactcgacggcgaaaataac

SEQ ID NO: 501135 - DNA, 75 bp, synthetic construct
  source 1..75: mol_type = other DNA
cgattaccgatcgtccaacggtgaatatgctgggcggatattactcacagcagcaatttttgcgtaacctggatg

SEQ ID NO: 501136 - DNA, 75 bp, synthetic construct
  source 1..75: mol_type = other DNA
ttgcgcaattacgccagttttgccagaacggtgccggagagtatgagcaacaacgagattttccggcagtggaag

SEQ ID NO: 501137 - DNA, 75 bp, synthetic construct
  source 1..75: mol_type = other DNA
ggacgaccctgtatgctggaagggattgtcagtcgaaatcgcgactcattttccgttgtcgacttttcgcataac

SEQ ID NO: 501138 - DNA, 75 bp, synthetic construct
  source 1..75: mol_type = other DNA
ttgtcagccgaaatcgtgatgcgttttccgtcgctgacttttcgcataacgtcttcaagtatgtgcgcaaaaatc

SEQ ID NO: 501139 - DNA, 75 bp, synthetic construct
  source 1..75: mol_type = other DNA
cgagcgatcagtatctctgctgaatatgacaggctttatgggatgacctgcgagcgccagtcgttaggtgagaag

SEQ ID NO: 501140 - DNA, 75 bp, synthetic construct
  source 1..75: mol_type = other DNA
ggcgtgctttaccgccaggcattgccggcagtccagtaccagctgggcccgatgcgcctgcgtactgccctgcag

SEQ ID NO: 501141 - DNA, 75 bp, synthetic construct
  source 1..75: mol_type = other DNA
gcctgcgccgtcagcaatgtcacaacctgccatcagcacacctcagtcagcacccgttaaacctgtcagcggagg

SEQ ID NO: 501142 - DNA, 75 bp, synthetic construct
  source 1..75: mol_type = other DNA
agtgcggccgttggaatatcaccattcattgcaaataatataaaggtcaatgggaagatggtatttcgtggttcg

SEQ ID NO: 501143 - DNA, 75 bp, synthetic construct
  source 1..75: mol_type = other DNA
cagttggttgacaacaaaagatggaccaattgaagtactaaatgacgtatctgttgctgagcgagctattgttgt

SEQ ID NO: 501144 - DNA, 75 bp, synthetic construct
  source 1..75: mol_type = other DNA
caactgaagacttaaccctgtccggcgatcatgcagcggcatctgctgatagcttagttgtcgataatgccaacg

SEQ ID NO: 501145 - DNA, 75 bp, synthetic construct
  source 1..75: mol_type = other DNA
agtggaggcgggattgtcaggggctctgacggaatctatggaacagcagacgacaaccttaacactcaggaaaag

SEQ ID NO: 501146 - DNA, 75 bp, synthetic construct
  source 1..75: mol_type = other DNA
gcgaagtacggacactcgcaagccgcagcgcccaggcggcgaaagagattgaaggcttgatcagtgaatcagtca

SEQ ID NO: 501147 - DNA, 75 bp, synthetic construct
  source 1..75: mol_type = other DNA
aaaaaacgtccccggcggcctaattttccttatgagtttaaaatcgccttagtggagcagtcactgcagcccgga

SEQ ID NO: 501148 - DNA, 75 bp, synthetic construct
  source 1..75: mol_type = other DNA
ggcgaaaccctgaaaaacaatgccccaaacttctggcgctggctgcatcattccgcagggggcgacttcgacaaa

SEQ ID NO: 501149 - DNA, 75 bp, synthetic construct
  source 1..75: mol_type = other DNA
cgcgcaatgcaggccgcaccttatgtcgcatttgatatggctcttaaaaccatgtgtaaggaatgcgctgatact

SEQ ID NO: 501150 - DNA, 75 bp, synthetic construct
  source 1..75: mol_type = other DNA
gaggcctcagcggcggcgttgtcccttgaagaacaggcggcacgattaactgaggcggtggatgtattccgtctg

SEQ ID NO: 501151 - DNA, 75 bp, synthetic construct
  source 1..75: mol_type = other DNA
gcctatgctgaaatatgccaaaaatggcatgtttgaagcgattattaatcatgaaagtgagcatatccgaacgct

SEQ ID NO: 501152 - DNA, 75 bp, synthetic construct
  source 1..75: mol_type = other DNA
caggctgaacttatcaatgctcaactgaatgggctacaaatagcgcttgcggaaaaaggtattcctttattgttc

SEQ ID NO: 501153 - DNA, 75 bp, synthetic construct
  source 1..75: mol_type = other DNA
gcaatcccgcacatttacaggcctggcaggaaggcaaaacgggatacccgattgttgatgccgctatgcgtcagc

SEQ ID NO: 501154 - DNA, 75 bp, synthetic construct
  source 1..75: mol_type = other DNA
caggctgaatttatcaatgctcaactgaacgggctacagatcgcgctggcagaaaaaggcattcctttattgttc

SEQ ID NO: 501155 - DNA, 75 bp, synthetic construct
  source 1..75: mol_type = other DNA
taaagatgaaatgcttttttttgacaggtaatatcaactatctcttcggagggattagaactattgcttctttta

SEQ ID NO: 501156 - DNA, 75 bp, synthetic construct
  source 1..75: mol_type = other DNA
aattgttgtacggatgatttttataatgagttgaaacacaaagttaatgacaaaattaagttgattcgtacagat

SEQ ID NO: 501157 - DNA, 75 bp, synthetic construct
  source 1..75: mol_type = other DNA
ccgaatcaagtcatcctgttgtttctgttattctgccagttaataaaaaaaacccttttcttgatgaggcaataa

SEQ ID NO: 501158 - DNA, 75 bp, synthetic construct
  source 1..75: mol_type = other DNA
ctctgcacaatattgaaggttctactattaaacaggttcaggtcaataatccgggtgatgtttacagcaaaactc

SEQ ID NO: 501159 - DNA, 75 bp, synthetic construct
  source 1..75: mol_type = other DNA
gtgtgcgcggaaaatcgcattacccatctgttttataactatcagtatgaggtgaatgagcgggcgcgggatgtg

SEQ ID NO: 501160 - DNA, 75 bp, synthetic construct
  source 1..75: mol_type = other DNA
ctgatctggcgcgagttctaccgccatttgatgacgtattacccctcgttgtgtaaacatcgtccgtttattgtc

SEQ ID NO: 501161 - DNA, 75 bp, synthetic construct
  source 1..75: mol_type = other DNA
ctgatctggcgcgagttctaccgccatttgatgacgtattatccttcgctgtgtaaacatcgtccgtttattgcc

SEQ ID NO: 501162 - DNA, 75 bp, synthetic construct
  source 1..75: mol_type = other DNA
atgacgttgtatatcggtatgagcaggaatgacgggcagaccattgcagatacagaccatctgcgccagtcggtg

SEQ ID NO: 501163 - DNA, 75 bp, synthetic construct
  source 1..75: mol_type = other DNA
atctgatgacgtattacccttcgttgtgtaaacatcgtccatttattgcctggacggatcgtgtacagtggcaaa

SEQ ID NO: 501164 - DNA, 75 bp, synthetic construct
  source 1..75: mol_type = other DNA
ccggctacggatgattacagccagttttttggtgaaagatttattgatcgactggcgcgaaggcgagcgatattt

SEQ ID NO: 501165 - DNA, 75 bp, synthetic construct
  source 1..75: mol_type = other DNA
atgtgtacacgttgaaacaggccgcccgcctcatcggttatcatgagcacgaatttattgatttgctgattgagc

SEQ ID NO: 501166 - DNA, 75 bp, synthetic construct
  source 1..75: mol_type = other DNA
atggggcggcgcaatcacggtgattatgtgtacacgttgaaacaggccgcccgcctcatcggttatcatgaacac

SEQ ID NO: 501167 - DNA, 75 bp, synthetic construct
  source 1..75: mol_type = other DNA
atgatgaatgagcagccgctggaaggcgcggtacgcgaaaaagcgttgcacaccatgcgcgagcagacccagcgg

SEQ ID NO: 501168 - DNA, 75 bp, synthetic construct
  source 1..75: mol_type = other DNA
gtgaatcctggcgcttattgagcagtgtctttctgcacagcagtgtttctcatttgctgatgaatatgtttgcac

SEQ ID NO: 501169 - DNA, 75 bp, synthetic construct
  source 1..75: mol_type = other DNA
atccgcacttatccatctcggtgctaacgttgcttctctcacgttgtcgggtgaatcctggcgcttattgagcag

SEQ ID NO: 501170 - DNA, 75 bp, synthetic construct
  source 1..75: mol_type = other DNA
gccaatttgaagctggcacaggccgtaatcaatagttatcgcggaaagtggatcgcaaaagtgaaacatgttgtt

SEQ ID NO: 501171 - DNA, 75 bp, synthetic construct
  source 1..75: mol_type = other DNA
acggccagcggtaaaaaagtcccgcaggtcaccataacccgcagcgacggcgaccgccatcattttgcgattgct

SEQ ID NO: 501172 - DNA, 75 bp, synthetic construct
  source 1..75: mol_type = other DNA
gtgggatattttcgaacaggggcatcagttattaaccgcagcgggttatcagcaatatgaaacttccgcttacgc

SEQ ID NO: 501173 - DNA, 75 bp, synthetic construct
  source 1..75: mol_type = other DNA
actacatcggtattggctgcggcgcgcacggcaaaatcaccttctctgatggtcgcatcctgcgtaccaccaaaa

SEQ ID NO: 501174 - DNA, 75 bp, synthetic construct
  source 1..75: mol_type = other DNA
ctcacagaatgtgcggattactggcagataacggaacatgggaagttgtttttaaattcgctgctggagcttttt

SEQ ID NO: 501175 - DNA, 75 bp, synthetic construct
  source 1..75: mol_type = other DNA
cttgcaagcgggctggggctgcgtagctttaacctcgatttgatgcatggactaccggatcaatcactggaagag

SEQ ID NO: 501176 - DNA, 75 bp, synthetic construct
  source 1..75: mol_type = other DNA
ctcacagaatgtgcggattactggcagataaccgagcatggtaaattattcttaaactcacttcttgaattattc

SEQ ID NO: 501177 - DNA, 75 bp, synthetic construct
  source 1..75: mol_type = other DNA
gtgggatattttcgaacaggggcatcagttattaaccgcagcgggctatcagcagtatgaaacatccgcttacgc

SEQ ID NO: 501178 - DNA, 75 bp, synthetic construct
  source 1..75: mol_type = other DNA
gcacgggaaggggatatgtcattgttgaaaccggggcctttttcagctgcagctacgatggagttacgttatgag

SEQ ID NO: 501179 - DNA, 75 bp, synthetic construct
  source 1..75: mol_type = other DNA
gatatagaaatacagaccattacaaatcagagtacaggatatcactggaaaacaataaatatacctgttagctgt

SEQ ID NO: 501180 - DNA, 75 bp, synthetic construct
  source 1..75: mol_type = other DNA
ccactggccagccgttccgtctggtacaacagcgcagtgccatcgatacggtggtgatgcaggagattgtccgtc

SEQ ID NO: 501181 - DNA, 75 bp, synthetic construct
  source 1..75: mol_type = other DNA
tctacattcacatcccgtggtgcgtgcagaaatgcccgtactgcgatttcaactctcacgcgttgaaaggagaag

SEQ ID NO: 501182 - DNA, 75 bp, synthetic construct
  source 1..75: mol_type = other DNA
tgtttacaataatgctatcaaaacgactaaatatgatgctgaaaagctggttatttatttccgacaggggacagc

SEQ ID NO: 501183 - DNA, 75 bp, synthetic construct
  source 1..75: mol_type = other DNA
cttgatgtatttccaaataaaaaatacactgatttagtggtgaaaatcgatcttgataaagaagaggcggaatct

SEQ ID NO: 501184 - DNA, 75 bp, synthetic construct
  source 1..75: mol_type = other DNA
aatacgctgtttggctctcgcccgccggtgctgccggacgacgatgcgttgtgggatatattcgaacaggggcat

SEQ ID NO: 501185 - DNA, 75 bp, synthetic construct
  source 1..75: mol_type = other DNA
aatgagaacacaaatgccggaaaccggatctcagaagagaaaaagaagagttgttgcaagataagcacaaaaaat

SEQ ID NO: 501186 - DNA, 75 bp, synthetic construct
  source 1..75: mol_type = other DNA
aatgagaacacaaatgggctaattcggcagtactttcctaaaaagacatgtcttgcccaatacgggaggcatcgc

SEQ ID NO: 501187 - DNA, 75 bp, synthetic construct
  source 1..75: mol_type = other DNA
tatagcgcccagtgggtagttttagcgaaagaagttcaggacgacataatcagccgtactgagcaacaactgtcg

SEQ ID NO: 501188 - DNA, 75 bp, synthetic construct
  source 1..75: mol_type = other DNA
atcccgctgatgatcctcaacgcgctggcgggtaaatcgctgccggtatatggcaacgggcagcaaatccgtgac

SEQ ID NO: 501189 - DNA, 75 bp, synthetic construct
  source 1..75: mol_type = other DNA
gcgttccgttttcatcatatctccaccgacgaagtatacggtgacctgcattccacagatgatttcttcaccgaa

SEQ ID NO: 501190 - DNA, 75 bp, synthetic construct
  source 1..75: mol_type = other DNA
tcgatttacaaaatgatttctgtgctggtggcgcgctcgccgtgccggaaggtgacagtacggtagatgtcgcta

SEQ ID NO: 501191 - DNA, 75 bp, synthetic construct
  source 1..75: mol_type = other DNA
aatcaattttgcacatcgttacgcggtcaaagcccgtattctcgcggaacaggcctcaccagtccgtaaaaaaga

SEQ ID NO: 501192 - DNA, 75 bp, synthetic construct
  source 1..75: mol_type = other DNA
atccgtcgcgccaaagcgcttgaaaagatccttgcggaattgccagtcaccatccgggcaggtgaactaatcgtt

SEQ ID NO: 501193 - DNA, 75 bp, synthetic construct
  source 1..75: mol_type = other DNA
aagatgctgacaaaatgtttctggatatgattattgatatgggggagagtaaaattattcatggagacttacata

SEQ ID NO: 501194 - DNA, 75 bp, synthetic construct
  source 1..75: mol_type = other DNA
atcgaccgcaacactttgatcgaagcccagaaaaatcctgagcaacatcaggatctggtggtacgcgttgcgggc

SEQ ID NO: 501195 - DNA, 75 bp, synthetic construct
  source 1..75: mol_type = other DNA
cgtgattactgtatcatcggctgcgtagagccgcaggcaccgcatcgcaccgagggctggcatgacgccgcgttc

SEQ ID NO: 501196 - DNA, 75 bp, synthetic construct
  source 1..75: mol_type = other DNA
gcgcgggaatacggcatcatcggttgcgtcgaacctcaacgtccgggaaaaacagaaggctggcacgacgctgcg

SEQ ID NO: 501197 - DNA, 75 bp, synthetic construct
  source 1..75: mol_type = other DNA
ctgacgccagagcagctggccctggtgcgcaccgacatcattgaagccatccgggacgactggatggggcgcacc

SEQ ID NO: 501198 - DNA, 75 bp, synthetic construct
  source 1..75: mol_type = other DNA
gtcgccgtatatgcagggaacagatacccattttgtctcctcacggccaaatatcttttccgcctttcccgataa

SEQ ID NO: 501199 - DNA, 75 bp, synthetic construct
  source 1..75: mol_type = other DNA
ccaccgcccactggttactgacggaacgcccgtttaaacatcaggaaaaagattacctgctgtataaattcaacc

SEQ ID NO: 501200 - DNA, 75 bp, synthetic construct
  source 1..75: mol_type = other DNA
tgatatcaaccaggctgccgggcagttttcagcgatgcagaaagtcgtattgcaggcagccgcagaccatcatct

SEQ ID NO: 501201 - DNA, 75 bp, synthetic construct
  source 1..75: mol_type = other DNA
gaggcgcataacagggctgtagcggtggtgatgcaggaggttgagaagctggtcagcgcgcgcattacagaagag

SEQ ID NO: 501202 - DNA, 75 bp, synthetic construct
  source 1..75: mol_type = other DNA
aactgggccgggagcaggtaacactgcaggtgctggagcccgtgtggctggacagcaaaacccgtcatcagcgcg

SEQ ID NO: 501203 - DNA, 75 bp, synthetic construct
  source 1..75: mol_type = other DNA
cagtggtgatgacgctatttatttgctgcacggcttatcacgctttgtaccgcactttatcgccctttctgccgc

SEQ ID NO: 501204 - DNA, 75 bp, synthetic construct
  source 1..75: mol_type = other DNA
cgaacagtggaatgacgctaacaatgtgctcacgcttcggccgggagtggtagtgggctacgagcgcaacatctg

SEQ ID NO: 501205 - DNA, 75 bp, synthetic construct
  source 1..75: mol_type = other DNA
catgatattttcgccaatacgctgcgccagcaagggatagaagttctgttactcactgatttactaacacaaaca

SEQ ID NO: 501206 - DNA, 75 bp, synthetic construct
  source 1..75: mol_type = other DNA
gttaacagacctcctgacacaaacccttgatattaaagaagcgaaaacttggttactggagacgcaaatttctga

SEQ ID NO: 501207 - DNA, 75 bp, synthetic construct
  source 1..75: mol_type = other DNA
caccgcagtaaccgattacagcactctaccggaaggcatctggagcggcgacgttagcgtacagttcgacgcgac

SEQ ID NO: 501208 - DNA, 75 bp, synthetic construct
  source 1..75: mol_type = other DNA
tggcggccttgctgttcttctacggcaaggtgctgtgcacggatctgccctggcagggcatcaacgaagaccaga

SEQ ID NO: 501209 - DNA, 75 bp, synthetic construct
  source 1..75: mol_type = other DNA
agcgtggcggataaattcaaagagttaatggcgcaaaagcccggtagctggatctttacctcggcaacattgtcg

SEQ ID NO: 501210 - DNA, 75 bp, synthetic construct
  source 1..75: mol_type = other DNA
ccgccagtcgactggcgagacaaatctggataccgccatacaggccagccgggagcggctgatgtcggatgcaga

SEQ ID NO: 501211 - DNA, 75 bp, synthetic construct
  source 1..75: mol_type = other DNA
cggcagggaacggggaatgccctgtctgtgctgaaagaagccggtatcccgcagtaccggttttatggcacccaa

SEQ ID NO: 501212 - DNA, 75 bp, synthetic construct
  source 1..75: mol_type = other DNA
gatgatgagcgccgcctgcgtgacggtacagaacgggaaagccgggagctggatgaggctgtccgggaagcggtg

SEQ ID NO: 501213 - DNA, 75 bp, synthetic construct
  source 1..75: mol_type = other DNA
agacactgatagccgacggtgcggaagccgcgttgcagctggcacggcaaaacccggaaagtggggtggtgatac

SEQ ID NO: 501214 - DNA, 75 bp, synthetic construct
  source 1..75: mol_type = other DNA
ttcgggctacaggccagcctggtgatgcgtcttccgctcagatttctgaatcagacgtacagaaagccgtcagtg

SEQ ID NO: 501215 - DNA, 75 bp, synthetic construct
  source 1..75: mol_type = other DNA
gatgcgcagttcgccggcctgcaggccagccgtaacggacagacactcattgctgatgatgcacagacggcgctg

SEQ ID NO: 501216 - DNA, 75 bp, synthetic construct
  source 1..75: mol_type = other DNA
tttacccgctcagacactgatcgggggtatgtggccaacagcttgtgggaggtggccggtttcacggaagacggc

SEQ ID NO: 501217 - DNA, 75 bp, synthetic construct
  source 1..75: mol_type = other DNA
acgtcagcccacagcaggtcccgcgtcaggccggggcatgggttccggaaaagtccgttatggaaatccgtaagc

SEQ ID NO: 501218 - DNA, 75 bp, synthetic construct
  source 1..75: mol_type = other DNA
ggtgctgcagggggaagacggcagtcgcctgaccctgaaggtcacgcaggtggacggcagctggagcctgtaccg

SEQ ID NO: 501219 - DNA, 75 bp, synthetic construct
  source 1..75: mol_type = other DNA
gggggaccgggtgcgctttacccgctcggacaccgaccgcggctatgtggccaacagtctgtgggaggtggccgg

SEQ ID NO: 501220 - DNA, 75 bp, synthetic construct
  source 1..75: mol_type = other DNA
cgctggcgcagagcggcggtgacatccggatttatacgccactggaggccgggcaggccgcgcgtaaagtggaga

SEQ ID NO: 501221 - DNA, 75 bp, synthetic construct
  source 1..75: mol_type = other DNA
acccgctccgatactgaccggggctatgtggccaacagcctgtgggaggtggccggtttcacggaagatggcgct

SEQ ID NO: 501222 - DNA, 75 bp, synthetic construct
  source 1..75: mol_type = other DNA
gcccggcatgagaaaggcgatacaggtgctgaagaacgcacgttcaccgttctggagccgctccgggtgcctgac

SEQ ID NO: 501223 - DNA, 75 bp, synthetic construct
  source 1..75: mol_type = other DNA
cgtgcgtgaagtcaacctgctcggtcagaatgtgaatgcctggcgtggtgagaactacgacggcaccaccggatc

SEQ ID NO: 501224 - DNA, 75 bp, synthetic construct
  source 1..75: mol_type = other DNA
ttcgctttaccaccagccatccgatcgaattcaccgacgatatcatcgaagtgtaccgcgacacgcctgagctgg

SEQ ID NO: 501225 - DNA, 75 bp, synthetic construct
  source 1..75: mol_type = other DNA
acactccatcaaaacccgcagccacagggacggggctgacccggcgcgaacgccagaggcgtcgttgtctgcgca

SEQ ID NO: 501226 - DNA, 75 bp, synthetic construct
  source 1..75: mol_type = other DNA
tgccaaccgctaccgccgacatcaaagtcgacgcggtgcgcggcttcggcggtgaggtgctgcttcacggcgcga

SEQ ID NO: 501227 - DNA, 75 bp, synthetic construct
  source 1..75: mol_type = other DNA
cgatgccatctgtgcggcgatgaaagacctgttcgaagatgtgcgcgcggtggcggaaccctctggcgcgctggc

SEQ ID NO: 501228 - DNA, 75 bp, synthetic construct
  source 1..75: mol_type = other DNA
acagctttaagctgcgcggcgcatacgccatgatggcgggcctgacggaagaacaaaaagcgcacggcgtgatca

SEQ ID NO: 501229 - DNA, 75 bp, synthetic construct
  source 1..75: mol_type = other DNA
gtattagcgggaccgcaaatagtgccggcgcgcaccaacacaagagttccggtgcatttggtggcacgaacacga

SEQ ID NO: 501230 - DNA, 75 bp, synthetic construct
  source 1..75: mol_type = other DNA
tatgcgtggctggacgattaagggcaagcccgccagtggtcgtgccgtattgtctcaggaacaggacggcattaa

SEQ ID NO: 501231 - DNA, 75 bp, synthetic construct
  source 1..75: mol_type = other DNA
cggaccggagtagctatgcctgtggtatgttctgggcttattcatcatcggaacgcgctattcattccattctga

SEQ ID NO: 501232 - DNA, 75 bp, synthetic construct
  source 1..75: mol_type = other DNA
atgaccacaacgcaaaaaacgactgatgtgacagcccgtcgacgcagccactggtggtggacggtgccgggatgc

SEQ ID NO: 501233 - DNA, 75 bp, synthetic construct
  source 1..75: mol_type = other DNA
acagaacgctttatgcagacacttagcacagaacttcaggaataccagcgcgatcacaacgtccttatcctggtg

SEQ ID NO: 501234 - DNA, 75 bp, synthetic construct
  source 1..75: mol_type = other DNA
ttggcgcaactgatccttattctgaatcagttgcggtaaatttaattttagattttaaacaaggtaatggatttt

SEQ ID NO: 501235 - DNA, 75 bp, synthetic construct
  source 1..75: mol_type = other DNA
agcttcctcaaattctgccagctacttggcgggcgctcggtcacagagttcaactaccgtttcgctgatgctaaa

SEQ ID NO: 501236 - DNA, 75 bp, synthetic construct
  source 1..75: mol_type = other DNA
gacttacctattgcaattctggctgccggaatggttaatgaaaatgatctgatcttctttgataatggccaggag

SEQ ID NO: 501237 - DNA, 75 bp, synthetic construct
  source 1..75: mol_type = other DNA
tctgcatttgatgttctgattagcgatcgtccgttaccggcagattatgttacgcactgccggaatgcttctgta

SEQ ID NO: 501238 - DNA, 75 bp, synthetic construct
  source 1..75: mol_type = other DNA
tcgccagcgcgcccactatgtcgatattatttttgggccgcaaacgctgcaccgcctgccggagatgattaactc

SEQ ID NO: 501239 - DNA, 75 bp, synthetic construct
  source 1..75: mol_type = other DNA
gcagcgccacgacggcatccacgaaggcgacagaggcagctggtagtgcgacggcggcagctcagagcaaaagta

SEQ ID NO: 501240 - DNA, 75 bp, synthetic construct
  source 1..75: mol_type = other DNA
tgaagagactgcggcggcgtacccgaaggcgctggtcgaactggaggccgctgccgcggaaattctggcgcgcgc

SEQ ID NO: 501241 - DNA, 75 bp, synthetic construct
  source 1..75: mol_type = other DNA
tatttccgccagcggtgtgcataatcactttggcgtcagctggtttaaccctgaagatcttgccactaagcgtaa

SEQ ID NO: 501242 - DNA, 75 bp, synthetic construct
  source 1..75: mol_type = other DNA
aacagcgtctgtatattctgcaagaacgtatcaatcagcaagcgatggcatggagccgccggatgctcggcacca

SEQ ID NO: 501243 - DNA, 75 bp, synthetic construct
  source 1..75: mol_type = other DNA
gcgcaaagaaattttgcagatgctcaacgacggcggctacagcgtggttgatctctccgacgacgaaatggcgaa

SEQ ID NO: 501244 - DNA, 75 bp, synthetic construct
  source 1..75: mol_type = other DNA
agtttccttaaattttgccagctactcggtgggcgctcggtcacagagttcaactatcgctttgcagatgccaaa

SEQ ID NO: 501245 - DNA, 75 bp, synthetic construct
  source 1..75: mol_type = other DNA
gggtacaccagccgccgatatggttgatgatgttccggaagaagagaagaagcagcgtctgtatattctacaaga

SEQ ID NO: 501246 - DNA, 75 bp, synthetic construct
  source 1..75: mol_type = other DNA
tccgggcgtaccgaaaataaccgcgtggtcaacttcgaaggcacgccggatatgatcggtaaattcgtcgatgta

SEQ ID NO: 501247 - DNA, 75 bp, synthetic construct
  source 1..75: mol_type = other DNA
gagcggttccgatcgcattctgaacctgatgggccgtactcatacggcgctggagtacaaagcgatcatccgtaa

SEQ ID NO: 501248 - DNA, 75 bp, synthetic construct
  source 1..75: mol_type = other DNA
gttagtgataaaaaggaatgacagccatcgggcatcccgcgttgtcatttcaacgccaagtcgcacagctaatca

SEQ ID NO: 501249 - DNA, 75 bp, synthetic construct
  source 1..75: mol_type = other DNA
gcgccgacggtgcgccggtggaagataccttatcgcgtgggcagcttaagctgttgatgtgcgccttacgtctgg

SEQ ID NO: 501250 - DNA, 75 bp, synthetic construct
  source 1..75: mol_type = other DNA
gacgggcataaagtcgcggaactggcgcacctgatgccaatgcagttgataacgccagaagggtttactttactc

SEQ ID NO: 501251 - DNA, 75 bp, synthetic construct
  source 1..75: mol_type = other DNA
tagctatgatggaagaaatacgtctgacagaacgatgatcatcactggtggttctggcgaatgggattaccgcgc

SEQ ID NO: 501252 - DNA, 75 bp, synthetic construct
  source 1..75: mol_type = other DNA
cgactgcccgatgtataaagattgctttgtggtcaaagcacgcaaaaaagcgatggacgccgatgtggtggtggt

SEQ ID NO: 501253 - DNA, 75 bp, synthetic construct
  source 1..75: mol_type = other DNA
aatttctcccggagttttctctgactttctcttttcagcgcggctgggagaaagagacagaatacgctgaggtgc

SEQ ID NO: 501254 - DNA, 75 bp, synthetic construct
  source 1..75: mol_type = other DNA
gtggcaaaaccagcgtgctggaagccatctatacgctcggtcacggtcgggcgtttcgcagtttgcagattggtc

SEQ ID NO: 501255 - DNA, 75 bp, synthetic construct
  source 1..75: mol_type = other DNA
cgatagaaaaaagccagccgctggtggtggaagcgggaaccggtacaggcaaaacctacgcttaccttgcccctg

SEQ ID NO: 501256 - DNA, 75 bp, synthetic construct
  source 1..75: mol_type = other DNA
gctcctggtccaatcaaacagtcgatggcgatatcagcacctgcgtcagtgtcgcggaagattcgcaggcatggc

SEQ ID NO: 501257 - DNA, 75 bp, synthetic construct
  source 1..75: mol_type = other DNA
aacaaaccgcagggtgtggcgcactatcgtgacctgatcacttttgtcgccgatcgtcctgggcatgatttacgt

SEQ ID NO: 501258 - DNA, 75 bp, synthetic construct
  source 1..75: mol_type = other DNA
tacgttgcgacattatttctgtaaccagcaataccgctgtagtggttcgtgctaacaggaacgtcccgccatccc

SEQ ID NO: 501259 - DNA, 75 bp, synthetic construct
  source 1..75: mol_type = other DNA
cagcctgcagtggattcagtgccggtatgggaaaccagtaagagtacgtcgattggcgatattcgccgtgcagac

SEQ ID NO: 501260 - DNA, 75 bp, synthetic construct
  source 1..75: mol_type = other DNA
gcaaaaacggacgtgtaaaaatccgtcagcttgacccgttgccgctgtctgttcttgccgttattcctcgcctta

SEQ ID NO: 501261 - DNA, 75 bp, synthetic construct
  source 1..75: mol_type = other DNA
aattaatcaaagaagctgtggatgttctacctaaagagattcgcaagtctgtctataacaaaattagaaatgtta

SEQ ID NO: 501262 - DNA, 75 bp, synthetic construct
  source 1..75: mol_type = other DNA
cccggtagtgatagacggagttcagatcgagaatatcgatttttcagatgcttatgaaaaatcgattgaagaccg

SEQ ID NO: 501263 - DNA, 75 bp, synthetic construct
  source 1..75: mol_type = other DNA
ctcaccactgctgaacgttgggacggaaaactacctgataccatgatccccggcagtacagttccgtttatctcc

SEQ ID NO: 501264 - DNA, 75 bp, synthetic construct
  source 1..75: mol_type = other DNA
accgccatcagcgctgtacaggatcgtacaaaactggttcaggatctgcaaaatgccatgcgcaaagccgttgtt

SEQ ID NO: 501265 - DNA, 75 bp, synthetic construct
  source 1..75: mol_type = other DNA
ttgagacaagagcattccctatccagatttttgctgaggaaggattaaatgtgattgttccaacggctgattatg

SEQ ID NO: 501266 - DNA, 75 bp, synthetic construct
  source 1..75: mol_type = other DNA
gtgaaagcacctgtttcaataacttcattccgcccacaaaaatctcttgctatcgccattggcgtgcttgccgtg

SEQ ID NO: 501267 - DNA, 75 bp, synthetic construct
  source 1..75: mol_type = other DNA
aacgcgatatttatcaacgtagcggcatccagtttctgcccttcaatacgatctatcagctacgtgcactgacag

SEQ ID NO: 501268 - DNA, 75 bp, synthetic construct
  source 1..75: mol_type = other DNA
acttatcgccgtgacacaggcacttcctgcctgccgtttcatcatcaatcccaatgacgctcgctttattaatcc

SEQ ID NO: 501269 - DNA, 75 bp, synthetic construct
  source 1..75: mol_type = other DNA
acgacagcacaaaaaggaattgtccagctcagtagtgcaaccaacagcgcatctgaaacgcttgccgcgacaccg

SEQ ID NO: 501270 - DNA, 75 bp, synthetic construct
  source 1..75: mol_type = other DNA
acacgtaagcaaaatctggaaacagagaaaatccaggcgcaaatagcagtaactcaggcccaggctgaagcagac

SEQ ID NO: 501271 - DNA, 75 bp, synthetic construct
  source 1..75: mol_type = other DNA
cgtagagaaaatttccacgcgtaatcaggctgtggtctatcagggattacaggcctacagccgcgaccagcaacc

SEQ ID NO: 501272 - DNA, 75 bp, synthetic construct
  source 1..75: mol_type = other DNA
ggcgcaccaatcccgtggccatcagataccgttccgtctggctatgccctgatgcaggggcaggcttttaacaaa

SEQ ID NO: 501273 - DNA, 75 bp, synthetic construct
  source 1..75: mol_type = other DNA
cgcgaatccgtgggcttcctggtaacaatcaaagagttgctggaagatccgacgcgtctgctgctggacgtgtag

SEQ ID NO: 501274 - DNA, 75 bp, synthetic construct
  source 1..75: mol_type = other DNA
aaacgccacggcatccgtctgggctttatgtccttctatgtgaaagcggtggttgaagccctgaaacgttacccg

SEQ ID NO: 501275 - DNA, 75 bp, synthetic construct
  source 1..75: mol_type = other DNA
aaggtatttgctacctttggtcgtattgatgtgttgatattaaatgccggtgtggcatttgccaataaagttaac

SEQ ID NO: 501276 - DNA, 75 bp, synthetic construct
  source 1..75: mol_type = other DNA
acaatgggttaccgccgccagaaaagggctcggaactcctggttcccgcacggtggctgaactggaatctgaaat

SEQ ID NO: 501277 - DNA, 75 bp, synthetic construct
  source 1..75: mol_type = other DNA
gagatcatcaataacgtgagagaaaaccgccaggtgaccgtccctgctgaactgctggcgtccctgattcagacc

SEQ ID NO: 501278 - DNA, 75 bp, synthetic construct
  source 1..75: mol_type = other DNA
gcaaccggctctggctgcacgtagtgaaaaacgtgtcccgatgactcgcctgcgtaagcgtgtggcagagcgtct

SEQ ID NO: 501279 - DNA, 75 bp, synthetic construct
  source 1..75: mol_type = other DNA
atcttcgaaaaagactcgacccgtactcgatgctctttcgaagttgccgcatatgatcaaggcgcacgcgtcact

SEQ ID NO: 501280 - DNA, 75 bp, synthetic construct
  source 1..75: mol_type = other DNA
ctggccggaagctgcgctggttacggaatgccgcgccctggcacagcaaaatggcgggaatattacgctgacgga

SEQ ID NO: 501281 - DNA, 75 bp, synthetic construct
  source 1..75: mol_type = other DNA
aggtgaaacaagctcgtatcaaagctggctttacgcagcaggaagccgctaaacggtttggtttttcgttatcag

SEQ ID NO: 501282 - DNA, 75 bp, synthetic construct
  source 1..75: mol_type = other DNA
ggcgtattggcgaagctatacccagatgaaaaagatctcgccaaagccttacagcgccatttaaccatgttcaac

SEQ ID NO: 501283 - DNA, 75 bp, synthetic construct
  source 1..75: mol_type = other DNA
tctacttaatggcgattttgaattattaaatcaattagttgaaagcaatgaaaaagaattgaaagattgtaatct

SEQ ID NO: 501284 - DNA, 75 bp, synthetic construct
  source 1..75: mol_type = other DNA
atcttcgaaaaagactcgactcgtacccgatgctctttcgaagttgccgcatatgaccagggcgcacgtgtcact

SEQ ID NO: 501285 - DNA, 75 bp, synthetic construct
  source 1..75: mol_type = other DNA
atgtacggaacatgcgaaacgctatgccggtagctggcagcaaagtatgcgggagacacgcccctgatgctggtt

SEQ ID NO: 501286 - DNA, 75 bp, synthetic construct
  source 1..75: mol_type = other DNA
gcacgcgctggattgaacgtctgatgccgcccgtagtgacgggcgcggtggtgatggcgattggcctgaacttag

SEQ ID NO: 501287 - DNA, 75 bp, synthetic construct
  source 1..75: mol_type = other DNA
aaaaccgccaggtgaccgtccctgctgaactgctggagaccctgactcagatcgctgaacaggcactgtggaaac

SEQ ID NO: 501288 - DNA, 75 bp, synthetic construct
  source 1..75: mol_type = other DNA
cgtcccggaatgcgtcacccgccgtcaagcggtggttaatcaggcccgcaccctgctgaaaaacaacacacgcga

SEQ ID NO: 501289 - DNA, 75 bp, synthetic construct
  source 1..75: mol_type = other DNA
gggcattcgtaggcgatgggctggcgacgatgctttctggctctgtcggcggtagcggcgtaaccacctacgccg

SEQ ID NO: 501290 - DNA, 75 bp, synthetic construct
  source 1..75: mol_type = other DNA
cgcgctgatccataccattccggccgcggtgattggtggtgcatcaattgttgtgttcgggctgattgccgtcgc

SEQ ID NO: 501291 - DNA, 75 bp, synthetic construct
  source 1..75: mol_type = other DNA
ttgtgttcgggctgattgccgtcgcaggcgcaaggatatgggtacaaaaccgtgtcgatttaagccagaacggta

SEQ ID NO: 501292 - DNA, 75 bp, synthetic construct
  source 1..75: mol_type = other DNA
gccaggtgaccgtctctgctgaactgctggcgtccctgattcagaccgctgaacaggcactgtggaaacgtgaat

SEQ ID NO: 501293 - DNA, 75 bp, synthetic construct
  source 1..75: mol_type = other DNA
gtgaatttgtctgctgagaataagcgccagttgtggatacctgaaggatttgcgcatggatttttggtgctgagt

SEQ ID NO: 501294 - DNA, 75 bp, synthetic construct
  source 1..75: mol_type = other DNA
atgtacggaacatgcgaaacgctatgccggcagctggcagcaaagtatgcgggagacacgcctctgatgctggtt

SEQ ID NO: 501295 - DNA, 75 bp, synthetic construct
  source 1..75: mol_type = other DNA
cctgtccgatcatgaaatcaggaccgtcctggcgcggctggaggacatcccggaagaccagcgaattgagtccgg

SEQ ID NO: 501296 - DNA, 75 bp, synthetic construct
  source 1..75: mol_type = other DNA
cgtcccggaatgcgtcacccgccgtcaggcggtggttaatcagacccacagcctgctgaaaaacaacacacacga

SEQ ID NO: 501297 - DNA, 75 bp, synthetic construct
  source 1..75: mol_type = other DNA
tctgaccgatcatgaaatcaggaccgtcctggcgcgcctggaggacatcccggaagaccagcggattgagtccgg

SEQ ID NO: 501298 - DNA, 75 bp, synthetic construct
  source 1..75: mol_type = other DNA
catatcaaccagcaccacgagtaacaacgcagggattagagcaggactttggccttcagcaaggcgcgctgactc

SEQ ID NO: 501299 - DNA, 75 bp, synthetic construct
  source 1..75: mol_type = other DNA
gtgacggatgcctgtaaaaaacacggcggtttctacctcggtagtatcggtggtccggcagctgtattggcgcag

SEQ ID NO: 501300 - DNA, 75 bp, synthetic construct
  source 1..75: mol_type = other DNA
aggatggtgagtttataactgatgatcaggcagggatggggtttggtgatcctgatgcttgggatgtttctgttc

SEQ ID NO: 501301 - DNA, 75 bp, synthetic construct
  source 1..75: mol_type = other DNA
gttacgttagtatcaaataagcgaacctatgttttctttttgcagtctgtgaagggaaatccttcatggatggtt

SEQ ID NO: 501302 - DNA, 75 bp, synthetic construct
  source 1..75: mol_type = other DNA
aatttctgtgtgtaaaccagaaaaacaaaccagagccagaagttgaagcatttaccaatcaaccgaaaaagatgg

SEQ ID NO: 501303 - DNA, 75 bp, synthetic construct
  source 1..75: mol_type = other DNA
cattggtggttttatgacaccaaaaggtaagcctaaagtgccggaagcactgtttaaaaacatctgcgactctct

SEQ ID NO: 501304 - DNA, 75 bp, synthetic construct
  source 1..75: mol_type = other DNA
ggcagagacggcgataagcgtccaaccttgcgttttgttgagcctgaatcagcggcatttatgctggatattctt

SEQ ID NO: 501305 - DNA, 75 bp, synthetic construct
  source 1..75: mol_type = other DNA
gttagaatcactgaggaaacagttcagtgattgtgaaaatattcattttttgggcgagataaataattttaataa

SEQ ID NO: 501306 - DNA, 75 bp, synthetic construct
  source 1..75: mol_type = other DNA
gacccaagtagaactgggtaagctttcaggcgtgactggggttactatagggtactgggagaaagatctaaacga

SEQ ID NO: 501307 - DNA, 75 bp, synthetic construct
  source 1..75: mol_type = other DNA
ttcaagattatgtaaactatttcatagatttaaatgcatttatgtatcgcatggttggtcctgtatttataatgg

SEQ ID NO: 501308 - DNA, 75 bp, synthetic construct
  source 1..75: mol_type = other DNA
actctgcggcgttataagcaggctaatgcggtttatgcggatgaagcaagtaagcttcagaatactaggctgaag

SEQ ID NO: 501309 - DNA, 75 bp, synthetic construct
  source 1..75: mol_type = other DNA
tgaaagcgcttacggcttcgcaagcctgtggggtgaaggtgtttatgggagcttctaccggaaatatgctggtgg

SEQ ID NO: 501310 - DNA, 75 bp, synthetic construct
  source 1..75: mol_type = other DNA
attttatgacattaactccatcacgtctaatgatataattattgatggagataaacgtagtgacaaaaaaagaga

SEQ ID NO: 501311 - DNA, 75 bp, synthetic construct
  source 1..75: mol_type = other DNA
aacagttcctgctcaaccttcaggatacgatttgtcagcagctgaccactgtcgatggcgctgagtttgtcgaag

SEQ ID NO: 501312 - DNA, 75 bp, synthetic construct
  source 1..75: mol_type = other DNA
ggatttatgtctgatcttggtgaagcagtaaaagagactggtcgcggactggtgcaggctggcgtgaacgtggca

SEQ ID NO: 501313 - DNA, 75 bp, synthetic construct
  source 1..75: mol_type = other DNA
ttcagcagattgatactgagatatctaacctgcagaagcttggtaaggttgctgataacgagacgatttcaaaac

SEQ ID NO: 501314 - DNA, 75 bp, synthetic construct
  source 1..75: mol_type = other DNA
cggatcaacagcctttgagaaagcaatgcagcaggcacaaaatgcaattaacgctctgacgcagggggctaagtc

SEQ ID NO: 501315 - DNA, 75 bp, synthetic construct
  source 1..75: mol_type = other DNA
gccggacgtggattaggtgctgcttatcgtggcgttcgtggtgctattgcgccagaagcgcagcaagctatcaga

SEQ ID NO: 501316 - DNA, 75 bp, synthetic construct
  source 1..75: mol_type = other DNA
aacgcggatcgacagcgtttgagaaagccatgcagcaagcgcaaaaagcgattaatgcactgacgcagggtgcga

SEQ ID NO: 501317 - DNA, 75 bp, synthetic construct
  source 1..75: mol_type = other DNA
cagggtttattggttctgctgttgttcgtcacataataaataatacgcaagatagtgttgttaatgtcgataaat

SEQ ID NO: 501318 - DNA, 75 bp, synthetic construct
  source 1..75: mol_type = other DNA
tacggcgaacgcgagcgcaattttcagctctaccgtcgcggtcgttatgtcgagttcaatctggtctgggatcgc

SEQ ID NO: 501319 - DNA, 75 bp, synthetic construct
  source 1..75: mol_type = other DNA
gttcaacctggtatgggatcgcggcacattatttggcttacaaacaggcggtcgcaccgaatctatcctgatgtc

SEQ ID NO: 501320 - DNA, 75 bp, synthetic construct
  source 1..75: mol_type = other DNA
ctacggacttcttactcgcgcctatgagagcgagccattcagaaatgcaatgctccgaatggcaaacaccccacg

SEQ ID NO: 501321 - DNA, 75 bp, synthetic construct
  source 1..75: mol_type = other DNA
atgaagtgtacggcgatctgccgcatcccgatgaactgccggccggtagcgatctgccgcttttcaccgagacta

SEQ ID NO: 501322 - DNA, 75 bp, synthetic construct
  source 1..75: mol_type = other DNA
ccctgcggcatttattgaaaccaatattgtggggacttatgttcttttagaagcggcgcgcaattactggtctgc

SEQ ID NO: 501323 - DNA, 75 bp, synthetic construct
  source 1..75: mol_type = other DNA
gagatcaacggcgttgaggatcgtttgaaatcccgcttcggttggggactgactgtggcgatcgaaccgccagag

SEQ ID NO: 501324 - DNA, 75 bp, synthetic construct
  source 1..75: mol_type = other DNA
taccgttccgtagatgcgctgctgatcgacgatattcaattctttgctaataaagaacgatcccaggaagaattt

SEQ ID NO: 501325 - DNA, 75 bp, synthetic construct
  source 1..75: mol_type = other DNA
taacgttccggctccggcagaaccgacctatcgttccaacgttaacgttaaacatacatttgataacttcgtcga

SEQ ID NO: 501326 - DNA, 75 bp, synthetic construct
  source 1..75: mol_type = other DNA
aaagcgcgcatggaagattgtcgtttgcgcggtggcgacccgttcgatgaagtgcaactaccagatgcgtcatta

SEQ ID NO: 501327 - DNA, 75 bp, synthetic construct
  source 1..75: mol_type = other DNA
cgaaaacctctcaggccgcagtggcgagcaacgttacagcgccagctcaggtggcgcaaatgcaaccgcagcgcg

SEQ ID NO: 501328 - DNA, 75 bp, synthetic construct
  source 1..75: mol_type = other DNA
gtcgcggatctcctttccaagcgtcgatcccgctcggtggcgcgtccgcgccagatggcgatggcgctggcgaaa

SEQ ID NO: 501329 - DNA, 75 bp, synthetic construct
  source 1..75: mol_type = other DNA
gcatagagaaaaaagtgagattccgtttagtaaggtaagcgtgttaaaaaatgggcaatcacttaccagcaatct

SEQ ID NO: 501330 - DNA, 75 bp, synthetic construct
  source 1..75: mol_type = other DNA
atgagaagaacatttacagcggaagaaaaagcgtcagtatttgaactatggaagaacggaacaggcttcagtgaa

SEQ ID NO: 501331 - DNA, 75 bp, synthetic construct
  source 1..75: mol_type = other DNA
ccttttacgcctattagcgttgaaggtgatgaaacccaggactactatcaggaacaattgataacagatctggca

SEQ ID NO: 501332 - DNA, 75 bp, synthetic construct
  source 1..75: mol_type = other DNA
acgtgaagttcagcgtaatcggggcagacgctattacaaagttgttgatgctaataaccgagccaacagaatggc

SEQ ID NO: 501333 - DNA, 75 bp, synthetic construct
  source 1..75: mol_type = other DNA
ctggttgctgctcagctaaacaacagaccgagaaaggcactgaagttcaaaacaccgaaagagataattgaaagg

SEQ ID NO: 501334 - DNA, 75 bp, synthetic construct
  source 1..75: mol_type = other DNA
gggcaagcaaacctaaatcaaacgatagagaaacaaatgaatatgtgtatgacatggcgacatttgaaggaataa

SEQ ID NO: 501335 - DNA, 75 bp, synthetic construct
  source 1..75: mol_type = other DNA
acttgtagaccgaaaatcacgttatacgatcatcctcagactcaggggcaaagattctgtctcagtaaatcaggc

SEQ ID NO: 501336 - DNA, 75 bp, synthetic construct
  source 1..75: mol_type = other DNA
tttgattgttatgtgtgtgctattaaagaagtcgcattactcgcagctcgtattgaagaggctgacaagaaatac

SEQ ID NO: 501337 - DNA, 75 bp, synthetic construct
  source 1..75: mol_type = other DNA
caggtgcagttgtgcatattggattgcctatcaccgctgaattcgaaacactggatatcaacatcaacgggcagg

SEQ ID NO: 501338 - DNA, 75 bp, synthetic construct
  source 1..75: mol_type = other DNA
ttcaatcgtaatgttccggcggtactgcgcaatgcggccacaactaactggcagatggcccgccagacgttcagt

SEQ ID NO: 501339 - DNA, 75 bp, synthetic construct
  source 1..75: mol_type = other DNA
gctgcaccgcccaaatttaagtctgaaacgtttgacaccatcgaattgtcaggaactgcttttcgatgatgtact

SEQ ID NO: 501340 - DNA, 75 bp, synthetic construct
  source 1..75: mol_type = other DNA
ctggcgtgacgctgggttgcgctacacctcgcagctcgatttgctgccttttggtcagttgaagaacaagaaaat

SEQ ID NO: 501341 - DNA, 75 bp, synthetic construct
  source 1..75: mol_type = other DNA
tggtggtcgatgcctgcccggacaacttgttgcgcctgtcatttaacgttgattttacccaccgtcagggctggg

SEQ ID NO: 501342 - DNA, 75 bp, synthetic construct
  source 1..75: mol_type = other DNA
atggaggagttcaaacacgaacccttcggttctgatacgtcacacattgttgaagtggcgattgaagcgcgaatg

SEQ ID NO: 501343 - DNA, 75 bp, synthetic construct
  source 1..75: mol_type = other DNA
tcttgcccaatatactcaacatgaactggatctggttgctgctcagctaaacaacagaccgagaaagacactgaa

SEQ ID NO: 501344 - DNA, 75 bp, synthetic construct
  source 1..75: mol_type = other DNA
gataacagacgctctctagggcattgggagggcgatttagtctcaggtacaaaaaactctcatatagccacactt

SEQ ID NO: 501345 - DNA, 75 bp, synthetic construct
  source 1..75: mol_type = other DNA
gggctaaatatgcgtggaacagcgttaacggctaccctagtaccgttgtttactaccagcagcgcctgtactttg

SEQ ID NO: 501346 - DNA, 75 bp, synthetic construct
  source 1..75: mol_type = other DNA
cagcaactgggataaaaacggacgcgttaaggtccgccaacttgatcctttgcctctgtcagtgctggctgttct

SEQ ID NO: 501347 - DNA, 75 bp, synthetic construct
  source 1..75: mol_type = other DNA
gcggtggcacgggtgactggagctatcaggttgattatccggttacggtgagtggtggagcgtatttcgttaata

SEQ ID NO: 501348 - DNA, 75 bp, synthetic construct
  source 1..75: mol_type = other DNA
catccgcacctccctgtagaaagccgacaccaggcaaaaggaacccgcttcctgtggcagtacagcgaaaagtgg

SEQ ID NO: 501349 - DNA, 75 bp, synthetic construct
  source 1..75: mol_type = other DNA
gtaccggggcaggtggcgttgagccgcaggcgcttacgaccagcggcaacatcagcacgcagagtttcattttca

SEQ ID NO: 501350 - DNA, 75 bp, synthetic construct
  source 1..75: mol_type = other DNA
gatgggcgcgtttctggcgggcgtactgctggcaagctcggaataccgtcatgcgctggaaagcgatatcgggta

SEQ ID NO: 501351 - DNA, 75 bp, synthetic construct
  source 1..75: mol_type = other DNA
atcgctggctgaagaacgatattattcgcggccattttcagccggatgaaaaactgcgaatgagtttgctgacgt

SEQ ID NO: 501352 - DNA, 75 bp, synthetic construct
  source 1..75: mol_type = other DNA
gaaaacttaagaaagttgcttcaagagcatattaacatgctaaagaaagatcttgatatgagacttcaggatgct

SEQ ID NO: 501353 - DNA, 75 bp, synthetic construct
  source 1..75: mol_type = other DNA
atctcccggcgcttaaggcggccatcgaaaacggcgcagatgctgtttatatcgggctaaaagatgataccaatg

SEQ ID NO: 501354 - DNA, 75 bp, synthetic construct
  source 1..75: mol_type = other DNA
gcgggttcactataataatgagcgaacccatcagggaaaaatgtgcagtggccgaacgccgatggaaacgttact

SEQ ID NO: 501355 - DNA, 75 bp, synthetic construct
  source 1..75: mol_type = other DNA
cgtcccggaatgcgtcacccgccgtcaggcggtggttaatcaggcccgcgccctgctgaaaaacaacacacgcga

SEQ ID NO: 501356 - DNA, 75 bp, synthetic construct
  source 1..75: mol_type = other DNA
aatggaccgcccgtgacagcaatcatccggtcccggaaagcgttacccgccgcctggctgatgcggcgaaagttc

SEQ ID NO: 501357 - DNA, 75 bp, synthetic construct
  source 1..75: mol_type = other DNA
ttcaggcccgcgccctgcggaaaaacaacacacacgaaaacgactgatgttatcgccgcctgcgggtggcgattc

SEQ ID NO: 501358 - DNA, 75 bp, synthetic construct
  source 1..75: mol_type = other DNA
cgtgaacggttgtttgatctggcggcgcgctatcgatttatctggctgcggcgaacagtgctttcggtggaaatg

SEQ ID NO: 501359 - DNA, 75 bp, synthetic construct
  source 1..75: mol_type = other DNA
tcgcggtaattttcaaccggatgaaaaattacggatgagtttgctgacctcgcgttatgcactcggcgtcgggcc

SEQ ID NO: 501360 - DNA, 75 bp, synthetic construct
  source 1..75: mol_type = other DNA
aactagagggtgagaaaccgcaaagtaaagagtccgcaaactcaactgaaaaccccggttatgaagaattctatt

SEQ ID NO: 501361 - DNA, 75 bp, synthetic construct
  source 1..75: mol_type = other DNA
cagagaactaatgagaaaaaatgatgatggctctatgaacataactactgaatccggtacctgtaaggtttactt

SEQ ID NO: 501362 - DNA, 75 bp, synthetic construct
  source 1..75: mol_type = other DNA
gatgtcgcatgagcgatcgttgtgggggcctggaagcctctaaatccgatcagccttgtatttatcgctgtcatg

SEQ ID NO: 501363 - DNA, 75 bp, synthetic construct
  source 1..75: mol_type = other DNA
atgatttctgcggcgacacttaattcagaactcattaataaaatcgcacaggattttgcgcaggcgactagtctt

SEQ ID NO: 501364 - DNA, 75 bp, synthetic construct
  source 1..75: mol_type = other DNA
ccgcgacccacagagtggtgtgctgggacggtctgcacttaaaacagtaccgttgatatttgggcgggagagtga

SEQ ID NO: 501365 - DNA, 75 bp, synthetic construct
  source 1..75: mol_type = other DNA
gaatggaaatgcggaggcgctgaacagcaagatcagactgctgaggataaaggccaggggataccgaaaccggga

SEQ ID NO: 501366 - DNA, 75 bp, synthetic construct
  source 1..75: mol_type = other DNA
gtcatgagataccgcaatcgggagcgctttaagccgggcttgatgttccactacgggaaactgaatatggcgttc

SEQ ID NO: 501367 - DNA, 75 bp, synthetic construct
  source 1..75: mol_type = other DNA
tcatggatttcaagtattatcagatattgcagattttgaatataaatgcactgattattactatccggagtttga

SEQ ID NO: 501368 - DNA, 75 bp, synthetic construct
  source 1..75: mol_type = other DNA
tgatttaaaaggtgccaacttttcccgaacaaactttgcccatcaagtgagtaatcgtatgtacttttgctcagc

SEQ ID NO: 501369 - DNA, 75 bp, synthetic construct
  source 1..75: mol_type = other DNA
cagggtgatatcgaaggttgccattttgatgtcgcagaccttcgcgatgcaagtttccaacaatgccagcttgcg

SEQ ID NO: 501370 - DNA, 75 bp, synthetic construct
  source 1..75: mol_type = other DNA
tcatgcttgctggactcagcgggcttttcttatcaggatttatacttctcagtgtactaattaaaactgtctttg

SEQ ID NO: 501371 - DNA, 75 bp, synthetic construct
  source 1..75: mol_type = other DNA
cagcggaggctggcttttgaacgtcagtatgcagaggaagagagacggcaacaggaagaaaataatacggcacag

SEQ ID NO: 501372 - DNA, 75 bp, synthetic construct
  source 1..75: mol_type = other DNA
gttccgccggagcgggcgtataaatctgaagggcttgaacgtgtggcgctcagtgacagtgaacggcagaaagtc

SEQ ID NO: 501373 - DNA, 75 bp, synthetic construct
  source 1..75: mol_type = other DNA
aaatcagcagattgtccgccgttctgcacatgaacggaagcaactgagtgcatggaactgtgatgcgcaggaaaa

SEQ ID NO: 501374 - DNA, 75 bp, synthetic construct
  source 1..75: mol_type = other DNA
gttatgcctggtggctggactgacagggggcgttatgcttatggaatgttctggcaatatcaaaacaatgaacga

SEQ ID NO: 501375 - DNA, 75 bp, synthetic construct
  source 1..75: mol_type = other DNA
tgctgtgccacgactgcggctggattgccgaatgcccacgttgtgatcactactacacgctgcatcaggcgcaac

SEQ ID NO: 501376 - DNA, 75 bp, synthetic construct
  source 1..75: mol_type = other DNA
gtgacgctggtggcgttactggatgtggacggcgcgctgttttctgccgatttccgctcggcagagcgttttgcc

SEQ ID NO: 501377 - DNA, 75 bp, synthetic construct
  source 1..75: mol_type = other DNA
tgcccttcctgcggttccacgcacctggtacccgtggggctgggcaccgaacagcttgaacagacgcttgcgccg

SEQ ID NO: 501378 - DNA, 75 bp, synthetic construct
  source 1..75: mol_type = other DNA
ttttcgctcagcagaacgttttgctcagctttacactcaggtcgctggtcgtgcggggcgtgcaggtaaacaggg

SEQ ID NO: 501379 - DNA, 75 bp, synthetic construct
  source 1..75: mol_type = other DNA
tgtcattgatgaagagcacgacagttcctacaagcagcaggaaggctggcgctatcatgcccgcgacctggcggt

SEQ ID NO: 501380 - DNA, 75 bp, synthetic construct
  source 1..75: mol_type = other DNA
ccggtcgtgccgggcgtgcgggtaaacagggcgaagtgccatccggaacatcctctgttgcaaacattgctctat

SEQ ID NO: 501381 - DNA, 75 bp, synthetic construct
  source 1..75: mol_type = other DNA
cgatcaccgaacgttttggcccttcacatatggccttcctggtggtgccgatggtcggtgcgttctttatcgata

SEQ ID NO: 501382 - DNA, 75 bp, synthetic construct
  source 1..75: mol_type = other DNA
tggcgcatgatgggcaaaaactacgatgcggcagtgctggctgcgggtcattgtggttttggcctcggtgcaacg

SEQ ID NO: 501383 - DNA, 75 bp, synthetic construct
  source 1..75: mol_type = other DNA
tgtggttggtattttcctgattgtggttgttggcctattggtgatgcaaaatgccattggcattggtatggctag

SEQ ID NO: 501384 - DNA, 75 bp, synthetic construct
  source 1..75: mol_type = other DNA
tactggtatatgccaacagccctgctgcgcggtatttttcataatgttcccgattcgtgtttccggcagtggatt

SEQ ID NO: 501385 - DNA, 75 bp, synthetic construct
  source 1..75: mol_type = other DNA
agaaatatcgtttcccggaaacactgaccaatcagagccgctggtttggcctgccactggatgaactgatccccg

SEQ ID NO: 501386 - DNA, 75 bp, synthetic construct
  source 1..75: mol_type = other DNA
ggatgctgcaacagaccatagaacaagcactacttgaacaaggtcgtatcaccgaaaaaacgaaccaaaactttg

SEQ ID NO: 501387 - DNA, 75 bp, synthetic construct
  source 1..75: mol_type = other DNA
aaccgccggggttttgcgcctgcgctactgtgccacgactgtggctggatagccgaatgcccacgttgcgatcac

SEQ ID NO: 501388 - DNA, 75 bp, synthetic construct
  source 1..75: mol_type = other DNA
accgtgtatgaagattctcaaccggggacgctgaatgcttttctcggtgccatgtcggaggatgacgtccggccg

SEQ ID NO: 501389 - DNA, 75 bp, synthetic construct
  source 1..75: mol_type = other DNA
gaaaaagcccgggagtcagcagaaagcgcacagtcagcggaacaaagcaggatagcggcggaagacgccgtaaac

SEQ ID NO: 501390 - DNA, 75 bp, synthetic construct
  source 1..75: mol_type = other DNA
aaagagcgctgcaaatgctgacacttcagcaggggaggcatcggagtcagcccggcaggcggcagaaagtgcagc

SEQ ID NO: 501391 - DNA, 75 bp, synthetic construct
  source 1..75: mol_type = other DNA
tctggggccgggaaacattattgagacaaacagccatggctggttcccggatacagatggcgcactcatcaccgg

SEQ ID NO: 501392 - DNA, 75 bp, synthetic construct
  source 1..75: mol_type = other DNA
gacaccggccctgtcggggcaaccggcgaacggggaccggcaggtgatgctgtccggcaggcccgcagggccgaa

SEQ ID NO: 501393 - DNA, 75 bp, synthetic construct
  source 1..75: mol_type = other DNA
aggggcccgctggccctcaggggccgaagggtgataagggagagcgtggtgacaccggccctgtcggggcaaccg

SEQ ID NO: 501394 - DNA, 75 bp, synthetic construct
  source 1..75: mol_type = other DNA
gcgatattctggtgtggaacccggtactggaagatgcgtttgagctttcttccatggggattcgcgtggatgccg

SEQ ID NO: 501395 - DNA, 75 bp, synthetic construct
  source 1..75: mol_type = other DNA
gaagggagataaaggagagcgtggtgacaccggccctgtcggggcaaccggcgaacggggaccgggaggagatac

SEQ ID NO: 501396 - DNA, 75 bp, synthetic construct
  source 1..75: mol_type = other DNA
ccggaacatcctctgttgcaaacgttgctctataaaggctacgacgcctttgccgaacaggcgctggctgagcga

SEQ ID NO: 501397 - DNA, 75 bp, synthetic construct
  source 1..75: mol_type = other DNA
acccgccgatgccctgcgcacgctggcgctgttgcaggcagaactgccactgaaaaaagcggcggcgctggcagc

SEQ ID NO: 501398 - DNA, 75 bp, synthetic construct
  source 1..75: mol_type = other DNA
attctcagggccagctttacattgtaccgacgccaatcggcaatctggcggatatcacccagcgtgcgttagagg

SEQ ID NO: 501399 - DNA, 75 bp, synthetic construct
  source 1..75: mol_type = other DNA
cgtcctcgtcctcggcttctgcggccgctcaaaaagccagtgagtcatcacaaagtgcagcagaagctgaattgt

SEQ ID NO: 501400 - DNA, 75 bp, synthetic construct
  source 1..75: mol_type = other DNA
cgatcactgaacgctttggtccatctcatatggcgttcctggtggtgccgatggttggtgcgttctttatcgata

SEQ ID NO: 501401 - DNA, 75 bp, synthetic construct
  source 1..75: mol_type = other DNA
ctcgactggggcatttaagaagtctgaagcatcttacttttttaaattgccccaactagagggtctttatcgtta

SEQ ID NO: 501402 - DNA, 75 bp, synthetic construct
  source 1..75: mol_type = other DNA
taaagcagtttatgccattagataaaaatgaagttcaagtaatgacacttcacaagtctaaaggacttgaattta

SEQ ID NO: 501403 - DNA, 75 bp, synthetic construct
  source 1..75: mol_type = other DNA
ggtacagccgctgtcgggacaaaggcagcaaccgacccacgcagtgtcggaacgcaggtggatgatgaagtgctg

SEQ ID NO: 501404 - DNA, 75 bp, synthetic construct
  source 1..75: mol_type = other DNA
tattacaggccgttgatctgattgccgccgaggatacgcgtcataccggtttactgctgcaacattttggaatta

SEQ ID NO: 501405 - DNA, 75 bp, synthetic construct
  source 1..75: mol_type = other DNA
ttcaggtggagaatttaaaaaatcagatgaatcatatttttttaaattaccacaattgaatggtctatataatta

SEQ ID NO: 501406 - DNA, 75 bp, synthetic construct
  source 1..75: mol_type = other DNA
tcaattatttctaaaaataaatgaacttggtttatgctctattgctgttggtgatgtttggcaatcaatttatga

SEQ ID NO: 501407 - DNA, 75 bp, synthetic construct
  source 1..75: mol_type = other DNA
gacgcgacgttttaagccgtttattgagcggcgctgcgcctaccgctggcggcgcatttgtggtgacacttgctg

SEQ ID NO: 501408 - DNA, 75 bp, synthetic construct
  source 1..75: mol_type = other DNA
atgccttacgatagcgtatacagcgagaagcgcccaccgggcacgctgcgtaccgcctggcgcaaattctatggt

SEQ ID NO: 501409 - DNA, 75 bp, synthetic construct
  source 1..75: mol_type = other DNA
ttccctgctgctggcaattatcgttgtagcgtttgccggaccgagtttgtctcacgccatgtttgccgtctggct

SEQ ID NO: 501410 - DNA, 75 bp, synthetic construct
  source 1..75: mol_type = other DNA
ggcagcacttttatgacgataacttctccggcacggatttcaccactcactatgtggtgctcggttttcgcttca

SEQ ID NO: 501411 - DNA, 75 bp, synthetic construct
  source 1..75: mol_type = other DNA
tcagtctacagcatggtgcatgatgaactggaaaaagagtacgttatcgctgctcgcctggatggagcaacgacg

SEQ ID NO: 501412 - DNA, 75 bp, synthetic construct
  source 1..75: mol_type = other DNA
ttacggtcagcggtgcttaaccatattctggatactttactggcgatcccgtccctgctgctggcgattatcgtc

SEQ ID NO: 501413 - DNA, 75 bp, synthetic construct
  source 1..75: mol_type = other DNA
ttcggttcggatatgaccactgaaattgctcaggagctggaaaacaatcaggtgttgaaagcggtggtggatatt

SEQ ID NO: 501414 - DNA, 75 bp, synthetic construct
  source 1..75: mol_type = other DNA
caggtcgtcagcaccaccgcgaatctgaccacctttacccctaatcctgacagtgaaattgcccactatgtggcg

SEQ ID NO: 501415 - DNA, 75 bp, synthetic construct
  source 1..75: mol_type = other DNA
tcgatctcggcgcatccagtgggcgcgtgatgctggcgcgttactcccgtgaatgtcgcagcctgatgctgcgtg

SEQ ID NO: 501416 - DNA, 75 bp, synthetic construct
  source 1..75: mol_type = other DNA
ggggccaacaaagcctggtttggtcgcccgacacatccgggtaatgtcataggtcactggatttgcccgcagggt

SEQ ID NO: 501417 - DNA, 75 bp, synthetic construct
  source 1..75: mol_type = other DNA
atggtcggtgcgttctttatcgatatcgttaacgcgctggtgattaagctgtatttgatgttgccgatttttgcg

SEQ ID NO: 501418 - DNA, 75 bp, synthetic construct
  source 1..75: mol_type = other DNA
ttttgaattgccaaccttcgtttgcgtgctttttgtgggcgtgattctgagcaacggtttgtccatgatgggctt

SEQ ID NO: 501419 - DNA, 75 bp, synthetic construct
  source 1..75: mol_type = other DNA
ccataattgtcttcggttgcggcataaaagtagcggtgcactctcagcatgggagttttcgaatgttgtgggggg

SEQ ID NO: 501420 - DNA, 75 bp, synthetic construct
  source 1..75: mol_type = other DNA
aggtcactggatttgcccgcagggtaatgagattccagtggtcgccgttgccagccatgataccgccagcgcggt

SEQ ID NO: 501421 - DNA, 75 bp, synthetic construct
  source 1..75: mol_type = other DNA
cgtatggtctgacgatggatgaaaaaacacagaaaatctacgttggcggaagagattacatcaacgaaattgatg

SEQ ID NO: 501422 - DNA, 75 bp, synthetic construct
  source 1..75: mol_type = other DNA
ttgtcggacgatatggataccctttacattggcatcaaagaaggctttaaccgcgattgggatcctgatgtgttt

SEQ ID NO: 501423 - DNA, 75 bp, synthetic construct
  source 1..75: mol_type = other DNA
agcatcggtattgatacctggggcgtggactatgtgctgctggatcaacacggtcaacgcgtcggtttaccgatt

SEQ ID NO: 501424 - DNA, 75 bp, synthetic construct
  source 1..75: mol_type = other DNA
attccacacattgctcacgctctgctgatgccggattactttagttatcgcctgaccggcaagatgaactgggag

SEQ ID NO: 501425 - DNA, 75 bp, synthetic construct
  source 1..75: mol_type = other DNA
gctggaacctaccgctgagctgcgcaagctggaagcggcgggcgattacactgcgcgtctggcactgctggaaga

SEQ ID NO: 501426 - DNA, 75 bp, synthetic construct
  source 1..75: mol_type = other DNA
ggcaggtcctcagggacctaaaggggatgcgggagctgcaggcccggcaggaccacggggaccgaaaggggatac

SEQ ID NO: 501427 - DNA, 75 bp, synthetic construct
  source 1..75: mol_type = other DNA
cccggcaggcggcagaaagtgcagcctcagcaaagcagtcagaggaggcgtcctcgtcctcggcttctgcggccg

SEQ ID NO: 501428 - DNA, 75 bp, synthetic construct
  source 1..75: mol_type = other DNA
ctgacaaaagtaacggctgaaattgccagctattgcgctgatgaatttaagaaactgaacgacaaaaggagctgg

SEQ ID NO: 501429 - DNA, 75 bp, synthetic construct
  source 1..75: mol_type = other DNA
cgggccaaagggggaacaggggcccgcgggtcctcaggggccgaagggagataaaggagagcgtggcgacaccgg

SEQ ID NO: 501430 - DNA, 75 bp, synthetic construct
  source 1..75: mol_type = other DNA
atttggcgacgggccgtggcaggatgtcaagggactggatggcgtgggcagtgatacaggcagaacaggagaatg

SEQ ID NO: 501431 - DNA, 75 bp, synthetic construct
  source 1..75: mol_type = other DNA
agaggcggagacgtcagcgaggaatgccggcatatcagccagtcaggcagaagagagcgctgcaaatgctgacac

SEQ ID NO: 501432 - DNA, 75 bp, synthetic construct
  source 1..75: mol_type = other DNA
caaacaacacagtttgtggtgcccaacagaggtgcaatggtagcggcgcgtttcaacgccaatatcggttatcgc

SEQ ID NO: 501433 - DNA, 75 bp, synthetic construct
  source 1..75: mol_type = other DNA
gaagccaatacccgtaattgggactataacagtcgccaaaaaagtgaaattcaattcaacatcagccagacaata

SEQ ID NO: 501434 - DNA, 75 bp, synthetic construct
  source 1..75: mol_type = other DNA
agcgaaaccaacgcaaagtccagccagacggcagcgaagaccagcgaaacgaatgccaaagccagtgaaactgcg

SEQ ID NO: 501435 - DNA, 75 bp, synthetic construct
  source 1..75: mol_type = other DNA
aagcagtcagaggaagcgtcctcgtcctcggcctctgcggccgctcaaaaagccagtgagtcatcacaaagtgca

SEQ ID NO: 501436 - DNA, 75 bp, synthetic construct
  source 1..75: mol_type = other DNA
gggagacacaaatccgttttcgtctggggccggcgagcattattgagacaaacagcaatggctggttcccggata

SEQ ID NO: 501437 - DNA, 75 bp, synthetic construct
  source 1..75: mol_type = other DNA
aagccaatacccgcaattgggactataacagtcgccaaaaaagtgaaccgccccgggtttcctggagagtgtttt

SEQ ID NO: 501438 - DNA, 75 bp, synthetic construct
  source 1..75: mol_type = other DNA
gaccgaaaggagaaacaggtgcggctggcccggtgggggcaaccggacctcagggaccgaagggcgacccggggg

SEQ ID NO: 501439 - DNA, 75 bp, synthetic construct
  source 1..75: mol_type = other DNA
aacttcatgcggaacccttgccgcaacggtttgtgattttgcgtttactgcttttgtcgccatgtggtgtacccc

SEQ ID NO: 501440 - DNA, 75 bp, synthetic construct
  source 1..75: mol_type = other DNA
ctgattcatgctctatctttctgcgccgtcttttccgtgccggtgataatgttttggtcaattctttatcggtca

SEQ ID NO: 501441 - DNA, 75 bp, synthetic construct
  source 1..75: mol_type = other DNA
ggtgtgctgaaagatggtgcgggaaaaccaatacagaactgcactattcaactgaaggcaaagcgtaacagcacc

SEQ ID NO: 501442 - DNA, 75 bp, synthetic construct
  source 1..75: mol_type = other DNA
ggccaaagggggaaccgggtcccgcgggtcctcaggggccgaagggagataaaggagagcgtggagacaccggtc

SEQ ID NO: 501443 - DNA, 75 bp, synthetic construct
  source 1..75: mol_type = other DNA
ggggccgaaaggtgacaggggagagcggggagagaccggtctgacgggaaatgcaggtccacagggtccaaaggg

SEQ ID NO: 501444 - DNA, 75 bp, synthetic construct
  source 1..75: mol_type = other DNA
tctgacgggaaatgcaggtccacagggtccaaagggagagaccggtctgacgggaaatgcaggtcgacggggtcc

SEQ ID NO: 501445 - DNA, 75 bp, synthetic construct
  source 1..75: mol_type = other DNA
tttttcagcatttgcaggtcaggtttggtgacgggccgtggcaggatgtcaaggggctggatgaagtgggcagtg

SEQ ID NO: 501446 - DNA, 75 bp, synthetic construct
  source 1..75: mol_type = other DNA
cgctgcaaagcagtcagaggaggcgtcctcgtcctcggcctctgcggccgctcaaaaagccagtgagtcatcaca

SEQ ID NO: 501447 - DNA, 75 bp, synthetic construct
  source 1..75: mol_type = other DNA
ttttttcagcatttgcaggtcaggtttggtgacgggccgtggcaggatgttaaggggctggatgaagtgggcagt

SEQ ID NO: 501448 - DNA, 75 bp, synthetic construct
  source 1..75: mol_type = other DNA
atggacgttgagtacggtcagtacagagtcattctgttggtggaaggattcccgccgtcacatgccgggaccatc

SEQ ID NO: 501449 - DNA, 75 bp, synthetic construct
  source 1..75: mol_type = other DNA
tggtggaagaagcggcgcgtcacgcagaggaggcgaagaagaatgccggagaagcagagacgtccgcgaggaatg

SEQ ID NO: 501450 - DNA, 75 bp, synthetic construct
  source 1..75: mol_type = other DNA
aacacgtgcagtcgcttacagcacaactgcgactggggccagcagacatcctggagtcagatgagaatggtatta

SEQ ID NO: 501451 - DNA, 75 bp, synthetic construct
  source 1..75: mol_type = other DNA
aaaaacagtcaggatgctgcagcccaaagcgagagtgccgcagctggttctgcaagtgcggcggcttcttctgcc

SEQ ID NO: 501452 - DNA, 69 bp, synthetic construct
  source 1..69: mol_type = other DNA
atggcagcagtaaaaatctcaggtgtgctgaaagacggtgcaggaaaaccgatacagaactgcaccatt

SEQ ID NO: 501453 - DNA, 75 bp, synthetic construct
  source 1..75: mol_type = other DNA
gcgttattctgttggtggaaggggtcccgccgtcacatgccgggaccatcaccgtgtatgaagattctcagccgg

SEQ ID NO: 501454 - DNA, 75 bp, synthetic construct
  source 1..75: mol_type = other DNA
cagttattgcagagactacagaaacattaccattatcttcttgagcaaataaaggatctggaagcgcagttaaag

SEQ ID NO: 501455 - DNA, 75 bp, synthetic construct
  source 1..75: mol_type = other DNA
ctcaaaaagccattgagtcatcacaaagtgcagcagatgctgaattgtcaaaaaagacggcagaaagtgcagccg

SEQ ID NO: 501456 - DNA, 75 bp, synthetic construct
  source 1..75: mol_type = other DNA
aaagcaggatagcggcggaagaagccgtaaaccgaatcccgaccgtggtggggcctcccgggccaaagggggaac

SEQ ID NO: 501457 - DNA, 75 bp, synthetic construct
  source 1..75: mol_type = other DNA
gaagggagataaaggagagcgtggagacaccggccctgtcggggcaaccggtgaacggggaccgagaggagatac

SEQ ID NO: 501458 - DNA, 75 bp, synthetic construct
  source 1..75: mol_type = other DNA
aaacgcaacaagcgaaatctggtaaaactggataatgcgttagatcgtctggaggcacttactggttatctttac

SEQ ID NO: 501459 - DNA, 75 bp, synthetic construct
  source 1..75: mol_type = other DNA
tcaggggccgaagggcgacccgggggagacgcaaatacggttccgtctggggccgggaaacattattgagacaaa

SEQ ID NO: 501460 - DNA, 75 bp, synthetic construct
  source 1..75: mol_type = other DNA
tggtgaacacggtggcctctgaaaatccggatgaagccggacgttacagcatggatgttgagcatggtcagtaca

SEQ ID NO: 501461 - DNA, 75 bp, synthetic construct
  source 1..75: mol_type = other DNA
ggcccggcaggcccacagggaccgaaaggagaaacaggtgcggctggcccggtggggggcaaccggacctcaggg

SEQ ID NO: 501462 - DNA, 75 bp, synthetic construct
  source 1..75: mol_type = other DNA
gtttacggtgcgcagggggtcaaagtgtcactgaatgatgcgcttcttcagtgggagaaggagcagacagaaggc

SEQ ID NO: 501463 - DNA, 75 bp, synthetic construct
  source 1..75: mol_type = other DNA
tgcagcccagaacggaatctcagcaggcaatgcgggctctgcatcgtgtccgtgaatccctggttcaggataagg

SEQ ID NO: 501464 - DNA, 75 bp, synthetic construct
  source 1..75: mol_type = other DNA
gcggaagaagccgtaaaccgaatccccaccgtggtggggccacccgggccaaagggggaaccgggtcccgcgggt

SEQ ID NO: 501465 - DNA, 75 bp, synthetic construct
  source 1..75: mol_type = other DNA
gagacacaaatccgttttcgtctggggccggcgagcattattgagacaaacagccatggctggttcccggataca

SEQ ID NO: 501466 - DNA, 75 bp, synthetic construct
  source 1..75: mol_type = other DNA
tctggcatagtcatccggtcacggtgcaacaacgtgagcaacgccacggtcatcgtggtgttgtgctgtggttta

SEQ ID NO: 501467 - DNA, 75 bp, synthetic construct
  source 1..75: mol_type = other DNA
cctcagcccgggatgcggcggtttcaaaagaggcggcaaaatcatcagaaacgaacgcatcctcgagcgccagta

SEQ ID NO: 501468 - DNA, 75 bp, synthetic construct
  source 1..75: mol_type = other DNA
tcagcatttgcaggtcaggtttggtgacgggccgtggcaggatgttaaggggctggatgaagtgggcagtgatac

SEQ ID NO: 501469 - DNA, 75 bp, synthetic construct
  source 1..75: mol_type = other DNA
cgtaaaccgaatccccacagtggtggggccacccgggccaaagggagaaccggggcccgcgggtcctcaggggcc

SEQ ID NO: 501470 - DNA, 75 bp, synthetic construct
  source 1..75: mol_type = other DNA
tactggatgcggataaaaagcagatacagtgcgtggtaagaccgctgcaaatcctgcgtgctgacgggaggtggg

SEQ ID NO: 501471 - DNA, 75 bp, synthetic construct
  source 1..75: mol_type = other DNA
aaggctgtttaccgtaaaaaatttacacggccaaagttaatcgaatttttggcgacatgccccgctacaaccatc

SEQ ID NO: 501472 - DNA, 75 bp, synthetic construct
  source 1..75: mol_type = other DNA
ggctggttcccggatacagatggcgcactcatcaccggactgacctttcttgaccccaaagatgccacacggatt

SEQ ID NO: 501473 - DNA, 75 bp, synthetic construct
  source 1..75: mol_type = other DNA
aggtccggcaggtccgcaggggccgaaaggtgacaggggagagcggggagagaccggtctgacgggaaatgcagg

SEQ ID NO: 501474 - DNA, 75 bp, synthetic construct
  source 1..75: mol_type = other DNA
catgacggaggatgatgtccgaccggaggcactgcgtcgttttgaactgatggtggaagaagcggcgcgtcacgc

SEQ ID NO: 501475 - DNA, 75 bp, synthetic construct
  source 1..75: mol_type = other DNA
gggaggcatcggagtcagcccggcaggcggcagaaagtgcagccgctgcaaagcagtcagaggaagcgtcctcgt

SEQ ID NO: 501476 - DNA, 75 bp, synthetic construct
  source 1..75: mol_type = other DNA
ccattcgatgacatttgtttcaggtggttccagtggtgctccgggaagtggagcatctgattattctaaatacag

SEQ ID NO: 501477 - DNA, 75 bp, synthetic construct
  source 1..75: mol_type = other DNA
gccagactcgtaatgcagggaagacatcatcagatggtgctcatacccactcactgtccggcactgctgcaagcg

SEQ ID NO: 501478 - DNA, 75 bp, synthetic construct
  source 1..75: mol_type = other DNA
gcgacgggaagcagtatgccagtagccgtgactttgctgccgcaacagggttggtacctcgacaatacagcacgg

SEQ ID NO: 501479 - DNA, 75 bp, synthetic construct
  source 1..75: mol_type = other DNA
caccgagatcacccgcgcactgtcgatggcaattctcgatatcgccgcgctgggctttcttgacctcggcgcaca

SEQ ID NO: 501480 - DNA, 75 bp, synthetic construct
  source 1..75: mol_type = other DNA
aaaaacgtccgccgggtacgttgcgcaccgcatggcgcaatttctatggcgatgcgactgcgatgatcggcctgt

SEQ ID NO: 501481 - DNA, 75 bp, synthetic construct
  source 1..75: mol_type = other DNA
tgcccaacatcactgccggactggtcaccgagatcactcgcgcattgtcgatggcaattctcgatatcgccgcgc

SEQ ID NO: 501482 - DNA, 75 bp, synthetic construct
  source 1..75: mol_type = other DNA
cgcaagtacctatgaagccgttcattgtagaagtggcaagtgttgaagagggtgttcgcctgatggacgcactgg

SEQ ID NO: 501483 - DNA, 75 bp, synthetic construct
  source 1..75: mol_type = other DNA
ggataaaccgcagggtatgtccagcaacgatgcgctgcaaaaagtgaaacggatttataacgccaaccgtgccgg

SEQ ID NO: 501484 - DNA, 75 bp, synthetic construct
  source 1..75: mol_type = other DNA
gcgaccggcatgttgccaatttgcctcggggaagcgacgaagttttcccagtatctgctggactccgacaaacgc

SEQ ID NO: 501485 - DNA, 75 bp, synthetic construct
  source 1..75: mol_type = other DNA
gtacatcgccaacctccgccagaccattgaggctgaatgtctggggttcgatgttaacccgcaggccacacaggc

SEQ ID NO: 501486 - DNA, 75 bp, synthetic construct
  source 1..75: mol_type = other DNA
atcagagatggggcttacggatcgctgggtagattggtacagcgaatgccaatgttacgacgacccacgtaaata

SEQ ID NO: 501487 - DNA, 75 bp, synthetic construct
  source 1..75: mol_type = other DNA
cgtatgcaacgttcaacagatgggaaatcactttctccacgcttgtatgtggctgatgaagctaacttctcacct

SEQ ID NO: 501488 - DNA, 75 bp, synthetic construct
  source 1..75: mol_type = other DNA
gctgccaggcgcagcgattatgataagcgtgctgctggttaacctactgggtgacggcgtgggtataggaagtat

SEQ ID NO: 501489 - DNA, 75 bp, synthetic construct
  source 1..75: mol_type = other DNA
caagcgccagtgtcagcgagctgaagaaaaacccgatggcgacagtcagcgccggtgatggtttcccggtcgcta

SEQ ID NO: 501490 - DNA, 75 bp, synthetic construct
  source 1..75: mol_type = other DNA
gttttcggggcgcaggggatgaatgttgcactgaaggacgccatgctctgctggggagaggatgaggataagccg

SEQ ID NO: 501491 - DNA, 75 bp, synthetic construct
  source 1..75: mol_type = other DNA
ctactgtgttcctgctgaactgtatgaaaggatgcttgatgctctggatgaccaggagctggtgaaactggttac

SEQ ID NO: 501492 - DNA, 75 bp, synthetic construct
  source 1..75: mol_type = other DNA
gcctactaccgggaactcgctgaagacgctgaactcaacgcaattgctgatgaaagaatgaaaaatccagacatt

SEQ ID NO: 501493 - DNA, 75 bp, synthetic construct
  source 1..75: mol_type = other DNA
ttggccgattgggtcagggatttactgtgccggaaaagcaactttgtcgtcacttgtgctctggcaaacaagctg

SEQ ID NO: 501494 - DNA, 75 bp, synthetic construct
  source 1..75: mol_type = other DNA
atcaggagctggtgaaactggttgtcgaacgtagcaaccagaaactgcacgatgtgaatctagatagttacctat

SEQ ID NO: 501495 - DNA, 75 bp, synthetic construct
  source 1..75: mol_type = other DNA
ataagtataggctttttcattgggttatcatttactattcttttttgggcaatagatgcggctgggcagattatt

SEQ ID NO: 501496 - DNA, 75 bp, synthetic construct
  source 1..75: mol_type = other DNA
tctttgttattcatggtgggatacaaagcatcctagataagctatatttatcctacgagatattaccattacaag

SEQ ID NO: 501497 - DNA, 75 bp, synthetic construct
  source 1..75: mol_type = other DNA
atgctcggtgatgcgctggaactgatttatgtcgccccgtggactgtcatgctgccaggtgcggcaattatgatt

SEQ ID NO: 501498 - DNA, 75 bp, synthetic construct
  source 1..75: mol_type = other DNA
ttgtgctacaaaacctgtctcaaatgaacaagccactcctgttcctgaaaaacaaattatcagtaccgcgttact

SEQ ID NO: 501499 - DNA, 75 bp, synthetic construct
  source 1..75: mol_type = other DNA
atcatcgaaaactatacattctcagaaaaattaccctctggaatttttccattgactggcattgtgttaaaagaa

SEQ ID NO: 501500 - DNA, 75 bp, synthetic construct
  source 1..75: mol_type = other DNA
tgattcatcttctatcactggtgttattttataccaatttatcactgtgatctttgttattcatggtgggataca

SEQ ID NO: 501501 - DNA, 75 bp, synthetic construct
  source 1..75: mol_type = other DNA
tatcgggtaattgcgcggcttgggcagcgcactgatacttctgacgccgacggacaaatcgttgaagaacgtccg

SEQ ID NO: 501502 - DNA, 75 bp, synthetic construct
  source 1..75: mol_type = other DNA
gcactgaattaaaagacactcaacagttacaaaagtgcgccgaccgccttgctcagagtgcgcaggattttcgcc

SEQ ID NO: 501503 - DNA, 75 bp, synthetic construct
  source 1..75: mol_type = other DNA
atgcccgtgaaaagcaggacataaagatgctgaacgaaatgaataatacatcatgggtctggccggacaatatca

SEQ ID NO: 501504 - DNA, 75 bp, synthetic construct
  source 1..75: mol_type = other DNA
cagacagacaaaaaccagctgtctgtcatgtatgcctttgaatacctgatagaatcagcattaacagagtctgag

SEQ ID NO: 501505 - DNA, 75 bp, synthetic construct
  source 1..75: mol_type = other DNA
cactgagcgactgcgtgctgtcgctgtcggagaaagacctgcgggcacatactctggccactgcggaagtctacg

SEQ ID NO: 501506 - DNA, 75 bp, synthetic construct
  source 1..75: mol_type = other DNA
gcacgctcagggcaaactggtccgctgcgtggaaggtgaggtatttgacgtggcggtggatatccgtcgttcatc

SEQ ID NO: 501507 - DNA, 75 bp, synthetic construct
  source 1..75: mol_type = other DNA
cctaccattaaaattcagtggcccaatttacaggatatgcattttaaattatcaaataaggatttgaatgctaag

SEQ ID NO: 501508 - DNA, 75 bp, synthetic construct
  source 1..75: mol_type = other DNA
aatcgatgaattgatcgttatgggcctggctactgactattgcgtgaagtttaccgtgctggacgcgttacagtt

SEQ ID NO: 501509 - DNA, 75 bp, synthetic construct
  source 1..75: mol_type = other DNA
tttgctattgataacgcaaccggcgaactggttattggaaccaaactgtccgcaagtctgaacggtaatgcatta

SEQ ID NO: 501510 - DNA, 75 bp, synthetic construct
  source 1..75: mol_type = other DNA
atatacgggcaacgtggcgctgctgaaagggcgctcaaactacctctgcctcgaacgtctcgaacagcaggcgct

SEQ ID NO: 501511 - DNA, 75 bp, synthetic construct
  source 1..75: mol_type = other DNA
aacggccgtcggcagaaaactgcgctcgatgactggttgcgcgctcatgtaatcaatgaattggtgcctcggatt

SEQ ID NO: 501512 - DNA, 75 bp, synthetic construct
  source 1..75: mol_type = other DNA
agccacaggacagcgcgcacgcgtttatggagatgtcagccgctggggcaacgctatatacgctggcggactggg

SEQ ID NO: 501513 - DNA, 75 bp, synthetic construct
  source 1..75: mol_type = other DNA
aacggacgtcgacagaaaaccgcgcttgatgactggttgcgcgatcatgaaatcgatgaattgatcgttatgggt

SEQ ID NO: 501514 - DNA, 75 bp, synthetic construct
  source 1..75: mol_type = other DNA
aaaacctacgcttacctggctcctgcgctgcgggcaaaaaaagtcattatctcgaccggctcaaaagcgttgcag

SEQ ID NO: 501515 - DNA, 75 bp, synthetic construct
  source 1..75: mol_type = other DNA
cagatgtactgatttttgaaccgaaagtttttggtgatgagcgtggtttcttttttgagagctttaaccaaaagg

SEQ ID NO: 501516 - DNA, 75 bp, synthetic construct
  source 1..75: mol_type = other DNA
atgaacgtaattcagaccgcaatccccgacgtctttatctttgagccaaaagtgtttggcgatgaccgtggcttt

SEQ ID NO: 501517 - DNA, 75 bp, synthetic construct
  source 1..75: mol_type = other DNA
agcagccacatctgcatccaccgcgaccacgaaggcatcagaagctgcgacctcggcccgggatgcggcggcctc

SEQ ID NO: 501518 - DNA, 75 bp, synthetic construct
  source 1..75: mol_type = other DNA
ttgacgacctgggtgaaaaactcggctgtggcgcgcatgttatttacctgcgccgtctggcagtaagtaaatatc

SEQ ID NO: 501519 - DNA, 75 bp, synthetic construct
  source 1..75: mol_type = other DNA
gcaacctttagtgcagagcaactggcggcagcactggatacgttccgtggcgatatcgaacagatcccttcgatg

SEQ ID NO: 501520 - DNA, 75 bp, synthetic construct
  source 1..75: mol_type = other DNA
gaaactgctgagtttgtttataagacgacgaattattatcatccagagagtgatagagggattatttggaatgat

SEQ ID NO: 501521 - DNA, 75 bp, synthetic construct
  source 1..75: mol_type = other DNA
ctaataattattattcaaaggaacatgaggcaggtcttctatggtccgatactagaattggtatagcatggccaa

SEQ ID NO: 501522 - DNA, 75 bp, synthetic construct
  source 1..75: mol_type = other DNA
gcccagagcgcgcaggattttcgcctgcaattaggtgagccaggttatcgtggcaacctgcgcgaactgttagct

SEQ ID NO: 501523 - DNA, 75 bp, synthetic construct
  source 1..75: mol_type = other DNA
gacaattgtggatacctgaaggatttgcacatgggtttttggtgctgagtgagacggcggagtttttatataaaa

SEQ ID NO: 501524 - DNA, 75 bp, synthetic construct
  source 1..75: mol_type = other DNA
gccgcatcgtccgccagttcggcggcgtcatcggcatcatctgcgtctgcttcaaaagatgaggcgaccagacag

SEQ ID NO: 501525 - DNA, 75 bp, synthetic construct
  source 1..75: mol_type = other DNA
agggagtactcaagttagcgggactaatcaggttggtatcagtggctcattaaccagtggcacctcccaatgggt

SEQ ID NO: 501526 - DNA, 75 bp, synthetic construct
  source 1..75: mol_type = other DNA
accggtacagaactgcacaatccagctgaaagcaaaacgtaacagtaccactgtggtggtgaacacgctggcctc

SEQ ID NO: 501527 - DNA, 75 bp, synthetic construct
  source 1..75: mol_type = other DNA
atgattattgcgaaagcgctgggaactgacccctgggttatctggccatcacgctatcatgatccgcagacacat

SEQ ID NO: 501528 - DNA, 75 bp, synthetic construct
  source 1..75: mol_type = other DNA
tcgctggcccaaaggcgaaagattgattgcagaagcgttagatgttgcgcctgagaacatctggccatcacgcta

SEQ ID NO: 501529 - DNA, 75 bp, synthetic construct
  source 1..75: mol_type = other DNA
aggaaaatatgactctggattgaaatcaatagtttggacagattataaaaatcaaaaattgactgacacgatgtc

SEQ ID NO: 501530 - DNA, 75 bp, synthetic construct
  source 1..75: mol_type = other DNA
aaggaaggaaggcaggttgatatgatcaaggtcgtaaaaagaaaaggtaaatatttagttcgtcaaggtcatact

SEQ ID NO: 501531 - DNA, 75 bp, synthetic construct
  source 1..75: mol_type = other DNA
aaagagggcagacgagtcgatttaattaaggttgttaagaaagactccaattacgttgtaaggcaggggcattgc

SEQ ID NO: 501532 - DNA, 75 bp, synthetic construct
  source 1..75: mol_type = other DNA
gatggcggaactggggctgcgtctgccgataacagcaggccagttttacggtgtctggcagcacttttatgacga

SEQ ID NO: 501533 - DNA, 75 bp, synthetic construct
  source 1..75: mol_type = other DNA
ttgccagtgctgaaaatatgaactggatgcaggcattacgttttgtggcggcaaaaggccatcagaaagcgatta

SEQ ID NO: 501534 - DNA, 75 bp, synthetic construct
  source 1..75: mol_type = other DNA
aaattatctggccgtccagatatttcgatgatcagggcaaccgtattgtaaggctcatgcgaaagcagtgctcct

SEQ ID NO: 501535 - DNA, 75 bp, synthetic construct
  source 1..75: mol_type = other DNA
atgatgcagccggactggcatcccgctgatattatcgcgggactgagaaaacgggggacatcgctggctaaggtg

SEQ ID NO: 501536 - DNA, 75 bp, synthetic construct
  source 1..75: mol_type = other DNA
atacagttgccacattttctggcattcctgacaggcaaaaacctgtaacttgtaataaagacaaaaacaaagatg

SEQ ID NO: 501537 - DNA, 75 bp, synthetic construct
  source 1..75: mol_type = other DNA
accggaaaccattatgcaggaggagatgcgaaaatattatactgtttccacattctctggtatcccggacaggca

SEQ ID NO: 501538 - DNA, 75 bp, synthetic construct
  source 1..75: mol_type = other DNA
tggctgtatccgaggaggatattcaagctgcgcttgaaggagatgagtttcgtgtgcccctcaattctcctgtaa

SEQ ID NO: 501539 - DNA, 75 bp, synthetic construct
  source 1..75: mol_type = other DNA
cccgcagtttgctgaccctgccaaatatccagaagcacaaatccagtttcgtctgaatctggctgatgtgctgct

SEQ ID NO: 501540 - DNA, 75 bp, synthetic construct
  source 1..75: mol_type = other DNA
tatgcccagatgagttggccgggagtgacctttcgcccactggaggaacgtattcctgccgacttgtatattgtt

SEQ ID NO: 501541 - DNA, 75 bp, synthetic construct
  source 1..75: mol_type = other DNA
acattgctgttcgttcgtcattcgcgcagtgtggcgctcactcatgcggggaaaattttactggaagagtcacgt

SEQ ID NO: 501542 - DNA, 75 bp, synthetic construct
  source 1..75: mol_type = other DNA
cggaatctatggtcactcccgtttttgcaacaccgattttgacgacaagttggcttgcttgaatctatccggcgt

SEQ ID NO: 501543 - DNA, 75 bp, synthetic construct
  source 1..75: mol_type = other DNA
attatgatcagcgtgttgttggttaacctccttggtgatggtgtgcgtcgtgcaattattgcgggggtggaataa

SEQ ID NO: 501544 - DNA, 75 bp, synthetic construct
  source 1..75: mol_type = other DNA
tgggctttcttgatctcggcgcgcaactcccctctcctgaatggggagcgatgctcggcgatgcactggaactga

SEQ ID NO: 501545 - DNA, 75 bp, synthetic construct
  source 1..75: mol_type = other DNA
cattggctcgagtagaacagattggtcgtggtgaagcagggcgcattgagctgggcgtagtgggaacagcaatgt

SEQ ID NO: 501546 - DNA, 75 bp, synthetic construct
  source 1..75: mol_type = other DNA
gtgattttcgccgcgacttcccgcagtttgctgaccctgccaaaatatcccgaagcgcaaatccagtttcgtctg

SEQ ID NO: 501547 - DNA, 75 bp, synthetic construct
  source 1..75: mol_type = other DNA
ctcaaagtccgttgacaaggtaagtgtcagttatgacatcagcgcgacgctgaatcctgatgcaggcttctggaa

SEQ ID NO: 501548 - DNA, 75 bp, synthetic construct
  source 1..75: mol_type = other DNA
gtctgaatctggccgatgaactgctgagcgaaaacgtcaccggaaaaaagttgtttccgtactttgccgggttgt

SEQ ID NO: 501549 - DNA, 75 bp, synthetic construct
  source 1..75: mol_type = other DNA
ggtgaagacctgcgtaaggtcgccgtaacagccatcggtgtcggtattgtaggggtcgtctcagaaaacggaatc

SEQ ID NO: 501550 - DNA, 75 bp, synthetic construct
  source 1..75: mol_type = other DNA
gcggcatacagaccgcaaaatcagtggataaggtttcagcaagttatgatgcaagcgcaaccctggaccctaatg

SEQ ID NO: 501551 - DNA, 75 bp, synthetic construct
  source 1..75: mol_type = other DNA
ccggtttctggaacaacacccgttacggatcggagttctgggaatacctgatgatgtttggtgccggagcggttc

SEQ ID NO: 501552 - DNA, 75 bp, synthetic construct
  source 1..75: mol_type = other DNA
ctgatatgacagagcagcaaatcatgcaacttaagcaaaagacctataaagcgatggtaaaagatttggttaacc

SEQ ID NO: 501553 - DNA, 75 bp, synthetic construct
  source 1..75: mol_type = other DNA
gtcagaatattgaacacatttatgataaagagtttgaaaaaaaacaaaccttaataaaagaatataataaagagc

SEQ ID NO: 501554 - DNA, 75 bp, synthetic construct
  source 1..75: mol_type = other DNA
aaacaaaacatatatctaacccatgaaaaaggcaacctgtctggtttagaacttttaggtaatgtttgcataggt

SEQ ID NO: 501555 - DNA, 75 bp, synthetic construct
  source 1..75: mol_type = other DNA
ttgttctggcattactcttacccgttgcggctaccgctgcatctgtaacgcgtatcctggacggcgatacgctgg

SEQ ID NO: 501556 - DNA, 75 bp, synthetic construct
  source 1..75: mol_type = other DNA
ataaacagcaggagttagcaaaagagaggcaactgattcagccaaagccatttacagcagagcttccacctggag

SEQ ID NO: 501557 - DNA, 75 bp, synthetic construct
  source 1..75: mol_type = other DNA
aattcgttgcgtgcaactctattgagtcttgcttcatttacagacagtatatcggtccttaaaactatgcgctcc

SEQ ID NO: 501558 - DNA, 75 bp, synthetic construct
  source 1..75: mol_type = other DNA
aattgtcctaagcattttatctcgtgagaatttaattgaaaatgatcgaaaaataacaggagcctaccatactga

SEQ ID NO: 501559 - DNA, 75 bp, synthetic construct
  source 1..75: mol_type = other DNA
ggcacaggcatttgccatcaggttaacctcgaatatctcggcaaagcagtgtggagtgaattgcaggacggtgaa

SEQ ID NO: 501560 - DNA, 75 bp, synthetic construct
  source 1..75: mol_type = other DNA
gatcaacggccttggcgtgctggggtggggcgtgggtgttaggccagccggtttccatgcttatcccggacgtaa

SEQ ID NO: 501561 - DNA, 75 bp, synthetic construct
  source 1..75: mol_type = other DNA
ttggtactgactcgcacaccactatgatcaacggccttggcgtgctggggtggggcgtgggtgggatcgaagcag

SEQ ID NO: 501562 - DNA, 75 bp, synthetic construct
  source 1..75: mol_type = other DNA
ctcgcgataacctggcctcgttgctcgagctggcggttgatgaaaatcagcctgttgagattcagcgccgtaaag

SEQ ID NO: 501563 - DNA, 75 bp, synthetic construct
  source 1..75: mol_type = other DNA
gcgctgctacaggcagaactgccgctgaaaaaagcggcggcgctggccgcagaaattcacggcgtgaagaaaaat

SEQ ID NO: 501564 - DNA, 75 bp, synthetic construct
  source 1..75: mol_type = other DNA
aaggttttccataaaggcaatcagcgggcaggtaatatcaccgactgtacggtgattgtgaccaaaaaagccgct

SEQ ID NO: 501565 - DNA, 75 bp, synthetic construct
  source 1..75: mol_type = other DNA
gtttctgacggccgatttcctcgcgttgtttgaatatcagcccgaccatgaaattatccgtcagtcggagctcaa

SEQ ID NO: 501566 - DNA, 75 bp, synthetic construct
  source 1..75: mol_type = other DNA
cgctaacagccgtgtttattttaataatgatccacgtgcaatcattggcttaaataaaaaggaagtcaaaaatgt

SEQ ID NO: 501567 - DNA, 75 bp, synthetic construct
  source 1..75: mol_type = other DNA
cgcaaacgcaccattcttggctgtgtcgtggcaaccatgcaggcgtggcaatataacgccgtcctcttacgttgg

SEQ ID NO: 501568 - DNA, 75 bp, synthetic construct
  source 1..75: mol_type = other DNA
aaactgaagcgttttactggttggcaatcgtgccattcctggggttcctgacctgcgtattgattaattgggaac

SEQ ID NO: 501569 - DNA, 75 bp, synthetic construct
  source 1..75: mol_type = other DNA
ctggtggatgtggcaacaggtgagtgggctacctggtcgccggtgaattatgaatataaagtgcttccaccattg

SEQ ID NO: 501570 - DNA, 75 bp, synthetic construct
  source 1..75: mol_type = other DNA
atgaaaagaagaaaaaagctcaagtcacacaaagtaatattaataaaaacactcccccagcaactgacagacaaa

SEQ ID NO: 501571 - DNA, 75 bp, synthetic construct
  source 1..75: mol_type = other DNA
agcaccactacagaaaatcgggaggttacatttctgtggcgctcagagaaagcactgcaaggcgtatatcttcgc

SEQ ID NO: 501572 - DNA, 75 bp, synthetic construct
  source 1..75: mol_type = other DNA
tgctcgaaggtaaatcaaggaaactggagcgctttgcggtcaagcggccagaagagattgtcaactggcatgccg

SEQ ID NO: 501573 - DNA, 75 bp, synthetic construct
  source 1..75: mol_type = other DNA
aaaccggtattcagttcgtgggccgaaaaacaaaagctatttgaaatgtgcgaaaaaggtgcggaattactgaaa

SEQ ID NO: 501574 - DNA, 75 bp, synthetic construct
  source 1..75: mol_type = other DNA
ttttctgcctggagcgatatcgacgaacattttgatttcaggagtctttccgcattcctcaaggcgctaaaagat

SEQ ID NO: 501575 - DNA, 75 bp, synthetic construct
  source 1..75: mol_type = other DNA
cagctggcgaatatgctccgttcacaggctgcccgcagcggttgttttcaaagcaatcgtccgtttcatccacat

SEQ ID NO: 501576 - DNA, 75 bp, synthetic construct
  source 1..75: mol_type = other DNA
caactggcgaatatgctccgttcacaggctgcacgcagtggttgttttcaaagcaatcgaccgtttcatccacat

SEQ ID NO: 501577 - DNA, 75 bp, synthetic construct
  source 1..75: mol_type = other DNA
ataaagctcgtccccctagagttcaaataacttatgacgttgaaattggtaatgccaaaacagcaaaagagttac

SEQ ID NO: 501578 - DNA, 75 bp, synthetic construct
  source 1..75: mol_type = other DNA
ggattttctggcccgttttgcacagtttaaggataagacggtgatcgaagggcaaacactcggtgtgctaatcga

SEQ ID NO: 501579 - DNA, 75 bp, synthetic construct
  source 1..75: mol_type = other DNA
gtgcctgaacgcggattcacacttctggaaatcatgttggtgattttccttatcggccttgccagttcgggcgtg

SEQ ID NO: 501580 - DNA, 75 bp, synthetic construct
  source 1..75: mol_type = other DNA
cgcgcctggctaccagtttatgcagcgtcgtcaggggcagtggttgcccgtttcctcgacccggttatcggcaca

SEQ ID NO: 501581 - DNA, 75 bp, synthetic construct
  source 1..75: mol_type = other DNA
ggtgctgggcgatctgctcaactatttcttcggcggcggctcggtcagctttgtggcgttctcctgcctggcgtt

SEQ ID NO: 501582 - DNA, 75 bp, synthetic construct
  source 1..75: mol_type = other DNA
cagcaactttacgcctgccctttaaagagaaactctcttacggtatcggcgatctggcctctaacatcctgctgg

SEQ ID NO: 501583 - DNA, 75 bp, synthetic construct
  source 1..75: mol_type = other DNA
tttccgcgacccggttatcggcacaggttacggtgccgaaacaggtgcagatgctgttacaacccggaagtgata

SEQ ID NO: 501584 - DNA, 75 bp, synthetic construct
  source 1..75: mol_type = other DNA
tatggcctggaagaagaggttgattattatgcgccggcgttccgctttgaagacgaagatgataatccgtggatc

SEQ ID NO: 501585 - DNA, 75 bp, synthetic construct
  source 1..75: mol_type = other DNA
tttaaggacagggcagtgatcgaagggcagacactcggtgtgttaatcgacccgcctggctatcagtttatgcag

SEQ ID NO: 501586 - DNA, 75 bp, synthetic construct
  source 1..75: mol_type = other DNA
tggaaatcatgctggtgattttccttatcggccttgccagtgcgggcgtggtacagacttttgcgagccgttctg

SEQ ID NO: 501587 - DNA, 75 bp, synthetic construct
  source 1..75: mol_type = other DNA
gtttgattttgcgaacatgatcaatgcaaatgagcatcccatcgacgctttaaaaacgatggcaccgcatattac

SEQ ID NO: 501588 - DNA, 75 bp, synthetic construct
  source 1..75: mol_type = other DNA
gcgagcgtttttctctgggcaatatggcagataaagaactctctgcctttggtgataaagctcgtcgtctgaacc

SEQ ID NO: 501589 - DNA, 75 bp, synthetic construct
  source 1..75: mol_type = other DNA
aagttggcagcatcacctgaaaccagcgcctcagataaggcatctattgacgaagccgtcgccatcgcgttgaaa

SEQ ID NO: 501590 - DNA, 75 bp, synthetic construct
  source 1..75: mol_type = other DNA
ctttaccgatatgggtaccggcatcatgctcgattcccggcgcaagatcggtccaaaaggcaaattccgcccttt

SEQ ID NO: 501591 - DNA, 75 bp, synthetic construct
  source 1..75: mol_type = other DNA
tttttaacatacttaataaagtcatcgaatcaggaagtcaggccggttgggtttttctcttatgtctcttacttg

SEQ ID NO: 501592 - DNA, 75 bp, synthetic construct
  source 1..75: mol_type = other DNA
ttcagaggtaaatatactgtaagcaataataatgaaattaatgattatatatcaaggctaaagcaacaatgcgga

SEQ ID NO: 501593 - DNA, 75 bp, synthetic construct
  source 1..75: mol_type = other DNA
gaataaaccatcgtggtttaatttctatttatcactctcgggtatcattattgtttattttgtattgctgcttgt

SEQ ID NO: 501594 - DNA, 75 bp, synthetic construct
  source 1..75: mol_type = other DNA
cccctcactttgaagggatcggagctataaaaatggtgttatccggcttcctcaaattgaggtttccgaaaatat

SEQ ID NO: 501595 - DNA, 75 bp, synthetic construct
  source 1..75: mol_type = other DNA
taatggaaaggttaattgggagcaactattttctttatcttgtttttctttcccaatctatcaatttccaacgct

SEQ ID NO: 501596 - DNA, 75 bp, synthetic construct
  source 1..75: mol_type = other DNA
agtgattgcgatattgacgcggcattttattcaatagtcgttatgcttgatgaagtaatattgtgttctgaactt

SEQ ID NO: 501597 - DNA, 75 bp, synthetic construct
  source 1..75: mol_type = other DNA
accttattggcaatcgctaactttatcggcacaccgttcgatgtcactggtaaaacggtgatggccactattctg

SEQ ID NO: 501598 - DNA, 75 bp, synthetic construct
  source 1..75: mol_type = other DNA
ttgcgatgggttgtttctacagtctgaacgagaaaatgtacgtccgcattgttgaagaaatagaagcccgtaaac

SEQ ID NO: 501599 - DNA, 75 bp, synthetic construct
  source 1..75: mol_type = other DNA
cttcccaggctggatgctgacgcaaatcggctatgtgccaaacgtcgcccaggctgaccataccatcgaaggttt

SEQ ID NO: 501600 - DNA, 75 bp, synthetic construct
  source 1..75: mol_type = other DNA
agaagatagtctttcaaacattgcctatcacagcaggcatgatccaagaggttcgtatcctctaattagttgggt

SEQ ID NO: 501601 - DNA, 75 bp, synthetic construct
  source 1..75: mol_type = other DNA
acactccactgggggggtcgagttcttttataaacttgataaagtcatcgaatcgggaagtcaggctggatgggt

SEQ ID NO: 501602 - DNA, 75 bp, synthetic construct
  source 1..75: mol_type = other DNA
tcagctcttggcgtaagtgttgactggctgctcaatggcacctctgattcgaatgttagatttgttgggcacgtt

SEQ ID NO: 501603 - DNA, 75 bp, synthetic construct
  source 1..75: mol_type = other DNA
gcaaatttctaaactcttagaactacgttggtgggagttatcattagaagagatttcggatctggagtttggaaa

SEQ ID NO: 501604 - DNA, 75 bp, synthetic construct
  source 1..75: mol_type = other DNA
ttatcaccatcaatcgcacggccgagatgctgtcagctgcgtatcgagcaaatgactgccagaccggcgactgga

SEQ ID NO: 501605 - DNA, 75 bp, synthetic construct
  source 1..75: mol_type = other DNA
gtggaaaagggtatacgaacacgatttgctgcgacttcataaagtggtctgaggacaacgcaggttatcagttcg

SEQ ID NO: 501606 - DNA, 75 bp, synthetic construct
  source 1..75: mol_type = other DNA
gtctggctggataacgtcgatctggaatgggtgaaacagaatatttgggccgagtactggaggaaggtcacggac

SEQ ID NO: 501607 - DNA, 75 bp, synthetic construct
  source 1..75: mol_type = other DNA
atccgtttccccgagaagagcggcaagatgcaggatcacggcgttattgccgttgataccgcagtgaagctctga

SEQ ID NO: 501608 - DNA, 75 bp, synthetic construct
  source 1..75: mol_type = other DNA
atgaaaatgccagaaaggcccgtaacagggccggggcgttctcacgcccaaaacaaccaccacacgccccacggg

SEQ ID NO: 501609 - DNA, 75 bp, synthetic construct
  source 1..75: mol_type = other DNA
ctctcttggccgtcacagagagcacacgttggccgcgctgagacatctgaaagtcggtgggcgtctggtagcagt

SEQ ID NO: 501610 - DNA, 75 bp, synthetic construct
  source 1..75: mol_type = other DNA
gactggatgacgatggataattacgtttatgccagagggaagtcgtttaccaacgagtttgaagacacagggatc

SEQ ID NO: 501611 - DNA, 75 bp, synthetic construct
  source 1..75: mol_type = other DNA
cgcaacgaagcgcgctgatatcggatgcgaaggcgacaatcagcctctggcagtcagagcttctgctgggcacca

SEQ ID NO: 501612 - DNA, 75 bp, synthetic construct
  source 1..75: mol_type = other DNA
cctgtttacctctttctcagggagtttagtctccaggattcccggggcggttcacctaacctttatataagaaac

SEQ ID NO: 501613 - DNA, 75 bp, synthetic construct
  source 1..75: mol_type = other DNA
gccggacaagaaaagcacgaagcagaccagcgcgggtgcgccggttgtccgtatcacagaccttaacaaacaggc

SEQ ID NO: 501614 - DNA, 75 bp, synthetic construct
  source 1..75: mol_type = other DNA
cgaacaactggccgcgtgtggaagagttgttccgccgcaaaatctggcaactgaaagagctgggttatgcagccg

SEQ ID NO: 501615 - DNA, 75 bp, synthetic construct
  source 1..75: mol_type = other DNA
cgcaggaagcgcgcaaccagctggttgtctcggtgccgagcggtaacttcggcgatttgacggcgggcctgctgg

SEQ ID NO: 501616 - DNA, 75 bp, synthetic construct
  source 1..75: mol_type = other DNA
gaactgaaagtggcgctggggttaaactctgctaactccattaacatcagccgtttgctggcgcagatttgctac

SEQ ID NO: 501617 - DNA, 75 bp, synthetic construct
  source 1..75: mol_type = other DNA
cgaataagctgtatcaggtggcgcttttcacggctgccaaccgaaaccgctcgatggtgaatattctcactgaac

SEQ ID NO: 501618 - DNA, 75 bp, synthetic construct
  source 1..75: mol_type = other DNA
ataagaaaagtggtgaagatgtggatgctgcaatacaaaaaatgcaaattgctaaccgtgctgaaaccgcacggg

SEQ ID NO: 501619 - DNA, 75 bp, synthetic construct
  source 1..75: mol_type = other DNA
gcttgatgggttgctggctaacagactgatcaacattaatcctgatgggcatattgaggctagctcattcctacg

SEQ ID NO: 501620 - DNA, 75 bp, synthetic construct
  source 1..75: mol_type = other DNA
accagtgcaggtgcaccggttgtacggatcactgacctcaacaaacaggccggtgatgaagtgacgttcagcatc

SEQ ID NO: 501621 - DNA, 75 bp, synthetic construct
  source 1..75: mol_type = other DNA
accagcgcaggtgcgccggttgtccgtatcacagaccttaacaaacaggccggtgatgaagtgaccttcagcatc

SEQ ID NO: 501622 - DNA, 75 bp, synthetic construct
  source 1..75: mol_type = other DNA
ttgttgctgatgacaccattctgccaacggcagatcaccctgaattcaaaaaaatcatgatcaacgacgtactgc

SEQ ID NO: 501623 - DNA, 75 bp, synthetic construct
  source 1..75: mol_type = other DNA
cgcaggaagcacgtaaccagttggttgtctcggtgccgagcggaaacttcggtgatttgacggcggggctgctgg

SEQ ID NO: 501624 - DNA, 75 bp, synthetic construct
  source 1..75: mol_type = other DNA
ccgcaaaatctggcaactgaaagagctgggttatgcagccgtggatgatgaaaccacgcaacagacaatgcgtga

SEQ ID NO: 501625 - DNA, 75 bp, synthetic construct
  source 1..75: mol_type = other DNA
gcgttttatcgctgccactaacgtgaacgataccgtgccgcgtttcctgcacgacgggcagtggtcccccaaagc

SEQ ID NO: 501626 - DNA, 75 bp, synthetic construct
  source 1..75: mol_type = other DNA
tcactgattggccttggtgtcgggcaactgctgttcggccctttgagcgacaaaatcgggcgcaagcgcccgtta

SEQ ID NO: 501627 - DNA, 75 bp, synthetic construct
  source 1..75: mol_type = other DNA
aaacactgttaaaaatgagtctggcaattacggtgtgttatacactggcattcctggttgctctcaccagaatcg

SEQ ID NO: 501628 - DNA, 75 bp, synthetic construct
  source 1..75: mol_type = other DNA
gcatctcgcaggaaatgaaaaatttgatttcagggatatggttacgtgtatacgtgaagatgtgcaacagattgt

SEQ ID NO: 501629 - DNA, 75 bp, synthetic construct
  source 1..75: mol_type = other DNA
agggttaggcgagcattttacccgctttaaaacacgctatctggcaggaaaaacgcaacatctgggtagcatcac

SEQ ID NO: 501630 - DNA, 75 bp, synthetic construct
  source 1..75: mol_type = other DNA
tgcctatcgcctgcgtgaagcccagagtgaagaccaatattgcaccgctgaggtagccatcgcacttttagatat

SEQ ID NO: 501631 - DNA, 75 bp, synthetic construct
  source 1..75: mol_type = other DNA
tatacttatccttgccagaaaaatttctaaaaacatcatcagtcatgagtgttatatcatcaaaacttaaaacat

SEQ ID NO: 501632 - DNA, 75 bp, synthetic construct
  source 1..75: mol_type = other DNA
accacacactcgacgcacttggcctgcgctgcccggaaccggtgatgatggtgcgcaaaacagtgcgcaatatgc

SEQ ID NO: 501633 - DNA, 75 bp, synthetic construct
  source 1..75: mol_type = other DNA
aagcaggcattttcactgcctgatattgattatgccgatatttcccaacgcgaacagttggccgcggcggtgatg

SEQ ID NO: 501634 - DNA, 75 bp, synthetic construct
  source 1..75: mol_type = other DNA
tcatgttacaggtgatgaacgattcgagttccgcagcatggtgagtaacattcgagaagatgcaaaagatgttat

SEQ ID NO: 501635 - DNA, 75 bp, synthetic construct
  source 1..75: mol_type = other DNA
cgcgctttgaagtgatggtgcctggcggaacgctgcgttcccataacagtgggatcattggcccttcagcggcgt

SEQ ID NO: 501636 - DNA, 75 bp, synthetic construct
  source 1..75: mol_type = other DNA
tggaactttgctaccaaacgcgtggcgctggctgataccaataacccgcctcctgactggcagtacgcttaccag

SEQ ID NO: 501637 - DNA, 75 bp, synthetic construct
  source 1..75: mol_type = other DNA
cgctgccctggcggacgtcaccctgaaaacaaatccgagaatcgctgatgccagctccatccaggagttacttga

SEQ ID NO: 501638 - DNA, 75 bp, synthetic construct
  source 1..75: mol_type = other DNA
ctgccgttttttggcgcttttgccctgctgacttttgaggaaatccacatgtcattaccacactgcccaaaatgc

SEQ ID NO: 501639 - DNA, 75 bp, synthetic construct
  source 1..75: mol_type = other DNA
cttgctacaaagcttttcttggatggaaaaattgaccttacttcaatgattgctgtacagggaaatattgatact

SEQ ID NO: 501640 - DNA, 75 bp, synthetic construct
  source 1..75: mol_type = other DNA
ttttgggaatggtttttttcattctttcttggcatgcattagtgaaactcaacaagataagtttaatcgagaagt

SEQ ID NO: 501641 - DNA, 75 bp, synthetic construct
  source 1..75: mol_type = other DNA
ggcttgccaacgccctgttgctgcgtcatgtgatccagttcaacagtcgtgatttcgccgttcgtgcaaaatatg

SEQ ID NO: 501642 - DNA, 75 bp, synthetic construct
  source 1..75: mol_type = other DNA
gcgatccagagaaaggtattaaataccctttatttaacaatgcgctatatcccaacatggctattctcgacccga

SEQ ID NO: 501643 - DNA, 75 bp, synthetic construct
  source 1..75: mol_type = other DNA
cgatgcaatcactattactcaaagcaggtttaaacacagaacaggttgcgcaactggagtccgaaaatgaaggag

SEQ ID NO: 501644 - DNA, 75 bp, synthetic construct
  source 1..75: mol_type = other DNA
acggtctgacgcaggggctgctatctgtcctgcgtcttttctggggcaacctgattaactttatggccaactggc

SEQ ID NO: 501645 - DNA, 75 bp, synthetic construct
  source 1..75: mol_type = other DNA
caattcaacgcgaattacaagtttcgatgcaatcactattactcaaagcaggtttaaacacagaacaggttgcac

SEQ ID NO: 501646 - DNA, 75 bp, synthetic construct
  source 1..75: mol_type = other DNA
gtgagtatcgtctcactcgctttattccttaaagtctggcggccgaaaaataccgaaacggcaatcagcatggga

SEQ ID NO: 501647 - DNA, 75 bp, synthetic construct
  source 1..75: mol_type = other DNA
gcaggcattaaggcgtgctatccgctcaataatggtgaacgcgcgtttgattatacgagctggaatgaatttacc

SEQ ID NO: 501648 - DNA, 75 bp, synthetic construct
  source 1..75: mol_type = other DNA
caggggctgattagcgccgagcagctggcacaggcgctggcagagcaaaacggcgtggcgtgggaatccatcgat

SEQ ID NO: 501649 - DNA, 75 bp, synthetic construct
  source 1..75: mol_type = other DNA
gaatgatattttggcgttaaagcaggcattttcactgcctgatattgattatgccgatatttcccaacgcgaaca

SEQ ID NO: 501650 - DNA, 75 bp, synthetic construct
  source 1..75: mol_type = other DNA
gtcagagagttcagttagctcaggttagttgggttaagaataagtattcggtggccgccctgaatcgtttgaaac

SEQ ID NO: 501651 - DNA, 75 bp, synthetic construct
  source 1..75: mol_type = other DNA
taatcaccgcgttgattgacggcaagccacaatacttacgcactgaaatgagcggtcaacatgctcgattgattc

SEQ ID NO: 501652 - DNA, 75 bp, synthetic construct
  source 1..75: mol_type = other DNA
gggcaaaactggcatgggcaatcagtattattttgttgttaataacactgatttacacccttcatttttatccct

SEQ ID NO: 501653 - DNA, 75 bp, synthetic construct
  source 1..75: mol_type = other DNA
gtctgctcgcgctgaattgacggcgattaatccggcttggccgaaagcggcattattcaccaccgtgatgccttt

SEQ ID NO: 501654 - DNA, 75 bp, synthetic construct
  source 1..75: mol_type = other DNA
ggcgaaaaccagtatcgaagcggatttctttgccgtctcgcaacctgacttgttgtcgctgtatggcgatttaca

SEQ ID NO: 501655 - DNA, 75 bp, synthetic construct
  source 1..75: mol_type = other DNA
aatgcacgaaatgtcagagcattttttactgatgctccaccgcccaattctttctgccagttattaagcgaagag

SEQ ID NO: 501656 - DNA, 75 bp, synthetic construct
  source 1..75: mol_type = other DNA
atgatatgctcgtctcaatgttgctgaactccgggcatggtattttcagcgataagaacgacgatgatggcaacg

SEQ ID NO: 501657 - DNA, 75 bp, synthetic construct
  source 1..75: mol_type = other DNA
ttcaggcacaaacttacttcatcgatttgccttgctgggcgcagagtgaagaagaggacgattcgcctgatacgc

SEQ ID NO: 501658 - DNA, 75 bp, synthetic construct
  source 1..75: mol_type = other DNA
gtctgcgccgttacttcgaacagcgcgtcgccacacataaagaagctcactggcaggcttattatcaagctcgcc

SEQ ID NO: 501659 - DNA, 75 bp, synthetic construct
  source 1..75: mol_type = other DNA
atgatatgctcgtttcaatgttgttgaactccggtcatggtattttcagcgataacgatgaacaagaaacgaaag

SEQ ID NO: 501660 - DNA, 75 bp, synthetic construct
  source 1..75: mol_type = other DNA
ctgaataaaattaaaatggtacatccggacatcatcctttcgccgcagctttttggcagcgaaattctggcgcgg

SEQ ID NO: 501661 - DNA, 75 bp, synthetic construct
  source 1..75: mol_type = other DNA
cgaggaggattcaataaacttgtgaaaggaaacaagcatacgatgaatcgtaaagatcactttattgtttgcggt

SEQ ID NO: 501662 - DNA, 75 bp, synthetic construct
  source 1..75: mol_type = other DNA
actgaagcgccttggggagtggtctggtgaaaaccccctgactggtattcgcaagtttcgtgaggaagaaaagga

SEQ ID NO: 501663 - DNA, 75 bp, synthetic construct
  source 1..75: mol_type = other DNA
ctattgggtgcctctaacccgagttccgcagaggatgcgttatatctgaaagagtacatcaactctccagatatg

SEQ ID NO: 501664 - DNA, 75 bp, synthetic construct
  source 1..75: mol_type = other DNA
ctgcctcttgttttgcagtggttgatggaaggcgaaacggtagtgtcagaactagaaaagccctccaagagtaaa

SEQ ID NO: 501665 - DNA, 75 bp, synthetic construct
  source 1..75: mol_type = other DNA
tcgcatgatggttcactcaaagagctttgtctcaatttttttcgagcgattgataaaatcatcggttcaaattat

SEQ ID NO: 501666 - DNA, 75 bp, synthetic construct
  source 1..75: mol_type = other DNA
atgaataacaacgaaccagatgctctgcctgatcccgcattaggctatatttttcagaacgatattctggcgtta

SEQ ID NO: 501667 - DNA, 75 bp, synthetic construct
  source 1..75: mol_type = other DNA
aagcaggcattttcactgcctgatattgattatgccgatatttcccaacgcgaacagttggccgcggcattaaaa

SEQ ID NO: 501668 - DNA, 75 bp, synthetic construct
  source 1..75: mol_type = other DNA
cggaacttgctgacgtatctgcgtgaggacgccccgcaagttgtgagtgcgcgtaatgcgattcagtcattgcag

SEQ ID NO: 501669 - DNA, 75 bp, synthetic construct
  source 1..75: mol_type = other DNA
tccttggtgtgcactttttaatatgtctgttcgtaaactatctactggtaaatggctctgtgaatgctatcccta

SEQ ID NO: 501670 - DNA, 75 bp, synthetic construct
  source 1..75: mol_type = other DNA
atctgcacgcagttcttgcagaaatgaaacggttgggtgaatgggaaggtgataacccgctggaaggtatcaggc

SEQ ID NO: 501671 - DNA, 75 bp, synthetic construct
  source 1..75: mol_type = other DNA
atcaatgataacgctgtcacgctttcggcgttcgttaatcgctggtacgacatgcacggcaaaacgttatcatcc

SEQ ID NO: 501672 - DNA, 75 bp, synthetic construct
  source 1..75: mol_type = other DNA
gagccaaggtattctcgatattgtagtaaaactttttattttggcccagttacgtgccctcgcaacgggagcaga

SEQ ID NO: 501673 - DNA, 75 bp, synthetic construct
  source 1..75: mol_type = other DNA
cagagtatcaggacactggtgttcatgcttataaagacaaccctttcattgaggccttaccacctattcaagaac

SEQ ID NO: 501674 - DNA, 75 bp, synthetic construct
  source 1..75: mol_type = other DNA
tgatgggtgtcctgagcacttttctggtcagctggctgggaaaagatgcgatggccggcgtgggattggcggaca

SEQ ID NO: 501675 - DNA, 75 bp, synthetic construct
  source 1..75: mol_type = other DNA
atcgtgctcgttttgtttcagagattataaaaaagaaagaagcaatagaggagcaaatggaaagcgctatcagta

SEQ ID NO: 501676 - DNA, 75 bp, synthetic construct
  source 1..75: mol_type = other DNA
tttgatctcacgaaaaccgcctataaagtatttttcatctttttacgtatctatcaggatgcgataggaaaagat

SEQ ID NO: 501677 - DNA, 75 bp, synthetic construct
  source 1..75: mol_type = other DNA
taaaaacaggtcaattgaagcagttatacaagaagttaataaccaagatgagatagatttgttaatcgcaagatt

SEQ ID NO: 501678 - DNA, 75 bp, synthetic construct
  source 1..75: mol_type = other DNA
attcaggcattttctgagcttgacctctctctgctggctaatgcaccgttgtttatgctcggtgtttttctcgtt

SEQ ID NO: 501679 - DNA, 75 bp, synthetic construct
  source 1..75: mol_type = other DNA
ctatcgccggttattgatgaactggataaggcaatggcaattcacgagaataataactcgccccataccggagaa

SEQ ID NO: 501680 - DNA, 75 bp, synthetic construct
  source 1..75: mol_type = other DNA
ctatcgcctgtaattgatgaactggataaggcgatggcaattcacgaaaataataacgcgccccacaccggagaa

SEQ ID NO: 501681 - DNA, 75 bp, synthetic construct
  source 1..75: mol_type = other DNA
aggcaactgcggccagcggcagcggagacggacggtatccgtcggggctgtgcgcgggtgctgaaatcataccgg

SEQ ID NO: 501682 - DNA, 75 bp, synthetic construct
  source 1..75: mol_type = other DNA
aggcaactgcggccagcggcagaggagacggacggtatccgtcagggctgcatgatggtgctgaaatcagcacgg

SEQ ID NO: 501683 - DNA, 75 bp, synthetic construct
  source 1..75: mol_type = other DNA
cattatgtcgtcatgatcgaccccgcttcctttattgatgtcattccctatagctcatggcaaattgatgccgcc

SEQ ID NO: 501684 - DNA, 75 bp, synthetic construct
  source 1..75: mol_type = other DNA
ccccgagccaggtaaaatttcgaaagatggttatcgtgtctggttaacatcgcataacgatttaggcattatccg

SEQ ID NO: 501685 - DNA, 75 bp, synthetic construct
  source 1..75: mol_type = other DNA
gcagacgactgcaacatctatgtaagcagccggaaagcgggcgaacatctgctggatgaaatcagggggtttgtg

SEQ ID NO: 501686 - DNA, 75 bp, synthetic construct
  source 1..75: mol_type = other DNA
tcaaccggaagctgcgctgccagatgtggcggcagtggaagaggccgcgaagccgggccagaatgctgcaaaagg

SEQ ID NO: 501687 - DNA, 75 bp, synthetic construct
  source 1..75: mol_type = other DNA
tcttgccgtcagtgatagcaaaaacctgaataagattaagatggtgcaccctgatattatcctttcgccgcaatt

SEQ ID NO: 501688 - DNA, 75 bp, synthetic construct
  source 1..75: mol_type = other DNA
cgaaccactgaaatctgtcgtcaagtttgcgctggcaactggtctgagaaagtcgaacatcataaatctggaatg

SEQ ID NO: 501689 - DNA, 75 bp, synthetic construct
  source 1..75: mol_type = other DNA
ccgcctgtttatgaaccaaagccagtatcaactcagacaaaggcaaagcatcttgccatgataaaggccattctc

SEQ ID NO: 501690 - DNA, 75 bp, synthetic construct
  source 1..75: mol_type = other DNA
ttcaggaaatgggcggctgggagtctatcgaaatggtgcgtaggtacgcacaccttgcacctaatcatttgacag

SEQ ID NO: 501691 - DNA, 75 bp, synthetic construct
  source 1..75: mol_type = other DNA
gtgcgcatcattcagggttctgccaccgttgcctgtttaacggcggtgggactggtgatgccggtcattgaacaa

SEQ ID NO: 501692 - DNA, 75 bp, synthetic construct
  source 1..75: mol_type = other DNA
tctgccaccgttgcctgtttaacggcggtgggactggtgatgccggttattgaacaactgaactactccggtgcg

SEQ ID NO: 501693 - DNA, 75 bp, synthetic construct
  source 1..75: mol_type = other DNA
ggtccggcactaggcgaagcgttaaccgggatggggctgccgattgcgattacctgcttcgtgctggccgctgca

SEQ ID NO: 501694 - DNA, 75 bp, synthetic construct
  source 1..75: mol_type = other DNA
ggtaagatcttacatgaaaccggcgcggtcgatcagattgccgtcaaaatgctcaaatccttcggtcacagccgc

SEQ ID NO: 501695 - DNA, 75 bp, synthetic construct
  source 1..75: mol_type = other DNA
tttggattcagcctgtcgctgatcctgctgccgctggtgctggtagggttgaagacgattgccgcgcgttttgta

SEQ ID NO: 501696 - DNA, 75 bp, synthetic construct
  source 1..75: mol_type = other DNA
tggttcgattgttgtcagccacgttaacgacgccggtttctggttgttcggtaaatttaccggcgcgaccgaagc

SEQ ID NO: 501697 - DNA, 75 bp, synthetic construct
  source 1..75: mol_type = other DNA
acttttcagaacgtgtttcttttattcaatctgagtgtagttatcagaggatgaaaggaaatgatccagttgtta

SEQ ID NO: 501698 - DNA, 75 bp, synthetic construct
  source 1..75: mol_type = other DNA
ggccgcgcctgcttggtattcgcgtggttattgctgaatcgttcgaacgtattcaccgttccaatttaatcggga

SEQ ID NO: 501699 - DNA, 75 bp, synthetic construct
  source 1..75: mol_type = other DNA
aaagattttaactcctacggttcgcggcgtggcaaccatgaagtaatgatgcgcggcacattcgccaatattcgc

SEQ ID NO: 501700 - DNA, 75 bp, synthetic construct
  source 1..75: mol_type = other DNA
gtaaggacgcgttgcaggccaaagataaaacttaccactactacagcctgccgcttgctgccaaatcactgggcg

SEQ ID NO: 501701 - DNA, 75 bp, synthetic construct
  source 1..75: mol_type = other DNA
gcgcggcacattcgccaatattcgcattcgtaacgaaatggtgcccggtgttgaaggtggaatgacgcggcattt

SEQ ID NO: 501702 - DNA, 75 bp, synthetic construct
  source 1..75: mol_type = other DNA
ggcgcggtaaccatgaggtgatgatgcgcggcacattcgccaatattcgcattcgtaacgaaatggtgcccggtg

SEQ ID NO: 501703 - DNA, 75 bp, synthetic construct
  source 1..75: mol_type = other DNA
gtccgttgcccgatcctatcgaaactgcaatcaaaaaaggcgatttaaccgtcggtgcggtactgtccggcaacc

SEQ ID NO: 501704 - DNA, 75 bp, synthetic construct
  source 1..75: mol_type = other DNA
aagcgaagcagggcgattacctggtggggacggatgaaaacgtgttggtacttaatcgcacctatgctaatcgga

SEQ ID NO: 501705 - DNA, 75 bp, synthetic construct
  source 1..75: mol_type = other DNA
gggggtgacggccagcggtaaaaaaatcccgcaggtcaccatcacccgcagcgacggcgaccgccatcattttgc

SEQ ID NO: 501706 - DNA, 75 bp, synthetic construct
  source 1..75: mol_type = other DNA
attattggcaatgcccgtaatatagtcataaccagcagcgacgaaattgcccggggtattattacccaattgcaa

SEQ ID NO: 501707 - DNA, 75 bp, synthetic construct
  source 1..75: mol_type = other DNA
gctgggggattcagtcaccactgaccatatctctccggcgggcagtatgaggtgtactggcaatagcggacacta

SEQ ID NO: 501708 - DNA, 75 bp, synthetic construct
  source 1..75: mol_type = other DNA
cgctggcaggatggtaactcggttaccgaagaggatatccacgcgctggctggctggttgaaaaatgcccatgct

SEQ ID NO: 501709 - DNA, 75 bp, synthetic construct
  source 1..75: mol_type = other DNA
atttgccgccagtaacgaactggaagtgaatgccacgcataaagatcgccagccggtcgattatgttatgaacgg

SEQ ID NO: 501710 - DNA, 75 bp, synthetic construct
  source 1..75: mol_type = other DNA
cgcggatggtagccaggaagtcgtaccctgccgttgtcgtatcgacaccgcgacggagttgacctactaccagaa

SEQ ID NO: 501711 - DNA, 75 bp, synthetic construct
  source 1..75: mol_type = other DNA
gatgatgcaacacgcgcagaatctggagttcgaagaagcggcacaaattcgtgaccagttgcatcagctgcgtga

SEQ ID NO: 501712 - DNA, 75 bp, synthetic construct
  source 1..75: mol_type = other DNA
ggctactgttcggggattgaaaactactcgcgcttcctctccggtcgtggaccgggtgagccaccgccgacgctg

SEQ ID NO: 501713 - DNA, 75 bp, synthetic construct
  source 1..75: mol_type = other DNA
acctgttattactggaaaaagaaggtgtggttcagcgctctccattaaggcgaggcatggcaacatactggtttc

SEQ ID NO: 501714 - DNA, 75 bp, synthetic construct
  source 1..75: mol_type = other DNA
atgatcaagccttccagcgcggtactttccgcgttcgtggcgaggtgattgatatcttcccggcagaatcggatg

SEQ ID NO: 501715 - DNA, 75 bp, synthetic construct
  source 1..75: mol_type = other DNA
cggaagacctcaccgaatatctcgaagaacacggcgagcgcgtgcgttatcttcactccgacattgataccgttg

SEQ ID NO: 501716 - DNA, 75 bp, synthetic construct
  source 1..75: mol_type = other DNA
aaacgctggtggagtacggtttccgcctgccatctgcgctggataaccgtccactgaaatttgaagagttcgaag

SEQ ID NO: 501717 - DNA, 75 bp, synthetic construct
  source 1..75: mol_type = other DNA
tgcattcttcggtggagcaggagcgccaggccgttggtaatgactccaacttattgatagtgttttatgttcaga

SEQ ID NO: 501718 - DNA, 75 bp, synthetic construct
  source 1..75: mol_type = other DNA
ttgatggcgaaaaaatatgttctttgatatctaaatattaccctgagttctgggattttgaatcaatcaattacg

SEQ ID NO: 501719 - DNA, 75 bp, synthetic construct
  source 1..75: mol_type = other DNA
agtccttttatcatatatagatgcaggtaaattatatgttgatattctcaagggaaataccgacatcccgctgaa

SEQ ID NO: 501720 - DNA, 75 bp, synthetic construct
  source 1..75: mol_type = other DNA
tgtggttcagcgctctcccttaaggcgaggcatggcaacatactggattctgaaaggagagaggcaggcggggca

SEQ ID NO: 501721 - DNA, 75 bp, synthetic construct
  source 1..75: mol_type = other DNA
tgtggttcagcgctctcccttaagccgaggcatggcaacatactgggttctgaaaggagagaggcaggcgggaca

SEQ ID NO: 501722 - DNA, 75 bp, synthetic construct
  source 1..75: mol_type = other DNA
tgtggttcagcgctctcccttaagacgaggcatggcaacatactgggttctgaaaggagagaggcaggcgggcca

SEQ ID NO: 501723 - DNA, 75 bp, synthetic construct
  source 1..75: mol_type = other DNA
agctcattcttagcggtgaagaaagccagcgcggccagcgtttgcaggcttacttcggttacctcaaccaggcgc

SEQ ID NO: 501724 - DNA, 75 bp, synthetic construct
  source 1..75: mol_type = other DNA
cgaacagatctatcgtgatgagcaaggtttaagcctgatgccgcacaccgcgcagccggtactgccagcgcaaaa

SEQ ID NO: 501725 - DNA, 75 bp, synthetic construct
  source 1..75: mol_type = other DNA
acggcggttggcgtggtgaaaggcgactggatggcgctggtacaggcggtcaaaaacgactccagctcgaacgtg

SEQ ID NO: 501726 - DNA, 75 bp, synthetic construct
  source 1..75: mol_type = other DNA
caacgcgccgagctggaagagaaacagagcgagcaacaaacactgttatatgagcagcgcgcccaacaggcgaag

SEQ ID NO: 501727 - DNA, 75 bp, synthetic construct
  source 1..75: mol_type = other DNA
tgatgtcccgtaccggtggtctgggcgcaccgcgtggtcaggcattctggccggttcgcgggccgacgctgcatc

SEQ ID NO: 501728 - DNA, 75 bp, synthetic construct
  source 1..75: mol_type = other DNA
aaaaagccgcccaggaacgcagcctcgccgcgcaactggatgccgcgtttcgtcagggtgaacataccggtattc

SEQ ID NO: 501729 - DNA, 75 bp, synthetic construct
  source 1..75: mol_type = other DNA
tcagaaatggagcgcagcggcaacagccaggtgttctatctcaaatacagcaaagcggaagatctggtcgatgtg

SEQ ID NO: 501730 - DNA, 75 bp, synthetic construct
  source 1..75: mol_type = other DNA
gatactgacctgaaatcgttcattgaaaccgtcggcgctaacctcaataaaaccatcatcatgggaccgggcgta

SEQ ID NO: 501731 - DNA, 75 bp, synthetic construct
  source 1..75: mol_type = other DNA
cgtgatgactggtgcaccattatccatagtgatattgaagccacccggttgagcctgaaaacctgtctgggacaa

SEQ ID NO: 501732 - DNA, 75 bp, synthetic construct
  source 1..75: mol_type = other DNA
cgaaggtggaaggacagaccagcctcgacgtggtgtttggtgagcgcaaactgaaaaccaccgtgctggctaacg

SEQ ID NO: 501733 - DNA, 75 bp, synthetic construct
  source 1..75: mol_type = other DNA
acactgcgcagccggtactgccagcgcaaaaccaggcattgccgccggaagtacgcgcgttcctcaatgccggga

SEQ ID NO: 501734 - DNA, 75 bp, synthetic construct
  source 1..75: mol_type = other DNA
gtgctggaaagcttgaccaaaaacagcggcgagaaccaaccagcaacgctgaaatcacagattgttgctgatgaa

SEQ ID NO: 501735 - DNA, 75 bp, synthetic construct
  source 1..75: mol_type = other DNA
ataccaacaaatggtattacggaaacgctgatacaacttttgagccattaaaccatttacctgactactgcaatg

SEQ ID NO: 501736 - DNA, 75 bp, synthetic construct
  source 1..75: mol_type = other DNA
atgtgcaaactgactaaagaagaagaatacagcatcatcagtcggacaatgacaaatattcgttcactacgcatg

SEQ ID NO: 501737 - DNA, 75 bp, synthetic construct
  source 1..75: mol_type = other DNA
aatggttttgtatccggttgccagatggtgtattgaaaatactgccctgaaatttacccagcctcatttctggaa

SEQ ID NO: 501738 - DNA, 75 bp, synthetic construct
  source 1..75: mol_type = other DNA
ggagacccaccgacatttcatgaactacgtagtctgtccgcgaggctatatcggaaccagattggctacaagttt

SEQ ID NO: 501739 - DNA, 75 bp, synthetic construct
  source 1..75: mol_type = other DNA
agttgctcgaaatgcaggaaaaactgaatgttgttattgatgaacgtcgtgaggacgctgaacgtgaggctgcgg

SEQ ID NO: 501740 - DNA, 75 bp, synthetic construct
  source 1..75: mol_type = other DNA
atgtgcaaactgactaaagaagaagaatacagcatcatcagtcggacaatgacgaatattcgttcactgcgcatg

SEQ ID NO: 501741 - DNA, 75 bp, synthetic construct
  source 1..75: mol_type = other DNA
atgatgtgcaaactgactaaagaagaagaatacagcatcatcagtcggacaatgacgaatattcgttcactacgc

SEQ ID NO: 501742 - DNA, 75 bp, synthetic construct
  source 1..75: mol_type = other DNA
gcattggtgatttatggctcggtgggcgcagtagaagaagcgttatcaccaaaccgtcagcggtttaggtcgctt

SEQ ID NO: 501743 - DNA, 75 bp, synthetic construct
  source 1..75: mol_type = other DNA
atggcccgttcagctaaacctcgcaaacaaaaatcccgcaaacaatccacccgctcagcccccctgttgcgatgg

SEQ ID NO: 501744 - DNA, 75 bp, synthetic construct
  source 1..75: mol_type = other DNA
gtagcatagatactatttcgcagggcatagaagcgcgtgtgcgcatttgtattaatcagctgctttatacaccgc

SEQ ID NO: 501745 - DNA, 75 bp, synthetic construct
  source 1..75: mol_type = other DNA
agaattaaaggcgctgacgcaatcactcttcatgcgtggcttgaccgatatgaaacaatcctcagcgagaggggt

SEQ ID NO: 501746 - DNA, 75 bp, synthetic construct
  source 1..75: mol_type = other DNA
acggcgatgatcgccggtgatttagcgctgaaagccgccgatgtgcatatcggttttctcgaccgttttagcggc

SEQ ID NO: 501747 - DNA, 75 bp, synthetic construct
  source 1..75: mol_type = other DNA
gcgttccggatgcgggcgcaatcggcattatgacgctaactcctggcgaaacggcgatgatcgccggtgatttag

SEQ ID NO: 501748 - DNA, 75 bp, synthetic construct
  source 1..75: mol_type = other DNA
ttttcatgcatacttatggcctgagtacttttagttactcaattattttctccttctcagttttatttttcataa

SEQ ID NO: 501749 - DNA, 75 bp, synthetic construct
  source 1..75: mol_type = other DNA
gattatgattttaaatacagattactgttctggtgtatttctctctgcggaatggttttgtatccggttgcaaaa

SEQ ID NO: 501750 - DNA, 75 bp, synthetic construct
  source 1..75: mol_type = other DNA
aagcagcagccgcgagggggattacatggagggcgcagacggcaatgtgtacgtcatgcgccaaaccttcaaaaa

SEQ ID NO: 501751 - DNA, 75 bp, synthetic construct
  source 1..75: mol_type = other DNA
tgcgtatacgggggtccgggcgcactggctcgatctgaagttcgggcaaaagaaaaaagtgaacgtgaagcgacg

SEQ ID NO: 501752 - DNA, 75 bp, synthetic construct
  source 1..75: mol_type = other DNA
gcagaatgtattgttattccctgtaataccgcgcattactggttcaaagaattaaaagatgcttgtcatattgat

SEQ ID NO: 501753 - DNA, 75 bp, synthetic construct
  source 1..75: mol_type = other DNA
tattatccgctatctatacattcattaaaatgattgcgggttttatcatcggtaaggtagtagcaatttatacag

SEQ ID NO: 501754 - DNA, 75 bp, synthetic construct
  source 1..75: mol_type = other DNA
gtcgcgataataattttattagtatttgctcctttaggcttcatattttctaaatcaatatcgttgattctattt

SEQ ID NO: 501755 - DNA, 75 bp, synthetic construct
  source 1..75: mol_type = other DNA
gcgttaaagcgggcaggcattagcaacttccgcttccatgacctgaggcatacctgggcaagctggctggttcag

SEQ ID NO: 501756 - DNA, 75 bp, synthetic construct
  source 1..75: mol_type = other DNA
gcggcgaaaatgcagtgggaacgcctgcaacgcggcgttgcgtcattctcgttacaactggcggaagggcgggca

SEQ ID NO: 501757 - DNA, 75 bp, synthetic construct
  source 1..75: mol_type = other DNA
gtggacgagattgaacacactggcgcaccggaccgcctgactatccgggcgcgaagtgctgattttcgtgaaacg

SEQ ID NO: 501758 - DNA, 75 bp, synthetic construct
  source 1..75: mol_type = other DNA
ggagcggcgacgttcagcatcaccctggcgcgtggccgaacagatttgtacccggaacagcccgccagcgtctgt

SEQ ID NO: 501759 - DNA, 75 bp, synthetic construct
  source 1..75: mol_type = other DNA
accagaaaggaattgaatcgttagggtttaactatatcaccccggatgcagatggccaaaaaaatgtgatgaaaa

SEQ ID NO: 501760 - DNA, 75 bp, synthetic construct
  source 1..75: mol_type = other DNA
ggcagcctgagttcacagataaaacactctccaggaaaaccggggcggttcatttacctgatgtcacttttgaag

SEQ ID NO: 501761 - DNA, 75 bp, synthetic construct
  source 1..75: mol_type = other DNA
caaatcgatatgcagcgacgtgttgcttgggtaaaccctgaagacagtaagtcaaaccgcgctattggggtcgca

SEQ ID NO: 501762 - DNA, 75 bp, synthetic construct
  source 1..75: mol_type = other DNA
accacaaccattaatgcggagctacgccgactctggcgcagcggttcagtcataagaaaagagcgcaaaacaggc

SEQ ID NO: 501763 - DNA, 75 bp, synthetic construct
  source 1..75: mol_type = other DNA
ggtcgcttttcttaccaggtaaacccgatgcagttcgggtgtggcaacccgcttactcacttgtttaaccagcta

SEQ ID NO: 501764 - DNA, 75 bp, synthetic construct
  source 1..75: mol_type = other DNA
aatcgccacagcactgaataccccaaccacagccattaattcggagttacgccgactctggcgcgacggcttagt

SEQ ID NO: 501765 - DNA, 75 bp, synthetic construct
  source 1..75: mol_type = other DNA
tcagtcgtcaggaattgctctggcttatgagtctgactgaagactgtccggatatgcaccaggaactgcttaacc

SEQ ID NO: 501766 - DNA, 75 bp, synthetic construct
  source 1..75: mol_type = other DNA
cagagaatgaaacgaaaaaggaaactagcgctgctgatgaaaataagcctcaaggtcaaggtgtgggcgcatttt

SEQ ID NO: 501767 - DNA, 75 bp, synthetic construct
  source 1..75: mol_type = other DNA
tctctggcaggagaaagtggatgcaatgcaggagtctgccacccgtcagcgtgaacaggatactattcggaagtt

SEQ ID NO: 501768 - DNA, 75 bp, synthetic construct
  source 1..75: mol_type = other DNA
caacgcctgcggtcaggaagatggtaagcgcatcatttaaaccgtctttcgcctccctttcctgtttccgatact

SEQ ID NO: 501769 - DNA, 75 bp, synthetic construct
  source 1..75: mol_type = other DNA
ggtcgcttttcttaccagataaacccgatgccgttcaggtgcggcaatccacttaccaacatgtttaaccagcta

SEQ ID NO: 501770 - DNA, 75 bp, synthetic construct
  source 1..75: mol_type = other DNA
atgaccattctggactacatcgcagccaatccggggtgcagcggaagtgaaatcgccacggcactgaatacccag

SEQ ID NO: 501771 - DNA, 75 bp, synthetic construct
  source 1..75: mol_type = other DNA
aagagattaataagataatttctttttgtatggtaaaaggggttcaacctcaagatttagttacgtcgatatttg

SEQ ID NO: 501772 - DNA, 75 bp, synthetic construct
  source 1..75: mol_type = other DNA
gactattgcctcgaaacaactgctggcggcggtagggcagagtcgactgattcaactgtgggaacagctgttttc

SEQ ID NO: 501773 - DNA, 75 bp, synthetic construct
  source 1..75: mol_type = other DNA
caaccgccgccattcttgaacgcggcagctccctgttgccgaaaggcattaaaagcgtgactggcaatttctcgc

SEQ ID NO: 501774 - DNA, 75 bp, synthetic construct
  source 1..75: mol_type = other DNA
ccgcgacaccctgcgagcgttgctcgataacaatatcgttccggtaatcaatgagaacgatgctgtcgctacggc

SEQ ID NO: 501775 - DNA, 75 bp, synthetic construct
  source 1..75: mol_type = other DNA
agaaaaaatacgatttctctaccccgtacaccatttccggtattcaggcgctggtgaaaaaaggtaacgaaggca

SEQ ID NO: 501776 - DNA, 75 bp, synthetic construct
  source 1..75: mol_type = other DNA
aatgaagacctgctgaaagcagtgaatgatgcaattgcggaaatgcaaaaagacggcactctgcaagctctttct

SEQ ID NO: 501777 - DNA, 75 bp, synthetic construct
  source 1..75: mol_type = other DNA
aggtaaaaaagttggcgttggtctggggactaactatgaagagtggctgcggcagaatgttcagggtgttgatgt

SEQ ID NO: 501778 - DNA, 75 bp, synthetic construct
  source 1..75: mol_type = other DNA
aggcggatcgcgccgtctgaaccgtgcccatatcgttgaacttgttcgccagtgcgcgcagttacatgccgccgg

SEQ ID NO: 501779 - DNA, 75 bp, synthetic construct
  source 1..75: mol_type = other DNA
cgcaggtgctgctgttcgtgattttaccgggcgcgctgccggaaattttaaccgggctgcgcatcggcctcggcg

SEQ ID NO: 501780 - DNA, 75 bp, synthetic construct
  source 1..75: mol_type = other DNA
cgctggctggccaaacgcatttaccgctgctcctgttgtcggagaggtattaagcaatcgctcatcgagtaaaag

SEQ ID NO: 501781 - DNA, 75 bp, synthetic construct
  source 1..75: mol_type = other DNA
ggcgtcagtcgttacaacagcgatgcattacgccgtattgccggacaccactcgcaagaaattgatgcaatactg

SEQ ID NO: 501782 - DNA, 75 bp, synthetic construct
  source 1..75: mol_type = other DNA
ccgcgggtagcaagccaggcgtcattggcgacgtgatggaaggtatcccggttggtacgttgttccatgcccagg

SEQ ID NO: 501783 - DNA, 75 bp, synthetic construct
  source 1..75: mol_type = other DNA
taaaactcggcaccagtgtgctaacaggcggatcgcgccgtctgaaccgtgcccatatcgtagaacttgttcgcc

SEQ ID NO: 501784 - DNA, 75 bp, synthetic construct
  source 1..75: mol_type = other DNA
gaacataaaacactatcaataagttggagtcattacccaaaacatcttggcgttgaggcgtcactaaaaccgacc

SEQ ID NO: 501785 - DNA, 75 bp, synthetic construct
  source 1..75: mol_type = other DNA
aaatatcatttaaaaaagcttcctcctcataattctcctgtcttcgaccagattgtcttattggatggtgaaaaa

SEQ ID NO: 501786 - DNA, 75 bp, synthetic construct
  source 1..75: mol_type = other DNA
tcggaactggcggcatgagtaccaaattgcaggccgcggacgtggcttgccgtgcgggtatcgacaccattattg

SEQ ID NO: 501787 - DNA, 75 bp, synthetic construct
  source 1..75: mol_type = other DNA
tttgggtgggtaatagatggtatgcatacggtcatatttattcaattggtggtaagtacattaaaagaaaccagg

SEQ ID NO: 501788 - DNA, 75 bp, synthetic construct
  source 1..75: mol_type = other DNA
atggtttgaaaataattgaaccacaggtacatgtggataatagaggtttttttcttgaaacttattcagaggaaa

SEQ ID NO: 501789 - DNA, 75 bp, synthetic construct
  source 1..75: mol_type = other DNA
ggatattaaagtatttgacagtgtaagtaaaaaagaaagtgttagtcagccaataaaaaaagacttcattcctga

SEQ ID NO: 501790 - DNA, 75 bp, synthetic construct
  source 1..75: mol_type = other DNA
gaacccgcgaaacatgatcccctgacatggacggcgcaggaccggattaccgcgttatggtggatatttaccggc

SEQ ID NO: 501791 - DNA, 75 bp, synthetic construct
  source 1..75: mol_type = other DNA
ggtgaatatgaaattagtacatctgggacgtcaggcgctgatgggggttatggccgtggcgctggttgcgggtat

SEQ ID NO: 501792 - DNA, 75 bp, synthetic construct
  source 1..75: mol_type = other DNA
ctttaaacacagccagacccattgcgcgcattgccgtaaattactcgaccgcattaccctcgttcgcgacggcaa

SEQ ID NO: 501793 - DNA, 75 bp, synthetic construct
  source 1..75: mol_type = other DNA
gcgccgcctgcgtgatctgcatatagggatagttgaagaccaggaagagcgcgaactattcaagatctacgggga

SEQ ID NO: 501794 - DNA, 75 bp, synthetic construct
  source 1..75: mol_type = other DNA
ttattgacaaagggttaatagttgaagtcggcgagctaacgataaaattcaattacgaaggcaaggaatatgaaa

SEQ ID NO: 501795 - DNA, 75 bp, synthetic construct
  source 1..75: mol_type = other DNA
atgcaaataatcattgattacctttgccacgctgtaaatactctttttggtttttatcaacaaccattcctcaaa

SEQ ID NO: 501796 - DNA, 75 bp, synthetic construct
  source 1..75: mol_type = other DNA
aaatgcataacaatcaaaagacatatcttttagaaatcattattaaaagaatggactctcttgataaaaagaaga

SEQ ID NO: 501797 - DNA, 75 bp, synthetic construct
  source 1..75: mol_type = other DNA
gaactgaaaatgaaaccggaagaagagatggaacagcaactgccacccgggatcagtgaatccggtgaagtggtg

SEQ ID NO: 501798 - DNA, 75 bp, synthetic construct
  source 1..75: mol_type = other DNA
aacagccgcaacagccgcaacagccgcaacagccgcaacagccgcaacagccgcaacagccggtgtctcctgcca

SEQ ID NO: 501799 - DNA, 75 bp, synthetic construct
  source 1..75: mol_type = other DNA
tgaatccggtgaagtggtggatatggccgcttatgaggcatggcaacaggaaaatcatccggacatccagcagca

SEQ ID NO: 501800 - DNA, 75 bp, synthetic construct
  source 1..75: mol_type = other DNA
tcgcctggctgggaattgctatcagccactatcgcttccgtcgtggctatgtattgcaggggcatgatattaacg

SEQ ID NO: 501801 - DNA, 75 bp, synthetic construct
  source 1..75: mol_type = other DNA
gcgtagctatgattgtcggcttctctttccagggaaccgagctgatcggtattgctgcaggcgagtccgaagatc

SEQ ID NO: 501802 - DNA, 75 bp, synthetic construct
  source 1..75: mol_type = other DNA
aatgataagaagtcagatgcaggtgtgagtgttccggcaggggggatcgagcaggagctgaaaatgaaaccggaa

SEQ ID NO: 501803 - DNA, 75 bp, synthetic construct
  source 1..75: mol_type = other DNA
tacctgccgcccgccagggagatccgctgacgccgcatgataaaccgaagcatccccctcatccccgaaaaatcg

SEQ ID NO: 501804 - DNA, 75 bp, synthetic construct
  source 1..75: mol_type = other DNA
ttggtaatgatgtctggattggcagtcatgtggtcattaatccaggcgtcaccatcggggaaaattcggttattg

SEQ ID NO: 501805 - DNA, 75 bp, synthetic construct
  source 1..75: mol_type = other DNA
cattgtcgacgactacacggtaacgatcggtgataacgtattgattgcacccaatgttactctttccgttacggg

SEQ ID NO: 501806 - DNA, 75 bp, synthetic construct
  source 1..75: mol_type = other DNA
gccgcaacagccgcaacagccgcaacagccgaacagccgcaacagccgcaacagccgcaacagccgcaacagccg

SEQ ID NO: 501807 - DNA, 75 bp, synthetic construct
  source 1..75: mol_type = other DNA
acaaaggcacccagcacgacggttattacgagaccgtcatcaccgccgggtcatccactgtctttatcgatggtc

SEQ ID NO: 501808 - DNA, 75 bp, synthetic construct
  source 1..75: mol_type = other DNA
tcatccaccgtttttatcgatggtctccccgcagcccgtcagggagatccgctgacgccgcatgctaaaccgaag

SEQ ID NO: 501809 - DNA, 75 bp, synthetic construct
  source 1..75: mol_type = other DNA
cgacggccttgctccgcagcggttacgacattcgaaccgtgcaggatctgctcggccattccgacgtctctacga

SEQ ID NO: 501810 - DNA, 75 bp, synthetic construct
  source 1..75: mol_type = other DNA
cggatgaagtggttcgcatcctcggttttctggaaggcgagcatcgtttgttcgcccagcttctgtatggaacgg

SEQ ID NO: 501811 - DNA, 75 bp, synthetic construct
  source 1..75: mol_type = other DNA
ttacgacattcgaaccgtgcaggatctgctcggccattccgacgtctctacgacgatgatttacacgcatgtgct

SEQ ID NO: 501812 - DNA, 75 bp, synthetic construct
  source 1..75: mol_type = other DNA
catcacatgtatgaccagacctttcagcgcgccttcaaacgtgccgtagaacaagcaggcatcacgaagcccgcc

SEQ ID NO: 501813 - DNA, 75 bp, synthetic construct
  source 1..75: mol_type = other DNA
cttgcttaatttttatttaaatgatattcgcatggcgatagatttagaaatatggaaacctgtgggtaattatgt

SEQ ID NO: 501814 - DNA, 75 bp, synthetic construct
  source 1..75: mol_type = other DNA
gcattagcaacggaaaatattgttctgaatacgcttcagaacaaaacaggtgcggttccgacaggaataccgttt

SEQ ID NO: 501815 - DNA, 75 bp, synthetic construct
  source 1..75: mol_type = other DNA
acccgacccagctgctggcggacctgatgaccatgcaggagcacctgccgggcaaggcgtttaacgagatgacgc

SEQ ID NO: 501816 - DNA, 75 bp, synthetic construct
  source 1..75: mol_type = other DNA
actcgccatgtaccgccagtttgccgatgcggtgcaggtgccgatcctcgccaacattaccgaatttggcgcaac

SEQ ID NO: 501817 - DNA, 75 bp, synthetic construct
  source 1..75: mol_type = other DNA
attaacgctaaccatgcgttgctggcacagcgtgccggatatcaggcaatttatctctccggcggcggtgtggcg

SEQ ID NO: 501818 - DNA, 75 bp, synthetic construct
  source 1..75: mol_type = other DNA
agcaggcatcacgaagcccgccacaccgcaaccctccgccactcgttcgcgacggccttgctccgcagcggttac

SEQ ID NO: 501819 - DNA, 75 bp, synthetic construct
  source 1..75: mol_type = other DNA
cttcaggagatcggaagacctcggccgtcgcggcgcttgccgcgcgtcaggctggcgtcaaccgagagggtaaat

SEQ ID NO: 501820 - DNA, 75 bp, synthetic construct
  source 1..75: mol_type = other DNA
cgtcgcggcgcttgccggtggtgctgacccggatgaagtggttcgcatcctcggttttctggaaggcgagcatcg

SEQ ID NO: 501821 - DNA, 75 bp, synthetic construct
  source 1..75: mol_type = other DNA
ttatctttccggcggtggcgtggcggcagggtcgctggggctgcccgatctcggtatttctacccttgatgacgt

SEQ ID NO: 501822 - DNA, 75 bp, synthetic construct
  source 1..75: mol_type = other DNA
acgatcggtgtcaacagtttggtctagcggttcctgtcattcattctctagtttttaatcgttcgacagagtatg

SEQ ID NO: 501823 - DNA, 75 bp, synthetic construct
  source 1..75: mol_type = other DNA
cagataacgccggggataccatgaaatcgtatgctatttggaataataaaggtggcgtaggaaagacctacttat

SEQ ID NO: 501824 - DNA, 75 bp, synthetic construct
  source 1..75: mol_type = other DNA
agcggctgaaagaatatgctgcagccaatgtgttcggagccgactttgacccgttcctgattcgcgctgctcaga

SEQ ID NO: 501825 - DNA, 75 bp, synthetic construct
  source 1..75: mol_type = other DNA
tatggaagaagttattcactgggcctgtaacgttgaccagaaaaaattaaaagaatttttaatggggacgcctgc

SEQ ID NO: 501826 - DNA, 75 bp, synthetic construct
  source 1..75: mol_type = other DNA
atcattagaggcggcaaaaatattgctttagatccaaatggggggttcttaaagaatttctatcgtcccggcgat

SEQ ID NO: 501827 - DNA, 75 bp, synthetic construct
  source 1..75: mol_type = other DNA
agcgaaggattcgcaaacagaagaatggaatggatacggtcgtcttttatttaccgaggtatcccgtaaagtatt

SEQ ID NO: 501828 - DNA, 75 bp, synthetic construct
  source 1..75: mol_type = other DNA
ttgatgccaaccgcaagacagtgcgtgatcgccttgatgaactgaaagccaaggcgcgccagcctcttactgatt

SEQ ID NO: 501829 - DNA, 75 bp, synthetic construct
  source 1..75: mol_type = other DNA
tcgaagtctagtaaaggtgtacttcgagggcttcactttcaacgtccgccttttgagcaagcaaagttggtaaga

SEQ ID NO: 501830 - DNA, 75 bp, synthetic construct
  source 1..75: mol_type = other DNA
ctcctatattgtctaaaaaagacatggagcttccaacattaaaaaatattagacaatcgttattggatggatttt

SEQ ID NO: 501831 - DNA, 75 bp, synthetic construct
  source 1..75: mol_type = other DNA
gaacgtcggcaaaaatgccgtacgcatccgcgattttgaacaggctgctcaagatcttgatgaaattgaagctat

SEQ ID NO: 501832 - DNA, 75 bp, synthetic construct
  source 1..75: mol_type = other DNA
atcgctggctgaagaacgatattattcgcggtaattttcaaccggatgaaaaattacgaatgagtttgctgacat

SEQ ID NO: 501833 - DNA, 75 bp, synthetic construct
  source 1..75: mol_type = other DNA
ttgatgccaaccgcaagacagtgcgtgatcgccttgatgagctgaaagccaaggcacgccagcctcttactgatt

SEQ ID NO: 501834 - DNA, 75 bp, synthetic construct
  source 1..75: mol_type = other DNA
ttctcagtaagaatcttgccccacatttgaaaatgccggaaggtaatttttccctgcgtgactggcttgatgatg

SEQ ID NO: 501835 - DNA, 75 bp, synthetic construct
  source 1..75: mol_type = other DNA
tgattcacgaggtagatctcattatagaaactatcgtgcagcagctagagaaattggtataaaacctaccaagag

SEQ ID NO: 501836 - DNA, 75 bp, synthetic construct
  source 1..75: mol_type = other DNA
tggtgatgcagaattgcgaatacttaaaggtgaggatggtaaactgacgtattctcaggcaaaaggctatgaaca

SEQ ID NO: 501837 - DNA, 75 bp, synthetic construct
  source 1..75: mol_type = other DNA
atgatccggatgtcgggcggttcatggtaacggatccgatcagtttagctggcgggataaatctttatcagtatg

SEQ ID NO: 501838 - DNA, 75 bp, synthetic construct
  source 1..75: mol_type = other DNA
tgacgcgcattttgctggcgttacttgcggcggtattgatcggcattccggtcgggatcgcgatggggataagcc

SEQ ID NO: 501839 - DNA, 75 bp, synthetic construct
  source 1..75: mol_type = other DNA
tttttgcaccggtggcgatgtcggcgctggcgggggtgaaaagcgcgcagcaggttcgcattcgtgccgcccagt

SEQ ID NO: 501840 - DNA, 75 bp, synthetic construct
  source 1..75: mol_type = other DNA
acatcagccctgacggtaaaccgtacaaccggacaaaatttttatgggacggaatgcggctggcgcaggagagca

SEQ ID NO: 501841 - DNA, 75 bp, synthetic construct
  source 1..75: mol_type = other DNA
tatcagaggccaggaaatctggctgtagcggagtttatcttattgtccataaaggacttttcagtcgtgtggttt

SEQ ID NO: 501842 - DNA, 75 bp, synthetic construct
  source 1..75: mol_type = other DNA
gtgatctgcctgtcggcaagttcaagactaaacatgtgcaatacacgcgtaagaacccggttccgggcatcatca

SEQ ID NO: 501843 - DNA, 75 bp, synthetic construct
  source 1..75: mol_type = other DNA
caaactattctggctaacatgcgttctaacatcgtgctgggcggcagccgtctcggtgaggacacgttggatcaa

SEQ ID NO: 501844 - DNA, 75 bp, synthetic construct
  source 1..75: mol_type = other DNA
atgtatgaagaccgtttggaaactatcaaggcagtttgtgaaaaacttaaaaaccaaccacgcaaaccgaagaca

SEQ ID NO: 501845 - DNA, 75 bp, synthetic construct
  source 1..75: mol_type = other DNA
ccgtgaagatgtggaaaaacatctggcgaaagccccggcgaaagagtctgcaccggcagttgctgctccggcggc

SEQ ID NO: 501846 - DNA, 75 bp, synthetic construct
  source 1..75: mol_type = other DNA
gactccagaaagatggagtgtatcgatggtgaagtcgtcgtaacagttaacgaaaagctcaaagatttcagagac

SEQ ID NO: 501847 - DNA, 75 bp, synthetic construct
  source 1..75: mol_type = other DNA
ttattgaaaaagcaaatgcaatgactgtatttcagtctgcagaccagattgaagaaatccttcaaaaggttgaac

SEQ ID NO: 501848 - DNA, 75 bp, synthetic construct
  source 1..75: mol_type = other DNA
ccaatcgtggcgaatcacgtaattaacgctaaacgtaacggggcgaaaatcatcgtctgcgatccgcgtaaaatt

SEQ ID NO: 501849 - DNA, 75 bp, synthetic construct
  source 1..75: mol_type = other DNA
gaaaacggactggcaaatcatcagtgaaatcgccacccgtatgggttatccgatgcactacaacaacacccagga

SEQ ID NO: 501850 - DNA, 75 bp, synthetic construct
  source 1..75: mol_type = other DNA
ccaaacgtctgggtattgaagatgaggcattggtttgggtgcactcgcgtaaaggcaaaattatcacccgtgcgc

SEQ ID NO: 501851 - DNA, 75 bp, synthetic construct
  source 1..75: mol_type = other DNA
gctgaccgatcaaaaaggtttgtataccgctgacccgcgcagcaatccgcaggcagaactgattaaagatgttta

SEQ ID NO: 501852 - DNA, 75 bp, synthetic construct
  source 1..75: mol_type = other DNA
caatcgacaaactcaccgacgagtatccaatggtactgtcaacggtgcgtgaagttgggcactactcctgtcgtt

SEQ ID NO: 501853 - DNA, 75 bp, synthetic construct
  source 1..75: mol_type = other DNA
cagcgccagtgagatccgtcaggcggcgaggatgtatgcccaggcagaaagcgcatctatcctgtggggcatggg

SEQ ID NO: 501854 - DNA, 75 bp, synthetic construct
  source 1..75: mol_type = other DNA
agcgccaatcgacaaactcaccgacgagtacccgatggtactgtcaacggtgcgtgaagttggtcactactcttg

SEQ ID NO: 501855 - DNA, 75 bp, synthetic construct
  source 1..75: mol_type = other DNA
atgagcaatgctattaacgaaattgataataccgatttagtgttcgttttcgggtacaacccggcggattcccac

SEQ ID NO: 501856 - DNA, 75 bp, synthetic construct
  source 1..75: mol_type = other DNA
gtgaaagatccggctaaccgcgagaaattcgccaaagcctggggcgtggaaagcctgccggcccataccggttat

SEQ ID NO: 501857 - DNA, 75 bp, synthetic construct
  source 1..75: mol_type = other DNA
taagccacatgcgggcgttaacccggttcgtggtcagaacaacgtgcagggtgcctgcgatatgggcgcgctgcc

SEQ ID NO: 501858 - DNA, 75 bp, synthetic construct
  source 1..75: mol_type = other DNA
ccatcctgtggggcatgggtgtaacccagttctaccagggcgtggaaaccgtgcgttctctgaccagcctcgcga

SEQ ID NO: 501859 - DNA, 75 bp, synthetic construct
  source 1..75: mol_type = other DNA
gtgtggatcactattgcaccgttcgtgacagatctcgatgatggttacgccagactatcaaatatgctgcttgag

SEQ ID NO: 501860 - DNA, 75 bp, synthetic construct
  source 1..75: mol_type = other DNA
tatagcgtggttataccgttatgtgaatggtggattcaccctaacaccaggaattggtgtggagtggagcagcca

SEQ ID NO: 501861 - DNA, 75 bp, synthetic construct
  source 1..75: mol_type = other DNA
ccatcgccttttcgattctgcagttacgcaggcatttatttatcgatttagttggcggcgcgttgctggcgtcgg

SEQ ID NO: 501862 - DNA, 75 bp, synthetic construct
  source 1..75: mol_type = other DNA
ctggcccgttcaatgcaaatttccgcactggtggctggcgtattttatcttctctggcccacaaccatgcattat

SEQ ID NO: 501863 - DNA, 75 bp, synthetic construct
  source 1..75: mol_type = other DNA
aacagaaggtgagttaatcttcgccattaagacaactggcacatttaaaaacaaaaccattccacaacctcatga

SEQ ID NO: 501864 - DNA, 75 bp, synthetic construct
  source 1..75: mol_type = other DNA
acgcgataagctatcaggtaaagaactggatgcaatgatgagcgcctcagaccatcggagagccgaaatcactca

SEQ ID NO: 501865 - DNA, 75 bp, synthetic construct
  source 1..75: mol_type = other DNA
gaagtgaaaaattctcccatggtggataagtcatgggacggcctattttccaccgggatcacttatcgtttctga

SEQ ID NO: 501866 - DNA, 75 bp, synthetic construct
  source 1..75: mol_type = other DNA
cgcctgaccggtcttgcgtgttctgccaatgcccagcagaaagggtcagaagagcagcgttatgctattgcaccg

SEQ ID NO: 501867 - DNA, 75 bp, synthetic construct
  source 1..75: mol_type = other DNA
agaagaggcgaattgcgttaaaaatgacgcaaaccgaactggcaaccaaagccggtgttaaacagtcagagaatt

SEQ ID NO: 501868 - DNA, 75 bp, synthetic construct
  source 1..75: mol_type = other DNA
tttgcagacggtcgttactgggtttttgaactgggcttaccatatttcaaacagtcattgctcaaagaggtaaga

SEQ ID NO: 501869 - DNA, 75 bp, synthetic construct
  source 1..75: mol_type = other DNA
gtctcacaggaatctttgtactttgtgcgttatatctgacattttcattaccatttcattatgaagaacgtctac

SEQ ID NO: 501870 - DNA, 75 bp, synthetic construct
  source 1..75: mol_type = other DNA
cggccagcggcgtcacgctgtcggacggaactgaaattctgctctggccggggaaaacacatcttctgcctgagc

SEQ ID NO: 501871 - DNA, 75 bp, synthetic construct
  source 1..75: mol_type = other DNA
gataaccccgaagaaacatgcctggcgagagaaattatcaagcggttaggtattaataccgataacttcgccagt

SEQ ID NO: 501872 - DNA, 75 bp, synthetic construct
  source 1..75: mol_type = other DNA
atgcgtttaccctgggaactggctggaacacgcgcattggtgccatttcagttgatgctactaaatcgcacagta

SEQ ID NO: 501873 - DNA, 75 bp, synthetic construct
  source 1..75: mol_type = other DNA
gtggcaaccggaaaattgccgccccttatcgcggcgcggttgtactggttaattttgataccgatcagcgcaagc

SEQ ID NO: 501874 - DNA, 75 bp, synthetic construct
  source 1..75: mol_type = other DNA
tcaacggcgcgaaattctctgccactgattaccctgtgctggcaaaagtgtttccttcgctggtattacctgaag

SEQ ID NO: 501875 - DNA, 75 bp, synthetic construct
  source 1..75: mol_type = other DNA
cagcggatgtttgcccgcgtgggtaaagaatgctggatagaaccaccgattaatcttgcctacggaactcatatc

SEQ ID NO: 501876 - DNA, 75 bp, synthetic construct
  source 1..75: mol_type = other DNA
atggcagttatagtcagtcgaatacttatcagcaggcaggggccagcatttcagggggcgtggtcgcctggtctg

SEQ ID NO: 501877 - DNA, 75 bp, synthetic construct
  source 1..75: mol_type = other DNA
tagcggcagcagtaaggattatcagttgagttattccaacaacctgcgacggataagctataccctcgcggcaag

SEQ ID NO: 501878 - DNA, 75 bp, synthetic construct
  source 1..75: mol_type = other DNA
cgaaccgtctttccgaaacgtttgctgtgatgaatgcgccaggaattaaagatgcttatgtcaatgggcaaaaat

SEQ ID NO: 501879 - DNA, 75 bp, synthetic construct
  source 1..75: mol_type = other DNA
cattgccgattattaccagaatgattttggtcgcaaaaatagcttttccgccaatatgagccagtcattgccaga

SEQ ID NO: 501880 - DNA, 75 bp, synthetic construct
  source 1..75: mol_type = other DNA
aattccgccatcagttaatgtggctattgataaacaacaagggctttcatgcacaatcaccttcggtaaacagat

SEQ ID NO: 501881 - DNA, 75 bp, synthetic construct
  source 1..75: mol_type = other DNA
cagcaatagtcgtgttattactcggcattgaagcgcatgcaactgaagaaacttttgatactcattttatgatgg

SEQ ID NO: 501882 - DNA, 75 bp, synthetic construct
  source 1..75: mol_type = other DNA
ggctcgatggtcgcgaataattattacgcgttcactttggggactggctggaatacacgcattggtgccatttcc

SEQ ID NO: 501883 - DNA, 75 bp, synthetic construct
  source 1..75: mol_type = other DNA
gttccgaatttgaacattccgcgcgaaatgcggctatcgcctggctgatgaagtcgtttggcaatttccatcatg

SEQ ID NO: 501884 - DNA, 75 bp, synthetic construct
  source 1..75: mol_type = other DNA
gcaccttatccctactagtgaaggtcagggcgagaatggagatattggtcccctgcgtccgctcaccattaattt

SEQ ID NO: 501885 - DNA, 75 bp, synthetic construct
  source 1..75: mol_type = other DNA
tggagcttcccgcgacgttttttgttaatggaggtacagactggacgctacgaaccccgattatcgttttccccg

SEQ ID NO: 501886 - DNA, 75 bp, synthetic construct
  source 1..75: mol_type = other DNA
ctgagtggtgttgatggtggtgaaaaagtggactgggcgaatgcccgcccggtgcaggttttaattaatggcgtc

SEQ ID NO: 501887 - DNA, 75 bp, synthetic construct
  source 1..75: mol_type = other DNA
tattgagccgattaccgttggtctgcatgcttttcatttagcgcaaggttgtgagaataaaaacgttattattat

SEQ ID NO: 501888 - DNA, 75 bp, synthetic construct
  source 1..75: mol_type = other DNA
tttgccacacgtggatcggaaaactatttcgtacagatagcgcagcttcagagcggtcattatattgcgggtgtt

SEQ ID NO: 501889 - DNA, 75 bp, synthetic construct
  source 1..75: mol_type = other DNA
tttataacccgggaggtaacgaaaaatcctggacatttcgctcaccttcaggccacggattatccggtattaatg

SEQ ID NO: 501890 - DNA, 75 bp, synthetic construct
  source 1..75: mol_type = other DNA
tcagggaaaacagtaaggcacagattaaaccgtggtggctcacgtgaagcaaacaatgccctgtggacaatagcc

SEQ ID NO: 501891 - DNA, 75 bp, synthetic construct
  source 1..75: mol_type = other DNA
tcaggaaaaacagtcaggcacagattaaatcgaggtggctcacgtgaagcaaacaatgccctgtggacaatagcc

SEQ ID NO: 501892 - DNA, 75 bp, synthetic construct
  source 1..75: mol_type = other DNA
atgatgccggtaactcgcttgcgggcattgccgtccttgaacaattgacgaaacaattagggcgttcagtttatt

SEQ ID NO: 501893 - DNA, 75 bp, synthetic construct
  source 1..75: mol_type = other DNA
ggcggcgtgcaggatgtgcgtttgggaagcgccattggtattggacgcggcgggaatgcaccatcaggtcacttg

SEQ ID NO: 501894 - DNA, 75 bp, synthetic construct
  source 1..75: mol_type = other DNA
aaaatcagggcgaaaatggcgatattggtcccctgcgtccgttcactattaatctgcggacgggtgaaatatcca

SEQ ID NO: 501895 - DNA, 75 bp, synthetic construct
  source 1..75: mol_type = other DNA
ggcagccacactgctggcagttgcaggtgataatcccgaacgtttaaaaaatgaagcagcactggcatcgctttg

SEQ ID NO: 501896 - DNA, 75 bp, synthetic construct
  source 1..75: mol_type = other DNA
ataaaagcgttaagagcggatgggcaaccattaacgtttggttatgaagtcaatgatatccatggtcataatatt

SEQ ID NO: 501897 - DNA, 75 bp, synthetic construct
  source 1..75: mol_type = other DNA
ggcgtgtgtaggactggtactgatgatttggctgtatcaggcgctgaaattcagaaaccgcgcgctggcgctgga

SEQ ID NO: 501898 - DNA, 75 bp, synthetic construct
  source 1..75: mol_type = other DNA
atcgttaatgtgccggtagctcagtatgaggagtatatccgacagtgggaattatataaggataaaatgaaatga

SEQ ID NO: 501899 - DNA, 75 bp, synthetic construct
  source 1..75: mol_type = other DNA
gagtcatcgttaatttgccggtagctcagtgtgaggagtatatccgacagtgggaactatataaggctgagatga

SEQ ID NO: 501900 - DNA, 75 bp, synthetic construct
  source 1..75: mol_type = other DNA
tattacgaagccacggtatcagatacggccagaacgtccggaatgagtaaccgggagtttgaagcctttgaagtg

SEQ ID NO: 501901 - DNA, 75 bp, synthetic construct
  source 1..75: mol_type = other DNA
aaaaccagaaacagcgtaaagagctggggctgattgtcactcttaccttcttcagcatgttgttctgggcctttg

SEQ ID NO: 501902 - DNA, 75 bp, synthetic construct
  source 1..75: mol_type = other DNA
gctgggcgccagcgagatccatccgacattcctctatttgtcgctggcgattatcgtctgcggctatggcctgtt

SEQ ID NO: 501903 - DNA, 75 bp, synthetic construct
  source 1..75: mol_type = other DNA
ctgagcccactgggcccggttgcggttattgcggcaaacctgatgaccgaagagggcatggaaaccattcgtcag

SEQ ID NO: 501904 - DNA, 75 bp, synthetic construct
  source 1..75: mol_type = other DNA
agaaggtatggaaactatccgtcgggaaattaatgcccgccaccgcgatatcagcctgatggtgaatgccgccgg

SEQ ID NO: 501905 - DNA, 75 bp, synthetic construct
  source 1..75: mol_type = other DNA
ctgagcccgctgggaccggtggcggtcatcgcggccaacctgatgactgaagaaggtatggaaactatccgtcat

SEQ ID NO: 501906 - DNA, 75 bp, synthetic construct
  source 1..75: mol_type = other DNA
tggtttccggtattgtcagttacacccgctggcctgcgctatcagggccaccaaagttatgtatcttttcatctt

SEQ ID NO: 501907 - DNA, 75 bp, synthetic construct
  source 1..75: mol_type = other DNA
tgctgcttaccctcctccagacaggagggtcagtattcgctcaggagattactgacgttgcaaaaaatgtacgtt

SEQ ID NO: 501908 - DNA, 75 bp, synthetic construct
  source 1..75: mol_type = other DNA
gccagcttatccaccagtttacccagcagtcaaaaattgccgccaccaacaaaatccgcgatatggtcagcgtcc

SEQ ID NO: 501909 - DNA, 75 bp, synthetic construct
  source 1..75: mol_type = other DNA
gatgcaacgttgcgtaccaacccgcgtgcggctgatgcctccgctattgcagaactgctcgaggagttgttatga

SEQ ID NO: 501910 - DNA, 75 bp, synthetic construct
  source 1..75: mol_type = other DNA
gatcagtttaactatggtgccaacttgagtcatcagcatcaggggaacgaaacgacagctggggcgaatttaacc

SEQ ID NO: 501911 - DNA, 75 bp, synthetic construct
  source 1..75: mol_type = other DNA
aataacaatccaggggtgtggaaaagcaataccctgtatctggaacgtggatttgcccaacttctcggcacgctt

SEQ ID NO: 501912 - DNA, 75 bp, synthetic construct
  source 1..75: mol_type = other DNA
ggagcaaataagcaaagcgattttgttcaggtcggttaccagtatggctttaataatttattaacgctgtatggc

SEQ ID NO: 501913 - DNA, 75 bp, synthetic construct
  source 1..75: mol_type = other DNA
tcagggggcattgtcgcctggtcgggtggcgttaatctggcgaatcgtctttctgaaacttttgccgtgatgcat

SEQ ID NO: 501914 - DNA, 75 bp, synthetic construct
  source 1..75: mol_type = other DNA
ccagtcattgccagaaggttgggggtctgtgtcattaagtacgttatggcgagattactggggcgtagcggcagt

SEQ ID NO: 501915 - DNA, 75 bp, synthetic construct
  source 1..75: mol_type = other DNA
cgggcaaagttatcaaattgcctacaacaaatttgtgagccaaacgtcgacgcgttttggtctggcggcctggcg

SEQ ID NO: 501916 - DNA, 75 bp, synthetic construct
  source 1..75: mol_type = other DNA
cgctacatcacccaaaaacgcatggtcgagaagcagatgaagatggccgcagaagcgacagaagttgaagaggac

SEQ ID NO: 501917 - DNA, 75 bp, synthetic construct
  source 1..75: mol_type = other DNA
aaacttttagatgatgccaaacaagcaaggaaagaagccaatgcactatatggctttcatgaaaatcatggacgg

SEQ ID NO: 501918 - DNA, 75 bp, synthetic construct
  source 1..75: mol_type = other DNA
gccagcctgaatgcacttattcaacatattgagcagcttaaaacaacctgtacgctgccgactcttgccaatgcg

SEQ ID NO: 501919 - DNA, 75 bp, synthetic construct
  source 1..75: mol_type = other DNA
cgtcacctggtttattcgtcggggagtacaacgccccgttgccattacgattgtagtggtggtgatgctgatcgc

SEQ ID NO: 501920 - DNA, 75 bp, synthetic construct
  source 1..75: mol_type = other DNA
ggggttactcttgacgtcaggaccgacaaagagtgggaggctctgacgtatgatctaactatcggacattgtgac

SEQ ID NO: 501921 - DNA, 75 bp, synthetic construct
  source 1..75: mol_type = other DNA
ttgctcgtgccgatacaggcaaggtgcttacatccaaacaggagagataccaaatccaggtagtcgaaggtgcag

SEQ ID NO: 501922 - DNA, 75 bp, synthetic construct
  source 1..75: mol_type = other DNA
tttggtgatatctggcgcggtatttacgggcaagagaactggctatctaacccgtgggtatgggtaattgagttt

SEQ ID NO: 501923 - DNA, 75 bp, synthetic construct
  source 1..75: mol_type = other DNA
cggtaacgttggtgatcgcatatgggtccgtgaaacattcaacgctttttggctggataacgatgtcattcagga

SEQ ID NO: 501924 - DNA, 75 bp, synthetic construct
  source 1..75: mol_type = other DNA
agggcggggcatctaccaccgaagatcaaatcaagtatggctggaactacgccctgcttatcaatcatggtccgt

SEQ ID NO: 501925 - DNA, 75 bp, synthetic construct
  source 1..75: mol_type = other DNA
tggcatgctgaaaaatcagctcagcgttgccggtcagctcgcccgacgtaatgaatccgcgcaggtggcactgcg

SEQ ID NO: 501926 - DNA, 75 bp, synthetic construct
  source 1..75: mol_type = other DNA
gatgcaggtaactcgcttgcgggcattgccgttcttgaacaattgacgaaacagttagggcgttcggtttattaa

SEQ ID NO: 501927 - DNA, 75 bp, synthetic construct
  source 1..75: mol_type = other DNA
gcctggcgggtggggctaccggcgaaatctggcgttggtggcggtattgtggcgattgttccgcatgaaatggcc

SEQ ID NO: 501928 - DNA, 75 bp, synthetic construct
  source 1..75: mol_type = other DNA
aaaattgtccgttttgaagagataacgcgtacaccgctggaagtgcaagactgtctgttaggtatgctttctgac

SEQ ID NO: 501929 - DNA, 75 bp, synthetic construct
  source 1..75: mol_type = other DNA
ccgtcacaacggcttaccttaatgtgcttattgaagatgaccagggaacgcatttccggctggtgatccgcaacg

SEQ ID NO: 501930 - DNA, 75 bp, synthetic construct
  source 1..75: mol_type = other DNA
ataagtctggcagagatggcgcgcgccattcccccttacaccgaactgatggaatgggcggatgggcaactgtcg

SEQ ID NO: 501931 - DNA, 75 bp, synthetic construct
  source 1..75: mol_type = other DNA
ttggcgatagcgcgcaaaatattagccgtaaagtggtgattagtccctctgctgtcgaacgtatgttagtcactc

SEQ ID NO: 501932 - DNA, 75 bp, synthetic construct
  source 1..75: mol_type = other DNA
gtccgcgcctggttttttagcgaatcgcgcgggggagcctgccgacctggtggaatgtattgccggaaccatcgt

SEQ ID NO: 501933 - DNA, 75 bp, synthetic construct
  source 1..75: mol_type = other DNA
gcctgcgccgttacttcgaacaacgtgttgctacacataaagaagctcactggcaggcttattatcaagctcgcc

SEQ ID NO: 501934 - DNA, 75 bp, synthetic construct
  source 1..75: mol_type = other DNA
atagtactttacgtttagccaacatatttaatgtatcggaagcagcgatgcactggcgactaaaagggctgggta

SEQ ID NO: 501935 - DNA, 75 bp, synthetic construct
  source 1..75: mol_type = other DNA
ataaaggcacccagcatgacggttattatgagaccgccattattgcaggctcctcctccgtctttattgatggta

SEQ ID NO: 501936 - DNA, 75 bp, synthetic construct
  source 1..75: mol_type = other DNA
catccgcctcacccccgtaaaatcgcaggcggctcttcttctgtctttatcgacggcctgcccgccgccagaacc

SEQ ID NO: 501937 - DNA, 75 bp, synthetic construct
  source 1..75: mol_type = other DNA
taatgaaccgtacccgattgatggcctgtccggtgaatatgcggagaaatcccttgaagaatgggcggaacagat

SEQ ID NO: 501938 - DNA, 75 bp, synthetic construct
  source 1..75: mol_type = other DNA
ccaacgttactctttccgttacgggacacccggtacaccatgaattgagaaaaaacggtgagatgtactcttttc

SEQ ID NO: 501939 - DNA, 75 bp, synthetic construct
  source 1..75: mol_type = other DNA
cagaaagaataaaagcaggcaagctatttaccgatatgtgcgaaggcttacctgaaaaaagacttcgtgggaaaa

SEQ ID NO: 501940 - DNA, 75 bp, synthetic construct
  source 1..75: mol_type = other DNA
catccccctcatccccgtaaaatcgccagaggttcttcaaccgtctttattgacggcctgcccgccgccagaacc

SEQ ID NO: 501941 - DNA, 75 bp, synthetic construct
  source 1..75: mol_type = other DNA
taccggctggctgctggtggcggcgggattcgtcggcgcaatcgtcattgccagcgcctacggctggagtatcga

SEQ ID NO: 501942 - DNA, 75 bp, synthetic construct
  source 1..75: mol_type = other DNA
gctgggcagtacctacgcgctgatagccatcggctacaccatggtttacggcattatcggcatgatcaacttcgc

SEQ ID NO: 501943 - DNA, 75 bp, synthetic construct
  source 1..75: mol_type = other DNA
ttagtcgctactgggatcgccgactacctgtcgatccgtttaaactcgccgcagcatggggagcaagagtggagg

SEQ ID NO: 501944 - DNA, 75 bp, synthetic construct
  source 1..75: mol_type = other DNA
tgatggcctgtccggtgaatatgcggagaaatcccttgaagaatgggcggaacagattcgcaaaggagctgacaa

SEQ ID NO: 501945 - DNA, 75 bp, synthetic construct
  source 1..75: mol_type = other DNA
accgaccgggtgattgcgctgacctttgtgattggcgcggcgatggcggcagtggcgggcgtgctgctcggtcag

SEQ ID NO: 501946 - DNA, 75 bp, synthetic construct
  source 1..75: mol_type = other DNA
gcctctattaccaccatgcaggcggtgatctggattgttaccttcctcgccatgttggcgctgacaattttcatc

SEQ ID NO: 501947 - DNA, 75 bp, synthetic construct
  source 1..75: mol_type = other DNA
aagcatgggcgcaaactggtcattgcgttgccgtatatctggttgatcctgctgtttctgctgccatttctgatc

SEQ ID NO: 501948 - DNA, 75 bp, synthetic construct
  source 1..75: mol_type = other DNA
tcagtacaccagtgaggtgttttacaacccgggagggaacgagctcagctggacgttccgcgcaccgcctggctg

SEQ ID NO: 501949 - DNA, 75 bp, synthetic construct
  source 1..75: mol_type = other DNA
ccttcaggccacgggttatccggtattaatgtgcaggaaaccggaagtaattcggcagataacatcggcggcgtg

SEQ ID NO: 501950 - DNA, 75 bp, synthetic construct
  source 1..75: mol_type = other DNA
tgccgaatatattgtcgttaagcggaaaaatgtctttgctctacccacggatatgcctattgaggatggggcttt

SEQ ID NO: 501951 - DNA, 75 bp, synthetic construct
  source 1..75: mol_type = other DNA
aggctttgaaaggttttgcgggtaaggaagtggttttttatcgccctgaagaggatgacggcgatgaaaaagggt

SEQ ID NO: 501952 - DNA, 75 bp, synthetic construct
  source 1..75: mol_type = other DNA
cgttgaccagatcaggaaatccgatggttcgctgcaggaacatgacggcatctgcgaaattcatgttgctaaata

SEQ ID NO: 501953 - DNA, 75 bp, synthetic construct
  source 1..75: mol_type = other DNA
atcaaaaacgtatgctgtatctgttcgttgaccagatcaggaaatccgatggttcgctgcaggaacatgacggca

SEQ ID NO: 501954 - DNA, 75 bp, synthetic construct
  source 1..75: mol_type = other DNA
aacaacgttattttcgggaaaaacaggataaatactgatgctgctcaggcgcttctgcgtcaggatcatgcagac

SEQ ID NO: 501955 - DNA, 75 bp, synthetic construct
  source 1..75: mol_type = other DNA
cctttacgcttaatctcaggaccggtcgcataactatgggacatggtctggatgttacagaagatgtatttgcag

SEQ ID NO: 501956 - DNA, 75 bp, synthetic construct
  source 1..75: mol_type = other DNA
tcccagtgcgcaaaatatgattttattggctcacggcgtgatggtggatttgccgaatatattgtcgttaagcga

SEQ ID NO: 501957 - DNA, 75 bp, synthetic construct
  source 1..75: mol_type = other DNA
tttaacatcggcaacgtttggcaaaatattacgtaaagagctgacggttatcggcagttggatgaactactccag

SEQ ID NO: 501958 - DNA, 75 bp, synthetic construct
  source 1..75: mol_type = other DNA
caccctggcgatgcggttgcctgtgtgccgttattaccctgttttacttgtccagagtgtttgaaagggttttat

SEQ ID NO: 501959 - DNA, 75 bp, synthetic construct
  source 1..75: mol_type = other DNA
atgaaatcagtggtgaatgatactgatggtatcgtgcgcgttgcagaaagcgtcattcctgaaattaaacatcag

SEQ ID NO: 501960 - DNA, 75 bp, synthetic construct
  source 1..75: mol_type = other DNA
gtcagtttatccagcagtcgaaaatttcctcgccggaaaaaatccgcaatatggtcagtgtgcagatccccggta

SEQ ID NO: 501961 - DNA, 75 bp, synthetic construct
  source 1..75: mol_type = other DNA
atgatggtgaaagacgcaaagaactacacgttcaacggtgatgctattctggtagaagccaaaaccggatcgcag

SEQ ID NO: 501962 - DNA, 75 bp, synthetic construct
  source 1..75: mol_type = other DNA
ggaatggtcgaaaactggaaagaagaccagtttatagattggctgcttgaggttattgcggagtgccatcgagtt

SEQ ID NO: 501963 - DNA, 75 bp, synthetic construct
  source 1..75: mol_type = other DNA
ccagcgggcgaaaattcattggtattgagatcaacagcgagtacatcaaaatggggcttcgacggctggatgtcg

SEQ ID NO: 501964 - DNA, 75 bp, synthetic construct
  source 1..75: mol_type = other DNA
atgttgttgctgctaattgtgccgataatgtggttccacaagcatcagcaaaaaagcgtgggagaacacggatga

SEQ ID NO: 501965 - DNA, 75 bp, synthetic construct
  source 1..75: mol_type = other DNA
cctcagcggtggcgatcatcatgttattgctgctgattgtgccaattatgtggttccacaaatatcagcaaaaaa

SEQ ID NO: 501966 - DNA, 75 bp, synthetic construct
  source 1..75: mol_type = other DNA
aaaagtaccgggtaacgtctgggattttccgcgcgtgcgttatttgatggatgaatatgaaaaccacccgacgca

SEQ ID NO: 501967 - DNA, 75 bp, synthetic construct
  source 1..75: mol_type = other DNA
tggctcaggtgtcgtgtccctgaaaatcgactggatcatggagcgctaccagctacctcaaagttaccaacgtat

SEQ ID NO: 501968 - DNA, 75 bp, synthetic construct
  source 1..75: mol_type = other DNA
aaaaccggtttacgcagttccggctcagtgaaacaaaagagattaccaatccgtatgccatgcgtttatacgaat

SEQ ID NO: 501969 - DNA, 75 bp, synthetic construct
  source 1..75: mol_type = other DNA
atccgtatgccatgcgtttatacgaatccctgtgtcagtatcgtaagccggatggctcaggcatcgtctctctga

SEQ ID NO: 501970 - DNA, 75 bp, synthetic construct
  source 1..75: mol_type = other DNA
cgtcacattactccgtggaagagctggcgaaagtaaaaaaaagaaagaccggcaacctgtcaaaacgatgccggg

SEQ ID NO: 501971 - DNA, 75 bp, synthetic construct
  source 1..75: mol_type = other DNA
ctcagtgaaacaaaagagattaccaatccgtacgccatgcgtttatacgaatctctgtgccagtaccgtaaacct

SEQ ID NO: 501972 - DNA, 75 bp, synthetic construct
  source 1..75: mol_type = other DNA
atgccggcgatgaaaaaggctatgaatcttttccctggtttatcaaacgtgcgcacagtccatccagagggcttt

SEQ ID NO: 501973 - DNA, 75 bp, synthetic construct
  source 1..75: mol_type = other DNA
gcaacggaagtgaatgccgcgcttcatgcgaaggatttaactgtcactgcaggcgctaaccgtgtaactgcagat

SEQ ID NO: 501974 - DNA, 75 bp, synthetic construct
  source 1..75: mol_type = other DNA
tccacaggcacaggtgaccacgacagcactttcagcatgaagacggttcatgattcggtccggcagcagggaaca

SEQ ID NO: 501975 - DNA, 75 bp, synthetic construct
  source 1..75: mol_type = other DNA
cgatataccagctaaaggaatgcttgtacgagaagcgatagatcgtgtgctaggtacagatgtaccgtctgcaat

SEQ ID NO: 501976 - DNA, 75 bp, synthetic construct
  source 1..75: mol_type = other DNA
tcagggcgaccacgctggatggcgacggcctgttgcagggcgccggtgcactggcgcttgcaggcgacaccctct

SEQ ID NO: 501977 - DNA, 75 bp, synthetic construct
  source 1..75: mol_type = other DNA
ccacgctgacacaggacggaatattgctggcgaaaggtcatgcgggactcgatgccggcacgctgaataacagtg

SEQ ID NO: 501978 - DNA, 75 bp, synthetic construct
  source 1..75: mol_type = other DNA
agatggcggcttcgatatcacggtcggcaaccacacccagctcgatggtgcggttatcgcttccacggcgacggc

SEQ ID NO: 501979 - DNA, 75 bp, synthetic construct
  source 1..75: mol_type = other DNA
ctgtctggtgtacaggccggtgttaaccacggactgcagcaacagagtgctgacccgaataatggtatcggcgtg

SEQ ID NO: 501980 - DNA, 75 bp, synthetic construct
  source 1..75: mol_type = other DNA
tgaaaaacagtttctgggctcgtcgtacattcttgaccatcttggcctgaaaccggaaaaagattaccgctttct

SEQ ID NO: 501981 - DNA, 75 bp, synthetic construct
  source 1..75: mol_type = other DNA
attacggtgaacccgaaactggatggtctcggaaaggtggacagcagtctgtttgccggactgtatgacctgctc

SEQ ID NO: 501982 - DNA, 75 bp, synthetic construct
  source 1..75: mol_type = other DNA
gggtgtgaagtacgtggcgactgcaaacagattataaaggagatggaggagctcagccttaagcaacagcaggaa

SEQ ID NO: 501983 - DNA, 75 bp, synthetic construct
  source 1..75: mol_type = other DNA
tttaaaggtggcgaaatgagcccatacccgggaatagctggcggttttataggttctggtgcttcagagttgggt

SEQ ID NO: 501984 - DNA, 75 bp, synthetic construct
  source 1..75: mol_type = other DNA
cgtttctgccggtgacagcgtgttactggccgccggtaatgacctgaacatgaacgcgatacaggccggcgaacg

SEQ ID NO: 501985 - DNA, 75 bp, synthetic construct
  source 1..75: mol_type = other DNA
agaaatcatgcggatacgttgaaaaacgtcaacaatcctgaagctcaggctgcgtatggcagagcaacagatgct

SEQ ID NO: 501986 - DNA, 75 bp, synthetic construct
  source 1..75: mol_type = other DNA
tgacaagaggaaagcagaagagctggttgtcacattgtacagacacagaggcgttgattattgatcgcgttatca

SEQ ID NO: 501987 - DNA, 75 bp, synthetic construct
  source 1..75: mol_type = other DNA
cgcaaaatggctgaattgttgaatgaggtgcacccggaatggtgttttagtacatgcgaaaagcgaattgctaat

SEQ ID NO: 501988 - DNA, 75 bp, synthetic construct
  source 1..75: mol_type = other DNA
attgatttgtatcctccggcaacgatatgaagggcgggggatgactaagcgaaaaatggctgaattgctgaatga

SEQ ID NO: 501989 - DNA, 75 bp, synthetic construct
  source 1..75: mol_type = other DNA
cagcgtatctcagaaaaagagcgccgcaacctggtgggtgccgaagtggcaatgatcttccaggacccgatgacc

SEQ ID NO: 501990 - DNA, 75 bp, synthetic construct
  source 1..75: mol_type = other DNA
aatttgctcaggacaaagaacgtctggcgtcgttgcctggtgtcgttcccggcaagtacgaccgcccgaacggct

SEQ ID NO: 501991 - DNA, 75 bp, synthetic construct
  source 1..75: mol_type = other DNA
atggcgttattaaatatagataaattatcggtgcatttcggcgacgaaagcgcaccgttccgcgccgtagaccgc

SEQ ID NO: 501992 - DNA, 75 bp, synthetic construct
  source 1..75: mol_type = other DNA
gcgaaactgcgtgacacgcaggcttacaggaatgaaatggcgaagtatggcaccggcagtgaaattcagcggggt

SEQ ID NO: 501993 - DNA, 75 bp, synthetic construct
  source 1..75: mol_type = other DNA
gaagaaaaagaaagagattaacgagacagtccgtcagcagggaacggaaatcgccagcggtggtgacaccaccgt

SEQ ID NO: 501994 - DNA, 75 bp, synthetic construct
  source 1..75: mol_type = other DNA
acgtcaacaatcctgaagctcaggctgcgtatggcagagcaacagatgctattaataaaatagaatcagccttga

SEQ ID NO: 501995 - DNA, 75 bp, synthetic construct
  source 1..75: mol_type = other DNA
agatggtggcttcgatatcacagtgggcagacacacccagctggatggtgcggtgatcgcctccactgccacgcc

SEQ ID NO: 501996 - DNA, 75 bp, synthetic construct
  source 1..75: mol_type = other DNA
cctgtagtgaaaatccttccggtgaagcctgtaagcgggggcaggatgaaaataaagcttatgcagccgcattag

SEQ ID NO: 501997 - DNA, 75 bp, synthetic construct
  source 1..75: mol_type = other DNA
gagcgattgccggaatgctgtatccgggcgtgaagcagtcagacctcagtgaagagcagaagcagacgataagta

SEQ ID NO: 501998 - DNA, 75 bp, synthetic construct
  source 1..75: mol_type = other DNA
cttgatggaaactcactggataacagcggcactgtccagggtaaccatgtcacgattcgtcagaacagtgtcacc

SEQ ID NO: 501999 - DNA, 75 bp, synthetic construct
  source 1..75: mol_type = other DNA
gctggtgcattgtaatgatgcagaggcgttatgcattgatcgtgtgattagtgaagtactggcagaacacccagg

SEQ ID NO: 502000 - DNA, 75 bp, synthetic construct
  source 1..75: mol_type = other DNA
gcgaaaaatggctgaattgctaaatgatgcacaccctgagtggtgttttagcacatgcgaaaagcgaattgctaa

SEQ ID NO: 502001 - DNA, 75 bp, synthetic construct
  source 1..75: mol_type = other DNA
atgatttacccaacaaatacaggcaaaagcggggaacaccttcgtctcaccacgctggaaagagtctggattcag

SEQ ID NO: 502002 - DNA, 75 bp, synthetic construct
  source 1..75: mol_type = other DNA
ggatgaataatagtgtcggaccacgttttgccttcattggtacatttatgtggttttcctcttatatcatctgga

SEQ ID NO: 502003 - DNA, 75 bp, synthetic construct
  source 1..75: mol_type = other DNA
gcaggttatcccgggctgctcaatgttctgagtcagcgttatgtggggcgggggatgactaagcgcaaaatggct

SEQ ID NO: 502004 - DNA, 75 bp, synthetic construct
  source 1..75: mol_type = other DNA
aaacaacaccgcaccggcaccgtggacgtacgacaacatcgcgtatatgaaaaaccagctcaaaatgctgggctt

SEQ ID NO: 502005 - DNA, 75 bp, synthetic construct
  source 1..75: mol_type = other DNA
aatcagttgctggcatccaaaaaactgacaaaaaccgcggtcaatgaagccctgcgtagaatcagggagtcaggg

SEQ ID NO: 502006 - DNA, 75 bp, synthetic construct
  source 1..75: mol_type = other DNA
gatgcctactccggacgaccagttgccggtgatcctgccggaagatgtggtaatggatggtattaccagcccgat

SEQ ID NO: 502007 - DNA, 75 bp, synthetic construct
  source 1..75: mol_type = other DNA
atagaaagatataaaagaaaatcattcagccacgaaatatcatcagttcttgatttcatagaagtcttcaaataa

SEQ ID NO: 502008 - DNA, 75 bp, synthetic construct
  source 1..75: mol_type = other DNA
ggctgaactgctgaatgatgcacacccgaaatggagtttaagaacctgtgaaagacgcattgagcattggctaaa

SEQ ID NO: 502009 - DNA, 75 bp, synthetic construct
  source 1..75: mol_type = other DNA
atgatttatccaacgaatacaggaaaaaacggagagcaccttcgtctcgcaacgctggaaagtgtctggattcag

SEQ ID NO: 502010 - DNA, 75 bp, synthetic construct
  source 1..75: mol_type = other DNA
ggaaaactgcgcatgtgggggcgctggtcgtatataggtggtggcaaaacaggaaatatgttcaatcagttgctg

SEQ ID NO: 502011 - DNA, 75 bp, synthetic construct
  source 1..75: mol_type = other DNA
gtcgtactggtggtgacatttgcgaacgtcttcaccatcattcaacctgtggttgaagctggagactgggacagc

SEQ ID NO: 502012 - DNA, 75 bp, synthetic construct
  source 1..75: mol_type = other DNA
cggtcaatgaagccctgcgtagaatcagggagtcagggattgataaaccagagctggaagcattcttgcgagaga

SEQ ID NO: 502013 - DNA, 75 bp, synthetic construct
  source 1..75: mol_type = other DNA
atgctgatttcctaaaaagctatgactggaccgctattatggctatgccttatatggaaggtgtcgcagaaaaat

SEQ ID NO: 502014 - DNA, 75 bp, synthetic construct
  source 1..75: mol_type = other DNA
tattaagctgggatttagatcccacattaacgcgagtaaaatacttaccaacaggggagaaaaaagcacaaattc

SEQ ID NO: 502015 - DNA, 75 bp, synthetic construct
  source 1..75: mol_type = other DNA
aaacagcactgcatcagcagcagtgggagcacagagcgggaagaatgctgttgagaataacctgctgggtggtgg

SEQ ID NO: 502016 - DNA, 75 bp, synthetic construct
  source 1..75: mol_type = other DNA
gcgttatgcattgatcgggtgattagtgaagtgttggcagagcatccaggattgattcacgtactccgacaacgg

SEQ ID NO: 502017 - DNA, 75 bp, synthetic construct
  source 1..75: mol_type = other DNA
gaaaaaagcgggaattgataaaccagagttggaagcatttttgcgtgagatgatcgaaggaaagcaaaaaagctg

SEQ ID NO: 502018 - DNA, 75 bp, synthetic construct
  source 1..75: mol_type = other DNA
aaagcggcgaacatttacgtctgaacacgctggaagcagtctggatccaggggaaattacggatgtgggggcggt

SEQ ID NO: 502019 - DNA, 75 bp, synthetic construct
  source 1..75: mol_type = other DNA
cagttatggcggttccgggtcacgaccagcgcgactacgagtttgcctctaaatacggcctgaacatcaaaccag

SEQ ID NO: 502020 - DNA, 75 bp, synthetic construct
  source 1..75: mol_type = other DNA
ggggtgacgctgggtaacgcactgcatttgtcacctgaagcgtcattgtcgctgggcgtatggtttgcgcgtatt

SEQ ID NO: 502021 - DNA, 75 bp, synthetic construct
  source 1..75: mol_type = other DNA
cccgctttaaaagtcgtgcgttaactgacttcactttagaacttagtgcgcgcgtaaaagccattcgcggtccac

SEQ ID NO: 502022 - DNA, 75 bp, synthetic construct
  source 1..75: mol_type = other DNA
gcaacaagtgcgagaagttgcgcgttcccggctcgttgagctcgcttctcatacatggaattctcactacggtat

SEQ ID NO: 502023 - DNA, 75 bp, synthetic construct
  source 1..75: mol_type = other DNA
gaaaaaagcgggtctggacaaacctgaacttgaggcttttttgcgggggatgactaagcgcaaaatggctgaact

SEQ ID NO: 502024 - DNA, 75 bp, synthetic construct
  source 1..75: mol_type = other DNA
gttcgaagctaagccagccaatcagttgctgacccagccagtaaaacatggcgcagagctggacttcccgatccc

SEQ ID NO: 502025 - DNA, 75 bp, synthetic construct
  source 1..75: mol_type = other DNA
caagattttgctgtcgccgtaggggtaagttatgacctggtcaaaagctgggaaaccaaacgccgtcagcctacc

SEQ ID NO: 502026 - DNA, 75 bp, synthetic construct
  source 1..75: mol_type = other DNA
tatggtcattgagatgaacaacttctacaccctgaccgtttacgagaagggcgcggaagtgattcgcatgatcca

SEQ ID NO: 502027 - DNA, 75 bp, synthetic construct
  source 1..75: mol_type = other DNA
acggtcctgtatcacttgatcgcttgcaccaggtacgcgaaatactcagcaaagcagcagcacaaagcgacggcg

SEQ ID NO: 502028 - DNA, 75 bp, synthetic construct
  source 1..75: mol_type = other DNA
ggctgaaatgggagctgcttatcgcaaagaagaaggtggtatctattcctggatgaataatagtgtcggaccacg

SEQ ID NO: 502029 - DNA, 75 bp, synthetic construct
  source 1..75: mol_type = other DNA
gtcccaggccgaacgcgtgcgggcggagctggctcgttttctcgaaaacccggcagatccacgttatctcgccgc

SEQ ID NO: 502030 - DNA, 75 bp, synthetic construct
  source 1..75: mol_type = other DNA
gatttttaacggcatcatccacaaaaacgagcaatacgacgcgaccttgtgtaacccgccattccacgattccgc

SEQ ID NO: 502031 - DNA, 75 bp, synthetic construct
  source 1..75: mol_type = other DNA
gaactgggatatcccggacggttttctctgcccgccagtaccgggccgggcggattatattcatcaccttgccga

SEQ ID NO: 502032 - DNA, 75 bp, synthetic construct
  source 1..75: mol_type = other DNA
gactacttggagcaatattccagatttgaattacgcctacgtaaacatttatcactggcggaagagtctctctag

SEQ ID NO: 502033 - DNA, 75 bp, synthetic construct
  source 1..75: mol_type = other DNA
tccaagcaatatttgaagaaatcttcagggatgctacttaattttacttcaagttcatacacgcgtggccgttca

SEQ ID NO: 502034 - DNA, 75 bp, synthetic construct
  source 1..75: mol_type = other DNA
cttttactaaatgcaaaagatgttgcattaacaacaattaaaatattaggaaccagaaatacagggctgattgtt

SEQ ID NO: 502035 - DNA, 75 bp, synthetic construct
  source 1..75: mol_type = other DNA
gaactgcaacaccgatgagaacatcgaattttggcgttgaaccaagcgacttgcttcttgaccccaaagatgttg

SEQ ID NO: 502036 - DNA, 75 bp, synthetic construct
  source 1..75: mol_type = other DNA
tggttttcctcttatatcatctggatggtgagtacctccgcgaaagtttgggtaccgttctcaacattcctctat

SEQ ID NO: 502037 - DNA, 75 bp, synthetic construct
  source 1..75: mol_type = other DNA
ttatcaagaaatatgtaaaacatgaaaaatacgataaacttgtcgcatatttaaatgatagtaattggccctcag

SEQ ID NO: 502038 - DNA, 75 bp, synthetic construct
  source 1..75: mol_type = other DNA
cagttggcagtcaggtcataccggtagtggcctgcactatcgccgttttcctttctttgccactttgcgtgaacg

SEQ ID NO: 502039 - DNA, 75 bp, synthetic construct
  source 1..75: mol_type = other DNA
acccccgcgtggcgcaggcatttgttgattacatggcgacgcagggcgttatcctcacgattcaacaacataacc

SEQ ID NO: 502040 - DNA, 75 bp, synthetic construct
  source 1..75: mol_type = other DNA
aaaattcgacgtcttttttcagaaatggcggcaggccgtccggggtgattgagatccccggcagtattacggaag

SEQ ID NO: 502041 - DNA, 75 bp, synthetic construct
  source 1..75: mol_type = other DNA
gagcaacggggcaaaatacaaccccacgacgttttcaccggtggatgcgcagacggtggaacaactgaagatgac

SEQ ID NO: 502042 - DNA, 75 bp, synthetic construct
  source 1..75: mol_type = other DNA
ttatcaagaaatatgtaaaagatgaaaaatacgataaacttgttgcatttttaaatgatagtaattggccctcag

SEQ ID NO: 502043 - DNA, 75 bp, synthetic construct
  source 1..75: mol_type = other DNA
ccacagttgcacatcaaagaacagccagcgccagtagtgaccaagacgatgctacagcctcgtaaaaaagtagac

SEQ ID NO: 502044 - DNA, 75 bp, synthetic construct
  source 1..75: mol_type = other DNA
gtgattttcaaaacgcgtatgtcggcaatgatcgcgacggtggttgtcgtactggtggtgacatttgcgaacgtc

SEQ ID NO: 502045 - DNA, 75 bp, synthetic construct
  source 1..75: mol_type = other DNA
gcgtcaggatctcgacagaccgtttgttattttcaaaacgcacatgtcagcaatgattgccacagtggttgtcgt

SEQ ID NO: 502046 - DNA, 75 bp, synthetic construct
  source 1..75: mol_type = other DNA
atcctctttaacctgctctggtggtggtatctcggtggcgcagtggaaaaacgcctcggtagcggtaagctgata

SEQ ID NO: 502047 - DNA, 75 bp, synthetic construct
  source 1..75: mol_type = other DNA
acgtcagaagacgcttctgacagaaagggaagtcagttttatgaaaggactgttcagaattgtggatatgaaacg

SEQ ID NO: 502048 - DNA, 75 bp, synthetic construct
  source 1..75: mol_type = other DNA
agtgctggatgaaatagagtgcgatatctgtggacatgtatccactgacccagaggggcggcaccactgctgtga

SEQ ID NO: 502049 - DNA, 75 bp, synthetic construct
  source 1..75: mol_type = other DNA
gatgccgaacgtttaagcgaactgttcgccagcctgttgaatatgcagggtgaagaaaaatcccgcgcgctggcg

SEQ ID NO: 502050 - DNA, 75 bp, synthetic construct
  source 1..75: mol_type = other DNA
aaagcccattaaagactggcctaaagtatggcgcacaacgctatcaggaatggatgtcgtggagatggcatccgc

SEQ ID NO: 502051 - DNA, 75 bp, synthetic construct
  source 1..75: mol_type = other DNA
atgctggcagccgcgccttttatcatcattctggcagcatgggcagcatgggcagcagataaactctggcctctg

SEQ ID NO: 502052 - DNA, 75 bp, synthetic construct
  source 1..75: mol_type = other DNA
cgctggaaccctggttgcctgcatcagaacgccgtgccgcacgcttgccagcggcctcgacaatttgcccaccgt

SEQ ID NO: 502053 - DNA, 75 bp, synthetic construct
  source 1..75: mol_type = other DNA
atactgggcgcgctgggtgatggaacaaacgcaatgcgacggttttcgtcttgatgcggtcaaacatattccggc

SEQ ID NO: 502054 - DNA, 75 bp, synthetic construct
  source 1..75: mol_type = other DNA
ctgaacgatgatggcaccctgaagcctatccgcgagtggccgaagatatggcgcaccacactgagtggtttcgac

SEQ ID NO: 502055 - DNA, 75 bp, synthetic construct
  source 1..75: mol_type = other DNA
atgagacctcgatagagacaatcctcaaaaaaataaaatggcctgacaaggtgaagaacctcgagcttatcggta

SEQ ID NO: 502056 - DNA, 75 bp, synthetic construct
  source 1..75: mol_type = other DNA
aatgatcttccaggacccgatgaccagccttaacccgtgctacaccgtgggtttccagattatggaagcgattaa

SEQ ID NO: 502057 - DNA, 75 bp, synthetic construct
  source 1..75: mol_type = other DNA
ccatgcgccgcgtcacccgtatactcaggcattgctgcgtgcgctgccggaatttgctcaggacaaagaacgtct

SEQ ID NO: 502058 - DNA, 75 bp, synthetic construct
  source 1..75: mol_type = other DNA
aatttgctcaggacaaagaacgtctggcgtcgttgcctggcgtcgttcctggcaaatacgaccgtccgaatggct

SEQ ID NO: 502059 - DNA, 75 bp, synthetic construct
  source 1..75: mol_type = other DNA
cgcaaaactggaggatatggcggcagcgtacaccgctttcgcccgccacggtaaggcaggcaaattgcgcttaca

SEQ ID NO: 502060 - DNA, 75 bp, synthetic construct
  source 1..75: mol_type = other DNA
acccggcatcactgctgcaagacgtcccccggcgtaccggtgattaccgacctggcaactttgacagcggttttc

SEQ ID NO: 502061 - DNA, 75 bp, synthetic construct
  source 1..75: mol_type = other DNA
ctggcgattatggggctgattgattatccgggccgcgtaatggcggaaaagctggagtttaacggtcaggatttg

SEQ ID NO: 502062 - DNA, 75 bp, synthetic construct
  source 1..75: mol_type = other DNA
gaatggaaagaaagcgtatcttgagtcagccgaatttcaggccatgctggaaaaggtgaaacgaaatgaaatttc

SEQ ID NO: 502063 - DNA, 75 bp, synthetic construct
  source 1..75: mol_type = other DNA
gctattgcccgcgccaaagcacgcaagctggaacagcaacaggctaatgcggaaccagaagaacaggtcgatccg

SEQ ID NO: 502064 - DNA, 75 bp, synthetic construct
  source 1..75: mol_type = other DNA
tcgcccgcgccaaagcacgcaaactggaacagcagcaggcaaacgcagaaccagaagaacaggttgacccgcgca

SEQ ID NO: 502065 - DNA, 75 bp, synthetic construct
  source 1..75: mol_type = other DNA
agctggaacagcaacaggccaatgcggagccagaacaacaggtcgatccgcgcaaagccgccgtcgaagccgcta

SEQ ID NO: 502066 - DNA, 75 bp, synthetic construct
  source 1..75: mol_type = other DNA
aggtagcggacttatccaccattattcaggaacaaccctctttcgtagcagaaacccgtgcgcctgacaaaaata

SEQ ID NO: 502067 - DNA, 75 bp, synthetic construct
  source 1..75: mol_type = other DNA
aggcgatcagtcagatcgacggcctgaaaacaacacagttaccatcaccagtaatggctgtactcacggcacttg

SEQ ID NO: 502068 - DNA, 75 bp, synthetic construct
  source 1..75: mol_type = other DNA
gcgagcgtaaagtgaactaccgcctgcgcgactggggtgtttcccgtcaacgttactggggcgcgccgattccga

SEQ ID NO: 502069 - DNA, 75 bp, synthetic construct
  source 1..75: mol_type = other DNA
tgcccgagcaatattcccctggtgcaatatttccgtcaggaaaaagctgaaattgcggctattcgtcaggaagaa

SEQ ID NO: 502070 - DNA, 75 bp, synthetic construct
  source 1..75: mol_type = other DNA
cggctattgcccgcgctcaggccaaaaaagccgccccagcagaaggttgtaaacgaggactaaatggtattcaga

SEQ ID NO: 502071 - DNA, 75 bp, synthetic construct
  source 1..75: mol_type = other DNA
tagcagatcggggagatgtatctgcgcttttaagagagtggcgcaccatgaaaacgagtgagcacttcccgccct

SEQ ID NO: 502072 - DNA, 75 bp, synthetic construct
  source 1..75: mol_type = other DNA
gccgcagcagttgtactggttcagcaaaggtcaacagcacgacaaagccaccacgcataacattgccgactgcat

SEQ ID NO: 502073 - DNA, 75 bp, synthetic construct
  source 1..75: mol_type = other DNA
cagaagaacaggttgatccgcgcaaagcggcagttgccgcggctattgcccgcgttcaggccaaaaaagccgccc

SEQ ID NO: 502074 - DNA, 75 bp, synthetic construct
  source 1..75: mol_type = other DNA
gagccgtatattactgccgatgaccgtctgatgcaggattgtgctgcccaggttgtagagggcattcgcattctt

SEQ ID NO: 502075 - DNA, 75 bp, synthetic construct
  source 1..75: mol_type = other DNA
ccgtctgcataaccagcatggtgatatcctggccgacaacagtctgtgggtacagaaggacagcagcgggacggc

SEQ ID NO: 502076 - DNA, 75 bp, synthetic construct
  source 1..75: mol_type = other DNA
tgcaggcgctaaccggataactgcagatggtcgtgtcagagccctgaagggcgaaggtgatgtgccgaaagttgc

SEQ ID NO: 502077 - DNA, 75 bp, synthetic construct
  source 1..75: mol_type = other DNA
cgccgcgaggccgggacaacgcagagtcagagtgccagtaccatcggctccactgccggtaatgtcagtattacc

SEQ ID NO: 502078 - DNA, 75 bp, synthetic construct
  source 1..75: mol_type = other DNA
cgctgcctcccgggataagatgaagagccgctttgactccgttgctgaacaaaccggaatgtttgccggtgacgg

SEQ ID NO: 502079 - DNA, 75 bp, synthetic construct
  source 1..75: mol_type = other DNA
agtcacagaccctgaccaacagtggtctgttgcagggggaggcctcactcaccgttaacacacagaggcttgata

SEQ ID NO: 502080 - DNA, 75 bp, synthetic construct
  source 1..75: mol_type = other DNA
gttgtccggcatgatggtgtggaatatctggccgtgtactggggtaagggtgccacggtacctgatgaataccgt

SEQ ID NO: 502081 - DNA, 75 bp, synthetic construct
  source 1..75: mol_type = other DNA
gtgccggagaggcattcaccaacaatggaatgctgactgccggtaaaggcaacagtgttttcagcgcacagcgtc

SEQ ID NO: 502082 - DNA, 75 bp, synthetic construct
  source 1..75: mol_type = other DNA
gaaaaagaaagagattaacgagacagtccgtcagcagggaacggaaatcgccagcggtggtgacaccaccgtcaa

SEQ ID NO: 502083 - DNA, 75 bp, synthetic construct
  source 1..75: mol_type = other DNA
gcggaacggataccggtccgctggctgctgtcagggcaacggactcactgtttatgggcgcagccggggatatca

SEQ ID NO: 502084 - DNA, 75 bp, synthetic construct
  source 1..75: mol_type = other DNA
aagagattaacgagacagtccgtcagcagggaacggaaatcgccagcggtggtgacaccaccgtcaacgcaggac

SEQ ID NO: 502085 - DNA, 75 bp, synthetic construct
  source 1..75: mol_type = other DNA
gtgatgactggccactgccttccggcaacaatggatacctggttccgtccacggacccggacagtccgtatctga

SEQ ID NO: 502086 - DNA, 75 bp, synthetic construct
  source 1..75: mol_type = other DNA
tggggatatcgcactctcgggcagagagttaagcaatcagagctggcagacggggacagagaatgaatatctggt

SEQ ID NO: 502087 - DNA, 75 bp, synthetic construct
  source 1..75: mol_type = other DNA
gacgatcggcagtggcacggacctggcttccggcatcgtggaggggaactatcccctgccttccggtaacaatgg

SEQ ID NO: 502088 - DNA, 75 bp, synthetic construct
  source 1..75: mol_type = other DNA
tattgcgcgtacacagggagaactgaatgcgttgaaggccgcgaaggaagcaaccggcgaaacacttcctgctaa

SEQ ID NO: 502089 - DNA, 75 bp, synthetic construct
  source 1..75: mol_type = other DNA
gtcatgcagggtgatgccatggtgctcggtgccggagaggcattcaccaacaatggaacgctgactgccggtaaa

SEQ ID NO: 502090 - DNA, 75 bp, synthetic construct
  source 1..75: mol_type = other DNA
gcaaaaatatgcccgctttatgacgccaccgccatccgttaaacccgcttcgtcaggtaaaaatcgggaggccgc

SEQ ID NO: 502091 - DNA, 75 bp, synthetic construct
  source 1..75: mol_type = other DNA
ggcactggtggcgtttcaaaaacctttaatttgcgcctcgaccaacgtagctacattaccgaagaagacgcgcgc

SEQ ID NO: 502092 - DNA, 75 bp, synthetic construct
  source 1..75: mol_type = other DNA
acgggatgtgaacatggctgcggagtccacaggcgcaggtgaccacgacagcactttcagcatgaagacggttca

SEQ ID NO: 502093 - DNA, 75 bp, synthetic construct
  source 1..75: mol_type = other DNA
tgccccgggcaggtggttcaggtaacacgataacggtgccttcgctgaactccctgacaccaccgacggtcagtc

SEQ ID NO: 502094 - DNA, 75 bp, synthetic construct
  source 1..75: mol_type = other DNA
ggacaaccagaagcaggacgtggcgaacctaagccgagacaccgaacatgccaatgacagcatcagcccgatctt

SEQ ID NO: 502095 - DNA, 75 bp, synthetic construct
  source 1..75: mol_type = other DNA
gaatgcgacgggagtcagcctgtcgctcaccacccagaaatcgaaatcacaacaacattctgaaagtgacacagt

SEQ ID NO: 502096 - DNA, 75 bp, synthetic construct
  source 1..75: mol_type = other DNA
tggctgaccgggatgtgtcactggcggcgggtaaccatgttgatgttcttgctgccaccagtacagatacgtcct

SEQ ID NO: 502097 - DNA, 75 bp, synthetic construct
  source 1..75: mol_type = other DNA
gcaatgggcgcgacgctggtgatgctcacgcgcaatatcgatgtttcggtaggttcgattaccggaatgtgcgca

SEQ ID NO: 502098 - DNA, 75 bp, synthetic construct
  source 1..75: mol_type = other DNA
acacgaaaatcgctgtgcgagattcgttacagagacggatacagggaggtggcggctttcatggcttacgaatcc

SEQ ID NO: 502099 - DNA, 75 bp, synthetic construct
  source 1..75: mol_type = other DNA
gtggtggttttgacgcatgggccgttccgactgaaaagggtgccacacggaaatttctgactggcacaacacgcg

SEQ ID NO: 502100 - DNA, 75 bp, synthetic construct
  source 1..75: mol_type = other DNA
atcagggctggcaggaggggaccaccggaaaggaaacggtctggcggcttgcctcaggctcactccccaaagcat

SEQ ID NO: 502101 - DNA, 75 bp, synthetic construct
  source 1..75: mol_type = other DNA
tgatggcggcgaatcaggcaacgctcacaggtaacagtctgaccaaccgtggcctgttccaggccgcacaactga

SEQ ID NO: 502102 - DNA, 75 bp, synthetic construct
  source 1..75: mol_type = other DNA
aacatcactgtccgggccgggcgcgacgttaatctgctggcggaagagtccgtggccggcagcagttcatactcg

SEQ ID NO: 502103 - DNA, 75 bp, synthetic construct
  source 1..75: mol_type = other DNA
gtcacagaaagatgtgacgctgcagaacggcagtattatcagcggtcagaatgtgcacctggcaggagggaatgt

SEQ ID NO: 502104 - DNA, 75 bp, synthetic construct
  source 1..75: mol_type = other DNA
gccgttttttccagtgatatcagtaatacatccacaacctcaaatgcaggacggatcacaaatacccttgcggca

SEQ ID NO: 502105 - DNA, 75 bp, synthetic construct
  source 1..75: mol_type = other DNA
aaagatgtcagtggtgccgcgaatgctgaagtgattaatacctccgggaatatcgaaaccacccgcggtgatatc

SEQ ID NO: 502106 - DNA, 75 bp, synthetic construct
  source 1..75: mol_type = other DNA
gatttaggtgaagatggatggggatattatgtgaagtcctggagcggtactgccggtggtggttttgaggcatgg

SEQ ID NO: 502107 - DNA, 75 bp, synthetic construct
  source 1..75: mol_type = other DNA
aacaatgcggcttccggtgctgcgggggcattcagcggtgaacttgcagcccggtatatcattgataactactac

SEQ ID NO: 502108 - DNA, 75 bp, synthetic construct
  source 1..75: mol_type = other DNA
tactgtggtgggagtccgtcaccatcaacggacagacagtcatggttccgaaactgtatctgtctccggaagata

SEQ ID NO: 502109 - DNA, 75 bp, synthetic construct
  source 1..75: mol_type = other DNA
cgctcacggtgaatcagacgctgaacaatcacgcgagcggaaaactgctcagtgcaggtgtgctgacgctgaagg

SEQ ID NO: 502110 - DNA, 75 bp, synthetic construct
  source 1..75: mol_type = other DNA
gattaactatttcatggtcaccaaaggggtggatcgtcagaccgcagaaagctacaccgaaacaaagcagggtct

SEQ ID NO: 502111 - DNA, 75 bp, synthetic construct
  source 1..75: mol_type = other DNA
tacgaagatggcccttataactcgaaatacagccagcaatacgctgatgcgtatggtcagatggtcaatctcctc

SEQ ID NO: 502112 - DNA, 75 bp, synthetic construct
  source 1..75: mol_type = other DNA
ggtggtcgtactgataacctgagtgaacaggaacgtcagcaaatcagcatgttggccaccattgcctcaggtatt

SEQ ID NO: 502113 - DNA, 75 bp, synthetic construct
  source 1..75: mol_type = other DNA
tgaaatccccacaaaagatgctgctgggaatacgactggtaattataaaggaaatggcgccaagccttttgagaa

SEQ ID NO: 502114 - DNA, 75 bp, synthetic construct
  source 1..75: mol_type = other DNA
acagcgccctgctttctgcaggtaacgacctgagtctgaatgcagtcagggaaagcaaaaacagtcgcaacggca

SEQ ID NO: 502115 - DNA, 75 bp, synthetic construct
  source 1..75: mol_type = other DNA
cataacggcagcgttatcagcgggaacaacgtgcagcttgcgggtggcaatattaccaacagcggcggcagcatc

SEQ ID NO: 502116 - DNA, 75 bp, synthetic construct
  source 1..75: mol_type = other DNA
catgcaatatcacaatggatacgctttattattacgctccgtttgctgacagtgccacacagcgctttctcagca

SEQ ID NO: 502117 - DNA, 75 bp, synthetic construct
  source 1..75: mol_type = other DNA
ctccggctatgctgccaggatatccggcggcgctgatatgcatatccgtgcaggacgactggataatgaggcatc

SEQ ID NO: 502118 - DNA, 75 bp, synthetic construct
  source 1..75: mol_type = other DNA
tctcacagggtagtaacgggcgctggctgacggcggacgacctcaccctccggggtaaaatactgaataccgcag

SEQ ID NO: 502119 - DNA, 75 bp, synthetic construct
  source 1..75: mol_type = other DNA
ggttcggatgtgattgcgaaccgggatatcagcattaccggtgacagtgtggtggttgacccggggcatgaccgt

SEQ ID NO: 502120 - DNA, 75 bp, synthetic construct
  source 1..75: mol_type = other DNA
cattactgctggtaaaggttacaatccaacagtaacctggaatgcagcaggtggatattatcaggctaaaatcga

SEQ ID NO: 502121 - DNA, 75 bp, synthetic construct
  source 1..75: mol_type = other DNA
gaagaactggtggaatgcaaggcttctggtggagactgtaaatctgttgttcagaaatatctggatatcagcaac

SEQ ID NO: 502122 - DNA, 75 bp, synthetic construct
  source 1..75: mol_type = other DNA
cgccgcaaacacacaaaaaacaacgggcaggaacagcagcagtggcggtggcgtgggtgtcagtatcggtgccgg

SEQ ID NO: 502123 - DNA, 75 bp, synthetic construct
  source 1..75: mol_type = other DNA
atccattcagggaatgggaaatgctctggttgatattcccctttcccttcttcctgacggcagctatggctattt

SEQ ID NO: 502124 - DNA, 75 bp, synthetic construct
  source 1..75: mol_type = other DNA
agtaaccagggcacgatacagggtggaggcggggtttccctgaacgtcacagaccgtctgcagaacgacggcaaa

SEQ ID NO: 502125 - DNA, 75 bp, synthetic construct
  source 1..75: mol_type = other DNA
acactgaatcagccccgtctggtgacggataaaaatctggtgctgtcttcatccgggcagattgtacagaacggt

SEQ ID NO: 502126 - DNA, 75 bp, synthetic construct
  source 1..75: mol_type = other DNA
atgcgaaaacgtattctttttattggccctccgctgtacggtttgttatacccattgatttctctggctcaggcc

SEQ ID NO: 502127 - DNA, 75 bp, synthetic construct
  source 1..75: mol_type = other DNA
ttgtgtttggcgaaggtgcagatcgctctgttaatgcagaaattgttgcgaagcgtgggtgtgggattattccgg

SEQ ID NO: 502128 - DNA, 75 bp, synthetic construct
  source 1..75: mol_type = other DNA
atggcagataacctcatcgattttgcaggaaaatggaggccagatttaatagtctatccccctcttgatccggca

SEQ ID NO: 502129 - DNA, 75 bp, synthetic construct
  source 1..75: mol_type = other DNA
ctgtagccgatgtcccggcccctttccgcggtaatgccattgcactgattaccgcaggtcttatgtctctggcct

SEQ ID NO: 502130 - DNA, 75 bp, synthetic construct
  source 1..75: mol_type = other DNA
atgactgattacctgttactgtttgtcggaaccgtactggtcaacaactttgtactggtcaagtttctgggcctc

SEQ ID NO: 502131 - DNA, 75 bp, synthetic construct
  source 1..75: mol_type = other DNA
cccgcgttgttgccgaacgcggctgcgggattatccctggcgacgtcggcctgtcgagtaacatgatcaatgctt

SEQ ID NO: 502132 - DNA, 75 bp, synthetic construct
  source 1..75: mol_type = other DNA
atcaataatgcggttaccagtgcacaggagacgaaggagagcagtgacagccgtctgaaagccctgcaggccaca

SEQ ID NO: 502133 - DNA, 75 bp, synthetic construct
  source 1..75: mol_type = other DNA
cgggatatcaccgctgttgcgtcatccgttaccgcaaccggcaatatcagcgtgaatgccggtcgtgatgttgcc

SEQ ID NO: 502134 - DNA, 75 bp, synthetic construct
  source 1..75: mol_type = other DNA
aggcttacaggaatgaaatggcgaagtatggtaccggcagtgaaattcagcggggtatccaggccgcgacagccg

SEQ ID NO: 502135 - DNA, 75 bp, synthetic construct
  source 1..75: mol_type = other DNA
cgtcgccacaatgtgggggccacaccacgtgatatggcctggatcgacgtaacaccgccgagtatgagcattctg

SEQ ID NO: 502136 - DNA, 75 bp, synthetic construct
  source 1..75: mol_type = other DNA
tgtagataagcttaatcagaagcaagaaagtgcgattaagaagatcgataacactataaaaaatgctctgaaaga

SEQ ID NO: 502137 - DNA, 75 bp, synthetic construct
  source 1..75: mol_type = other DNA
ctgagcggtggtggcagcttcggggataaatttcagggtaacatgccgggtggcatgatatccgccggaggtcac

SEQ ID NO: 502138 - DNA, 75 bp, synthetic construct
  source 1..75: mol_type = other DNA
cgtctgctggggatttttttgccgcttatcaccaccaactgtgccgtgctcggcgtggcgttgctgaatatcaat

SEQ ID NO: 502139 - DNA, 75 bp, synthetic construct
  source 1..75: mol_type = other DNA
taaccgaatcaaaaacattacaggtctgccacactcagcagtgatgaatcttgcaattaaccgtgatattaacga

SEQ ID NO: 502140 - DNA, 75 bp, synthetic construct
  source 1..75: mol_type = other DNA
tggagcacctcaaaaacaccatcatacactaaatcagtaagttggcagcatcaccccggagcggatattaataag

SEQ ID NO: 502141 - DNA, 75 bp, synthetic construct
  source 1..75: mol_type = other DNA
atttaacgctactacgaattattttaccggctaaacccgatcttaattgcgtaacccgttttggcggtgtcggcc

SEQ ID NO: 502142 - DNA, 75 bp, synthetic construct
  source 1..75: mol_type = other DNA
gaaaaaagcgggaatagagaaacctgaactggaatcatttttgcgagaaattatcaatggcaaacaaaagagctg

SEQ ID NO: 502143 - DNA, 75 bp, synthetic construct
  source 1..75: mol_type = other DNA
accaggtggattctgcgatagaaagatacaaaagaaaatcgttcaaccacgaaatatcatcagttcttgatttca

SEQ ID NO: 502144 - DNA, 75 bp, synthetic construct
  source 1..75: mol_type = other DNA
attgattagtgtcctccggcaacggtatgaagggcgggggatgactaagcgtaaaatggctgaattgctgaatga

SEQ ID NO: 502145 - DNA, 75 bp, synthetic construct
  source 1..75: mol_type = other DNA
agctttacgccagcaactcaacgatgttgccgaagcacatgaactgctgcgtgacgcagatgcactggtagaaaa

SEQ ID NO: 502146 - DNA, 75 bp, synthetic construct
  source 1..75: mol_type = other DNA
ggaagggcattacacaaagccattgcctatgcgctgtctcatcgcgtggaactgagccgcttcctggaagatggt

SEQ ID NO: 502147 - DNA, 75 bp, synthetic construct
  source 1..75: mol_type = other DNA
ggcaaattgaaaaattaattgccactttacatgccagtctacaacaacgctggagcgtagctgatatggctgcca

SEQ ID NO: 502148 - DNA, 75 bp, synthetic construct
  source 1..75: mol_type = other DNA
ggaagttaccttctccgtgtccaggagtggaggtgctcgcttcggaacaagttgaggaaggacaaccagcgccag

SEQ ID NO: 502149 - DNA, 75 bp, synthetic construct
  source 1..75: mol_type = other DNA
atgccagaaaatcctgtggtgaatgaaaagccgcaggaagtacaaaaatcagcagttaatgaaaacaagaaagta

SEQ ID NO: 502150 - DNA, 75 bp, synthetic construct
  source 1..75: mol_type = other DNA
gtggattttctcggccagaaacagatccaacgctggagcgatgaacggaaagctgcggtgagaaggcgcaacatg

SEQ ID NO: 502151 - DNA, 75 bp, synthetic construct
  source 1..75: mol_type = other DNA
cggaacaaccactgcacatgcaggtagtgtcagtccggtggtctctgcaccggtactgaatacgttaagtcagca

SEQ ID NO: 502152 - DNA, 75 bp, synthetic construct
  source 1..75: mol_type = other DNA
tgaaggcagacagtgtcacaaacgacgggcaattacagggaaatgccaccaccatcacggcaggacaactcacaa

SEQ ID NO: 502153 - DNA, 75 bp, synthetic construct
  source 1..75: mol_type = other DNA
gtgtcacaaacgacgggcaattacagggaaatgccaccaccatcacggcaggacaactcacaaacggcgggcatc

SEQ ID NO: 502154 - DNA, 75 bp, synthetic construct
  source 1..75: mol_type = other DNA
tgggaaagtcatagggcggcaatccagcgacggaaaagttggttggcgtgttgattatgatcctgaaaaaggcac

SEQ ID NO: 502155 - DNA, 75 bp, synthetic construct
  source 1..75: mol_type = other DNA
catactgtggtgggagtcagccaccatcaacggacagacagtcatggtcccgaaactgtatctgtcgccggaaga

SEQ ID NO: 502156 - DNA, 75 bp, synthetic construct
  source 1..75: mol_type = other DNA
gatatcacggccagcgggaaactgaccagtacaggttcgctggtgagcgatgatgtactggtgctgaaggcgcag

SEQ ID NO: 502157 - DNA, 75 bp, synthetic construct
  source 1..75: mol_type = other DNA
tctgcagacacactgaccaccacagaaaaatcagtcacaaacagtgacggtaacctcatgctgaacagcgcgtct

SEQ ID NO: 502158 - DNA, 75 bp, synthetic construct
  source 1..75: mol_type = other DNA
ctgctgacacatcacattcctcccttacttctacaaagggacgtgactatgaaagcaatggatatggcatagaaa

SEQ ID NO: 502159 - DNA, 75 bp, synthetic construct
  source 1..75: mol_type = other DNA
tacagattttcgcggtgaattatttaccggcagtcaatacttactggcatggtcagacaaactggtcgaattaaa

SEQ ID NO: 502160 - DNA, 75 bp, synthetic construct
  source 1..75: mol_type = other DNA
ctcttagcaaaaaatggatatctggattacgtcgatgtgacccttataagcaatggcgttgaacagaaagcaacc

SEQ ID NO: 502161 - DNA, 75 bp, synthetic construct
  source 1..75: mol_type = other DNA
accggaactggcacatctgctgaaatcaacagaaaaagacccggcagtaaacgccattgctcacgccattctggg

SEQ ID NO: 502162 - DNA, 75 bp, synthetic construct
  source 1..75: mol_type = other DNA
cagtgaaaagctcacccacagcgggaaaagcagtgccccgtcgctcagcctcagtgcgccggaactgaccagcag

SEQ ID NO: 502163 - DNA, 75 bp, synthetic construct
  source 1..75: mol_type = other DNA
atcaacacgccgcacgcgacgctcaccacgggcagacctgtgatgaatgccgacggcagcctgcaggcgctggag

SEQ ID NO: 502164 - DNA, 75 bp, synthetic construct
  source 1..75: mol_type = other DNA
ccggcagtacgctgaatgccgggaataatctgtctgttgtcgcaaccggcaaaaacaggggcgataaccgcggag

SEQ ID NO: 502165 - DNA, 75 bp, synthetic construct
  source 1..75: mol_type = other DNA
gaagcggattataaagtcagtcacagtggaatcagtctgagcggtggtggcagcttcggggataaatttcagggt

SEQ ID NO: 502166 - DNA, 75 bp, synthetic construct
  source 1..75: mol_type = other DNA
cagacatacccaactggatggtgcggtgattgcctccactgccacaccggataaaaaccacctggataccggaac

SEQ ID NO: 502167 - DNA, 75 bp, synthetic construct
  source 1..75: mol_type = other DNA
ggcgaaactgaagcgatgaaagcagccaggaaagagcatcctggcatgagcgatgcacagttgcgggagaccccg

SEQ ID NO: 502168 - DNA, 75 bp, synthetic construct
  source 1..75: mol_type = other DNA
ctaagtacgctggcgagtatctcagcaggtatggcgggtggtgttgcaggtgggaatactgcgggtgtggctacc

SEQ ID NO: 502169 - DNA, 75 bp, synthetic construct
  source 1..75: mol_type = other DNA
tccggtggcgtgaacaaccgttccggtggtgttctgatgagccggaatgcactgaatgtcagtactgcgaccctg

SEQ ID NO: 502170 - DNA, 75 bp, synthetic construct
  source 1..75: mol_type = other DNA
aaaaaagcggaggttttctcagtaagaaaaccacccacaccatcagtgaggacagtgcctcccgtgaagcaggct

SEQ ID NO: 502171 - DNA, 75 bp, synthetic construct
  source 1..75: mol_type = other DNA
ggttcgctggaaaaccaggacgtgaagaactacgtcactgaaagtaacagctatgacctgaactatctgaacaac

SEQ ID NO: 502172 - DNA, 75 bp, synthetic construct
  source 1..75: mol_type = other DNA
cgtaccgataacctgagtgaacaggaacgtcagcaaatcagcatgctggccaccattgcctcaggtattgcgggc

SEQ ID NO: 502173 - DNA, 75 bp, synthetic construct
  source 1..75: mol_type = other DNA
tcagaccacccggaccatcacggaagacagcgtcacccgtgagaagggctctctgctgtcggggaaccgcgtgac

SEQ ID NO: 502174 - DNA, 75 bp, synthetic construct
  source 1..75: mol_type = other DNA
tggtcggatatccataaccaggcagactataaagccagccataccggaatcagtttatcgggtggctcagggatg

SEQ ID NO: 502175 - DNA, 75 bp, synthetic construct
  source 1..75: mol_type = other DNA
cgccagtaaatattcactgcaatattcggaaaagtctatcggatacggtatgtatcaaggcggccaaatgagctc

SEQ ID NO: 502176 - DNA, 75 bp, synthetic construct
  source 1..75: mol_type = other DNA
cttcgatatcacggtcggcaaccacacccagctcgatggtgcggttatcgcttccacggcgacggcagataaaaa

SEQ ID NO: 502177 - DNA, 75 bp, synthetic construct
  source 1..75: mol_type = other DNA
atcaaagaactgcgtattctggactggagccgggttgaacctctggtggcggatgacggcgaggtgttctatcgc

SEQ ID NO: 502178 - DNA, 75 bp, synthetic construct
  source 1..75: mol_type = other DNA
taatcagagcccgtgcagcagctaaacgaggcagcagagttgtccgacagcgaattctgagcatgctattgcgaa

SEQ ID NO: 502179 - DNA, 75 bp, synthetic construct
  source 1..75: mol_type = other DNA
gttttaccagaaacatatcgattcggatattgatattgtaaaactacgaaatgatatcccagattatttgatgcg

SEQ ID NO: 502180 - DNA, 75 bp, synthetic construct
  source 1..75: mol_type = other DNA
atgaatgctacaggtacgtcttttagctcttttgggataagtagctatagagaaaactccttttggaactgtttc

SEQ ID NO: 502181 - DNA, 75 bp, synthetic construct
  source 1..75: mol_type = other DNA
tgattgtgttattagcgggttgttcatctaagcatgactacacgaacccgccgtggaacgcgaaagttccggtac

SEQ ID NO: 502182 - DNA, 75 bp, synthetic construct
  source 1..75: mol_type = other DNA
caaaagcgaccaatatgctttatacccgcaacgatgtctccgacagcgagaaaaaagcgacaattgagttgctga

SEQ ID NO: 502183 - DNA, 75 bp, synthetic construct
  source 1..75: mol_type = other DNA
tggcttggcgaagttcgttattatggtacgattaacaacgaagtcctggctgtacatcgattatgtcagaaattg

SEQ ID NO: 502184 - DNA, 75 bp, synthetic construct
  source 1..75: mol_type = other DNA
tcactgccagcttcagcggggcagccgacagtaccggatattataaaaccaggggaccgcgcaaaacatccagtt

SEQ ID NO: 502185 - DNA, 75 bp, synthetic construct
  source 1..75: mol_type = other DNA
gaattaaccagtatgaaaaggggaagcactcaccaaattttgagacggtgagcaatcttgcaaaagtattaaatg

SEQ ID NO: 502186 - DNA, 75 bp, synthetic construct
  source 1..75: mol_type = other DNA
acgctggtagtggtgtttgtctccagtcacccttacacccgtcagtacgatcttgacctgctggcagaactccgc

SEQ ID NO: 502187 - DNA, 75 bp, synthetic construct
  source 1..75: mol_type = other DNA
tgtctgccggtgcggcatcggcctggcatgatgttgcgttagagttgactcattgtccggtgggaacatcgaggg

SEQ ID NO: 502188 - DNA, 75 bp, synthetic construct
  source 1..75: mol_type = other DNA
cagggaaccgcgcaaaatatccagttagagctacaggatgacagcggcaacacattgaacaccggcgcaaccaaa

SEQ ID NO: 502189 - DNA, 75 bp, synthetic construct
  source 1..75: mol_type = other DNA
tcactgccagcttcagcggggcagccgacagtaccggatattataaaaaaccaggggaccgcgcaaaacatccag

SEQ ID NO: 502190 - DNA, 75 bp, synthetic construct
  source 1..75: mol_type = other DNA
gtagcgcgaaatcatcctgcgccgcaggctccgcgctatatctacaaacttgagcaggcactggacgcgatgtaa

SEQ ID NO: 502191 - DNA, 75 bp, synthetic construct
  source 1..75: mol_type = other DNA
tcgaccaggaaatatctcgcctgttacctgagtggtctctgtgcaatctggtctgccagttgcaggctcttaaag

SEQ ID NO: 502192 - DNA, 75 bp, synthetic construct
  source 1..75: mol_type = other DNA
attacggcggtggctcgtgagttgactggatttatgtgggatattgcacttgctgcccaatcatcattcagtcag

SEQ ID NO: 502193 - DNA, 75 bp, synthetic construct
  source 1..75: mol_type = other DNA
cggtggctcgtgagttgactggatttatgtgggatattgcacttgctgcccaatcatcattcagtcagcagaagc

SEQ ID NO: 502194 - DNA, 75 bp, synthetic construct
  source 1..75: mol_type = other DNA
gttttaccagaaacatatcgattcggatattgatattgtgaaactacgaaatgagatcccagattatttgaggtt

SEQ ID NO: 502195 - DNA, 75 bp, synthetic construct
  source 1..75: mol_type = other DNA
gtcagctaattgcaataactctggttgctgaactgggtgatttttcgcgattttccaatcccaaacagctcatgg

SEQ ID NO: 502196 - DNA, 75 bp, synthetic construct
  source 1..75: mol_type = other DNA
ccctggttgctgaactgggtgatttttcacgattttccagtcccaaacaactcatggcttttctgggactggttc

SEQ ID NO: 502197 - DNA, 75 bp, synthetic construct
  source 1..75: mol_type = other DNA
gagccgacgaccagcgaactgaaaaacccggagcgcaatatctcaatgggggcggcttacctgaatattctggaa

SEQ ID NO: 502198 - DNA, 75 bp, synthetic construct
  source 1..75: mol_type = other DNA
accggcccgctggcaggaattgaagatccgaaggtactgcaatatgcactggtggtgtcatacgccaacggagct

SEQ ID NO: 502199 - DNA, 75 bp, synthetic construct
  source 1..75: mol_type = other DNA
ttatcgccgtatgggctggagtggtgagccgacgaccagcgagctgaaaaatccggagcgtaatatttcaatggg

SEQ ID NO: 502200 - DNA, 75 bp, synthetic construct
  source 1..75: mol_type = other DNA
aattgcagggactttacggaaacattctttcctgctatgaggctggcccctgtggttttaggctatatcatcaac

SEQ ID NO: 502201 - DNA, 75 bp, synthetic construct
  source 1..75: mol_type = other DNA
ccggggcccgcgataccacgctctatcgggcgggacggcgccggtgcttcaacgatgcagtcacattttgtacag

SEQ ID NO: 502202 - DNA, 75 bp, synthetic construct
  source 1..75: mol_type = other DNA
ctcgcctgttacctgagtggtctctgtgcaatctggtctgccagttgcaggctcttaaaggtgttggtcagctaa

SEQ ID NO: 502203 - DNA, 75 bp, synthetic construct
  source 1..75: mol_type = other DNA
aaagagaacctgcggatcatcctgaccggcgccggaacctcggcatttatcggcgacatcatcgcaccgtggctt

SEQ ID NO: 502204 - DNA, 75 bp, synthetic construct
  source 1..75: mol_type = other DNA
ggctttaacaagtttgttgttcagtacgctactgactcgatgacctcgcagggtaaaggtctgtcgcagggttct

SEQ ID NO: 502205 - DNA, 75 bp, synthetic construct
  source 1..75: mol_type = other DNA
aggaatttaatgaacagcgattggaagagatgattgaacagaaccgtttcaaaccagcgataacgccttcattat

SEQ ID NO: 502206 - DNA, 75 bp, synthetic construct
  source 1..75: mol_type = other DNA
gaatctgttctatcaggtttttgatcggggctttatgcgcgatggcgaaggccgtgaaatcgattttcgcaatac

SEQ ID NO: 502207 - DNA, 75 bp, synthetic construct
  source 1..75: mol_type = other DNA
aaaatcactgattaccatcaatctgtcggaataccaggagccccatacggtttcccagcttaaggggtcaccgcc

SEQ ID NO: 502208 - DNA, 75 bp, synthetic construct
  source 1..75: mol_type = other DNA
ccagcccaactacggcttggctgggatgaggaagacgggattgtactggagttcgctacggaagagatgcaataa

SEQ ID NO: 502209 - DNA, 75 bp, synthetic construct
  source 1..75: mol_type = other DNA
cgcagcagattatgacgttgcgtcaggaagggacagacagcactgaactgcaacagcaactgcgagcgcatcagg

SEQ ID NO: 502210 - DNA, 75 bp, synthetic construct
  source 1..75: mol_type = other DNA
ggaaaaaccgaaacggcactggcgctggcagacgtgatgtacggcggcgaaaaatcactgattaccatcaatctg

SEQ ID NO: 502211 - DNA, 75 bp, synthetic construct
  source 1..75: mol_type = other DNA
atttgaacagcgcctgaaaaacgtgattgatgccgtgcagcagtcaccggctcctgtactgctgtttatagatga

SEQ ID NO: 502212 - DNA, 75 bp, synthetic construct
  source 1..75: mol_type = other DNA
gtaaaaaaatattttttaggaactgtgtcattgtatctttgtttgtttttacatacaacacatgggcgcagtgta

SEQ ID NO: 502213 - DNA, 75 bp, synthetic construct
  source 1..75: mol_type = other DNA
gctcagtgtggatgttgacgtacgcaccgttgccggtgtggtcgcggactggaccggggtgccgttatcttccct

SEQ ID NO: 502214 - DNA, 75 bp, synthetic construct
  source 1..75: mol_type = other DNA
ttccagaccgtgatttaccgtccgctgacacagtctgccatgcgcaccattgtggagatgaagcttgcacaggtc

SEQ ID NO: 502215 - DNA, 75 bp, synthetic construct
  source 1..75: mol_type = other DNA
ccaatctcggtagtgaccatctgatgcagttgctggacgaacaaccggaagccactgaggccagcctgcacgaac

SEQ ID NO: 502216 - DNA, 75 bp, synthetic construct
  source 1..75: mol_type = other DNA
atgcccaaactcccggtggtaaaaaaacgtccccggcggcctaattttccttatgaatttaaaatcgccttagtg

SEQ ID NO: 502217 - DNA, 75 bp, synthetic construct
  source 1..75: mol_type = other DNA
ccaccggtacatggactgaagaagagatccgccatcagcctcgcgcgtggcttcgttcgctcgccaacattgacg

SEQ ID NO: 502218 - DNA, 75 bp, synthetic construct
  source 1..75: mol_type = other DNA
acgcaatgagtgaaaagagtcacggcagagaagaaatccgtcttcacattgtttgcgatgtccctgatgaactta

SEQ ID NO: 502219 - DNA, 75 bp, synthetic construct
  source 1..75: mol_type = other DNA
agctgcactggcgtctggacgtggtaatgaatgaagacgactgcaaaataagaagaggaaatgcagcagaattat

SEQ ID NO: 502220 - DNA, 75 bp, synthetic construct
  source 1..75: mol_type = other DNA
atcctgccgccgtcccgtcactttatcgacgttgagcaggcattttgcttcctgatgtacgcccagacgtttgca

SEQ ID NO: 502221 - DNA, 75 bp, synthetic construct
  source 1..75: mol_type = other DNA
cactaatccgatggactacctgaatccagctcatccgctactgttgatctccttcggtcgatccggcaacagccc

SEQ ID NO: 502222 - DNA, 75 bp, synthetic construct
  source 1..75: mol_type = other DNA
ctgatgcagtcgctgcacatgggcaatacgccggataccccatcagccagcggcaccgttaaccgcgtggtgcaa

SEQ ID NO: 502223 - DNA, 75 bp, synthetic construct
  source 1..75: mol_type = other DNA
atgatctggcagcctgagttcacagataaaacactctccaggaaacccggggcggttcactatcgtatggaatac

SEQ ID NO: 502224 - DNA, 75 bp, synthetic construct
  source 1..75: mol_type = other DNA
ccggccggaactctcaggcttaaaggtaaactgacgccggcgttattacagacacttatccgcgaaataaaaggg

SEQ ID NO: 502225 - DNA, 75 bp, synthetic construct
  source 1..75: mol_type = other DNA
ggagcctgtgtggcgcagattgcccgtgaaaatggaatcaacgataacctgctcttcaactggcgccatcaatac

SEQ ID NO: 502226 - DNA, 75 bp, synthetic construct
  source 1..75: mol_type = other DNA
gtctggtctgtttcctccggctctacaaaaataatgtccatcatttttaatggacactatcgtatgaaacaccgg

SEQ ID NO: 502227 - DNA, 75 bp, synthetic construct
  source 1..75: mol_type = other DNA
gtcactgcagcccggaggtaagcgtgcagcaagaaccgtattgacggggatgtgttattcagtcggcagtgctac

SEQ ID NO: 502228 - DNA, 75 bp, synthetic construct
  source 1..75: mol_type = other DNA
tgatgagtggataaaagatgaacggatagtatatccctcaagggtgatcaaccaggagattgataattactgttt

SEQ ID NO: 502229 - DNA, 75 bp, synthetic construct
  source 1..75: mol_type = other DNA
ggttatgcgctggttgcatggtctggtcacgacgccggtatcgtctatatgggtatggcggctattgccgtaggt

SEQ ID NO: 502230 - DNA, 75 bp, synthetic construct
  source 1..75: mol_type = other DNA
gaactttcagccagacacaataaagattgtttacgatgaaaataatattattgtcgctatcaccagagatgcttc

SEQ ID NO: 502231 - DNA, 75 bp, synthetic construct
  source 1..75: mol_type = other DNA
gctacgataatgcctgcgtggaaagcttctttcattcgctgaaagtggaatgtatccatggagaacactttatca

SEQ ID NO: 502232 - DNA, 75 bp, synthetic construct
  source 1..75: mol_type = other DNA
cctgcagatggcgctgtggtggcgtaagagacccagaaacgttatcgttcactcggaccgcggaagccagtactg

SEQ ID NO: 502233 - DNA, 75 bp, synthetic construct
  source 1..75: mol_type = other DNA
aatttttgacctggacatctcgctggaccgtgttgaaggtgccgcgctggagttttatgaggcagcagccagaat

SEQ ID NO: 502234 - DNA, 75 bp, synthetic construct
  source 1..75: mol_type = other DNA
acgaacagctgcaactggcggaattacagaagtcagctttgcgttccgaagctgaaactatcattcagccactgg

SEQ ID NO: 502235 - DNA, 75 bp, synthetic construct
  source 1..75: mol_type = other DNA
gtattttgctgatgacacgataaaaatagcgtacgacaaagataatattatccgctatgtggaaaaggatgtgac

SEQ ID NO: 502236 - DNA, 75 bp, synthetic construct
  source 1..75: mol_type = other DNA
tcgccagactctacgcccgacacaaacacgtggatctgtctgcttcgcgccgcagcccactaactcaccacaaaa

SEQ ID NO: 502237 - DNA, 75 bp, synthetic construct
  source 1..75: mol_type = other DNA
gaagcatgggaacgctacagtgttctggtcagccgtgtggatacggcaaagccagaatggccacaaaagcctgag

SEQ ID NO: 502238 - DNA, 75 bp, synthetic construct
  source 1..75: mol_type = other DNA
gttgttgaagtggcggatattactgctaaccgacgggcggacatttcagggaactggatgtttaaggacggcaaa

SEQ ID NO: 502239 - DNA, 75 bp, synthetic construct
  source 1..75: mol_type = other DNA
gaggcttgggaacgctacagcgttctggtcagtcgtgtggatcctgcaaatcctgaatggccggaaatgccgcaa

SEQ ID NO: 502240 - DNA, 75 bp, synthetic construct
  source 1..75: mol_type = other DNA
tacgataatgcctgcgtggaaagcttctttcattcgctgaaagtggaatgtatccatggagaacactttatcagc

SEQ ID NO: 502241 - DNA, 75 bp, synthetic construct
  source 1..75: mol_type = other DNA
ttatcttgatgagcgaaaggttatgatgcaagactgggcagataaacttgaaggatgggtaggaagcacacacag

SEQ ID NO: 502242 - DNA, 75 bp, synthetic construct
  source 1..75: mol_type = other DNA
aactattgcatgtggctcatgtggtggacgctggcgcgaccagccgaagtaactgaggctgaatggacagaattc

SEQ ID NO: 502243 - DNA, 75 bp, synthetic construct
  source 1..75: mol_type = other DNA
acagcacctttttccaggcagggataatccgctaggtccaatgacatcacactctctgcgtcaactacttaaaag

SEQ ID NO: 502244 - DNA, 75 bp, synthetic construct
  source 1..75: mol_type = other DNA
gttggcgaccttaaagacgatgccctgctgtggaatggcaccgcattcagcgccgctcacggtaccgatgccacc

SEQ ID NO: 502245 - DNA, 75 bp, synthetic construct
  source 1..75: mol_type = other DNA
gttaacgtggatatttcgggtactcatcctgctttctcctctctctggttttcagcccccatcatctgttgagtt

SEQ ID NO: 502246 - DNA, 75 bp, synthetic construct
  source 1..75: mol_type = other DNA
gaagccgccacggcaagtggtgaggcaactgtaaacatccagttgcagacgagtgagaataacagctcatggtcc

SEQ ID NO: 502247 - DNA, 75 bp, synthetic construct
  source 1..75: mol_type = other DNA
tgaagcggcataatctgcgtggaaagcttctttcattcgctgaaagtggaatgtatccatggagaacactttatc

SEQ ID NO: 502248 - DNA, 75 bp, synthetic construct
  source 1..75: mol_type = other DNA
ctgcgccgtcagggactgagggcaaaggcctcccggaagttcagcccggtcagctaccgcgcacacggcctgcct

SEQ ID NO: 502249 - DNA, 75 bp, synthetic construct
  source 1..75: mol_type = other DNA
ttttacccggtcaaaacagcgttacggtgccccacgcctgacggatgaactgcgtgctcagggttacccctttaa

SEQ ID NO: 502250 - DNA, 75 bp, synthetic construct
  source 1..75: mol_type = other DNA
ttaccttgatgagcgtaaagtgatgatgcaggaatggtctgatatgttggacaaatgggtagcaggatccgagta

SEQ ID NO: 502251 - DNA, 75 bp, synthetic construct
  source 1..75: mol_type = other DNA
aacttgccgaagctcgcgagaaatgcgagcaagcgcgtaagcaagtcgcagatggagttagcccaacacaggctc

SEQ ID NO: 502252 - DNA, 75 bp, synthetic construct
  source 1..75: mol_type = other DNA
tcgcaaaactctacgcccgacacaaacatgtggatctgtctgcttcgcgccgcagcccacttactcaccccaaaa

SEQ ID NO: 502253 - DNA, 75 bp, synthetic construct
  source 1..75: mol_type = other DNA
gccgtggctggccgcgaaatacggctggagtgttgcgtttgcgttgagcgttgtaggcctgctgatcactatcgt

SEQ ID NO: 502254 - DNA, 75 bp, synthetic construct
  source 1..75: mol_type = other DNA
gccgttattgcagtactgatgctgtttaccgcgccgaaactgcaccgcatgacgcaggatgacgctgcagacaaa

SEQ ID NO: 502255 - DNA, 75 bp, synthetic construct
  source 1..75: mol_type = other DNA
accaggagattgataattactgttttcaaaaaaatgcaaaaatttccactgaagagaggcaaagggtcttttctc

SEQ ID NO: 502256 - DNA, 75 bp, synthetic construct
  source 1..75: mol_type = other DNA
atgcagcatttaaaaaacattactgctggcaatcctaaaacaaaagagcaatatcagctaacaaagaattttgat

SEQ ID NO: 502257 - DNA, 75 bp, synthetic construct
  source 1..75: mol_type = other DNA
atgcagcatttaaaaaatattactgcaggtaatcccaaaactatcgaacagtatcaacttacaaaagaatttgat

SEQ ID NO: 502258 - DNA, 75 bp, synthetic construct
  source 1..75: mol_type = other DNA
ttgtcgccatcaccagagatgcttcaacgctcaaccctgaaggttttagcgttgtcgaggttcctgatattaccg

SEQ ID NO: 502259 - DNA, 75 bp, synthetic construct
  source 1..75: mol_type = other DNA
ggcatcccgtataccaccgttcgtaaagaaaacaactacggcctgagcatcactttccgcgatgctaaagctcgt

SEQ ID NO: 502260 - DNA, 75 bp, synthetic construct
  source 1..75: mol_type = other DNA
actgttcagcaggcaattgatgaaggttatcgtggcgcattcagttccatcttcgatgcgaacatcaccacgctg

SEQ ID NO: 502261 - DNA, 75 bp, synthetic construct
  source 1..75: mol_type = other DNA
agatgcaaacggtcgtgcagtactggttaagcaggaagaggtgattaacatcgctaatatccagtctcgtctggg

SEQ ID NO: 502262 - DNA, 75 bp, synthetic construct
  source 1..75: mol_type = other DNA
gttatctggttatggtccgaagacggtaaaaactggtatgaggaagtaaataactttcaggacgacaccataaag

SEQ ID NO: 502263 - DNA, 75 bp, synthetic construct
  source 1..75: mol_type = other DNA
agcaaacttttgaccaggctgaataatagcgatctgctgcttctggatgactggggctggaacctctctcatcag

SEQ ID NO: 502264 - DNA, 75 bp, synthetic construct
  source 1..75: mol_type = other DNA
ggtattcaggacaccgcgcgtgcgaaagagattctgggtgcgacggcaacgctggaattccgtctggtaaacacc

SEQ ID NO: 502265 - DNA, 75 bp, synthetic construct
  source 1..75: mol_type = other DNA
gtcgttgaggttcccgatataacagccaaccgccgcgctgatgattcaggaaagtggatgtttaaggatggagct

SEQ ID NO: 502266 - DNA, 75 bp, synthetic construct
  source 1..75: mol_type = other DNA
tagtcgctatcaccagagatgcttcaacgcttaatcctgaaggttttagcgtcgttgaggttcccgatataacag

SEQ ID NO: 502267 - DNA, 75 bp, synthetic construct
  source 1..75: mol_type = other DNA
gccgaatccgtgattttgccgctggagcgcgctgtcaggctgaatatggcaacagatgaggaacgcagccgactg

SEQ ID NO: 502268 - DNA, 75 bp, synthetic construct
  source 1..75: mol_type = other DNA
gaactttcagtcagacacaataaagattgtttacgacgagaataatataattgtcggcatcacccgagatgcttc

SEQ ID NO: 502269 - DNA, 75 bp, synthetic construct
  source 1..75: mol_type = other DNA
tataccgtgatggccagcgatctcgcccgtgaaggcattaccgtgcactttattttaaacctctgtctggctgga

SEQ ID NO: 502270 - DNA, 75 bp, synthetic construct
  source 1..75: mol_type = other DNA
gtttattctcgtccagctcgcaaaactctacgcccgacacaaacatgtggatctgtctgcttcgcgccgcagccc

SEQ ID NO: 502271 - DNA, 75 bp, synthetic construct
  source 1..75: mol_type = other DNA
gatgcatgggaacgctacagcgttctggtcagtcgtgtggacccttcaaatcctgaatggccggacatgccgcaa

SEQ ID NO: 502272 - DNA, 75 bp, synthetic construct
  source 1..75: mol_type = other DNA
acaaaagtccgcgttactttccgaagctgaatcagttatccagccactggaacgcgctgtcagattgaatatggc

SEQ ID NO: 502273 - DNA, 75 bp, synthetic construct
  source 1..75: mol_type = other DNA
ctggcaatccaaaaaccgttgagcaatatcagctaacaaaaaattttaatgttgcctggctgtggtcagaagacg

SEQ ID NO: 502274 - DNA, 75 bp, synthetic construct
  source 1..75: mol_type = other DNA
ccattctggatcatcattggtagcccgattctggccgctatctataacaagatgggcgataccctgccgatgccg

SEQ ID NO: 502275 - DNA, 75 bp, synthetic construct
  source 1..75: mol_type = other DNA
tcaaccgacgtgctgacgactcaggtaaatggatgtttaaggatggtgctgtggttaaacggatttatacggcag

SEQ ID NO: 502276 - DNA, 75 bp, synthetic construct
  source 1..75: mol_type = other DNA
aacgcttaatccggcggggttaagtgttgttgaggtggcagatataacggcgaaccgccgtgcagacgattcggg

SEQ ID NO: 502277 - DNA, 75 bp, synthetic construct
  source 1..75: mol_type = other DNA
ccggctgtcggcatgggagcgttacagcgtcctgctcagccgggtggattcagcgaacccggaatggccacaaaa

SEQ ID NO: 502278 - DNA, 75 bp, synthetic construct
  source 1..75: mol_type = other DNA
taaccgtaaatagtggtgtgggattagaaacagtaattcacaataaacctgtcattataacagggaaaagtgatt

SEQ ID NO: 502279 - DNA, 75 bp, synthetic construct
  source 1..75: mol_type = other DNA
atgcgcaattacatattaagaaaaatgataagcaaagatactagagataattttatcataaaggctatgttttat

SEQ ID NO: 502280 - DNA, 75 bp, synthetic construct
  source 1..75: mol_type = other DNA
ttcacttgcaggcttgaacagcagaaaatttgcgagcatgattgcaattatttcactgcctgggatatcaatggc

SEQ ID NO: 502281 - DNA, 75 bp, synthetic construct
  source 1..75: mol_type = other DNA
atgaccaataaattcatagtttctaccgttgattgtatcaatgaatttgcaagtgacgttccgcagagtgtttcc

SEQ ID NO: 502282 - DNA, 75 bp, synthetic construct
  source 1..75: mol_type = other DNA
aatgccctcctgccgcacggaaacaacttccatccgggtcatgaaagaatcatttcatctgacggctgtaccccg

SEQ ID NO: 502283 - DNA, 75 bp, synthetic construct
  source 1..75: mol_type = other DNA
aaccataacgatgataacaaaaaactgaaaggttttttgaatggtaatgagattgaacttaatcatgatgaaaaa

SEQ ID NO: 502284 - DNA, 75 bp, synthetic construct
  source 1..75: mol_type = other DNA
ccacgacacaaaaagggatagttcagctcagtagcgacaccaacagcacttctgaaacattagctgcaactccaa

SEQ ID NO: 502285 - DNA, 75 bp, synthetic construct
  source 1..75: mol_type = other DNA
tgaacctgttaatcacctcagtggatggtgataaaaccgctggcgcggcgtcagtggatattggtgaattctacc

SEQ ID NO: 502286 - DNA, 75 bp, synthetic construct
  source 1..75: mol_type = other DNA
gatgtatttatggatgatgaaataaaagcgcattggtgtaattttggcacatggtgtgaacctccattttttata

SEQ ID NO: 502287 - DNA, 75 bp, synthetic construct
  source 1..75: mol_type = other DNA
aaaagaaacagaagactacgaagcattagagcgttatcgtgatgaagtgctgacgctcaagacaccttttaacat

SEQ ID NO: 502288 - DNA, 75 bp, synthetic construct
  source 1..75: mol_type = other DNA
gatttccggggcggttcagacagagcatccgggcggaacctgagtgaagtacatgcgctcaatacgctggtgaac

SEQ ID NO: 502289 - DNA, 75 bp, synthetic construct
  source 1..75: mol_type = other DNA
atgttaccgatcgtctccccctccgtagtaaccaaacaacttgcgttcaatcgagtaggcgataaacgcaaggtt

SEQ ID NO: 502290 - DNA, 75 bp, synthetic construct
  source 1..75: mol_type = other DNA
cgtgaaagaaaacgatcttcatttaactgagttttacttctatgacgctaactggtcattttgtggtgaagatga

SEQ ID NO: 502291 - DNA, 75 bp, synthetic construct
  source 1..75: mol_type = other DNA
catcaacgttcggagtagataccactactattttagataaattatacaataaattattcggtatcgaagagattg

SEQ ID NO: 502292 - DNA, 75 bp, synthetic construct
  source 1..75: mol_type = other DNA
tggctaatacagaagtaattagaatggcctggcacgattttcaagaggttgcaagagaaaattatcctttggttg

SEQ ID NO: 502293 - DNA, 75 bp, synthetic construct
  source 1..75: mol_type = other DNA
atatccataaacattttaaagataatgttcagtctataaactctcttttggcaagtgatagtaataccgttgtat

SEQ ID NO: 502294 - DNA, 75 bp, synthetic construct
  source 1..75: mol_type = other DNA
tgatcatcgactgttgaaaaacgcagtatcacaaattgaatattatcaacagcatggtaataataaattattaca

SEQ ID NO: 502295 - DNA, 75 bp, synthetic construct
  source 1..75: mol_type = other DNA
acaccctgtaagcgatataaaagctttcatcaggaagtctaataaaatagttttatcactaagagggaatcatag

SEQ ID NO: 502296 - DNA, 75 bp, synthetic construct
  source 1..75: mol_type = other DNA
atcgaagggcattaaatgatgagattctttctgttataagtaaagagccaagctcaggaataaaaaacaaactcc

SEQ ID NO: 502297 - DNA, 75 bp, synthetic construct
  source 1..75: mol_type = other DNA
atggcggaaaatcgtgttgaggccaacgccaataatgcgtgcactggcgcgacatccgacgccattcatggccat

SEQ ID NO: 502298 - DNA, 75 bp, synthetic construct
  source 1..75: mol_type = other DNA
taaagatagcatttaaaataaaattcagtaaaaatcatgtaaatatccgagcattattaaatgacatcaattatt

SEQ ID NO: 502299 - DNA, 75 bp, synthetic construct
  source 1..75: mol_type = other DNA
tgtgtcgttgagattgaaaacattgtctttggcggttacatttatacattgaacaacggcgtcacattacaaaac

SEQ ID NO: 502300 - DNA, 75 bp, synthetic construct
  source 1..75: mol_type = other DNA
ttaaccgcgttcagtttcgtgagaaatttaccgggcagctactggtcaatgtggataaaggtcgcgtggtgtgta

SEQ ID NO: 502301 - DNA, 75 bp, synthetic construct
  source 1..75: mol_type = other DNA
catatcagccccccatgaactggcaaatattcttacccgcgaaaaatacttacagcacgggaaaaaaaagaaacc

SEQ ID NO: 502302 - DNA, 75 bp, synthetic construct
  source 1..75: mol_type = other DNA
gcaaaagggattagttcagctcagtagtgccactaacagtacgtccgaagtgctggccgccacaccgaaagctgt

SEQ ID NO: 502303 - DNA, 75 bp, synthetic construct
  source 1..75: mol_type = other DNA
gctaaagagtttggccttaatcccgaagacgtcagggcaatggtgatgcctgtactggttcgcgagcgcctcact

SEQ ID NO: 502304 - DNA, 75 bp, synthetic construct
  source 1..75: mol_type = other DNA
ttctggccgcagcgaacattgagggggttatcgctgtggtgtcatctcttgaaaagcaagagacgaagttggggc

SEQ ID NO: 502305 - DNA, 75 bp, synthetic construct
  source 1..75: mol_type = other DNA
agcagggtgaaccgtggcaaacgattcgtttaatttctgaattttacccggaagacagcggcctgttctccccgc

SEQ ID NO: 502306 - DNA, 75 bp, synthetic construct
  source 1..75: mol_type = other DNA
ctgatactcggttggctgattgtgttttcaccatacctaattgctatgctcgctgatggcatgtatcagtggaaa

SEQ ID NO: 502307 - DNA, 75 bp, synthetic construct
  source 1..75: mol_type = other DNA
tggcaaaaaatctacccctgctgatttatcagtccattttccgatggaatctgatactcggttggctgattgtgt

SEQ ID NO: 502308 - DNA, 75 bp, synthetic construct
  source 1..75: mol_type = other DNA
atggctgcggataattctgctcgtgcagtattcatcaggggactgcttttactagggatgatgctttatcttatt

SEQ ID NO: 502309 - DNA, 75 bp, synthetic construct
  source 1..75: mol_type = other DNA
ctgctgagaatggacagcgaacggcgcatgaaaacgctgggtgagtcggtgaaaaatacgctgctgacgcccaat

SEQ ID NO: 502310 - DNA, 75 bp, synthetic construct
  source 1..75: mol_type = other DNA
gcccgtctctgtcgtcgtcccaatgcacagcagaatcgtatccagttttttgaactgtggctgaacgccaaactg

SEQ ID NO: 502311 - DNA, 75 bp, synthetic construct
  source 1..75: mol_type = other DNA
tattcccagtgtctgcagacgctgattgagtccattgagctgttactggatgaggcgctggaaacaggggaaaac

SEQ ID NO: 502312 - DNA, 75 bp, synthetic construct
  source 1..75: mol_type = other DNA
ttgaggtccccggcagtattacggaagaaaacgcgaaaaaactgaaggggaactgggacagcggatatacgggcg

SEQ ID NO: 502313 - DNA, 75 bp, synthetic construct
  source 1..75: mol_type = other DNA
acggcgcatctgacggtaataaggcaatcagtgaaacagagcatggtgcgttgaaagcgatgttgagggggatac

SEQ ID NO: 502314 - DNA, 75 bp, synthetic construct
  source 1..75: mol_type = other DNA
gaaaacactgggtgaatcggtgaaaaatacgcttctcacgcccaatgaggcccgtaaacgtgagaacctgccgcc

SEQ ID NO: 502315 - DNA, 75 bp, synthetic construct
  source 1..75: mol_type = other DNA
gtttatcgatgctgaacacgcgctggacccaatctacgcacgtaaactgggcgtcgatattgacaacctgctgtg

SEQ ID NO: 502316 - DNA, 75 bp, synthetic construct
  source 1..75: mol_type = other DNA
actgggcgccaaactgatcgaattcggtgccagagcgctggaaagcacctcgctgtacgaagttgcgctgcccgt

SEQ ID NO: 502317 - DNA, 75 bp, synthetic construct
  source 1..75: mol_type = other DNA
caggtaaagagctggacaggactcaccatgggggtgggcattgcgcccacaaaaacgctggctaaaagtgcccag

SEQ ID NO: 502318 - DNA, 75 bp, synthetic construct
  source 1..75: mol_type = other DNA
ccatgggggtgggcattgcgcctacaaaacgctggctaaaagtgcacagtgggcaacaaagcaatggccacagtt

SEQ ID NO: 502319 - DNA, 75 bp, synthetic construct
  source 1..75: mol_type = other DNA
atgaaggaagccggtggcggttttctgatggtgccagtagctttttggctgaaataaaagaccagaaattcatca

SEQ ID NO: 502320 - DNA, 75 bp, synthetic construct
  source 1..75: mol_type = other DNA
atggcagaaacctcttcaaccaccgcaggcgcacaaacgttattacgtggactggcggttcttaatgctgtttat

SEQ ID NO: 502321 - DNA, 75 bp, synthetic construct
  source 1..75: mol_type = other DNA
tgtttaagacctgtggtgatgaaacaaaactgggcgcatttattcagaacatgcgtcgttatgccgccagtggtt

SEQ ID NO: 502322 - DNA, 75 bp, synthetic construct
  source 1..75: mol_type = other DNA
atgaaaaccagtgtgcgcataggcgcttttataatcgacgacggcgaattacacggcgaatcgccgggtgaccga

SEQ ID NO: 502323 - DNA, 75 bp, synthetic construct
  source 1..75: mol_type = other DNA
ggagtacttgaaccagctattgaacaacttcgtgctttaggcggctggtcactgaccagtaaagttccattaaga

SEQ ID NO: 502324 - DNA, 75 bp, synthetic construct
  source 1..75: mol_type = other DNA
aggctggcgcgacaccggtttatctggaaaccgcacgtaacccgtatggctttatcggtggcattgatgcgcact

SEQ ID NO: 502325 - DNA, 75 bp, synthetic construct
  source 1..75: mol_type = other DNA
ccaaatcgggaaccaactcccgtaatggctattccacgaaaaccgtcccactaccgacgggccgatggaattacg

SEQ ID NO: 502326 - DNA, 75 bp, synthetic construct
  source 1..75: mol_type = other DNA
catctgggcatcccctgaagaggccgccggatggatgacccgcgtggccggcgagcagaccattagcgtggcgca

SEQ ID NO: 502327 - DNA, 75 bp, synthetic construct
  source 1..75: mol_type = other DNA
cgcggcgtggtcgaggcgctgcgcgacgatccggacgttgccgtcctcaccgaacggctggcgggagaactggcg

SEQ ID NO: 502328 - DNA, 75 bp, synthetic construct
  source 1..75: mol_type = other DNA
gtgagctgtatatgcaacggaggaagaaacctcgttgcgggaagccttgaagaagtatcgggtgttgctgaaccg

SEQ ID NO: 502329 - DNA, 75 bp, synthetic construct
  source 1..75: mol_type = other DNA
taaattgcttcttgaatgcgttgtaaaaacacagtcaacagttgccaagattttaggtattgagtcactcagtcc

SEQ ID NO: 502330 - DNA, 75 bp, synthetic construct
  source 1..75: mol_type = other DNA
gaagctcagatggagcgtaaagagtccgcgtttaatcagattgagtttaataaattacttcttgaatgcgttgta

SEQ ID NO: 502331 - DNA, 75 bp, synthetic construct
  source 1..75: mol_type = other DNA
tgatccgcgcgcttgggatgtggcaagcctgatggattttgcgattccacttttagcgtgcacattattatatat

SEQ ID NO: 502332 - DNA, 75 bp, synthetic construct
  source 1..75: mol_type = other DNA
tccgcgagcttgggatgtggcaagcctgatggattttgctgtgccggtggtggcgtgtctgctggtctggctgtt

SEQ ID NO: 502333 - DNA, 75 bp, synthetic construct
  source 1..75: mol_type = other DNA
aaactgggcttacggagcgatagccggttgtacgttcttcattgcgcgtgaacatacccaggcagaatatcgctg

SEQ ID NO: 502334 - DNA, 75 bp, synthetic construct
  source 1..75: mol_type = other DNA
gaatatgcaaatatggttgaagatatcagggataaggtatcaattgagatggatagattttttccaaaaattgat

SEQ ID NO: 502335 - DNA, 75 bp, synthetic construct
  source 1..75: mol_type = other DNA
tcatatagcaggtaatccaaaatttgaatatgcaaatatggttgaagatatcagggataaggtatcaattgagat

SEQ ID NO: 502336 - DNA, 75 bp, synthetic construct
  source 1..75: mol_type = other DNA
cacgcccggctattcgtgtcttcgcaacctacgccaagtgggatgagaaatggggttatgactacaacggtagct

SEQ ID NO: 502337 - DNA, 75 bp, synthetic construct
  source 1..75: mol_type = other DNA
cacccaggcagaatatcgctggattgaaatgtttgggcatggcaagaggattaacatgccgtggtggggcggttt

SEQ ID NO: 502338 - DNA, 75 bp, synthetic construct
  source 1..75: mol_type = other DNA
gtgatgaaatcgtctataaaataaatgaaattgtggaaagaagacgtgcagaaggagccaaaagcacagatgtaa

SEQ ID NO: 502339 - DNA, 75 bp, synthetic construct
  source 1..75: mol_type = other DNA
tcttgaactggggcttcgcgtatatgaggctcagatggagcgtaaagagtctgcatttaatcagactgagtttaa

SEQ ID NO: 502340 - DNA, 75 bp, synthetic construct
  source 1..75: mol_type = other DNA
gtacgttcttcattgctcgtgaacatacccaggcagaatatcgctggattgaaatgttcgggcatggcaagcgta

SEQ ID NO: 502341 - DNA, 75 bp, synthetic construct
  source 1..75: mol_type = other DNA
atcatgccgtgacggaagagattaaatactgggcgcgctgggtgatggaacaaacgcaatgcgacggttttcgtc

SEQ ID NO: 502342 - DNA, 75 bp, synthetic construct
  source 1..75: mol_type = other DNA
ggaagccgatccttttcacgccgtaaccctcgttgccaaccacgacacccaaccgttgcaagccctcgaagcacc

SEQ ID NO: 502343 - DNA, 75 bp, synthetic construct
  source 1..75: mol_type = other DNA
ttcaacggcggcagcttcggtcgtggcgacagcgacgagtggaccttcggtgcccagatggaaatctggtggtaa

SEQ ID NO: 502344 - DNA, 75 bp, synthetic construct
  source 1..75: mol_type = other DNA
tggtggtcatgtcaaacggcgacgatggcgaaaaaaccattaatctgggggagaattacggcaataaaacctggc

SEQ ID NO: 502345 - DNA, 75 bp, synthetic construct
  source 1..75: mol_type = other DNA
gacgaaaacggcgaagcgaccttcttttgcaacggcggcagcgtcagcgtgtgggttatcgaagaggtgatttaa

SEQ ID NO: 502346 - DNA, 75 bp, synthetic construct
  source 1..75: mol_type = other DNA
caatgacattgcggtactgctggacgtggtcgtcaaccacaaaatgggcgcagatgaaaaagaagccattcgcgt

SEQ ID NO: 502347 - DNA, 75 bp, synthetic construct
  source 1..75: mol_type = other DNA
tgtgtcggctgatttcaacggcggtagcttcggtcgtggcgacagcgacgagtggaccttcggtgcccagatgga

SEQ ID NO: 502348 - DNA, 75 bp, synthetic construct
  source 1..75: mol_type = other DNA
gtacgttcttcattgcgcgtgaacacacccaggcggaatatcgctggattgaaatgtttgggcatggcaagagga

SEQ ID NO: 502349 - DNA, 75 bp, synthetic construct
  source 1..75: mol_type = other DNA
gtgcagtagccgtgcaggggctggtcgggtgcattaccggtgactgggtttacggagcgatagcgggttgtacgt

SEQ ID NO: 502350 - DNA, 75 bp, synthetic construct
  source 1..75: mol_type = other DNA
atggatataacacctttccttcatgcactttgtgctgtggctgcgcagctactgattggtctttttaccgggaac

SEQ ID NO: 502351 - DNA, 75 bp, synthetic construct
  source 1..75: mol_type = other DNA
caaatccacccttttacgtcacttaagcggtttgattaccggcgataaatccgccggtagccatatcgagctgct

SEQ ID NO: 502352 - DNA, 75 bp, synthetic construct
  source 1..75: mol_type = other DNA
agcgtgtggcgattgcccgcgcgctgatgcagcaggcgaaggtgattctggccgatgaacccatcgcctcgctgg

SEQ ID NO: 502353 - DNA, 75 bp, synthetic construct
  source 1..75: mol_type = other DNA
gaatatgcgaatatggtcgaagatatcagagagaaggtgtcatctgagatggaacgattttttccaaaacatgat

SEQ ID NO: 502354 - DNA, 75 bp, synthetic construct
  source 1..75: mol_type = other DNA
tggctacattccattctaatgtagaagagtatcataagcttttcaataaagtcgtatcaaaaggttctacggata

SEQ ID NO: 502355 - DNA, 75 bp, synthetic construct
  source 1..75: mol_type = other DNA
agtggatggattccatagtgacatgaacattaaaaagttagttaagctgatgaaaaaaaatataaatagcttaag

SEQ ID NO: 502356 - DNA, 75 bp, synthetic construct
  source 1..75: mol_type = other DNA
tgacagggtcaaagtaaaagaaataaatgttgagtttaatgataatagtttaataaaaaatctaatacatgatgg

SEQ ID NO: 502357 - DNA, 75 bp, synthetic construct
  source 1..75: mol_type = other DNA
gaaaataagatacattatcttatgtcagatattcataaacaatttaaagataacgttcagtctataaactctctt

SEQ ID NO: 502358 - DNA, 75 bp, synthetic construct
  source 1..75: mol_type = other DNA
cctcataattatcctgtcttcgatcagattgttttattggatggtgaaaaattatcgcaatataaaacgaattat

SEQ ID NO: 502359 - DNA, 75 bp, synthetic construct
  source 1..75: mol_type = other DNA
ggtgacggatatggaggtcgttgtgatccgttgtctattttggttctcacttcaaaataccttgaaaaccaatct

SEQ ID NO: 502360 - DNA, 75 bp, synthetic construct
  source 1..75: mol_type = other DNA
ggtgcatacaatgccggattcaggaagaccgaacgccagaaccagagacgtcttgcctacgcatcagatgtttac

SEQ ID NO: 502361 - DNA, 75 bp, synthetic construct
  source 1..75: mol_type = other DNA
agtcatggtactctgttattaagagatatattcgagttatctcagcgctctagtggggatgttctaatctataat

SEQ ID NO: 502362 - DNA, 75 bp, synthetic construct
  source 1..75: mol_type = other DNA
ttgctcattatttaaaagacaaaaacataaataatattctgataaccacagaacatcacagtcttgtagtatccg

SEQ ID NO: 502363 - DNA, 75 bp, synthetic construct
  source 1..75: mol_type = other DNA
cacatcagaagagattaggttttacgctagtacaataaaaaacaaatgtatattaaagatagtatggtcttatgg

SEQ ID NO: 502364 - DNA, 75 bp, synthetic construct
  source 1..75: mol_type = other DNA
tgagaaactaatacctactggtatcaaagaacaccctgaatatgtaagagaaaataatatccaaacgcaagtgat

SEQ ID NO: 502365 - DNA, 75 bp, synthetic construct
  source 1..75: mol_type = other DNA
gcattattaaatgacatcaattattttatgacttatcagggcgagtccattaaccttatttcactggatcacgaa

SEQ ID NO: 502366 - DNA, 75 bp, synthetic construct
  source 1..75: mol_type = other DNA
aaaatattaatagatattttgtatcgatcatgaatcagaatgtgtctgggctgggagtaaagttttctaatacgg

SEQ ID NO: 502367 - DNA, 75 bp, synthetic construct
  source 1..75: mol_type = other DNA
agtggcagtttagataaaatgctggcagaaatagatgttgcttttgcatcaacttataccgcgcttacactatct

SEQ ID NO: 502368 - DNA, 75 bp, synthetic construct
  source 1..75: mol_type = other DNA
gatctggaagagatatctcaagtagatcaaaagataagcaagtatttgatatctcaaactaatagtcttgttaaa

SEQ ID NO: 502369 - DNA, 75 bp, synthetic construct
  source 1..75: mol_type = other DNA
atccttgatctgccattctccctggtttttgatactttactgctgccgatcgacattcatcatggccctatgagt

SEQ ID NO: 502370 - DNA, 75 bp, synthetic construct
  source 1..75: mol_type = other DNA
ctggaacaatcattagcatttattgagaattctgttagcatttctccagatataaaagaaatctatacgggtaag

SEQ ID NO: 502371 - DNA, 75 bp, synthetic construct
  source 1..75: mol_type = other DNA
ggtatcgaagagattgtcagagattccagtaagcaaagcaaaattcatcatgagatcattgctggaatattaagt

SEQ ID NO: 502372 - DNA, 75 bp, synthetic construct
  source 1..75: mol_type = other DNA
gtgtagcacttgaacatgcaaaaagtgaagttattaacagtttaactatcgaggagcttaatgtattaaaaaata

SEQ ID NO: 502373 - DNA, 75 bp, synthetic construct
  source 1..75: mol_type = other DNA
gcctggaaaaaagttgagcactatctagatactgctgcaagacgtaatgttgtcaaagttgatacctcccgggga

SEQ ID NO: 502374 - DNA, 75 bp, synthetic construct
  source 1..75: mol_type = other DNA
agaaatatattgatacgaactatataacagcaaaagaacatgagaaagtaaatttacttataaatgaaattaata

SEQ ID NO: 502375 - DNA, 75 bp, synthetic construct
  source 1..75: mol_type = other DNA
ccgagaactatctttatcagaatcaggattagttcgcggttttgcaaacaggatatggccttcacatgtaccgat

SEQ ID NO: 502376 - DNA, 75 bp, synthetic construct
  source 1..75: mol_type = other DNA
gggcaaagggctgtcgcaagggtctggcgtcgcatttgataacgaacactttgcttacaacatcaacaacaacgg

SEQ ID NO: 502377 - DNA, 75 bp, synthetic construct
  source 1..75: mol_type = other DNA
gcggcacgttagagctgggcgtcgactacggtcgtgccaacctgcgtgataactatcgtctggttgatggtgcat

SEQ ID NO: 502378 - DNA, 75 bp, synthetic construct
  source 1..75: mol_type = other DNA
cggcgcggttgaaacgcgcaaacgctgcaaaatcgtcgccgggcagacagtgagttttgcaggtcacagcgtaca

SEQ ID NO: 502379 - DNA, 75 bp, synthetic construct
  source 1..75: mol_type = other DNA
agttgacttcgaggaagctgaacgtctcatcatgcagcaaccttgccatttgagctcttcaatgaagcgcgaaga

SEQ ID NO: 502380 - DNA, 75 bp, synthetic construct
  source 1..75: mol_type = other DNA
gacacgctaattgatttgattagctataacgcgctaaaagcggagcaaatattaacggagcgggaggaagcacaa

SEQ ID NO: 502381 - DNA, 75 bp, synthetic construct
  source 1..75: mol_type = other DNA
caactgtgatgtttaacggtggtgagattattaatcggcttgatgtgaagtttgacaacgaatcactattacgcg

SEQ ID NO: 502382 - DNA, 75 bp, synthetic construct
  source 1..75: mol_type = other DNA
gacaggcgtggacgtaccggaaccattgatgcgctttatgacaacaaaattgcgctggggcagatttatcgtcat

SEQ ID NO: 502383 - DNA, 75 bp, synthetic construct
  source 1..75: mol_type = other DNA
gcacagaatctgtgggacagcgcccgggcgcttaatcagaatgctctggggcgggcgttgctgcgggaaaccggg

SEQ ID NO: 502384 - DNA, 75 bp, synthetic construct
  source 1..75: mol_type = other DNA
tgaaataaagacaatcacacatccccacttcggcgataaaccggtaaaggtgtacgcgataaaggtgaatatcgg

SEQ ID NO: 502385 - DNA, 75 bp, synthetic construct
  source 1..75: mol_type = other DNA
ctttgctaattttccttcttgtcgcctttgccgccgtattcccggatgtcgccgacaaaaattttaaactacttc

SEQ ID NO: 502386 - DNA, 75 bp, synthetic construct
  source 1..75: mol_type = other DNA
tttaatttcctggagcatttcccgttctcttccgtgctgtcattcattgcaatggcgatggtcatcgtcttcttt

SEQ ID NO: 502387 - DNA, 75 bp, synthetic construct
  source 1..75: mol_type = other DNA
tcgcgtatctgccgaagcgatctcttgtgaaacgttttatggacgacgtcatccagcccgccatgacgctggttc

SEQ ID NO: 502388 - DNA, 75 bp, synthetic construct
  source 1..75: mol_type = other DNA
atgactaaggcaacagatttattgagacttgcggcggaaaccatagagcaaagaggtaagcaaaacggatacgac

SEQ ID NO: 502389 - DNA, 75 bp, synthetic construct
  source 1..75: mol_type = other DNA
ttatctccttcagagattaaccctcaatgtcgttgcgctactgatttgcttgatttgaattttgggtatcagtca

SEQ ID NO: 502390 - DNA, 75 bp, synthetic construct
  source 1..75: mol_type = other DNA
caaaaattttaaactacttcagcaacaaatcttcacgaatgccagctggttctacatccttgctgtggccctgat

SEQ ID NO: 502391 - DNA, 75 bp, synthetic construct
  source 1..75: mol_type = other DNA
ccctgagagtggtgttgtgctgcaacaggatgtcgtgccacttcccggctggctgcttcagaagttaacgcaggg

SEQ ID NO: 502392 - DNA, 75 bp, synthetic construct
  source 1..75: mol_type = other DNA
atcacacatccgcactttggcgataaaccggtaaaggtgttcgctcttaaggtaaataacagcactgaatgtcaa

SEQ ID NO: 502393 - DNA, 75 bp, synthetic construct
  source 1..75: mol_type = other DNA
ctggctgacacactgcctgcggtggccattatcagcaccgggcggggaatggcgacacagcgggagcagatacag

SEQ ID NO: 502394 - DNA, 75 bp, synthetic construct
  source 1..75: mol_type = other DNA
ggggaaatcctgtccgtgccgggtgacggaagtgccagtcgttatgtgccggctgaaacctggctgcaggaaaaa

SEQ ID NO: 502395 - DNA, 75 bp, synthetic construct
  source 1..75: mol_type = other DNA
cgcctgtgtaatgactactggaaaaagcgcctcgttaaccgtaagtatgaccgcctgattatcacaaagggatat

SEQ ID NO: 502396 - DNA, 75 bp, synthetic construct
  source 1..75: mol_type = other DNA
atcacacatccgcactttggcgataaaccggtaacggtgttcgctcttatggtaaatatcagcactgaatgtcaa

SEQ ID NO: 502397 - DNA, 75 bp, synthetic construct
  source 1..75: mol_type = other DNA
atcacacatccgcactttggcgataaaccggtaatggtgttcgctcttatggtaaataccagcactgaatgtcaa

SEQ ID NO: 502398 - DNA, 75 bp, synthetic construct
  source 1..75: mol_type = other DNA
gcaggataactactattttctgggcagcatgcagtcccggtggttaggggaaggcgcaaaatcgctgcaactgga

SEQ ID NO: 502399 - DNA, 75 bp, synthetic construct
  source 1..75: mol_type = other DNA
ccctgagagtggtgttgtgctgcaacaggataccgcgccacttcccggctggctgcttcagaagttaacgcaggg

SEQ ID NO: 502400 - DNA, 75 bp, synthetic construct
  source 1..75: mol_type = other DNA
gcaggcagaaatgacacctgaagccatgaaaacggaacaggctgcacagaataccgatgcagaactgctcagtct

SEQ ID NO: 502401 - DNA, 75 bp, synthetic construct
  source 1..75: mol_type = other DNA
tgagagtgtggtggcgcaggctcccggtcgtgagcagcgggcgctgacggaggccatccgtcagtcactgaaagc

SEQ ID NO: 502402 - DNA, 75 bp, synthetic construct
  source 1..75: mol_type = other DNA
cagacaaacgcggatgcaatggccataaatgccggcattcatgaccgtctgcatgaggccggaaagaccggagag

SEQ ID NO: 502403 - DNA, 75 bp, synthetic construct
  source 1..75: mol_type = other DNA
gctggaaaccctgcctgaagctgacagaccggttgtggtggggctggcacccacgcaccgggccgtcagtgaaat

SEQ ID NO: 502404 - DNA, 75 bp, synthetic construct
  source 1..75: mol_type = other DNA
atgagtgaaaatgaaacaatcccaaagaagtctcacagccagattaacaaagctgtattctttacatctgctttg

SEQ ID NO: 502405 - DNA, 75 bp, synthetic construct
  source 1..75: mol_type = other DNA
cggcatttcatttttagtcatgctggttgccattttcttttccaccgcctggcgagtcctgacgttatcgggact

SEQ ID NO: 502406 - DNA, 75 bp, synthetic construct
  source 1..75: mol_type = other DNA
ctccaacgccagcggcatctttgtcattcgtccgctgaaaggcgagggtgggcgtaacggcaagattgccaatat

SEQ ID NO: 502407 - DNA, 75 bp, synthetic construct
  source 1..75: mol_type = other DNA
aactcataacgctggtgaagagcctctgtgtacttgtcggcatttcattttcactaatgctggttgccattttct

SEQ ID NO: 502408 - DNA, 75 bp, synthetic construct
  source 1..75: mol_type = other DNA
cgaagcggcggaagccatccccgatgcgcgcgatcgtttgtactatgttgtgcagatgaccgcccaggctgcgga

SEQ ID NO: 502409 - DNA, 75 bp, synthetic construct
  source 1..75: mol_type = other DNA
tccatgaaaatgtttatcgcgttaccaaagacaaggtaaacgacaagaacgacattattgaggaagtagctaagc

SEQ ID NO: 502410 - DNA, 75 bp, synthetic construct
  source 1..75: mol_type = other DNA
tgacaaagaccatttgtgtgattgtcgacgtttcattttcgctaatgatggttgctctttttctttccatagcct

SEQ ID NO: 502411 - DNA, 75 bp, synthetic construct
  source 1..75: mol_type = other DNA
tttggcctgacgggcacctctgcttttgatccagcgaagaatgatccgctgagtcgtgcggtgctcggtgaacat

SEQ ID NO: 502412 - DNA, 75 bp, synthetic construct
  source 1..75: mol_type = other DNA
cagaagagttagaggggcaactctttgcttcgatcatgcttgatatggaaaagctgattagcgcgtatcgacgta

SEQ ID NO: 502413 - DNA, 75 bp, synthetic construct
  source 1..75: mol_type = other DNA
gtgcgtgttctggatggtgataccattgacgccatgttatctcagcatccggtgtgtgtccgtcttgttaatatt

SEQ ID NO: 502414 - DNA, 75 bp, synthetic construct
  source 1..75: mol_type = other DNA
tgaaagtggccgggaaaacacttacccaggtacgcaacgagattacagcgcgtctggattcagtcattgaaagcc

SEQ ID NO: 502415 - DNA, 75 bp, synthetic construct
  source 1..75: mol_type = other DNA
taattacatttcatatcagaatatagttatatttacgggggggaatcagtttaagataagaaacaagaaagaatt

SEQ ID NO: 502416 - DNA, 75 bp, synthetic construct
  source 1..75: mol_type = other DNA
gttactgtcacatattttcagcgagatcgttatggtcgtattctcgggcaggtttatgcaccagacggaatgaat

SEQ ID NO: 502417 - DNA, 75 bp, synthetic construct
  source 1..75: mol_type = other DNA
cgcctgttctggatggaagatccgacgcctgccgagaaccaggaatgttttcgtctgattcgccagcataccgtg

SEQ ID NO: 502418 - DNA, 75 bp, synthetic construct
  source 1..75: mol_type = other DNA
agaagaaaactgaaaaccagataaacaaagctgtattctgtacatctgctttgttgattttcctgcttgttgctt

SEQ ID NO: 502419 - DNA, 75 bp, synthetic construct
  source 1..75: mol_type = other DNA
gtcagaattacgatgtgatggggtggaaccaggaacagattatcaatgatatacttgaccaatatgaaaagcatc

SEQ ID NO: 502420 - DNA, 75 bp, synthetic construct
  source 1..75: mol_type = other DNA
tacgtatcctgtctgaactcaatctgggtctggctttgttgctcctggcgctggtcctgtgtctgggaccaaccg

SEQ ID NO: 502421 - DNA, 75 bp, synthetic construct
  source 1..75: mol_type = other DNA
tttcagctaccactcctggttcgcgatgcttttttcggcagggatggggatcggcctgatgttctttggcgttgc

SEQ ID NO: 502422 - DNA, 75 bp, synthetic construct
  source 1..75: mol_type = other DNA
gatgtatgggatctaatgatttgcctcaaggaagcgcgtttaggggctattctcgctaatggaactgatccgctc

SEQ ID NO: 502423 - DNA, 75 bp, synthetic construct
  source 1..75: mol_type = other DNA
ggcagcctacttcactcgtttactaatgctgctggtgagcaaatcactgttacctgctctctgaactacaacatt

SEQ ID NO: 502424 - DNA, 75 bp, synthetic construct
  source 1..75: mol_type = other DNA
tttgacctctgggtgccaaactttggcgttcaggagtacatgggctattccgaacaaatgcttgaagtcttcccg

SEQ ID NO: 502425 - DNA, 75 bp, synthetic construct
  source 1..75: mol_type = other DNA
accgggatgcgacggattgccgattttgcatcgctttatcaggtacgtaccggttcgcatggcccttcagattta

SEQ ID NO: 502426 - DNA, 75 bp, synthetic construct
  source 1..75: mol_type = other DNA
acttatccgccttgtacaaaaggaaggatttgatcttctgatatgtggccatcaccatacatttattaacagact

SEQ ID NO: 502427 - DNA, 75 bp, synthetic construct
  source 1..75: mol_type = other DNA
gccgaaattgtttgacgcggtacgtaacaagtttggttttaatgaacatttgctgcatgacatgcaccatcgctt

SEQ ID NO: 502428 - DNA, 75 bp, synthetic construct
  source 1..75: mol_type = other DNA
ttgtatggtagtaggcgtaaaattaagtttgaagtgtctatttacaatacaggagattgcaataatgaaaattat

SEQ ID NO: 502429 - DNA, 75 bp, synthetic construct
  source 1..75: mol_type = other DNA
ttcgatgagaaactggcggcgaaatatccgtatgacccagcgtatctccccgtcgcgcgactggaagacggtaca

SEQ ID NO: 502430 - DNA, 75 bp, synthetic construct
  source 1..75: mol_type = other DNA
gttgaggtgaagtcgttctcttctcagtataaccgtaagctggttggtaaactgaacgttcctgatctggaactg

SEQ ID NO: 502431 - DNA, 75 bp, synthetic construct
  source 1..75: mol_type = other DNA
gataataaacactctgggtatattagcctggagtttttacctgaaatactgaaagaaattattaaggctattaaa

SEQ ID NO: 502432 - DNA, 75 bp, synthetic construct
  source 1..75: mol_type = other DNA
taaagaaacgactcatgtagcggacagcaaactggatatttcggtcaactggcaaggggcagcaaaagcgtattc

SEQ ID NO: 502433 - DNA, 75 bp, synthetic construct
  source 1..75: mol_type = other DNA
cttacgggtcagcttactgggaggccacaaagccttacaggactggtttttatgtcccgggctcatccccttcaa

SEQ ID NO: 502434 - DNA, 75 bp, synthetic construct
  source 1..75: mol_type = other DNA
tgttggcgctgtaagaaaataactcctgtgtttggtgtttttttgcctcgttggtttagttatagagatgttgtt

SEQ ID NO: 502435 - DNA, 75 bp, synthetic construct
  source 1..75: mol_type = other DNA
ccgcatgctgttgctgagcttgatcaccgcatagagaaaaagaaagctgtgctggttgatttgggtatctccttc

SEQ ID NO: 502436 - DNA, 75 bp, synthetic construct
  source 1..75: mol_type = other DNA
tgcatttatttctggaatggcgttacaccaacttgatcctcgcctgcctgtattgctgactgccattttgagcga

SEQ ID NO: 502437 - DNA, 75 bp, synthetic construct
  source 1..75: mol_type = other DNA
acttgaacataatattcgtgaaattgggttgcgtttagtacgtctcaaagaggccggtatgaaccagaagcaaat

SEQ ID NO: 502438 - DNA, 75 bp, synthetic construct
  source 1..75: mol_type = other DNA
ggcagattaccgttggaagttcaggataagttagatcgtatgattgctcttgtactaaaagataatctgaattcg

SEQ ID NO: 502439 - DNA, 75 bp, synthetic construct
  source 1..75: mol_type = other DNA
aatgtttatccgctgaccccgcgcctgattgatcaattacgcccacgcccgaatgtagcgcgccccaatatgacg

SEQ ID NO: 502440 - DNA, 75 bp, synthetic construct
  source 1..75: mol_type = other DNA
aacaggcgatcaccaacgtaccactgaccattctcgacgccatcaacgccgcaggtggcctgaccgacaccgctg

SEQ ID NO: 502441 - DNA, 75 bp, synthetic construct
  source 1..75: mol_type = other DNA
tattgctgactgccattttgagcgaggagttttcagcagatcaggttgtaaccttactcagtcagacgacaggat

SEQ ID NO: 502442 - DNA, 75 bp, synthetic construct
  source 1..75: mol_type = other DNA
gacccccatcgaagcggcgcgctttgggaagagcattgaggattaccgcctgttctggatggaagatccgacgcc

SEQ ID NO: 502443 - DNA, 75 bp, synthetic construct
  source 1..75: mol_type = other DNA
ggctgggtactgtgggcaccgattcgctttggcgctaccagtatcaacttttctaccgacaagcccttcccctcc

SEQ ID NO: 502444 - DNA, 75 bp, synthetic construct
  source 1..75: mol_type = other DNA
ctgcgcagacagcaaactcattgtgaaaaacacaagctcggggaaaagcgctgtaattgcaggactaaacgggtg

SEQ ID NO: 502445 - DNA, 75 bp, synthetic construct
  source 1..75: mol_type = other DNA
tttatccggttaatgaatacgtgagcgtttacagcggtaccactaatacctctgaagaaatagcgactgccgatc

SEQ ID NO: 502446 - DNA, 75 bp, synthetic construct
  source 1..75: mol_type = other DNA
tttaacgcggtaatgaatgcgaaccagagtgatcaggtaaccgggcagattgacacaaccacacgggggcaggta

SEQ ID NO: 502447 - DNA, 75 bp, synthetic construct
  source 1..75: mol_type = other DNA
gacggaccactaaacaaagcgattaattatatcctgaaccggcgcgatgaactgagctgcttcctgagtgacgga

SEQ ID NO: 502448 - DNA, 75 bp, synthetic construct
  source 1..75: mol_type = other DNA
gacagcagtctggcaaaagctaaatcggatgcacaggcggcgtttacgaaacagcaggggcgagcctctcttgtt

SEQ ID NO: 502449 - DNA, 75 bp, synthetic construct
  source 1..75: mol_type = other DNA
gtgaagtcttcaacagcatctgggactgcaaacaactgattgaagagcaactcatcgattatatccgcaccacgc

SEQ ID NO: 502450 - DNA, 75 bp, synthetic construct
  source 1..75: mol_type = other DNA
catgggctattccgaacaaatgcttgaagttttcccgcacagctggcgcttcgaggaaggttatatgcacccagg

SEQ ID NO: 502451 - DNA, 75 bp, synthetic construct
  source 1..75: mol_type = other DNA
attgtttgacgcggtacgtaacaagtttggttttaatgaacatttgctgcatgacatgcaccatcgcttaacgcc

SEQ ID NO: 502452 - DNA, 75 bp, synthetic construct
  source 1..75: mol_type = other DNA
gacagtaaacccgtcaaggccctgacctgccttatcacttcccgtaacatgccgggtactaataaaaattattca

SEQ ID NO: 502453 - DNA, 75 bp, synthetic construct
  source 1..75: mol_type = other DNA
cagtgagcgtcaagctcaacaataaagcaggcttcacccttgaggcgcaaagaatggccgctgcagcgaatattt

SEQ ID NO: 502454 - DNA, 75 bp, synthetic construct
  source 1..75: mol_type = other DNA
taaaatcacagtataaatgctctatatcaaatcagcaaaggaataggataagaatctttgctgaaccggtctata

SEQ ID NO: 502455 - DNA, 75 bp, synthetic construct
  source 1..75: mol_type = other DNA
atggaaaacagaaagcaccgaccgactattggccgtacgctgaatacaaatatcctgaataatactgaagaaata

SEQ ID NO: 502456 - DNA, 75 bp, synthetic construct
  source 1..75: mol_type = other DNA
atgaaaggcgaagtgaaagagcgcggcatgattttcaacgatgagatggtccgggccatcctcgaaggaaggaaa

SEQ ID NO: 502457 - DNA, 75 bp, synthetic construct
  source 1..75: mol_type = other DNA
gcgcggtatttacgggcaagagaactggctatctaacccgtgggtatgggtaattgagtttaagcgtattcagga

SEQ ID NO: 502458 - DNA, 75 bp, synthetic construct
  source 1..75: mol_type = other DNA
ggtgtatcagtaatggttctctctatgctcaattacaagtttatgtcgaaagcattaaacactggtaacttgctg

SEQ ID NO: 502459 - DNA, 75 bp, synthetic construct
  source 1..75: mol_type = other DNA
tatggttctcgactgtttaaggctaatttcaatgctgttcttatctctaatctggattgcaaggagttaaaatct

SEQ ID NO: 502460 - DNA, 75 bp, synthetic construct
  source 1..75: mol_type = other DNA
tgctgtggcacgatcgccagcgttggtttacaccgcaaggcttcagccgaatgccgccagcacgactggagcagt

SEQ ID NO: 502461 - DNA, 75 bp, synthetic construct
  source 1..75: mol_type = other DNA
ctgtgggaatccatctacggcgaagaaagctggagtgctaatccctgggtttgggtagcgtggatgcaatggctg

SEQ ID NO: 502462 - DNA, 75 bp, synthetic construct
  source 1..75: mol_type = other DNA
catcagcaaataaggccagcacagccagcgcagttgccgctttggttcctgattctgttcttgatgaattaaaca

SEQ ID NO: 502463 - DNA, 75 bp, synthetic construct
  source 1..75: mol_type = other DNA
tgaaagtagcaactgaacagtttggggttgttttcaaccagacaacagcacccacaactgcgttacaacagcagt

SEQ ID NO: 502464 - DNA, 75 bp, synthetic construct
  source 1..75: mol_type = other DNA
cgccttgttaatgactactggaaaaagcgcctcgttaaccgcgagtatggcagtctgatcatcacgaagggatat

SEQ ID NO: 502465 - DNA, 75 bp, synthetic construct
  source 1..75: mol_type = other DNA
tgaaatcaagacaatcacacatcctcacttcggcgataagtcggtaaaggtgttcgcgataaaggtaaatattga

SEQ ID NO: 502466 - DNA, 75 bp, synthetic construct
  source 1..75: mol_type = other DNA
gcagaattgacgtcccgtatgacggatatgaaatcaagacaatcacacatccgcacttcggcgataaaccggtaa

SEQ ID NO: 502467 - DNA, 75 bp, synthetic construct
  source 1..75: mol_type = other DNA
gtggctaacctacaacttgccgtcaaaggtgaatacttcgatgccatgattcgaggagagaaaacggaagagtat

SEQ ID NO: 502468 - DNA, 75 bp, synthetic construct
  source 1..75: mol_type = other DNA
ctcgccagacataatgacgctcacctgacgttaattcatattgatgatggcttaagcgagttgtatccgggtatc

SEQ ID NO: 502469 - DNA, 75 bp, synthetic construct
  source 1..75: mol_type = other DNA
atgtaccagcactcaacggcgtttgccgacacgctggatcgctgtttttccgcctgtagcgaaatgctcacgccg

SEQ ID NO: 502470 - DNA, 75 bp, synthetic construct
  source 1..75: mol_type = other DNA
ggctataccgccccttccgtcgcagggcaacaggcagtcatcgaagaggcgttaatgctggcggccatcgacgac

SEQ ID NO: 502471 - DNA, 75 bp, synthetic construct
  source 1..75: mol_type = other DNA
aaactatcggtaacagcaactccttcagacgatccgataaagaaacttgattacacagcaattactttgttgaat

SEQ ID NO: 502472 - DNA, 75 bp, synthetic construct
  source 1..75: mol_type = other DNA
gttgaaagtaagaccttcgtaaaccaggaaaacaatggaagagatcaacttgcactgaccagggagtctctgaaa

SEQ ID NO: 502473 - DNA, 75 bp, synthetic construct
  source 1..75: mol_type = other DNA
ctggattcaatcaaaaggaaattgctgaactggagggattatcccaggctaaggtcaccagggcactgcaggcgg

SEQ ID NO: 502474 - DNA, 75 bp, synthetic construct
  source 1..75: mol_type = other DNA
agattacatccagaccccatacgtccactacattggcactctgttcggcaacgtcaaagtgttcgaagtaccaga

SEQ ID NO: 502475 - DNA, 75 bp, synthetic construct
  source 1..75: mol_type = other DNA
tgagtcggcgctgttccgcatgatcggccagatgcgtgagattgtgaccagcgcgcagaaggccacacgcaaggc

SEQ ID NO: 502476 - DNA, 75 bp, synthetic construct
  source 1..75: mol_type = other DNA
aatgcaaaagctactgtcacaactccgcatgggatcggacgaccgcaagtgcttgctgttattagtaccctttat

SEQ ID NO: 502477 - DNA, 75 bp, synthetic construct
  source 1..75: mol_type = other DNA
ccgtttgatgccggcataccgcgggatgatcaataagttgaaagcggatctgctcatcgtgccgtttatcgataa

SEQ ID NO: 502478 - DNA, 75 bp, synthetic construct
  source 1..75: mol_type = other DNA
atgattgagaatcatctctactctctggtgactgttgtgaaatacaaattactaccatgcttactcgcgatattc

SEQ ID NO: 502479 - DNA, 75 bp, synthetic construct
  source 1..75: mol_type = other DNA
cataaatgcactaatattggctatattatctccagtcattctactatcaaataaaaagcaatgtgcatttataat

SEQ ID NO: 502480 - DNA, 75 bp, synthetic construct
  source 1..75: mol_type = other DNA
acaagcccgttccgccggatacggatattgccgacccgcaggcagacaacttgccacccgccaaaccgttcgacc

SEQ ID NO: 502481 - DNA, 75 bp, synthetic construct
  source 1..75: mol_type = other DNA
attgcaacacatacgctcatcgccagcgcgtttgacagtcgtgaagcctatgaccgggagttgattcatgaaatc

SEQ ID NO: 502482 - DNA, 75 bp, synthetic construct
  source 1..75: mol_type = other DNA
ttgtctccgaatattattgttccaactcttgccgacagaggggggtatatcgcttcagaatcaactttttatcgc

SEQ ID NO: 502483 - DNA, 75 bp, synthetic construct
  source 1..75: mol_type = other DNA
taataataaaacactacaaaacaatgtcagatcagcgtggaacaatgttgatgagcgacattatcgtacatttta

SEQ ID NO: 502484 - DNA, 75 bp, synthetic construct
  source 1..75: mol_type = other DNA
atgaacgaagccgttagcccaggtgcgcttagcaccctgttcaccgatgcccgcactcacaacggctggcgggag

SEQ ID NO: 502485 - DNA, 75 bp, synthetic construct
  source 1..75: mol_type = other DNA
tataaacggcctgatgtactcagggccgttgcaccgaatcaagtctggagttgggatatcagctatttgccgtcc

SEQ ID NO: 502486 - DNA, 75 bp, synthetic construct
  source 1..75: mol_type = other DNA
tgcgcggcgcatatgagcgtgccggccaggtttgcccgtggcaattttggaatgatcacgacgtcagaaccatcg

SEQ ID NO: 502487 - DNA, 75 bp, synthetic construct
  source 1..75: mol_type = other DNA
gaaaaagcgcgagaagaactcaatgaaattcgtgaaagcctgaaattaaaacagggcggttgggcgctgtttaag

SEQ ID NO: 502488 - DNA, 75 bp, synthetic construct
  source 1..75: mol_type = other DNA
ggtacggcttccagcggcttgtcctggctctctgttggcatgacgatgatgtgtattgccggttatgcaatgagt

SEQ ID NO: 502489 - DNA, 75 bp, synthetic construct
  source 1..75: mol_type = other DNA
tgggtgtcgaatatgattatcggcgcgaccttcctgacgctgctcgacagcattggcgctgccggtacgttctgg

SEQ ID NO: 502490 - DNA, 75 bp, synthetic construct
  source 1..75: mol_type = other DNA
gtaccgctgatgacgccgctgcgcttaacgcttgaagataaccacctgttggttactgcccttcacaccagctga

SEQ ID NO: 502491 - DNA, 75 bp, synthetic construct
  source 1..75: mol_type = other DNA
tcgccacctttattgctgtctttacagtagataaagcggggcgtaaaccggcactgaaaattggttttagcgtga

SEQ ID NO: 502492 - DNA, 75 bp, synthetic construct
  source 1..75: mol_type = other DNA
ctattgcctgatgcagtttgataacggtacggcttccagtggtttgtcctggctctctgttggcatgacgatgat

SEQ ID NO: 502493 - DNA, 75 bp, synthetic construct
  source 1..75: mol_type = other DNA
taaccggcacgcagacaatacgaaatatttaaaagtctggggtaacggagccaccttcgacaacgtaattttacg

SEQ ID NO: 502494 - DNA, 75 bp, synthetic construct
  source 1..75: mol_type = other DNA
tgataaacgctgggattttttacactttgggctgacaggcacctctgcttttgatcccgcgaagaatgacccgct

SEQ ID NO: 502495 - DNA, 75 bp, synthetic construct
  source 1..75: mol_type = other DNA
tgatatggaaaagctgattagcgcgtatcgacgtatgctgcgacaagggaatcatgcgctgacggttattgttgg

SEQ ID NO: 502496 - DNA, 75 bp, synthetic construct
  source 1..75: mol_type = other DNA
cgcagaagccggtgacgttgcaaacgccatcctcgacggtactgacgcagtgatgctgtctggtgaatccgcaaa

SEQ ID NO: 502497 - DNA, 75 bp, synthetic construct
  source 1..75: mol_type = other DNA
gggatcgaggtcatccccgcacacgtcactgaatatctgaacaaagtactgactgaaaccgatcatgccaaccct

SEQ ID NO: 502498 - DNA, 75 bp, synthetic construct
  source 1..75: mol_type = other DNA
cacgctgaatcatcaatttactgggaagatcctgaaacagcaattttgtgtcggtgccgtccggacaaaattatc

SEQ ID NO: 502499 - DNA, 75 bp, synthetic construct
  source 1..75: mol_type = other DNA
attcagcaatcactgcccatcaacgtcgctttgccggtgccgtcgcaccgcaatatctgaatatcaccaccggag

SEQ ID NO: 502500 - DNA, 75 bp, synthetic construct
  source 1..75: mol_type = other DNA
aaggcgtagactttgttgctgcttcctttattcgtaagcgttctgacgttatcgaaatccgtgagcacctgaaag

SEQ ID NO: 502501 - DNA, 75 bp, synthetic construct
  source 1..75: mol_type = other DNA
tttcaccactgataaatctgttatcggcaacagcgaaatggttgcggtaacgtatgaaggtttcactactgacct

SEQ ID NO: 502502 - DNA, 75 bp, synthetic construct
  source 1..75: mol_type = other DNA
taatcggcacgcagacaatacgaaatatttaaaagtttggggtaacggggccaccttcgacaacgtaattttacg

SEQ ID NO: 502503 - DNA, 75 bp, synthetic construct
  source 1..75: mol_type = other DNA
ttctgacgttatcgaaatccgtgagcacctgaaagcgcacggcggcgaaaacatccacatcatctccaaaatcga

SEQ ID NO: 502504 - DNA, 75 bp, synthetic construct
  source 1..75: mol_type = other DNA
gacctgggcgaaaacaaaggtgtgaacctgccgggtgtttctattgccctgccagcactggctgaaaaagacaaa

SEQ ID NO: 502505 - DNA, 75 bp, synthetic construct
  source 1..75: mol_type = other DNA
cccagaaaatgatgatcgaaaaatgtatccgtgcacgtaaagtcgttatcacggcgacccagatgctggattcca

SEQ ID NO: 502506 - DNA, 75 bp, synthetic construct
  source 1..75: mol_type = other DNA
cgcgggcaaaaaccaggggaaggctacaacattcagcaaatgctggagatccttaccgctcagaatttacatttt

SEQ ID NO: 502507 - DNA, 75 bp, synthetic construct
  source 1..75: mol_type = other DNA
atggcttatcgcgaccaacctttaggtgaactggcgctctctattcctcgcgcttcagctctgtttcgtaaatat

SEQ ID NO: 502508 - DNA, 75 bp, synthetic construct
  source 1..75: mol_type = other DNA
acgtaaagaactggatgttgaggtcattgaagccgaactggcaaagcttgctgaacaaccgattgagaaagactg

SEQ ID NO: 502509 - DNA, 75 bp, synthetic construct
  source 1..75: mol_type = other DNA
ctgattgatgacctgatggagcacatcagtctggaaaacaatgtgctgttcccgcgcgcgctggcgggtgagtga

SEQ ID NO: 502510 - DNA, 75 bp, synthetic construct
  source 1..75: mol_type = other DNA
aataatgggcaaagcgtgaaagctgggcaaaaaatcgccactatggggagcactgatgcggcatctgttcgcctg

SEQ ID NO: 502511 - DNA, 75 bp, synthetic construct
  source 1..75: mol_type = other DNA
caccgtgaaacggggggatacgctatatcgtatttcgcgcaccacgggaaccagcgtaaaagagctggcgcgact

SEQ ID NO: 502512 - DNA, 75 bp, synthetic construct
  source 1..75: mol_type = other DNA
tttcgcagtttgcctatgacgataccgactgggcgatgatgtccagcgccccggatatggaatccggtcactact

SEQ ID NO: 502513 - DNA, 75 bp, synthetic construct
  source 1..75: mol_type = other DNA
ccgcgagcgccagcctggaatgacgcgtaaggaagcggagttatgtctggttgggcacctcaatgaagcctatcc

SEQ ID NO: 502514 - DNA, 75 bp, synthetic construct
  source 1..75: mol_type = other DNA
aaaacattcttggcaatttaatgatactgacacagctaaaaaactaattaacagttgtttggcaaataatttagt

SEQ ID NO: 502515 - DNA, 75 bp, synthetic construct
  source 1..75: mol_type = other DNA
tgtcgccagttgtgcacttttacaagccgcaaaggcagcaggctatcggacggcaggttataaaccggtcgcctc

SEQ ID NO: 502516 - DNA, 75 bp, synthetic construct
  source 1..75: mol_type = other DNA
tacagcctaaaaataaaccagacaacaccagacatacttgttaactgtgatagcaataataactttgcctgtcag

SEQ ID NO: 502517 - DNA, 75 bp, synthetic construct
  source 1..75: mol_type = other DNA
ccctgcgcttggatgaaacgccgatagaacgcgctgcgattctggcctggcgcacgcttaaaaccatccgtcgcg

SEQ ID NO: 502518 - DNA, 75 bp, synthetic construct
  source 1..75: mol_type = other DNA
cgatcaaagatcctttccgcctccgttattatgatttctcgcaacgaacgcattccgaagagcagatagtccgtc

SEQ ID NO: 502519 - DNA, 75 bp, synthetic construct
  source 1..75: mol_type = other DNA
ccagcgtaaaagaactggcgcgactgaacggcatttcccccccttacaccattgaagttggtcagaaactaaaac

SEQ ID NO: 502520 - DNA, 75 bp, synthetic construct
  source 1..75: mol_type = other DNA
catttccagattcgttaccgtgctacggcgattgatcctttgcgctacttgccgccacagggcagcaaaccaaag

SEQ ID NO: 502521 - DNA, 75 bp, synthetic construct
  source 1..75: mol_type = other DNA
ttatcatgccttactcaatggcggatggcggcaataaagggattgatattgctgcagcgcgcgggacaccaatat

SEQ ID NO: 502522 - DNA, 75 bp, synthetic construct
  source 1..75: mol_type = other DNA
tgttctggtagcaaatcatcagacacaggaacgtattccggctccgtttacaccgtgaaacggggggatacgctt

SEQ ID NO: 502523 - DNA, 75 bp, synthetic construct
  source 1..75: mol_type = other DNA
taacgattttggtttcaatgatattttctcccgttacgttgaagcggtaggtcgcgaaggcgatgtactgctggg

SEQ ID NO: 502524 - DNA, 75 bp, synthetic construct
  source 1..75: mol_type = other DNA
gatctccacctcaggtaactctgcaaacgtgatcaaagcgatcgcggcggcgcgtgagaaggggatgaaagtgat

SEQ ID NO: 502525 - DNA, 75 bp, synthetic construct
  source 1..75: mol_type = other DNA
cggtcgctaccgtgaaaaccgtccgggctacccggcgattgctatttctgacgttagtcatatttcctgcgtcgg

SEQ ID NO: 502526 - DNA, 75 bp, synthetic construct
  source 1..75: mol_type = other DNA
atgtgcagaatcaattgattaacgcccctgccagtgtcctcgcgcccagtgatgttgatattccgttacagttaa

SEQ ID NO: 502527 - DNA, 75 bp, synthetic construct
  source 1..75: mol_type = other DNA
cagattcgttaccgtgcaacggcaattgatccgctacgttacttgccgcctcagggcagcaagccaaaatgctga

SEQ ID NO: 502528 - DNA, 75 bp, synthetic construct
  source 1..75: mol_type = other DNA
atgtaccaggatcttattcgtaatgaacttaacgaagcggcggaaacgctggctaactttttaaaagatgacgcc

SEQ ID NO: 502529 - DNA, 75 bp, synthetic construct
  source 1..75: mol_type = other DNA
ttgagcgcaggacgcccgaataaaaaaacgctgggtatcgtgatgctgttatcggcagggctgcttctggcgggc

SEQ ID NO: 502530 - DNA, 75 bp, synthetic construct
  source 1..75: mol_type = other DNA
ttgagtgcgggacgcctgaataaaaaatctctgggtatcgtgatgttgttatcggttggactgcttttggcgggc

SEQ ID NO: 502531 - DNA, 75 bp, synthetic construct
  source 1..75: mol_type = other DNA
ctggaaagccagatcggtactttacgtatgtcgctggtgaatattacgcctgatacagatggcaccaccctgaca

SEQ ID NO: 502532 - DNA, 75 bp, synthetic construct
  source 1..75: mol_type = other DNA
aaacgctttatgctggcgcagaccgacaaaaaagcgatggcgcaaatcatgaccatcggcggcgcgaagggcaat

SEQ ID NO: 502533 - DNA, 75 bp, synthetic construct
  source 1..75: mol_type = other DNA
cgacgccgctgaaacgctttatgctggcgcagaccgacaaaaaagcgatggcgcaaatcatgaccatcggcggcg

SEQ ID NO: 502534 - DNA, 75 bp, synthetic construct
  source 1..75: mol_type = other DNA
gggtaacagtaattccgtggagggagggtataacaacattgttattggtaattcctccacggtaaaagcttccgg

SEQ ID NO: 502535 - DNA, 75 bp, synthetic construct
  source 1..75: mol_type = other DNA
acgaccagatgaccttagacgccgctgtggatgaggccattctcatcaatgcatacatcttcaccgaaacaggtc

SEQ ID NO: 502536 - DNA, 75 bp, synthetic construct
  source 1..75: mol_type = other DNA
atcgctggccggaacgtgccgaggccgcacgtaataaagtgctcaatcggatggctgcgcaaggtgtgtggtccc

SEQ ID NO: 502537 - DNA, 75 bp, synthetic construct
  source 1..75: mol_type = other DNA
caagcgcccagccgactgcgtccggatcgctggccggaacgtgccgaggccgcacgtaataaagtgctcaatcgg

SEQ ID NO: 502538 - DNA, 75 bp, synthetic construct
  source 1..75: mol_type = other DNA
ttgcgcaagccctcgacacgctggaaagcaaattagtcgacttctcggcattaaccgccggtcttgatatgtcgc

SEQ ID NO: 502539 - DNA, 75 bp, synthetic construct
  source 1..75: mol_type = other DNA
accagtaattacgatctggcgcgtcggctttccctcacgccaatgggaacacaagcacacgaatggttccaggca

SEQ ID NO: 502540 - DNA, 75 bp, synthetic construct
  source 1..75: mol_type = other DNA
atctgccacgataaagcgtttgttcgggcactgcgcaaagcgttcgaccttccgcatattaaaaaagccagttaa

SEQ ID NO: 502541 - DNA, 75 bp, synthetic construct
  source 1..75: mol_type = other DNA
ttttattcagcttgtagtttactgttatagggactatttgtatcattttgagccatcgcagataaactggatagc

SEQ ID NO: 502542 - DNA, 75 bp, synthetic construct
  source 1..75: mol_type = other DNA
tctacttgttgttatatcaacagttgtgatattcacaccggcattcaccatacaatatattggtttggatctggc

SEQ ID NO: 502543 - DNA, 75 bp, synthetic construct
  source 1..75: mol_type = other DNA
tgctggccttactacagcaggattgcaccctctctttgcaggcactggctgaagccgttaatctgacaaccaccc

SEQ ID NO: 502544 - DNA, 75 bp, synthetic construct
  source 1..75: mol_type = other DNA
atgagtgtcaccctgaactgatgttccgtcacccgggaaacgagtacgaccagatgacctcagacgccgctgtgg

SEQ ID NO: 502545 - DNA, 75 bp, synthetic construct
  source 1..75: mol_type = other DNA
agatagttatcatttttttattatggctgctaataattctgtctttttatctttgtgcaatattaaaggcttctt

SEQ ID NO: 502546 - DNA, 75 bp, synthetic construct
  source 1..75: mol_type = other DNA
attaagaactgtacacagaaaatttaatatacctgaaatggttgagttttttatcatttttttattaatgatact

SEQ ID NO: 502547 - DNA, 75 bp, synthetic construct
  source 1..75: mol_type = other DNA
atggggtgggaggttactccccatgaactccgaccagatatttaccctaatcccaccgatggcttgcctgctgga

SEQ ID NO: 502548 - DNA, 75 bp, synthetic construct
  source 1..75: mol_type = other DNA
cagcaccgatcctgttcttcccgtcctgcaggaagaagcacgacagcagaaacgtggtctgtgggcagacagcgc

SEQ ID NO: 502549 - DNA, 75 bp, synthetic construct
  source 1..75: mol_type = other DNA
atctgaaatttgcatactttttttattattgacactaataattctgtctttatgtatttttgtaacattaaaagc

SEQ ID NO: 502550 - DNA, 75 bp, synthetic construct
  source 1..75: mol_type = other DNA
gttatcatcgctttattaatgatactaatgactctgtctttttatctttgtgcaatattaaaggcttctttttaa

SEQ ID NO: 502551 - DNA, 75 bp, synthetic construct
  source 1..75: mol_type = other DNA
cgctatcgacagcgacaaagtggcggaaaaaattgccgacgaagcgcgcgacgatacgccgcaggcgctggatgc

SEQ ID NO: 502552 - DNA, 75 bp, synthetic construct
  source 1..75: mol_type = other DNA
atgttactcaccgatctccttcacggtaatacgcatcaccctgaactgatgttccgtcacccggaaaacgagtac

SEQ ID NO: 502553 - DNA, 75 bp, synthetic construct
  source 1..75: mol_type = other DNA
atgttccgtcacccggaaaacgagtacgactggctgagctcagacgccgctgtggatgaggccctgctcataaac

SEQ ID NO: 502554 - DNA, 75 bp, synthetic construct
  source 1..75: mol_type = other DNA
tgggaggttactccacacgaactccgaccagacatttaccctaacccaaccgacggtttacccgttgggtgtaag

SEQ ID NO: 502555 - DNA, 75 bp, synthetic construct
  source 1..75: mol_type = other DNA
gccctgatatttatcctaacccaaccgacggtttacctgttggatgtaaggttaacacatcaaatgcaccggagt

SEQ ID NO: 502556 - DNA, 75 bp, synthetic construct
  source 1..75: mol_type = other DNA
aataggtcgttatatgggggtcgctcaacagactgtttggcaatggtttagctttggcgttcccccaaagcaggt

SEQ ID NO: 502557 - DNA, 75 bp, synthetic construct
  source 1..75: mol_type = other DNA
atgtttattgtactaaacgctcctgtacgaggacgctactgcgcacctatgacacaattcgcttctcctgttctg

SEQ ID NO: 502558 - DNA, 75 bp, synthetic construct
  source 1..75: mol_type = other DNA
cgaaacgcgttcctacaactgggacatgatgcataaagcggcctatttcgtcgctaacggtgcacgctttatcgc

SEQ ID NO: 502559 - DNA, 75 bp, synthetic construct
  source 1..75: mol_type = other DNA
gccgatttcctgcgtcgacaggaaggcaaaaaagcgtatgtagtgggcgaaggcgcgctgatccatgaactgtac

SEQ ID NO: 502560 - DNA, 75 bp, synthetic construct
  source 1..75: mol_type = other DNA
gaatttttgcacgggattatggataaaggcctgccgctggtgttgctgaccaactatccttcgcagactgggcaa

SEQ ID NO: 502561 - DNA, 75 bp, synthetic construct
  source 1..75: mol_type = other DNA
gccgtggaaggtttgaaagatatcgcgccgattctggcattgctgagcgcgcgtctgcaacagcgtgaaagccgt

SEQ ID NO: 502562 - DNA, 75 bp, synthetic construct
  source 1..75: mol_type = other DNA
cccgcgatcgcggtcaggcgatggtggacctgctggcacagtacgagcagcacggtttgcagttaaacagccgcg

SEQ ID NO: 502563 - DNA, 75 bp, synthetic construct
  source 1..75: mol_type = other DNA
taaaaacacacctgcgcttataactactgaccaagataaattccggatcaccctgtttagcgaggcagaagtccg

SEQ ID NO: 502564 - DNA, 75 bp, synthetic construct
  source 1..75: mol_type = other DNA
agtgggtgaaggggatccagactcgcgacactgaggaccagaatcagtccaaagtggaacaaattgccccagaag

SEQ ID NO: 502565 - DNA, 75 bp, synthetic construct
  source 1..75: mol_type = other DNA
cgagatgtagccaccggcgttctggcccgttcaatggatgtggatatttataacctgcacccagcacacgcaaaa

SEQ ID NO: 502566 - DNA, 75 bp, synthetic construct
  source 1..75: mol_type = other DNA
gcagactacaccgatcgcggtctgctgacaaaagagtggatgaaaggaaatcgtgtttcacgcatcactcgcacg

SEQ ID NO: 502567 - DNA, 75 bp, synthetic construct
  source 1..75: mol_type = other DNA
tcgcttgacgatatcgacagtatgccgttccgccccagctggatttacccgtcggtcgctgaaatcgacgttatc

SEQ ID NO: 502568 - DNA, 75 bp, synthetic construct
  source 1..75: mol_type = other DNA
aaacacgccagcgctgatctccactgaaaaagagaaattccgtataacgcaattcagtgaagctgaaatacgtgg

SEQ ID NO: 502569 - DNA, 75 bp, synthetic construct
  source 1..75: mol_type = other DNA
agggaaattcacagctcagcgagtctgcactgaaatccgtcgaaaataaaccagaagttatgcgcagtcagtctt

SEQ ID NO: 502570 - DNA, 75 bp, synthetic construct
  source 1..75: mol_type = other DNA
cgccatccttgacccacatcggatagtcgttggaatcgatacactttatacaacgcagcgcgaaacatttacctc

SEQ ID NO: 502571 - DNA, 75 bp, synthetic construct
  source 1..75: mol_type = other DNA
tccaacaccattgctatctacaccacccatcgcattctggttgaaatattcagcttaactctgcttgcgcaaatg

SEQ ID NO: 502572 - DNA, 75 bp, synthetic construct
  source 1..75: mol_type = other DNA
cctggttgtttaatatttcgttgctgttgtcgctggtgtcgattgtggtgatcatgaagctgttttatcagtacg

SEQ ID NO: 502573 - DNA, 75 bp, synthetic construct
  source 1..75: mol_type = other DNA
ctggctggcttgctggtacgaaaattttcacaacgcgcattcagcgacctgttgttctccccaccttctctgccc

SEQ ID NO: 502574 - DNA, 75 bp, synthetic construct
  source 1..75: mol_type = other DNA
tggccaggtcgatatgggtaaacgttatgtcaaagcgctgggaggttccgcacatgctatcaatctggcgcgtga

SEQ ID NO: 502575 - DNA, 75 bp, synthetic construct
  source 1..75: mol_type = other DNA
aaagccttaacaacatcagacaaaatgccaccatatatgttcacgcataccactatactgatgatgaaaaatgcg

SEQ ID NO: 502576 - DNA, 75 bp, synthetic construct
  source 1..75: mol_type = other DNA
atgctggatctatttcaatctttaccttgcaccctttcgtatgccggttttttctttatttccggctatttgatt

SEQ ID NO: 502577 - DNA, 75 bp, synthetic construct
  source 1..75: mol_type = other DNA
ttattcgcaccttccttaatacaggatgacgaaacagacttatttaacctgataaaagttaaaatttttgaagcc

SEQ ID NO: 502578 - DNA, 75 bp, synthetic construct
  source 1..75: mol_type = other DNA
atgggtcttgataatataggttctgttgtcaatcgcttctctggttggccatcaaatgatcctctaaaaacagat

SEQ ID NO: 502579 - DNA, 75 bp, synthetic construct
  source 1..75: mol_type = other DNA
tgaaaaaaaacctggctgctatggccaatgtcttttaatacaggatgacgaaacagacttatttaacctgataaa

SEQ ID NO: 502580 - DNA, 75 bp, synthetic construct
  source 1..75: mol_type = other DNA
tgacctgtgttaaagaagtaccgttgcgccgccatctgctgatgtcttcgctgctggccgttctggcggtcagtg

SEQ ID NO: 502581 - DNA, 75 bp, synthetic construct
  source 1..75: mol_type = other DNA
atctaatgatcctctaaaaacagataacgaatcaatgacatcacccgtgactgtgcaggtaataaagatgattgc

SEQ ID NO: 502582 - DNA, 75 bp, synthetic construct
  source 1..75: mol_type = other DNA
aaaatgatattccgagccagtatcgacatttcaaaatgtttaccaatttagcactagttattgatcagttaaccg

SEQ ID NO: 502583 - DNA, 75 bp, synthetic construct
  source 1..75: mol_type = other DNA
catatgcgatgcataaggctggcggtagcggaggaagtggcggtgctaaaacacctggcaccggcgctaatgcca

SEQ ID NO: 502584 - DNA, 75 bp, synthetic construct
  source 1..75: mol_type = other DNA
tatccgctataaacattcagtagagacgatagattcagagcacgccgatctcattttcaagatgcgccctgtgtg

SEQ ID NO: 502585 - DNA, 75 bp, synthetic construct
  source 1..75: mol_type = other DNA
tccagaaactgacagaaagagttgatgaacttcagtcagaattaaagttgttatcaacttcccgaaacgatatct

SEQ ID NO: 502586 - DNA, 75 bp, synthetic construct
  source 1..75: mol_type = other DNA
atggctacatcgacagtaattccgggagacattaccacgctaaagggagatgtcagtaaagctaaggaagatatt

SEQ ID NO: 502587 - DNA, 75 bp, synthetic construct
  source 1..75: mol_type = other DNA
cgcaggtgctgactggcgacaacggcctgactttaattgaaaacgcgccctggggcgtggtggcttcggtaactc

SEQ ID NO: 502588 - DNA, 75 bp, synthetic construct
  source 1..75: mol_type = other DNA
gccgcgggcaacagcgtcattttcgccccgcatccggcggcgaaaaaagtctctcagcgggcgattacgttactc

SEQ ID NO: 502589 - DNA, 75 bp, synthetic construct
  source 1..75: mol_type = other DNA
cgaaaaacacgccagagatttagcggaacttgccgtcagtgaaaccggcatgggccgcgttgaagataaatttgc

SEQ ID NO: 502590 - DNA, 75 bp, synthetic construct
  source 1..75: mol_type = other DNA
gtacaggtcgcaatgcgaaaatgacaggcgtgactggggtttctatggattgattgccgaggaagttggagaaat

SEQ ID NO: 502591 - DNA, 75 bp, synthetic construct
  source 1..75: mol_type = other DNA
gtacaggtcgcaatgcgaaaatgacaggcgtgactggggattctatggattgattgccgaggaagtaggagaaat

SEQ ID NO: 502592 - DNA, 75 bp, synthetic construct
  source 1..75: mol_type = other DNA
aaagcaggatatcagtaccagatacacaaaaacagaagtggataataagctgaaaaacaaagtggaagtgaacga

SEQ ID NO: 502593 - DNA, 75 bp, synthetic construct
  source 1..75: mol_type = other DNA
aaaccatttccagcaatggccttgttgccgaaggtgtaatgtacgaacgtctggttgttccactgattcaccata

SEQ ID NO: 502594 - DNA, 75 bp, synthetic construct
  source 1..75: mol_type = other DNA
gtacaggtcgcaatgcgaaaatgacaggcgtgactgggggttctatggattgattgccgaggaagtgggagaaat

SEQ ID NO: 502595 - DNA, 75 bp, synthetic construct
  source 1..75: mol_type = other DNA
gtacaggtcgcaatgcgaaaatgacaggcgtgactggggcttctatggattgattgccgaggaagtcggagaaat

SEQ ID NO: 502596 - DNA, 75 bp, synthetic construct
  source 1..75: mol_type = other DNA
cacggcggcaatgcactcgcgcaatatcgagaacatgaaccagatggcgaacgccattgataccagcattttcgt

SEQ ID NO: 502597 - DNA, 75 bp, synthetic construct
  source 1..75: mol_type = other DNA
ccgaatgggggtagagttccccgtcagtacaatggcggatatggtcggtgttgccggagctgtactggccccgct

SEQ ID NO: 502598 - DNA, 75 bp, synthetic construct
  source 1..75: mol_type = other DNA
ctggaagccgcaggcgtgaaaactgttcgcagcctggctgatatcggtgaagcactgaaaactgttctgaaataa

SEQ ID NO: 502599 - DNA, 75 bp, synthetic construct
  source 1..75: mol_type = other DNA
tccatgttcacactccgtttacgctgacgctcggcgatcagtcaaaacaggagtttggccgggggcggcataacg

SEQ ID NO: 502600 - DNA, 75 bp, synthetic construct
  source 1..75: mol_type = other DNA
gcgcagaaggagttccccgtcgggctacggtctctgttaatacgggaatacggcgacgatacagcgcagttaaaa

SEQ ID NO: 502601 - DNA, 75 bp, synthetic construct
  source 1..75: mol_type = other DNA
cgcggcacagataatgagccttctggaaacggcaaaacgtaatggtctggagccacatgcctggctgacagacgt

SEQ ID NO: 502602 - DNA, 75 bp, synthetic construct
  source 1..75: mol_type = other DNA
atgatgaaatatgtgtacccggtaaccccggtgtgcatcgtttttgattattcccgcacactcacgcagaaggaa

SEQ ID NO: 502603 - DNA, 75 bp, synthetic construct
  source 1..75: mol_type = other DNA
gagatatcaccacgctaaagggagatgtcagtaaaactaaggaagatatttcctcaattaacggaaaagtatcaa

SEQ ID NO: 502604 - DNA, 75 bp, synthetic construct
  source 1..75: mol_type = other DNA
tcggccttctggtggtgaccggcggcgaagcggtagtagaagcggcgcgtaaacacaccaataaacgtctgattg

SEQ ID NO: 502605 - DNA, 75 bp, synthetic construct
  source 1..75: mol_type = other DNA
ccgcaggtgccggtaacccgccggtagtggtggatgaaaccgccgacctcgcccgtgccgctcagtccatcgtca

SEQ ID NO: 502606 - DNA, 75 bp, synthetic construct
  source 1..75: mol_type = other DNA
gctgctcaagctgcaagagcagaacgacagcctgcaagcgcagattgctgccgcccagactggcggtaatggggc

SEQ ID NO: 502607 - DNA, 75 bp, synthetic construct
  source 1..75: mol_type = other DNA
ttggatggggttataagacctttgccgcttttgccgtcaaaggttttgagaattcctgtcattttacgggacaaa

SEQ ID NO: 502608 - DNA, 75 bp, synthetic construct
  source 1..75: mol_type = other DNA
cggttcgtagccgagtactctatccagctgagctacggatgcaaatggcggtgaggcggggattcgaaccccgga

SEQ ID NO: 502609 - DNA, 75 bp, synthetic construct
  source 1..75: mol_type = other DNA
cacgactacagcggcggcaaacctttatcttaatcctgaccctgcaatttcgtctgtgctgcggtcaacatcgtc

SEQ ID NO: 502610 - DNA, 75 bp, synthetic construct
  source 1..75: mol_type = other DNA
cgcactgtggtatccggtggtgctgcgccagcaaattaagcgcatgatccacgacctggaagcgaccggcattcg

SEQ ID NO: 502611 - DNA, 75 bp, synthetic construct
  source 1..75: mol_type = other DNA
tctggtcgatacgcaagtttgtgagtttattcagaacacgccagccttccataacacgccgatgcttctggaagc

SEQ ID NO: 502612 - DNA, 75 bp, synthetic construct
  source 1..75: mol_type = other DNA
gagagaaaggcgaccccggagcacagggtccgaaaggtgaaacgggagcaacaggccccgctggtccgcggggag

SEQ ID NO: 502613 - DNA, 75 bp, synthetic construct
  source 1..75: mol_type = other DNA
tcttgacaatcccgcagaggatgcgtcacgctttccggcactgctggcggagctgaacgatttactgcgcgggga

SEQ ID NO: 502614 - DNA, 75 bp, synthetic construct
  source 1..75: mol_type = other DNA
gtggcgttcgtgtgctggatttaacccgggtgctggctggcccttattgcggaatgatgctggcggatttcggcg

SEQ ID NO: 502615 - DNA, 75 bp, synthetic construct
  source 1..75: mol_type = other DNA
cgacggtttccagcagcttaaggccaaactgccgccggtttcccgccgtggtttaatccttatcgacccgccgta

SEQ ID NO: 502616 - DNA, 75 bp, synthetic construct
  source 1..75: mol_type = other DNA
aacaggggcacagggtgctccgggccccaaaggggataccggagccacaggacctgagggtaaagccggtcctgt

SEQ ID NO: 502617 - DNA, 75 bp, synthetic construct
  source 1..75: mol_type = other DNA
acagtaccaggaataaacccacgacggcgagtctggctgtcaatggctgggaacgtgatgaggccacaggccgga

SEQ ID NO: 502618 - DNA, 75 bp, synthetic construct
  source 1..75: mol_type = other DNA
gggtccgaaaggtgaaacgggagcaacaggccccgctggtccgcggggagcgcagggaccgaaaggggagaaagg

SEQ ID NO: 502619 - DNA, 75 bp, synthetic construct
  source 1..75: mol_type = other DNA
ggttgtgggtatcaggctgggtaatgaacagacttacagagcagaagagagctctggttttctgtcaataagcct

SEQ ID NO: 502620 - DNA, 75 bp, synthetic construct
  source 1..75: mol_type = other DNA
gttggggcatttgtctttgctcaggccagtataagtaacagtgaaaaatatgccgcaggtgccgtgcttgcggga

SEQ ID NO: 502621 - DNA, 75 bp, synthetic construct
  source 1..75: mol_type = other DNA
aagggcgaaaaaggcgagccgggaggaccggatgcgacgacggcacagaagggaattgtgcagttaagcagcgca

SEQ ID NO: 502622 - DNA, 75 bp, synthetic construct
  source 1..75: mol_type = other DNA
atttctcgccgcccgtgcagtgagtggtgtggaaacggtcgctgaggattattatgcccgtagtctggcggtggg

SEQ ID NO: 502623 - DNA, 75 bp, synthetic construct
  source 1..75: mol_type = other DNA
cagtgggctggcagtttttcatgaagagaccatggatcttgaccatgcaatttgccttacaactgccgtgctgtc

SEQ ID NO: 502624 - DNA, 75 bp, synthetic construct
  source 1..75: mol_type = other DNA
gattcagcccaggaggtcgttaacagacgactgaaggcatgtgccggaaaaagagccagaagacggaatctatat

SEQ ID NO: 502625 - DNA, 75 bp, synthetic construct
  source 1..75: mol_type = other DNA
ttatgagtaacgcgatgggttacttttttgaccttgccctgcagacaacggtgccggaaatcaaaacggcaaaag

SEQ ID NO: 502626 - DNA, 75 bp, synthetic construct
  source 1..75: mol_type = other DNA
atggctacatcgacagtaattccaggagatatcaccaagctaaagggggatgtcagtaaagctaaggaagatatt

SEQ ID NO: 502627 - DNA, 75 bp, synthetic construct
  source 1..75: mol_type = other DNA
tccagaaactgactgaaagagttgatgaacttgagtcagaattgaagttgttatcaacttcccaaagcgatatcg

SEQ ID NO: 502628 - DNA, 75 bp, synthetic construct
  source 1..75: mol_type = other DNA
tcgtagcgatgctgaaggtgttctctcagaccttggtttgggagaagcggcgaaaagggatgtgggcacaggaga

SEQ ID NO: 502629 - DNA, 75 bp, synthetic construct
  source 1..75: mol_type = other DNA
tgttgaggtgaatgcacctgtccgtgatgaaagcaacaagatcgttcgttatgaaactatccagaccaaacgtaa

SEQ ID NO: 502630 - DNA, 75 bp, synthetic construct
  source 1..75: mol_type = other DNA
acatcatcgtggtattgaaatcaccggcagtgacgaatttaaagagcgagtgtttaaccttatcagtgaatacaa

SEQ ID NO: 502631 - DNA, 75 bp, synthetic construct
  source 1..75: mol_type = other DNA
aaaaatggagtatgccaatccagaactggcggctggcaatgagccgttttattatcgagtttggtgaccgcctta

SEQ ID NO: 502632 - DNA, 75 bp, synthetic construct
  source 1..75: mol_type = other DNA
cagatagcctcctttactccaccgcatattaccgccggttgtggtggtattgatgcttatctgggctccttttcc

SEQ ID NO: 502633 - DNA, 75 bp, synthetic construct
  source 1..75: mol_type = other DNA
aagcgtattgataaagacggaaactggaaaacgtatatgactctttcagcaatcaataaaaatgccgaaagtgga

SEQ ID NO: 502634 - DNA, 75 bp, synthetic construct
  source 1..75: mol_type = other DNA
gcggggcaacgttgtgatccccctgtttaatgctgatggcgagttcaggacccttgagcgcatctggtccgacgg

SEQ ID NO: 502635 - DNA, 75 bp, synthetic construct
  source 1..75: mol_type = other DNA
tcatccgtcatctcggtgaatctgaatacatacgaatccgcatatgggaagtggagcctgctgtattgggtagcc

SEQ ID NO: 502636 - DNA, 75 bp, synthetic construct
  source 1..75: mol_type = other DNA
ggcgtaccggaaaaaccagccgatttaagtagtcattcatggcttgaatacagtgtgcgcccggacaatgaattt

SEQ ID NO: 502637 - DNA, 75 bp, synthetic construct
  source 1..75: mol_type = other DNA
atggaacgactaaaacgcatgtcggtgtttgccaaagtagttgaatttggctcttttaccgccgccagacagcta

SEQ ID NO: 502638 - DNA, 75 bp, synthetic construct
  source 1..75: mol_type = other DNA
agattatcgcttcttgggggatgccgcttttgatacccgctatgtatcgaactatatgctgaaccagatcggggg

SEQ ID NO: 502639 - DNA, 75 bp, synthetic construct
  source 1..75: mol_type = other DNA
caattgtgcaccggtgcctgatgcgacgctggcgcgtcttatcatgcctacaaacctgtgccggatcggtgggct

SEQ ID NO: 502640 - DNA, 75 bp, synthetic construct
  source 1..75: mol_type = other DNA
gtggaattttgccgcgtaatggcctgcgaggaccaacagcggcaaatgtttatctctcttaatatgacgctgctt

SEQ ID NO: 502641 - DNA, 75 bp, synthetic construct
  source 1..75: mol_type = other DNA
aaattggtattcactggctggtctttttgctggttattgcagcatattgcacaatggaatttcgtggattttttc

SEQ ID NO: 502642 - DNA, 75 bp, synthetic construct
  source 1..75: mol_type = other DNA
gctgctgcattggcacaccactatttctggaaggacaacacgcttctgcgcatgatgccgcgtaagcgttcctga

SEQ ID NO: 502643 - DNA, 75 bp, synthetic construct
  source 1..75: mol_type = other DNA
tcgattttcgtactgatggtgcttcgtctcgtgctaagactgaaatatccaacgccaccaattgtgcctaaacca

SEQ ID NO: 502644 - DNA, 75 bp, synthetic construct
  source 1..75: mol_type = other DNA
ggcataccggaaaaacccgccgatttaagtagtcattcatggcttgaatacagcgtgcgacccgacaatgaggca

SEQ ID NO: 502645 - DNA, 75 bp, synthetic construct
  source 1..75: mol_type = other DNA
ggctgacagccaaaatgctgaaagaatacccaggtttgagcgtcaatctggttaccggaattccagcccccgacc

SEQ ID NO: 502646 - DNA, 75 bp, synthetic construct
  source 1..75: mol_type = other DNA
ttagcgctaatatctctattaatattaaaatagccttccttttccttttttctgtattgctttacaaaaacgcag

SEQ ID NO: 502647 - DNA, 75 bp, synthetic construct
  source 1..75: mol_type = other DNA
atcattaaccgttccggtaatattgaaaccatgcgtggcgatatcaccatgaatacggcgcatctgctgaattca

SEQ ID NO: 502648 - DNA, 75 bp, synthetic construct
  source 1..75: mol_type = other DNA
atatcctggccggcaacagtctgtgggtacagaaggatgcttccggcggtgcaaacacagagattatcaatacct

SEQ ID NO: 502649 - DNA, 75 bp, synthetic construct
  source 1..75: mol_type = other DNA
aaatccggtctgatgggtaccggcggtattggtttcaccattggcagcagtaagacaacgcacgaccggcgcgag

SEQ ID NO: 502650 - DNA, 75 bp, synthetic construct
  source 1..75: mol_type = other DNA
cgaatcatggtaccctggccgcagggaaaaccctttccgtcacgtcgcagaacgccgtcaccaacggcggtgtga

SEQ ID NO: 502651 - DNA, 75 bp, synthetic construct
  source 1..75: mol_type = other DNA
cagggcaaacgggtgctgatcaccgcagacagtctggcaaacagcggggcgatccaggcggctgacagtctgact

SEQ ID NO: 502652 - DNA, 75 bp, synthetic construct
  source 1..75: mol_type = other DNA
tgccggtgacagcgtgttactgtccgccggtaatgacctgaacatgaacgcgatacaggccggcgaacgtcgtcg

SEQ ID NO: 502653 - DNA, 75 bp, synthetic construct
  source 1..75: mol_type = other DNA
gccctgcaggccacaaagacagcgctgtctggtgtgcaggccggacaggctgcgacaatggcctccgcaaccggt

SEQ ID NO: 502654 - DNA, 75 bp, synthetic construct
  source 1..75: mol_type = other DNA
ggtgacaccacgctgaaagcagccaccacggacaaccggggcagtctgctttcggccggcacgctctcccttaat

SEQ ID NO: 502655 - DNA, 75 bp, synthetic construct
  source 1..75: mol_type = other DNA
tatcaacggcacaggctctgacctgacgcagatgaaatacctgatggacagcgcggcagcacaacagaaagcgct

SEQ ID NO: 502656 - DNA, 75 bp, synthetic construct
  source 1..75: mol_type = other DNA
acgcgctgccggatacgctgaaggatatcccgggtgcgctgtcgctgtacggggcaagtgtaagcagctatcccc

SEQ ID NO: 502657 - DNA, 75 bp, synthetic construct
  source 1..75: mol_type = other DNA
cataatctggatgtcacggcatcctctgtttctgccgggcacagcgccctgctttctgcaggtaacgacctgagt

SEQ ID NO: 502658 - DNA, 75 bp, synthetic construct
  source 1..75: mol_type = other DNA
cacaacagtaaccggtgctgataatccggcaggccgcattgcgtcagggcgtaatctttctgctgaggctgaacg

SEQ ID NO: 502659 - DNA, 75 bp, synthetic construct
  source 1..75: mol_type = other DNA
tgtcacactgaaactgattgctgtcctcacgaattacggtaccctggccgcagggaaaaccctttccgtcacgtc

SEQ ID NO: 502660 - DNA, 75 bp, synthetic construct
  source 1..75: mol_type = other DNA
gacctgatattgctcgatatctatatgcaaaaagagaacgggctcgatttactgcctgttctgcataatgcgcgt

SEQ ID NO: 502661 - DNA, 75 bp, synthetic construct
  source 1..75: mol_type = other DNA
gcgtgggaggtgttcgaaaaactggaagactgctatttcagtcaaaaaatcccagaacaacttcagcttccagaa

SEQ ID NO: 502662 - DNA, 75 bp, synthetic construct
  source 1..75: mol_type = other DNA
ctcatcctctggacagaacgcggcgcagcccgtcacgcaaaaatgctcgaaaccgatcaggcgtgggaagtgttc

SEQ ID NO: 502663 - DNA, 75 bp, synthetic construct
  source 1..75: mol_type = other DNA
attatctggcgctacaacaggcgtttgacgcgccctggcctgggcctgtgggagagtctgtgacgctggaaaaag

SEQ ID NO: 502664 - DNA, 75 bp, synthetic construct
  source 1..75: mol_type = other DNA
tccctcatcctctggactgaacgcggcgctgcccgtcatgcaaaaatgctcgaaaccgatcgggcgtgggaggtg

SEQ ID NO: 502665 - DNA, 75 bp, synthetic construct
  source 1..75: mol_type = other DNA
ccatccctacgccacgatgaactatgttgatcgcaaggttatcagccttgatgcttccgtgctcttcgatatgcc

SEQ ID NO: 502666 - DNA, 75 bp, synthetic construct
  source 1..75: mol_type = other DNA
cgccttcaagcatctgacggaagaaatgcgccgtaaattgctggatatttcccgtacatcggaaaagtcttcccg

SEQ ID NO: 502667 - DNA, 75 bp, synthetic construct
  source 1..75: mol_type = other DNA
aaatggttggcggcgtaaccccaggtaaaggcggtactacccacctcggcctgccggtgttcaacaccgtgcgtg

SEQ ID NO: 502668 - DNA, 75 bp, synthetic construct
  source 1..75: mol_type = other DNA
aaatggttggtggcgtaactccaggtaaaggcggtactacccacctcggcctgccggtgttcaacaccgtgcgtg

SEQ ID NO: 502669 - DNA, 75 bp, synthetic construct
  source 1..75: mol_type = other DNA
aagtgaaactggatgaagccggcgttcgtatgatcggcccgaactgcccaggcgttatcaccccgggtgaatgca

SEQ ID NO: 502670 - DNA, 75 bp, synthetic construct
  source 1..75: mol_type = other DNA
taacgcaataaatctaacgccggaatttgtgacaccagataagccgctggtcatcgaaactcgttggcaatttac

SEQ ID NO: 502671 - DNA, 75 bp, synthetic construct
  source 1..75: mol_type = other DNA
aggtaaccagctccgttatccgggaaagtaccgtgttgtggaaaacctgcccgacgtttccccgtggagtgaaca

SEQ ID NO: 502672 - DNA, 75 bp, synthetic construct
  source 1..75: mol_type = other DNA
accgtcgatcacatctacctgctgactggcgatggcgactggctccagcttgttcgtgagaacgtgagctggata

SEQ ID NO: 502673 - DNA, 75 bp, synthetic construct
  source 1..75: mol_type = other DNA
aatttaacgccttcaaacatctgacggaagaaatgcgccgtactctacaggatatttcaagactgtcagatcgaa

SEQ ID NO: 502674 - DNA, 75 bp, synthetic construct
  source 1..75: mol_type = other DNA
tgaatggtaatgctacacttcataacagtcgaagtaaattactaataaagcttttctttaaattcattattaata

SEQ ID NO: 502675 - DNA, 75 bp, synthetic construct
  source 1..75: mol_type = other DNA
tattacaaatggtgaaaggttgcatgttgccagtaataaagatggacatgaatactttaataaatgcttgaaaaa

SEQ ID NO: 502676 - DNA, 75 bp, synthetic construct
  source 1..75: mol_type = other DNA
gtccccctcgacaataacccttgtgaaagagccatcaaaacggtggtcatgggcagaaaatcgtggctcttcgcc

SEQ ID NO: 502677 - DNA, 75 bp, synthetic construct
  source 1..75: mol_type = other DNA
taaagattcactacattacggcgtcgttgattacctgattaaacccttccaggcatcacgttttgaagaggcact

SEQ ID NO: 502678 - DNA, 75 bp, synthetic construct
  source 1..75: mol_type = other DNA
gaaatgttatcatataataaatatatttatatgcatgatcagttagcgacatatttagctgttgtttataagaat

SEQ ID NO: 502679 - DNA, 75 bp, synthetic construct
  source 1..75: mol_type = other DNA
atcgactatttaaaggagtatcaaaaaaataatattgttattgcaaagaatgatggaaaaaaaggccctgcgtat

SEQ ID NO: 502680 - DNA, 75 bp, synthetic construct
  source 1..75: mol_type = other DNA
actgtttattccattcatacaatgattcaactaaaaaaaattactgcactacaatccaccataaggaagacatga

SEQ ID NO: 502681 - DNA, 75 bp, synthetic construct
  source 1..75: mol_type = other DNA
atcctcaacgagctacacagcaagggctataacgtcgatgaaccgccccgggtttcctggagagtgttttatctg

SEQ ID NO: 502682 - DNA, 75 bp, synthetic construct
  source 1..75: mol_type = other DNA
ctcgaaaccgatcgggcgtgggaagtgttcgaaaaactggaagactgctatttcagtcaaaaaatcccagaacaa

SEQ ID NO: 502683 - DNA, 75 bp, synthetic construct
  source 1..75: mol_type = other DNA
gtgctggcactgcgacaaccagttgcgtgaccagacctccgaatcactcgggcaacttgctcaccaaaatttgtc

SEQ ID NO: 502684 - DNA, 75 bp, synthetic construct
  source 1..75: mol_type = other DNA
ctgacataagaagaaatcttgaatactttaaacacacaggccctacaggaaattcaagtcttggcctagcattaa

SEQ ID NO: 502685 - DNA, 75 bp, synthetic construct
  source 1..75: mol_type = other DNA
agtgattattggttgattcgctcttgggtatcaaattatttcgacgatcataaaaacgaacattttatcataact

SEQ ID NO: 502686 - DNA, 75 bp, synthetic construct
  source 1..75: mol_type = other DNA
gggctgcccgagcgccaaaatcgccgtctcgcggatgggcgttaacatggagcgcttcgccttgcgccccaccaa

SEQ ID NO: 502687 - DNA, 75 bp, synthetic construct
  source 1..75: mol_type = other DNA
cacggcattgatatctccagccgcgatgtactcagccactacacgccggaatatcagcaactgttccggcggggc

SEQ ID NO: 502688 - DNA, 75 bp, synthetic construct
  source 1..75: mol_type = other DNA
cgggtttcaagcccagccacgaggtaaaagcgatgctcgacgacgcggatgtgtttctgctgccgtcaattaccg

SEQ ID NO: 502689 - DNA, 75 bp, synthetic construct
  source 1..75: mol_type = other DNA
gcagtcgcgtggcgacgctgaaaggcgctgacgcgaacattttgcttcaggtacgtgaaaatctgccgctgatgc

SEQ ID NO: 502690 - DNA, 75 bp, synthetic construct
  source 1..75: mol_type = other DNA
taaatttacgtgaactgggcgttattagcggtaagattgtgactttttttcatggcaatgacatatcaagttgtg

SEQ ID NO: 502691 - DNA, 75 bp, synthetic construct
  source 1..75: mol_type = other DNA
aaaaggttgagaatgattttaatcagcagctcataaataatcaattagcagttttgttgagagatgttactaaaa

SEQ ID NO: 502692 - DNA, 75 bp, synthetic construct
  source 1..75: mol_type = other DNA
gatttgatgctcccaataagcaatctctgggccgcgcgtctgaaacacatgggttgcccgccggagaaaattgcc

SEQ ID NO: 502693 - DNA, 75 bp, synthetic construct
  source 1..75: mol_type = other DNA
tcatgtccacgtccgtcagtggcaaaaacgtggcgctgaccaacgccgaattcacaggggccggtgacgctaacg

SEQ ID NO: 502694 - DNA, 75 bp, synthetic construct
  source 1..75: mol_type = other DNA
gcgcggatggcgatatggaaggtattccggtggcgctgatggaggcgatggcggtcggcattccggtggtttcta

SEQ ID NO: 502695 - DNA, 75 bp, synthetic construct
  source 1..75: mol_type = other DNA
gccttgcggacgatgaaaggcgttcatcgctgtgcgacctggcaggcgttaaatgttgcgcgctacggcgctgaa

SEQ ID NO: 502696 - DNA, 75 bp, synthetic construct
  source 1..75: mol_type = other DNA
tctgggccgcgcgtctggaaaatatgggctgtccgccggagaaaattaccgtctcacggatgggggtggatatgc

SEQ ID NO: 502697 - DNA, 75 bp, synthetic construct
  source 1..75: mol_type = other DNA
ccaggctgatgtctttattgcgcatttcggaccggcaggggggacggcggcaaaactgcgtgaactgggggtcat

SEQ ID NO: 502698 - DNA, 75 bp, synthetic construct
  source 1..75: mol_type = other DNA
tgcccgtcagttcgatggctgacatggttggcgcggcgggtgccgcattatctcccctggcggcgttactccatc

SEQ ID NO: 502699 - DNA, 75 bp, synthetic construct
  source 1..75: mol_type = other DNA
tcatcagcaccaggacgcggcccatgacgtgtgtcattttcgccgcgtctgggctacggcacagaagctggcggc

SEQ ID NO: 502700 - DNA, 75 bp, synthetic construct
  source 1..75: mol_type = other DNA
gcgggcataacagctaccggtaaaacatgcctacaagcctcgcaatattgggcttatgccccattacttggcgag

SEQ ID NO: 502701 - DNA, 75 bp, synthetic construct
  source 1..75: mol_type = other DNA
gatcgacaaccacaagcaggagtacgaagggctgtggcagccgaatcatttgcagatcatgcaggaacatctgcg

SEQ ID NO: 502702 - DNA, 75 bp, synthetic construct
  source 1..75: mol_type = other DNA
cgcgctttagcccgcgtcccgtgaaagcgcccgcaacgccgctggagattatttccgtcgcacgcttaaccgaga

SEQ ID NO: 502703 - DNA, 75 bp, synthetic construct
  source 1..75: mol_type = other DNA
tccgccagagaaaatagacgccatttgccatgctatcgcggcacacagtttcagcgcacaaattacacctttaac

SEQ ID NO: 502704 - DNA, 75 bp, synthetic construct
  source 1..75: mol_type = other DNA
accaagctgttgaaattaccgctgacgatgcaaacggcaaaaggcaaaatgctggcgcagcataacgcccgtttt

SEQ ID NO: 502705 - DNA, 75 bp, synthetic construct
  source 1..75: mol_type = other DNA
gactaaccgccacggcagcggtctgctggtggttccgcagcgcccgattaacttcagcgcctggcactataccca

SEQ ID NO: 502706 - DNA, 75 bp, synthetic construct
  source 1..75: mol_type = other DNA
gtccccgccatgtggcaaatggaaggtcacggcaaactgcaatataccgacgaaggttttccgttccccatcgat

SEQ ID NO: 502707 - DNA, 75 bp, synthetic construct
  source 1..75: mol_type = other DNA
atgaatcgctgggaaaacattcagctcacccacgaaaaccgacttgcgccgcgtgcgtactttttttcatatgat

SEQ ID NO: 502708 - DNA, 75 bp, synthetic construct
  source 1..75: mol_type = other DNA
gtcagcatgtccgctggacggcactgactaaccgccacggcaacggtctgctggtggttccgcagcgccccatta

SEQ ID NO: 502709 - DNA, 75 bp, synthetic construct
  source 1..75: mol_type = other DNA
ggggaacggaccaggcgggctgacggagtaccagaacgtcttctataagcacgattgtattcagggacattatgt

SEQ ID NO: 502710 - DNA, 75 bp, synthetic construct
  source 1..75: mol_type = other DNA
gcagctggacgcccgcgaagcgttcctcaacattacggtgaccaaagattcccgcacccgctacagcgaagccgg

SEQ ID NO: 502711 - DNA, 75 bp, synthetic construct
  source 1..75: mol_type = other DNA
atgctgatgaacgtctgcaatttacccgtggtttgtgtggccgatgatgagccggaagcgtggctgcgtaacgat

SEQ ID NO: 502712 - DNA, 75 bp, synthetic construct
  source 1..75: mol_type = other DNA
agacagctacgctggctccgttcacgacagcccgccccgccagggggacgcccggaaaaggcataagcaggagaa

SEQ ID NO: 502713 - DNA, 75 bp, synthetic construct
  source 1..75: mol_type = other DNA
atgaatctgcccatctctcgcaaagcgacaatgaccagtattgagatcgcagaactggtaggtaagcgtcatgac

SEQ ID NO: 502714 - DNA, 75 bp, synthetic construct
  source 1..75: mol_type = other DNA
atgacgacactcatttatttgcaaattcctgtccctgaacccattcctggcgatcccgtaccagtgccagatccc

SEQ ID NO: 502715 - DNA, 75 bp, synthetic construct
  source 1..75: mol_type = other DNA
gactgtccgggggcagaccacaaaattttttgcctgcttttgggcaaaaagttttgcgggatgtacatttcaccc

SEQ ID NO: 502716 - DNA, 75 bp, synthetic construct
  source 1..75: mol_type = other DNA
cgttgccccttacatcccggcggccttttgccgggatgccgggagcgcaggccacggcgcgacagaggcggcgcg

SEQ ID NO: 502717 - DNA, 75 bp, synthetic construct
  source 1..75: mol_type = other DNA
ttattcagtcttacggcgcactggcggcagttgtctcgttcttgttgatgattttgcaggccattgctgcaccgc

SEQ ID NO: 502718 - DNA, 75 bp, synthetic construct
  source 1..75: mol_type = other DNA
agtccggcgttgacccatccagtggtcgttttaatgcggtaatggatgcaaatcaaagcgaccaggtgaccgggc

SEQ ID NO: 502719 - DNA, 75 bp, synthetic construct
  source 1..75: mol_type = other DNA
tcgctggcacaacaaatcttggttatcagaaacagtttggtgaagcgcgaagggagctggcgggtaatcttgctc

SEQ ID NO: 502720 - DNA, 75 bp, synthetic construct
  source 1..75: mol_type = other DNA
atgggtggaagtaaaggtggtggtgataccaaagtaaaaccaacagcagcgcaaatagcacaggaagaagtggcc

SEQ ID NO: 502721 - DNA, 75 bp, synthetic construct
  source 1..75: mol_type = other DNA
atccctcgcccgcaacccatgcctgacccaccacctgatgaagaaccgattaaattgtcgcatcgtgagcgtaga

SEQ ID NO: 502722 - DNA, 75 bp, synthetic construct
  source 1..75: mol_type = other DNA
agtccggtgttgacccgtccagtggtcgctttaacgcggtaatgaatgcgaaccagagtgatcaggtaaccgggc

SEQ ID NO: 502723 - DNA, 75 bp, synthetic construct
  source 1..75: mol_type = other DNA
tttcaaagttcaatacgttaagcgcaatggtgacaataccgcagattgctttatcactctggcagggggtacaca

SEQ ID NO: 502724 - DNA, 75 bp, synthetic construct
  source 1..75: mol_type = other DNA
cggcgttgccccttacatcccggcggccttttgccgggatgccgggagcgcaggccacggcgcgacagaggcggc

SEQ ID NO: 502725 - DNA, 75 bp, synthetic construct
  source 1..75: mol_type = other DNA
cacggatttatatatcaccgaagacagccgaactgaaacaggctattacccacgccattaataccatgtttttta

SEQ ID NO: 502726 - DNA, 75 bp, synthetic construct
  source 1..75: mol_type = other DNA
actgcgtcgtctgctgaccggtactcgtgtagaaaaaacctttaaatctacggattccgctgaaggcgctgatgt

SEQ ID NO: 502727 - DNA, 75 bp, synthetic construct
  source 1..75: mol_type = other DNA
actccgccgaacttcgttgaactggaaatcgttgataccgatccgggcctgaaaggtgataccgcaggtactggc

SEQ ID NO: 502728 - DNA, 75 bp, synthetic construct
  source 1..75: mol_type = other DNA
taagaaagcctgcacccaggccgcagaagtggcgctgtttgcctataatagtcgggcggcgcaaatctggtggca

SEQ ID NO: 502729 - DNA, 75 bp, synthetic construct
  source 1..75: mol_type = other DNA
taccgatgtggtgggtggttggtgtctgtgtggcagcaacctgtatggcatgtctggtactgacactggtgatgt

SEQ ID NO: 502730 - DNA, 75 bp, synthetic construct
  source 1..75: mol_type = other DNA
accggagcaatatttttccacaaccggcagatgtggaacgcgtggcggattatatcgccggtcatactgacccga

SEQ ID NO: 502731 - DNA, 75 bp, synthetic construct
  source 1..75: mol_type = other DNA
gccatctcctggcataatgttgaagacgatactgctgatcagcgttttatgtcagtgcgaacttctgcgcttcgt

SEQ ID NO: 502732 - DNA, 75 bp, synthetic construct
  source 1..75: mol_type = other DNA
gcatggtttgcccaaaactatgccgattttctacaaagctatgactggacggcaatcatggcaatgccctatatg

SEQ ID NO: 502733 - DNA, 75 bp, synthetic construct
  source 1..75: mol_type = other DNA
gccttttgccgggatgccgggagcgcaggtcacggcgcgacagaggcggcgcgaccggaacggtcgctgcaagcc

SEQ ID NO: 502734 - DNA, 75 bp, synthetic construct
  source 1..75: mol_type = other DNA
ccggctaccctgtctactggcgctgtggttaaagttccgctgttcgtacaaatcggcgaagtcatcaaagtggat

SEQ ID NO: 502735 - DNA, 75 bp, synthetic construct
  source 1..75: mol_type = other DNA
caaattcatccagcgcaataccgtcgtctctcccttttcgatgaccgggtacgtgaacaaattagtaccctttat

SEQ ID NO: 502736 - DNA, 75 bp, synthetic construct
  source 1..75: mol_type = other DNA
ccgcattatgggcaccggttggcagttggatagacacgccgatgaatcaacaagtgaaatttggcgatgaaatgg

SEQ ID NO: 502737 - DNA, 75 bp, synthetic construct
  source 1..75: mol_type = other DNA
gcgcggatggcgatatggaaggcattccggtggcgctaatggaagcgatggcggtcggtattccggtggtttcta

SEQ ID NO: 502738 - DNA, 75 bp, synthetic construct
  source 1..75: mol_type = other DNA
aatttccgctgtcgtcagaaaccttcgtcctcaatcaaattaccgcgtttattgatatgggatttgaggtggaga

SEQ ID NO: 502739 - DNA, 75 bp, synthetic construct
  source 1..75: mol_type = other DNA
agcctgccgtcagttgaaagagcagggcgtggcatttcgctatcgcattctcggcattggcccgtgggaacgacg

SEQ ID NO: 502740 - DNA, 75 bp, synthetic construct
  source 1..75: mol_type = other DNA
cacggtattgatatctctagtcgggaggtgctcaaccattacactcccgaatatcagcaactgttccgccgcggc

SEQ ID NO: 502741 - DNA, 75 bp, synthetic construct
  source 1..75: mol_type = other DNA
tttggcccggcgggggtaaccgcagcaaaactacgcgaactgggtgtcattcgcggcaaaattgccactatcttc

SEQ ID NO: 502742 - DNA, 75 bp, synthetic construct
  source 1..75: mol_type = other DNA
gctccggttatcaaacgtgcgcgcgaaaaagtcgaacacgattttaaccagcaggtgatcaatcgagaactcgcc

SEQ ID NO: 502743 - DNA, 75 bp, synthetic construct
  source 1..75: mol_type = other DNA
gaaagcgatgctcgacaacgcggatgttttcttgttgccatcggtaacgggtgcggatggcgatatggaaggcat

SEQ ID NO: 502744 - DNA, 75 bp, synthetic construct
  source 1..75: mol_type = other DNA
cgaacaatatcaactggaagatgtggtggagatgccgggctttaaaccgagccatgaagtgaaagcgatgctcga

SEQ ID NO: 502745 - DNA, 75 bp, synthetic construct
  source 1..75: mol_type = other DNA
ccagaacacccacgcggcatggacgaaatacaaccttgccgcaagaacccgctggttacaggacgaacctacggg

SEQ ID NO: 502746 - DNA, 75 bp, synthetic construct
  source 1..75: mol_type = other DNA
caaaactacgcgaactgggtgtcattcgcggcaaaattgccaccatcttccacggtattgatatctccagtcggg

SEQ ID NO: 502747 - DNA, 75 bp, synthetic construct
  source 1..75: mol_type = other DNA
ggcgtcgcccggcgcatggtcgcgttgctgaataggatggatgctgacctggccgcaaaactgctggtgctgctg

SEQ ID NO: 502748 - DNA, 75 bp, synthetic construct
  source 1..75: mol_type = other DNA
ttcaggacgaaaccatagcgcacgggctttatgtgaaccgctacggtactggcgtcgcccggcgcatggtgtcgt

SEQ ID NO: 502749 - DNA, 75 bp, synthetic construct
  source 1..75: mol_type = other DNA
gatggacaggtaccggggaaaacttcgtatctggaatggctcgcgcgccagccagcacaacgccaggatcaggtt

SEQ ID NO: 502750 - DNA, 75 bp, synthetic construct
  source 1..75: mol_type = other DNA
agatgaattttacaccgataaaggcgaatggctgacactgaagcaactccgagagcgtgatgcacaggcattcag

SEQ ID NO: 502751 - DNA, 75 bp, synthetic construct
  source 1..75: mol_type = other DNA
ggagaaaccgggccgatggggccgcccggggcatcagacgggaagagccgggttgtgggtatcaggctgggtaat

SEQ ID NO: 502752 - DNA, 75 bp, synthetic construct
  source 1..75: mol_type = other DNA
gggccaaaaggcgataccggcgagcgtgggccaaagggtgagcgtggtgagacaggaccacaggggcttcagggt

SEQ ID NO: 502753 - DNA, 75 bp, synthetic construct
  source 1..75: mol_type = other DNA
accgggatgcacgatagagctgaaagcgcgccgcacaacggagatggtgattgtcaccacggtggcgtatggtca

SEQ ID NO: 502754 - DNA, 75 bp, synthetic construct
  source 1..75: mol_type = other DNA
gtgatgaatcgattgcccatgctatctggatatctcgctatagcacaggtgtagcggccagaatggtgaaaacgc

SEQ ID NO: 502755 - DNA, 75 bp, synthetic construct
  source 1..75: mol_type = other DNA
acgtttattctgaaatctgcgaaggaactggggattgatgttcgggatgtttctcctgccgagagggcaagtatg

SEQ ID NO: 502756 - DNA, 75 bp, synthetic construct
  source 1..75: mol_type = other DNA
ttgtcagcggcttacaaaaagcgcatccgggtgaacaggttaaaaccacaaccgatacccccgcagatattgcat

SEQ ID NO: 502757 - DNA, 75 bp, synthetic construct
  source 1..75: mol_type = other DNA
gtgaactggcgaaaagtgaagccgccgcttccatcgcgcatttgacggtaaaacgttacgttccgctcgtgggca

SEQ ID NO: 502758 - DNA, 75 bp, synthetic construct
  source 1..75: mol_type = other DNA
gcgaacctatacagagcgtatattccgaataccgaaaaggaaaatatattgttaataggagatatcaacgtaaat

SEQ ID NO: 502759 - DNA, 75 bp, synthetic construct
  source 1..75: mol_type = other DNA
agcgatctctgtcagaacggttatatcgggaacagggtctggatacgcaaaagttgttaggtcataaatccagaa

SEQ ID NO: 502760 - DNA, 75 bp, synthetic construct
  source 1..75: mol_type = other DNA
gctgattgttaacgataaaagtcaggttgaagcgcgccctgtcgttgccagtcaggcgattggcgataaatggtt

SEQ ID NO: 502761 - DNA, 75 bp, synthetic construct
  source 1..75: mol_type = other DNA
gtcctgtcgttgccagccaggcgattggcgataaatggttgattagcgaagggctgaaatctggcgatcaagtca

SEQ ID NO: 502762 - DNA, 75 bp, synthetic construct
  source 1..75: mol_type = other DNA
atgaaggtcggcttcttcttattgaaattccctctgtcgtcagaaaccttcgtcctcaatcaaattaccgcgttt

SEQ ID NO: 502763 - DNA, 75 bp, synthetic construct
  source 1..75: mol_type = other DNA
tatcgccaaacgcgtgatggtggacctgtttcgccgaaacgcgctggaaaaagcgtatctggagatgctggcgct

SEQ ID NO: 502764 - DNA, 75 bp, synthetic construct
  source 1..75: mol_type = other DNA
ggtatgcaatatctaaaagatataacagcacttgatatttccgaaataacagatgctgttaaggcagagggtcat

SEQ ID NO: 502765 - DNA, 75 bp, synthetic construct
  source 1..75: mol_type = other DNA
gtaaagtcgaacactataacaatgaacttcagtaaagcacgcgataaagcggaaatagattggggtaatggcacg

SEQ ID NO: 502766 - DNA, 75 bp, synthetic construct
  source 1..75: mol_type = other DNA
acaaaacacccacgcggcatggacgaaatataaccttgctgccagaactcgctggttacaggacgaaccacaagg

SEQ ID NO: 502767 - DNA, 75 bp, synthetic construct
  source 1..75: mol_type = other DNA
gccagccagaccttacgcggcattcatcgtaaaaatacctggcaggcgcttaacctcaaacgctatggtgccgag

SEQ ID NO: 502768 - DNA, 75 bp, synthetic construct
  source 1..75: mol_type = other DNA
tatggtgctgagtcgcggaacctgattttgtctgccatttgtggtcaggtcgcaacaccgtttcatgccgatgtg

SEQ ID NO: 502769 - DNA, 75 bp, synthetic construct
  source 1..75: mol_type = other DNA
gcgaggccacggcactattagccgtgctggtgctgttcgtgtttccgggagtgttggacagccagtacctcagcg

SEQ ID NO: 502770 - DNA, 75 bp, synthetic construct
  source 1..75: mol_type = other DNA
aaatacaaccttgccgccagaacccgctggttacaggacgaaccacaaggcaaagtggcgaaactgcgccaccgc

SEQ ID NO: 502771 - DNA, 75 bp, synthetic construct
  source 1..75: mol_type = other DNA
gctccggttatcaaacgtgcgcgcgaaaaagtcgaacatgattttaaccagcaggtgattaatcgagaactcgcc

SEQ ID NO: 502772 - DNA, 75 bp, synthetic construct
  source 1..75: mol_type = other DNA
cgtcaacctggttagatcgctatcaagcgatccaggatgacaggctcaaaagtggtgatataagactcaacacct

SEQ ID NO: 502773 - DNA, 75 bp, synthetic construct
  source 1..75: mol_type = other DNA
ctcatcgttatatgggaaatgccatgctcctagctttggtcactgggcagcgtttgggagatatatccaaaatga

SEQ ID NO: 502774 - DNA, 75 bp, synthetic construct
  source 1..75: mol_type = other DNA
agtggcgatataaagctcaacacctataaacagaaagccaaaccagtatccttgctcagggaacgagcaggaatg

SEQ ID NO: 502775 - DNA, 75 bp, synthetic construct
  source 1..75: mol_type = other DNA
tgtgggccggaaggctgcaaaaaatgggctgcccgagggaaaaaattgccgtatcgcgcatgggcgtggacatga

SEQ ID NO: 502776 - DNA, 75 bp, synthetic construct
  source 1..75: mol_type = other DNA
gggggcaccgaaaggtgcgccggtctccgttgacgccggttacgccaaccccgtccagttcaccaccagtgaaat

SEQ ID NO: 502777 - DNA, 75 bp, synthetic construct
  source 1..75: mol_type = other DNA
ctgcaatttcgggacgttacactgttccagcaccttataaagcgggtgccgggattggaaccccggaattgcata

SEQ ID NO: 502778 - DNA, 75 bp, synthetic construct
  source 1..75: mol_type = other DNA
attttttttcatcagcctcgaagtatccttatgcgtcaaaagcatcagcagatttctttaatgacttgcgtgata

SEQ ID NO: 502779 - DNA, 75 bp, synthetic construct
  source 1..75: mol_type = other DNA
acatcaatgcctttaaccagatggaaaaactgctttcaaagccatccacgctgagcgatgccgcagataacgcca

SEQ ID NO: 502780 - DNA, 75 bp, synthetic construct
  source 1..75: mol_type = other DNA
tttaaccagatggagaaacagctttcaaatccctctgtactgagcgacgttgcacataacgccagcgttctctat

SEQ ID NO: 502781 - DNA, 75 bp, synthetic construct
  source 1..75: mol_type = other DNA
tccgttgacgccggttacgccaaccccgtccagttcaccaccagtgaaattggcgtttccggtggtggaagtttt

SEQ ID NO: 502782 - DNA, 75 bp, synthetic construct
  source 1..75: mol_type = other DNA
atgatggaagatcttaaaaaaacgatccgactgcgctgtgcattctgccgttcggaacagttcgccttaccttac

SEQ ID NO: 502783 - DNA, 75 bp, synthetic construct
  source 1..75: mol_type = other DNA
atatagctgaaggccatgtagacaagcttatagagcaatttcataaggatctaaagaaagcctttaaaggaagtc

SEQ ID NO: 502784 - DNA, 75 bp, synthetic construct
  source 1..75: mol_type = other DNA
aagattttcgatatcgcagataagaaacatcaatatatgggaaatgcaatgctgcttgcccttgtgactgggcaa

SEQ ID NO: 502785 - DNA, 75 bp, synthetic construct
  source 1..75: mol_type = other DNA
ccttgtcagacctgatttcaggcggttcttgtcaacgacggatgaaaagtgatccacttatatctccaccaacgg

SEQ ID NO: 502786 - DNA, 75 bp, synthetic construct
  source 1..75: mol_type = other DNA
tgttcgtaacttgtctgtcctttcacaggacggcgctaacctgttcgcaacagagtcatcaggagcgatagccct

SEQ ID NO: 502787 - DNA, 75 bp, synthetic construct
  source 1..75: mol_type = other DNA
ctttcgcacagtatgtggctgatacgcacacgccagaaattcaggctgcacgcggtcgcaagggcggttctaagt

SEQ ID NO: 502788 - DNA, 75 bp, synthetic construct
  source 1..75: mol_type = other DNA
gatcgatgacgtgaagcggcaaatcaatgattcaatgccctataccgacattccagtcgacctggtggaagaagc

SEQ ID NO: 502789 - DNA, 75 bp, synthetic construct
  source 1..75: mol_type = other DNA
ggtttgtcactgatgatgggcggtatagcgcaaatcatatctccgcaagccactaacgaaagtgtgaggcaggcg

SEQ ID NO: 502790 - DNA, 75 bp, synthetic construct
  source 1..75: mol_type = other DNA
taaagcatggatgaagcgcaacatcaaaacctatgacagataccacatccagatcaccaataaacagggccacaa

SEQ ID NO: 502791 - DNA, 75 bp, synthetic construct
  source 1..75: mol_type = other DNA
tccgcgaggaagtggtggatcttgtcacgaacggtgcaatagtgctccacacccaacgcctgaaatcagatccag

SEQ ID NO: 502792 - DNA, 75 bp, synthetic construct
  source 1..75: mol_type = other DNA
tgctgacgagcaagctgtcactgtgtgtcatcgccgttgactggagtggatacccctcacaggagtatcacgtac

SEQ ID NO: 502793 - DNA, 75 bp, synthetic construct
  source 1..75: mol_type = other DNA
tttttggtgaaaaattggccaatattttatatgaagctaactctcaatttttttacgagagaaatgtcatagaag

SEQ ID NO: 502794 - DNA, 75 bp, synthetic construct
  source 1..75: mol_type = other DNA
ccagggcaacccagtacaacttatctatggcgaggaaattctggttggctcacaggttgtgagttcttcaatcac

SEQ ID NO: 502795 - DNA, 75 bp, synthetic construct
  source 1..75: mol_type = other DNA
cgcaaaccgtggatggcgttgccagcccggcacaagcctcggttagcgatctcacgggtgaagaaaacgcagcgc

SEQ ID NO: 502796 - DNA, 75 bp, synthetic construct
  source 1..75: mol_type = other DNA
ccgattacacccagagcgacaactgactccggcatgacgaccaataatccaaccctgcaaaccacgccgaccgga

SEQ ID NO: 502797 - DNA, 75 bp, synthetic construct
  source 1..75: mol_type = other DNA
cgcaaaccgtagacggcgttgccagcccggcacaagcgtctgttagcgatctgacaggtgaagaaaccgccgcac

SEQ ID NO: 502798 - DNA, 75 bp, synthetic construct
  source 1..75: mol_type = other DNA
atgtagaatgcagcgtgcattacaacttgttgtaatgcctggtattccaataaaacgcgtggcaatgtcctgtgg

SEQ ID NO: 502799 - DNA, 75 bp, synthetic construct
  source 1..75: mol_type = other DNA
ggttctggcaatgcacggttcagcatggacaattaccggagccatctacgatacatccttgcatactgcatcatt

SEQ ID NO: 502800 - DNA, 75 bp, synthetic construct
  source 1..75: mol_type = other DNA
agccaatgcgtttgcgcaagagtggcagaaactgggcggcggcaccgttctgcaacaaaaatttggttccaccag

SEQ ID NO: 502801 - DNA, 75 bp, synthetic construct
  source 1..75: mol_type = other DNA
tgcccgttcggaatatgcccggtgtgatggccatttttatttgcataaaaaagagccgaaaggccggaagaatcg

SEQ ID NO: 502802 - DNA, 75 bp, synthetic construct
  source 1..75: mol_type = other DNA
ccagggaagaagaaagcaagaagggaatggacgcaagccagttaactggcgcgacatcaagttatgcgcgtaaat

SEQ ID NO: 502803 - DNA, 75 bp, synthetic construct
  source 1..75: mol_type = other DNA
ctggtagccgaagagttacgcgccaaccattccggcgagcggatcgtggcgcgttttgaggatgaagacgagtaa

SEQ ID NO: 502804 - DNA, 75 bp, synthetic construct
  source 1..75: mol_type = other DNA
ataacgaagaattgatctcaaaattatatacaatcatggatcagtctctggaaagtatgaaggaggatttaaacg

SEQ ID NO: 502805 - DNA, 75 bp, synthetic construct
  source 1..75: mol_type = other DNA
tggttcgtgaacgacgctttacctccgatgccgctcacgaactgcgtagcccgttaacggcgctgaaagtacaaa

SEQ ID NO: 502806 - DNA, 75 bp, synthetic construct
  source 1..75: mol_type = other DNA
catcgttgttggccaggagtgggaataccgtgaagacatggcactggcgattgtcactggacagctcattccctg

SEQ ID NO: 502807 - DNA, 75 bp, synthetic construct
  source 1..75: mol_type = other DNA
actgctcacactatcgcggctcgactcgctggataaccttcaggatgtcgcggagatcccacttgaagatctcct

SEQ ID NO: 502808 - DNA, 75 bp, synthetic construct
  source 1..75: mol_type = other DNA
atgttctggtttacgctgtttcttctttgtattgcccttgaaattataaccggaacgggatggttactcgtaatc

SEQ ID NO: 502809 - DNA, 75 bp, synthetic construct
  source 1..75: mol_type = other DNA
tgggcgttacagcctgaacgatctgcacagggctgccggttctctggataagcataagcctgcattctggctccg

SEQ ID NO: 502810 - DNA, 75 bp, synthetic construct
  source 1..75: mol_type = other DNA
acatctgagatatcaggccaacagcattaaaacacggcgggtaatctcgtatctgacattagcggagaatgtctt

SEQ ID NO: 502811 - DNA, 75 bp, synthetic construct
  source 1..75: mol_type = other DNA
taccataatagatacctctatggaaagtatggttgatggtataaaagatatacctaaagatgctgcaaaagatac

SEQ ID NO: 502812 - DNA, 75 bp, synthetic construct
  source 1..75: mol_type = other DNA
taatatttgtagagtaagaaacccttacacaaagatatccttttccagaaggcagaaggaggttttgttaatgtt

SEQ ID NO: 502813 - DNA, 75 bp, synthetic construct
  source 1..75: mol_type = other DNA
gttatctgacgcctgtcggggatagcccccagtatgacgaggcgctggagcgtgaaatcagccggtggattcgtg

SEQ ID NO: 502814 - DNA, 75 bp, synthetic construct
  source 1..75: mol_type = other DNA
aattacgcgcgggtgtcaacggcggttcaggtatcgctttaacggggagtccgattacccccagaacgacaaccg

SEQ ID NO: 502815 - DNA, 75 bp, synthetic construct
  source 1..75: mol_type = other DNA
tgatgacattcagggaacggcagcagtgaccctgggaacgctgctgtctgcctgccgacataaaagacagacatt

SEQ ID NO: 502816 - DNA, 75 bp, synthetic construct
  source 1..75: mol_type = other DNA
atgaatgagaaacagaccgaagaactggtggtgacgctgaaacgtccggtgaaggatccggataccaggaccgag

SEQ ID NO: 502817 - DNA, 75 bp, synthetic construct
  source 1..75: mol_type = other DNA
ggcgcaggaatcttgtcggcttctgcaattacatcaaatcagttccgcggtttttcaagcatagcgaccgctgca

SEQ ID NO: 502818 - DNA, 75 bp, synthetic construct
  source 1..75: mol_type = other DNA
gccgttaatctatacccccacagtcggttatgcctgtcagcattattctgaaatatggcgaaaaccccggggtat

SEQ ID NO: 502819 - DNA, 75 bp, synthetic construct
  source 1..75: mol_type = other DNA
cgggtaaaaattcagcttgatcgctttgttactgatgaagcgcgacatgtgtttttacgtaatcttcaggacaca

SEQ ID NO: 502820 - DNA, 75 bp, synthetic construct
  source 1..75: mol_type = other DNA
caatgatggccgaagggctgaatgagcaagaagcgcgtcgccgtatttatatggtggataaagacggtctcctgc

SEQ ID NO: 502821 - DNA, 75 bp, synthetic construct
  source 1..75: mol_type = other DNA
gaattgctggcgctggtggacatcatcacgccaaacgaaacggaagcagaaaagctcaccggtattcgtgttgaa

SEQ ID NO: 502822 - DNA, 75 bp, synthetic construct
  source 1..75: mol_type = other DNA
ctgcgattgccgtaacacgtaaaggcgcacaaccttccgtaccgtggcgtgaagagatcgacgcatttttagaca

SEQ ID NO: 502823 - DNA, 75 bp, synthetic construct
  source 1..75: mol_type = other DNA
gctgggcgtagcggtgcgaatatcgcgtttattgcctgtacgggtgatgacagcattggcgagagcgtacgtcag

SEQ ID NO: 502824 - DNA, 75 bp, synthetic construct
  source 1..75: mol_type = other DNA
gctggcggagaaagcggcccgggaagcagagctggcggcaaaaaaagcgcaggccagacaggcgctgtccattta

SEQ ID NO: 502825 - DNA, 75 bp, synthetic construct
  source 1..75: mol_type = other DNA
agttaatcgtcactctaccgatgtaattgtcacctggaatgcccgtaaggctgatgatgtccatattttaggaat

SEQ ID NO: 502826 - DNA, 75 bp, synthetic construct
  source 1..75: mol_type = other DNA
accactatcaagtcgcattcggcggtaaaggcgcgaatcaggctgtggcagcagggcgtagcggcgcgaatatcg

SEQ ID NO: 502827 - DNA, 75 bp, synthetic construct
  source 1..75: mol_type = other DNA
cgggtaaaaattcagcttgatcgctttgctactgatgaggcgcgacatgtgtttttacgcaatcttcaggacaca

SEQ ID NO: 502828 - DNA, 75 bp, synthetic construct
  source 1..75: mol_type = other DNA
ccacttagcgccctgacgctggcgcaatggtcttctccaacagccctgcgttccctgttggctgtttattccgat

SEQ ID NO: 502829 - DNA, 75 bp, synthetic construct
  source 1..75: mol_type = other DNA
cgctgcgccatgccctcttttttgagaaaacgcttactaccggtgaagataatccactctggcgtaccgtggtgc

SEQ ID NO: 502830 - DNA, 75 bp, synthetic construct
  source 1..75: mol_type = other DNA
ctcactgtgggcgcaatggtatatcggcctgatgacgccaccattaatgctggtgctgctgacgcaggaaaaagc

SEQ ID NO: 502831 - DNA, 75 bp, synthetic construct
  source 1..75: mol_type = other DNA
ttttgaaatcaacggtaataccggaagcctgacggcaaacccggattgcgtgattaacaggaagttatcatggct

SEQ ID NO: 502832 - DNA, 75 bp, synthetic construct
  source 1..75: mol_type = other DNA
accgctggcccggatttccgactggagatggaaggcttgcagtacagcgaaatcccgatgctggcaggcggtaat

SEQ ID NO: 502833 - DNA, 75 bp, synthetic construct
  source 1..75: mol_type = other DNA
atttggttccaccagcgaattacgcgcgggtgttaacggcggttcgggtatcgctttaacgggtagcccgattac

SEQ ID NO: 502834 - DNA, 75 bp, synthetic construct
  source 1..75: mol_type = other DNA
gaccgaattgctcgaactgacgccgcagtcacgggtgctggaaatcggcactggttcaggatatcaaaccgcaat

SEQ ID NO: 502835 - DNA, 75 bp, synthetic construct
  source 1..75: mol_type = other DNA
tcaacccgtcatggcgatggatggcaaggttggcaggcacgcgcgccgtttgacgctatcattgttacggcggca

SEQ ID NO: 502836 - DNA, 75 bp, synthetic construct
  source 1..75: mol_type = other DNA
gtggtattaccatcacttccgctgcgactactgcattttggtctggtatggctaagcagtatgagccgcatcgca

SEQ ID NO: 502837 - DNA, 75 bp, synthetic construct
  source 1..75: mol_type = other DNA
tgcgcgacggcctgctggtgcgccgcacttgctgccagcgttatcgcttaccggatgtgcaacagtgtggggatt

SEQ ID NO: 502838 - DNA, 75 bp, synthetic construct
  source 1..75: mol_type = other DNA
tgacgcaactggatgagggcggcattctcgtcttacccgtaggggaagagcaccagtatttaaaacgggtgcgtc

SEQ ID NO: 502839 - DNA, 75 bp, synthetic construct
  source 1..75: mol_type = other DNA
cagtcacgggtgctggaaatcggcactggttcaggatatcaaaccgcaattctggcgcatcttgtccagcatgta

SEQ ID NO: 502840 - DNA, 75 bp, synthetic construct
  source 1..75: mol_type = other DNA
tttgacctgaccacgtttgatgatgaacgcgattttttcgccgcctgccgtgctcttcaccaggatgaagccgat

SEQ ID NO: 502841 - DNA, 75 bp, synthetic construct
  source 1..75: mol_type = other DNA
atgtctgttgttgcacctgctgtatacgtcggaacctggcacaaatacaactgtggaagcatcgccggacgctgg

SEQ ID NO: 502842 - DNA, 75 bp, synthetic construct
  source 1..75: mol_type = other DNA
atgtctgttgttgcacctgctgtatacgttggaacctggcacaaatacaactgcggaagcatcgccggacgctgg

SEQ ID NO: 502843 - DNA, 75 bp, synthetic construct
  source 1..75: mol_type = other DNA
aagcgcgtatccgtaccaagttgctgaaagacggacacatcgatacggtgattggcctgcccgcgaacctgttct

SEQ ID NO: 502844 - DNA, 75 bp, synthetic construct
  source 1..75: mol_type = other DNA
cgcggactcaacatgtgaaactgcttaatacattacaggcaggttttaagtacattgaggaagaatctttcgcca

SEQ ID NO: 502845 - DNA, 75 bp, synthetic construct
  source 1..75: mol_type = other DNA
atcgattttgaaacgtcaatgtggaccatccctcttgattggtattgcagtaagcagagggttggactggtacag

SEQ ID NO: 502846 - DNA, 75 bp, synthetic construct
  source 1..75: mol_type = other DNA
acgtcggaacctggcacaaatataactgcggaagcatcgccggccgctggtttgacctgaccacgtttgatgatg

SEQ ID NO: 502847 - DNA, 75 bp, synthetic construct
  source 1..75: mol_type = other DNA
acatattgatagcaaaatagacataaaaaaattacaggatagcgtagaaagttatattattttggcaaaatccat

SEQ ID NO: 502848 - DNA, 75 bp, synthetic construct
  source 1..75: mol_type = other DNA
actgtggaagcatcgctggccgctggtttgacctgacaacgtttgatgatgaacgcgactttttcgccgcctgcc

SEQ ID NO: 502849 - DNA, 75 bp, synthetic construct
  source 1..75: mol_type = other DNA
acgttggaacctggcgaaagtataacggtggcagtattgccggtcgctggtttgacctgacttcatttgatgatg

SEQ ID NO: 502850 - DNA, 75 bp, synthetic construct
  source 1..75: mol_type = other DNA
gttgaaggcttccgccgggcacgggatgaaggctgcgaagaggcttatcgtctctgggtggatgataccggtgag

SEQ ID NO: 502851 - DNA, 75 bp, synthetic construct
  source 1..75: mol_type = other DNA
ttttaggcgatcgtctatcctgggtcgaagggacgatattctgcaatacacaatgggaaagagaaccatctgttt

SEQ ID NO: 502852 - DNA, 75 bp, synthetic construct
  source 1..75: mol_type = other DNA
tttctctggataatcagataaaatcagcaactcaaaaatataacgaatttctaaaagagttaggtttagctcctt

SEQ ID NO: 502853 - DNA, 75 bp, synthetic construct
  source 1..75: mol_type = other DNA
aatctttgcgttgttatctgtttttcttgaggatacgcagtttataccgttacttctgaacgtgttgcaaccgaa

SEQ ID NO: 502854 - DNA, 75 bp, synthetic construct
  source 1..75: mol_type = other DNA
tgcttatgaatattttgcgaccgaatatgcgaacgcgggtttgcacggtcatcaataataatattgctcatgaat

SEQ ID NO: 502855 - DNA, 75 bp, synthetic construct
  source 1..75: mol_type = other DNA
taattgcgtacgcaaaacataaatttattctcactatgttgaatggtgaatatcgctgctttaatggcggtgatg

SEQ ID NO: 502856 - DNA, 75 bp, synthetic construct
  source 1..75: mol_type = other DNA
gattgaacgcattctaaggggcgtagaggacgttacagaggatgtaccagtaccgaagactaagaaaccacgcaa

SEQ ID NO: 502857 - DNA, 75 bp, synthetic construct
  source 1..75: mol_type = other DNA
caacatttgcagggtaactaagtttgatgggtatcttgctgatgctgaacaatggcgcaagctgtcagccactgc

SEQ ID NO: 502858 - DNA, 75 bp, synthetic construct
  source 1..75: mol_type = other DNA
caattaagcgagttgcagtatcctgtggatatcacagcgtgtcgtatttcatttacgtctttcgaaattattatg

SEQ ID NO: 502859 - DNA, 75 bp, synthetic construct
  source 1..75: mol_type = other DNA
aaatatcagacgcgcaatcagagagagtcttaaaaaccatgtcaagtgacaagacgacatcattacaattatata

SEQ ID NO: 502860 - DNA, 75 bp, synthetic construct
  source 1..75: mol_type = other DNA
gctaatagccggttatgaagacgtttcattatggcgaatgggggaagtcatcgatgggaatatcgtattttcgcc

SEQ ID NO: 502861 - DNA, 75 bp, synthetic construct
  source 1..75: mol_type = other DNA
tttgaccttttgtgttctaatggtccagagtggaatcgctttgtttcgctggaaataaggtgtggcagtattttg

SEQ ID NO: 502862 - DNA, 75 bp, synthetic construct
  source 1..75: mol_type = other DNA
taattgcgtacgcaagacataaatatattctcaccatggttaatggtgaatatcgctattttaatggcggtgacc

SEQ ID NO: 502863 - DNA, 75 bp, synthetic construct
  source 1..75: mol_type = other DNA
ggcttcagacttttacttcggcgatggcttcacagcgacacttgatttcctgcttaaaccaaaaacgctacgcga

SEQ ID NO: 502864 - DNA, 75 bp, synthetic construct
  source 1..75: mol_type = other DNA
ccgaactggatcgggatcttgaacgcaagatctatgcgttcactgactacctgaaagacaaaagcattaacggct

SEQ ID NO: 502865 - DNA, 75 bp, synthetic construct
  source 1..75: mol_type = other DNA
ggaaagatttttattccatggcctgattatgaagatggcaaaagtaaagatttgactaaaggcattgataagctg

SEQ ID NO: 502866 - DNA, 75 bp, synthetic construct
  source 1..75: mol_type = other DNA
atgactgataaaatcgcggttctgttgggcggaacctccgctgagcgggaagtttctttgaactctggtgccgca

SEQ ID NO: 502867 - DNA, 75 bp, synthetic construct
  source 1..75: mol_type = other DNA
aacccgcgcagagtttgaaaaaggcctgagtgataagcagttagcagaaatttctgccttaggtttgccggttat

SEQ ID NO: 502868 - DNA, 75 bp, synthetic construct
  source 1..75: mol_type = other DNA
ccggcagcggagtgatggcatctgcgctttcaatggataaactacgcagcaaactgctgtggcaaggtgccggtt

SEQ ID NO: 502869 - DNA, 75 bp, synthetic construct
  source 1..75: mol_type = other DNA
taccttacatgatggctgagcctacagcttttcgctggttatgcttacaggaaagtttgctgaaggcgccaaata

SEQ ID NO: 502870 - DNA, 75 bp, synthetic construct
  source 1..75: mol_type = other DNA
gtgcacaagaaactgctggatgcgctgccttttctgtcggccgatccttcagcttgccggtgggtgtgcctgcag

SEQ ID NO: 502871 - DNA, 75 bp, synthetic construct
  source 1..75: mol_type = other DNA
ctctgatgagacacagtatttctgccccgcaggtttagacgcggcacaagaggccaatttgcaggcattagtgct

SEQ ID NO: 502872 - DNA, 75 bp, synthetic construct
  source 1..75: mol_type = other DNA
attatcatgatggtactactgagtcgcgaactttcaccgctaaacaaactggcgctggcgctacgtatgcgtgat

SEQ ID NO: 502873 - DNA, 75 bp, synthetic construct
  source 1..75: mol_type = other DNA
ccatgacggcaaaatggtcctcaacgacggtgataacggggaggacattccctacagctatcaacgtgaaggatt

SEQ ID NO: 502874 - DNA, 75 bp, synthetic construct
  source 1..75: mol_type = other DNA
ggttgagtcgctaaatcaactgttcgcccgcacacatgcgatgatggttcgtgaacgacgctttacctccgacgc

SEQ ID NO: 502875 - DNA, 75 bp, synthetic construct
  source 1..75: mol_type = other DNA
ctcgagctgatgggcttgccttataccggcagcggagtgatggcatctgcgctttcaatggataaactacgcagc

SEQ ID NO: 502876 - DNA, 75 bp, synthetic construct
  source 1..75: mol_type = other DNA
tgctaaacggtttgtttgcgctggttatgcactttgccgcgccggaaatgttcggaagtaatgcgtattatgcag

SEQ ID NO: 502877 - DNA, 75 bp, synthetic construct
  source 1..75: mol_type = other DNA
cggtatcgttctggaactggcccaacaggtgctgacattgagacaaaaagagcaacttggaagtgatgcttacaa

SEQ ID NO: 502878 - DNA, 75 bp, synthetic construct
  source 1..75: mol_type = other DNA
ggaggcggccctcccgggccatctgaaggtaaccggagtgaatgccggccggttaggcattgcactgctggacac

SEQ ID NO: 502879 - DNA, 75 bp, synthetic construct
  source 1..75: mol_type = other DNA
aaagaagcgaaagcgatcgccgccgccgaaggacgcgagttgatcattctcgccttgtgctgggcaccgatcttg

SEQ ID NO: 502880 - DNA, 75 bp, synthetic construct
  source 1..75: mol_type = other DNA
tgtcatcaacggcaaagcgggcgcagacaacgagcagttgctggtggagattgaagaactgttcaacagcaaagc

SEQ ID NO: 502881 - DNA, 75 bp, synthetic construct
  source 1..75: mol_type = other DNA
gctggaaaacgatccgcaaactgaaattatcgcactgatttcaaaacctcccgcgcctgcggtggcccgcaaagt

SEQ ID NO: 502882 - DNA, 75 bp, synthetic construct
  source 1..75: mol_type = other DNA
ggcagtcgatgatcgcggcggcttctggagatcgtcagttaataaagaataatgccaaattggttttcacctgtt

SEQ ID NO: 502883 - DNA, 75 bp, synthetic construct
  source 1..75: mol_type = other DNA
aatttaccgtttggcttatcaatcttttttgctaatacgccttactcagttgcgacattgcaaataatatcgctt

SEQ ID NO: 502884 - DNA, 75 bp, synthetic construct
  source 1..75: mol_type = other DNA
aaaaggccgtcaggaatgggagcgacgactggcaacgctcaataacaaacgccgtgggcgacccggctacaggct

SEQ ID NO: 502885 - DNA, 75 bp, synthetic construct
  source 1..75: mol_type = other DNA
gatacgccatcattagaacaacaaagccagatgctgcttgatgccggagtgattctggcgagcagcagcaccaat

SEQ ID NO: 502886 - DNA, 75 bp, synthetic construct
  source 1..75: mol_type = other DNA
aagtgcattcgcgccgcacgcgaagtgatgcaggacgagttgatgcagatgccagaatttaaagagattgcctga

SEQ ID NO: 502887 - DNA, 75 bp, synthetic construct
  source 1..75: mol_type = other DNA
ctgttggaaatcaatgtggtaagtgcattcgtgctgcacgtgaagtaatgcaggatgagttgttgcagatgcccg

SEQ ID NO: 502888 - DNA, 75 bp, synthetic construct
  source 1..75: mol_type = other DNA
gcaggggctacagtttgcccgcggcaccaaagaggcggcgctaaaagcggtgatgctctccggcgtgaaacagga

SEQ ID NO: 502889 - DNA, 75 bp, synthetic construct
  source 1..75: mol_type = other DNA
cgcagcagaaatacattcgtggtctgttctgcggcggtacgctgtgtgacgaaaccctgttcgcggtgatggaaa

SEQ ID NO: 502890 - DNA, 75 bp, synthetic construct
  source 1..75: mol_type = other DNA
ccgtatccatgaatttggtggcggcgtttcacaactgatcggcaccggcgggcgcgacctgagcgagaaaatcgg

SEQ ID NO: 502891 - DNA, 75 bp, synthetic construct
  source 1..75: mol_type = other DNA
gacctgacgccggctgccatcggcccttactgtgtgccggtggttaacctcgatgcaaacgtcgatcaactgaac

SEQ ID NO: 502892 - DNA, 75 bp, synthetic construct
  source 1..75: mol_type = other DNA
taataagggattttatgttgatgatcgggcactaaggccttctgaatttgcaagattaaatcttcaagagataaa

SEQ ID NO: 502893 - DNA, 75 bp, synthetic construct
  source 1..75: mol_type = other DNA
atgatgctgtaccacgacgatgaaccgctaacattggaattgatctggcagcatggcggttggtgcagtgcgatg

SEQ ID NO: 502894 - DNA, 75 bp, synthetic construct
  source 1..75: mol_type = other DNA
agtgttaacaaggcaaattttgcgatactgcactggtttggccttcgttttgagcctcattttactgacctgaac

SEQ ID NO: 502895 - DNA, 75 bp, synthetic construct
  source 1..75: mol_type = other DNA
ccgtcctggaaccactacaccgtaaagcctgtgaaattctgcctgccctgaatatttctcagcaaaaccttctgt

SEQ ID NO: 502896 - DNA, 75 bp, synthetic construct
  source 1..75: mol_type = other DNA
gattgtctggatgatacacaactcacactgtgagttcaggcttaacatcatgtggtcacaatttgcggcgttctt

SEQ ID NO: 502897 - DNA, 75 bp, synthetic construct
  source 1..75: mol_type = other DNA
tggcaagggcataaccagagcgacaaatgtctccagaattggtattgccgccagttgcgttctgcgcttttattt

SEQ ID NO: 502898 - DNA, 75 bp, synthetic construct
  source 1..75: mol_type = other DNA
cgcggctggtgaccaagtacgaggcggccggcaacagcaaggcgctggcactcatcacaaaaatttcgcctgcgg

SEQ ID NO: 502899 - DNA, 75 bp, synthetic construct
  source 1..75: mol_type = other DNA
tgccaggatctctttcaactttttaattctcctcattcaccgctaccaacattacttgtttctgggatgcctgag

SEQ ID NO: 502900 - DNA, 75 bp, synthetic construct
  source 1..75: mol_type = other DNA
atgatgctattccacgacgatgagccattaacgtttgatctgatctggcgaaatggcagctggcagagtttgggg

SEQ ID NO: 502901 - DNA, 75 bp, synthetic construct
  source 1..75: mol_type = other DNA
aaacccgggcagacccgcctttatctgctgtgctatgcatggattcgttaccggcagttcagcgacaacctggtg

SEQ ID NO: 502902 - DNA, 75 bp, synthetic construct
  source 1..75: mol_type = other DNA
cggggaaacatgcggtcgcgtggtggccgcagcggtaagcctgatatcccccgcgctggaggtggttatcagcgt

SEQ ID NO: 502903 - DNA, 75 bp, synthetic construct
  source 1..75: mol_type = other DNA
gcactcacaaaagtacgcagcgccatcattgccaccagtcttgccgcgcgtctggcgggcgtgtcgtttctgacc

SEQ ID NO: 502904 - DNA, 75 bp, synthetic construct
  source 1..75: mol_type = other DNA
gcccgtttccgcagtgagttttctgccatgggtgccgtggggtttgctgaagatctggcaggtaaaaccgcgtgg

SEQ ID NO: 502905 - DNA, 75 bp, synthetic construct
  source 1..75: mol_type = other DNA
attatgctggatacgcagggagtcgcacgtgtgttttccggcatgcacgacggcagtgaaacaacaatctggcca

SEQ ID NO: 502906 - DNA, 75 bp, synthetic construct
  source 1..75: mol_type = other DNA
cagaaccggatagagtcttatcaccagttacgtgcagccgtggccaaagttggtggaaagaaagagttaaccgga

SEQ ID NO: 502907 - DNA, 75 bp, synthetic construct
  source 1..75: mol_type = other DNA
tatgtacatatacaacaactaatcctacaaggcaggcggtatttgaatatgaccgtctgattcgcagcatttata

SEQ ID NO: 502908 - DNA, 75 bp, synthetic construct
  source 1..75: mol_type = other DNA
gaagctgaactggcataaatcggtagtcagtcgttataaagaacagaaccggcgtttttacgggcaactgccgtt

SEQ ID NO: 502909 - DNA, 75 bp, synthetic construct
  source 1..75: mol_type = other DNA
ataggttatattcaaaatcaaaagttttctttctttaaaagagatggaatcaatatagctattgatgaaataaca

SEQ ID NO: 502910 - DNA, 75 bp, synthetic construct
  source 1..75: mol_type = other DNA
aacagatgaaagacgcagcagattatttttcttccaatataaaattaatatctctttgtgattatataaaaaatg

SEQ ID NO: 502911 - DNA, 75 bp, synthetic construct
  source 1..75: mol_type = other DNA
aaggtggtgcggcagtaattatcattcctgctagtatgatagaaaatacaggatgggaagatggaaccttattgg

SEQ ID NO: 502912 - DNA, 75 bp, synthetic construct
  source 1..75: mol_type = other DNA
gtcagcaggaaacgccgcgggtaggccgcctgctgtcactctacgttgatgatagcgtggccgatcccacgccct

SEQ ID NO: 502913 - DNA, 75 bp, synthetic construct
  source 1..75: mol_type = other DNA
ggctatgtctctttacgggaactcaatgcgacagatgcgcgaattggcctgctggctggacgcggtgcaggtgct

SEQ ID NO: 502914 - DNA, 75 bp, synthetic construct
  source 1..75: mol_type = other DNA
cggcctggcggcctccgcttaaaagggctttatgcccgcccggcgtcgtctggctgcggcggctcgtgccgcgca

SEQ ID NO: 502915 - DNA, 75 bp, synthetic construct
  source 1..75: mol_type = other DNA
ccacgttgcggtctcttttgagtcaccagaatataccgctgacgtcgacgcgatgggtacgctgcgcctgctgga

SEQ ID NO: 502916 - DNA, 75 bp, synthetic construct
  source 1..75: mol_type = other DNA
acgcagaagtggcacaagagacagatattccagtgctacgccagttagccagtgaggcatttgcgcaaagccgtt

SEQ ID NO: 502917 - DNA, 75 bp, synthetic construct
  source 1..75: mol_type = other DNA
tcaaacaccgctgagctggatgctctgcaacagttgggattcatactggtggaaggtgaaatcgatttggcgtta

SEQ ID NO: 502918 - DNA, 75 bp, synthetic construct
  source 1..75: mol_type = other DNA
cactaacctgggaaaacaccttctttggtgtcaacagcgccattgtgcgtattagtcttgacgcgccactcctga

SEQ ID NO: 502919 - DNA, 75 bp, synthetic construct
  source 1..75: mol_type = other DNA
tgcatatttcggcattatcaccgacgacgcgcctaactcacgcacagcgacacgggaaaacttataccatcgaac

SEQ ID NO: 502920 - DNA, 75 bp, synthetic construct
  source 1..75: mol_type = other DNA
atattgcgatggctgaagcgggtattccgcgcggtaccggaatgggttacggcggctgcggggggggcgggcata

SEQ ID NO: 502921 - DNA, 75 bp, synthetic construct
  source 1..75: mol_type = other DNA
tggtgatgatggcgttttcagcaatggcgataggctcaacaactgcatttgcccacggcggacacggtatgtggc

SEQ ID NO: 502922 - DNA, 75 bp, synthetic construct
  source 1..75: mol_type = other DNA
aattccatctgcattatggcgacctgagtgatacctctaacctgacgcgcattttgcgtgaagtacagccggatg

SEQ ID NO: 502923 - DNA, 75 bp, synthetic construct
  source 1..75: mol_type = other DNA
gttcagcaataaccataccatcggattgtgcgtcggcaggccctttaaccagcaaccagcgagcgttggtaatgg

SEQ ID NO: 502924 - DNA, 75 bp, synthetic construct
  source 1..75: mol_type = other DNA
gactaccaggctatcgcacgcgcagcggcacgggaaaacatacaccatagatgagcagcgcgaatggtggagcag

SEQ ID NO: 502925 - DNA, 75 bp, synthetic construct
  source 1..75: mol_type = other DNA
gtgcccgtccgcgccagtattgagccactcacctgggaaaatgccttctttggtgttaatagcgccatcgtgcgt

SEQ ID NO: 502926 - DNA, 75 bp, synthetic construct
  source 1..75: mol_type = other DNA
ggctggacccgagcattaccgtatgcaatcggtggttcatgtctatttaaagttgaagaactgactacttcttta

SEQ ID NO: 502927 - DNA, 75 bp, synthetic construct
  source 1..75: mol_type = other DNA
atttaaccatccttactggatgtgcaaaggctcatgggcttatgcaaataataaggtcattacagatacaggttg

SEQ ID NO: 502928 - DNA, 75 bp, synthetic construct
  source 1..75: mol_type = other DNA
cagcctgcattcgctttagggcaaacaggaagcagggttgcaaatgataaagctgttggctggaactggaatagc

SEQ ID NO: 502929 - DNA, 75 bp, synthetic construct
  source 1..75: mol_type = other DNA
actttaatgcagtggagagaggagcgtttccggagcattcagcgacagtatggattaacggtgagggaggtaccc

SEQ ID NO: 502930 - DNA, 75 bp, synthetic construct
  source 1..75: mol_type = other DNA
gtcgttaatggtaacgatagcggcggtgattgcggagcgcaacggccggacatttttgcgtacagtagcgcagtt

SEQ ID NO: 502931 - DNA, 75 bp, synthetic construct
  source 1..75: mol_type = other DNA
tgtcaacaagcaatagcattcggtacaccggctgcgggatcatttggttataacgtttatgatattgcattcaat

SEQ ID NO: 502932 - DNA, 75 bp, synthetic construct
  source 1..75: mol_type = other DNA
gcggagaaggctgcccgggaagcagagctgacagcaaaaaaagcgcaggccagacaggcgctgtccatttatctg

SEQ ID NO: 502933 - DNA, 75 bp, synthetic construct
  source 1..75: mol_type = other DNA
aggtcattacagatacaggttgcggaaatatttgtcttgcaggtgctgtggtggaagttattggcactcgcggcg

SEQ ID NO: 502934 - DNA, 75 bp, synthetic construct
  source 1..75: mol_type = other DNA
cgtgatatccgacttggtggcgcatcatcatacaaaccagcaaataatggcacaacatggacacatcaggctcca

SEQ ID NO: 502935 - DNA, 75 bp, synthetic construct
  source 1..75: mol_type = other DNA
tagcggagcctataacgcagctattagtggtgcatcaacgttaattattcatttttatatgggagaaggaagttg

SEQ ID NO: 502936 - DNA, 75 bp, synthetic construct
  source 1..75: mol_type = other DNA
atgcggctacagcgaccaaattgcagacggcgtgtactatcaacggtgtctcgtttgacggttctaaaaatattg

SEQ ID NO: 502937 - DNA, 75 bp, synthetic construct
  source 1..75: mol_type = other DNA
atgccatgcgtgccaaaatcgaccattatccaaaacctcggtttacaggaaacggtaaatcaggcttctggcgca

SEQ ID NO: 502938 - DNA, 75 bp, synthetic construct
  source 1..75: mol_type = other DNA
tattgccggtacgctggtggcgggtttggcctatgccttcctcaaacgcccggaaacacaaatagtagaaaaaaa

SEQ ID NO: 502939 - DNA, 75 bp, synthetic construct
  source 1..75: mol_type = other DNA
aagcgaaaaaacgtggctggtgggtgaaagttgaaacccgtggttctgttggcgcgggtaatgcaatcacccctg

SEQ ID NO: 502940 - DNA, 75 bp, synthetic construct
  source 1..75: mol_type = other DNA
tggcggcaggtatggtgccaccgctggcaatgggcctggcaacaatggtggcgcgtcgcaaattcgacaaagcgc

SEQ ID NO: 502941 - DNA, 75 bp, synthetic construct
  source 1..75: mol_type = other DNA
attgaaactgaagcgaaaaaacgcggttggtgggtgaaagttgaaacccgtggctctgttggtgcggggaatgcc

SEQ ID NO: 502942 - DNA, 75 bp, synthetic construct
  source 1..75: mol_type = other DNA
tggatctggcgaaatttgctggtaaaccgatgtatcgcacctctaccggtctggcgctgaagaaaaccgcgcagg

SEQ ID NO: 502943 - DNA, 75 bp, synthetic construct
  source 1..75: mol_type = other DNA
ggcgcaatctcaatggcgattggtgcgaaactgatggcaccacacggtggtctgtttgttctgctgatccctggc

SEQ ID NO: 502944 - DNA, 75 bp, synthetic construct
  source 1..75: mol_type = other DNA
aagcagcttgaagaagcgaaagcgcgcgttcaggctcaacgtgctgaacagcaagcgaaaaaacgcgaagctgcc

SEQ ID NO: 502945 - DNA, 75 bp, synthetic construct
  source 1..75: mol_type = other DNA
actgagggaacagtgcgacggcttgagtcagcaggtgcagagattagccgggcaggtggaccgcttgagtcggtt

SEQ ID NO: 502946 - DNA, 75 bp, synthetic construct
  source 1..75: mol_type = other DNA
aggactatacgcagcggctgaaagactgggagagcgccttcacggatttgcagcatatgttcgagctgacacgac

SEQ ID NO: 502947 - DNA, 75 bp, synthetic construct
  source 1..75: mol_type = other DNA
atcattccgctaatttccagtctggtggtcggtctggcgatgatctacctgatcggtaaaccggttgctggcatt

SEQ ID NO: 502948 - DNA, 75 bp, synthetic construct
  source 1..75: mol_type = other DNA
tctcttacatgctgccgatggtcgttgcaggtggtctgtgtatcgcgctttcttttgcttttggtatcgaagcgt

SEQ ID NO: 502949 - DNA, 75 bp, synthetic construct
  source 1..75: mol_type = other DNA
ggcgccgagcgcaaacctcgcgcgcaaaaaccggctgagaaagcgccaaaaacagtaaaagcacctcgcgaagaa

SEQ ID NO: 502950 - DNA, 75 bp, synthetic construct
  source 1..75: mol_type = other DNA
tttcgcggtgggcgaatcttcccggcagtgtttgtcggcgtggcattagggttgatgctgcatgagcacgttccc

SEQ ID NO: 502951 - DNA, 75 bp, synthetic construct
  source 1..75: mol_type = other DNA
tacggttcggctcagggctattgtggtaatataaatggatgtacctactcattcgcagtttattcgcatgctaat

SEQ ID NO: 502952 - DNA, 75 bp, synthetic construct
  source 1..75: mol_type = other DNA
agcgcgcgtggcaagtattgagatgaatgaatgcgatccgcgtctggcgaactgtcatattgaagtagcatgtga

SEQ ID NO: 502953 - DNA, 75 bp, synthetic construct
  source 1..75: mol_type = other DNA
tttagcgcgcgtggcaagcattgagatggatgaatgcgatccgcgtctggcgaactgccatattgaagtagcatg

SEQ ID NO: 502954 - DNA, 75 bp, synthetic construct
  source 1..75: mol_type = other DNA
aaacccatcgccgggcgcgacccgcaatcggaagatctggtgctgacgcagcgttgcttgataaagggggatgtt

SEQ ID NO: 502955 - DNA, 75 bp, synthetic construct
  source 1..75: mol_type = other DNA
tccggctgtgacgcctttcttttgcaggaacgccagcgtcgtcagcggcatgacccgcttttttcatgtggtgtt

SEQ ID NO: 502956 - DNA, 75 bp, synthetic construct
  source 1..75: mol_type = other DNA
aggaacgccagcgtcgtcagcggcatgacccgcttttttcatgttgtatttccggcaaacagcgaaaaacagagg

SEQ ID NO: 502957 - DNA, 75 bp, synthetic construct
  source 1..75: mol_type = other DNA
cgcggcgagcttgttgatggagcaggtactggctccgcgcttcgagtttaagcccaagaatccagaaagcggccc

SEQ ID NO: 502958 - DNA, 75 bp, synthetic construct
  source 1..75: mol_type = other DNA
cgcggcaagcctgctgatggagcaagtattggctccgcgcttcgagttcaagcctaagaacccagaaagcggccc

SEQ ID NO: 502959 - DNA, 75 bp, synthetic construct
  source 1..75: mol_type = other DNA
ggtggtaacacgcgatggctggttaagtctttttatggcggcagtcgttgtacccaataccacattgctaccgct

SEQ ID NO: 502960 - DNA, 75 bp, synthetic construct
  source 1..75: mol_type = other DNA
ctaaaatttattttggtgaagaggcaataacctctctatgccaatttaataataaacgagtcggtattgtcaccg

SEQ ID NO: 502961 - DNA, 75 bp, synthetic construct
  source 1..75: mol_type = other DNA
ctcaatgtactcgatcctgacaagaagaccattatccatattcccaacgtcaattcgcgcgagagcacgaaggat

SEQ ID NO: 502962 - DNA, 75 bp, synthetic construct
  source 1..75: mol_type = other DNA
tgcggatcctgcgacaggtttccagttagtcaaatgccgcgatggccgaatgttgcgtatcgctgatctggtgga

SEQ ID NO: 502963 - DNA, 75 bp, synthetic construct
  source 1..75: mol_type = other DNA
tacgagaacgctaccgcgattttggccccacgctggcccgggaaaaactggaggaagttcacggtctggtcctgg

SEQ ID NO: 502964 - DNA, 75 bp, synthetic construct
  source 1..75: mol_type = other DNA
accaaaggctatctcaacgagttcctgctgtggctgggcgttattgataccccaattcgcatcatgttcaccccc

SEQ ID NO: 502965 - DNA, 75 bp, synthetic construct
  source 1..75: mol_type = other DNA
gccggaaccgaaacgtattgtcgaagcacctgccattaaggcgctgatccaacaaggctttgtcgtaattggcgc

SEQ ID NO: 502966 - DNA, 75 bp, synthetic construct
  source 1..75: mol_type = other DNA
caggcgctcgatcgcgtagatattgccaccatgccccgctatatgcaggaaggacatttcccgcccggcagcatg

SEQ ID NO: 502967 - DNA, 75 bp, synthetic construct
  source 1..75: mol_type = other DNA
agcgatgggcctgttctatgtatccgacctgatgggcggtgcgaaaaacctgctgatcggtaacgtcatcaaggt

SEQ ID NO: 502968 - DNA, 75 bp, synthetic construct
  source 1..75: mol_type = other DNA
tttcgtcaaaatggtctttacgctggataactacacacgtctgctcgatccgctctattttgaagtgctattgca

SEQ ID NO: 502969 - DNA, 75 bp, synthetic construct
  source 1..75: mol_type = other DNA
gccgctgtactccagtatcgaaaaactggataagccgttgcttgaggcggcgcgcgatctcggtgccagcaagtt

SEQ ID NO: 502970 - DNA, 75 bp, synthetic construct
  source 1..75: mol_type = other DNA
ggtatctatcgccatcatcataatcaccgccatgatttacaggggcggattattctgcgtcggggaaatgatcgc

SEQ ID NO: 502971 - DNA, 75 bp, synthetic construct
  source 1..75: mol_type = other DNA
ggtatctatcgccatcatcataatcaccgccacgatttacaggggcgaattattctgcgtcggggaaatgaccgc

SEQ ID NO: 502972 - DNA, 75 bp, synthetic construct
  source 1..75: mol_type = other DNA
caacgttgaccagaaaatatgaaggctcaacttgtcttccaaatgtagctctttacgcggcaggctacaggaaat

SEQ ID NO: 502973 - DNA, 75 bp, synthetic construct
  source 1..75: mol_type = other DNA
ccgtcaccgtggtaactcaggtggaagtggataaaaacgatccaggttttgcccatcccaccaagcccattggtg

SEQ ID NO: 502974 - DNA, 75 bp, synthetic construct
  source 1..75: mol_type = other DNA
gcgtggacgcggttatcgacaaagatctctctaccgcgctactggctcccgaaaatcacgccgacactcttgtga

SEQ ID NO: 502975 - DNA, 75 bp, synthetic construct
  source 1..75: mol_type = other DNA
tcgagctgtaactcgaaggctaatttcggtcggcataagtggcaaaagttttatgaatcactgatgaaaaataga

SEQ ID NO: 502976 - DNA, 75 bp, synthetic construct
  source 1..75: mol_type = other DNA
ctgctgtttctgctgattgttcccttctggaccaactcattgattcgtatctacgggctgaaaattttcctcagc

SEQ ID NO: 502977 - DNA, 75 bp, synthetic construct
  source 1..75: mol_type = other DNA
cactaaagcgagagcgttagcgcgtgaagcatcagcctgtggcatcaaaacaaaattagctgatctcgacctgga

SEQ ID NO: 502978 - DNA, 75 bp, synthetic construct
  source 1..75: mol_type = other DNA
ggtaactcgcttccctgctctgctttatccgctgggtaactggatctgcctgctgtttatggcggcggtattggt

SEQ ID NO: 502979 - DNA, 75 bp, synthetic construct
  source 1..75: mol_type = other DNA
cgcccacaaatctatgctgccaaatccgaagctaacagagccaatacgcgtcttgatgctcaggactattttgat

SEQ ID NO: 502980 - DNA, 75 bp, synthetic construct
  source 1..75: mol_type = other DNA
ctataagatatcctcgaaaggtcgcaaactcattcttcttatatgaaaataatgcctcagagaaatataaaggag

SEQ ID NO: 502981 - DNA, 75 bp, synthetic construct
  source 1..75: mol_type = other DNA
taagggaaccctggaaattgccaaagtcgctgatctcgttgttcaaccgacaggggcttcgctcgatgatttaat

SEQ ID NO: 502982 - DNA, 75 bp, synthetic construct
  source 1..75: mol_type = other DNA
ttcaacagcaaagcaggcgatagaatctgccggcgattttgaccttctgattcttgatggccctgctcgtgcaag

SEQ ID NO: 502983 - DNA, 75 bp, synthetic construct
  source 1..75: mol_type = other DNA
aacttcgcagacagcaaaaacatgtggtaacaccggggcagaatgaaaaatactatctggctggtgctttacata

SEQ ID NO: 502984 - DNA, 75 bp, synthetic construct
  source 1..75: mol_type = other DNA
tgcactgcacagcggtacgggtaaagtcagctacattggtggaaacagtaaaggttcatccttatttatcagact

SEQ ID NO: 502985 - DNA, 75 bp, synthetic construct
  source 1..75: mol_type = other DNA
ttcgtgaactgataaaacactctcccggatattttggctatcagcgttcacgctggagtacagaactgctggcaa

SEQ ID NO: 502986 - DNA, 75 bp, synthetic construct
  source 1..75: mol_type = other DNA
taccgttaagaactcttctgaactgttccacctggtgattgctggtgatactgctatcgtttccgctcctaacat

SEQ ID NO: 502987 - DNA, 75 bp, synthetic construct
  source 1..75: mol_type = other DNA
ggaatgaatatattgttcgtcagggagtctaccggcgaacggggggccaccggctactatatgctgacagactgg

SEQ ID NO: 502988 - DNA, 75 bp, synthetic construct
  source 1..75: mol_type = other DNA
atgacgaacgacgcctgatgcagaaagtcatccataaaacacacgataaaaattatgcccgcagactggctgcca

SEQ ID NO: 502989 - DNA, 75 bp, synthetic construct
  source 1..75: mol_type = other DNA
gcagggtagtgtcacagtgacaccgggggtagtgtcagagagacaccagggtagtgtcacagtgacaccgggggt

SEQ ID NO: 502990 - DNA, 75 bp, synthetic construct
  source 1..75: mol_type = other DNA
atgtgttttttttgattttttttagttgcattgcaaacgcaaacgcaaacgcaaacgcaaacgcaaacgcaaacg

SEQ ID NO: 502991 - DNA, 75 bp, synthetic construct
  source 1..75: mol_type = other DNA
aattgcgaattgatcgatattggttgcacctttatggaaataaccagtaaggccacatcggtttctgcagagtca

SEQ ID NO: 502992 - DNA, 75 bp, synthetic construct
  source 1..75: mol_type = other DNA
atactgggacgcgacctgtaactgtggttataaacggtggaaattttcatcgcgtgagcagtgcaagatacacgc

SEQ ID NO: 502993 - DNA, 75 bp, synthetic construct
  source 1..75: mol_type = other DNA
atgctggcaataaaacgtagcgtggcgatcattgcgatactgttcagtccgttaagtgcggcgagcaatctcaca

SEQ ID NO: 502994 - DNA, 75 bp, synthetic construct
  source 1..75: mol_type = other DNA
gcgattgatagcaaatcaaaatcattggttattatgtatgctttgggtgatcataaaaaacgatttgctcagtta

SEQ ID NO: 502995 - DNA, 75 bp, synthetic construct
  source 1..75: mol_type = other DNA
cgcgttagtacaatgcctgttttaaccttagatgctaaatatttaatagtaagaagtaagttgaatgggcgggat

SEQ ID NO: 502996 - DNA, 75 bp, synthetic construct
  source 1..75: mol_type = other DNA
gcgaagcaccgcgcacaaaaagcagtggatgagatggtggattgtgtggcagaactggaaaccaaagttggtaag

SEQ ID NO: 502997 - DNA, 75 bp, synthetic construct
  source 1..75: mol_type = other DNA
atgattgataaagcttgttttgtaagccagcaggaaatagctgaacatttccaggtaaacagaaccactattcgc

SEQ ID NO: 502998 - DNA, 75 bp, synthetic construct
  source 1..75: mol_type = other DNA
cgaaaaacatcaactttgtctttattaccagccaataatcgatatcaaaacagaaaaatgtatcggcgctgaagc

SEQ ID NO: 502999 - DNA, 75 bp, synthetic construct
  source 1..75: mol_type = other DNA
gtaatccctcaaaactttcacccgcaagagtttgttaactggacgccaaactggtttattgctagagactggggc

SEQ ID NO: 503000 - DNA, 75 bp, synthetic construct
  source 1..75: mol_type = other DNA
cccctgaacaattacgtaaacaggcgcaggaaatgttgcgacaggcggaacaactggaaaaaacaggtgtaacaa

SEQ ID NO: 503001 - DNA, 75 bp, synthetic construct
  source 1..75: mol_type = other DNA
tggatgagctggtggattgtgtggcagagctggaaaccaaagttggaaagtttgaaaaactggtgcatgaggtgc

SEQ ID NO: 503002 - DNA, 75 bp, synthetic construct
  source 1..75: mol_type = other DNA
ccaccgcgtacggtgctggatatcaatcaacttgttgatgccattagcctgcgcgatctatcacccgatcaacca

SEQ ID NO: 503003 - DNA, 75 bp, synthetic construct
  source 1..75: mol_type = other DNA
acgaatttacccataaactctgcgctcgttgggaagagattgcctgtcgggcgcaaagcgacaaaacacgtgtgt

SEQ ID NO: 503004 - DNA, 75 bp, synthetic construct
  source 1..75: mol_type = other DNA
gggcttgccgatcaaagcaacctcaacggcgttgatgcggtaatcaacctggccggagaaccgattgctgataaa

SEQ ID NO: 503005 - DNA, 75 bp, synthetic construct
  source 1..75: mol_type = other DNA
tccacgtttgctggagctgggccatcaaatcacggtagtgacgcgtaacccgcagaaagccagttccgttctcgg

SEQ ID NO: 503006 - DNA, 75 bp, synthetic construct
  source 1..75: mol_type = other DNA
gcgcagattctgaccacttctgacggtcgcactatggagtgggcaacagctgatggtacttccgaagttggtgtt

SEQ ID NO: 503007 - DNA, 75 bp, synthetic construct
  source 1..75: mol_type = other DNA
gattaatcaagccgtggctgaaaggttatcccattaataaccctgaagatgtggcgtacagtcggactatgtata

SEQ ID NO: 503008 - DNA, 75 bp, synthetic construct
  source 1..75: mol_type = other DNA
atgtggaaaaagaacctgggcgtagatgttaaattgcaaaaccaggaatggaaaacctatatcgatagccgtaat

SEQ ID NO: 503009 - DNA, 75 bp, synthetic construct
  source 1..75: mol_type = other DNA
aacaaaagaatctatatttacacgttaaaaggagagcttgtaagaaagtttaataatgtcacagtgggaaaaaaa

SEQ ID NO: 503010 - DNA, 75 bp, synthetic construct
  source 1..75: mol_type = other DNA
gttatcatgtatgctttgggcgatcataaaaaaagatttgctcaattatattacattcctttagataaacttatt

SEQ ID NO: 503011 - DNA, 75 bp, synthetic construct
  source 1..75: mol_type = other DNA
gattgatagtaaatcaaaatcattagttatcatgtatgctttgggcgatcataaaaaaagatttgctcaattata

SEQ ID NO: 503012 - DNA, 75 bp, synthetic construct
  source 1..75: mol_type = other DNA
cggacaacgcgccttgccaaaacggcttgaagaagcggggttcgcttttcgctggtacgatttagaagaggcgct

SEQ ID NO: 503013 - DNA, 75 bp, synthetic construct
  source 1..75: mol_type = other DNA
cccatgcgcttggtcatgcgctgcatcgcccggcgattttgcgcgtccctgccacagctattcgcttgctgatgg

SEQ ID NO: 503014 - DNA, 75 bp, synthetic construct
  source 1..75: mol_type = other DNA
gcctacaccgagcttactagagattccggttaccaggtgctaaaaaagtttttcccaggtggagaagaaaaatct

SEQ ID NO: 503015 - DNA, 75 bp, synthetic construct
  source 1..75: mol_type = other DNA
tttgtctctattaccaaccgattattgatattaaaacgaataaatgtattggtgctgaggcattgctacgctggc

SEQ ID NO: 503016 - DNA, 75 bp, synthetic construct
  source 1..75: mol_type = other DNA
ttcctggaaattgcagaaaaaaagaacatttggatctaccaatagtaaggatgcaatggggggagatttgtcgaa

SEQ ID NO: 503017 - DNA, 75 bp, synthetic construct
  source 1..75: mol_type = other DNA
tataacgagcttgtgaaagagctgcagcgccagcttggtttgagcaaaattgttgacatcctacaacgtctcgta

SEQ ID NO: 503018 - DNA, 75 bp, synthetic construct
  source 1..75: mol_type = other DNA
tggatgtttatgcaacaacaaatgataagataacgtttttgctaaagaaacttgtattgtctaatgccaaagagt

SEQ ID NO: 503019 - DNA, 75 bp, synthetic construct
  source 1..75: mol_type = other DNA
gcagttcacgcaccataaaaaaggggatgccggtaaaaaatcggcaaaaggtgacgcggcgaaaaaagcggctaa

SEQ ID NO: 503020 - DNA, 75 bp, synthetic construct
  source 1..75: mol_type = other DNA
ctgatattgaaaatgagctgcgagagtcgatcagacaaacatcatcaggttcgtatctgaatatctccccagagc

SEQ ID NO: 503021 - DNA, 75 bp, synthetic construct
  source 1..75: mol_type = other DNA
tagccaaaacatctcaccaggcgccgagccgttgattttaaacttaagtaataatatttatagttcagacattgc

SEQ ID NO: 503022 - DNA, 75 bp, synthetic construct
  source 1..75: mol_type = other DNA
cgctacatcctcgaggaggccaaagcggcgaacaaaatcagcccggtcagtgagtcacccatcgaccccttcggg

SEQ ID NO: 503023 - DNA, 75 bp, synthetic construct
  source 1..75: mol_type = other DNA
ccgtctggcaaacgtctttaaaacaaaacacctcaatatctgggtgtcggcgcgttcggcgtatttcaacctggt

SEQ ID NO: 503024 - DNA, 75 bp, synthetic construct
  source 1..75: mol_type = other DNA
tgctacgacaaacggcgggaagtcatcgagatgctcaacggctcggtgcccaacgatgaactgttcgggatcatc

SEQ ID NO: 503025 - DNA, 75 bp, synthetic construct
  source 1..75: mol_type = other DNA
tttatggttcaatggacggggcgatgaagtttgtaaaaggggacgctattgctggtatcattattgttttagtta

SEQ ID NO: 503026 - DNA, 75 bp, synthetic construct
  source 1..75: mol_type = other DNA
tgagtctgcgaaagaagcaaatcgcttaaacgcagtggaggagtcacctatagatccccacggagccacaaacct

SEQ ID NO: 503027 - DNA, 75 bp, synthetic construct
  source 1..75: mol_type = other DNA
tggagccgtggcagctctttgtgatctgctgtgcgtttggctgggtcaataaaggcacccggctgcgccgcttcc

SEQ ID NO: 503028 - DNA, 75 bp, synthetic construct
  source 1..75: mol_type = other DNA
cgcagtgcgatccgcatgccgaaatgagtgaagaggatcgggaatggattgatgcgcctgcggtgggcaaggaga

SEQ ID NO: 503029 - DNA, 75 bp, synthetic construct
  source 1..75: mol_type = other DNA
tgaagtgactgaacatgcatttcttgatgttgacaaaatgacaccaattattctggctttccgccaggctggtta

SEQ ID NO: 503030 - DNA, 75 bp, synthetic construct
  source 1..75: mol_type = other DNA
gtgggtcgaaatctgcgctcaacggaggtcgcagagatgctgaacgccattgcgctcagacgtcccttaccacaa

SEQ ID NO: 503031 - DNA, 75 bp, synthetic construct
  source 1..75: mol_type = other DNA
aaacctctgcattgatccgaaactggcactggatgcggcctggcgtctggcgcagttcacgcaccataaaaaagg

SEQ ID NO: 503032 - DNA, 75 bp, synthetic construct
  source 1..75: mol_type = other DNA
catcaaagggaaataaccgtacagcagaacggttatttatatgcgatagtccattcaacaaaacgtcccattgct

SEQ ID NO: 503033 - DNA, 75 bp, synthetic construct
  source 1..75: mol_type = other DNA
ttataaaatgacctatatgcagcgaggaaactatgtcgcggtaattaaccctttattctggagcgaggtgatgtc

SEQ ID NO: 503034 - DNA, 75 bp, synthetic construct
  source 1..75: mol_type = other DNA
cgatatcaaaacagaaaaatgtatcggcgctgaagcgttgttacgttggcctggtgagcaggggcaaataatgaa

SEQ ID NO: 503035 - DNA, 75 bp, synthetic construct
  source 1..75: mol_type = other DNA
gagctggcagagctgcgaggataaatcactgacccttgagcagttcgaggggcagccgtgcattctggcctttga

SEQ ID NO: 503036 - DNA, 75 bp, synthetic construct
  source 1..75: mol_type = other DNA
gcagaaaaagatgcagacggaggagtgccataaggaagcccctccggctgaaaagaactccccggtttcactgcc

SEQ ID NO: 503037 - DNA, 75 bp, synthetic construct
  source 1..75: mol_type = other DNA
atgggcgaggcaagaattgccgctatgcgtgaagcaatgggcgacgatgctgatattattgtagagattcattct

SEQ ID NO: 503038 - DNA, 75 bp, synthetic construct
  source 1..75: mol_type = other DNA
cgctggatgcggcttataagctggcgcagttcacgcaccataaaaaaggggatgccggtaaaaaatcggcaaaag

SEQ ID NO: 503039 - DNA, 75 bp, synthetic construct
  source 1..75: mol_type = other DNA
ggaagttatcgagatgctcaacggttcggtacccaacgatgaactgttcgggatcatctataccgttgacgaagg

SEQ ID NO: 503040 - DNA, 75 bp, synthetic construct
  source 1..75: mol_type = other DNA
tgctggatctgaatcgtcatgagctgatttatcagttcgatttttcggtcatcagcgagctgactgaagacgata

SEQ ID NO: 503041 - DNA, 75 bp, synthetic construct
  source 1..75: mol_type = other DNA
gggctttttagtccgcactgtaaagagaattggctgcgtaccctgtgtgaagtcgatttcacgccaccggtaaag

SEQ ID NO: 503042 - DNA, 75 bp, synthetic construct
  source 1..75: mol_type = other DNA
atgcctatctggtctacatggaggccaacggttataaaaatacgctcagtcttaccatgtttggcaaggggctac

SEQ ID NO: 503043 - DNA, 75 bp, synthetic construct
  source 1..75: mol_type = other DNA
gtggctgcgctgtttcagcgcctcggcgcgcctttttcatccgggaaaattgcctctctcgtggaaaccctcaaa

SEQ ID NO: 503044 - DNA, 75 bp, synthetic construct
  source 1..75: mol_type = other DNA
cggcattctggcgctggctggatcgtgccgcaggttttaatcctgaaaagcgggacattattctggctgcattgt

SEQ ID NO: 503045 - DNA, 75 bp, synthetic construct
  source 1..75: mol_type = other DNA
cctggagcatctgcttcatgaagaaaaactggcacgtcatcaacgtaaatttaaaaggtgcagaagacggtgtag

SEQ ID NO: 503046 - DNA, 75 bp, synthetic construct
  source 1..75: mol_type = other DNA
gtatgcagatggagagctggtaaatctgcagttaatcaacgctgatgggggcaaatgcttccttaaaggcggtca

SEQ ID NO: 503047 - DNA, 75 bp, synthetic construct
  source 1..75: mol_type = other DNA
caataacccgatgcgctttaccgaccgcagcggcggtgtttcccgtcgacgggtgatcctgcatttcccggaaca

SEQ ID NO: 503048 - DNA, 75 bp, synthetic construct
  source 1..75: mol_type = other DNA
cagcgcgccgtctgattggttttcgtaacggcgtacttgataccgccaccggcacattcagcccgcaccacaaat

SEQ ID NO: 503049 - DNA, 75 bp, synthetic construct
  source 1..75: mol_type = other DNA
accggggaaaccgtcatggtggcactgtcgtccgcaaacctcctttctctggcgagccttgcccgtcagaaatac

SEQ ID NO: 503050 - DNA, 75 bp, synthetic construct
  source 1..75: mol_type = other DNA
gccggtggacgctgccgctgttgcccctgctgacgccggagataatgaagcggcacgtgaggctgccgccgcgct

SEQ ID NO: 503051 - DNA, 75 bp, synthetic construct
  source 1..75: mol_type = other DNA
tcaaacgcaccctgaaaggcggagcggtgaaaggggcatgtcatatcatcgaggggcagaaacaggcaggaaaac

SEQ ID NO: 503052 - DNA, 75 bp, synthetic construct
  source 1..75: mol_type = other DNA
cagccatgctgaaagagtacggactgagttatgagaagcgccgtaaaaatcagggcatacagaccaatctggcgc

SEQ ID NO: 503053 - DNA, 75 bp, synthetic construct
  source 1..75: mol_type = other DNA
tggcacaaaccctgatggcgaaaacccgtcccggaaccggtaacgcctacctgacccgcaagggctttcccggcc

SEQ ID NO: 503054 - DNA, 75 bp, synthetic construct
  source 1..75: mol_type = other DNA
ttctggctgaaatcgcgaccctgcttgccggggaagataatgccacgtcagccgatatcgacacactggaagacc

SEQ ID NO: 503055 - DNA, 75 bp, synthetic construct
  source 1..75: mol_type = other DNA
ccgaccgtgacctgaacggcgacggccagaacaaagccacagcggccgcagacgcctgtgagggcgttgttgccc

SEQ ID NO: 503056 - DNA, 75 bp, synthetic construct
  source 1..75: mol_type = other DNA
cgatgcggtctcggttgacccgaaataccagaacccgtactcaacacatattccggcagtgattctggccgtgaa

SEQ ID NO: 503057 - DNA, 75 bp, synthetic construct
  source 1..75: mol_type = other DNA
gctggtagaaaaagtgtttggcgtgactccctcagaggccgccgggaaggtgaacgccgtgaccggcaacctgcc

SEQ ID NO: 503058 - DNA, 75 bp, synthetic construct
  source 1..75: mol_type = other DNA
ttttgaacattatattcctggaattaggcgtagtggtgatttatctgcttggcaagctaacaggacaaaaagaac

SEQ ID NO: 503059 - DNA, 75 bp, synthetic construct
  source 1..75: mol_type = other DNA
aatacgtcagtgccgtgggcgcaatggcgcacgcaccgttcctgtcctccgtttccccggagtttatggggctga

SEQ ID NO: 503060 - DNA, 75 bp, synthetic construct
  source 1..75: mol_type = other DNA
ctgccgaaccggtcaataaactggccgtggacagcatgattgcagatattgatgaacgcatcagccgccagatgg

SEQ ID NO: 503061 - DNA, 75 bp, synthetic construct
  source 1..75: mol_type = other DNA
atccgtcagtatgttgccgaccaggaaaacccgcctgcggacgtgcgcagccgcaagcctctgcgtgctgccaga

SEQ ID NO: 503062 - DNA, 75 bp, synthetic construct
  source 1..75: mol_type = other DNA
ctgcatccgcaaaccctgcgcaccatcgcgctggcctttagctgggtgctggcgtccgcatcgctgctggcgctg

SEQ ID NO: 503063 - DNA, 75 bp, synthetic construct
  source 1..75: mol_type = other DNA
tatctgtggggtaatacggcctggatgctggcatgcaatatcgcagacagttttgccaaataccgctggtgtcca

SEQ ID NO: 503064 - DNA, 75 bp, synthetic construct
  source 1..75: mol_type = other DNA
gtacgccgggcgcacgatggaatatggcaacgcgcgcgatgtcttttatcaacccgttcatccttattctatcgg

SEQ ID NO: 503065 - DNA, 75 bp, synthetic construct
  source 1..75: mol_type = other DNA
tggaaatttgtagtagcgcaccgccgctggaagagtttacgcctggccgtctgcgtgcttgctttaaaccggtgg

SEQ ID NO: 503066 - DNA, 75 bp, synthetic construct
  source 1..75: mol_type = other DNA
ttcctgggggatttcaaccgctttatcattcgccgcgttacttatatggaactgaaacgtctggttgagcgttat

SEQ ID NO: 503067 - DNA, 75 bp, synthetic construct
  source 1..75: mol_type = other DNA
tggcagtggtattcgagcaggacgaggcaaggtcgagtatggaccgcacattccgacattgttgaagcaggcaga

SEQ ID NO: 503068 - DNA, 75 bp, synthetic construct
  source 1..75: mol_type = other DNA
atgtcaatacccgcaggttgtttaccttgcggtaatcgcatctattatttacctatggacaaatatgaatttaga

SEQ ID NO: 503069 - DNA, 75 bp, synthetic construct
  source 1..75: mol_type = other DNA
gtcaccgtacaggcgcagatcatgacgctattgaatgaactgaagcgggaatttaataccgccatcattatgatc

SEQ ID NO: 503070 - DNA, 75 bp, synthetic construct
  source 1..75: mol_type = other DNA
atgcgcacaagcgacgttacgcaactgatggatctggcgctggggctgtggtttccctttgtgcgcattatggcg

SEQ ID NO: 503071 - DNA, 75 bp, synthetic construct
  source 1..75: mol_type = other DNA
atcatctggcgctgatgaaagatctgaagcgtctgctgcgcgcaggggggacgattatgttctcaaacaacaaac

SEQ ID NO: 503072 - DNA, 75 bp, synthetic construct
  source 1..75: mol_type = other DNA
cttgcaccgtgggcgttggggatttagcggctgggcgcagcacgacgaagccatctggcaggaagtgaaagcgga

SEQ ID NO: 503073 - DNA, 75 bp, synthetic construct
  source 1..75: mol_type = other DNA
ctggctgagtacaactctcatttctacggttccgacagcgatgcgcgggtgattcaacgtgcgcgcaccaacgcc

SEQ ID NO: 503074 - DNA, 75 bp, synthetic construct
  source 1..75: mol_type = other DNA
acgcgccaatcttcaactatgccgattacggtctggtgggcgatatctacaaagtcgtccccgccctgattagcc

SEQ ID NO: 503075 - DNA, 75 bp, synthetic construct
  source 1..75: mol_type = other DNA
gagcagtggcgcatcgaccaccgtgctggcggagctcatcaacgtctacgcgatcctgctgttttttgccatgga

SEQ ID NO: 503076 - DNA, 75 bp, synthetic construct
  source 1..75: mol_type = other DNA
gaaactgggcgagaagggcgagtttcttgaagttaccgaatataacgctcacttgtgggtgaacctgacggatta

SEQ ID NO: 503077 - DNA, 75 bp, synthetic construct
  source 1..75: mol_type = other DNA
gcggtgcacgcagcaccaccaccgtggatatgtcgcgtacttatctggagtgggcagaacgcaacctgcgtctga

SEQ ID NO: 503078 - DNA, 75 bp, synthetic construct
  source 1..75: mol_type = other DNA
ttcggtactggggattgcgccaaacaaactggtgctgaaaacccgtgaacgccagaagggcaaaaatcagtacca

SEQ ID NO: 503079 - DNA, 75 bp, synthetic construct
  source 1..75: mol_type = other DNA
gtgtctggaaatataggggcaaatccactaacctgtaacgaattatatggatacgatgtcgggcaagaaccaatt

SEQ ID NO: 503080 - DNA, 75 bp, synthetic construct
  source 1..75: mol_type = other DNA
attggcaacactgtacttgatgcgttgagccgatcacaaacatttcgtgatgccgtaagctatggcattcataat

SEQ ID NO: 503081 - DNA, 75 bp, synthetic construct
  source 1..75: mol_type = other DNA
atactctgctgccgttgctcctaatcgtgctgaaaatgcctatgcggattacgttttggatataggtaagcgaat

SEQ ID NO: 503082 - DNA, 75 bp, synthetic construct
  source 1..75: mol_type = other DNA
acacgctggccctgattgaaaaggggcaatggtgtttcggcagtatggacgaagaaaacgaagagcgggcaatca

SEQ ID NO: 503083 - DNA, 75 bp, synthetic construct
  source 1..75: mol_type = other DNA
gatgtaaatcagatccaactgtatcatggtgctccttatatctttacatttggggatgtggacagacacaattag

SEQ ID NO: 503084 - DNA, 75 bp, synthetic construct
  source 1..75: mol_type = other DNA
gtttcaacttttttgcccctgctggatactctgctgccgttgccccaaatcgtgcggacaatgcctatgcggatt

SEQ ID NO: 503085 - DNA, 75 bp, synthetic construct
  source 1..75: mol_type = other DNA
ctcgatttcctcgatactttacgtaatgacgacgccaaagcagtgcaacgtcagaacgaagtggaaaatctcgaa

SEQ ID NO: 503086 - DNA, 75 bp, synthetic construct
  source 1..75: mol_type = other DNA
cgctcacggtcgcgaagtagatgaaattcgccagatcatcggtgctgacgggttgattttccaggatctgaacga

SEQ ID NO: 503087 - DNA, 75 bp, synthetic construct
  source 1..75: mol_type = other DNA
atagaaataaacatctcaataataaaaagaacgaataccgaaacgaatccatttgaggtcataagcataaataat

SEQ ID NO: 503088 - DNA, 75 bp, synthetic construct
  source 1..75: mol_type = other DNA
ctcgatttcctcgataccttacgtaatgacgatgccaaagcagtgcaacgtcagaacgaagttgaaaacctggaa

SEQ ID NO: 503089 - DNA, 75 bp, synthetic construct
  source 1..75: mol_type = other DNA
gggctttgagttcctgcgtgatgtagcaccaggtgaagcgatttacatcactgaagacggacagttgtttacccg

SEQ ID NO: 503090 - DNA, 75 bp, synthetic construct
  source 1..75: mol_type = other DNA
ctgaagaagggcagctgtttacccgccagtgcgctgacaacccggtcagcaatccgtgcctgttcgagtatgttt

SEQ ID NO: 503091 - DNA, 75 bp, synthetic construct
  source 1..75: mol_type = other DNA
gccattcagtggcaggacctggagaaaacctttaccaaactccgcgttcttgatctcgatgttaatatcgaccgt

SEQ ID NO: 503092 - DNA, 75 bp, synthetic construct
  source 1..75: mol_type = other DNA
aagatactgcgtcgaatcaagagccgacgcttcatcgcggattacataaccgtcatattcaactgattgcgctgg

SEQ ID NO: 503093 - DNA, 75 bp, synthetic construct
  source 1..75: mol_type = other DNA
gtgaaaaacgcgtcaaccgtatcggaagatactgcgtcgaatcaagagccgacgcttcatcgcggattacataac

SEQ ID NO: 503094 - DNA, 75 bp, synthetic construct
  source 1..75: mol_type = other DNA
aactcggtggtattggcaagaaaatgccggttatctccatcgccatgttagtcgggttgatggcaatggctgcgc

SEQ ID NO: 503095 - DNA, 75 bp, synthetic construct
  source 1..75: mol_type = other DNA
acagtggggtttactccaacagccgcatgctgtttggcctttctgtgcagggtaatgcgccgaagtttcttaccc

SEQ ID NO: 503096 - DNA, 75 bp, synthetic construct
  source 1..75: mol_type = other DNA
catgctgtttggcctttctgtgcagggtaatgcgccgaagtttttgactcgcgtcagccgtcgcggcgtgccgat

SEQ ID NO: 503097 - DNA, 75 bp, synthetic construct
  source 1..75: mol_type = other DNA
tggtctgctgatggcgctggtggtggcaacgctgttgctgaactggattatgatttgtctggcgcacttgcgttt

SEQ ID NO: 503098 - DNA, 75 bp, synthetic construct
  source 1..75: mol_type = other DNA
atagtggcttgtggtgacgtgctattgcgccatgcgatggcatccagaaaacaggatgccataatggcagaccac

SEQ ID NO: 503099 - DNA, 75 bp, synthetic construct
  source 1..75: mol_type = other DNA
atggtggcttgtggtggcgtgctgttgcgccatgcgatggcatccagaaaacaggatgccatgatggcagaccac

SEQ ID NO: 503100 - DNA, 75 bp, synthetic construct
  source 1..75: mol_type = other DNA
actgcgcaaatggctgaatccggtgtcgctggtgccgggctggcagtgcgaggggagtgcgttgctgttccgccg

SEQ ID NO: 503101 - DNA, 75 bp, synthetic construct
  source 1..75: mol_type = other DNA
aggggagtgcgttgctgttccgccggatggcgctggttgaactggcggtactggtggtgattattgtttcacgag

SEQ ID NO: 503102 - DNA, 75 bp, synthetic construct
  source 1..75: mol_type = other DNA
taagtgatttagacatttcttactatacatcgcggcttgattttaaaaatactacgaacctatcagtgcttgtat

SEQ ID NO: 503103 - DNA, 75 bp, synthetic construct
  source 1..75: mol_type = other DNA
cgaagtcagggccgaactaaacatcgcgccgaaacgctacgtgacctacgcgcgggaatgctttggctggggcgt

SEQ ID NO: 503104 - DNA, 75 bp, synthetic construct
  source 1..75: mol_type = other DNA
attataaatggaaacggtttgtttggtgaaaaaacagcctacctttgtaagggtatgggtagaggtgagaagaat

SEQ ID NO: 503105 - DNA, 75 bp, synthetic construct
  source 1..75: mol_type = other DNA
aaggaaagccagtgagtctaattgagtcaaaagttgtagggtgtcctaacatttcctttaattgcaaaactggtc

SEQ ID NO: 503106 - DNA, 75 bp, synthetic construct
  source 1..75: mol_type = other DNA
cataaatggtgtctgcagaagaaaataatgctgagtgtcaatatttcccgggtggtagccctgtatctgagaaaa

SEQ ID NO: 503107 - DNA, 75 bp, synthetic construct
  source 1..75: mol_type = other DNA
ctatattttacagttttactaactttaccgaatctcctgcaacaactacattaaatggtagtaaacaatattcgg

SEQ ID NO: 503108 - DNA, 75 bp, synthetic construct
  source 1..75: mol_type = other DNA
ttaagtggtacaggtggaaaaaaatattcgctagctaataaaggggttcagagagtaaatgtgactatcccaatt

SEQ ID NO: 503109 - DNA, 75 bp, synthetic construct
  source 1..75: mol_type = other DNA
atataggctccagaattgcttattggtctgaaggaagtcagtcagcttttcgtatggtcaatacaagtaatccta

SEQ ID NO: 503110 - DNA, 75 bp, synthetic construct
  source 1..75: mol_type = other DNA
gcgtgatgggtgatattcttaatattattaccttgcaaacaggtttaaatttttctccgatcaccgtttcacaca

SEQ ID NO: 503111 - DNA, 75 bp, synthetic construct
  source 1..75: mol_type = other DNA
aatccttgatgtcgacaaaattgaatcgggtaactatcaacttcaaccacaatgggtcgatatccctactttagt

SEQ ID NO: 503112 - DNA, 75 bp, synthetic construct
  source 1..75: mol_type = other DNA
atcgaatatcgtggcatcagtagtaacaaccgtgtcacacttgatccagtacgtctgagcaacaaggaattacgt

SEQ ID NO: 503113 - DNA, 75 bp, synthetic construct
  source 1..75: mol_type = other DNA
tcattccggaaagcactctcggactccttaccgaatccaacttatgttgtaaactggcaaggtaatgtcattagt

SEQ ID NO: 503114 - DNA, 75 bp, synthetic construct
  source 1..75: mol_type = other DNA
cacaatagtgcatttgaacattatttcactgctgattactacaaaaatgcaatgttgccattagaaaacagtgaa

SEQ ID NO: 503115 - DNA, 75 bp, synthetic construct
  source 1..75: mol_type = other DNA
gaacaaacattaaaaaaaggaatgaaagttgccattccatattattatgagcttcattcgcaattaaaagagatg

SEQ ID NO: 503116 - DNA, 75 bp, synthetic construct
  source 1..75: mol_type = other DNA
cgtatggtcaatacaagtaaaccttctttatattacacttttaaaaccgttagcgaatcttctagaacagataca

SEQ ID NO: 503117 - DNA, 75 bp, synthetic construct
  source 1..75: mol_type = other DNA
catgccgatacggcaatgtacagtgccaaagaaggcggacgaggacaattttgcgtcttttcgccggaaatgaat

SEQ ID NO: 503118 - DNA, 75 bp, synthetic construct
  source 1..75: mol_type = other DNA
ggcatccatgcgcaataatcgtggattttttcgaaacggcaatgcatatgaggtagaaatctggatacccacgcg

SEQ ID NO: 503119 - DNA, 75 bp, synthetic construct
  source 1..75: mol_type = other DNA
tcatttcctacgccgaagagtcagggctaattgtgcctttaggccgttgggtgattctcgatgtcgtacgccagg

SEQ ID NO: 503120 - DNA, 75 bp, synthetic construct
  source 1..75: mol_type = other DNA
ctggcgcagagccttaaaccgggcgggatcatgctcatcggtgaaccttactggcgtcagcttccggcaacggac

SEQ ID NO: 503121 - DNA, 75 bp, synthetic construct
  source 1..75: mol_type = other DNA
acgcctctggtccccataaatagctcaggtatatatattgaccctgtaggtgccaatacaaaccccaatacttat

SEQ ID NO: 503122 - DNA, 75 bp, synthetic construct
  source 1..75: mol_type = other DNA
tatcttggattaagatatccttcgttagcttggggtgatgcaaaactcacattttcacaaaaaatagctttaata

SEQ ID NO: 503123 - DNA, 75 bp, synthetic construct
  source 1..75: mol_type = other DNA
taactcttcctgacgcagcatggctaagaaacaagattcgcgattacgctggctcggcaccggagatagaaaatg

SEQ ID NO: 503124 - DNA, 75 bp, synthetic construct
  source 1..75: mol_type = other DNA
tgaaagtgacgagcgatttattcatttgtgcaatgagtttccgcgagtggctatcggtagttgtggcgactatga

SEQ ID NO: 503125 - DNA, 75 bp, synthetic construct
  source 1..75: mol_type = other DNA
ggcgctgtccgttattcagcaatttagccagttaggggcgcaagtacatctggatgatttcggcaccggctactc

SEQ ID NO: 503126 - DNA, 75 bp, synthetic construct
  source 1..75: mol_type = other DNA
aattttaaaaaagtgaacgatgcctacgggcatttgtttggcgaccagctgttacgcgaggtttcactggccatt

SEQ ID NO: 503127 - DNA, 75 bp, synthetic construct
  source 1..75: mol_type = other DNA
tgacgggcgtattccggtgattgccggaaccggcgctaacgctactgcggaagccattagcctgacacagcgttt

SEQ ID NO: 503128 - DNA, 75 bp, synthetic construct
  source 1..75: mol_type = other DNA
aagctctgagaagagttaccagaacgtcccagaaagaattgggtaaattttgtggagtaagcgacgttgctgtgg

SEQ ID NO: 503129 - DNA, 75 bp, synthetic construct
  source 1..75: mol_type = other DNA
cagaatttgccctggatcgcatcgcttaaagtcggggacaaaaaattgcctgttgtggtcgttcgcgtcggtgag

SEQ ID NO: 503130 - DNA, 75 bp, synthetic construct
  source 1..75: mol_type = other DNA
cctgacggtcaatttttgctgctcggcagacccgatcgaaaagtcgaacgtgattttaaaaaacagggcattgaa

SEQ ID NO: 503131 - DNA, 75 bp, synthetic construct
  source 1..75: mol_type = other DNA
tacccattgctgaacactcattcgggtgttgcatggactcagctcgataaactcaacagttacaccatcaaaaaa

SEQ ID NO: 503132 - DNA, 75 bp, synthetic construct
  source 1..75: mol_type = other DNA
ctcgctaccccaacatcccgatcaatggtaactgcctcattattggagtagttaaaggcgttcagtacgaactct

SEQ ID NO: 503133 - DNA, 75 bp, synthetic construct
  source 1..75: mol_type = other DNA
tgcattggaggttaaaggtgattcgatgacaaaccctaatggcctcccgacaatccctgaaggggcaacagtcat

SEQ ID NO: 503134 - DNA, 75 bp, synthetic construct
  source 1..75: mol_type = other DNA
gatggggcactgaattagcaaaattaaatatttctgaaaattggatgaaactacataaacttgctaaaaatactt

SEQ ID NO: 503135 - DNA, 75 bp, synthetic construct
  source 1..75: mol_type = other DNA
ccggtaaagagtggctggatgttgtcggctattaccccaaattaaaccagctcgtttccggtctgatccatcacg

SEQ ID NO: 503136 - DNA, 75 bp, synthetic construct
  source 1..75: mol_type = other DNA
agcgatcgtctatgcgctggcgcggcgtgtggaactgagtctgttcctggaggatggcgcggtccccctcgacaa

SEQ ID NO: 503137 - DNA, 75 bp, synthetic construct
  source 1..75: mol_type = other DNA
gcgcgattttgaaaccaacgtcgatgtgctcaacaacgtgaaaagtatgcagcaaagtttgctgaaactgggaga

SEQ ID NO: 503138 - DNA, 75 bp, synthetic construct
  source 1..75: mol_type = other DNA
catgagcagggaaagccgcgtcattgccgaactgttgctaaccgatcccgatgaacagacatggcaagagcaaat

SEQ ID NO: 503139 - DNA, 75 bp, synthetic construct
  source 1..75: mol_type = other DNA
aatctttttggatgcgagctcataataaagaattacaaaaaaatgtagcactaacaaaacagactataaacgaat

SEQ ID NO: 503140 - DNA, 75 bp, synthetic construct
  source 1..75: mol_type = other DNA
gtgttgcatggactcagctcgataaactcaacagttacaccatcaaaaaaaaccaatcactcattgatcacattg

SEQ ID NO: 503141 - DNA, 75 bp, synthetic construct
  source 1..75: mol_type = other DNA
ctggctcaggtagtgaaagagattaagcatcagcaagatacatttgtctttactgaatttaaccccgatcaaaca

SEQ ID NO: 503142 - DNA, 75 bp, synthetic construct
  source 1..75: mol_type = other DNA
tttcgaaggcccggcttacaccaaatggcgttcactgcgtgagtcagaagactcccgaaatctcggtctgacagc

SEQ ID NO: 503143 - DNA, 75 bp, synthetic construct
  source 1..75: mol_type = other DNA
gaatcggggcgctttcatcatgatggcaatcccatcatgacctggtgtatcggcaacgtggtcggcaaaaccatt

SEQ ID NO: 503144 - DNA, 75 bp, synthetic construct
  source 1..75: mol_type = other DNA
gcggcctatcgcgcctatggcaacgctgatttgcgctgggtatttcgcgtgctggtgggccatgagtcagaaatg

SEQ ID NO: 503145 - DNA, 75 bp, synthetic construct
  source 1..75: mol_type = other DNA
tattggctttcatgcgacatggggcaatgaaagacccaccgatgccaaagctctggcaaagtggcaacaattact

SEQ ID NO: 503146 - DNA, 75 bp, synthetic construct
  source 1..75: mol_type = other DNA
cccaatgggggaggcgatgggcaggttaaacctgaacgtcgcaaggcagaacgaatcgactacgaatccttcctg

SEQ ID NO: 503147 - DNA, 75 bp, synthetic construct
  source 1..75: mol_type = other DNA
tacgaatccttcctgaacgcctacaacaccgaagtcggtgacagacttccacacgctgttgcggtcaacgagaaa

SEQ ID NO: 503148 - DNA, 75 bp, synthetic construct
  source 1..75: mol_type = other DNA
gtctattccggagacagacgcgcccattaagcaggcgcttgcgcatggattattattacacttaaaaaatatcta

SEQ ID NO: 503149 - DNA, 75 bp, synthetic construct
  source 1..75: mol_type = other DNA
atgttattgctctctgttctggacgtaaaaacatacagagatgatgcgcgattaaatcaatggatatctaaggaa

SEQ ID NO: 503150 - DNA, 75 bp, synthetic construct
  source 1..75: mol_type = other DNA
attaagcaggcgcttgcgcatggattattattacacttaatggatttgcccctatatttccagacacctgttatc

SEQ ID NO: 503151 - DNA, 75 bp, synthetic construct
  source 1..75: mol_type = other DNA
ctgccagccattataggcatgatgttgatttgtgccggtgtgttggttattaatttattgtcacgaagcacacca

SEQ ID NO: 503152 - DNA, 75 bp, synthetic construct
  source 1..75: mol_type = other DNA
gatctgcgtaacctactggagcacggggcatcgcttaccaatggcatcctgcaaatgtcaaaaggcgcagaaatg

SEQ ID NO: 503153 - DNA, 75 bp, synthetic construct
  source 1..75: mol_type = other DNA
gtgggtgcgttttttgcgggtgagaacggtaactccaccactgggcgacgccatttatatgcgtggtgccgatac

SEQ ID NO: 503154 - DNA, 75 bp, synthetic construct
  source 1..75: mol_type = other DNA
taaattccgcctgacatccggacaacgacaggcactgaagcgcctttctgagagaggaagagaccgtcccctgaa

SEQ ID NO: 503155 - DNA, 75 bp, synthetic construct
  source 1..75: mol_type = other DNA
cgaaccggaatctgttgtgaggttcgtatcggtacgaggcagagccacgctttatatacctgacgaacatctgca

SEQ ID NO: 503156 - DNA, 75 bp, synthetic construct
  source 1..75: mol_type = other DNA
tcacttaccatttcatgacgctgtatgacctgaaagcggaagatgcagaaaaagcggcatgtgatttattcgata

SEQ ID NO: 503157 - DNA, 75 bp, synthetic construct
  source 1..75: mol_type = other DNA
caggtttcaaaaagcgttgcggttgtctatgacagcaaaaaaccactcaaccaacggttaatctctttcaccatt

SEQ ID NO: 503158 - DNA, 75 bp, synthetic construct
  source 1..75: mol_type = other DNA
ctggtagcatcgttatcggtgtataacagcggggtttactctaacagccggatgctgtttggcctttctgtgcag

SEQ ID NO: 503159 - DNA, 75 bp, synthetic construct
  source 1..75: mol_type = other DNA
ctttattatcatcaacgccgttaacctggtgaacgtgcgcttatatggcgaaaccgagttctggtttgcgctgat

SEQ ID NO: 503160 - DNA, 75 bp, synthetic construct
  source 1..75: mol_type = other DNA
acagcggggtttactccaacagccggatgctgtttggtctttctgtgcagggtaatgcaccgaagtttcttaccc

SEQ ID NO: 503161 - DNA, 75 bp, synthetic construct
  source 1..75: mol_type = other DNA
ggcattacatgtcggtaaattccgtctgacgtccgggcaacgactggcactgaagcgcctttctgagagagggag

SEQ ID NO: 503162 - DNA, 75 bp, synthetic construct
  source 1..75: mol_type = other DNA
ggcattacgcccggctggcagagaatgtgggggtgagagatttcaaaatgctactgatgaccgggctggacaagg

SEQ ID NO: 503163 - DNA, 75 bp, synthetic construct
  source 1..75: mol_type = other DNA
aacagtagcccgtttgtgatgattttccataatctcgacagcaacgtggtggcttctgcgctgaacttcgtcatt

SEQ ID NO: 503164 - DNA, 75 bp, synthetic construct
  source 1..75: mol_type = other DNA
tcagtttatgcgaggcgattggcacactcgaattgctgaagcagtcattgattgaaggcgcgaaagagtcctcaa

SEQ ID NO: 503165 - DNA, 75 bp, synthetic construct
  source 1..75: mol_type = other DNA
ggcaatggattgccgacttctacaccgtcaaccgcagcaacggtaagaacggaaaacgtatacgtaaaaagtttg

SEQ ID NO: 503166 - DNA, 75 bp, synthetic construct
  source 1..75: mol_type = other DNA
gatggggttccaccatcagtgaactgatactgactctggctgatattccctataagtttgttgatgtcagtggtt

SEQ ID NO: 503167 - DNA, 75 bp, synthetic construct
  source 1..75: mol_type = other DNA
tgggggcctgggcatgaatggtttcaggataatgccacgaatatcagtgcgattgctgatgctgtatgtcagtta

SEQ ID NO: 503168 - DNA, 75 bp, synthetic construct
  source 1..75: mol_type = other DNA
ctgtaattattattacgtcaccttatgccaaagagcttttccgcttcactttgagcctgattcacttctacctga

SEQ ID NO: 503169 - DNA, 75 bp, synthetic construct
  source 1..75: mol_type = other DNA
agctgggcggttcagatccgtttattgtgcttaacgatgccgatctggaactggcggttaaagcggcggttgccg

SEQ ID NO: 503170 - DNA, 75 bp, synthetic construct
  source 1..75: mol_type = other DNA
atgaccattactccggaaactcatgcaatttcgataaatcctgccaccggtgaacaactttctgtgctgccgtgg

SEQ ID NO: 503171 - DNA, 75 bp, synthetic construct
  source 1..75: mol_type = other DNA
ttctatttgggcgctggggccgctggtagcgcgtttcggtcagggacaggtttcgctgcctggcggttgtacaat

SEQ ID NO: 503172 - DNA, 75 bp, synthetic construct
  source 1..75: mol_type = other DNA
gcggaaggtaccacgattattgaaaacgcagcgcgtgaaccggaaatcgtcgataccgcgaacttcctgattacg

SEQ ID NO: 503173 - DNA, 75 bp, synthetic construct
  source 1..75: mol_type = other DNA
gacgttaatgtattctgcgcaccttacgatctggttaaaaccatgcgtgcttctatctgggcactggggccgctg

SEQ ID NO: 503174 - DNA, 75 bp, synthetic construct
  source 1..75: mol_type = other DNA
gacccgcagggtatcatccaggcaattgaagttaccgctgaaggcattggccgtgacgcgtctgacctgctgcgt

SEQ ID NO: 503175 - DNA, 75 bp, synthetic construct
  source 1..75: mol_type = other DNA
attccaccctttcgccactttcgataccgcggcgctggctggcctggcgcttgggcagacggtgttgtcaaaagc

SEQ ID NO: 503176 - DNA, 75 bp, synthetic construct
  source 1..75: mol_type = other DNA
aaaaataatgatatctatttactggcaaaacgctggtctgtcagacatgaagatatagaaaaaatactcctgttt

SEQ ID NO: 503177 - DNA, 75 bp, synthetic construct
  source 1..75: mol_type = other DNA
tggtgacttttcaacaggcatggcgctcagtggtaataacaacagtgtgacgttggcggcgaaagatctgaacgt

SEQ ID NO: 503178 - DNA, 75 bp, synthetic construct
  source 1..75: mol_type = other DNA
gcaggtagatgcattccactggaaagaagacggcatcagtgataaaggtgtgatgctaaacttcaagaaaacgtt

SEQ ID NO: 503179 - DNA, 75 bp, synthetic construct
  source 1..75: mol_type = other DNA
ttcatctctgcgtggaagaaccggcgatcaccgccggttttctgcgttttttagcgggggaggcccgcaaggccg

SEQ ID NO: 503180 - DNA, 75 bp, synthetic construct
  source 1..75: mol_type = other DNA
aaagcagcagagaaaggtgtgcatctggtgaaactggatcaatggttcgccagttcgaaaacctgccactgctgc

SEQ ID NO: 503181 - DNA, 75 bp, synthetic construct
  source 1..75: mol_type = other DNA
cacagtacgattacggcaacatgatgtcaggtactaatgctctgttaagtaccgatggaggcagtgttgttaaca

SEQ ID NO: 503182 - DNA, 75 bp, synthetic construct
  source 1..75: mol_type = other DNA
acggtggacaacaaaggcggcatgactgtcaccgatccggattccatcggtattcagatcgacggcgacaaggcg

SEQ ID NO: 503183 - DNA, 75 bp, synthetic construct
  source 1..75: mol_type = other DNA
agtttatctgaacggtgattctactatcagcggctctttgccgttaggctatgccaacattcttcagctaagcaa

SEQ ID NO: 503184 - DNA, 75 bp, synthetic construct
  source 1..75: mol_type = other DNA
tttcaacgggcatggcgcttagcagcgacaacaacagcgtgacgctggcggcgaaagatatcaatgtcaccgggc

SEQ ID NO: 503185 - DNA, 75 bp, synthetic construct
  source 1..75: mol_type = other DNA
cacagcaaaaactgactaactacactattggtaccaatagcgatggcacctctggtatgttgaaagccaataacc

SEQ ID NO: 503186 - DNA, 75 bp, synthetic construct
  source 1..75: mol_type = other DNA
ttgaacattttcgcatttacgtcaccctggcggatggctttaacagccacaccatcgagtattacgtcgaaacaa

SEQ ID NO: 503187 - DNA, 75 bp, synthetic construct
  source 1..75: mol_type = other DNA
acactatctcgaaaaaatcgctggcgtttacgacagcttatacaccgctattgaaaacaatgtgccggtgaattt

SEQ ID NO: 503188 - DNA, 75 bp, synthetic construct
  source 1..75: mol_type = other DNA
cccgagggtattcaataatagcgtgtcgagtatgatgggaatggaggcctacggtaaaggcactgttcttaacag

SEQ ID NO: 503189 - DNA, 75 bp, synthetic construct
  source 1..75: mol_type = other DNA
gaagccaccgtaaacaataacggcagcaccaccgttgacggaaaagattccacaggcactgagattaacggtgac

SEQ ID NO: 503190 - DNA, 75 bp, synthetic construct
  source 1..75: mol_type = other DNA
ggccgaacctgagctacgcgaagagccagcgcacggcaagcctggcaggcgcaggcagccagcactttaatgtcg

SEQ ID NO: 503191 - DNA, 75 bp, synthetic construct
  source 1..75: mol_type = other DNA
gtacagcagcaaagagagctcgctgaatctggatgcctatcactggaaagaagacggcgtcagcgataaaggcgt

SEQ ID NO: 503192 - DNA, 75 bp, synthetic construct
  source 1..75: mol_type = other DNA
cagccagttcttcggcctgaaacatcaaatgtcttttgacaacggtatgagctggaataatgcgctgcgttacga

SEQ ID NO: 503193 - DNA, 75 bp, synthetic construct
  source 1..75: mol_type = other DNA
ggcaacaccaccgttgacggcaaggattccacgggcaccgagataaacggtgacaaagccatcgtcaacaacgac

SEQ ID NO: 503194 - DNA, 75 bp, synthetic construct
  source 1..75: mol_type = other DNA
caatccaaagtttatctgaacggtgattctactatcagcggctctttgccgttaggctatgccaacattcttcag

SEQ ID NO: 503195 - DNA, 75 bp, synthetic construct
  source 1..75: mol_type = other DNA
caaggcgcccgtcagccacactcacccgtggagtcagataacgggagtgcctgctgcctcgctgacggcaaaagg

SEQ ID NO: 503196 - DNA, 75 bp, synthetic construct
  source 1..75: mol_type = other DNA
gaatccatcatgtctgctactctggaacatgcagagaaggtcatcccggctgttgtgcaactcagcaatggcctg

SEQ ID NO: 503197 - DNA, 75 bp, synthetic construct
  source 1..75: mol_type = other DNA
cctcaagtaaaaacaacgcactcttcctcttcctggggttgatggtggtagccttcctgctcgtgccggatcagg

SEQ ID NO: 503198 - DNA, 75 bp, synthetic construct
  source 1..75: mol_type = other DNA
actctcaggtgagcgatatgcagattacggaacttcctgtctgtattccagactgttcgctgctgaagcacttcc

SEQ ID NO: 503199 - DNA, 75 bp, synthetic construct
  source 1..75: mol_type = other DNA
ccagggcgggacgggcatcagcataatgagcaacgacagcagcatgctgttggcgggaaacattaatgtgacgtc

SEQ ID NO: 503200 - DNA, 75 bp, synthetic construct
  source 1..75: mol_type = other DNA
ttaaactgcgtcacacactggaaggtggctatcaagagcgcaatgccggagactttaacctgaatatgaacagtg

SEQ ID NO: 503201 - DNA, 75 bp, synthetic construct
  source 1..75: mol_type = other DNA
ttggcaggttcaacggataccggcgacggtgatgctaaagcggtgaataccggtatcatcaacgttaagaatgaa

SEQ ID NO: 503202 - DNA, 75 bp, synthetic construct
  source 1..75: mol_type = other DNA
cgccggcactattaatgtgcagggtgatggtgcagtcgctatcagcgggggaaccaccagctatacggttcaact

SEQ ID NO: 503203 - DNA, 75 bp, synthetic construct
  source 1..75: mol_type = other DNA
gtgggtactgaacagggcaaagcagatggaagcaacggtgaaggtctgattggcatcaaaggaaatggttctgca

SEQ ID NO: 503204 - DNA, 75 bp, synthetic construct
  source 1..75: mol_type = other DNA
ccccagcccataccgccagatgataatggccctctaccgctacccgttcccagtgatgaagattcaggtatacct

SEQ ID NO: 503205 - DNA, 75 bp, synthetic construct
  source 1..75: mol_type = other DNA
tgatcattctgctcactcttcttttccccagcccataccgccagatgataatggccctctaccgctacccgttcc

SEQ ID NO: 503206 - DNA, 75 bp, synthetic construct
  source 1..75: mol_type = other DNA
ttattattaccgatgatgctgtgtctgaggtggataaactggcattgcagaagacacgggtaaaattaattacgg

SEQ ID NO: 503207 - DNA, 75 bp, synthetic construct
  source 1..75: mol_type = other DNA
cagcaaagaaagttcgctgaatctggatgcgtacaactggaaagaggaaggcatcagcgacaaaggcgtgatgct

SEQ ID NO: 503208 - DNA, 75 bp, synthetic construct
  source 1..75: mol_type = other DNA
atttttcaacagggctgacattaactggcgataataatagcctgacaatggcaatgcaggatcttaatgtcgttg

SEQ ID NO: 503209 - DNA, 75 bp, synthetic construct
  source 1..75: mol_type = other DNA
gatgatgttgaccccccgagaacagaacccgttgtctttgataacaatgtgacatgggacaaggacgcgcaaacc

SEQ ID NO: 503210 - DNA, 75 bp, synthetic construct
  source 1..75: mol_type = other DNA
acgaagttgaaaacagtgccagaaaaatgtgctgttgttacaaataatggtttcagctcgttactggcattaggt

SEQ ID NO: 503211 - DNA, 75 bp, synthetic construct
  source 1..75: mol_type = other DNA
tacggaaggcacgaccgataccggcctgattgcaatgcaactggatgccaatgcaacggcagacgcagtcattga

SEQ ID NO: 503212 - DNA, 75 bp, synthetic construct
  source 1..75: mol_type = other DNA
acgaagagccagcgcacggcaagcctggcaggcgcaggcagccagcactttaatgtcgatgatgggcaaaagggc

SEQ ID NO: 503213 - DNA, 75 bp, synthetic construct
  source 1..75: mol_type = other DNA
ggtacggaagtacactatgtcgactttaccgcgccggaagaacccaccattacgccatacgacggcagccattct

SEQ ID NO: 503214 - DNA, 75 bp, synthetic construct
  source 1..75: mol_type = other DNA
atcagggtaccatcaacctcgagaagaatgagaactttgatggcagcctgggggcgaataaactcgttggtatgg

SEQ ID NO: 503215 - DNA, 75 bp, synthetic construct
  source 1..75: mol_type = other DNA
cgtttgccctttccgaaaataaagacattactctggtcgtctgcggtggcacggtccgccataaaacgcgctcga

SEQ ID NO: 503216 - DNA, 75 bp, synthetic construct
  source 1..75: mol_type = other DNA
ctgggttgggagtggcaaggggtgatgtttgctgtcctgacgctgctcgctgcctggctatggtggaaatggttg

SEQ ID NO: 503217 - DNA, 75 bp, synthetic construct
  source 1..75: mol_type = other DNA
gtgctggctcgggatcatcatggctttcagtaaatatggttttacttccgagaagattagcctgacttttaacga

SEQ ID NO: 503218 - DNA, 75 bp, synthetic construct
  source 1..75: mol_type = other DNA
accagaacctcgcttatgcctgtgtccatattacgtgggtaggatcagaactccatccagtcgtttggggttgct

SEQ ID NO: 503219 - DNA, 75 bp, synthetic construct
  source 1..75: mol_type = other DNA
aatgctcctctgtagtcgaacagaacctgatgccatggcttgtcacaggtgctgctactgcgttaatcacaacct

SEQ ID NO: 503220 - DNA, 75 bp, synthetic construct
  source 1..75: mol_type = other DNA
tctgagaacggcgacgcttgacgtcacaaaaggaggaaagatgagcggcaatatcacgcacagcggcggcaactt

SEQ ID NO: 503221 - DNA, 75 bp, synthetic construct
  source 1..75: mol_type = other DNA
agacttaactttgtggatttgcccctatatttccagacacctgttatcacttaacccattactggcctgctgccg

SEQ ID NO: 503222 - DNA, 75 bp, synthetic construct
  source 1..75: mol_type = other DNA
ttattattactgatgatgccgtttcagaggtggataaactggcattgcagaaaacacgggtgaaattaattacgg

SEQ ID NO: 503223 - DNA, 75 bp, synthetic construct
  source 1..75: mol_type = other DNA
cgccaaaaaacagaatagcgcaggcggcagtcaaaatgatccacgaagggatgaccgttattctcgacagcggaa

SEQ ID NO: 503224 - DNA, 75 bp, synthetic construct
  source 1..75: mol_type = other DNA
atgaacatgcgtaatattcatgttattactgcccgctctgtaccggataaaagcgtatctgatgattttatgcat

SEQ ID NO: 503225 - DNA, 75 bp, synthetic construct
  source 1..75: mol_type = other DNA
attcgctgaaagtggaatgtatccatggagaacactttatcagccgggaaataatgcgggcaacggtgtttaatt

SEQ ID NO: 503226 - DNA, 75 bp, synthetic construct
  source 1..75: mol_type = other DNA
tcgctgaagagcgttttatctccgccctgccacatttctctttcatccataaacttatcaacacctttaacctgt

SEQ ID NO: 503227 - DNA, 75 bp, synthetic construct
  source 1..75: mol_type = other DNA
gccaaaaatatcacggtgattaccaacagtctcccggcagcgtttgccctttccgaaaataaagacattactctg

SEQ ID NO: 503228 - DNA, 75 bp, synthetic construct
  source 1..75: mol_type = other DNA
cgatgagcattgtatcgcactcaacgggaggttttagttatgacacactcgctagagccttgatttctaaaaata

SEQ ID NO: 503229 - DNA, 75 bp, synthetic construct
  source 1..75: mol_type = other DNA
cgttggaactgatcacacactctgctggtggttttagttatgacactcttgccagagcattgatttcagataaaa

SEQ ID NO: 503230 - DNA, 75 bp, synthetic construct
  source 1..75: mol_type = other DNA
atacacctgaatctagaagggttttagaagggcagatcagagagtgttatggtcgggtcgtttactcacataaga

SEQ ID NO: 503231 - DNA, 75 bp, synthetic construct
  source 1..75: mol_type = other DNA
gtgccgcggagaatgcccgccccgtgtcaggaaaaattatattctccagtgtggcccgggccggttccggaacag

SEQ ID NO: 503232 - DNA, 75 bp, synthetic construct
  source 1..75: mol_type = other DNA
agcgaagaaaaagacaagcgaccttgtgaacaggatgaaggcagcgtttaagggccatttattaaatgagatata

SEQ ID NO: 503233 - DNA, 75 bp, synthetic construct
  source 1..75: mol_type = other DNA
cagatcactggctggttaatacctttgagcgccacgtattaacgcgtattgatagcgtgaacagtgtttaccagc

SEQ ID NO: 503234 - DNA, 75 bp, synthetic construct
  source 1..75: mol_type = other DNA
accgccagccgggtagtagcacgtctcaaacaaattcttgaacagaaacagggctgcacgctggagcgcgcggcg

SEQ ID NO: 503235 - DNA, 75 bp, synthetic construct
  source 1..75: mol_type = other DNA
tgccgtcgcaggtgatggcggcgaagcaacagacaaatagtcttattaaccgaatgaaaaaagcctttaacggtg

SEQ ID NO: 503236 - DNA, 75 bp, synthetic construct
  source 1..75: mol_type = other DNA
aaggcaagcgacattaacgcaacgcttggtctgatccgcgaaaacaatgaactggctcgatcaggggcaaataac

SEQ ID NO: 503237 - DNA, 75 bp, synthetic construct
  source 1..75: mol_type = other DNA
attcatcataccttttattttctgaagaagttttgcttgttgaagggaaaacagagacaaacgttctatatgcac

SEQ ID NO: 503238 - DNA, 75 bp, synthetic construct
  source 1..75: mol_type = other DNA
gtttataattgacgggactcttacctttgcaagaagacaggaatttaataaggaaacaggaaaagccaaaaaaag

SEQ ID NO: 503239 - DNA, 75 bp, synthetic construct
  source 1..75: mol_type = other DNA
ccagtttgccaacgtgttcagtaaacaaaccggtaaaaatgtgattccttcggcagagccactattggtcacacc

SEQ ID NO: 503240 - DNA, 75 bp, synthetic construct
  source 1..75: mol_type = other DNA
agcgccggggctggatggtttcgactatctcacgccggacggcacgcgtaagcatattgcgttcagtgaactggt

SEQ ID NO: 503241 - DNA, 75 bp, synthetic construct
  source 1..75: mol_type = other DNA
ggatctggaggctttcttcgaggtctatcgcgaaaagctgatggcgatcctcaagcggcccgcctctcggaaaaa

SEQ ID NO: 503242 - DNA, 75 bp, synthetic construct
  source 1..75: mol_type = other DNA
cgtaaggaaggcgtggggctgtttaccggcgccctgatggcgcgctacccgtggcttccggtggaagaggatggc

SEQ ID NO: 503243 - DNA, 75 bp, synthetic construct
  source 1..75: mol_type = other DNA
taaggcaagaaaacaattattgaatacaatatcatcattaggggtttctcagtttgatgtgatttatgaagatat

SEQ ID NO: 503244 - DNA, 75 bp, synthetic construct
  source 1..75: mol_type = other DNA
accagccggatgagtaaagcagaatttagcgaactaatcgaactgatctactcgttcggtgctgaacatggcgtt

SEQ ID NO: 503245 - DNA, 75 bp, synthetic construct
  source 1..75: mol_type = other DNA
ttcgttcggcgctgaacatggtgttcagtggtctggtgacacgaaattaaacgatgaattcataaaacgctgggg

SEQ ID NO: 503246 - DNA, 75 bp, synthetic construct
  source 1..75: mol_type = other DNA
acagccgccagcgcggcgagctgcgggaggtgatcctcaactatcgcgccgggctgctgccgatcctcgcgccgc

SEQ ID NO: 503247 - DNA, 75 bp, synthetic construct
  source 1..75: mol_type = other DNA
tgtttcaaaaaaacagaaaacattgcgagaattgctgcattattgcagtatttcagtcagggggaagggaaaatt

SEQ ID NO: 503248 - DNA, 75 bp, synthetic construct
  source 1..75: mol_type = other DNA
cttgagcaggatttatctccttccggtccgttaagtgcgtttcggggacatgtttcaaaaaaacagaaaacattg

SEQ ID NO: 503249 - DNA, 75 bp, synthetic construct
  source 1..75: mol_type = other DNA
cagtggcgttcagtgggtatcatgtctgatgaagccggtataatatttgatgggtataccctgtctgagctgcct

SEQ ID NO: 503250 - DNA, 75 bp, synthetic construct
  source 1..75: mol_type = other DNA
cgcgtcgcatgacgtccttacaaaagcaggcgctgaaaaaagctcgccgtaaggcacatacgtcgatagctaaca

SEQ ID NO: 503251 - DNA, 75 bp, synthetic construct
  source 1..75: mol_type = other DNA
tatattctccagtgtggcccgggtcggttcagaaacaggaaaaaactgaacgcattgctgaacattcttgaatct

SEQ ID NO: 503252 - DNA, 75 bp, synthetic construct
  source 1..75: mol_type = other DNA
ggctcattgaggagtgccgcggagaatgcccaccccgtgtcaggaaaaattatattctccagtgtggcccgggtc

SEQ ID NO: 503253 - DNA, 75 bp, synthetic construct
  source 1..75: mol_type = other DNA
gctgttagccgtgaaaactctctgcgcactgctggaggtgctgttcctgcatctgttaaagaatatcaatatttc

SEQ ID NO: 503254 - DNA, 75 bp, synthetic construct
  source 1..75: mol_type = other DNA
tcgccaatacgaaactggtcgttatgttcggaaataacccggcagaaacgcggatgagcggcggtggtgtcactt

SEQ ID NO: 503255 - DNA, 75 bp, synthetic construct
  source 1..75: mol_type = other DNA
actacgtcgagcaagcccgcgaacgttcaaatgcacgcatgatcgtcatcgatccacgttataacgacacagctg

SEQ ID NO: 503256 - DNA, 75 bp, synthetic construct
  source 1..75: mol_type = other DNA
aaccatggctaaagcagttcgcgaaatcacatagaaaagttgctgaatccttattggatagccttatttatatca

SEQ ID NO: 503257 - DNA, 75 bp, synthetic construct
  source 1..75: mol_type = other DNA
gatcaactaatatgcatttctcgagcaaaagctgttgccctaatcgaagagctccagaagaccatcaactatatg

SEQ ID NO: 503258 - DNA, 75 bp, synthetic construct
  source 1..75: mol_type = other DNA
ctcgccaggatcacaccttctggttttttaaagagaaagatccgattgaggtctacaaagttaacgggctactaa

SEQ ID NO: 503259 - DNA, 75 bp, synthetic construct
  source 1..75: mol_type = other DNA
ttgaaaaagcgcatcacctttatcgtttttctttgcgccatcgtggcggtgagcctgttttttgtgcaatcctgc

SEQ ID NO: 503260 - DNA, 75 bp, synthetic construct
  source 1..75: mol_type = other DNA
tcttcgagtgtaccgtgacaataaatccgtcacttttgccgaacttgatgtgtttgatttgagtgaggcgttaag

SEQ ID NO: 503261 - DNA, 75 bp, synthetic construct
  source 1..75: mol_type = other DNA
cttagtgcatatatatcaaccaaaggtgatccatctgcagtattcactataaccgcaaaggctactgttaaaaaa

SEQ ID NO: 503262 - DNA, 75 bp, synthetic construct
  source 1..75: mol_type = other DNA
tgctgcaccggaagttgcaaacggtctggccttcaacgtggtagcgaaaggcgacccgcgtgctgaactgggtaa

SEQ ID NO: 503263 - DNA, 75 bp, synthetic construct
  source 1..75: mol_type = other DNA
cgatcataaaacgctcatcaacacccacaaaaaagagttgatagcggaagccgccgtcagttttatccacgatgg

SEQ ID NO: 503264 - DNA, 75 bp, synthetic construct
  source 1..75: mol_type = other DNA
atcgatctcaatgcgggcgtaaccaccttcaacgaggtttataccgtcagtaaggcaatgtgcaatgccgcgcgc

SEQ ID NO: 503265 - DNA, 75 bp, synthetic construct
  source 1..75: mol_type = other DNA
gcggtgaacactctgaaaccctggtggccgggattgtttgacggtaacacgccccgggtaatgactccaacttat

SEQ ID NO: 503266 - DNA, 75 bp, synthetic construct
  source 1..75: mol_type = other DNA
aaaaaattttgcataagttcagcaacacaaagatcccccctttctataacggttcatttgagactccccttgact

SEQ ID NO: 503267 - DNA, 75 bp, synthetic construct
  source 1..75: mol_type = other DNA
tggatgagctggtggattgtgtggcagagctggaaaccaaagttggaaagttcgaaaaactggtgcaggaggtac

SEQ ID NO: 503268 - DNA, 75 bp, synthetic construct
  source 1..75: mol_type = other DNA
gtgaaacatcgcgcacaaaaagcggtggatgagctggtggactgtgtggcagagctggaaaccagagttggaaag

SEQ ID NO: 503269 - DNA, 75 bp, synthetic construct
  source 1..75: mol_type = other DNA
ggcgataatcagtttgtcattagcgatgagcgcgattatgccatttatgtgatttcactgaccccaaactcggaa

SEQ ID NO: 503270 - DNA, 75 bp, synthetic construct
  source 1..75: mol_type = other DNA
ctctcggtcatgagaagtacttcgatatcaaagatcgaatggagggtcgggatattgagcgtggcgagttggcag

SEQ ID NO: 503271 - DNA, 75 bp, synthetic construct
  source 1..75: mol_type = other DNA
ggctcatcggcgtgcaggtcgtcgccccggaagccggcgaattgatccagacggctgttctcgccattcgcaacc

SEQ ID NO: 503272 - DNA, 75 bp, synthetic construct
  source 1..75: mol_type = other DNA
tagcaaccgtgggctacagcgaagcggaagcgcatcacgacgggatcgaaaccgacagtcgcacgctcacgctcg

SEQ ID NO: 503273 - DNA, 75 bp, synthetic construct
  source 1..75: mol_type = other DNA
gcaacgttcaaaatcgatatctgatttcaaggatcaaagcatggttaaattcctgagaggtgtaatggatgatct

SEQ ID NO: 503274 - DNA, 75 bp, synthetic construct
  source 1..75: mol_type = other DNA
gatcaactaatatgcatttctcgagcaaaagctattgccctaatcgaagagctccagaagaccatcgactatatg

SEQ ID NO: 503275 - DNA, 75 bp, synthetic construct
  source 1..75: mol_type = other DNA
acaaagatcccccccccctttttctataacggttcatttgagactcccccttgactccctcttcgaaattgaaga

SEQ ID NO: 503276 - DNA, 75 bp, synthetic construct
  source 1..75: mol_type = other DNA
atagaacgctcagttaatgccgatatagcccggcgcgacaggttccgcgaaatgatgcgagcacctgcctactag

SEQ ID NO: 503277 - DNA, 75 bp, synthetic construct
  source 1..75: mol_type = other DNA
tttcgcatttcaccttcaaagataccattaaccgtatctacaaaaacgccaccgtacagcatcaaaatagtaaga

SEQ ID NO: 503278 - DNA, 75 bp, synthetic construct
  source 1..75: mol_type = other DNA
gctaacgctgcactcgacagccacaacgaatatcagcaaaccggaacgctcacaatgatgggctgcccggaactg

SEQ ID NO: 503279 - DNA, 75 bp, synthetic construct
  source 1..75: mol_type = other DNA
ggtgtgtttaccggtccaacctacaaaatcggtgaaacaaattattataacgtcggcgatgcactggctgcgatt

SEQ ID NO: 503280 - DNA, 75 bp, synthetic construct
  source 1..75: mol_type = other DNA
ttctgtcgcgactgaagcggatactgtctccgtgggtaacacaacagttcagcgaaaaattgtcaatatggcaaa

SEQ ID NO: 503281 - DNA, 75 bp, synthetic construct
  source 1..75: mol_type = other DNA
taaggcagagaatacaggttccatggctatgggagcagaaacagaagccaacttcttttcctcagccattggtta

SEQ ID NO: 503282 - DNA, 75 bp, synthetic construct
  source 1..75: mol_type = other DNA
gatgccgtggcagccaacaccaccaatatcgccacgaacaccaccaacatcaccaacctgactgacgctgttgac

SEQ ID NO: 503283 - DNA, 75 bp, synthetic construct
  source 1..75: mol_type = other DNA
aaaaccaccaacgatgctgtggcgacgaataccaccaatatcgccaataacactccaatattgccactaacacca

SEQ ID NO: 503284 - DNA, 75 bp, synthetic construct
  source 1..75: mol_type = other DNA
gcagttatgttgttgatgcgctgggggggtggtgccgaagtcaatgcagacggcaccatcactgcgccgacgtac

SEQ ID NO: 503285 - DNA, 75 bp, synthetic construct
  source 1..75: mol_type = other DNA
agaaccctgccagacgcctttatgcacgccaatatcggcccgttcgattcccccatcactcgtgcaatactgcgc

SEQ ID NO: 503286 - DNA, 75 bp, synthetic construct
  source 1..75: mol_type = other DNA
tttgcctcggtgcctttaaagccggaatgcgtgaatttaccgccaatgtcagcggtaacgatctggttcgcgtta

SEQ ID NO: 503287 - DNA, 75 bp, synthetic construct
  source 1..75: mol_type = other DNA
gggctgattaaccctgaacgttttgtgccaatgtttggcatgtatgggctggcggaagcggttaacttgctgtgt

SEQ ID NO: 503288 - DNA, 75 bp, synthetic construct
  source 1..75: mol_type = other DNA
actgacagtactgatgccatcaatggatcacagctttatgctattagtaagtcagtagcggataatcttggtgga

SEQ ID NO: 503289 - DNA, 75 bp, synthetic construct
  source 1..75: mol_type = other DNA
cgctttaggcagaaaatcagtcgccagtgcggcgaactctattgcgataggtgctgagaccgaagccgctgaaaa

SEQ ID NO: 503290 - DNA, 75 bp, synthetic construct
  source 1..75: mol_type = other DNA
ttaggtaacaccagtgaagccagcgaacaaaatgcgattgcgctggggcaaggtagcattgcaagcaaagtgaac

SEQ ID NO: 503291 - DNA, 75 bp, synthetic construct
  source 1..75: mol_type = other DNA
tgtggaatggcaccgcgttcagcgccgcgcacggcaccgaagccaccagcaaaatcaccaacgtcaaagacggtg

SEQ ID NO: 503292 - DNA, 75 bp, synthetic construct
  source 1..75: mol_type = other DNA
tggcgataccttgtccggtgggcttacttttgaaaacgactcaatccttgcctggattcgaaatactgactgggc

SEQ ID NO: 503293 - DNA, 75 bp, synthetic construct
  source 1..75: mol_type = other DNA
atactgccgaaagttacaaaccaaccgttgccgaagggtccggacgtgcacaaacatttcgcaccattctgaccg

SEQ ID NO: 503294 - DNA, 75 bp, synthetic construct
  source 1..75: mol_type = other DNA
catacgcgttaccacgccgagcacgtccagcggtggcggaattactaacgctcaattcacttatattaatcatgg

SEQ ID NO: 503295 - DNA, 75 bp, synthetic construct
  source 1..75: mol_type = other DNA
ggggcttgctactgcggcagacaggtttccgtattttacggggaatgatgttgccagcctggcaaccctgacaaa

SEQ ID NO: 503296 - DNA, 75 bp, synthetic construct
  source 1..75: mol_type = other DNA
gatgtgcctgcagcttcactgacggtaaaaggcaccgtgcaactcagcagcgccactaacagcacgtcagaaatg

SEQ ID NO: 503297 - DNA, 75 bp, synthetic construct
  source 1..75: mol_type = other DNA
aagaccgcaatggttctgatattcccaatccggcactgtttgttcagaatctgggattgaaaacgactgttgata

SEQ ID NO: 503298 - DNA, 75 bp, synthetic construct
  source 1..75: mol_type = other DNA
aaggcggcacaggtaaatcacatctggcaaccaacttaactgtttgcctctcacaacagggaaagagaacggggc

SEQ ID NO: 503299 - DNA, 75 bp, synthetic construct
  source 1..75: mol_type = other DNA
tcgataagattggctcgacggagacagggcgtgtcctcctgcatgccattgaatcaatatctcggatcaaatcag

SEQ ID NO: 503300 - DNA, 75 bp, synthetic construct
  source 1..75: mol_type = other DNA
tgaccgtaggcaattttcaaactgtatacttagtttggcttttttaagttgtttgatttactttattaaaaccgt

SEQ ID NO: 503301 - DNA, 75 bp, synthetic construct
  source 1..75: mol_type = other DNA
ggtgggcttacttttgaaaacgactcaatccttgcctggattcgaaatactgactgggcaaagattggatttaaa

SEQ ID NO: 503302 - DNA, 75 bp, synthetic construct
  source 1..75: mol_type = other DNA
cgctggcggggcttgctactgcggcagacaggtttccgtattttacggggaatgatgttgccagcctggcaaccc

SEQ ID NO: 503303 - DNA, 75 bp, synthetic construct
  source 1..75: mol_type = other DNA
cgaaactctggaagagattaaaccgctactcaaaagcgatacccaagttcatctgctcggtattgcacgtccaga

SEQ ID NO: 503304 - DNA, 75 bp, synthetic construct
  source 1..75: mol_type = other DNA
aaaacgtttctggcgttacctcgacagaaccctgccagacgcctttatgcacgccaatatcggcccgtctgattc

SEQ ID NO: 503305 - DNA, 75 bp, synthetic construct
  source 1..75: mol_type = other DNA
tctcagctcaaaaccaccaacgacaacgtgacgaccaacaccaccaacatcgccactaacaccaccaatatcacc

SEQ ID NO: 503306 - DNA, 75 bp, synthetic construct
  source 1..75: mol_type = other DNA
aaccagcaccgatgtagtaaacggctctcaattgtacgacctgcagcaggatgccctgttgtggaacggcacagc

SEQ ID NO: 503307 - DNA, 75 bp, synthetic construct
  source 1..75: mol_type = other DNA
aacggctctcagctcaaaaccaccaacgacaacgtgacgaccaacaccaccaacatcgccactaacaccaccaac

SEQ ID NO: 503308 - DNA, 75 bp, synthetic construct
  source 1..75: mol_type = other DNA
ccagttgaaagaaaccaaagacgatgtggccaccaacacagccaatatcgccgataacactgctgatattgcaac

SEQ ID NO: 503309 - DNA, 75 bp, synthetic construct
  source 1..75: mol_type = other DNA
gctggcgcattcagcgccgcgcacggcaccgaagccaccagcaaaatcaccaacgtcaccgctggcaacctgact

SEQ ID NO: 503310 - DNA, 75 bp, synthetic construct
  source 1..75: mol_type = other DNA
caacaccagtaccgatgccatcaacggctcacagctttatacgatcagtgattcagtcgccaagcgactcggagg

SEQ ID NO: 503311 - DNA, 75 bp, synthetic construct
  source 1..75: mol_type = other DNA
tcctggtgcgtcattcgggtttgcgtagcgtgtttgtggacattggcggcgagatttaccagcaggtcattccgc

SEQ ID NO: 503312 - DNA, 75 bp, synthetic construct
  source 1..75: mol_type = other DNA
gaacggtgcgttccgtcttgccgacgaccgggaagtgcgtttccgtcaggtcgatccggaaaaaacggagtcagt

SEQ ID NO: 503313 - DNA, 75 bp, synthetic construct
  source 1..75: mol_type = other DNA
cggcaatgattctgtcgccctcggtgtaggggctgcagcagcgaccgacaattctgtcgctatcggcgcaggatc

SEQ ID NO: 503314 - DNA, 75 bp, synthetic construct
  source 1..75: mol_type = other DNA
cgttgccagtgaaacggcaaaaagccgtggcaagaaatccgggcgcagtaagctgttaatttctgccctggttgc

SEQ ID NO: 503315 - DNA, 75 bp, synthetic construct
  source 1..75: mol_type = other DNA
ggaatccggctacgggcagttacaccgttgccagcgaaacggccaaaagccgtggcaaaaagagcgggcgcagta

SEQ ID NO: 503316 - DNA, 75 bp, synthetic construct
  source 1..75: mol_type = other DNA
tcctggtgcgtcatgcgggcttgcgtagcttgtttgtggacattggtggtgagattcaccagcaggttattcctc

SEQ ID NO: 503317 - DNA, 75 bp, synthetic construct
  source 1..75: mol_type = other DNA
atgaacaaaatatttaaagttatctggaatccggcaacaggcagttacaccgttgccagcgaaacggcgaagagc

SEQ ID NO: 503318 - DNA, 75 bp, synthetic construct
  source 1..75: mol_type = other DNA
aacgttacgatgccaaacgtcaggcaaaaatgcgtgcggcgctggaacagttgaaagggctggaaaatctctctg

SEQ ID NO: 503319 - DNA, 75 bp, synthetic construct
  source 1..75: mol_type = other DNA
gtaaccgcgttgcgcaaggcgaactggaaaacggacgtcattgggtacagtggcaggacccgttcccgaaaccgt

SEQ ID NO: 503320 - DNA, 75 bp, synthetic construct
  source 1..75: mol_type = other DNA
tggcaaccttgatcgcgcgccgtgggcgatgacctcgctgaaaaactccatgaaatgggatgaagaacgcttcgg

SEQ ID NO: 503321 - DNA, 75 bp, synthetic construct
  source 1..75: mol_type = other DNA
gggacgacgccgcaggcgcattcaccgctgcacacggcactaacgccaccaacaaaatcactaacgtcaccgctg

SEQ ID NO: 503322 - DNA, 75 bp, synthetic construct
  source 1..75: mol_type = other DNA
accaacatcactaacctgacgggcgaagtggctggcaacaccaccagtatcaccaacctgactgatacggtgaat

SEQ ID NO: 503323 - DNA, 75 bp, synthetic construct
  source 1..75: mol_type = other DNA
atccggcgctggcggcagaaatcctgacgctgccttccgtcaatgaaatggcagaactgttcgatatcatcgacc

SEQ ID NO: 503324 - DNA, 75 bp, synthetic construct
  source 1..75: mol_type = other DNA
ttctgcggcggttgctgcacagctgccatgccgtgacgcgctgatgcaggagtacgacgacaagtggcatcagga

SEQ ID NO: 503325 - DNA, 75 bp, synthetic construct
  source 1..75: mol_type = other DNA
aacagtacaccctgaccatcagtcaacgtacgccagctacgccggatcaggctgaaaaacagccactgcatattc

SEQ ID NO: 503326 - DNA, 75 bp, synthetic construct
  source 1..75: mol_type = other DNA
ggcgcaaagtttgctggcaacctacatcaagctgaacgtcgcccgtcatcagcaagggcagccgctgtctctgcc

SEQ ID NO: 503327 - DNA, 75 bp, synthetic construct
  source 1..75: mol_type = other DNA
cgcgatcaggagttcagctctgaccttggttcccgcgcagttaaccgcatcaataatgtacgcaccatgcgcgga

SEQ ID NO: 503328 - DNA, 75 bp, synthetic construct
  source 1..75: mol_type = other DNA
gctgtgctgctcgatgagaagatcgacccggcgctggcggcagaaatcctgacactgccttctgtcaatgaaatg

SEQ ID NO: 503329 - DNA, 75 bp, synthetic construct
  source 1..75: mol_type = other DNA
agtacgacgacaagtggcatcaggacggtctggtgatggataaatggtttatcctgcaagccaccagcccggcgg

SEQ ID NO: 503330 - DNA, 75 bp, synthetic construct
  source 1..75: mol_type = other DNA
agactgccttgaacgtgaacgctaacacgctggtggtgaacgacggtactattaatattgacaacactggtaatg

SEQ ID NO: 503331 - DNA, 75 bp, synthetic construct
  source 1..75: mol_type = other DNA
ggatcccccgcgaggggatggagacgacacgaaagccatcagttattacggtaaagtttggtgacggatatgaac

SEQ ID NO: 503332 - DNA, 75 bp, synthetic construct
  source 1..75: mol_type = other DNA
ccgtcatgccgggattcgtgcttttttgtggcgcccgccaaaacacaacaggactgtccgggttgtctgcaggga

SEQ ID NO: 503333 - DNA, 75 bp, synthetic construct
  source 1..75: mol_type = other DNA
attaatgctgaaataggtcatgcattttataacgatggtaccggcacaatcatcaactatggtaccatttgtact

SEQ ID NO: 503334 - DNA, 75 bp, synthetic construct
  source 1..75: mol_type = other DNA
aatatccagaatattacattcattgaagcagaagggaaagacagtaccgcgattaacaacggaaacatagaacta

SEQ ID NO: 503335 - DNA, 75 bp, synthetic construct
  source 1..75: mol_type = other DNA
gcagcgatatacatggaaatagagccggagattatgccgctggcatgtgggtaggcacagatgattttaacggcc

SEQ ID NO: 503336 - DNA, 75 bp, synthetic construct
  source 1..75: mol_type = other DNA
tgtgaaagtcgggcttatttatctcccggaaaaaaaagacgaccgggagaagctgtattacatctccgttttatt

SEQ ID NO: 503337 - DNA, 75 bp, synthetic construct
  source 1..75: mol_type = other DNA
acgaatatgtcatcacatcacgggttgtccgggaggatggtagcggggaaactccttttgtcctgagcccccctg

SEQ ID NO: 503338 - DNA, 75 bp, synthetic construct
  source 1..75: mol_type = other DNA
actgacggcaggtctggccttatacaggcaagaccccaggaccccattccttttatgtgaactactgacgaaaga

SEQ ID NO: 503339 - DNA, 75 bp, synthetic construct
  source 1..75: mol_type = other DNA
cttgaactatgactatgatgacgcacgcgggttggttcgacgcccagcctctgcaccgccgggtgtgactataca

SEQ ID NO: 503340 - DNA, 75 bp, synthetic construct
  source 1..75: mol_type = other DNA
gtggagcccatgaaaattaccgtgaaggacagccgtgttttttatttcacggtttataacgacacagataacgaa

SEQ ID NO: 503341 - DNA, 75 bp, synthetic construct
  source 1..75: mol_type = other DNA
ctccttaataaacgggatgatgtaaaagtcgggcttatttatcttccggaaaaaaaagagacaaccggggagaag

SEQ ID NO: 503342 - DNA, 75 bp, synthetic construct
  source 1..75: mol_type = other DNA
tattcagaccagtggcatctttaataacctacaagatggcaaagtggacaatggttctgcattaaccggtgatgc

SEQ ID NO: 503343 - DNA, 75 bp, synthetic construct
  source 1..75: mol_type = other DNA
ccaaaaagacggcattgtaaaacatggttctaaattaaccaataatgcagtggtgaataacgacggcacctggat

SEQ ID NO: 503344 - DNA, 75 bp, synthetic construct
  source 1..75: mol_type = other DNA
caccacaaggaagttatggcgaagcgatttatccccttccctggtatagtggagtatcctttgtcttaatggcgg

SEQ ID NO: 503345 - DNA, 75 bp, synthetic construct
  source 1..75: mol_type = other DNA
ccctacgccgttcttatggcagataatgccggaacgcatattgataactatggaaccattaatgcgactacttcg

SEQ ID NO: 503346 - DNA, 75 bp, synthetic construct
  source 1..75: mol_type = other DNA
aagcggcttacccccttccctggtataacagagtgttcttcgccttaatggcggataattatgggcaggccacta

SEQ ID NO: 503347 - DNA, 75 bp, synthetic construct
  source 1..75: mol_type = other DNA
attagcggtgataataacaccattgatttaaacggcagcataaacttctcattcaatgaggggatggctacggtg

SEQ ID NO: 503348 - DNA, 75 bp, synthetic construct
  source 1..75: mol_type = other DNA
gtttatctggcaacggaaacaacctcgaaatttcaggggatatgaccgttgatgggttgaacgcggtgggtacac

SEQ ID NO: 503349 - DNA, 75 bp, synthetic construct
  source 1..75: mol_type = other DNA
tgcaggtaaagacggctggagcgctagcgctacgctggaaggcgggccgaacctgagctacgcgaagagccagcg

SEQ ID NO: 503350 - DNA, 75 bp, synthetic construct
  source 1..75: mol_type = other DNA
caatgttggtactggtcaggcgttttataacgatggcacaggaacaattgttaactatggtacaatctgcacttt

SEQ ID NO: 503351 - DNA, 75 bp, synthetic construct
  source 1..75: mol_type = other DNA
gccacggcggatgcggtgatcgagaacaacggcaccatcaatatcttcgccaatgactcgtttgcattcagcgtg

SEQ ID NO: 503352 - DNA, 75 bp, synthetic construct
  source 1..75: mol_type = other DNA
gtcagcggcggcggtcacgggattgatattaccggcgacagcgcaacggtggacaacaagggcaccatgaccgtc

SEQ ID NO: 503353 - DNA, 75 bp, synthetic construct
  source 1..75: mol_type = other DNA
ggattgatatcaccggcgacagcgcgacggtggataacaagggcaccatgaccgttaccgatccggagtccatcg

SEQ ID NO: 503354 - DNA, 75 bp, synthetic construct
  source 1..75: mol_type = other DNA
cctggcaagtgtcggcgtgaagtacagcagcaaagaaagttcgctgaatctggatgcttaccactggaaagagga

SEQ ID NO: 503355 - DNA, 75 bp, synthetic construct
  source 1..75: mol_type = other DNA
acgtatatcgcatgtaaatcatgttgtgtcatcgctggcatcgtattatgacagcaagcaccatgctactggtga

SEQ ID NO: 503356 - DNA, 75 bp, synthetic construct
  source 1..75: mol_type = other DNA
gcgagtattccgctttcagaatggagttgctattgcttttaaaaacattcaggcaggtgatagtaaaaagttctc

SEQ ID NO: 503357 - DNA, 75 bp, synthetic construct
  source 1..75: mol_type = other DNA
actaaaaatattacatttggtgatattgagtttattaatcctcccgcgaccgaaactgttgttggggtggcaaga

SEQ ID NO: 503358 - DNA, 75 bp, synthetic construct
  source 1..75: mol_type = other DNA
ggtgggcttacttttgaaaatgactcaattcttgcctggattcgaaatactgactgggcaaagattggatttaaa

SEQ ID NO: 503359 - DNA, 75 bp, synthetic construct
  source 1..75: mol_type = other DNA
ggacgtaatgcggtatccactgatggtgctcaggctttgctccgtcaggaccatgccgaccgcaaatttatgatt

SEQ ID NO: 503360 - DNA, 75 bp, synthetic construct
  source 1..75: mol_type = other DNA
tgcgcgacagggaacgaataatacccaaatcgcaagcacggctttcgttatggctgcgattgccgcccttgtaga

SEQ ID NO: 503361 - DNA, 75 bp, synthetic construct
  source 1..75: mol_type = other DNA
aggcaggtgatagtaaaaagttctcgctatccagctccaacacctccacaaagaatgcaacgtttaatttatggg

SEQ ID NO: 503362 - DNA, 75 bp, synthetic construct
  source 1..75: mol_type = other DNA
ggtattcttgatgtttacgctaatagtcagcgagtattccgctttcagaatggagttgctattgcttttaaaaac

SEQ ID NO: 503363 - DNA, 75 bp, synthetic construct
  source 1..75: mol_type = other DNA
atagggccactacgcccctttacgcttaatctcagaactggtcgcataactatggggcatggtctggatgttaca

SEQ ID NO: 503364 - DNA, 75 bp, synthetic construct
  source 1..75: mol_type = other DNA
gaacaggtgatccctgaaaatgagggcggttggtggatccgtgaagtgggcctgtttgatgagtccggggcattg

SEQ ID NO: 503365 - DNA, 75 bp, synthetic construct
  source 1..75: mol_type = other DNA
ttgctgcgacgcctaaggctgttaaggcagcatatgacctggctaatggcaaatacaccgcacaggacgctacca

SEQ ID NO: 503366 - DNA, 75 bp, synthetic construct
  source 1..75: mol_type = other DNA
ctgaatacgctgaacgagttagcggcggcgctgggaaacgacccgaattttgcgaccaccatgactaacgcgctt

SEQ ID NO: 503367 - DNA, 75 bp, synthetic construct
  source 1..75: mol_type = other DNA
ccgggaaattggagtatttgatgagcacggcgatttaatcgcggtgggcaatactgccgaaagttacaagccagc

SEQ ID NO: 503368 - DNA, 75 bp, synthetic construct
  source 1..75: mol_type = other DNA
atgcgctgaacaaaatcagtcaggacaaacgaaacagtaattatattatcgcagagctggttattccgccggagg

SEQ ID NO: 503369 - DNA, 75 bp, synthetic construct
  source 1..75: mol_type = other DNA
cttaaaaacaggcgcgtggtgttcaatattaagggaaatgattacaggttaattgtcgcaattgcttatcagcga

SEQ ID NO: 503370 - DNA, 75 bp, synthetic construct
  source 1..75: mol_type = other DNA
agcagtgtagcggaaaagctgctgacctctgaaattgggaacatccttaagcagggtggcaattataaaagggct

SEQ ID NO: 503371 - DNA, 75 bp, synthetic construct
  source 1..75: mol_type = other DNA
aggaaggtaacaaaatgaaaatgcctcacagtcgtgtaattggcggagggctttttgaactgagagttggggata

SEQ ID NO: 503372 - DNA, 75 bp, synthetic construct
  source 1..75: mol_type = other DNA
aaaacagagtgatgacagaaagcgatttatctgcgcaagagcacagcggattttactcaagatataagaagcgca

SEQ ID NO: 503373 - DNA, 75 bp, synthetic construct
  source 1..75: mol_type = other DNA
cgtgttagtattcgcgccacaacaggtaacgtcatttttttccattttgtttttgatttctgccacaaatacatg

SEQ ID NO: 503374 - DNA, 75 bp, synthetic construct
  source 1..75: mol_type = other DNA
cccccccttttcctcccccacctcccccccccggaagccctcgcctggctcgccgccgatgccgctgcattatcc

SEQ ID NO: 503375 - DNA, 75 bp, synthetic construct
  source 1..75: mol_type = other DNA
gtggggaaaatagttataaatctttggcatataaaaaatactaatggcttattttattatgccttggattatatt

SEQ ID NO: 503376 - DNA, 75 bp, synthetic construct
  source 1..75: mol_type = other DNA
taacggcaatgaatatttcaaatggagaagtcgccagagcaccacaacaaaagacctgatgaatcttaaatggga

SEQ ID NO: 503377 - DNA, 75 bp, synthetic construct
  source 1..75: mol_type = other DNA
gcagagctggttattccgccggaggtgggcggtttctggatgcgtgaacttggcctgtacgatgatgcgggaacg

SEQ ID NO: 503378 - DNA, 75 bp, synthetic construct
  source 1..75: mol_type = other DNA
ctctttgaactaagagtaggggataaaaacatcgcaagaacgctgtatgcctacgcggctggtaacgagatttat

SEQ ID NO: 503379 - DNA, 75 bp, synthetic construct
  source 1..75: mol_type = other DNA
aatgaatatgttgatgccaatggctggaagtttggaaaactaacaaatgcgatttatcaaagcattttccatgaa

SEQ ID NO: 503380 - DNA, 75 bp, synthetic construct
  source 1..75: mol_type = other DNA
gcactttttctgcgcacggaaaatatcaaaaatagatgtactttcgctgtagaaacgacactcacaggaatgggg

SEQ ID NO: 503381 - DNA, 75 bp, synthetic construct
  source 1..75: mol_type = other DNA
ctcgttcggcgctgaacatgatgttcaatggtctggcgatacgaaattaaacgaggaattcataaaacgctgggg

SEQ ID NO: 503382 - DNA, 75 bp, synthetic construct
  source 1..75: mol_type = other DNA
gcgctgggaatcaccagtcgggccgatcaagctcgatttcgccgttccggtcgctgacaaagacgagcatggttt

SEQ ID NO: 503383 - DNA, 75 bp, synthetic construct
  source 1..75: mol_type = other DNA
tggtgccgtttaaagagggcgatgagtacgaatcgaaagatctggcggaactgaaccgccgactttctgctaccg

SEQ ID NO: 503384 - DNA, 75 bp, synthetic construct
  source 1..75: mol_type = other DNA
tcgatagcgaatttaccaaagcgcagctgggcattgcgctcggcctgcataaagccttctgggatattgattata

SEQ ID NO: 503385 - DNA, 75 bp, synthetic construct
  source 1..75: mol_type = other DNA
tccacaatttgataaagcgcgcgaaacgaaagtattaccattgacgggcgtggtttcgccgcgaacagaaaacac

SEQ ID NO: 503386 - DNA, 75 bp, synthetic construct
  source 1..75: mol_type = other DNA
acgaaagtattaccattgacgggcgtggtttcgccgcgaactgaaaacaccatcgaaaccggggtcggttactct

SEQ ID NO: 503387 - DNA, 75 bp, synthetic construct
  source 1..75: mol_type = other DNA
ggggctcagatgtcgatttctccgttttccaggcgcagaacgtctggatccgcacactgtacgatcgccatcgtt

SEQ ID NO: 503388 - DNA, 75 bp, synthetic construct
  source 1..75: mol_type = other DNA
ggacctttcttgatttaagtatgaaatggttgtcggatccagaaatagcaagtttagttatggtgccttctttca

SEQ ID NO: 503389 - DNA, 75 bp, synthetic construct
  source 1..75: mol_type = other DNA
gcttaccaaaatccgcttaaagaccaacaggtcactttccagagtaacgatgtcacactaagcggaacagaagtc

SEQ ID NO: 503390 - DNA, 75 bp, synthetic construct
  source 1..75: mol_type = other DNA
aaatcgctggtttcctcgctacagaccaaatatgccctgaaaggctataaaatcgacgctgctgcgctggaatct

SEQ ID NO: 503391 - DNA, 75 bp, synthetic construct
  source 1..75: mol_type = other DNA
tttcgggaaaataaggggtcgtcaaccaataattttcgggaaatctcggaaacgtcaaccaactatccggtaact

SEQ ID NO: 503392 - DNA, 75 bp, synthetic construct
  source 1..75: mol_type = other DNA
attgaccgtgaatataacacgttcactggtatgtattctgacaaagcagaagtcgaacgttgggtgcggctgcat

SEQ ID NO: 503393 - DNA, 75 bp, synthetic construct
  source 1..75: mol_type = other DNA
attcgccatattattctcggcattggcggcagtgcgacggtcgacggcggtatgggcatggcgcaggcgcttggt

SEQ ID NO: 503394 - DNA, 75 bp, synthetic construct
  source 1..75: mol_type = other DNA
atcaagctcgatttcgccgttccggtcgctgacaaagacgagcacgggttacagttttacatcggtctggggcca

SEQ ID NO: 503395 - DNA, 75 bp, synthetic construct
  source 1..75: mol_type = other DNA
atagtgatctggttgaaccgctaatatgctccgcacgctatacaggaaacacattccggcgaggagaagcaacga

SEQ ID NO: 503396 - DNA, 75 bp, synthetic construct
  source 1..75: mol_type = other DNA
tcgaattgttcattaaaaatccgcttgaaaacgggcttactcgtggcgaacaaatggaactggcacgtattgctc

SEQ ID NO: 503397 - DNA, 75 bp, synthetic construct
  source 1..75: mol_type = other DNA
tcgaattgttcattaaaaatccgcttgaaaacggccttactcgtggggaacaaatggaactggcacgtattgctc

SEQ ID NO: 503398 - DNA, 75 bp, synthetic construct
  source 1..75: mol_type = other DNA
acgaaatgaatgaatccttatccagggataaggctgcgctttccggggcgatggagagccggaaacaaaaggaga

SEQ ID NO: 503399 - DNA, 75 bp, synthetic construct
  source 1..75: mol_type = other DNA
gatgctgaagataaaaatattgcgaccttaaacagtcgcattgcatcgacagagaaggcgatccccggtgcaagg

SEQ ID NO: 503400 - DNA, 75 bp, synthetic construct
  source 1..75: mol_type = other DNA
gattcaattggtcaacgcaacagttatgtgaaaacatggggttgcggaggttttttgaatgagacgaacatttac

SEQ ID NO: 503401 - DNA, 75 bp, synthetic construct
  source 1..75: mol_type = other DNA
gtctgaccaccagtaccagtatttccgcgccggaacagatcctcgacttcagctataaaatgccgctgctgaaga

SEQ ID NO: 503402 - DNA, 75 bp, synthetic construct
  source 1..75: mol_type = other DNA
cgacgtggaaaaagccgtggatgaactcatacggtcacagtttgaccaccagtaccagtatttccgcgccagaac

SEQ ID NO: 503403 - DNA, 75 bp, synthetic construct
  source 1..75: mol_type = other DNA
gtgtaagcttactctgctttggtggttctgctatcgccgcgaacgtccgtctacaggtcgaagggttatcaggac

SEQ ID NO: 503404 - DNA, 75 bp, synthetic construct
  source 1..75: mol_type = other DNA
tcgaattgttcattaaaaaaccgcttgaaaacggccttactcgtggtgaacaaatggaactggcacgtattgctc

SEQ ID NO: 503405 - DNA, 75 bp, synthetic construct
  source 1..75: mol_type = other DNA
tcgaattgttcattaaaaaaccgcttgaaaacggtcttactcgtggcgaacaaatggaactggcacgtattgctc

SEQ ID NO: 503406 - DNA, 75 bp, synthetic construct
  source 1..75: mol_type = other DNA
gcgctgggaatcgccggtcgggccaatcaaactcgattttgccgtaccggtcgcggataaagacgagcacgggtt

SEQ ID NO: 503407 - DNA, 75 bp, synthetic construct
  source 1..75: mol_type = other DNA
tcgcttgaggtggataaaaatattcaccagtcggtcacgatcaccgtggtcccaaacagggaacaatcggtaatg

SEQ ID NO: 503408 - DNA, 75 bp, synthetic construct
  source 1..75: mol_type = other DNA
acaaagttggtggcgtggagacacaccgctgggcgcagtgattatgtcgatcgttatggctgggttgcgcatcgc

SEQ ID NO: 503409 - DNA, 75 bp, synthetic construct
  source 1..75: mol_type = other DNA
ggtaatgcaaaaaggtcagatcacccatagcttcctgcctgacagcagttctcaggccaggattgcggaggtggt

SEQ ID NO: 503410 - DNA, 75 bp, synthetic construct
  source 1..75: mol_type = other DNA
ctcgcctgaagatcacaaaatgcgcgcggataaagttcgtgagattgccgcaaaactggggcgtcatgtggctat

SEQ ID NO: 503411 - DNA, 75 bp, synthetic construct
  source 1..75: mol_type = other DNA
tgggaacacgatcttcacgctgcgatggataacattcaggaagaaattgagttagtgggggagaatgcctccagc

SEQ ID NO: 503412 - DNA, 75 bp, synthetic construct
  source 1..75: mol_type = other DNA
tgtggcaacgtttctgccaattttatcagcaggatccactgcaaagactgcgaaatgctaatgaaagggacgcat

SEQ ID NO: 503413 - DNA, 75 bp, synthetic construct
  source 1..75: mol_type = other DNA
tctgttgccattggtggcggtgttgggctgattggtgtcgatgcaattcgtggggctgcaatgagagtgatcggt

SEQ ID NO: 503414 - DNA, 75 bp, synthetic construct
  source 1..75: mol_type = other DNA
attcccgacggtgaatgcggctttaagttcgacccgcaaccgtacgctgacgagcggaaccgctaccagtgctga

SEQ ID NO: 503415 - DNA, 75 bp, synthetic construct
  source 1..75: mol_type = other DNA
aagtgtatgcggcagagcgtctggataaaatccaccgccagaacaggataaaggcagagcttcaggccgtgcttg

SEQ ID NO: 503416 - DNA, 75 bp, synthetic construct
  source 1..75: mol_type = other DNA
ttgctggaatggccgaccgtccgcctacaatctattggctgttcccgccgttgggcgacgtcgattgtgctggtt

SEQ ID NO: 503417 - DNA, 75 bp, synthetic construct
  source 1..75: mol_type = other DNA
ctgatgtccggcgacctggtcatcgtcacccagggcgacgtaatgagtaccgtgggttctaccaataccacgcgt

SEQ ID NO: 503418 - DNA, 75 bp, synthetic construct
  source 1..75: mol_type = other DNA
gtcatctgacgttctgctgcgtcgcccggatatccaggaagcggaacataatttgaagagcgccaatgctgatat

SEQ ID NO: 503419 - DNA, 75 bp, synthetic construct
  source 1..75: mol_type = other DNA
acactggaaagcctgccggaacagatgatcagtctggttccggcgggcgtgtcatctgacgttctgctgcggcgc

SEQ ID NO: 503420 - DNA, 75 bp, synthetic construct
  source 1..75: mol_type = other DNA
ctgacttactggaactcttacaaagttggtggcgtggagatacgccgctgggcgcagtggttatgtcaattatta

SEQ ID NO: 503421 - DNA, 75 bp, synthetic construct
  source 1..75: mol_type = other DNA
ccggtaactggatcaaagtcgttcagcgtctgcctgttcgtatcgaactggaccaaaaacagctggagcaatacc

SEQ ID NO: 503422 - DNA, 75 bp, synthetic construct
  source 1..75: mol_type = other DNA
gacgcgcgccgatcaccagtcagggacagaacgtctggcggaagttgtcgaaaaatgcgcattcagcgacgacac

SEQ ID NO: 503423 - DNA, 75 bp, synthetic construct
  source 1..75: mol_type = other DNA
gacgcgcgccgatcatcagtcagggacagaacgcctggcggaagttgtcgaaaaatgcgcgttcagcgacgacac

SEQ ID NO: 503424 - DNA, 75 bp, synthetic construct
  source 1..75: mol_type = other DNA
agcgggtgagtttacagttacggcgacgctgacaagaaataataccattgctcatcagcaagtttcttttattgg

SEQ ID NO: 503425 - DNA, 75 bp, synthetic construct
  source 1..75: mol_type = other DNA
agatgaaagtaaatcaacattgaaatctagcgttagctcttttatggctgacttccaggagagcgcgacacttac

SEQ ID NO: 503426 - DNA, 75 bp, synthetic construct
  source 1..75: mol_type = other DNA
atgtggtacatgctaaacctcagacgacagtttcatctgcccccccctctactagaaaataatactgtgccttac

SEQ ID NO: 503427 - DNA, 75 bp, synthetic construct
  source 1..75: mol_type = other DNA
tggcggctggaaacgaaaaacactcgaaattttgctctgtggcgctctgacgctgacatttgcatccgctcttga

SEQ ID NO: 503428 - DNA, 75 bp, synthetic construct
  source 1..75: mol_type = other DNA
cggattggctggagattttccagagctggtggcgtggagatacgcctcttggcgcagtgattatgtcgatcgtta

SEQ ID NO: 503429 - DNA, 75 bp, synthetic construct
  source 1..75: mol_type = other DNA
atgcctcataacccaaatacctggccggactggctggagttgtttcagagctggtggcgtggagacacgccgctg

SEQ ID NO: 503430 - DNA, 75 bp, synthetic construct
  source 1..75: mol_type = other DNA
agagttctccatgggcggtaggggcaggggtgatcctgctgtttatgctggtgcttggctacattcaacaatatg

SEQ ID NO: 503431 - DNA, 75 bp, synthetic construct
  source 1..75: mol_type = other DNA
cgtgggatttcggcttttactggctgcatcgctggcatcacgaaatgcgcccgctgtgggcggtacatgtggtgc

SEQ ID NO: 503432 - DNA, 75 bp, synthetic construct
  source 1..75: mol_type = other DNA
acggaaatccactctttaaagaacccgttgatatactgcataaaaacgaatggttgacttgttatgatgcaattc

SEQ ID NO: 503433 - DNA, 75 bp, synthetic construct
  source 1..75: mol_type = other DNA
gcttattacaacgtttatcgacctcatacaaacaatggtggtttatcgccttgccgcatgaagaaaaatggaaac

SEQ ID NO: 503434 - DNA, 75 bp, synthetic construct
  source 1..75: mol_type = other DNA
ctttgataacagcagcaacccaggcttcctggtggaagatgatcgtgtgcgtgtacgtctgaataaccaaagctg

SEQ ID NO: 503435 - DNA, 75 bp, synthetic construct
  source 1..75: mol_type = other DNA
acgcgctggaactcatctaccaacgtaatgccctgcccgccattactggtcacatttgcgatcaccagtgccagc

SEQ ID NO: 503436 - DNA, 75 bp, synthetic construct
  source 1..75: mol_type = other DNA
ggtatgccatgggataacagcccatgcttttacaacctggaagaaattgatcgctggattgaacgtcaggcatca

SEQ ID NO: 503437 - DNA, 75 bp, synthetic construct
  source 1..75: mol_type = other DNA
tgatgtcgattttctggaaatcgggccaggtgccaccctgacccagctgaccaacggtcatgcattaggtgatcg

SEQ ID NO: 503438 - DNA, 75 bp, synthetic construct
  source 1..75: mol_type = other DNA
caccggcgcggggctggtggtgttaaagcgtgttgatgaagcgctgcgtgatggcgataacatctatgcggtcat

SEQ ID NO: 503439 - DNA, 75 bp, synthetic construct
  source 1..75: mol_type = other DNA
ggcagaaatctaccaacgtaaaggcgacatctctgtcaccctggtgaacagcgatgatcgtgacgcatttgtcgc

SEQ ID NO: 503440 - DNA, 75 bp, synthetic construct
  source 1..75: mol_type = other DNA
acctttgtaaaactcaacccaactttattaggttacgctcgtgttcgcgagattctcgatggctgcggcttcgat

SEQ ID NO: 503441 - DNA, 75 bp, synthetic construct
  source 1..75: mol_type = other DNA
cggcactgcttatgttgatgactggtaatgcctgggcagatggcgaaccgccaactgaaaatatcttaaaagatc

SEQ ID NO: 503442 - DNA, 75 bp, synthetic construct
  source 1..75: mol_type = other DNA
ggcgctggaaatgctggaacgcctgatggcgctggcaaaagaaaaatcactcggctttggcgtcaaactgactaa

SEQ ID NO: 503443 - DNA, 75 bp, synthetic construct
  source 1..75: mol_type = other DNA
ccatgttccagccttccgcatccggtaaatcgttcatctttaatatgagcgtcggttacaacctcgatggtatta

SEQ ID NO: 503444 - DNA, 75 bp, synthetic construct
  source 1..75: mol_type = other DNA
cggtaaaccgtacaaagacaaaatcaccgtcttcagcctgtcgcaagactttgataacagcagcaacccaggctt

SEQ ID NO: 503445 - DNA, 75 bp, synthetic construct
  source 1..75: mol_type = other DNA
tctcctgggaaaacgggcaggcgctggtcagttgtgatgttaaagcctcatgcagcagctgcgcttcacgcgccg

SEQ ID NO: 503446 - DNA, 75 bp, synthetic construct
  source 1..75: mol_type = other DNA
ttacaacatacttaatgcttcttttgatttcgtacatgcggctaaggtgcttgataataaaagtttgctgcttat

SEQ ID NO: 503447 - DNA, 75 bp, synthetic construct
  source 1..75: mol_type = other DNA
taacacccagggcgtgatccttatccgtactgcagaaggggagaacgtggtggggctgcaacgtgttgcagaacc

SEQ ID NO: 503448 - DNA, 75 bp, synthetic construct
  source 1..75: mol_type = other DNA
cggccttgagcatgaaaaactgctcgatgaatataaagagttgttggatcagattgcggaactgttgcgtattct

SEQ ID NO: 503449 - DNA, 75 bp, synthetic construct
  source 1..75: mol_type = other DNA
atgaaacggaacacgaaaattgccctggtcatgatggcgctttcagcaatgacaatgggagcaacaccggcattc

SEQ ID NO: 503450 - DNA, 75 bp, synthetic construct
  source 1..75: mol_type = other DNA
atgacagagcagaaacgaccggtactgacactgacactgaaacggaaaacggaaggggaaacaccgacccggagc

SEQ ID NO: 503451 - DNA, 75 bp, synthetic construct
  source 1..75: mol_type = other DNA
acgttcgtggcccgcgtgccactatgtataccgcccaaccgtggaccatccgtcagtatgctggtttctcgacaa

SEQ ID NO: 503452 - DNA, 75 bp, synthetic construct
  source 1..75: mol_type = other DNA
agattgctgaactgctgcgtattcttggcagtgccgatcgccttatggaagtgatccgtgaagaactggaactgg

SEQ ID NO: 503453 - DNA, 75 bp, synthetic construct
  source 1..75: mol_type = other DNA
gaagtggatattatcgccgatctgctggatgaactggaagcatcaaaaaagcgaacagagctggagacacgggag

SEQ ID NO: 503454 - DNA, 75 bp, synthetic construct
  source 1..75: mol_type = other DNA
cgcttcattatttcagctactctttgcttcagatattgcagcattatgcggtgcgattctcggtggcgttggtgg

SEQ ID NO: 503455 - DNA, 75 bp, synthetic construct
  source 1..75: mol_type = other DNA
aagattgcggaactggtaaaagaaaaacgcgtggaaggtatcagcgcgctgcgtgacgagtctgacaaagacggt

SEQ ID NO: 503456 - DNA, 75 bp, synthetic construct
  source 1..75: mol_type = other DNA
gttaccgaacgtaacggtttagtggttggcgcggtgcaggtagatgactgcgaccagatcatgatgatcaccgat

SEQ ID NO: 503457 - DNA, 75 bp, synthetic construct
  source 1..75: mol_type = other DNA
gaaggcgataaagtcgtctctctgatcgtgcctcgtggcgatggcgcaatcctcaccgcaacgcagaacggttat

SEQ ID NO: 503458 - DNA, 75 bp, synthetic construct
  source 1..75: mol_type = other DNA
tgtcctcaattaccttggtttaggagaaggctcggcgctacccgttggtgtgcctgttccgtggcccaccgccac

SEQ ID NO: 503459 - DNA, 75 bp, synthetic construct
  source 1..75: mol_type = other DNA
gcggtattgccggtctgcaaaactgtatggacgtgatgttcgatgaagcggtacagaaacgcggaatgtctctgc

SEQ ID NO: 503460 - DNA, 75 bp, synthetic construct
  source 1..75: mol_type = other DNA
tatatggtttcaactttcagagaagctatattcaatagccttaccgtacgaaacctattttccataactgacaca

SEQ ID NO: 503461 - DNA, 75 bp, synthetic construct
  source 1..75: mol_type = other DNA
tgcaaacagcgaaagacggagggggcggtatatctgcggggaagtgacgcacctggcgggctgagagatatggag

SEQ ID NO: 503462 - DNA, 75 bp, synthetic construct
  source 1..75: mol_type = other DNA
gtagtgttgtcggatgcaatgctgggctatctccatttcgttgctaacattccggtcaaaggtacgcgctggttg

SEQ ID NO: 503463 - DNA, 75 bp, synthetic construct
  source 1..75: mol_type = other DNA
cacatctaacatcttggcaaatgcaaaaactatctgggctggaaaaagtaaaaactataggagatgtattgtctt

SEQ ID NO: 503464 - DNA, 75 bp, synthetic construct
  source 1..75: mol_type = other DNA
actttaagtcagacaactcagcaaaaatttaataaaataattgaaaggtatgttgagcttagactcagcgaatac

SEQ ID NO: 503465 - DNA, 75 bp, synthetic construct
  source 1..75: mol_type = other DNA
atgatgactctggcgttagttggcgaaaaaattgacagaaacaggttcaccggtgaaaaagttgaaaatagcaca

SEQ ID NO: 503466 - DNA, 75 bp, synthetic construct
  source 1..75: mol_type = other DNA
cccgcaccgaagaccgaagaaataaaggggttgggggaattaaaaaaagcacctaaaaaaacacctaaacaaggt

SEQ ID NO: 503467 - DNA, 75 bp, synthetic construct
  source 1..75: mol_type = other DNA
cgccagtgatggcgaacacctcggggcattcgatccaaaaacgggtaagcaggttaaagggccggatccaaaacg

SEQ ID NO: 503468 - DNA, 75 bp, synthetic construct
  source 1..75: mol_type = other DNA
ctgcttgaatccggagggggtaacggcggggttttttatgaccatgagccgttgctccttattgcctcccggcgt

SEQ ID NO: 503469 - DNA, 75 bp, synthetic construct
  source 1..75: mol_type = other DNA
actttccacaatatgtggaatgaaaacgaattacgggaaatgtcaacaggtccccgggagcctgaaggactcccg

SEQ ID NO: 503470 - DNA, 75 bp, synthetic construct
  source 1..75: mol_type = other DNA
gatttcaggaatatcaatgcgctgggaatcgaaattcgccactgccgggcacaagggtcagattttcgcggcgca

SEQ ID NO: 503471 - DNA, 75 bp, synthetic construct
  source 1..75: mol_type = other DNA
aaggtcttccgcgtgaaatcgagttgcgccagaaacaatacgagtactatcgtgatttactgttcagttttccca

SEQ ID NO: 503472 - DNA, 75 bp, synthetic construct
  source 1..75: mol_type = other DNA
ctaaaggtgcacgaagatatgactggtgggcttatgtatcagctcgcccccgcaatatcgcatttaactatatcg

SEQ ID NO: 503473 - DNA, 75 bp, synthetic construct
  source 1..75: mol_type = other DNA
acttaaataagtgtaaggataaacttcaggcgttatcgtcacctaattctcctgtaaagcctgttattgtcccaa

SEQ ID NO: 503474 - DNA, 75 bp, synthetic construct
  source 1..75: mol_type = other DNA
tttcttggttttattgagctgattcatgggattcgaaagattctggtctggtcaggctggaaaaacggaagttaa

SEQ ID NO: 503475 - DNA, 75 bp, synthetic construct
  source 1..75: mol_type = other DNA
accaaaagcggtcaaggctgcatacgacctcgcagccggcaaggcgccagtcagccacactcacccgtggagtca

SEQ ID NO: 503476 - DNA, 75 bp, synthetic construct
  source 1..75: mol_type = other DNA
accaaaagcggtcaaggctgcatacgaccttgcagccggcaaggcgccagccagccacactcacccgtggagtca

SEQ ID NO: 503477 - DNA, 75 bp, synthetic construct
  source 1..75: mol_type = other DNA
accaaaagcggtcaaggctgcatacgacctagcagccggcaaggcgcctgacagccacactcacccgtggagtca

SEQ ID NO: 503478 - DNA, 75 bp, synthetic construct
  source 1..75: mol_type = other DNA
gcctacctcgcgaaatcgagctacgacaaaaacagtacgaatactatcgtgacttgctgttcagcttcccgaaac

SEQ ID NO: 503479 - DNA, 75 bp, synthetic construct
  source 1..75: mol_type = other DNA
atcctaaagttggtgaagtattgatttctgccagtggaaccatcggcaggactgttatatttgatggtagggaat

SEQ ID NO: 503480 - DNA, 75 bp, synthetic construct
  source 1..75: mol_type = other DNA
gctagttgaacaacaaaaaatagtgaaattactggataaatttgatgctttgaccaactccatcaccgaaggtct

SEQ ID NO: 503481 - DNA, 75 bp, synthetic construct
  source 1..75: mol_type = other DNA
ttactggaatggccaaccgtgcggctacaatcaataggctgctcccgacgctgggcgacgtcgattgtattggtc

SEQ ID NO: 503482 - DNA, 75 bp, synthetic construct
  source 1..75: mol_type = other DNA
gatcttcggtggtttgtggggattctggggcgtattcttcgccattccattggcgacgctgatcaaagccgtgat

SEQ ID NO: 503483 - DNA, 75 bp, synthetic construct
  source 1..75: mol_type = other DNA
ggcgtgatcgtgatggacttcattcttggatttggatcacatgaagatccggttggagtgatgctggatacaatt

SEQ ID NO: 503484 - DNA, 75 bp, synthetic construct
  source 1..75: mol_type = other DNA
cagggtcagaacatatcgttccggcagatgcggtgatcatggcgtttggtttccgtccacacagcatggaatggc

SEQ ID NO: 503485 - DNA, 75 bp, synthetic construct
  source 1..75: mol_type = other DNA
caaattcaacgtccagccgctgggtattgaagtgaacggtaacggcaaagtcagcggcgtaaaaatggtgcgtac

SEQ ID NO: 503486 - DNA, 75 bp, synthetic construct
  source 1..75: mol_type = other DNA
ttcgcagggtcggatcattgccccggaaggtaacgaaaacgccttccagaccagtaacccgaaaatctttgccgg

SEQ ID NO: 503487 - DNA, 75 bp, synthetic construct
  source 1..75: mol_type = other DNA
ctatcgtcgtgatgaagagaacatgccaggttcccgccgcgaagtgaaaaacgcgcgggaagaaggtgttgagtt

SEQ ID NO: 503488 - DNA, 75 bp, synthetic construct
  source 1..75: mol_type = other DNA
ttcacagggtcgcattatcgctccggaaggtaacgaaaacgctttccaaaccagcaatccgaaaatctttgccgg

SEQ ID NO: 503489 - DNA, 75 bp, synthetic construct
  source 1..75: mol_type = other DNA
aacgaagacgccgatggcgtgtacgcggcgctgccgttcctcatcgccaacaccaaacagttaatgggctttggc

SEQ ID NO: 503490 - DNA, 75 bp, synthetic construct
  source 1..75: mol_type = other DNA
atgaccgtcgcggatgcggattcgattggcattcagatagacggcgacaaggcggtcgtgaacaacgacggcgac

SEQ ID NO: 503491 - DNA, 75 bp, synthetic construct
  source 1..75: mol_type = other DNA
aataccaccgttgatggtcagggttcgaccgggactgaaatcgcgggtaataacgcggtggtgaatcaggacggc

SEQ ID NO: 503492 - DNA, 75 bp, synthetic construct
  source 1..75: mol_type = other DNA
ccggaattggtatggccgcctacggcgctggtaatacggttattaaccagggcaccattaatctggagaaaaacg

SEQ ID NO: 503493 - DNA, 75 bp, synthetic construct
  source 1..75: mol_type = other DNA
aaatcgccagattgtcgcggataacgcaaaaacgcgcgtacccatgacgataggcgcactctggacggcttaccg

SEQ ID NO: 503494 - DNA, 75 bp, synthetic construct
  source 1..75: mol_type = other DNA
gacggtgacagtgccatcagtaacggcggcaccggcacgcagattaacggtgatgaagccaccgtaaacaataac

SEQ ID NO: 503495 - DNA, 75 bp, synthetic construct
  source 1..75: mol_type = other DNA
cattgagaacaatggcgccatcaacatttacgccaacaactcctttgcatttagcatgttgggttccgtaggcca

SEQ ID NO: 503496 - DNA, 75 bp, synthetic construct
  source 1..75: mol_type = other DNA
agaaatgggcgaaccggatgccaaaggccgtcgccgcgcggagattgtggcaggttccgaacatatcgttccggc

SEQ ID NO: 503497 - DNA, 75 bp, synthetic construct
  source 1..75: mol_type = other DNA
gctggctgactattttgctgccatcgccaactgctttacaagcaaagacaccccggcaggctgcttcatgatcaa

SEQ ID NO: 503498 - DNA, 75 bp, synthetic construct
  source 1..75: mol_type = other DNA
attgaggtggctgttgggctgaacgatccctggtacaactatcgcgtcggcacgctggttcacgcttcgaaagag

SEQ ID NO: 503499 - DNA, 75 bp, synthetic construct
  source 1..75: mol_type = other DNA
gcagcgatgtcgcggcgttaatgcaacttgccagtaaaacgggcggcggtttaacgtcgcttcctgccaatgaag

SEQ ID NO: 503500 - DNA, 75 bp, synthetic construct
  source 1..75: mol_type = other DNA
ggcgatccatcattcggcggtacaattctattaattctttcaatgatcgtttatggctgtgcctttgattttttc

SEQ ID NO: 503501 - DNA, 75 bp, synthetic construct
  source 1..75: mol_type = other DNA
gtgcccgggaaggcgcatcgctggaaaaactaatgcagatttcgcggacaacattgcgcttatggccagcgctgg

SEQ ID NO: 503502 - DNA, 75 bp, synthetic construct
  source 1..75: mol_type = other DNA
atcgccaatacgctgaaatcacgccatgcgatgcaagagcgcactttgcagcagtttttatgtcaacgacaagcg

SEQ ID NO: 503503 - DNA, 75 bp, synthetic construct
  source 1..75: mol_type = other DNA
acggtaatgatcgttcctccactatgcataattttttggacaacagcattgctgcagagcgtcttgagaattttt

SEQ ID NO: 503504 - DNA, 75 bp, synthetic construct
  source 1..75: mol_type = other DNA
gcggaagttctgaaaggcaatccggatgcaaaagtgatggatgaattacgccgactggctcgcaactacggcact

SEQ ID NO: 503505 - DNA, 75 bp, synthetic construct
  source 1..75: mol_type = other DNA
agctgttgcgatcccttttcctgtatgacccggtgacaggtcgcctgcaccataaagctaaccgacgccgggtta

SEQ ID NO: 503506 - DNA, 75 bp, synthetic construct
  source 1..75: mol_type = other DNA
atgatggtcatccgtcccgttgagcgcaccgatgtcgcggcgttaatgcagcttgctggtaaaacgggcggcggc

SEQ ID NO: 503507 - DNA, 75 bp, synthetic construct
  source 1..75: mol_type = other DNA
atgatggtcatccgtcccgttgagcgctcagacgttgcggcgctgatgcagcttgccagcaaaacgggcggcggc

SEQ ID NO: 503508 - DNA, 75 bp, synthetic construct
  source 1..75: mol_type = other DNA
cgctttcagcaccatgcgcaagtacggcatgaatatcatcaccgccacgcagcatatggatattaatgcttacgt

SEQ ID NO: 503509 - DNA, 75 bp, synthetic construct
  source 1..75: mol_type = other DNA
accggactcagcattgcaggtgatggtaatactttccgtctgaatggcggtattcaactggttggtgaggcgaac

SEQ ID NO: 503510 - DNA, 75 bp, synthetic construct
  source 1..75: mol_type = other DNA
ggcatcgcatgttaatgcccgctacgccagttatatggtgctgtttattgcttttttcagccacatttcttccga

SEQ ID NO: 503511 - DNA, 75 bp, synthetic construct
  source 1..75: mol_type = other DNA
taggcgggaagcttcacggcgctggggctaatgcgttctacgaaggcatcgacaacgaggggaatatggttcgcg

SEQ ID NO: 503512 - DNA, 75 bp, synthetic construct
  source 1..75: mol_type = other DNA
ggagggaagaaatcatcaatgcaacagccgcctactcagcaatcagcaggaggtagctacacctcaaaatcaggc

SEQ ID NO: 503513 - DNA, 75 bp, synthetic construct
  source 1..75: mol_type = other DNA
gttacgacaaatataccgacaatgccagtaaaacccagccgctgggttatgcttccggggcttacgcgtggcagt

SEQ ID NO: 503514 - DNA, 75 bp, synthetic construct
  source 1..75: mol_type = other DNA
ccattatatttttgaatacccagtattatctgcagggctgacgcttggtgggttggggaatgacctcggttgttc

SEQ ID NO: 503515 - DNA, 75 bp, synthetic construct
  source 1..75: mol_type = other DNA
ccatgctcacttggagataagatctcttatttcagaaaactgcatgagcgttggcttgagcaatatgactttttt

SEQ ID NO: 503516 - DNA, 75 bp, synthetic construct
  source 1..75: mol_type = other DNA
tgctatgcgtcaacttgccgcgcagtatcctgaccagattgaagcggtccgtaacggtatgaagtttgtcgatga

SEQ ID NO: 503517 - DNA, 75 bp, synthetic construct
  source 1..75: mol_type = other DNA
aggctctggtaaccctgccgtaggtgctgatgtgcgaagccgattcaatggcaaggagcagcgccaactgtacaa

SEQ ID NO: 503518 - DNA, 75 bp, synthetic construct
  source 1..75: mol_type = other DNA
ctgctattcaatcaggtgatcgacagcaggttcgagatctgatgaccaaatatcctggtcaattagagaagattc

SEQ ID NO: 503519 - DNA, 75 bp, synthetic construct
  source 1..75: mol_type = other DNA
attcaggcgcgcttcttgccgggttaggcggcatgaactccaacgctccaagagcaagtgatgcagactccacgc

SEQ ID NO: 503520 - DNA, 75 bp, synthetic construct
  source 1..75: mol_type = other DNA
caatccgcagcaatcaggctggcgaggcgctaacagcacgaggtcagaacatcacgatgcgcggtcaggatttat

SEQ ID NO: 503521 - DNA, 75 bp, synthetic construct
  source 1..75: mol_type = other DNA
attgatcgcggaaaacttgcagagacaatccgcagcaatcaggctggcgaggcgctaacagcacgaggtcagaac

SEQ ID NO: 503522 - DNA, 75 bp, synthetic construct
  source 1..75: mol_type = other DNA
ttccacgatttattaacgacaaggtggcgttgagtgccgttaatgatcaatacgaaattgtatgcagcatgatcg

SEQ ID NO: 503523 - DNA, 75 bp, synthetic construct
  source 1..75: mol_type = other DNA
tgttgatggcaaagacgccaccggcacggaaatcgcgggtaacaacgcggtggtgaatcaggacggcacgctgga

SEQ ID NO: 503524 - DNA, 75 bp, synthetic construct
  source 1..75: mol_type = other DNA
tccgtaggccacctcgtgaataacggtacggtaaccattgcagatggggtgacgggggccgggctgattaagcaa

SEQ ID NO: 503525 - DNA, 75 bp, synthetic construct
  source 1..75: mol_type = other DNA
gtacgacagataccggtatgataggtatgcagctggatagcagtgcgacggctgatgcggtgatcgagaataatg

SEQ ID NO: 503526 - DNA, 75 bp, synthetic construct
  source 1..75: mol_type = other DNA
actaatgaagggaatatttcgctggcaggcagtatgcaggtgggcgacttctctaccgggatggatctaaacggt

SEQ ID NO: 503527 - DNA, 75 bp, synthetic construct
  source 1..75: mol_type = other DNA
aacgagggtacctggtatctcggtgccagcagtagtagtgatagcaataatgaaccgccccgggtttcctggaga

SEQ ID NO: 503528 - DNA, 75 bp, synthetic construct
  source 1..75: mol_type = other DNA
caaacacgacaggagcgatcactgtagcggatacggactctgtcggtattcaggttgatggtaatgcagtgaccg

SEQ ID NO: 503529 - DNA, 75 bp, synthetic construct
  source 1..75: mol_type = other DNA
ctggttggtgaagaaaatcaattgactgatggttctaccgtcgcatcaaaccgcaagggctatggcaaaacacca

SEQ ID NO: 503530 - DNA, 75 bp, synthetic construct
  source 1..75: mol_type = other DNA
ataaaactaatgccatcaggcggaaataccactatcggaagagcgtctgggcaaaataacacttactttgatgaa

SEQ ID NO: 503531 - DNA, 75 bp, synthetic construct
  source 1..75: mol_type = other DNA
gaaaccagcaaccaagaggtttcagaccatttcgttgataccaccaaaatggttgttctagggtctggtgcccaa

SEQ ID NO: 503532 - DNA, 75 bp, synthetic construct
  source 1..75: mol_type = other DNA
tgggttttaatgatttagtcttttataacccggcgaacagtatgacgggccttaacgccaccactcatggttatg

SEQ ID NO: 503533 - DNA, 75 bp, synthetic construct
  source 1..75: mol_type = other DNA
ctgatgcgaacagtatgatgggtcttgatgcctttgatcacggatacgtgtccaatgaaagcggtggcagcattg

SEQ ID NO: 503534 - DNA, 75 bp, synthetic construct
  source 1..75: mol_type = other DNA
ccgaaatcgcgggtaataacgcggtggtgaatcaggacggtacactggatgtcagcggcggcggtcacggtattg

SEQ ID NO: 503535 - DNA, 75 bp, synthetic construct
  source 1..75: mol_type = other DNA
atgttagctcgttcagggaaggtaagcatggctacgaagaagagaagtggagaagaaataaatgacagacaaatt

SEQ ID NO: 503536 - DNA, 75 bp, synthetic construct
  source 1..75: mol_type = other DNA
atcaggcgatgattctggggacgaaactggaagatcagcctgccgtgcaacaggctgccaccgaagtacgtaacg

SEQ ID NO: 503537 - DNA, 75 bp, synthetic construct
  source 1..75: mol_type = other DNA
caagctgccactgaagtgcgcaatgcctggctggcgctggaacgtacccgtattgtcagcccgatgaccggttat

SEQ ID NO: 503538 - DNA, 75 bp, synthetic construct
  source 1..75: mol_type = other DNA
cggttatttccagaatgacggcacagacgattattgatggaaaagacgtattgtatccgaacgggccaacgttcg

SEQ ID NO: 503539 - DNA, 75 bp, synthetic construct
  source 1..75: mol_type = other DNA
tgaaaaaatagccaaggatatgtggattgaaggcgtatccggcatatctgtgggacgatcgcatttcaaatttaa

SEQ ID NO: 503540 - DNA, 75 bp, synthetic construct
  source 1..75: mol_type = other DNA
tctggttaccctgccgggttaccggttcaccagtacgccagaaaccgataacacctggccgattgaagttaccgc

SEQ ID NO: 503541 - DNA, 75 bp, synthetic construct
  source 1..75: mol_type = other DNA
ccttatcgaagcggggcagtttgcggtgttccctccagaaaagtggcacaacattgaagccatgactgacgatac

SEQ ID NO: 503542 - DNA, 75 bp, synthetic construct
  source 1..75: mol_type = other DNA
ggtggttccggtttcagccgggtgagattgatgcgctggatactgacgatctggaaatgtggctggcacaggcag

SEQ ID NO: 503543 - DNA, 75 bp, synthetic construct
  source 1..75: mol_type = other DNA
aagatcttcgatccctttttcaccaccaaagcctcaggaaccgggcttggtctggcgttaagtcaacgcatcatt

SEQ ID NO: 503544 - DNA, 75 bp, synthetic construct
  source 1..75: mol_type = other DNA
aacggtcaggtactggcaagcacagtgcgctccactccagtagcggtaagtaccgcccgtgaaatcagcctggaa

SEQ ID NO: 503545 - DNA, 75 bp, synthetic construct
  source 1..75: mol_type = other DNA
aacagcgtgaagaaacgcgtttgattattgaagaattactggaagatggtagcgatccagacgcgctgtacacca

SEQ ID NO: 503546 - DNA, 75 bp, synthetic construct
  source 1..75: mol_type = other DNA
tcaaatggttttctatatagtttccgtaattacgattatgatttatatgtggcagcattaaagaataaaagtaaa

SEQ ID NO: 503547 - DNA, 75 bp, synthetic construct
  source 1..75: mol_type = other DNA
cgtctcagttacctggccgtttcctcaatagctgttggcgaaaagaatggctggttccagcttaatcttcaaatt

SEQ ID NO: 503548 - DNA, 75 bp, synthetic construct
  source 1..75: mol_type = other DNA
aagcgtatgcggcagcgcgtctggcgaaaatccgccgccagaaccggataaagacagaacttcaggccgtgcttg

SEQ ID NO: 503549 - DNA, 75 bp, synthetic construct
  source 1..75: mol_type = other DNA
tctgacgctgccctcactggatgaggcggtgaacactctgaaaccctggtggccgggattgtttgacggtaacac

SEQ ID NO: 503550 - DNA, 75 bp, synthetic construct
  source 1..75: mol_type = other DNA
gtagtagtcgccgacgggcgcatcgcctggcagggtaagaccgaagaattgttgagcggtaaggcgagtgcttcg

SEQ ID NO: 503551 - DNA, 75 bp, synthetic construct
  source 1..75: mol_type = other DNA
ttgctggaatggccgactgtccgcctgcagtctattggctgttcccgcccttgggcgacatctatcgtgctgatc

SEQ ID NO: 503552 - DNA, 75 bp, synthetic construct
  source 1..75: mol_type = other DNA
tggggggtgttctttgccattcctctggcgacgctaattaaagcggtaatccatgcctggcccgatggtcaaatt

SEQ ID NO: 503553 - DNA, 75 bp, synthetic construct
  source 1..75: mol_type = other DNA
accgcgccggtatccggcattaatggatgcggggattattgatgcaatggctgaaaatatgcgtagccggatgct

SEQ ID NO: 503554 - DNA, 75 bp, synthetic construct
  source 1..75: mol_type = other DNA
cggattggttacctttcgcgatgagctgcttgccgattcgctggccttaaaaagagtggaactcggtattgtgac

SEQ ID NO: 503555 - DNA, 75 bp, synthetic construct
  source 1..75: mol_type = other DNA
ccagcgattttgccagtaacccggaaccacgttgcccctgcattttgctgttggatgtttctggttcgatgagtg

SEQ ID NO: 503556 - DNA, 75 bp, synthetic construct
  source 1..75: mol_type = other DNA
ccagcgattttgctagtaacccggaaccacgttgtccctgtattttgctgctggatgtttctggctcgatgagcg

SEQ ID NO: 503557 - DNA, 75 bp, synthetic construct
  source 1..75: mol_type = other DNA
gtggtggtcgccgacgggcgcatcgcctggcagggtatgaccaatgagttgttgagcggtaaggcgagtgcttcg

SEQ ID NO: 503558 - DNA, 75 bp, synthetic construct
  source 1..75: mol_type = other DNA
gccggttatcacaccagaaccggaagctgtcagcgaaccgtggatcgctatgccggaagaggagcgcaaaaacgt

SEQ ID NO: 503559 - DNA, 75 bp, synthetic construct
  source 1..75: mol_type = other DNA
ggcattggcgcgggcgaggcggtttctgccgcgacccgtaaacgcgatcagatcctcaaagacattcaggacaaa

SEQ ID NO: 503560 - DNA, 75 bp, synthetic construct
  source 1..75: mol_type = other DNA
attaacaaagttattcagcaattgctcgaattttcacgcccacgccacagtcaatggcaacaagtcagcctcaat

SEQ ID NO: 503561 - DNA, 75 bp, synthetic construct
  source 1..75: mol_type = other DNA
ggaagcgcgaatcgtaaaaattccagaatccgtctggcagcgttacacgaacgggtggctaatgcccgtgctgat

SEQ ID NO: 503562 - DNA, 75 bp, synthetic construct
  source 1..75: mol_type = other DNA
ttttaatccgaagctgaaagcgcggttcccgacgtttaaacgcaaacacggaaaacaatcgagctatcactgtgt

SEQ ID NO: 503563 - DNA, 75 bp, synthetic construct
  source 1..75: mol_type = other DNA
atgtctgacaacaccatccctgaatatctgcaatccgcgctggcacaactggaaaaggccagagtcgctcatctt

SEQ ID NO: 503564 - DNA, 75 bp, synthetic construct
  source 1..75: mol_type = other DNA
atgaagtagaaaaaatagcgcatttgcttgaacgggatagcattgtgaatggtcgaaatgttagctcgttaattg

SEQ ID NO: 503565 - DNA, 75 bp, synthetic construct
  source 1..75: mol_type = other DNA
ttctggctggctgtacgccggaggaggagaaaggcctacaggattatgggcgctatctcggcactgctttccagt

SEQ ID NO: 503566 - DNA, 75 bp, synthetic construct
  source 1..75: mol_type = other DNA
ggaaggccattccggcagtacgctcagaatatggcgcagatacgcttccggatcgataccgttcagacggcaggt

SEQ ID NO: 503567 - DNA, 75 bp, synthetic construct
  source 1..75: mol_type = other DNA
gtcagcggcggcggtcacgggattgatatcaccggcgacagcgcaacggtggataacaagggcaccatgaccgtc

SEQ ID NO: 503568 - DNA, 75 bp, synthetic construct
  source 1..75: mol_type = other DNA
caacttcgtgaagacgaaaagcgtctttttctgagaaatgaattgaaagaacataacaaacaattggttgaggca

SEQ ID NO: 503569 - DNA, 75 bp, synthetic construct
  source 1..75: mol_type = other DNA
gcagtaataacgtcaacattatttggcattgtggcagataaatggattagtgctaaatggatttatgccgcctgt

SEQ ID NO: 503570 - DNA, 75 bp, synthetic construct
  source 1..75: mol_type = other DNA
agccagtatgcagagcatgagctcgatgttgccctgcgtgatacctgtagcgcgctggtcagggcaatgaaactc

SEQ ID NO: 503571 - DNA, 75 bp, synthetic construct
  source 1..75: mol_type = other DNA
atgatctggcagcctgagttcacagataaaacactctccaggaaacccggggcggttcaatataatcataaaggt

SEQ ID NO: 503572 - DNA, 75 bp, synthetic construct
  source 1..75: mol_type = other DNA
gataacaagggcaccatgaccgtcaccgatccggagtccatgggtatccagattgacggcgacaaggcggttgtt

SEQ ID NO: 503573 - DNA, 75 bp, synthetic construct
  source 1..75: mol_type = other DNA
tggcaaagttatccctttcatacgctactacgcggaaggtataaagcgcgatgcaacaaaggccgcttttgtagc

SEQ ID NO: 503574 - DNA, 75 bp, synthetic construct
  source 1..75: mol_type = other DNA
gcctcaatgcattggttgaagaaactctggtactggtacaaaccgccggcgtacaagcgcgggtcgacttcataa

SEQ ID NO: 503575 - DNA, 75 bp, synthetic construct
  source 1..75: mol_type = other DNA
tctggggccgtatgaagcgcgagaacgtgccgatgtgttccgccgctttaatattcagatggtggaagagatggc

SEQ ID NO: 503576 - DNA, 75 bp, synthetic construct
  source 1..75: mol_type = other DNA
tccttgatgggtgtggcattggcttgttaacagatttgcgggcactggggaactcgggagaaccccagcaactgg

SEQ ID NO: 503577 - DNA, 75 bp, synthetic construct
  source 1..75: mol_type = other DNA
gattaacgccgatcgtgaactgctcaaacaggtactactgaatatcctgatcaatgccgtccaggctatcagtgc

SEQ ID NO: 503578 - DNA, 75 bp, synthetic construct
  source 1..75: mol_type = other DNA
aactcagtgtcactaccagtcgtattcataacacgcatggtgaaatgataggtgctttggtgattttctctgatt

SEQ ID NO: 503579 - DNA, 75 bp, synthetic construct
  source 1..75: mol_type = other DNA
aatataggggcaaatccaccacgtgaggagcgtatccgcgcattaaatgcagaacttgcccccattaccgaaaat

SEQ ID NO: 503580 - DNA, 75 bp, synthetic construct
  source 1..75: mol_type = other DNA
tggctgatgacattgaaatgtcagtggaatttacagcagatagcaatagtgctcgacagcgtgaaacggtaactg

SEQ ID NO: 503581 - DNA, 75 bp, synthetic construct
  source 1..75: mol_type = other DNA
tacatgaggccaagtgtttgggtgttgttaaacacagcataattcacagccacgatctagggcgtttgcgggata

SEQ ID NO: 503582 - DNA, 75 bp, synthetic construct
  source 1..75: mol_type = other DNA
aggtgatggtaaacgatgtgtagcattccacgaagcgggacatgcagtagctgcatggcttattcgcttagatat

SEQ ID NO: 503583 - DNA, 75 bp, synthetic construct
  source 1..75: mol_type = other DNA
acttatcggcaccgtaggaaccgcgcaaaaagcgcagagtgcgctaaaagcgggcgcgtggcaggttattaacta

SEQ ID NO: 503584 - DNA, 75 bp, synthetic construct
  source 1..75: mol_type = other DNA
ggcattctcaatcagaaaggctcgttgtatgtgacacgcccttccctgcaaggctatatcaccacgcgggaggaa

SEQ ID NO: 503585 - DNA, 75 bp, synthetic construct
  source 1..75: mol_type = other DNA
taaatgccccgaaggaagtttctgttcaccgtgaagagatctaccagcgtatccagactgaaaaatcccagcagt

SEQ ID NO: 503586 - DNA, 75 bp, synthetic construct
  source 1..75: mol_type = other DNA
tggagggattcccgccgtcacatgccgggaccatcaccgtgtatgaagattctcaaccggggacgctgaatgatt

SEQ ID NO: 503587 - DNA, 75 bp, synthetic construct
  source 1..75: mol_type = other DNA
tccagccattgttgcttctggtttattaatggggcttctgggaatggtgaaaacatatggctgggtgaatgccga

SEQ ID NO: 503588 - DNA, 75 bp, synthetic construct
  source 1..75: mol_type = other DNA
gcctttattcaggttgcaggtattagcgaatccagtaaagcagataccgctcgactcgccgctcaaaaactcaat

SEQ ID NO: 503589 - DNA, 75 bp, synthetic construct
  source 1..75: mol_type = other DNA
ttgtttattaatatcctctttttattatcaggctgtgcaaacttcaaaaaaatcaatgctaatgaacttgcagcc

SEQ ID NO: 503590 - DNA, 75 bp, synthetic construct
  source 1..75: mol_type = other DNA
ctgaggacgccgacgaattaacgacgaaacacggcatacagccgcgtttcgattttaaaccgattgatcacgagc

SEQ ID NO: 503591 - DNA, 75 bp, synthetic construct
  source 1..75: mol_type = other DNA
tcaggtggaacagcatcggatgccatttccggtgatgccagtaatacccagaccaccaccgtggatatgaaatct

SEQ ID NO: 503592 - DNA, 75 bp, synthetic construct
  source 1..75: mol_type = other DNA
ggattctgactcacccggcactcacaaatgcctggggcgttgctgcgggatttcagacaatgaacttcttcggtt

SEQ ID NO: 503593 - DNA, 75 bp, synthetic construct
  source 1..75: mol_type = other DNA
ctgaatattgaaatcctgagcatcaaaaaaaccagcaaagagcaggccggaatcgactggaacgccgttttcagt

SEQ ID NO: 503594 - DNA, 75 bp, synthetic construct
  source 1..75: mol_type = other DNA
tgctctgtccggaagatcgcaaagcggaaggtattattccggtgcattccgttcgtgacaatatcaacatcagtg

SEQ ID NO: 503595 - DNA, 75 bp, synthetic construct
  source 1..75: mol_type = other DNA
ctaagcacgaaatttacaacgtgatttatacgctggcggcgcagggcgtggcggtgctgtttgcctccagcgatc

SEQ ID NO: 503596 - DNA, 75 bp, synthetic construct
  source 1..75: mol_type = other DNA
ggcgggaatcgactggaacgcagtatttaatgatggtcatcttggtctgagtcttggtggctcatttggtaatgc

SEQ ID NO: 503597 - DNA, 75 bp, synthetic construct
  source 1..75: mol_type = other DNA
atgaataaaaaattgctttgtttattaatatcctcttttttattatcaggctgtgcaaacttcaaaaaaatcagt

SEQ ID NO: 503598 - DNA, 75 bp, synthetic construct
  source 1..75: mol_type = other DNA
tcggactcggtggtggcgtggacagtgcagatgacgacaccattctggttgtgctgatcacaccgcacgtaatct

SEQ ID NO: 503599 - DNA, 75 bp, synthetic construct
  source 1..75: mol_type = other DNA
tgggcgtctacgtgggggatcagacagtttcagtttttgggcggtgtgccggtgtcggtgtaccgcgaactgcgg

SEQ ID NO: 503600 - DNA, 75 bp, synthetic construct
  source 1..75: mol_type = other DNA
ttccaacggcgcggaactgcattttctggggacatccgccgcgagtgcacagtcatacacgggcaatctgtattt

SEQ ID NO: 503601 - DNA, 75 bp, synthetic construct
  source 1..75: mol_type = other DNA
atcgccatcgccaacgtgttcgtttatctgctgcgttacggcatcctcgactggtcaccgacttacctgaaagag

SEQ ID NO: 503602 - DNA, 75 bp, synthetic construct
  source 1..75: mol_type = other DNA
atcttgttgattgttgtgatgattggcgaaaaacgtcgccatcaggaattacagcaaaaacgcaacggaggctaa

SEQ ID NO: 503603 - DNA, 75 bp, synthetic construct
  source 1..75: mol_type = other DNA
cacagcagccacccagccgaagaaaaagatccgcaaaaagcaaaactatttctcagagtcgcagattgccgcgct

SEQ ID NO: 503604 - DNA, 75 bp, synthetic construct
  source 1..75: mol_type = other DNA
gtggcggcagattgtcactatcgaggatgctgtcgctaacggatggcagttcaccagtattgatgatattcgcga

SEQ ID NO: 503605 - DNA, 75 bp, synthetic construct
  source 1..75: mol_type = other DNA
tcgctggtactgaaaatgctgcaaataatgcgtgccgggcggtgggaatacgatcgcgccgaacgcgagctggtc

SEQ ID NO: 503606 - DNA, 75 bp, synthetic construct
  source 1..75: mol_type = other DNA
tcaccactgaatgtgcgcacggtgccgtattctgcggagtccgtcagcgaactggcggactccattaaaggtgtc

SEQ ID NO: 503607 - DNA, 75 bp, synthetic construct
  source 1..75: mol_type = other DNA
gcggcctttaacgccgtgcgtaaggtgaaaacaccgggcggctttatcacttacgaaacggaccgcgcgaggggg

SEQ ID NO: 503608 - DNA, 75 bp, synthetic construct
  source 1..75: mol_type = other DNA
acccacgagcagaaaaaacggctcaatgaaagcatcagaaactacaaaccggaacggcaaaaatcacctgctgat

SEQ ID NO: 503609 - DNA, 75 bp, synthetic construct
  source 1..75: mol_type = other DNA
tcgccactatcgtttactggctgaacccggctggcaacccaactgtcgatatgatttgtatgatcgtcatcggct

SEQ ID NO: 503610 - DNA, 75 bp, synthetic construct
  source 1..75: mol_type = other DNA
gctcggtgtcggatcgctcgaatccgcgcgttttcctgcccgcaggtttgattctggcggcggcggtgatgcttt

SEQ ID NO: 503611 - DNA, 75 bp, synthetic construct
  source 1..75: mol_type = other DNA
gcgataccccgcaatcctgtggcttgccgccgatcgaagagtacaaaaatgattatccggacgactataacgaaa

SEQ ID NO: 503612 - DNA, 75 bp, synthetic construct
  source 1..75: mol_type = other DNA
tcgcgatatcggcgatatctacggctggcaaccgcgtagttatggtgaggagcgattgcgcctggatgcagttaa

SEQ ID NO: 503613 - DNA, 75 bp, synthetic construct
  source 1..75: mol_type = other DNA
cgcaacacaatggctggcatccacaacacaatccgaatggatggcggctatacgccactggcagcaatccttaac

SEQ ID NO: 503614 - DNA, 75 bp, synthetic construct
  source 1..75: mol_type = other DNA
tgctggcactactggatgaacgggaaagaaaccagcagtacatcaaatcccgcgaccaggagaacgaggaaattg

SEQ ID NO: 503615 - DNA, 75 bp, synthetic construct
  source 1..75: mol_type = other DNA
atggaaaggagagcccggtggcgtaattgcagaatgtcatgttaactgcctggttgaaacagatgctcaggctta

SEQ ID NO: 503616 - DNA, 75 bp, synthetic construct
  source 1..75: mol_type = other DNA
aatatggttacgtcatcgaacgcggtaataaatttgtcggcgcagtgtctatcgattcgttaaaagcagcattaa

SEQ ID NO: 503617 - DNA, 75 bp, synthetic construct
  source 1..75: mol_type = other DNA
gacaggcgcattactgaggtgacaatgtggattaagcgactgagttcctctctcaaaaacgccaaaccagacagc

SEQ ID NO: 503618 - DNA, 75 bp, synthetic construct
  source 1..75: mol_type = other DNA
gtgaacaagattgactatcaggcattgcgtgaggcagcagagcaggcaatgcatgacgactggggatttgacgcg

SEQ ID NO: 503619 - DNA, 75 bp, synthetic construct
  source 1..75: mol_type = other DNA
gtttgtgcatggtattcagtggattggctacacgctccacttcccggactggctgactatcttcctcgcccaggg

SEQ ID NO: 503620 - DNA, 75 bp, synthetic construct
  source 1..75: mol_type = other DNA
agtgatcatcgtcgtcagcgttttccttagcgccttcaacagcttctcactgagcgggaaaatcgtcgacaacat

SEQ ID NO: 503621 - DNA, 75 bp, synthetic construct
  source 1..75: mol_type = other DNA
taagcaacactctgacggcagaacccagccgttttactaccgcggtggataaaatcgtgcttaaccgtttcctcg

SEQ ID NO: 503622 - DNA, 75 bp, synthetic construct
  source 1..75: mol_type = other DNA
caaccctgaagtagtgcaggcgttgctggatgaacgggaaagaaaccagcaatacattaaacgccgagaccagga

SEQ ID NO: 503623 - DNA, 75 bp, synthetic construct
  source 1..75: mol_type = other DNA
agccgattggtgtacatgaagataactggcaggcaacggttggcctgttcacgggcgcaatggcgaaagaagtgg

SEQ ID NO: 503624 - DNA, 75 bp, synthetic construct
  source 1..75: mol_type = other DNA
atcgcctgtcactacattttaagcggcgatgccgatctgctgattaacgtggtggatgcgtctaaccttgaacgt

SEQ ID NO: 503625 - DNA, 75 bp, synthetic construct
  source 1..75: mol_type = other DNA
gcgaaagatattgcccgccgcagcccgaatggtttaattcgtaaaacccccggcttcggtccgcgttcggcactg

SEQ ID NO: 503626 - DNA, 75 bp, synthetic construct
  source 1..75: mol_type = other DNA
gacagatgcagattatcttcggcaccggggtggtgaacaaagtctacgccgcctttatccaggcggcagggattg

SEQ ID NO: 503627 - DNA, 75 bp, synthetic construct
  source 1..75: mol_type = other DNA
gctttagtaggaaaaaatggaactaataaaagttctgttatcaaagcgctatttggttgcccacatggtaaaaat

SEQ ID NO: 503628 - DNA, 75 bp, synthetic construct
  source 1..75: mol_type = other DNA
tgctctttgtgcggatgatttccgctatgcttcgccgttcgggcggtgatgcgggcgctgttatgtttgaggcgt

SEQ ID NO: 503629 - DNA, 75 bp, synthetic construct
  source 1..75: mol_type = other DNA
tctgtggcctggtcaatggctttgttatcgccaaactgaaaataaatgctctgatcacaacactggcaacgatgc

SEQ ID NO: 503630 - DNA, 75 bp, synthetic construct
  source 1..75: mol_type = other DNA
tccgttcgcgacaatatcaacatcagtgccagacgtaaacatgtgctcggcggttgtgtaatcaacaacggttag

SEQ ID NO: 503631 - DNA, 75 bp, synthetic construct
  source 1..75: mol_type = other DNA
ggcgtcaacttcctgctgccgatttgggcgatggccaacgtcgctcagggcggtgcttgtctggcggtgtggttc

SEQ ID NO: 503632 - DNA, 75 bp, synthetic construct
  source 1..75: mol_type = other DNA
gatgcgcaaacgcctcttagcgagttgctctctcatgtcggacaggcaccctgtgcggtgcccgtggtcgacgag

SEQ ID NO: 503633 - DNA, 75 bp, synthetic construct
  source 1..75: mol_type = other DNA
gaattgccattatgcaaaatggtgaagtggtgcaggttggcacaccggatgaaattctcaataatccggcgaatg

SEQ ID NO: 503634 - DNA, 75 bp, synthetic construct
  source 1..75: mol_type = other DNA
ctgtgcggtgcccgtggtcgacgaggaccaacagtatgtcggcatcatttcgaaaggaatgctgctacgcgcttt

SEQ ID NO: 503635 - DNA, 75 bp, synthetic construct
  source 1..75: mol_type = other DNA
tgcgtgaagcggcagagaaagccggtgaagataagtggcaggctaaaaaaataaatggtgatttttttgttattc

SEQ ID NO: 503636 - DNA, 75 bp, synthetic construct
  source 1..75: mol_type = other DNA
tgagatgtacaaaccaacagtgcgcatcgtggaagttaatgtgccacgcgccgctggcatcaaggaggagtctga

SEQ ID NO: 503637 - DNA, 75 bp, synthetic construct
  source 1..75: mol_type = other DNA
ttagaaattaaaaatctttataaaatatttggtgagcatccacagcgagcgttcaaatatatcgaacaaggactt

SEQ ID NO: 503638 - DNA, 75 bp, synthetic construct
  source 1..75: mol_type = other DNA
gttggtattactgaacaagcatggagacgtgcggttagccagaaacttaattacttcaatgcgaagaatagcgaa

SEQ ID NO: 503639 - DNA, 75 bp, synthetic construct
  source 1..75: mol_type = other DNA
gggcgcctcgacaactcccattatacgttggttttccgtggacgcaagagcgaacatatggatagaccaatgccg

SEQ ID NO: 503640 - DNA, 75 bp, synthetic construct
  source 1..75: mol_type = other DNA
cttgcatatttacgatccctcgttgagcagcgttataacaggttaagaaagacctggaaatcactccaacattaa

SEQ ID NO: 503641 - DNA, 75 bp, synthetic construct
  source 1..75: mol_type = other DNA
ctgaatcgctggaaggcgatgagccagagccgctgccgcaagtgcgctggccgctggcgcatatgatggatttgc

SEQ ID NO: 503642 - DNA, 75 bp, synthetic construct
  source 1..75: mol_type = other DNA
ttttgaaaaagctcagtatggcgccgtcttacttttccagcaaaatgaatattgtggtggcgcaggacctctacc

SEQ ID NO: 503643 - DNA, 75 bp, synthetic construct
  source 1..75: mol_type = other DNA
tggaagaccctgacttcaatgaagcgcgcaatgtcagtgcgctgttcctcgtgcgcgaatggttgaaagggcagg

SEQ ID NO: 503644 - DNA, 75 bp, synthetic construct
  source 1..75: mol_type = other DNA
tgtttgcggcttggcaagccagtgccggagtataaaccaaagctggcaagcaaaggaacgaagacgcggcatatg

SEQ ID NO: 503645 - DNA, 75 bp, synthetic construct
  source 1..75: mol_type = other DNA
caaaatggacagattcaacagcatgagtaccaatgagattatcgactattataaaaaagttacgaacgatttaga

SEQ ID NO: 503646 - DNA, 75 bp, synthetic construct
  source 1..75: mol_type = other DNA
ttgaaaacctcaaaaaaggtgtgggtggtgagaataacgaaataattatccacaactctctgccgatgccgggag

SEQ ID NO: 503647 - DNA, 75 bp, synthetic construct
  source 1..75: mol_type = other DNA
atgagtaagaaaaaagtcgctaccgaagccgccgtcaccgaaagctataccgtgttctacagtggggacgccgag

SEQ ID NO: 503648 - DNA, 75 bp, synthetic construct
  source 1..75: mol_type = other DNA
acggcgatatatggtatcttcacgacgttggtgatgggtacgttgggtgtagatcccgggaagggaaggaggttt

SEQ ID NO: 503649 - DNA, 75 bp, synthetic construct
  source 1..75: mol_type = other DNA
tcgcggtaatgactgacaacttcaacacagaagttaaatcattttcggtcaatgtttacgtgactaatactggtt

SEQ ID NO: 503650 - DNA, 75 bp, synthetic construct
  source 1..75: mol_type = other DNA
ccgctggcgcatatgatggatttgctggaagcccctgacttcaacgaagcgcgtaatgtcagcgcgctgttcctc

SEQ ID NO: 503651 - DNA, 75 bp, synthetic construct
  source 1..75: mol_type = other DNA
ttctccacgccatccaccgaaacgcacgaggcatacgcctactggaacggcgaccgctggaacgagaaaaaggcc

SEQ ID NO: 503652 - DNA, 75 bp, synthetic construct
  source 1..75: mol_type = other DNA
actgaagacgagttccgcaatctctacatgtgtgaatttgctcgcgaaggggaatcggcatttaacctgaatatc

SEQ ID NO: 503653 - DNA, 75 bp, synthetic construct
  source 1..75: mol_type = other DNA
tttccggggagaaaccgtaccatcagcatcattcttcatccctgacgatgagaaaagctgcagcagcgatcccgt

SEQ ID NO: 503654 - DNA, 75 bp, synthetic construct
  source 1..75: mol_type = other DNA
aagataatccgcagcgcacattaaaagaacagaacattttcgcggtgctgaagcagttaggattcagttctgatc

SEQ ID NO: 503655 - DNA, 75 bp, synthetic construct
  source 1..75: mol_type = other DNA
tttccgcaggtgccagctattacatgaccttccttaatgtggtcattggttatggcatcatcgcttccgtcatga

SEQ ID NO: 503656 - DNA, 75 bp, synthetic construct
  source 1..75: mol_type = other DNA
tctttcgggcggccagtgaaggtgtgccacagggcggtgttatatcgccgctattatcgaacatcatgctgaatg

SEQ ID NO: 503657 - DNA, 75 bp, synthetic construct
  source 1..75: mol_type = other DNA
taccggtcgctgaaaataataaatcgaagacaataaataatgatcatccccagaaatcatgtggagcacaaccaa

SEQ ID NO: 503658 - DNA, 75 bp, synthetic construct
  source 1..75: mol_type = other DNA
actgttcgtggcctgcgtgttactaaaggcgctcgtgctgctatcgaagctgctggcgggaaaatcgaggaataa

SEQ ID NO: 503659 - DNA, 75 bp, synthetic construct
  source 1..75: mol_type = other DNA
tcgaagatcctgacttcaatgaagcacgtaatgtcagcgcgttgttcctggtgcgcgagtggttgaaggggcagg

SEQ ID NO: 503660 - DNA, 75 bp, synthetic construct
  source 1..75: mol_type = other DNA
taagtgtctctattgccaatcaggatttaaacaaacaactttctgatgttgaggattttattactaaaaaagtgg

SEQ ID NO: 503661 - DNA, 75 bp, synthetic construct
  source 1..75: mol_type = other DNA
aaactgaaaggctgggccatgttctatcagttcgttgattttaaggccaaagtcttcaggcactgttgcaaatag

SEQ ID NO: 503662 - DNA, 75 bp, synthetic construct
  source 1..75: mol_type = other DNA
cggcactcggtcgtatgttcgtcacccagcagagcatgatcctcgcccgtgacctgggctaccgcctggaaggca

SEQ ID NO: 503663 - DNA, 75 bp, synthetic construct
  source 1..75: mol_type = other DNA
caggcttccagagatggcaaacccgaaccggaatatggaggcctcggctttgttgataacgccatacccaatccg

SEQ ID NO: 503664 - DNA, 75 bp, synthetic construct
  source 1..75: mol_type = other DNA
acgacgactggaaagactggaaaccttttgctccccgcccgatggggaatcgtccggtatggattgggtatgacg

SEQ ID NO: 503665 - DNA, 75 bp, synthetic construct
  source 1..75: mol_type = other DNA
ttcagcggaagattactggtccacattactgcatgaactggtacacagtaccggtcatgcgaaacgtcttaaccg

SEQ ID NO: 503666 - DNA, 75 bp, synthetic construct
  source 1..75: mol_type = other DNA
cggtgcgaatgacacgctgaatgctgtggctgatcgtgtactgacgatggtgaatgcctgtggtgtgaagattca

SEQ ID NO: 503667 - DNA, 75 bp, synthetic construct
  source 1..75: mol_type = other DNA
agagcaaaacgtgggttttatttggtaaaaccaatcacggcaagctcagcggcgaaatactgtactggttggtgg

SEQ ID NO: 503668 - DNA, 75 bp, synthetic construct
  source 1..75: mol_type = other DNA
cgacaaacagacgggggagatgcgggagcagacggaatggcaccgtgttgtgctgttcggcaagctcgcggaagt

SEQ ID NO: 503669 - DNA, 75 bp, synthetic construct
  source 1..75: mol_type = other DNA
cggcccgccgtccggcaaaacagactgacttctatcgccagataaccgaccgcattgttgccgcgctggaaaacg

SEQ ID NO: 503670 - DNA, 75 bp, synthetic construct
  source 1..75: mol_type = other DNA
ttccgccccactcaagcgcgccatggtgctgaaagcgcttatgttgatccgtgccggtcgtctggaagtggatgc

SEQ ID NO: 503671 - DNA, 75 bp, synthetic construct
  source 1..75: mol_type = other DNA
ctggcggcacaggttggcgttgagctgaaaggcggcgacgccatcaccctaagcaacggcgcaacgttctacttt

SEQ ID NO: 503672 - DNA, 75 bp, synthetic construct
  source 1..75: mol_type = other DNA
catatgcggcccgccccatggctgatcgtcccgtctggattggctatgacccgaacggcgccagcggcaaggggg

SEQ ID NO: 503673 - DNA, 75 bp, synthetic construct
  source 1..75: mol_type = other DNA
ggtggactggtacggtctggcaagagccgcccggcaaacgtcctggcatcagtctgcgctttactttaagcgcaa

SEQ ID NO: 503674 - DNA, 75 bp, synthetic construct
  source 1..75: mol_type = other DNA
gttactttttctcgtcgggattcagctacgcaacaatggcatgaccttaaaacaaattatccttaatcgccgcgg

SEQ ID NO: 503675 - DNA, 75 bp, synthetic construct
  source 1..75: mol_type = other DNA
tcagcggacaggcgggctggagatggttccagcggcgattgttcacggttttattcttagcctgttagtgccgat

SEQ ID NO: 503676 - DNA, 75 bp, synthetic construct
  source 1..75: mol_type = other DNA
ccagcgagtaacaccatatcccgatgggggagaactgctgatgttcctttatgggcgatagtcacagcctgcaca

SEQ ID NO: 503677 - DNA, 75 bp, synthetic construct
  source 1..75: mol_type = other DNA
taattctgataggtaatctggggcaggacccggatattcgatatatgccagacggcggcgctgtggccagcattg

SEQ ID NO: 503678 - DNA, 75 bp, synthetic construct
  source 1..75: mol_type = other DNA
cgttccgtggttactcctgtgatactgcaaccaaactctcactgcgttgcatgtttgtacgtcagggtggagcag

SEQ ID NO: 503679 - DNA, 75 bp, synthetic construct
  source 1..75: mol_type = other DNA
aattatcagtaaaatcttaccgtattgtttcatatagtggtgaaccagatccaaaatttgtaacagaagttgaaa

SEQ ID NO: 503680 - DNA, 75 bp, synthetic construct
  source 1..75: mol_type = other DNA
cgactggccggttatgaggggcaaggtgcgacagctaacagcaacgccagtcgtatgcttagaaatgccagggtt

SEQ ID NO: 503681 - DNA, 75 bp, synthetic construct
  source 1..75: mol_type = other DNA
ataagcggctacaggaactggaaattgaacggcgcagaatggaaaaccagaagctgcgcaaagagatcgaaacgg

SEQ ID NO: 503682 - DNA, 75 bp, synthetic construct
  source 1..75: mol_type = other DNA
ggcgcaggcctccagagatggcaaacccgagccggaatatggtggccttggctttgttgataacgccatacccaa

SEQ ID NO: 503683 - DNA, 75 bp, synthetic construct
  source 1..75: mol_type = other DNA
aagtgctgcggtgagggaacgggacagctttatatggctgataccactctgcttgatggggatgcgcggcaatta

SEQ ID NO: 503684 - DNA, 75 bp, synthetic construct
  source 1..75: mol_type = other DNA
agattgaaaacctcaagaaaggcgctggtggcgctaataaccaaataattattcacaactctctgccgatgccgg

SEQ ID NO: 503685 - DNA, 75 bp, synthetic construct
  source 1..75: mol_type = other DNA
tgcagcaggagtacattgctgaatacacccgctccggtatatctccggtggcatggtgtgaagcaaggggactga

SEQ ID NO: 503686 - DNA, 75 bp, synthetic construct
  source 1..75: mol_type = other DNA
gaattcggcatctcagagcagcagacgaaatttgcgatgctggttgcacaggggagaaaactcgttgaggcatat

SEQ ID NO: 503687 - DNA, 75 bp, synthetic construct
  source 1..75: mol_type = other DNA
gaaatcgaactggtgttccattcaccggaaacagtcggaagctggcatgcacgctggagtgaccgggtggcagag

SEQ ID NO: 503688 - DNA, 75 bp, synthetic construct
  source 1..75: mol_type = other DNA
tgcgcactgagattgaaaacctcaaaaaaggcgtgggtggtgagaataacgaaataattatccacaactctctgc

SEQ ID NO: 503689 - DNA, 75 bp, synthetic construct
  source 1..75: mol_type = other DNA
cgagccagtcagaccttacgcggcattcatcgtaaaaatacctggcaggcgctcaacctcaaacgctatggtgcc

SEQ ID NO: 503690 - DNA, 75 bp, synthetic construct
  source 1..75: mol_type = other DNA
aatattgccatcgcccagggatttaccgacttcgtgcgcttgctttcaggttacgacgccattattcaggtcggc

SEQ ID NO: 503691 - DNA, 75 bp, synthetic construct
  source 1..75: mol_type = other DNA
gatgaaacgcagcaatatcaccaccgcaaaagttgaacatggcgtcgataccgcgtggctggtcgatcaccacac

SEQ ID NO: 503692 - DNA, 75 bp, synthetic construct
  source 1..75: mol_type = other DNA
tacattgctaattgtgtggtgttagcactatccactattgtttttgggtatctattttatctacttcacagttaa

SEQ ID NO: 503693 - DNA, 75 bp, synthetic construct
  source 1..75: mol_type = other DNA
atgaaattacttattctgggcaaccacacttgcggcaaccgcggcgacagcgccatcttgcgcggcttacttgat

SEQ ID NO: 503694 - DNA, 75 bp, synthetic construct
  source 1..75: mol_type = other DNA
agattgtcgcgctgcaaaaaggcgacacccagaacacccacgcggcatggacgaaatacaaccttgccgccagaa

SEQ ID NO: 503695 - DNA, 75 bp, synthetic construct
  source 1..75: mol_type = other DNA
gacagctagggcgctggccgagtttgtttatggggatgagaataaactcatcacgattaatatgacggaatttca

SEQ ID NO: 503696 - DNA, 75 bp, synthetic construct
  source 1..75: mol_type = other DNA
aattgattataaagataagaaaacaacaaaaaaaataagaatgtcagtaaggaaaaacaatattacattacgtga

SEQ ID NO: 503697 - DNA, 75 bp, synthetic construct
  source 1..75: mol_type = other DNA
atgatatttcatcaaagaatatgtacagaaaagaactggaaagtgcatataagaaagacggccctatggtttttg

SEQ ID NO: 503698 - DNA, 75 bp, synthetic construct
  source 1..75: mol_type = other DNA
cttcaccgccagctatgccgttcaacactggctggacgttgccgcacaacagaaaacggtggcaattaccctgcg

SEQ ID NO: 503699 - DNA, 75 bp, synthetic construct
  source 1..75: mol_type = other DNA
tagcaaagaggatgttcgaactcaggatgataaagatacgataggcattcttcgcgctacaaatgtgacgggaaa

SEQ ID NO: 503700 - DNA, 75 bp, synthetic construct
  source 1..75: mol_type = other DNA
tcatgggaagagctaacttaattccgttcactccgttgcataccaaaacactcagggatatcgcaatcatcaaaa

SEQ ID NO: 503701 - DNA, 75 bp, synthetic construct
  source 1..75: mol_type = other DNA
cgcgtgggtggaagaagtcccgccgccgactgaccagccggaggaaattatcgaagaactgggcgaaattgaaaa

SEQ ID NO: 503702 - DNA, 75 bp, synthetic construct
  source 1..75: mol_type = other DNA
tgctgatcagcgccgatgtgattcgggggcgcaaactgaccgccgttaaaccgattgtgattgatgttaaaaacg

SEQ ID NO: 503703 - DNA, 75 bp, synthetic construct
  source 1..75: mol_type = other DNA
gacaataaatttgaaagaaaagttaataaaaagtaatgaattagccaatgaatcatttaattcattatctcaaaa

SEQ ID NO: 503704 - DNA, 75 bp, synthetic construct
  source 1..75: mol_type = other DNA
aatctcaaaacttgaacctccttatactactcttggggcatttccgggagcaagaagccattatattaaagagtt

SEQ ID NO: 503705 - DNA, 75 bp, synthetic construct
  source 1..75: mol_type = other DNA
attcagaatacaggtatttaaaaagggagaagaaaagccgttcctcgacacagtaatggaactgaaggataaacc

SEQ ID NO: 503706 - DNA, 75 bp, synthetic construct
  source 1..75: mol_type = other DNA
accgtaagcctgatgatgagcccgttgagcgtcctgatgaggggcaaccattgaaccctttttcaccggatgata

SEQ ID NO: 503707 - DNA, 75 bp, synthetic construct
  source 1..75: mol_type = other DNA
ttcgccatctgtcacggtccgcagctgctgatcagcgccgatgtgattcgggggcgcaaactgaccgcggttaaa

SEQ ID NO: 503708 - DNA, 75 bp, synthetic construct
  source 1..75: mol_type = other DNA
tggatattcagcaggagattctggccagaaatattggtgacgggcatcgtgtcattcatggtgtggccggctccg

SEQ ID NO: 503709 - DNA, 75 bp, synthetic construct
  source 1..75: mol_type = other DNA
attacccgtcagcaactgaaggcactgacagggaatgatgagaatgcggtggaaaagatttttccttcagcacag

SEQ ID NO: 503710 - DNA, 75 bp, synthetic construct
  source 1..75: mol_type = other DNA
taacgttattcgcccgatgttaattcgcatgggagcagatttaccgctcatcctcatcctctccggggtcatcgg

SEQ ID NO: 503711 - DNA, 75 bp, synthetic construct
  source 1..75: mol_type = other DNA
tgggaatccaggctcaaggacgtacttctgtcctgccagtcaattatcgtaatccgaaatgcattctgcactttg

SEQ ID NO: 503712 - DNA, 75 bp, synthetic construct
  source 1..75: mol_type = other DNA
acaatctgccaggatgaaatgacgcagtctgttttacctgaggtattccggcaaaaaattgccgggatgtttacc

SEQ ID NO: 503713 - DNA, 75 bp, synthetic construct
  source 1..75: mol_type = other DNA
taagctggattggttatggtgccctgatcaccgccgttccgctgattactgttggcattctggcgcggatgttag

SEQ ID NO: 503714 - DNA, 75 bp, synthetic construct
  source 1..75: mol_type = other DNA
aagcattatattgcgatatagatgaggcagagaagatcctcatatctttttccggtaaaaaagaatattctactt

SEQ ID NO: 503715 - DNA, 75 bp, synthetic construct
  source 1..75: mol_type = other DNA
aagcgcatggtggagcttccagcatcatgacggcgagcaatgggatggatgggtgttagctggcatcgacacccc

SEQ ID NO: 503716 - DNA, 75 bp, synthetic construct
  source 1..75: mol_type = other DNA
ttttgtggttacgcctcctttatttatgttaccaacgcgaaaagaagcctcattgaggataatgtttattggtaa

SEQ ID NO: 503717 - DNA, 75 bp, synthetic construct
  source 1..75: mol_type = other DNA
gttttgcaaatagaaacatcaaaccttcgctgaagactcaatatgccataagggtcggtgctctatttttactgt

SEQ ID NO: 503718 - DNA, 75 bp, synthetic construct
  source 1..75: mol_type = other DNA
ttgcggtttaagtatgagggcaaacaactaaaagttatcaatccttcgccttattacctgacactgacaggaatt

SEQ ID NO: 503719 - DNA, 75 bp, synthetic construct
  source 1..75: mol_type = other DNA
caattccgccaacagatgagaaaaatacacagaagaataccttacagttggcattacaaaacaaaatcaagctat

SEQ ID NO: 503720 - DNA, 75 bp, synthetic construct
  source 1..75: mol_type = other DNA
ctaaaggcacggaaattgagtttggcaaggaatgggacggccacacggcagatgatgtgttaaatcgtctgctaa

SEQ ID NO: 503721 - DNA, 75 bp, synthetic construct
  source 1..75: mol_type = other DNA
atgaacaactttaatctgcacaccccaacccgtattctgtttggtaaaggcgctatcgctggtttacgcgaacaa

SEQ ID NO: 503722 - DNA, 75 bp, synthetic construct
  source 1..75: mol_type = other DNA
tggcggcggttctgtactggacggcaccaaatttatcgccgctgctgccaactacccggaaaacatcgatccgtg

SEQ ID NO: 503723 - DNA, 75 bp, synthetic construct
  source 1..75: mol_type = other DNA
gaagatggtccgaaagccctgaaagagccagaaaactacgatgtgcgcgccaacgtcatgtgggcggcgactcag

SEQ ID NO: 503724 - DNA, 75 bp, synthetic construct
  source 1..75: mol_type = other DNA
acctaatcctcttgcgctgctagcgatatttttatttagaccacggagaggatgcaaaattatcgttcattggca

SEQ ID NO: 503725 - DNA, 75 bp, synthetic construct
  source 1..75: mol_type = other DNA
gcttcctccggattacattgttcttattggtggaacaggcccactaattgacacattaaagcaaaaggttgctaa

SEQ ID NO: 503726 - DNA, 75 bp, synthetic construct
  source 1..75: mol_type = other DNA
ggaattaggatcatatgagtacgaagaacagccagaagaagatgatgaagattctgaaccagagtctgaaatcaa

SEQ ID NO: 503727 - DNA, 75 bp, synthetic construct
  source 1..75: mol_type = other DNA
gaaacggctgatgcattccgtatccgtgtgcgtgaggcatttcgccgtcgtgttgcggagactgaacaacatggc

SEQ ID NO: 503728 - DNA, 75 bp, synthetic construct
  source 1..75: mol_type = other DNA
tgcggtggcagagcgcgttcatagcgctaaaaccagtcagcaacaggcggcgcgcccacaggagaacgatccggc

SEQ ID NO: 503729 - DNA, 75 bp, synthetic construct
  source 1..75: mol_type = other DNA
cgcgtgaccgcgcgcccgcaggtcgagcgtaaaacggaaaaagtagcagacagcgagccggttattgcgagggcc

SEQ ID NO: 503730 - DNA, 75 bp, synthetic construct
  source 1..75: mol_type = other DNA
ggaatttttttttcagatatttgattttgggattatagaggattctgaaggtaagatgatctctttcagagattg

SEQ ID NO: 503731 - DNA, 75 bp, synthetic construct
  source 1..75: mol_type = other DNA
ttaataagttaactccagaaagccgaagcaccctggattctgctattaactacgcaatctcgagatcacaccatg

SEQ ID NO: 503732 - DNA, 75 bp, synthetic construct
  source 1..75: mol_type = other DNA
agaacaatccaatactgaccggtgaaccgggagttgggaaaagtagtatagtagaaggcttagcattgcaaattg

SEQ ID NO: 503733 - DNA, 75 bp, synthetic construct
  source 1..75: mol_type = other DNA
gactctactggagaaaacatggatacatgccagtactaaatggcaaatcgatcatatagatatccctgtcttttt

SEQ ID NO: 503734 - DNA, 75 bp, synthetic construct
  source 1..75: mol_type = other DNA
atgaagatagaacttattacgacaaaacagtttattgaacaagccgaatgttatttcaggaactatatggacgga

SEQ ID NO: 503735 - DNA, 75 bp, synthetic construct
  source 1..75: mol_type = other DNA
ttgttcccacgtcttgagccggtgcatgttgacagtgcgatggcctggcaactgctggggtttccggatgtctgg

SEQ ID NO: 503736 - DNA, 75 bp, synthetic construct
  source 1..75: mol_type = other DNA
gttgctggcctttcctgaagtctgggttcgtcatgaagagcttgatggtgtgctcaaaaagcaacaacaggatga

SEQ ID NO: 503737 - DNA, 75 bp, synthetic construct
  source 1..75: mol_type = other DNA
cagaaagacacacctatggtttttgagtgtgtggataaacattgtgttgctgatgttgtatctggttggactgga

SEQ ID NO: 503738 - DNA, 75 bp, synthetic construct
  source 1..75: mol_type = other DNA
aaaaagatggagcattagcccggcgttttcagattataaaagtaactgaaccaaatcaggaagtaacagccggga

SEQ ID NO: 503739 - DNA, 75 bp, synthetic construct
  source 1..75: mol_type = other DNA
cagccgtattttctgagtctatgcaactcctactagaaaaaacatggttacatgctagcactaaatgggcatgca

SEQ ID NO: 503740 - DNA, 75 bp, synthetic construct
  source 1..75: mol_type = other DNA
cgattgagatgtacaaaccaactgtgcgcatcgtggaagttaatgtgccccgcgccgctggcattcgcatcaaag

SEQ ID NO: 503741 - DNA, 75 bp, synthetic construct
  source 1..75: mol_type = other DNA
gcgctacgcgataagcaggcgttacttgaagcctcagaaaagcgcatagcagaactggaagcacgggaaataaaa

SEQ ID NO: 503742 - DNA, 75 bp, synthetic construct
  source 1..75: mol_type = other DNA
acatcaaaagccgcgatcaggagaacgaggatattgcgctaacggtagggaagctgcgtgttgagctggaagcag

SEQ ID NO: 503743 - DNA, 75 bp, synthetic construct
  source 1..75: mol_type = other DNA
ccggttcagtggactaatggcgatgcggaaaagcgcatgacaggagctgactggctgacagcgattgagatgtac

SEQ ID NO: 503744 - DNA, 75 bp, synthetic construct
  source 1..75: mol_type = other DNA
acaaaccaactgtgcgcatcgtggaagttaatgtgccacgcgtcgccccgggcgtgcgccttacgaatttggtga

SEQ ID NO: 503745 - DNA, 75 bp, synthetic construct
  source 1..75: mol_type = other DNA
gtgaaaaggcagagaaagcaacgtgtggtgagtggtcgctcgaatatggagagggacgatttgatggtgatgatg

SEQ ID NO: 503746 - DNA, 75 bp, synthetic construct
  source 1..75: mol_type = other DNA
ttgttatttccaccagcaggcggaggattatcaaatcaatatgtcccgcattggttttgctggtgattccgcagg

SEQ ID NO: 503747 - DNA, 75 bp, synthetic construct
  source 1..75: mol_type = other DNA
gatacccacgatcgcattatgcgtctgctggcaaagtacacccagtgtacggtgattggcattgattacaccctt

SEQ ID NO: 503748 - DNA, 75 bp, synthetic construct
  source 1..75: mol_type = other DNA
gcaacaggatttgctgatgtatgaagaggcctatttaggtaacaaagcagaccgcgagtcgccatattactgcct

SEQ ID NO: 503749 - DNA, 75 bp, synthetic construct
  source 1..75: mol_type = other DNA
aaactcaacgagcagcgcgagtattacgagggagttatctctgatgagtgcaagcgtattgctgaactggaagcg

SEQ ID NO: 503750 - DNA, 75 bp, synthetic construct
  source 1..75: mol_type = other DNA
aaactcaacgagcagcgtgaatattacgaaggcgttatctctgatgggagcaagcgtattgctgaactggaggag

SEQ ID NO: 503751 - DNA, 75 bp, synthetic construct
  source 1..75: mol_type = other DNA
attgcagaatgtcacgttaactgcctgattgaaacagatgctcaggcttatgcaaacgcagaattcatagcagag

SEQ ID NO: 503752 - DNA, 75 bp, synthetic construct
  source 1..75: mol_type = other DNA
ggattcgacgaacagaaaaacgcagagaacaacgctcgttatatcgcagctttcaaccctgaagtagtgctggca

SEQ ID NO: 503753 - DNA, 75 bp, synthetic construct
  source 1..75: mol_type = other DNA
aaggcttcgttctgcgtgctggtaaagtgattatcatcgtcagcattttcctgagcgccttcaacagcttctcgc

SEQ ID NO: 503754 - DNA, 75 bp, synthetic construct
  source 1..75: mol_type = other DNA
gcacctattctctgaccaccatctcatcgcagacctcgctcgatgagcaaatcgcctgtcactacattttgagtg

SEQ ID NO: 503755 - DNA, 75 bp, synthetic construct
  source 1..75: mol_type = other DNA
tgttgagctggaaggcaaagacaagctgattgcagagcttggaaaacaatgcgccgaatgggagcgaaatgcatt

SEQ ID NO: 503756 - DNA, 75 bp, synthetic construct
  source 1..75: mol_type = other DNA
gcagagcctgaaagacaccttcagccttagcgtactgatgaaccccattgaagctagcaaaggcgacggcgaaat

SEQ ID NO: 503757 - DNA, 75 bp, synthetic construct
  source 1..75: mol_type = other DNA
tgtatctcggtgatgggggctatcgcccgtgaatcaagccgtggctggatgggcttctccatcctgtgggggctg

SEQ ID NO: 503758 - DNA, 75 bp, synthetic construct
  source 1..75: mol_type = other DNA
gatgtcgaactgctggcaacgcgcaaatcggtaagcagttgctgtgcggccagcaccactggcgattgccactaa

SEQ ID NO: 503759 - DNA, 75 bp, synthetic construct
  source 1..75: mol_type = other DNA
ttaccgattacgcactgcaagctgccggaactgtagacgaattggttgcagcgctggaatccacagagaagcgca

SEQ ID NO: 503760 - DNA, 75 bp, synthetic construct
  source 1..75: mol_type = other DNA
tggagtaactggttcggcttttctgatgctgtcgatgccgtggttgacagaattgctgatttagaagctaaacag

SEQ ID NO: 503761 - DNA, 75 bp, synthetic construct
  source 1..75: mol_type = other DNA
acgccgcgcatcagcttatcgccaatggcgttaaagccgtcgccgaaggggcaaatatgccgaccaccatcgaag

SEQ ID NO: 503762 - DNA, 75 bp, synthetic construct
  source 1..75: mol_type = other DNA
gcagatgagcgacatgtcatgatacctaaagaaaatggcagttggctttacctgattgacctggaacacgcatta

SEQ ID NO: 503763 - DNA, 75 bp, synthetic construct
  source 1..75: mol_type = other DNA
agccgtggtctgtgccggtggatatcgccctgccatgcgcgacccagaacgaactggatgtagatgccgcgcacc

SEQ ID NO: 503764 - DNA, 75 bp, synthetic construct
  source 1..75: mol_type = other DNA
aggctattggtgtaccggttaagtggactaatggcgatgcagaaaagcgcatgactggcgctgactggctgacag

SEQ ID NO: 503765 - DNA, 75 bp, synthetic construct
  source 1..75: mol_type = other DNA
tggaatgcgggcgctccagaaatggcaaccagagcttacagggttccaacaaaatatgggcaggtgaaaacacgt

SEQ ID NO: 503766 - DNA, 75 bp, synthetic construct
  source 1..75: mol_type = other DNA
tgcgatttttcatgccgtccctgaccgcagaagaactgcacggcaaccgtcttcagtggctgtatgccatcgatg

SEQ ID NO: 503767 - DNA, 75 bp, synthetic construct
  source 1..75: mol_type = other DNA
ggcaagaagacatactcgcgacgtaaggatgtggtgcatttactgacgtaccagagcagcaaggggctggagttc

SEQ ID NO: 503768 - DNA, 75 bp, synthetic construct
  source 1..75: mol_type = other DNA
tggtggatgaggggcatgattttgacagtcgctggctggctctaattgcccgtctatttgataattcatcccgtt

SEQ ID NO: 503769 - DNA, 75 bp, synthetic construct
  source 1..75: mol_type = other DNA
tgaagacgttatcaaatggaccggctttgatggacagaaaaacgcagagaacaacgcccattatatcgcagcttt

SEQ ID NO: 503770 - DNA, 75 bp, synthetic construct
  source 1..75: mol_type = other DNA
ggccaaccaaaaacggatggaggggaaaacacaacgacgggaacgcaatcaccgcctgtttcttgcggcggggtt

SEQ ID NO: 503771 - DNA, 75 bp, synthetic construct
  source 1..75: mol_type = other DNA
acaaaaacaggcgagctatgctataaaaaagacgggatattacaggcacttaaggaaattaagtacgatctggag

SEQ ID NO: 503772 - DNA, 75 bp, synthetic construct
  source 1..75: mol_type = other DNA
tgctcctgatgtacgatgatgcccagtccatttatcggcgggagcgggctctgaacttttctctggccagtgtgg

SEQ ID NO: 503773 - DNA, 75 bp, synthetic construct
  source 1..75: mol_type = other DNA
gttcaggatctgcgtgataaaactgtcattatccactttcccatcggcactttggaggagctccttggttggttt

SEQ ID NO: 503774 - DNA, 75 bp, synthetic construct
  source 1..75: mol_type = other DNA
tgttttaatatcatttccaacaggaacgctgggagatattattgcatggtttcactacgctgaaaaattccgtat

SEQ ID NO: 503775 - DNA, 75 bp, synthetic construct
  source 1..75: mol_type = other DNA
aaatcagaaataaatccgctggtacaggttcgtcgttatgcctgtgatacggttaatgccttacctgcaaacccg

SEQ ID NO: 503776 - DNA, 75 bp, synthetic construct
  source 1..75: mol_type = other DNA
agcggatgagtctgaagtgattccggtgctttatgtggcgttcacccgggcaacccgtgaattactggtgacctg

SEQ ID NO: 503777 - DNA, 75 bp, synthetic construct
  source 1..75: mol_type = other DNA
cgaaccggatatgatgctgtactggtggatgaggggcatgattttgacagtcgctggctggccctgattgcccgt

SEQ ID NO: 503778 - DNA, 75 bp, synthetic construct
  source 1..75: mol_type = other DNA
gtggactaatggcgatgcggaaaagcgcatgacaggagctgactggctgacagcgattgagatgtacaaaccaac

SEQ ID NO: 503779 - DNA, 75 bp, synthetic construct
  source 1..75: mol_type = other DNA
gccagatatcgcgctggcattgttggatgaacgggaaagaaaccagcaatacatcaaacgccgcgaccaggagaa

SEQ ID NO: 503780 - DNA, 75 bp, synthetic construct
  source 1..75: mol_type = other DNA
tgcctatccgcgcgtacagtcgatgcctgaaattaacgatgccgacaaaaccgttaaattacgtgtgaacgttga

SEQ ID NO: 503781 - DNA, 75 bp, synthetic construct
  source 1..75: mol_type = other DNA
cgaaatgcgtcagatggaaggtgcatggctggggagcgatctggtcgatcagggtaaggagcgtctgaatcgtct

SEQ ID NO: 503782 - DNA, 75 bp, synthetic construct
  source 1..75: mol_type = other DNA
ccgccctgttttattgccggggcggagttcgatccgctgctggatgacagccgtctgctttaccagacgttagcg

SEQ ID NO: 503783 - DNA, 75 bp, synthetic construct
  source 1..75: mol_type = other DNA
gtcatgatacctaaagaaaatggcagttggctttacctgattgacctagaacacgcattacgcgtcgctgacatt

SEQ ID NO: 503784 - DNA, 75 bp, synthetic construct
  source 1..75: mol_type = other DNA
cagagaataacctcattgatagtgaatgccatgttgctgaactggaagaagcgctacgcgataagcaggcgttac

SEQ ID NO: 503785 - DNA, 75 bp, synthetic construct
  source 1..75: mol_type = other DNA
tcaggacggcgcgaaagacctgtgtaaatcggatgatgctgtaggcggtaacgccatggcggttgccagcctcga

SEQ ID NO: 503786 - DNA, 75 bp, synthetic construct
  source 1..75: mol_type = other DNA
gctggggttatggtgatggtttaggcggcaaagagatgccgttctacgagaacttctatgccggtggttccagca

SEQ ID NO: 503787 - DNA, 75 bp, synthetic construct
  source 1..75: mol_type = other DNA
cggatcaggttgatgtggtctacaaggtcaaagaacgtaacaccggtagcttcaacttcggtattggttacggta

SEQ ID NO: 503788 - DNA, 75 bp, synthetic construct
  source 1..75: mol_type = other DNA
atggtacggacgtgacgctgggcttcccgattaacgaatataactctctgcgcgcaggtctgggttatgtacata

SEQ ID NO: 503789 - DNA, 75 bp, synthetic construct
  source 1..75: mol_type = other DNA
tggatgtccccattggggccgttggtgttctcctacgcccagccgttcaaaaagtacgatggagacaaggcagaa

SEQ ID NO: 503790 - DNA, 75 bp, synthetic construct
  source 1..75: mol_type = other DNA
aattggtccgaaagcagtttacttcccgcatcaggccagtaattatgatccggactatgattacgaatgtgcgac

SEQ ID NO: 503791 - DNA, 75 bp, synthetic construct
  source 1..75: mol_type = other DNA
taaaagcaacgacaaactgcgaccactgggtatccccgcgttgcgggatcgtattgttcagcgggccatgctgat

SEQ ID NO: 503792 - DNA, 75 bp, synthetic construct
  source 1..75: mol_type = other DNA
ggatgcgcagaaaggggctttcgctaaggaagacggtgaaaaggtcgttgatgaagcaggaaaacggctgaaata

SEQ ID NO: 503793 - DNA, 75 bp, synthetic construct
  source 1..75: mol_type = other DNA
ttaccgaaagtgaagtggcggtggcggggaacagtaaattccgcttcgtgggggctgatgccttctcgccagatg

SEQ ID NO: 503794 - DNA, 75 bp, synthetic construct
  source 1..75: mol_type = other DNA
ttaccgaaagtgaagtggcggtggctgggaacagtaaattccgcttcgtgggggctgatgccttctcgccagagg

SEQ ID NO: 503795 - DNA, 75 bp, synthetic construct
  source 1..75: mol_type = other DNA
aaaccgccagagtggtgtttaatgaattaagcgtcaccgaaccggcgactgtcggggagattgcacagaatactt

SEQ ID NO: 503796 - DNA, 75 bp, synthetic construct
  source 1..75: mol_type = other DNA
atatgtggcgtttgtcctgatgggggagtcattcttgcgctcaccggcatttagcgtgccggagtccgcccagcg

SEQ ID NO: 503797 - DNA, 75 bp, synthetic construct
  source 1..75: mol_type = other DNA
tttcacgcgaacgctgtcagttaatactgacccagctggttatggcggggctggtagattaccagttcggctgtt

SEQ ID NO: 503798 - DNA, 75 bp, synthetic construct
  source 1..75: mol_type = other DNA
taatcgcccggtggtagtgacaccgctcggcacgaagctgtgccgtccctccgaagtggttctggacatactgcc

SEQ ID NO: 503799 - DNA, 75 bp, synthetic construct
  source 1..75: mol_type = other DNA
atgctaaaacagcaggatatgacagaaaccgccagagtggtgtttaatgaattaagcgtcacctacccggcgaca

SEQ ID NO: 503800 - DNA, 75 bp, synthetic construct
  source 1..75: mol_type = other DNA
gtcggggagatggcgcagagtacttacctttcacgcgaacgctgccagttaatactgacccagctcgttatgtcg

SEQ ID NO: 503801 - DNA, 75 bp, synthetic construct
  source 1..75: mol_type = other DNA
taaccgaaagtgaagtggcggtggcggggaacagtaaattccgcttcgtgggggctgatgccttctcgccagagg

SEQ ID NO: 503802 - DNA, 75 bp, synthetic construct
  source 1..75: mol_type = other DNA
ctctccccgactatgtcgcagactaaaggtaaggtggaacggatggtgcagtacacccgtaacagtttttacatc

SEQ ID NO: 503803 - DNA, 75 bp, synthetic construct
  source 1..75: mol_type = other DNA
cgtaaccgcggtctgcactctgcattcactgttcgtaaaatttccaacggcgaaggcgttgagcgtgtcttccag

SEQ ID NO: 503804 - DNA, 75 bp, synthetic construct
  source 1..75: mol_type = other DNA
ctggcagaccttgcgcctgtcatcctcgatgcgctggcagaagaccgcatcaccacagagcactgtcaggcgctg

SEQ ID NO: 503805 - DNA, 75 bp, synthetic construct
  source 1..75: mol_type = other DNA
atgctatgtttgtctcgttttctggggattcctcagcccttcagggcacagactaaaggtaaggtggaacggatg

SEQ ID NO: 503806 - DNA, 75 bp, synthetic construct
  source 1..75: mol_type = other DNA
tgaccgaaagtgaagtggcggtggcagggaacagtaaattccgcttcgtgggggctgatgccttctcgccagagg

SEQ ID NO: 503807 - DNA, 75 bp, synthetic construct
  source 1..75: mol_type = other DNA
atctgtgcttggggcctgtcagaaactccaggaggctgttggcttaccgaatctggctccgcgctatgccattga

SEQ ID NO: 503808 - DNA, 75 bp, synthetic construct
  source 1..75: mol_type = other DNA
cgatcgcatctttgattttggtaaaaattccgtagtaccgaccggatttggctggttaggcaataaagggcaaat

SEQ ID NO: 503809 - DNA, 75 bp, synthetic construct
  source 1..75: mol_type = other DNA
gaagatgccaaaggtctgttcaacgccaccgtgcgcgatgcctgggcgcccgatggtgccgacgggattgtttat

SEQ ID NO: 503810 - DNA, 75 bp, synthetic construct
  source 1..75: mol_type = other DNA
gttgttgatgagattcaacaactgggggggcaggcatttgcgtggcgctgtgatattacgtccgaacaggaatta

SEQ ID NO: 503811 - DNA, 75 bp, synthetic construct
  source 1..75: mol_type = other DNA
aaggttgcatgttcggcaagaacatcaccagtcccgcaaatccgcgcgagacgcagccgcatttcttcgaatccc

SEQ ID NO: 503812 - DNA, 75 bp, synthetic construct
  source 1..75: mol_type = other DNA
aaaaaattctggtcgctgacagcgaaaggctgcatgttcggcaagaacatcaccagtcccgcaaatccgcgcgag

SEQ ID NO: 503813 - DNA, 75 bp, synthetic construct
  source 1..75: mol_type = other DNA
ccggcagttgcggcggggctgctgggtattaaagcgaaaaagctgactaaaaaaaaacgacatatcaggctgcac

SEQ ID NO: 503814 - DNA, 75 bp, synthetic construct
  source 1..75: mol_type = other DNA
atggctggatcgtgcgattcgcgtggcttccgtcattattcacgacgtcgccagaaataatcattaccgcgtcaa

SEQ ID NO: 503815 - DNA, 75 bp, synthetic construct
  source 1..75: mol_type = other DNA
cacgcggtggaagctttcttgattgtttatgacgtcactcacgacaaaaaatggctggatcgcgcgattcgcgtg

SEQ ID NO: 503816 - DNA, 75 bp, synthetic construct
  source 1..75: mol_type = other DNA
cggattacaacaaagataacccggcgcaccgcttccgcgcattcggaggcacgccgggccactggatcgagtggg

SEQ ID NO: 503817 - DNA, 75 bp, synthetic construct
  source 1..75: mol_type = other DNA
caaagaagagatgggtacccatctgtggatcaccgcccgtatgctgcacgtttattccgttgctgcggcgatggg

SEQ ID NO: 503818 - DNA, 75 bp, synthetic construct
  source 1..75: mol_type = other DNA
gaagatgccaaaggcctgttcaatgccaccatccgcgacgcctgggcgcccgatggcgcagacggaattgtttat

SEQ ID NO: 503819 - DNA, 75 bp, synthetic construct
  source 1..75: mol_type = other DNA
ggttaacaacgccggtggcggtggacctaaaccgtttgatatgccaatggcagattttcgccgtgcttatgaact

SEQ ID NO: 503820 - DNA, 75 bp, synthetic construct
  source 1..75: mol_type = other DNA
atgctgaaacagcaggatatgacagaaaccgccagagtggtgtttaatgaattaagcgttaccgaaccggcgaca

SEQ ID NO: 503821 - DNA, 75 bp, synthetic construct
  source 1..75: mol_type = other DNA
atgccccgaaagtggtgcggtatattaaacgcgctggtggttattaataccggtctttcagcttgctggcttttt

SEQ ID NO: 503822 - DNA, 75 bp, synthetic construct
  source 1..75: mol_type = other DNA
tgaccgaaagtgaagtggcggtggctgggaacagtaaattccgcttcgtgggggctgatgccttctcgccagatg

SEQ ID NO: 503823 - DNA, 75 bp, synthetic construct
  source 1..75: mol_type = other DNA
aaaccgccagagtggtgtttaatgaattaagcgttaacgacccggcgacagtcggggagattgcgcagaatactt

SEQ ID NO: 503824 - DNA, 75 bp, synthetic construct
  source 1..75: mol_type = other DNA
acctttcacgcgaacgatgccagttaatactgactcagcttgttatggcgggtctggctgattatcagttcggtt

SEQ ID NO: 503825 - DNA, 75 bp, synthetic construct
  source 1..75: mol_type = other DNA
atgctgaaacagcaggatatgaccgaaaccgccagagtggtgtttaatgaattaagcgtcactgaaccggcgaca

SEQ ID NO: 503826 - DNA, 75 bp, synthetic construct
  source 1..75: mol_type = other DNA
cagtgcggtaatgagatttatagtgcaattaaggacttacaaagcaaagcgcctgataaaaatatcgttattttc

SEQ ID NO: 503827 - DNA, 75 bp, synthetic construct
  source 1..75: mol_type = other DNA
agatattgctaacgcagcgctgttcctttgctcgcctgctgcgagctgggtaagcggacaaattctcaccgtctc

SEQ ID NO: 503828 - DNA, 75 bp, synthetic construct
  source 1..75: mol_type = other DNA
gaccttggcggaaaaaatattcgggttaatggcattgcaccaggtgcaatactgactgatgcccttaaatccgtt

SEQ ID NO: 503829 - DNA, 75 bp, synthetic construct
  source 1..75: mol_type = other DNA
aaacggcaaaggcagttttcaatgaattaagcgataaaccagcaacggctggggagattgcacagaatacccacc

SEQ ID NO: 503830 - DNA, 75 bp, synthetic construct
  source 1..75: mol_type = other DNA
cctgattatctggatggtttagtcatgcatgtggaaaaggcaaagtttatctggatggggaattcgttaaccact

SEQ ID NO: 503831 - DNA, 75 bp, synthetic construct
  source 1..75: mol_type = other DNA
gggctgggtacacatgctgcctggagcagtaatggtttgccgcgtatcgacaataaaacgctggccagattagcg

SEQ ID NO: 503832 - DNA, 75 bp, synthetic construct
  source 1..75: mol_type = other DNA
gaaatagatcaggcgaaagcaagtctgcaaaacgcctcgattgcacttatcaacaactcaatagcgcaaagcaag

SEQ ID NO: 503833 - DNA, 75 bp, synthetic construct
  source 1..75: mol_type = other DNA
atcgtatcctggactgacccggaaaacgggtgggagcagtcaaaagagtatgtagcagatgatgagctaatcgcc

SEQ ID NO: 503834 - DNA, 75 bp, synthetic construct
  source 1..75: mol_type = other DNA
aaacaccgactttgattaatgataacctttatcacaaacagttttatcgtgtgctggatattatttcggaaggtc

SEQ ID NO: 503835 - DNA, 75 bp, synthetic construct
  source 1..75: mol_type = other DNA
gcggaaacgaaagcagaaattgagcgcattgattcagttattgctacagagaaggaggcgaccgcgcagaaactg

SEQ ID NO: 503836 - DNA, 75 bp, synthetic construct
  source 1..75: mol_type = other DNA
ctcgacgcaggcagctacacgcttggtattcgcggtcgtaatgacactggcatgaagggcgcagaaagtattgtg

SEQ ID NO: 503837 - DNA, 75 bp, synthetic construct
  source 1..75: mol_type = other DNA
cgagacgacatcgaaagcattaactgatttcaaaggtgacgttaacgcatcatattcaatcaagattgccactga

SEQ ID NO: 503838 - DNA, 75 bp, synthetic construct
  source 1..75: mol_type = other DNA
ttccgaggcatcgcgttatgggacggacaacgccttaccgtgatgattgatgcgccacaagacccgatcgccacc

SEQ ID NO: 503839 - DNA, 75 bp, synthetic construct
  source 1..75: mol_type = other DNA
acgtggacgcttgttaaagacgtaactataggcccgggtaagatcagcggagaatatcttgaagcgcatattatc

SEQ ID NO: 503840 - DNA, 75 bp, synthetic construct
  source 1..75: mol_type = other DNA
gtactggatattatttcggaaggtcctatttatggacctgtaaatacaaaagcaccattaaatagcgtgatgctt

SEQ ID NO: 503841 - DNA, 75 bp, synthetic construct
  source 1..75: mol_type = other DNA
gatggtaaatttaaaaaacatcagatcaccggagttaacgggaacaaaatcacactggcagcggccccggcatgg

SEQ ID NO: 503842 - DNA, 75 bp, synthetic construct
  source 1..75: mol_type = other DNA
aggtgtatttcaggctacagtgtacccgataagcaagacgacgctaacaactgatacagcgtatgaattctacta

SEQ ID NO: 503843 - DNA, 75 bp, synthetic construct
  source 1..75: mol_type = other DNA
catgaagggtgcagaaagcatagtagatcttgttatcggtgcgccagcctcgccaataggcgttaactgggttcc

SEQ ID NO: 503844 - DNA, 75 bp, synthetic construct
  source 1..75: mol_type = other DNA
aaagcgttaaccgacttcaaaggtaatgttgatgcgacgtactccatcaagctggcaaccgacaacaacggcatg

SEQ ID NO: 503845 - DNA, 75 bp, synthetic construct
  source 1..75: mol_type = other DNA
atcgggacgggaaactgaacaaagcaatcagtcgcggtaatggcctgaaaggcgaggactggacgcagaaagttc

SEQ ID NO: 503846 - DNA, 75 bp, synthetic construct
  source 1..75: mol_type = other DNA
agtttaccgggcgcgggtatcagtggactttcggcggcatgaatacgggccacacttattacgtttatgtgcgca

SEQ ID NO: 503847 - DNA, 75 bp, synthetic construct
  source 1..75: mol_type = other DNA
tgttttccaggcgactgtttacccgatcagcagcaccacgctaacgaccgataccagttacgaattctattatgc

SEQ ID NO: 503848 - DNA, 75 bp, synthetic construct
  source 1..75: mol_type = other DNA
gcatggtggttatcaaggcgtttatcgcggtacggatgctgggcctgcggcaggaaggtatcagtgaagaaacac

SEQ ID NO: 503849 - DNA, 75 bp, synthetic construct
  source 1..75: mol_type = other DNA
gccctggttgggtagttatgtgggatggctggttcagacttcaggatatggttgagggttacctggtgatgaagt

SEQ ID NO: 503850 - DNA, 75 bp, synthetic construct
  source 1..75: mol_type = other DNA
tgggttaagctggaaggaaaaccgcttccgtcacagatgccgacactgaaatgggcctgtctgaaactggcgaaa

SEQ ID NO: 503851 - DNA, 75 bp, synthetic construct
  source 1..75: mol_type = other DNA
aggtgttttccaggcaacagtgtacccgatcagcaaaacaaccctgaccactgatacggcatatgagttctactt

SEQ ID NO: 503852 - DNA, 75 bp, synthetic construct
  source 1..75: mol_type = other DNA
tgacgttaagccttcatcttcaacaacgtggtcactggttaaagatattcacatcggcccgggtaaacaaagcgg

SEQ ID NO: 503853 - DNA, 75 bp, synthetic construct
  source 1..75: mol_type = other DNA
tcacggagcaaatgagcgcccgcgacttgctggacaacattgcaggcatgttccgtggtatcgcgttatgggacg

SEQ ID NO: 503854 - DNA, 75 bp, synthetic construct
  source 1..75: mol_type = other DNA
cgtttactcgttcaagtatcgcccgtgcggaatgttataacgccgtgatcgtatcttggactgacccgaagaacg

SEQ ID NO: 503855 - DNA, 75 bp, synthetic construct
  source 1..75: mol_type = other DNA
gcacctagtgaaagcccgttcgatattcgggttcgtcgtattacacccgatagcactggcgatttattgaacaac

SEQ ID NO: 503856 - DNA, 75 bp, synthetic construct
  source 1..75: mol_type = other DNA
aatgatacacctattacggatactgcgggtcatgtcagtatccccggcgttagtgtcgcctggcgtcctggtaca

SEQ ID NO: 503857 - DNA, 75 bp, synthetic construct
  source 1..75: mol_type = other DNA
gtcgcaaggaaacaaacgcgcagattgatcgtattgacagcgttatcgctgaagagaaaaaggctacagccgaag

SEQ ID NO: 503858 - DNA, 75 bp, synthetic construct
  source 1..75: mol_type = other DNA
tgagagttgggtgcgccagctcaggcgagagcgtcaggggattacgctctctgcaacacccattaccgctgagca

SEQ ID NO: 503859 - DNA, 75 bp, synthetic construct
  source 1..75: mol_type = other DNA
aaacacctgcaactacgtaacaacaatttcggcggcgtggacatggtgatcggcggcaatgtgccgcagggcgcc

SEQ ID NO: 503860 - DNA, 75 bp, synthetic construct
  source 1..75: mol_type = other DNA
ttttcacatgcgcgactggtggcagccgacgaaagcaaacttcttcggacacctgaaaaagccgcagattatcgc

SEQ ID NO: 503861 - DNA, 75 bp, synthetic construct
  source 1..75: mol_type = other DNA
tcacccctgagttcaggctggaatgtgcacagctgattgttgataagggctactcatatcgacaagccagtgagg

SEQ ID NO: 503862 - DNA, 75 bp, synthetic construct
  source 1..75: mol_type = other DNA
cgagagcgccaaggtattgcgccctctgcagcacccattacccctgaacagcaacgtattcgcgagctggaaaag

SEQ ID NO: 503863 - DNA, 75 bp, synthetic construct
  source 1..75: mol_type = other DNA
gctgcagcaccactcacatcagagcagcaacgtattcgtgagctggaaaagcaggtgcgtcgtctggaggaacaa

SEQ ID NO: 503864 - DNA, 75 bp, synthetic construct
  source 1..75: mol_type = other DNA
taaccgtccgatcgtggttacgccgctgggaaccagactgtgccgtccttctgaagtggttctggatatcctaca

SEQ ID NO: 503865 - DNA, 75 bp, synthetic construct
  source 1..75: mol_type = other DNA
atggggattaccgtacgcgcgctgctgcgtaaaaacgtcgagccgtatgaggaactgggccttgcggaagataaa

SEQ ID NO: 503866 - DNA, 75 bp, synthetic construct
  source 1..75: mol_type = other DNA
attatgtggttatccaacctacggcgcggcaaatcttcaaatgctgggacaacgccaagttttccgctgtgattg

SEQ ID NO: 503867 - DNA, 75 bp, synthetic construct
  source 1..75: mol_type = other DNA
gtcgcgcaacatgggaaacacagacgacaacgcgtcgcctgacctttgagattcgcgtgtataacgccgaaggcg

SEQ ID NO: 503868 - DNA, 75 bp, synthetic construct
  source 1..75: mol_type = other DNA
gttgacgacggcgcattatatacgctttctcaatactgcgaccagttggtagatgatggttacggtggccttgag

SEQ ID NO: 503869 - DNA, 75 bp, synthetic construct
  source 1..75: mol_type = other DNA
acataagcaggccgtagtcgataatggcgcaatcttcgagatcaataacgacacgcttaatcacttccgcgtgcc

SEQ ID NO: 503870 - DNA, 75 bp, synthetic construct
  source 1..75: mol_type = other DNA
actacgtcacaaaagacgtaattaattcagaacagtttaaggggatgattagcgacattaaagatcttggcgacc

SEQ ID NO: 503871 - DNA, 75 bp, synthetic construct
  source 1..75: mol_type = other DNA
gttgacgacggcgcattatatacgctttctcaatactgcgaccagttggtaaacgacggttacggcggctttgaa

SEQ ID NO: 503872 - DNA, 75 bp, synthetic construct
  source 1..75: mol_type = other DNA
tgacaaaaacagcgacgaaataaatcagactaaagcaagtctgcaaaacgcctcaatcgcacttatcaacaactc

SEQ ID NO: 503873 - DNA, 75 bp, synthetic construct
  source 1..75: mol_type = other DNA
cgaaaccactggtacgtggagaataagctgtactggcgtctggacgtggtaatgaatgaagacgacagcaaaata

SEQ ID NO: 503874 - DNA, 75 bp, synthetic construct
  source 1..75: mol_type = other DNA
agcacagggcactgttccgtctaattcttctgtagttgcctggaataaacagcagggcggtcagacctggtatgt

SEQ ID NO: 503875 - DNA, 75 bp, synthetic construct
  source 1..75: mol_type = other DNA
ttacgtgaagagctggtgacgctgaccggcgggcaaaaacacgtagcgcaagcggcggagttctgggtgttctgt

SEQ ID NO: 503876 - DNA, 75 bp, synthetic construct
  source 1..75: mol_type = other DNA
aaacaccgactttaattaacgataatctataccataaacaattttatcgtgtacttgatattatttcggaaggtc

SEQ ID NO: 503877 - DNA, 75 bp, synthetic construct
  source 1..75: mol_type = other DNA
atacgccagcagcagaaagcggaaaaattgatacccactcacggcgttttaaccgtaagagtggtggcagcaacg

SEQ ID NO: 503878 - DNA, 75 bp, synthetic construct
  source 1..75: mol_type = other DNA
cgcggttatggaccgcctgaatgacgaactgctcaaacaactgtcagaaaaaacaccgccagtgatcgtggctgt

SEQ ID NO: 503879 - DNA, 75 bp, synthetic construct
  source 1..75: mol_type = other DNA
ccggatttaccgaaacaacggtcgatcaagaacgcatagccatcagggtaatgattggtgatgtggtcggccgct

SEQ ID NO: 503880 - DNA, 75 bp, synthetic construct
  source 1..75: mol_type = other DNA
aacgtgcggaatactgggaagaacgggcgcggtcggcactgcttcacgcgaagtataaagaacgtccggacgttc

SEQ ID NO: 503881 - DNA, 75 bp, synthetic construct
  source 1..75: mol_type = other DNA
cgcagaaatatctgacgatgtggcgggctgaatcgctggatctgaatatggcaaaactcatcagcagtcatgacc

SEQ ID NO: 503882 - DNA, 75 bp, synthetic construct
  source 1..75: mol_type = other DNA
ggcacataatgatgtatccatgcctgcacaacttccctggaaagatccacgtgttcttgtaccgtcttcggtgtg

SEQ ID NO: 503883 - DNA, 75 bp, synthetic construct
  source 1..75: mol_type = other DNA
tttacgtcgtgttatgcaggctttcaatgttggacccggcacagataaacctgtgcagattatcgcgacctctgc

SEQ ID NO: 503884 - DNA, 75 bp, synthetic construct
  source 1..75: mol_type = other DNA
tcagggaaccgtactgatgtcattgacggcaacccagctcttgacccgcacacaagcaatgatgcagcaggttga

SEQ ID NO: 503885 - DNA, 75 bp, synthetic construct
  source 1..75: mol_type = other DNA
gacatattcagtcattaaatcagacaagattaattcatcatgggttaaagttattcatgatttcagacctgaaaa

SEQ ID NO: 503886 - DNA, 75 bp, synthetic construct
  source 1..75: mol_type = other DNA
attaaaataggtgccactgccgtagcatatcgcctttcggaggtgcaggcgtggattcgtggggaatggtactta

SEQ ID NO: 503887 - DNA, 75 bp, synthetic construct
  source 1..75: mol_type = other DNA
atgaaaaaaatggcaattgttgataaaaagggtctggaatacattcctaacattgaccgaatgatccgtgagaaa

SEQ ID NO: 503888 - DNA, 75 bp, synthetic construct
  source 1..75: mol_type = other DNA
agcaatcatgaccatatcagcgcctgtttcccgctggatacgtatccgcgcccggcagaaaaaagccagtatgaa

SEQ ID NO: 503889 - DNA, 75 bp, synthetic construct
  source 1..75: mol_type = other DNA
tgttacctggttttaaaccagaaaatcgtctttacgatgattctgtttttatgcagttgcccactctgaaaaata

SEQ ID NO: 503890 - DNA, 75 bp, synthetic construct
  source 1..75: mol_type = other DNA
aaatcgtacagttctctttcattataaaaacattattactgatcttaaccaagcgcattcatgcagagcgtccct

SEQ ID NO: 503891 - DNA, 75 bp, synthetic construct
  source 1..75: mol_type = other DNA
tttgattttgccctgcgagtaccgcagcaagttgaacggctggcaaacacgcgagcgcgagctgttgccccgggt

SEQ ID NO: 503892 - DNA, 75 bp, synthetic construct
  source 1..75: mol_type = other DNA
ctggcagaagcgacgggcgtttctaaagcgatgttagggcagattgaacgtaatgaatccagcccgacggtcgcg

SEQ ID NO: 503893 - DNA, 75 bp, synthetic construct
  source 1..75: mol_type = other DNA
gtgcaataagcgaatcgacgccccatgagaagggggtaatcgaacatgtcgtcgtcattgatggacaacttgatc

SEQ ID NO: 503894 - DNA, 75 bp, synthetic construct
  source 1..75: mol_type = other DNA
atgtggctactgattttctggctttcatctccctttaatgtctcttccggtgatgcccgtcagcccacactggcg

SEQ ID NO: 503895 - DNA, 75 bp, synthetic construct
  source 1..75: mol_type = other DNA
atgtggatcctgattttctggctctcatccccctttaatgtctcctccggcgatgcccggcaacccacactggct

SEQ ID NO: 503896 - DNA, 75 bp, synthetic construct
  source 1..75: mol_type = other DNA
cgccattaaaaaagagaatgttggcgaattttctctgcggggcgtttgtgtttctgacggaaatacgaaggagga

SEQ ID NO: 503897 - DNA, 75 bp, synthetic construct
  source 1..75: mol_type = other DNA
ctgctggcatggacgctctgcctgaatgtgtttggcagcggagcgtacagtaaaccagcacaaatcagcctggaa

SEQ ID NO: 503898 - DNA, 75 bp, synthetic construct
  source 1..75: mol_type = other DNA
ttatatatcagaatgtaaatattaccgctcatatgtcacctgatgttttgtcaatgtcttatacagataatgaag

SEQ ID NO: 503899 - DNA, 75 bp, synthetic construct
  source 1..75: mol_type = other DNA
ccgggtcattaagctattaatcgcagtctttccggcaatacaacctgagcaggctcactggaaatcgttagttaa

SEQ ID NO: 503900 - DNA, 75 bp, synthetic construct
  source 1..75: mol_type = other DNA
gagatttatgactcctgctcgctggttcttgcggggccgcaggaacagtgggactttgcccaatggccattattt

SEQ ID NO: 503901 - DNA, 75 bp, synthetic construct
  source 1..75: mol_type = other DNA
cgagctggatctgacgctttttgcctttgcttaccgttggcgagcctctcagaatacggactctgcggcagaggg

SEQ ID NO: 503902 - DNA, 75 bp, synthetic construct
  source 1..75: mol_type = other DNA
ttgatcgtgtttattcggagaaagacttcagcattaacatcgcaatatttgtctccggaatcgcaggagttacct

SEQ ID NO: 503903 - DNA, 75 bp, synthetic construct
  source 1..75: mol_type = other DNA
ggtataaatcatgggattggttcttcgtttctagaggaggcctttggagggcttgttaggaaggaaggtgtacct

SEQ ID NO: 503904 - DNA, 75 bp, synthetic construct
  source 1..75: mol_type = other DNA
atgacattagcagcaatcaccatgaccgccccggaagctgccagccctgtgcagatgtaccgcgcgacctactca

SEQ ID NO: 503905 - DNA, 75 bp, synthetic construct
  source 1..75: mol_type = other DNA
gcgcagtgggccgccctgccccgggactgtaaggccgtgcgcagtgtggaagaagcagaagaccacggggcatac

SEQ ID NO: 503906 - DNA, 75 bp, synthetic construct
  source 1..75: mol_type = other DNA
ccgggaaatgacaaaggcacagtgggccgccctgccccgggactgtaaagccgtgcgcagtgtggcagaggcaga

SEQ ID NO: 503907 - DNA, 75 bp, synthetic construct
  source 1..75: mol_type = other DNA
ccaccccggaagccgccagccctgtgcagatgtaccgcgcgacctactcaccggatgacaacaaactgcgcctgt

SEQ ID NO: 503908 - DNA, 75 bp, synthetic construct
  source 1..75: mol_type = other DNA
gctgaactgttccacgaccatggagatgggggtggatattggtggtatgagtttggtggcaatgaacaacgttcc

SEQ ID NO: 503909 - DNA, 75 bp, synthetic construct
  source 1..75: mol_type = other DNA
ttacagtccaaagcaagtgtggcgttgcccctatactcgacgtgcgttagacgtcacgttgctgggatactctcc

SEQ ID NO: 503910 - DNA, 75 bp, synthetic construct
  source 1..75: mol_type = other DNA
ggaagcacgggcggagcggtttaccggatacagcggaaagcgggccagtgaatccgcacaggcacttgatgaagt

SEQ ID NO: 503911 - DNA, 75 bp, synthetic construct
  source 1..75: mol_type = other DNA
gccgcagcactgctcgcttccattggcgtgctggcagaatattctcattttgtcccggagtggtcatgctggtgc

SEQ ID NO: 503912 - DNA, 75 bp, synthetic construct
  source 1..75: mol_type = other DNA
ccgttttgatatcagcgtaaaaatccgtgccaccatacaggccgctgttggcattgttatgatggtgttcggcaa

SEQ ID NO: 503913 - DNA, 75 bp, synthetic construct
  source 1..75: mol_type = other DNA
tggataaacctaacttccgcaaacgtcaccagggattgatacctctcgttgggggtatttcggtttacgcaggga

SEQ ID NO: 503914 - DNA, 75 bp, synthetic construct
  source 1..75: mol_type = other DNA
cgcacgaatcactttctctgctgacgttctgcgttctggtgctgcgcaacggcttcaccgtcaccggagagagcg

SEQ ID NO: 503915 - DNA, 75 bp, synthetic construct
  source 1..75: mol_type = other DNA
tccagcgaggccgaagtactgctgtcaaagaaaactggcaatggaaacctgccgttgcttactgtcgctatgccg

SEQ ID NO: 503916 - DNA, 75 bp, synthetic construct
  source 1..75: mol_type = other DNA
agccagaaaagatcggtggtactggaataacagtatccaacggggccgaagtacggcggtcagagaaaactggca

SEQ ID NO: 503917 - DNA, 75 bp, synthetic construct
  source 1..75: mol_type = other DNA
gaattaggcgatacgattcctgtcacaatgcaaaacgaactggtctatgaaatagccggtgaattctgcgagact

SEQ ID NO: 503918 - DNA, 75 bp, synthetic construct
  source 1..75: mol_type = other DNA
tggcgcagcgcatgggtagacacgcatttttgattgacgatgcagcagacatccaggaagagtgggtgaaaggcg

SEQ ID NO: 503919 - DNA, 75 bp, synthetic construct
  source 1..75: mol_type = other DNA
aagcgccgacgcctgccgcaggaaataacaccacgcggattgcgaccactgcgtttgtacaggccgctattaccg

SEQ ID NO: 503920 - DNA, 75 bp, synthetic construct
  source 1..75: mol_type = other DNA
acaatggacaataatttccgcctggtgaatgtgtatatcaccgacatgaaaatcacggaaatcccgcaaaaataa

SEQ ID NO: 503921 - DNA, 75 bp, synthetic construct
  source 1..75: mol_type = other DNA
ctcgggtacagcggcacgatgaaagtgacgcccgatcgcatcacggactacaaagcgccatcggcagaagaggcc

SEQ ID NO: 503922 - DNA, 75 bp, synthetic construct
  source 1..75: mol_type = other DNA
agctgggcggtggtgaagccattccgctggaaggtcgtgaagaaaacattgttttcgaagtgccgaaagagctgc

SEQ ID NO: 503923 - DNA, 75 bp, synthetic construct
  source 1..75: mol_type = other DNA
gctggaaggccgcgaagaaaacatcgttttcgaagtgccgaaagaactgcgtgtggatattcgtgaagtcgagta

SEQ ID NO: 503924 - DNA, 75 bp, synthetic construct
  source 1..75: mol_type = other DNA
actttcttacatttttgatgatctttctggtatcgttagttcttattagtgcaaaaataaagtcgaatggcctgt

SEQ ID NO: 503925 - DNA, 75 bp, synthetic construct
  source 1..75: mol_type = other DNA
actttcatacatttttgatgttatttctggtatcgttagttcttattagtgcaaaaataaagtcgaatggcctgt

SEQ ID NO: 503926 - DNA, 75 bp, synthetic construct
  source 1..75: mol_type = other DNA
tatattgcaaccctttattgcttttatgaaccatcgtgcacatatcgatcgtcggctggctccgattgcgaatat

SEQ ID NO: 503927 - DNA, 75 bp, synthetic construct
  source 1..75: mol_type = other DNA
gctggattccgcttttggagtgagatggttgccgcgcttcgccgtattctgattggtaagggtaacggctggtct

SEQ ID NO: 503928 - DNA, 75 bp, synthetic construct
  source 1..75: mol_type = other DNA
ataaagtgaatatcaacggcggtgcgccacaacgtattacctgggaaggttcgcagaaccaggatgcggatgtca

SEQ ID NO: 503929 - DNA, 75 bp, synthetic construct
  source 1..75: mol_type = other DNA
actttcctacatttttgatgatttttctggtatcgttagttcttattagtgcaaaaataaagtcgaatggcctgt

SEQ ID NO: 503930 - DNA, 75 bp, synthetic construct
  source 1..75: mol_type = other DNA
gatgtggcacgcaggaagaagcgctgtttttcggtattgtttattgactgggaagcccagtaccagtgcactatt

SEQ ID NO: 503931 - DNA, 75 bp, synthetic construct
  source 1..75: mol_type = other DNA
gagctctttatgccaatgaaagcggtgcttattttgccctgcgtaaacgtataaccaaaccaccccatcatacct

SEQ ID NO: 503932 - DNA, 75 bp, synthetic construct
  source 1..75: mol_type = other DNA
cacatttcccattttaccgatatgccatgacttttgaagaatttgttccggcattttcttcctggtttgccggtg

SEQ ID NO: 503933 - DNA, 75 bp, synthetic construct
  source 1..75: mol_type = other DNA
cgaaggcctgtttggtttggcagacagtgaagcgatgaacgatgcgttctgggacgagctgttgaaagtgcgtgg

SEQ ID NO: 503934 - DNA, 75 bp, synthetic construct
  source 1..75: mol_type = other DNA
gcgctgtatcacatcgcggaagcgctggttcgctggatggcaccaatcctctccttcaccgctgatgaagtgtgg

SEQ ID NO: 503935 - DNA, 75 bp, synthetic construct
  source 1..75: mol_type = other DNA
aatcttttactgggtggcgcttcccctgaccacggtaaacggtgtctctcagtttcagccggaatggatatgctg

SEQ ID NO: 503936 - DNA, 75 bp, synthetic construct
  source 1..75: mol_type = other DNA
aactcgtcgctctcgtcataaaacagcgcacagaagctgctcttgagttccaacgttctgttgaacagagtcttg

SEQ ID NO: 503937 - DNA, 75 bp, synthetic construct
  source 1..75: mol_type = other DNA
atgtgtgcccgggtctcaggagcagccagtggagcgctgtatgcaaatgaaagtggtgcttattttgcgcttcgc

SEQ ID NO: 503938 - DNA, 75 bp, synthetic construct
  source 1..75: mol_type = other DNA
gcgtgctgcaatcgcccgcattgagtggatttttgaaacatttccgtcggtatgtctgtctttttcaggtggaaa

SEQ ID NO: 503939 - DNA, 75 bp, synthetic construct
  source 1..75: mol_type = other DNA
atacttggcaacatgattcgtcagtacttcagccaggaacgagcagaagaagagactatacaggccctgaatcac

SEQ ID NO: 503940 - DNA, 75 bp, synthetic construct
  source 1..75: mol_type = other DNA
agtttcagccggagtggatatgctgggagtctggtgtgaagtgggttcgccagccaccggagggggccattacag

SEQ ID NO: 503941 - DNA, 75 bp, synthetic construct
  source 1..75: mol_type = other DNA
gagcggtgcctattttgccctgcgtaagcgtatttcaaaaccagcccatcatacctggcgcagctatgcgatgtt

SEQ ID NO: 503942 - DNA, 75 bp, synthetic construct
  source 1..75: mol_type = other DNA
atgagtaccacaacacgtaaatttaaaaccgttatcaccgatacgggtgccaaaaaattagctcaggcagccgcg

SEQ ID NO: 503943 - DNA, 75 bp, synthetic construct
  source 1..75: mol_type = other DNA
tcatcatcgtgggtaatctgggccaggacccggaagttcgttatatgcccaatggcggcgcggtcgctaatctca

SEQ ID NO: 503944 - DNA, 75 bp, synthetic construct
  source 1..75: mol_type = other DNA
attgatagtgaaacagatgaatttatgaatcgtgatgatgccgctttcttagcagagtttgataaagcggttccc

SEQ ID NO: 503945 - DNA, 75 bp, synthetic construct
  source 1..75: mol_type = other DNA
tgcccacgctgctggcactacacccaggatgtcggcaaggtagcggaacacgcagaaatctgcggccgctgtgtc

SEQ ID NO: 503946 - DNA, 75 bp, synthetic construct
  source 1..75: mol_type = other DNA
ggacgggattgtttataccgttgactgggaaggaaaaccggtggtccgcgaacgtgtgcgttggcctatcgtcga

SEQ ID NO: 503947 - DNA, 75 bp, synthetic construct
  source 1..75: mol_type = other DNA
tggatcaccgcccgtatgcttcacgtctattccgttgctgccgcgatgggccgccctggcgcttattcactggtt

SEQ ID NO: 503948 - DNA, 75 bp, synthetic construct
  source 1..75: mol_type = other DNA
agaagaaaccacatccgacaaaattaaatccggggtcattctgcttgaatcagcagcaaagactctaaatctgtc

SEQ ID NO: 503949 - DNA, 75 bp, synthetic construct
  source 1..75: mol_type = other DNA
cgaagaacgcgtctggcaggcgctggaaaccgtgcaactggcggagctggcgcgtagcatgagtgatggtattta

SEQ ID NO: 503950 - DNA, 75 bp, synthetic construct
  source 1..75: mol_type = other DNA
tacgccagccattaagcgagtttgatacccaacctgtcgggcaggtgatttcccgcgtcactaatgatactgaag

SEQ ID NO: 503951 - DNA, 75 bp, synthetic construct
  source 1..75: mol_type = other DNA
ctgtttgccgctggactgcactacgcacagtcgctgctgtttaatcgggcggcggttggcgtggtacaacagttg

SEQ ID NO: 503952 - DNA, 75 bp, synthetic construct
  source 1..75: mol_type = other DNA
ggtttgactccggatctacccactcttctgttgttgacgtgcgtccggaatttgccggtcacgcagcggacatgt

SEQ ID NO: 503953 - DNA, 75 bp, synthetic construct
  source 1..75: mol_type = other DNA
ccggcactgaacaggcgatccaacatgcactggcagcggtgcgtgaacacacgacgctggttgttatagcccacc

SEQ ID NO: 503954 - DNA, 75 bp, synthetic construct
  source 1..75: mol_type = other DNA
gacaatatggtagcgaaaaataatctgccgctgaaagtggttgccggattggcggcagcgtatgtcgggctgcaa

SEQ ID NO: 503955 - DNA, 75 bp, synthetic construct
  source 1..75: mol_type = other DNA
aagcgcatatcaaaaccggaccatcatacctggcgcagttacgtgatgttcctgctggatgtgatgccggaaaga

SEQ ID NO: 503956 - DNA, 75 bp, synthetic construct
  source 1..75: mol_type = other DNA
ttactgggtggctcttcccctgaccacggtaaacggtgtctctcagtttcagccggagtggatatgctgggagcc

SEQ ID NO: 503957 - DNA, 75 bp, synthetic construct
  source 1..75: mol_type = other DNA
ggctgtggctttatcatgttctggagccggaaacctgggcccgaatgtgctcacgtgtctccggcgcagccagtg

SEQ ID NO: 503958 - DNA, 75 bp, synthetic construct
  source 1..75: mol_type = other DNA
ccattgttttcgttggcgctgtagcagctctgtcactggtgaatgcgcaatctgcactggctgctaatgaatctg

SEQ ID NO: 503959 - DNA, 75 bp, synthetic construct
  source 1..75: mol_type = other DNA
tgaccgaaagtgaagtggcggtggcggggaacagtaaattccgcttcgtgggggctgatgccttctcgccagaag

SEQ ID NO: 503960 - DNA, 75 bp, synthetic construct
  source 1..75: mol_type = other DNA
agaacccgagctatctacaatcccctgtatgacctgatgtaccgtgccggcgtgccgttacgctacatgcgtgtc

SEQ ID NO: 503961 - DNA, 75 bp, synthetic construct
  source 1..75: mol_type = other DNA
gcagtttcagcctgagtggatatgccgggagcccggtgtagagtgggttcgacagccaccggaagatgctattac

SEQ ID NO: 503962 - DNA, 75 bp, synthetic construct
  source 1..75: mol_type = other DNA
gcagcactcaacatgctggcagagcgcaacatccttccggctgactggcctgtccgcgtgaaggttattccgcag

SEQ ID NO: 503963 - DNA, 75 bp, synthetic construct
  source 1..75: mol_type = other DNA
cgctgggtgcctggctggatgtgtgcaccacgcccacagacggatgccactgaacgtaccgataacttggctgat

SEQ ID NO: 503964 - DNA, 75 bp, synthetic construct
  source 1..75: mol_type = other DNA
gcgttacgacgcgctggaaaaccagtgtgaggaatccgacctgctggaagcagaaatgaagctgatgcgctgcat

SEQ ID NO: 503965 - DNA, 75 bp, synthetic construct
  source 1..75: mol_type = other DNA
gcgctgaccagcgatgcaccgtcggggaaggaaggtgccgcattcatggcgctgatggcagaacactctcgtttt

SEQ ID NO: 503966 - DNA, 75 bp, synthetic construct
  source 1..75: mol_type = other DNA
cggtgccgcacgggacgcggagaagatgaagaaaggcgatgcggctgaacatgcagagttccatatgaaagacaa

SEQ ID NO: 503967 - DNA, 75 bp, synthetic construct
  source 1..75: mol_type = other DNA
caccttttactgggtggcgcttcccctgaccacggtaaatggtgtctctcagtttcaaccggagtggatatgctg

SEQ ID NO: 503968 - DNA, 75 bp, synthetic construct
  source 1..75: mol_type = other DNA
gcggtcatggctttcgccccacggggcagcctgttacatgcgcccgatatgtatatgaaaaagctggttgttaat

SEQ ID NO: 503969 - DNA, 75 bp, synthetic construct
  source 1..75: mol_type = other DNA
gtgatcctcgcggcatcgctgctgttgctgttctcaattaacactctgcaaagtagctttggtcggcgtgtggta

SEQ ID NO: 503970 - DNA, 75 bp, synthetic construct
  source 1..75: mol_type = other DNA
atgtttgcagtttcttcaagacgcgtgctgccgggttttactttaagccttggcaccagtctgctgtttgtgtgc

SEQ ID NO: 503971 - DNA, 75 bp, synthetic construct
  source 1..75: mol_type = other DNA
ggtgtccgtgcggatgaatccctcaaccgctttatgggactggtgtctcagcgtaagctcagatatgccgatgat

SEQ ID NO: 503972 - DNA, 75 bp, synthetic construct
  source 1..75: mol_type = other DNA
tcagcccaaacaaaccccgtcactatgaacgctatctgcaaagaatgaaagagaggagaaaggaatgggggatcc

SEQ ID NO: 503973 - DNA, 75 bp, synthetic construct
  source 1..75: mol_type = other DNA
aacgacgtttttccgtgttgtttatcgactgggaagcgcagtatttatgtactgtccgccatgtacaagaaatgc

SEQ ID NO: 503974 - DNA, 75 bp, synthetic construct
  source 1..75: mol_type = other DNA
gaacaggggaaaatgtcttgtcagcagctgttcaccgtattgagtggctgtttgatacattcccttctgtctgtt

SEQ ID NO: 503975 - DNA, 75 bp, synthetic construct
  source 1..75: mol_type = other DNA
ccgaacaaaccccggcactatgaacgttacctgcagcgtatgaaggaaaggaggaaggaatgggggattctgtga

SEQ ID NO: 503976 - DNA, 75 bp, synthetic construct
  source 1..75: mol_type = other DNA
gggccagaagtcgatatcgcggttgacccgattgaaggcacgcggatggtggcgatggggcagagcaatgcgctg

SEQ ID NO: 503977 - DNA, 75 bp, synthetic construct
  source 1..75: mol_type = other DNA
cccggcggcgagcgcgattgcttcggtgatcctcgcggcatccctgttgctgctgttctcaattaacactctgca

SEQ ID NO: 503978 - DNA, 75 bp, synthetic construct
  source 1..75: mol_type = other DNA
attttcctttttaccgttacgccatgacatttgaggagtttgtcccggccttttcatcctggtttgtggcggata

SEQ ID NO: 503979 - DNA, 75 bp, synthetic construct
  source 1..75: mol_type = other DNA
ttactgggtggcccttcccctgactacggtaaacggtgtctctcagtttcagccggaatggatatgctgggaacc

SEQ ID NO: 503980 - DNA, 75 bp, synthetic construct
  source 1..75: mol_type = other DNA
gagaattacttgagttctaccatgctgcatatatcgaactgggacgaaaagtccgtcaatactcaaaatcagagg

SEQ ID NO: 503981 - DNA, 75 bp, synthetic construct
  source 1..75: mol_type = other DNA
gaattctatcatgctgcatatatcgaactgggacggaaaatccgtaaatactcaaaatatgaggtggcacaatga

SEQ ID NO: 503982 - DNA, 75 bp, synthetic construct
  source 1..75: mol_type = other DNA
aatttgtgagcggtacgacgggcaggatcaggaaaaccttaaaatgctgttttgtatgcttgtcgcggcgctgga

SEQ ID NO: 503983 - DNA, 75 bp, synthetic construct
  source 1..75: mol_type = other DNA
acccgaccatcacaacgcttgcacaacttacatcggtagccggattacagttcactctcagtaaatccagccact

SEQ ID NO: 503984 - DNA, 75 bp, synthetic construct
  source 1..75: mol_type = other DNA
gggtgatggtgtttcgctgtcggattttaaggtgacgtttaatatccagaagatgcccgcgactatctttaacgg

SEQ ID NO: 503985 - DNA, 75 bp, synthetic construct
  source 1..75: mol_type = other DNA
cgacatagcaaagttccaaagagggagtacctgggttcttacgcaccaaaagttgagctaattggtaatgccaga

SEQ ID NO: 503986 - DNA, 75 bp, synthetic construct
  source 1..75: mol_type = other DNA
atatagatgatgagtttttctctaattttggaaatttagtaggagtagataattatgaaaaattattatctgctt

SEQ ID NO: 503987 - DNA, 75 bp, synthetic construct
  source 1..75: mol_type = other DNA
tcctaatgaattattaaatactaaaattttaaatttataccatggggtgggattaaaacaaattgaaagaaagtc

SEQ ID NO: 503988 - DNA, 75 bp, synthetic construct
  source 1..75: mol_type = other DNA
ataattatactaaagataacatctggttgtttaatagtgctggtctatttacagggaatgtgaaatatttgtttg

SEQ ID NO: 503989 - DNA, 75 bp, synthetic construct
  source 1..75: mol_type = other DNA
ttgcgtatgcggaatgtctgctggaagccgatattaacccttccatgcatatgttcggtagctgcattgatatcg

SEQ ID NO: 503990 - DNA, 75 bp, synthetic construct
  source 1..75: mol_type = other DNA
ccttcaatatgagcagagaaggcactggcagtaaaaatgttattcagaacgcgcagtcgggcagcgaatatccag

SEQ ID NO: 503991 - DNA, 75 bp, synthetic construct
  source 1..75: mol_type = other DNA
ttggagcattaagggaatttgcaccggcaatcacttcagaatctttagccttattaaaacaaggaaaaccagttg

SEQ ID NO: 503992 - DNA, 75 bp, synthetic construct
  source 1..75: mol_type = other DNA
ttattatccagaaggcaaaaaaacgcctcgattcccaggaagcgccgggctgcaccaaagcaggctggctgatga

SEQ ID NO: 503993 - DNA, 75 bp, synthetic construct
  source 1..75: mol_type = other DNA
aaaaataccagtatgttgataaacaaacaggagaaattaaagaccgaactttgaatataccgcattacttttgtg

SEQ ID NO: 503994 - DNA, 75 bp, synthetic construct
  source 1..75: mol_type = other DNA
aattgttatgaaagtcacgaaacattagctaagatttttaagtcttcagcatcaacaattaaacgtaagataaaa

SEQ ID NO: 503995 - DNA, 75 bp, synthetic construct
  source 1..75: mol_type = other DNA
ctccctctcacagatgcacacattacaccaccggaagacgtgaaattcgctgtaaacgtagaacgggctgcacct

SEQ ID NO: 503996 - DNA, 75 bp, synthetic construct
  source 1..75: mol_type = other DNA
ttcaaagaatatctgtcttgagaaacaggcttttcacgatctgataatatctctaagagaaaaaagtgaaatata

SEQ ID NO: 503997 - DNA, 75 bp, synthetic construct
  source 1..75: mol_type = other DNA
acagagcttccttggggcggtgtcactatttgcaaactgaatggacagccaacagaagcagcccttgagtgggct

SEQ ID NO: 503998 - DNA, 75 bp, synthetic construct
  source 1..75: mol_type = other DNA
gattggtcttatgattaaaatcggtcttttagaagaggtcggagaacgaatcccaaaacgtcctttaaaattacg

SEQ ID NO: 503999 - DNA, 75 bp, synthetic construct
  source 1..75: mol_type = other DNA
tgcacgacctattccgccgtccgttcacccgccgcacgaccctgttcggctggttctcctgcgcggtgcagtcgt

SEQ ID NO: 504000 - DNA, 75 bp, synthetic construct
  source 1..75: mol_type = other DNA
tttcctgctggtggccatagggatatccatttcgtcgtggggcgtctactccagcagtttcgggtttatcacctt

SEQ ID NO: 504001 - DNA, 75 bp, synthetic construct
  source 1..75: mol_type = other DNA
ctgttcgccctgaaagacatttatgagccgagtgcctggctgctcggttttaccgccgcgggtacgcaactgggc

SEQ ID NO: 504002 - DNA, 75 bp, synthetic construct
  source 1..75: mol_type = other DNA
caagtaaagtcgcatcagtcgcagcacaaaccctaaacaaccccaacgcatctgcaattcagaagagccttgctg

SEQ ID NO: 504003 - DNA, 75 bp, synthetic construct
  source 1..75: mol_type = other DNA
ctgaaaatgtggcttctaccgctgcaaaaacgctgactaatccgaacgcttcagctatccagaaaagcctcgctg

SEQ ID NO: 504004 - DNA, 75 bp, synthetic construct
  source 1..75: mol_type = other DNA
cagaagtgggcgggtgacatcacgtactgtgtgcccggagttcagggcgggcatggatgcttaaatgaaccgcga

SEQ ID NO: 504005 - DNA, 75 bp, synthetic construct
  source 1..75: mol_type = other DNA
taccgtgcgtgatatccgtggctttgccaccaagttctataccgaagagggtatttttgaccttgttggcaataa

SEQ ID NO: 504006 - DNA, 75 bp, synthetic construct
  source 1..75: mol_type = other DNA
ccttcagatacgcccgcccctgtggcgcagcgggctgcggcagaactaccgaatcttccagcagcaggacattca

SEQ ID NO: 504007 - DNA, 75 bp, synthetic construct
  source 1..75: mol_type = other DNA
atcacggtggcgaacgaccggcgcataacggtacgtaatgaccagacgctgaaggtgacgaatgaccggacggtg

SEQ ID NO: 504008 - DNA, 75 bp, synthetic construct
  source 1..75: mol_type = other DNA
gagaacggcgtgacggagtggactccgctgttttatgaagaccatccggcgcgggagttctgtgtgcagtacggg

SEQ ID NO: 504009 - DNA, 75 bp, synthetic construct
  source 1..75: mol_type = other DNA
ggcgtatgtccgcccgtcgtcggtacagagccaggattacacgtttaaggtgccggactggccggggatgtatga

SEQ ID NO: 504010 - DNA, 75 bp, synthetic construct
  source 1..75: mol_type = other DNA
gatgaccatccggtcaaaaacctataaaggaagcggatttaacgagctgcggtttgaagacgccaccagtaatgg

SEQ ID NO: 504011 - DNA, 75 bp, synthetic construct
  source 1..75: mol_type = other DNA
acgagcatggccgggtacgggtgaagttccactgggaccgttatcacgggatgacggaggcgagttcatgctggg

SEQ ID NO: 504012 - DNA, 75 bp, synthetic construct
  source 1..75: mol_type = other DNA
gacacatcggcaggagcggagacagagtgtgtcagtatgttccgttatgaggcgcatgtccgcccgtcgtcggtg

SEQ ID NO: 504013 - DNA, 75 bp, synthetic construct
  source 1..75: mol_type = other DNA
atgaacatggccgggtacgggtgaagtttcactgggacgagaggaaatcttctgtgatgaacatggccgggtacg

SEQ ID NO: 504014 - DNA, 75 bp, synthetic construct
  source 1..75: mol_type = other DNA
gcgacgatgtggcgggggtgtcacaggggggggagcttccgtttaacccggacacatcggcaggagcggagacgg

SEQ ID NO: 504015 - DNA, 75 bp, synthetic construct
  source 1..75: mol_type = other DNA
tgtatctagcaaacatgaaattaaagtgaagttgctatttgcgaatgatgattttctctcaatggaaggacacta

SEQ ID NO: 504016 - DNA, 75 bp, synthetic construct
  source 1..75: mol_type = other DNA
gaagacctataaaggaagcggttttaatgagttgcgctttgaggatgcgacggataaggaacaggtctatatcca

SEQ ID NO: 504017 - DNA, 75 bp, synthetic construct
  source 1..75: mol_type = other DNA
cctataaaggaagcggttttaatgagttgcgctttgaggatgcgacggataaggaacaggtctatatccacgcgc

SEQ ID NO: 504018 - DNA, 75 bp, synthetic construct
  source 1..75: mol_type = other DNA
atcctgatttctggattttcggtctgtttttctttctttactttttcatcatggcgacctgttttccgtttttgc

SEQ ID NO: 504019 - DNA, 75 bp, synthetic construct
  source 1..75: mol_type = other DNA
ggtggaggggaagcacagcctggaggtgaaaggcgacctagcgaggaagattagcggtgcgctgggaatgaaggt

SEQ ID NO: 504020 - DNA, 75 bp, synthetic construct
  source 1..75: mol_type = other DNA
ggaggtgctcaacgaccggacaacggatgtgaaacatgaccatacggaaaccatcgggaacgaccagaagataac

SEQ ID NO: 504021 - DNA, 75 bp, synthetic construct
  source 1..75: mol_type = other DNA
tctagcaaacatgaaattaaagtgaagttgttatttgcgaatgatgattttctctcaatggaaggacactatgga

SEQ ID NO: 504022 - DNA, 75 bp, synthetic construct
  source 1..75: mol_type = other DNA
tttgccgaatattattcccatccgcgtctgttctggctaagtcagacgccattcgagcagcaccatattgttgat

SEQ ID NO: 504023 - DNA, 75 bp, synthetic construct
  source 1..75: mol_type = other DNA
taccgatacacaaatcagtcgtcttggtgggccgaatttccatgagattccgattaaccgtccgacctgccctta

SEQ ID NO: 504024 - DNA, 75 bp, synthetic construct
  source 1..75: mol_type = other DNA
aaactcactgcgtgccggtagccgtggtccaacgctgctggaagattttattctgcgcgagaaaatcacccactt

SEQ ID NO: 504025 - DNA, 75 bp, synthetic construct
  source 1..75: mol_type = other DNA
aaatagacatgcggttgttagtgacatttagggaaggtgcgaataagcaggtcatttcttcccaagctgactcgc

SEQ ID NO: 504026 - DNA, 75 bp, synthetic construct
  source 1..75: mol_type = other DNA
cctttgataggacgttatggcaacaaaattgatatgcggttgttggtgacatttagttttttgatgtatgcggtt

SEQ ID NO: 504027 - DNA, 75 bp, synthetic construct
  source 1..75: mol_type = other DNA
gtgtggcctgtgtctatgatgtgtttgatcagcagtttgccacttttttccgttctttttttgacacgcctcagg

SEQ ID NO: 504028 - DNA, 75 bp, synthetic construct
  source 1..75: mol_type = other DNA
gcctcaccattaaagtcggtgaatgcttactgaaaatgaataaggacggtactatcattctcaatggtaaaagta

SEQ ID NO: 504029 - DNA, 75 bp, synthetic construct
  source 1..75: mol_type = other DNA
cagagccaggattacacctttaaggtgccggactggccggggatgtatgagcagcagggtgagaacctgaacgga

SEQ ID NO: 504030 - DNA, 75 bp, synthetic construct
  source 1..75: mol_type = other DNA
tcacctcgtttggtgtagcaaatgccattgcgatccctgttaccggcaggctggcacaaagaataggcgaattaa

SEQ ID NO: 504031 - DNA, 75 bp, synthetic construct
  source 1..75: mol_type = other DNA
gcgtgccgcagtttgaacatgcactttgctctttcatggcgaaaaagccgctgtttatgattggtcacagtgttg

SEQ ID NO: 504032 - DNA, 75 bp, synthetic construct
  source 1..75: mol_type = other DNA
ttcatattgtcatggatgaactcaacgatgttgagatcggtaaaatcctcgcatcctgccagttaaccatcggta

SEQ ID NO: 504033 - DNA, 75 bp, synthetic construct
  source 1..75: mol_type = other DNA
gaccacattcaggacccgtcgcgctatcacgtggtgatggacgaactcaacgatctggaaatgggcaaactgctg

SEQ ID NO: 504034 - DNA, 75 bp, synthetic construct
  source 1..75: mol_type = other DNA
atggttacgctttggggaaattatgaggggatctctcagggcgtcgaggcgaccgccaattttgataccggacca

SEQ ID NO: 504035 - DNA, 75 bp, synthetic construct
  source 1..75: mol_type = other DNA
agcgaagccgtcagtcgtgagcgtcagacgggaatgcagatggtgcagtccgtactggaacgcatcggggaggtg

SEQ ID NO: 504036 - DNA, 75 bp, synthetic construct
  source 1..75: mol_type = other DNA
cagcacatcagcgatcctgcccgttaccacgtagtgatggatgaactcaacgatctggaaatgggcaaaattctc

SEQ ID NO: 504037 - DNA, 75 bp, synthetic construct
  source 1..75: mol_type = other DNA
cactggcgcacacaaataccgctataccatcaccgaaccctatacaggaacggtgcgcacgtatttgcaggaaga

SEQ ID NO: 504038 - DNA, 75 bp, synthetic construct
  source 1..75: mol_type = other DNA
cgtgagggaatgccgccgcgtgaaggtggtgacgagttcagccaggcatggaagcaggaagtgacaatcagcaag

SEQ ID NO: 504039 - DNA, 75 bp, synthetic construct
  source 1..75: mol_type = other DNA
tctgtcatcgctgaggcggtggccacgatgccgtgttatctgtatctggtacgtaatgacaagggcagggaggcg

SEQ ID NO: 504040 - DNA, 75 bp, synthetic construct
  source 1..75: mol_type = other DNA
aatcgcccggtgatgggcgatccgctctatttgcagatgaaagcgcataacaatgcgccgggcatggtcgggcga

SEQ ID NO: 504041 - DNA, 75 bp, synthetic construct
  source 1..75: mol_type = other DNA
acgggatactgtgttctttgaccatactcagattataacattaaaaaagatattgagtctagcttatgggtttag

SEQ ID NO: 504042 - DNA, 75 bp, synthetic construct
  source 1..75: mol_type = other DNA
gaagaacttatcaccctggaagaagtgaaactccattgccgtatcgatggagacgaggaagaccagttaatcagc

SEQ ID NO: 504043 - DNA, 75 bp, synthetic construct
  source 1..75: mol_type = other DNA
gcgcagagctggtttctggcgggcgtttgtttgacctcggccaggtaccgaagtccgtctggcactatgtccaat

SEQ ID NO: 504044 - DNA, 75 bp, synthetic construct
  source 1..75: mol_type = other DNA
gctatggcgtaaatatcagcctgattttctggagggtgaaaacaatgtgtaacgatccgaacgttacagaaagaa

SEQ ID NO: 504045 - DNA, 75 bp, synthetic construct
  source 1..75: mol_type = other DNA
ttattgcggatgccattgtgtcgaagaagagcgcgccgggaacgatgatgatcctgcgggatgaagaagttccgg

SEQ ID NO: 504046 - DNA, 75 bp, synthetic construct
  source 1..75: mol_type = other DNA
gtgttttatggtttgcgggcggtgctgttctggaatgctgccgttttcagtgtggcgctgtgctttaccggcact

SEQ ID NO: 504047 - DNA, 75 bp, synthetic construct
  source 1..75: mol_type = other DNA
atgacacataaaacaaaggcgaccgggggcggtcgccaatgggaaaacactaaacataagcccgaacatcatagc

SEQ ID NO: 504048 - DNA, 75 bp, synthetic construct
  source 1..75: mol_type = other DNA
tgattctttgttggtcatggcgctgccctgtaaaacgatgcaccgtagtccctcacaccacggcgctggtgatgg

SEQ ID NO: 504049 - DNA, 75 bp, synthetic construct
  source 1..75: mol_type = other DNA
ttgtgttgtcctgcatagcaatgcgcctgcgttcctcaaactatggcgctgatagtggctattcctgctctttgg

SEQ ID NO: 504050 - DNA, 75 bp, synthetic construct
  source 1..75: mol_type = other DNA
ttggatggttgaagattgaggaaagggcaggtagcacaaatgcttatattgtccttccttatgaacaagaagcca

SEQ ID NO: 504051 - DNA, 75 bp, synthetic construct
  source 1..75: mol_type = other DNA
ctccctctcacagatgcacatattactcccccaggagaatcatcactctctgatctttctgaggcagaagaagca

SEQ ID NO: 504052 - DNA, 75 bp, synthetic construct
  source 1..75: mol_type = other DNA
agccgcaggatatcgctgtctgacctgcgatttttcatgccgtccctgaccgcagaagaactgcgtggcaaccgt

SEQ ID NO: 504053 - DNA, 75 bp, synthetic construct
  source 1..75: mol_type = other DNA
cgtttttggagggcaaattgattacggccgtgggatagaatgcatattatcagctgctaaaattgctcataaaaa

SEQ ID NO: 504054 - DNA, 75 bp, synthetic construct
  source 1..75: mol_type = other DNA
ctaagtatccactagacctcaatagtacgtggttaactagagaacttgctgaagaatttaacaacagggggtacg

SEQ ID NO: 504055 - DNA, 75 bp, synthetic construct
  source 1..75: mol_type = other DNA
ctcatatagtttgaccggaaatttattaattaacactgcattatttctgcctgttatttcattcattacactact

SEQ ID NO: 504056 - DNA, 75 bp, synthetic construct
  source 1..75: mol_type = other DNA
acggcgtgaagggcaaacaggcattagccgcactggaacgctataaaggggccagaaacgccggaaaaacgccca

SEQ ID NO: 504057 - DNA, 75 bp, synthetic construct
  source 1..75: mol_type = other DNA
agcgtaactatctcccgctctctccctatggaagatatgaggtggagttacagaacagcaaaaactcactcgaca

SEQ ID NO: 504058 - DNA, 75 bp, synthetic construct
  source 1..75: mol_type = other DNA
actgtggtcgaagctgggcacattcagcatcagctacaatgatgaccgccgttacaacagccattattacacggc

SEQ ID NO: 504059 - DNA, 75 bp, synthetic construct
  source 1..75: mol_type = other DNA
atgctcgacacctggaacttgcagtccttagggccgatgaccgccatttcagcagggaagatttacggcctttcc

SEQ ID NO: 504060 - DNA, 75 bp, synthetic construct
  source 1..75: mol_type = other DNA
acgtcaaattttggccgaattatttagcggtcgtgttatgtcacgtcttgatgaactagagactaccgttcggtt

SEQ ID NO: 504061 - DNA, 75 bp, synthetic construct
  source 1..75: mol_type = other DNA
tggtcggaaaacgggaaaaagacgcgaccagctaaagagagctggctagcaggtgcctcgacctccggctcactg

SEQ ID NO: 504062 - DNA, 75 bp, synthetic construct
  source 1..75: mol_type = other DNA
tctccctatggaagatatgaggtggagttacagaacagcaaaaactcactcgatgaagcggcgcacgaaaaacgc

SEQ ID NO: 504063 - DNA, 75 bp, synthetic construct
  source 1..75: mol_type = other DNA
tgtaacctcctttgggcgaataatactctaccaagtgcctcagtcaatgtcagttttgatggcaatacatccggg

SEQ ID NO: 504064 - DNA, 75 bp, synthetic construct
  source 1..75: mol_type = other DNA
tacttcacatggaagaatatcttaagatgtaaccgtgtcggagaaagatataactttacacagacaaatattgaa

SEQ ID NO: 504065 - DNA, 75 bp, synthetic construct
  source 1..75: mol_type = other DNA
gttgggaatttcagccttaccttgctgaaagcaatgttcgtcagttgttagcggaaattgctaatgtactcgagc

SEQ ID NO: 504066 - DNA, 75 bp, synthetic construct
  source 1..75: mol_type = other DNA
ggtcggtgatgtggtctgcagcggcctctcatcgtgggcagccgtgaagcagaccggagaagagaatgagagtta

SEQ ID NO: 504067 - DNA, 75 bp, synthetic construct
  source 1..75: mol_type = other DNA
tagccgggggcgcggcgtcggtgcaccactggcgtggcagatatggggcggtagctttcatatggatcgctggtc

SEQ ID NO: 504068 - DNA, 75 bp, synthetic construct
  source 1..75: mol_type = other DNA
tataccgtaccaatttcaatactatttcaggatcgtaatgctgtttctggtaatttcaatggaagtgccattcta

SEQ ID NO: 504069 - DNA, 75 bp, synthetic construct
  source 1..75: mol_type = other DNA
cgatccgggacatagagaaagatgatgttgtttttctggaaaaatttatagacttgctgaatctggatcgcacaa

SEQ ID NO: 504070 - DNA, 75 bp, synthetic construct
  source 1..75: mol_type = other DNA
ggtcagggcgtggacgccggagatgcgtgccggaggtggagtggtggtgtcctggcgttatggaaacgtatgtgt

SEQ ID NO: 504071 - DNA, 75 bp, synthetic construct
  source 1..75: mol_type = other DNA
cagcaacagcacctacagcaatttcagcgaggcaagccgcgcgtttctgaccatgacaatgcgcccatggctggc

SEQ ID NO: 504072 - DNA, 75 bp, synthetic construct
  source 1..75: mol_type = other DNA
agcctgccgttgctgacgaaaatgtcctcagagcgcacgctggcagtccaggcggcactgatgcagcaaccggac

SEQ ID NO: 504073 - DNA, 75 bp, synthetic construct
  source 1..75: mol_type = other DNA
ggtgaatgttgagcagacaggggaacataactggcgttaccgcatcactgacgcttacagcggaaacacccgcaa

SEQ ID NO: 504074 - DNA, 75 bp, synthetic construct
  source 1..75: mol_type = other DNA
atgacgcttgatgagtttatggcgctggccggcacatcgaacacgggggctggtgagtacgtatcatcggggaca

SEQ ID NO: 504075 - DNA, 75 bp, synthetic construct
  source 1..75: mol_type = other DNA
aggaggcccgcgaatggcttgattctcatccggtcgatcacatcctcaacgagcgcccgaacgcgtggcagacac

SEQ ID NO: 504076 - DNA, 75 bp, synthetic construct
  source 1..75: mol_type = other DNA
tccttgaaggtggcatggactataagcagcttggcatgagcaatcaggatgctgagtggttggcctcccggcgct

SEQ ID NO: 504077 - DNA, 75 bp, synthetic construct
  source 1..75: mol_type = other DNA
taattcgtgccagacaccttaccagtttaaacgcacaatgatgcgtcactgcctgctgaacggtaacgcctatgc

SEQ ID NO: 504078 - DNA, 75 bp, synthetic construct
  source 1..75: mol_type = other DNA
agcgtgcagacagtgaccggtcagccagatgttgaccaggctgttctggatcaggctattcaaaaccgttccggg

SEQ ID NO: 504079 - DNA, 75 bp, synthetic construct
  source 1..75: mol_type = other DNA
cggtaatgcttatgcggtgattcagtgggggcgtgatggttttccggtggctttgcacccttacccgccgcagtc

SEQ ID NO: 504080 - DNA, 75 bp, synthetic construct
  source 1..75: mol_type = other DNA
tgggggcgtgatggttttccggtggctttgcacccttacccgccgcagtcggtgaatgttgagcagacaggggaa

SEQ ID NO: 504081 - DNA, 75 bp, synthetic construct
  source 1..75: mol_type = other DNA
tctggtggagtttgactccgctgaccttctccgtgccacacctaccgagcgttacgccacttatgagcgcggtat

SEQ ID NO: 504082 - DNA, 75 bp, synthetic construct
  source 1..75: mol_type = other DNA
ccacaaccgaaatcattaaagcaactgaagaaagtaacggccatcgtgtcagtctgccgttatcggttttcgatc

SEQ ID NO: 504083 - DNA, 75 bp, synthetic construct
  source 1..75: mol_type = other DNA
acagaaagggacaacgcctggctgttctcgctgtcgcatcagacaaatgacaccggcgaatcagaatggattcat

SEQ ID NO: 504084 - DNA, 75 bp, synthetic construct
  source 1..75: mol_type = other DNA
gaacatggggcgcattgtcgttgacgtcgatggtattgagcttgctgaactgattaacgtggtctgcgataatgg

SEQ ID NO: 504085 - DNA, 75 bp, synthetic construct
  source 1..75: mol_type = other DNA
ctggaagacgtgaagtggctggcgcagggcactatctaccctgacgttatcgaatctgcggcgtctgcaaccggt

SEQ ID NO: 504086 - DNA, 75 bp, synthetic construct
  source 1..75: mol_type = other DNA
caggtatcgcttccctgatgaggtggtggtgtaaatcaccgaaaccgggtcagagcaaaacgtgggttttatttg

SEQ ID NO: 504087 - DNA, 75 bp, synthetic construct
  source 1..75: mol_type = other DNA
cgttatggcgtcagtctcattcatctggacgccagcgcagaatgtctgccagggttccccactttcgactggtaa

SEQ ID NO: 504088 - DNA, 75 bp, synthetic construct
  source 1..75: mol_type = other DNA
gtaccgatgcgtggtcatatccggttctgcggctcaagcgcctggggctgtcaaaaacgttccgtcgtctggttg

SEQ ID NO: 504089 - DNA, 75 bp, synthetic construct
  source 1..75: mol_type = other DNA
tctgcgacttaaacgcctgggcctgtcaaaaacgtttcgtcgtctgatcgtcacgctcattcgccgttatggcgt

SEQ ID NO: 504090 - DNA, 75 bp, synthetic construct
  source 1..75: mol_type = other DNA
attgatggtgttaacctcgctgaactgattaacaatgtccctgaaaacggttattcactccgtgtggtggaggaa

SEQ ID NO: 504091 - DNA, 75 bp, synthetic construct
  source 1..75: mol_type = other DNA
tgattaacaaggtcgctgaaaacggttattcactccgcgtagtggatgaatccggccaacagtcaacctgcacac

SEQ ID NO: 504092 - DNA, 75 bp, synthetic construct
  source 1..75: mol_type = other DNA
actgaacatggggcgaattgtcgttgacgtcgatggtattgagcttgctgaactgattaacgtggtctgcgataa

SEQ ID NO: 504093 - DNA, 75 bp, synthetic construct
  source 1..75: mol_type = other DNA
tcgccgactggctgcactcaacatgctggcagagcgtggcatcattccggctgactggcctgtgcgtgtgaaggt

SEQ ID NO: 504094 - DNA, 75 bp, synthetic construct
  source 1..75: mol_type = other DNA
attatcaatgaagtgaacggtatttcccgcgtggtgtatgacatcagcggcaagccaccagcgactattgagtgg

SEQ ID NO: 504095 - DNA, 75 bp, synthetic construct
  source 1..75: mol_type = other DNA
atctgccagtgtgaagccctgtggacgccagcgaaaattatcgacgatgccgtagcccgtatccgcgagcaggta

SEQ ID NO: 504096 - DNA, 75 bp, synthetic construct
  source 1..75: mol_type = other DNA
ttcctgccggtacgttctgttggcgtaatgggcgatggtcgtaaatacgactgggttgtgtctctgcgtgccgtc

SEQ ID NO: 504097 - DNA, 75 bp, synthetic construct
  source 1..75: mol_type = other DNA
gaggcttctaatgaacgtgaatttggctacgcgcaggttgaagtcgtaaacgacagcgcactggttcgcggtatc

SEQ ID NO: 504098 - DNA, 75 bp, synthetic construct
  source 1..75: mol_type = other DNA
tcgtctggttgtcacacttagccggagttatggcgtccgtctcattcatctggttgccagcgccgcatttctgcc

SEQ ID NO: 504099 - DNA, 75 bp, synthetic construct
  source 1..75: mol_type = other DNA
acggaaacagacaacgcctggctgtactcgctgtcgcatcagaccagtgacgttggtgaatcggaatggattcat

SEQ ID NO: 504100 - DNA, 75 bp, synthetic construct
  source 1..75: mol_type = other DNA
caccaccgttaacaacccttaccggcatacgctgcagcaccgcacatatcacggaaacagacaacgccaggctgt

SEQ ID NO: 504101 - DNA, 75 bp, synthetic construct
  source 1..75: mol_type = other DNA
tgcgtaagattggtctggagctaggcctgccgtacgacatgctgtaccgtcacccgttcccgggaccgggcctcg

SEQ ID NO: 504102 - DNA, 75 bp, synthetic construct
  source 1..75: mol_type = other DNA
atctgccagtgtgaagccctgtggacgccggcgaaaattatcgacgatgctgtagcccgtatccgtgagcaggta

SEQ ID NO: 504103 - DNA, 75 bp, synthetic construct
  source 1..75: mol_type = other DNA
gatgaagatggggctggttgaaccgctgaaagagctgttcaaagacgaagtgcgtaagattggtctggagctggg

SEQ ID NO: 504104 - DNA, 75 bp, synthetic construct
  source 1..75: mol_type = other DNA
agggtactatctaccctgacgttatcgaatctgctgcttctgcaaccggtaaagcacatgtcatcaaatctcacc

SEQ ID NO: 504105 - DNA, 75 bp, synthetic construct
  source 1..75: mol_type = other DNA
cctgccgtacgacatgctgtaccgtcacccgttcccgggaccaggccttggcgttcgtgttctgggtgaagtgaa

SEQ ID NO: 504106 - DNA, 75 bp, synthetic construct
  source 1..75: mol_type = other DNA
gaagatgcgctgacagcagacggtaaacctctgctcgatgtctggatgagccatggcgataaagttaccgctatc

SEQ ID NO: 504107 - DNA, 75 bp, synthetic construct
  source 1..75: mol_type = other DNA
gtcgatggtgttaatctcgctgaactgattaacgtggtctgcgacaatggccactcccttcgtgttgttaatgaa

SEQ ID NO: 504108 - DNA, 75 bp, synthetic construct
  source 1..75: mol_type = other DNA
tctgcggcttaaacgcctggggctgtcaaaaacgttccgccgtctggttgtcacactcatccggcgttatggcgt

SEQ ID NO: 504109 - DNA, 75 bp, synthetic construct
  source 1..75: mol_type = other DNA
cgctgcagtaccgcgcatatcacggcaaaggacaacgcctggctgtactcgctgtcacatcagacgaatggcacc

SEQ ID NO: 504110 - DNA, 75 bp, synthetic construct
  source 1..75: mol_type = other DNA
cgttatggcgtcagtctcattcatctggatgccagcgctgaatgcctgccgggtttacccactttcaactgctaa

SEQ ID NO: 504111 - DNA, 75 bp, synthetic construct
  source 1..75: mol_type = other DNA
ggcttaagcgccagggcctgtcaaaaacgttccgccgtctggttgtcacactcatccgacgttatggcgtcagtc

SEQ ID NO: 504112 - DNA, 75 bp, synthetic construct
  source 1..75: mol_type = other DNA
cgccacgttcagcgaatgctgaaactggctgaccttgcgcctgtcatcctcgatgcgctggcagaagaccgcatc

SEQ ID NO: 504113 - DNA, 75 bp, synthetic construct
  source 1..75: mol_type = other DNA
actcgctgtcgcatcagacgaatgacaccggcgagtcagaatggattcattttacaggcagcggatatctgttac

SEQ ID NO: 504114 - DNA, 75 bp, synthetic construct
  source 1..75: mol_type = other DNA
gtggtcatacccggttctgcggcttaaacgcctggggctgtcaaaaacgttccgccgtctggttgtcacacttac

SEQ ID NO: 504115 - DNA, 75 bp, synthetic construct
  source 1..75: mol_type = other DNA
tcatacccggttctgcggcttaagcgccagggcctgtcaaaaacgttccgccgtctggttgtcacactcatccga

SEQ ID NO: 504116 - DNA, 75 bp, synthetic construct
  source 1..75: mol_type = other DNA
ctggtttgaacgcgcaagcccacgtattatcctcgctgcacaacaactctgtaatgcgctttcacaagtggatta

SEQ ID NO: 504117 - DNA, 75 bp, synthetic construct
  source 1..75: mol_type = other DNA
catacgctgcagtaccgcacatatcacggaaaaggataacgcctggttgtactcgctgtcacaccagaccagtga

SEQ ID NO: 504118 - DNA, 75 bp, synthetic construct
  source 1..75: mol_type = other DNA
ccgacagtattaatgtgcaggcactgaacatggagcgaattgttgttgacgtcgatggtattgagctcgctgaac

SEQ ID NO: 504119 - DNA, 75 bp, synthetic construct
  source 1..75: mol_type = other DNA
gctgattaagtcaccactgaatgtgcgcacggtgccgtattctgcggagtccgtcagcgaactggctgattccat

SEQ ID NO: 504120 - DNA, 75 bp, synthetic construct
  source 1..75: mol_type = other DNA
attgtcgttgacgtcgatggcgttaatctcactgaactgattaataacgtcgctgaaaacggttattcactccgt

SEQ ID NO: 504121 - DNA, 75 bp, synthetic construct
  source 1..75: mol_type = other DNA
caaccctttcctgcatacgctgcagtaccgcacatatcacggaaacggacaacgcctggttgtactcgctgtcac

SEQ ID NO: 504122 - DNA, 75 bp, synthetic construct
  source 1..75: mol_type = other DNA
caacccttaccagcatacgatgcagtaccgcacatatcacggaaacggacaacgcctggttgtactcgctgtcac

SEQ ID NO: 504123 - DNA, 75 bp, synthetic construct
  source 1..75: mol_type = other DNA
tgacgtcgatggtgttaatctcagtgaactgattaacaaagtctctgaaaacggttattcactccgggtggtaga

SEQ ID NO: 504124 - DNA, 75 bp, synthetic construct
  source 1..75: mol_type = other DNA
ctccgccatttgcaacccttgccggcatacgctgcagtaccgcacatatcacggaaacagacaacgcctggctgt

SEQ ID NO: 504125 - DNA, 75 bp, synthetic construct
  source 1..75: mol_type = other DNA
aattccgcaggagctggcgaccgctgcatcaatgactgaaaacggtcatcgtcgggatatgcaccctgccgaaca

SEQ ID NO: 504126 - DNA, 75 bp, synthetic construct
  source 1..75: mol_type = other DNA
caaccctttcccgcatacgttgcagtaccgcacatatcacggaaacggacaacgcctggttgtactcgctgtcac

SEQ ID NO: 504127 - DNA, 75 bp, synthetic construct
  source 1..75: mol_type = other DNA
acggaaacggacaacgcctggctgtactcgctgtcacaccagactaatgacgacggcgaaacagaatggattcat

SEQ ID NO: 504128 - DNA, 75 bp, synthetic construct
  source 1..75: mol_type = other DNA
tcactcccttcgtgttgttgatgaatctgaccgggcctcaacagactgcacgctaccatttgccgcccttaccgg

SEQ ID NO: 504129 - DNA, 75 bp, synthetic construct
  source 1..75: mol_type = other DNA
tattccgcaggagctggcgaccgcagcatcaatgactgaaaacggtcatcgtcgggatatgcaccctgccgaaca

SEQ ID NO: 504130 - DNA, 75 bp, synthetic construct
  source 1..75: mol_type = other DNA
tgacgtcgatggtgttaatctcattgaactgattaacaaagtcgctgaaaacggttattcactccgggtggtaga

SEQ ID NO: 504131 - DNA, 75 bp, synthetic construct
  source 1..75: mol_type = other DNA
tgacgtcgatggtgttaatctcattgaactgattaacaaagtcactgaaaacggttattcactccgggtggtgga

SEQ ID NO: 504132 - DNA, 75 bp, synthetic construct
  source 1..75: mol_type = other DNA
tgacgtcgatggtgttaatctcaatgaactgattaacaaagtctctgaaaacggttattcactccgggtggtgga

SEQ ID NO: 504133 - DNA, 75 bp, synthetic construct
  source 1..75: mol_type = other DNA
accagccgataatcatggggcggacgtaccatgaggacaaccgttcgccgggcgacctgccgggaacgaagacgc

SEQ ID NO: 504134 - DNA, 75 bp, synthetic construct
  source 1..75: mol_type = other DNA
agaatgataacaacgatgagggtgaggaagcgccagaaaaatcggtgtgtaaggagtgcctgaaaagggcgcagg

SEQ ID NO: 504135 - DNA, 75 bp, synthetic construct
  source 1..75: mol_type = other DNA
gggccggaacagaagctggcggtgtgtgatgacgtggcggggctgacgggaatgggggcgctggcgtttaacccg

SEQ ID NO: 504136 - DNA, 75 bp, synthetic construct
  source 1..75: mol_type = other DNA
ttgcgcagtcagcaaaaaaaacttcaggagcgaactcactgacgggggaaatgacagttgcgtcagcgggtgttg

SEQ ID NO: 504137 - DNA, 75 bp, synthetic construct
  source 1..75: mol_type = other DNA
tcttctgcgacgaacatggtcgggtacgggtgaagtttcactgggaccgttatcacgggatgacggaggagagtt

SEQ ID NO: 504138 - DNA, 75 bp, synthetic construct
  source 1..75: mol_type = other DNA
acaacggctggcagatgcgttatcacctgcgtattgagccgccgttatggcggtgcgggctgcggcagaacttcc

SEQ ID NO: 504139 - DNA, 75 bp, synthetic construct
  source 1..75: mol_type = other DNA
gcgacgaacatggtcgggtacgggtgaagtttcactgggaccgttatcacgggatgacggaggagagttcgtgct

SEQ ID NO: 504140 - DNA, 75 bp, synthetic construct
  source 1..75: mol_type = other DNA
ggtatacagagcgtttttttgtatctagcaaacatgaaattaaagtgaagttgctatttgcgaatgatgattttc

SEQ ID NO: 504141 - DNA, 75 bp, synthetic construct
  source 1..75: mol_type = other DNA
catccttaaacagtgagcaccctactcgcgagttctgcgtacagtatggcgaaacggacctggcatttctgtcac

SEQ ID NO: 504142 - DNA, 75 bp, synthetic construct
  source 1..75: mol_type = other DNA
cgctgttctatgaggcgcacccggcgcgggagttctgcgtgcagtacggggagagcgacctggcgttcctgaccc

SEQ ID NO: 504143 - DNA, 75 bp, synthetic construct
  source 1..75: mol_type = other DNA
tcgccgactggctgcactcaacatgctggcagagcgtggcatcattccggctgactggcctgttcgagtgaaggt

SEQ ID NO: 504144 - DNA, 75 bp, synthetic construct
  source 1..75: mol_type = other DNA
tgcagagcaaaccgaaggtggacgggccgcagagtgcgatagtgacggggccagcgggagaggagattttctgcg

SEQ ID NO: 504145 - DNA, 75 bp, synthetic construct
  source 1..75: mol_type = other DNA
acgggatgaacagtggctcgaaaatgagctacgtcgtaaagcgcaatctggagagacggcagctacgcgggcgcg

SEQ ID NO: 504146 - DNA, 75 bp, synthetic construct
  source 1..75: mol_type = other DNA
gccgaagctgtggccgggaacgcggtttacgctgacggggcatccgcagaagatgctgaaccgtgaatggcaggt

SEQ ID NO: 504147 - DNA, 75 bp, synthetic construct
  source 1..75: mol_type = other DNA
aaaaggccacagggcagagtaattcgccgaagctgtggccgggaacgcggtttacgctgacggggcatccgcaga

SEQ ID NO: 504148 - DNA, 75 bp, synthetic construct
  source 1..75: mol_type = other DNA
gattacatctttatgggcgcttattctttacaggccggttatggcgtagggcgtggtgaagcgttcagctatatt

SEQ ID NO: 504149 - DNA, 75 bp, synthetic construct
  source 1..75: mol_type = other DNA
cgcagaagatgctgaaccgtgaatggcaggtggtacagagcattctgtcaggagaccagccgcaggcgcttcacg

SEQ ID NO: 504150 - DNA, 75 bp, synthetic construct
  source 1..75: mol_type = other DNA
cttgcgcctgtcatcctcgatgcgctggcagaagaccgcatcaccaccgaacactgtcaggcgctggcgctggag

SEQ ID NO: 504151 - DNA, 75 bp, synthetic construct
  source 1..75: mol_type = other DNA
ggacaaccgttcgccggggagcctgccggggacgaagacgcagatgacgatacggtcgaagacctataaaggaag

SEQ ID NO: 504152 - DNA, 75 bp, synthetic construct
  source 1..75: mol_type = other DNA
aaaggaagcgggtttaacgagctgcgctttgaggacgccacggacaaggaagaaatctacctgcacgcccagaaa

SEQ ID NO: 504153 - DNA, 75 bp, synthetic construct
  source 1..75: mol_type = other DNA
gccggaggagcgaaattttaatgactggatacttgtctttcctgacggtgcggaattaacaccaatatatgtgta

SEQ ID NO: 504154 - DNA, 75 bp, synthetic construct
  source 1..75: mol_type = other DNA
gagcaatcagtttgaggtgataccggcagacaggacgtggcgtcacgcgccgctgccgaagccgaaggtggacgg

SEQ ID NO: 504155 - DNA, 75 bp, synthetic construct
  source 1..75: mol_type = other DNA
caggcgtgggcggggccggggtttggtaacctggcgataccgcgcgtgggccaggaggtgattgttgacttcctg

SEQ ID NO: 504156 - DNA, 75 bp, synthetic construct
  source 1..75: mol_type = other DNA
gtggccgggaacgcggtttacgctgacggggcatccgcagaagatgctgaaccgtgaatggcaggtggtacagag

SEQ ID NO: 504157 - DNA, 75 bp, synthetic construct
  source 1..75: mol_type = other DNA
aaaggaagcgggtttaacgagctgcggtttgaggatgcgacggacaaggaagaaatttacctgcacgcacagaaa

SEQ ID NO: 504158 - DNA, 75 bp, synthetic construct
  source 1..75: mol_type = other DNA
agtgaaggatcagaccattgctgtcaaggaaaattacactctcgatgttgctcatatcacaaccatcaaatcggg

SEQ ID NO: 504159 - DNA, 75 bp, synthetic construct
  source 1..75: mol_type = other DNA
ccgacagcgttaacgtgcaggcactgaacatggggcgcattgtcgttgacgtcgatggtgttaatctcactgaac

SEQ ID NO: 504160 - DNA, 75 bp, synthetic construct
  source 1..75: mol_type = other DNA
ggcgttatggtgtcagtctcattcatctggatgccagtgccggatgtctgccaggtttacccacttttaattggt

SEQ ID NO: 504161 - DNA, 75 bp, synthetic construct
  source 1..75: mol_type = other DNA
cgttgacgtcgatggtgttactctcgctgaactgattaacgtggtctgcgataacggttactcccttcgtgttgt

SEQ ID NO: 504162 - DNA, 75 bp, synthetic construct
  source 1..75: mol_type = other DNA
ttgctggttggccagactggtcatcgtcaataaacattacagccaccgtttcgtaaataattcataccttcatct

SEQ ID NO: 504163 - DNA, 75 bp, synthetic construct
  source 1..75: mol_type = other DNA
gtgccgacattgcaacaagctactggcacgagccagttttagttatctggaagtcaaatgtccgcgctgtaaaac

SEQ ID NO: 504164 - DNA, 75 bp, synthetic construct
  source 1..75: mol_type = other DNA
cttaaccggctatggatgcatgactgtatgccgagaaactccgaatcaagggcaatcagttacgcgctcaagcta

SEQ ID NO: 504165 - DNA, 75 bp, synthetic construct
  source 1..75: mol_type = other DNA
tcgtctggttgtcacgcttagccggcgttatggcgtccgtctcattcatctggttgccagcgccggatttctgcc

SEQ ID NO: 504166 - DNA, 75 bp, synthetic construct
  source 1..75: mol_type = other DNA
tcgtctggttgtcacccttagccggcgttatggcgtccgtctcattcatctggttgccagcgccgcatttctgcc

SEQ ID NO: 504167 - DNA, 75 bp, synthetic construct
  source 1..75: mol_type = other DNA
tcgtctggttgtcacacttagccggcgttatggcgtccgtctcattcatctggttgccagcgccgaatttctgcc

SEQ ID NO: 504168 - DNA, 75 bp, synthetic construct
  source 1..75: mol_type = other DNA
ttaacaaggtctctgaaaacggttattcactccgcgtggtcgataaatccgaccagcagtcaaccagtacaccac

SEQ ID NO: 504169 - DNA, 75 bp, synthetic construct
  source 1..75: mol_type = other DNA
catggggcgcattgtcgttgacgtcgatggtgttaatctcgctgaactgattaacaaggtctctgaaaacggtta

SEQ ID NO: 504170 - DNA, 75 bp, synthetic construct
  source 1..75: mol_type = other DNA
tcgtctggttgtcacgcttagccggggttatggcgtccgtctcattcatctggttgccagcgccgcatttctgcc

SEQ ID NO: 504171 - DNA, 75 bp, synthetic construct
  source 1..75: mol_type = other DNA
attcgatgggggcgattgatgtcccggcagataagctgtggggcgcacaaactcaacgctcgctggagcatttcc

SEQ ID NO: 504172 - DNA, 75 bp, synthetic construct
  source 1..75: mol_type = other DNA
gacaccgcctgctccacttcggcagtggctatccaccaggcctgcatcgcactacgtaaccgggattgcgatgcg

SEQ ID NO: 504173 - DNA, 75 bp, synthetic construct
  source 1..75: mol_type = other DNA
acaccgtggttgccatcatcgccatcatgttgatcggggctgcttatgtgcccatcagccccgactacccagtgg

SEQ ID NO: 504174 - DNA, 75 bp, synthetic construct
  source 1..75: mol_type = other DNA
tgaagcctgccgccgaagactgtgctcagaaaaaagagtttcgcctgaagcaaacaaagaaaagagtgacattac

SEQ ID NO: 504175 - DNA, 75 bp, synthetic construct
  source 1..75: mol_type = other DNA
gcggcaggcatggaccggctgaacgccatgatagcagaaaggcgcctcggcggctatgcgctcagcatgagcaat

SEQ ID NO: 504176 - DNA, 75 bp, synthetic construct
  source 1..75: mol_type = other DNA
cgaacaggcggctgcgctgcctatcgcatacctcaccgcctattacgcactggtggtgcgcgctaatttgcaacc

SEQ ID NO: 504177 - DNA, 75 bp, synthetic construct
  source 1..75: mol_type = other DNA
ggcgttgttctgtgtcgaatacagcctagcgcgcaccttgattgatctggggattacgccggacagtatgatcgg

SEQ ID NO: 504178 - DNA, 75 bp, synthetic construct
  source 1..75: mol_type = other DNA
cgtaaagttcaccctaacgacgacgtgaacaaaagccaaagttccaatgatgtctttccgacggcgatgcacgtt

SEQ ID NO: 504179 - DNA, 75 bp, synthetic construct
  source 1..75: mol_type = other DNA
aactcattccgcagcttaaaaccctgacacagacgctgagtgaaaaatcgcgtgcatttgccgatatcgtcaaaa

SEQ ID NO: 504180 - DNA, 75 bp, synthetic construct
  source 1..75: mol_type = other DNA
ttccacaacttaaaaccctgacccagacgctgagtgaaaaatcccgcgcatttgccgatatcgtcaaaatcggtc

SEQ ID NO: 504181 - DNA, 75 bp, synthetic construct
  source 1..75: mol_type = other DNA
ccggtaacttttcagcgtgggttattgaagcctgcaggagaaggctggcaacagatgcaacgcatctggtgcccg

SEQ ID NO: 504182 - DNA, 75 bp, synthetic construct
  source 1..75: mol_type = other DNA
ctttaaaagccgcagcccttgcgttggggtatcttaacgaagccgagtttgatagttgggtacgaccagaacaga

SEQ ID NO: 504183 - DNA, 75 bp, synthetic construct
  source 1..75: mol_type = other DNA
cgcgcatttgccgatatcgtcaaaattggtcgtacccacttgcaggacgccacaccgctgaccctgggacaggag

SEQ ID NO: 504184 - DNA, 75 bp, synthetic construct
  source 1..75: mol_type = other DNA
atgcaggaaaaaaaataagtgttcaacacttgacgtgtttaacacctaggcttaaattggtgttcaacaccttgt

SEQ ID NO: 504185 - DNA, 75 bp, synthetic construct
  source 1..75: mol_type = other DNA
tcgcgtttgctgaacttctatataagctcaaacctgcgccgtcaggcagttctggaacagtttcttggtaccaac

SEQ ID NO: 504186 - DNA, 75 bp, synthetic construct
  source 1..75: mol_type = other DNA
cggggattatcgcctcgctggaggcggggtatcagtggttaccggggcgtggtgtggtgattgaaccgcaggcgc

SEQ ID NO: 504187 - DNA, 75 bp, synthetic construct
  source 1..75: mol_type = other DNA
taaccagggcgacagccgctcgaatatgaccggaactcgcgccgataaccagaaccacggttatgccgttgggct

SEQ ID NO: 504188 - DNA, 75 bp, synthetic construct
  source 1..75: mol_type = other DNA
gataccgttttatttagtttttcggacagaccggtacaagaagccctggggctgttccgcgaagcgcgttattaa

SEQ ID NO: 504189 - DNA, 75 bp, synthetic construct
  source 1..75: mol_type = other DNA
ggtgaacgcacgccaatgaatgagggcgattttatcctgactccgcagtggtgctggcacgatcacggtaaccct

SEQ ID NO: 504190 - DNA, 75 bp, synthetic construct
  source 1..75: mol_type = other DNA
ggcgaacgcacgccaatgaatgagggcgattttatcctgactccgcagtggcgctggcacgatcacggtaaccct

SEQ ID NO: 504191 - DNA, 75 bp, synthetic construct
  source 1..75: mol_type = other DNA
gctctgctggttttggctaaggaaggtgcgaataagcggggaaattcttctcggctgactcagtcatttcatttc

SEQ ID NO: 504192 - DNA, 75 bp, synthetic construct
  source 1..75: mol_type = other DNA
ggctggcgcagtcatgataatggccgattcagcacgggatatcctcaaccaacgaagtcatgaatcatgttcaga

SEQ ID NO: 504193 - DNA, 75 bp, synthetic construct
  source 1..75: mol_type = other DNA
ataatacctatggtttttccaatggccttggcgtcgtggaggtgatgattgctctgctggtgttagcaaatcctg

SEQ ID NO: 504194 - DNA, 75 bp, synthetic construct
  source 1..75: mol_type = other DNA
tccggtgcggtcagcctgcaaaatggcgtcgctggcgacacgctgacggtaaacggtgattatactggcggtggt

SEQ ID NO: 504195 - DNA, 75 bp, synthetic construct
  source 1..75: mol_type = other DNA
gcggtacgctattgctcgatagcgaattaaacggcgatgactcggcaagcgaccaactggtattgaacggtaata

SEQ ID NO: 504196 - DNA, 75 bp, synthetic construct
  source 1..75: mol_type = other DNA
ggatattttaataacctgcgggcggcaaatcaggcatttgtgatggagcgacgcgatcacgctggtggcgatggt

SEQ ID NO: 504197 - DNA, 75 bp, synthetic construct
  source 1..75: mol_type = other DNA
aaaccacgcgcaaatccagccgtaaacctgcaaaaacgcaggaaacagtcctgtctgccctgctggagcagacgg

SEQ ID NO: 504198 - DNA, 75 bp, synthetic construct
  source 1..75: mol_type = other DNA
ctgctgaatttaagtggtacaaaatcaatgatgccggtcaggaagtggagtacttcaatacgaagcttgagaacg

SEQ ID NO: 504199 - DNA, 75 bp, synthetic construct
  source 1..75: mol_type = other DNA
accggtacccgtactcacaagccctttacgtttaccaaagaaatcgatgcgtccagtccgtatctctacaaagct

SEQ ID NO: 504200 - DNA, 75 bp, synthetic construct
  source 1..75: mol_type = other DNA
ggaagcccaggtaatcatcgagcaggcgaacaaacgccgctcgcagattctggacgaagcgaaagctgaggcaga

SEQ ID NO: 504201 - DNA, 75 bp, synthetic construct
  source 1..75: mol_type = other DNA
aggtggagctgcgctacgagaaaatcacctggacttacaaggacggcaacatcattcattccgacgcatggagtg

SEQ ID NO: 504202 - DNA, 75 bp, synthetic construct
  source 1..75: mol_type = other DNA
accggtacccgcattcacacgccattcctgtttaccaaggaaatcgattcttccagcccttacctttataaggcc

SEQ ID NO: 504203 - DNA, 75 bp, synthetic construct
  source 1..75: mol_type = other DNA
ctcagccaggaggtactgttatccctgctcagtttctgcaccgcgtgcagccttaacggtgtccagacccgcgag

SEQ ID NO: 504204 - DNA, 75 bp, synthetic construct
  source 1..75: mol_type = other DNA
cgcaagtaatggatgttctgattgtattagctctgcatgggatggaatgggctaccggatgagtattattcctgc

SEQ ID NO: 504205 - DNA, 75 bp, synthetic construct
  source 1..75: mol_type = other DNA
gggttttcattcctgagtttaatcgcgctgtacgtgaggcgttttataaccgaccggttgaacagcgtgatgcat

SEQ ID NO: 504206 - DNA, 75 bp, synthetic construct
  source 1..75: mol_type = other DNA
gttcaaccgcgcaatgcgtgacgcctactacaaccgtccgagagagcagcgcgacgcttggttgctgtggatcgg

SEQ ID NO: 504207 - DNA, 75 bp, synthetic construct
  source 1..75: mol_type = other DNA
gccaggccatcgcgtttgtcctgttcgttctgttctgcatgaagtacgtatggccgccattaatggcagccatcg

SEQ ID NO: 504208 - DNA, 75 bp, synthetic construct
  source 1..75: mol_type = other DNA
accaaatccttcttgcgttatggaaagcaaaaagtgttcgcgagcatgatgttgaaagtgaagtagtgatctatt

SEQ ID NO: 504209 - DNA, 75 bp, synthetic construct
  source 1..75: mol_type = other DNA
tgattttttacactgaattagcaaaagcattaagtattgatcttgattattataacatcagcattctttctgttg

SEQ ID NO: 504210 - DNA, 75 bp, synthetic construct
  source 1..75: mol_type = other DNA
taatacctatggtttttccaacggtcttggcgtcgtggaggtgattattgctctgctggttttggctaatcctgt

SEQ ID NO: 504211 - DNA, 75 bp, synthetic construct
  source 1..75: mol_type = other DNA
caaccaggagaatccgggagtatgccccgcagaaccgtgagcttcatcgtatcgcggatgccctgcaggcggtgc

SEQ ID NO: 504212 - DNA, 75 bp, synthetic construct
  source 1..75: mol_type = other DNA
agccttcgttgtggctgttgaagcagacgatgcggcactttctgccgattttccggcggcggtggcactggctga

SEQ ID NO: 504213 - DNA, 75 bp, synthetic construct
  source 1..75: mol_type = other DNA
cccctttggacaaagctatattaccggtatcagaaaaaataatttatccggtcgtctggaagcacttacctgcac

SEQ ID NO: 504214 - DNA, 75 bp, synthetic construct
  source 1..75: mol_type = other DNA
atgcgttcgtttctgatgattttgccgcttcttttgaagccgacgcatcccgggctgaggtggcagcttctgacg

SEQ ID NO: 504215 - DNA, 75 bp, synthetic construct
  source 1..75: mol_type = other DNA
gaacggtaaaaccgcaaaattcagtggagatataacatcaaatcgctggttacatccaaacggtggcggtttcac

SEQ ID NO: 504216 - DNA, 75 bp, synthetic construct
  source 1..75: mol_type = other DNA
cactggcagacgacgcagccgctgtttttgagcctgccgcagctgaggcgctctgtcccgctgccgtttcagaag

SEQ ID NO: 504217 - DNA, 75 bp, synthetic construct
  source 1..75: mol_type = other DNA
gtgtatttcccgttagccaggtcatacgcggccttaactgcttttggcgttgccgccagtgactcggaagtgctg

SEQ ID NO: 504218 - DNA, 75 bp, synthetic construct
  source 1..75: mol_type = other DNA
aggctgcgctcgtttctgatgatttcgctgcctcttttgaggccgccgcatcccgggctgaggtggcagcttctg

SEQ ID NO: 504219 - DNA, 75 bp, synthetic construct
  source 1..75: mol_type = other DNA
cctgtctggtcgcctcatcttttgaagcagacgcagatgatgccgatgacgctgccgaactggcggacgatgcgg

SEQ ID NO: 504220 - DNA, 75 bp, synthetic construct
  source 1..75: mol_type = other DNA
tctcagacgtctttgccgccttcgcggaatttcctgccgccattgccgaggaagctgcactactggcgcttgatg

SEQ ID NO: 504221 - DNA, 75 bp, synthetic construct
  source 1..75: mol_type = other DNA
gaggattctgcgctggtttccgacgctttcgcgttcgtctcggatgtcttcgctgcggaagcagacctcgctgct

SEQ ID NO: 504222 - DNA, 75 bp, synthetic construct
  source 1..75: mol_type = other DNA
cgctgtctcagcgcgcgttgctgcagattccgccgtacttttgctctgagctgctgccgtcgcactgcctgccgc

SEQ ID NO: 504223 - DNA, 75 bp, synthetic construct
  source 1..75: mol_type = other DNA
tcaggccggaaaggcatgcgaaaccctgtctttttctatggattcaagttctgtgatatccgcttcttgcgattt

SEQ ID NO: 504224 - DNA, 75 bp, synthetic construct
  source 1..75: mol_type = other DNA
atggagtggtggaattggtcactggagaagatcaaagcggcaatgcccatgctgtgctcgtctaatattgttggc

SEQ ID NO: 504225 - DNA, 75 bp, synthetic construct
  source 1..75: mol_type = other DNA
tcgttggtgacaaaagatgtggggcactgttgcaaagttagcgatgaggcagccttttgtcttattcaaaggcct

SEQ ID NO: 504226 - DNA, 75 bp, synthetic construct
  source 1..75: mol_type = other DNA
gacagcattacaccattcgtcgcaaacagtccactaatgtcgttcttttatgaacacccggaagactataaacag

SEQ ID NO: 504227 - DNA, 75 bp, synthetic construct
  source 1..75: mol_type = other DNA
atggaaaaatatctgcacctgttaagccgaggggataaaatcggcctgacattaattcgtctgagcattgcgatt

SEQ ID NO: 504228 - DNA, 75 bp, synthetic construct
  source 1..75: mol_type = other DNA
tcattgttttcatcaagagaatccgtatacggtggcatcaatgcataccatcaagccggaaaggcatgtgaaacc

SEQ ID NO: 504229 - DNA, 75 bp, synthetic construct
  source 1..75: mol_type = other DNA
gggcagactgaaccgccgtcagattagtgccctgattggtttggctccgtttaaccgggactccggatttatgcg

SEQ ID NO: 504230 - DNA, 75 bp, synthetic construct
  source 1..75: mol_type = other DNA
atgcagccgctgtttttgagtctgctgctgcggaggcactctgttccgctgccgtctcagaagacttagcgttcg

SEQ ID NO: 504231 - DNA, 75 bp, synthetic construct
  source 1..75: mol_type = other DNA
tgcagctgctgtctcagagtctgccgcagctgaggcgctctgttccgctgccgtttcagaagacctggcattcgt

SEQ ID NO: 504232 - DNA, 75 bp, synthetic construct
  source 1..75: mol_type = other DNA
gtgacaaaagatgtggggcactgttgcaaagttagcgatgaggcagccttttgtcttattcaaaggccttacatt

SEQ ID NO: 504233 - DNA, 75 bp, synthetic construct
  source 1..75: mol_type = other DNA
taccaataccattgatggtaactggcaggccgatgaaggacgccgttaccgggataatgtaagaatctatttttg

SEQ ID NO: 504234 - DNA, 75 bp, synthetic construct
  source 1..75: mol_type = other DNA
tttgcattattcacgaatgatgaaaaccgccgacgaggctcttcgcgacggcgctcagttctttaccgctcagct

SEQ ID NO: 504235 - DNA, 75 bp, synthetic construct
  source 1..75: mol_type = other DNA
cgaaccagagaaagcagacaacaagacgataaaagacttagagtcaaaatcggttgaagacgaagatattattcg

SEQ ID NO: 504236 - DNA, 75 bp, synthetic construct
  source 1..75: mol_type = other DNA
cgaaccagagaaagcagacaaaaagacgatcaaagacttagagtcaaaatcggttgaagacgaagatattattcg

SEQ ID NO: 504237 - DNA, 75 bp, synthetic construct
  source 1..75: mol_type = other DNA
cgaaccagagaaagcagacaaaaagacgattaaagactcagagtcaaaatcggttgaagacgaagatattattcg

SEQ ID NO: 504238 - DNA, 75 bp, synthetic construct
  source 1..75: mol_type = other DNA
tacgtaatgaaagataacagatttattaacgtgggtaattcagaaaatcttggttgtgctgcttcgtttattaat

SEQ ID NO: 504239 - DNA, 75 bp, synthetic construct
  source 1..75: mol_type = other DNA
gcagataaaaagaccattgagagtcaaaaatcggttgaagacgaagatattattcgtctggtcgccgaacgataa

SEQ ID NO: 504240 - DNA, 75 bp, synthetic construct
  source 1..75: mol_type = other DNA
cgaaccagagaaagcagacaacaagacgattaaagactaagagtcaaaatcggttgaagacgaagatattattcg

SEQ ID NO: 504241 - DNA, 75 bp, synthetic construct
  source 1..75: mol_type = other DNA
gacctgagtaccgtagaaaaagaaaccatcgataatatatccggtaacgtacgccgagcctttatcgggctgtac

SEQ ID NO: 504242 - DNA, 75 bp, synthetic construct
  source 1..75: mol_type = other DNA
attttcaagggattcgaatagaaccccttgaaaattacttttcaacaaaaagcattaattcttttgattcaaaat

SEQ ID NO: 504243 - DNA, 75 bp, synthetic construct
  source 1..75: mol_type = other DNA
taaggtttctggtcttgttaatgatttattatgttacaggtataacttaaataaaactgctcagtctattttgga

SEQ ID NO: 504244 - DNA, 75 bp, synthetic construct
  source 1..75: mol_type = other DNA
cgaacctgagaaagcagataaaaagaccgttgagagtcaaaaatcggttgaagacgaagatattattcgtctggt

SEQ ID NO: 504245 - DNA, 75 bp, synthetic construct
  source 1..75: mol_type = other DNA
caatctggaactataatgaaatattaaaaatgtatcattcaaatgcaatcgatataaaaaaatacattcctaata

SEQ ID NO: 504246 - DNA, 75 bp, synthetic construct
  source 1..75: mol_type = other DNA
ggaattaatggacatccttaataaaggatttggcttgttaatgaaaaagaaagggattcgaatagctctccttga

SEQ ID NO: 504247 - DNA, 75 bp, synthetic construct
  source 1..75: mol_type = other DNA
caacagtcgggccatcagcaggaagaggtgagtgccgccttacagcttgatgatgcgcctcaatttcaacagaac

SEQ ID NO: 504248 - DNA, 75 bp, synthetic construct
  source 1..75: mol_type = other DNA
agccgaagtgaatgctcacctgactgcgccgctttcccgtgaagccagtggtgaagatctgctgcgtcgtccgga

SEQ ID NO: 504249 - DNA, 75 bp, synthetic construct
  source 1..75: mol_type = other DNA
tacccaaatgggactgaagttccgtgccaaagctgtcgtgctcaccgttgggacgttcctcgacggtaaaattca

SEQ ID NO: 504250 - DNA, 75 bp, synthetic construct
  source 1..75: mol_type = other DNA
taaacgcaagcaaaggaccggcggttcgcgctacccgagctcaggcggatcgtgtgctctaccgtcaggcggtac

SEQ ID NO: 504251 - DNA, 75 bp, synthetic construct
  source 1..75: mol_type = other DNA
cgccgcgtcaggtggctaacggcgtagtggacgcctttgtacacaccgtggaacagtatgttaccaaaccggttg

SEQ ID NO: 504252 - DNA, 75 bp, synthetic construct
  source 1..75: mol_type = other DNA
caacccgcattctgtttggtaaaggcgctatcgccggtttacgcgagcaaatccctcacgatgcccgcatattga

SEQ ID NO: 504253 - DNA, 75 bp, synthetic construct
  source 1..75: mol_type = other DNA
gcttcgcgtatttccggcatcacgcctgctgctatctccattctgctggtatggctgaaaaaacaaggtatgctg

SEQ ID NO: 504254 - DNA, 75 bp, synthetic construct
  source 1..75: mol_type = other DNA
cacaggtcgccatcacgtcgctatttatcctttttatcaggcgctggcgctggatacacctgctatttgctgtaa

SEQ ID NO: 504255 - DNA, 75 bp, synthetic construct
  source 1..75: mol_type = other DNA
acttagacggcaccctcttgactccaaaaaagaccttgcttccctcatcaatagaagcccttgcccgcgctcgcg

SEQ ID NO: 504256 - DNA, 75 bp, synthetic construct
  source 1..75: mol_type = other DNA
cgccgatgacgcagtaaaagcgcgcgccaacattgtgattggtgataacaccaccgacagcattgcccggttcat

SEQ ID NO: 504257 - DNA, 75 bp, synthetic construct
  source 1..75: mol_type = other DNA
cccagcatccacagcaggtgccgtgttatatcactcataccaacgagaaaacccatgatgtgatccgcagtaacc

SEQ ID NO: 504258 - DNA, 75 bp, synthetic construct
  source 1..75: mol_type = other DNA
gcggtgcgctttcgtcctcatccggggatgggctttccggtcagcgagttaaagaacgttgaacgtgacgtggac

SEQ ID NO: 504259 - DNA, 75 bp, synthetic construct
  source 1..75: mol_type = other DNA
acttagacggcaccttattgaccccgaaaaagaccctacttccttcatcaatagaagcacttgcccgcgctcgcg

SEQ ID NO: 504260 - DNA, 75 bp, synthetic construct
  source 1..75: mol_type = other DNA
gagcagacagaatggcatcgcgtggtgttgttcggcaagctcgcggaagtggcaggtgaatatctgcgcaagggt

SEQ ID NO: 504261 - DNA, 75 bp, synthetic construct
  source 1..75: mol_type = other DNA
accgctgagcttaacatgcgtaaaaaacagtacaactactatcgcgaccagttgttgagttttaaagaaggtgag

SEQ ID NO: 504262 - DNA, 75 bp, synthetic construct
  source 1..75: mol_type = other DNA
accgaaggtctcccgcgtgaaatcgagttgcgccagaaacaatacgagtactatcgtgatttactgttcagtttc

SEQ ID NO: 504263 - DNA, 75 bp, synthetic construct
  source 1..75: mol_type = other DNA
tgattctcttagaaaaccaataactagtggattaagggagactggaaatattccctattatggtgcgtcaggcat

SEQ ID NO: 504264 - DNA, 75 bp, synthetic construct
  source 1..75: mol_type = other DNA
tctactacaccactcccagccctaacccagaggcacggcaggaatataaaaagctatgcagaaacaacagcgtaa

SEQ ID NO: 504265 - DNA, 75 bp, synthetic construct
  source 1..75: mol_type = other DNA
agcaaaggcgaatggcttcgtttaacttcccttgataggcttcctcctgttatcccctccattaacctggaggcc

SEQ ID NO: 504266 - DNA, 75 bp, synthetic construct
  source 1..75: mol_type = other DNA
cgaaggtctcccgcgtgaaatcgcgttgcgccagaaacaatacgagtactatcgtgatttactgttcagtttccc

SEQ ID NO: 504267 - DNA, 75 bp, synthetic construct
  source 1..75: mol_type = other DNA
cttaccatgcgtaaaaaacagtacaactactatcgagaccagttgctgagttttgataacgaagatgttccacat

SEQ ID NO: 504268 - DNA, 75 bp, synthetic construct
  source 1..75: mol_type = other DNA
gatgctttttctcgttggttcatctattgtttcccatatattaaaaatgctttcctgaatgagagtaattatacc

SEQ ID NO: 504269 - DNA, 75 bp, synthetic construct
  source 1..75: mol_type = other DNA
aactgaaaaaaaatttgtccgagatgcagttttacgtgacacagaatcacgggacggagccgccatttactggac

SEQ ID NO: 504270 - DNA, 75 bp, synthetic construct
  source 1..75: mol_type = other DNA
gacattgtggaaagagatcaactggctgaacttaaagcaaaatattctacctactcgcgagcgcgccagtttaat

SEQ ID NO: 504271 - DNA, 75 bp, synthetic construct
  source 1..75: mol_type = other DNA
tacagatggcttccttcaccctaatcaggttctgaaagaacgtggtctgatgaagaagaaaggcttcccggaatc

SEQ ID NO: 504272 - DNA, 75 bp, synthetic construct
  source 1..75: mol_type = other DNA
tcagaaaaaagactttatggatgcaggtgtaggatgcatacactatggtcaaatctatacgtattacggaacata

SEQ ID NO: 504273 - DNA, 75 bp, synthetic construct
  source 1..75: mol_type = other DNA
tatgattaccctcgctaaagggatttctatgcacgcacaccactacgccacctactacaccactcccagccctaa

SEQ ID NO: 504274 - DNA, 75 bp, synthetic construct
  source 1..75: mol_type = other DNA
tttaattcttttgctgaaattgaggatatcattttaactgaaccgaatgactgtgaagcattaagctctgcatat

SEQ ID NO: 504275 - DNA, 75 bp, synthetic construct
  source 1..75: mol_type = other DNA
ggaaacggcttctactgctacaacaattcacctgatccacggtggtgaagatccggttatcgatctggctcacgc

SEQ ID NO: 504276 - DNA, 75 bp, synthetic construct
  source 1..75: mol_type = other DNA
ttaacggacgctatgccagcctgccggaaacggcttctactgctacaacaattcacctgatccacggtggtgaag

SEQ ID NO: 504277 - DNA, 75 bp, synthetic construct
  source 1..75: mol_type = other DNA
accttgcaacccgcccgcagaagcccggctacgatggaggcacggcacagcccgcacacgacgctgaggccacat

SEQ ID NO: 504278 - DNA, 75 bp, synthetic construct
  source 1..75: mol_type = other DNA
ttgcagcattatttaattttataatactttttggtttgattgctctcgcccccaaagaccctgattatgtagaaa

SEQ ID NO: 504279 - DNA, 75 bp, synthetic construct
  source 1..75: mol_type = other DNA
ccgccgatggcccaattcaggagaattacaacccgctgactggcgcacagcaaggcgcaccaaatttctcctgga

SEQ ID NO: 504280 - DNA, 75 bp, synthetic construct
  source 1..75: mol_type = other DNA
ccagcgtggtgtgcagttgcgcagcgaggatgacgcggctgccgacgctgaccgcacggaacaggtgcaggagaa

SEQ ID NO: 504281 - DNA, 75 bp, synthetic construct
  source 1..75: mol_type = other DNA
atgccgcaaacgtggctctggatgttattgatgatgaagtagcaaaaggctttcctgaacctgattgggcgcatc

SEQ ID NO: 504282 - DNA, 75 bp, synthetic construct
  source 1..75: mol_type = other DNA
tcaggctggcgcggatttctttttcgcctacgaagccctgaacgatgcactgcacaccggacgcaaccagatttt

SEQ ID NO: 504283 - DNA, 75 bp, synthetic construct
  source 1..75: mol_type = other DNA
aattcacttgattcatggcggtgaagatccggttatcgatctggcgcatgcggttgcggcgcaggaagcgttaat

SEQ ID NO: 504284 - DNA, 75 bp, synthetic construct
  source 1..75: mol_type = other DNA
aaattggcagttggtttgcgccactgttcccggatgcgctggtggtgagcgtcggtggcgcggagccaagtggta

SEQ ID NO: 504285 - DNA, 75 bp, synthetic construct
  source 1..75: mol_type = other DNA
gatgcgctggtggtgagtgtcggtggcgcggagccgagcggtaatccggcggggcgtcagtggttttcggtgcag

SEQ ID NO: 504286 - DNA, 75 bp, synthetic construct
  source 1..75: mol_type = other DNA
acgctggcgattttaggtctggcggtggcgatgcagcgtcgcatcagtatctggttttactggagtagcgttttc

SEQ ID NO: 504287 - DNA, 75 bp, synthetic construct
  source 1..75: mol_type = other DNA
tgcggcgttgttatgcgcgcggataaatggcagtcctgcttgttttgccgcctgtatggattcatcaaatgaata

SEQ ID NO: 504288 - DNA, 75 bp, synthetic construct
  source 1..75: mol_type = other DNA
gttccctgaccagcttaccgtgacccgttcacagaccttcaccgcttatgaacgcttgtcgacggccctgacggt

SEQ ID NO: 504289 - DNA, 75 bp, synthetic construct
  source 1..75: mol_type = other DNA
ggcgtgtactggctggcgggtttgctggggcttctggtgctggggcaacggctactcaaaaatcctgccatgcgc

SEQ ID NO: 504290 - DNA, 75 bp, synthetic construct
  source 1..75: mol_type = other DNA
gggggaatgttgcagcgtcggcggcacgcacatcgtcgcgtggcggcggcagatctggcgctgttcacgcgccaa

SEQ ID NO: 504291 - DNA, 75 bp, synthetic construct
  source 1..75: mol_type = other DNA
ttgcagggggaaaacgcctggagttacgcagaaaagctgaaactggcgatttccagtatccgcaaccatatgttc

SEQ ID NO: 504292 - DNA, 75 bp, synthetic construct
  source 1..75: mol_type = other DNA
acagaacgatagcgaggcgttcgcggttaaatatgacaaagaggtttatcaaccggcgattgcggcatgtcataa

SEQ ID NO: 504293 - DNA, 75 bp, synthetic construct
  source 1..75: mol_type = other DNA
tgctaagggtaatcaggccacctggtcagcggaaggcgatgtctcttccagtgacgatctctatacctgggtcgg

SEQ ID NO: 504294 - DNA, 75 bp, synthetic construct
  source 1..75: mol_type = other DNA
cagtatcacggcattctcaagcttgatgtcatcaccttaaaaaatcttgatgctaagggtaatcaggccacctgg

SEQ ID NO: 504295 - DNA, 75 bp, synthetic construct
  source 1..75: mol_type = other DNA
tacagcataatggtcacaaagcgaaaggtctgattgaagcggactctgcacgtcatgcacgccagttgttgcgag

SEQ ID NO: 504296 - DNA, 75 bp, synthetic construct
  source 1..75: mol_type = other DNA
cagacatggatcgccggttatcttaaccgtcaaagccgaagaaatggcgaaacgaggaatacctttctggcaagc

SEQ ID NO: 504297 - DNA, 75 bp, synthetic construct
  source 1..75: mol_type = other DNA
taatggctgggccgatggcgaaccgccaactgaaaatgtcttaaaagatcaattcaacaagcagtatcacggtat

SEQ ID NO: 504298 - DNA, 75 bp, synthetic construct
  source 1..75: mol_type = other DNA
tgagcgaacggttttacttcgcttgccacaggaggatatgtgccagacattcggtttaccttcatcggtgaaata

SEQ ID NO: 504299 - DNA, 75 bp, synthetic construct
  source 1..75: mol_type = other DNA
tttcaggcgccagcaaaggtgctgaaattaccggaagtgcagattcatgagatcgttagtcactgtgcgagaatg

SEQ ID NO: 504300 - DNA, 75 bp, synthetic construct
  source 1..75: mol_type = other DNA
tttcaggcgccagcaaaggtgctgaaattaccggaagtgcagattcatgacatcgttagtcactctgcgagaatg

SEQ ID NO: 504301 - DNA, 75 bp, synthetic construct
  source 1..75: mol_type = other DNA
tttcaggcgccagcaaaggtgctgaaattaccggaagtgcagattcatgaaatcgttagtcactatgcgagaatg

SEQ ID NO: 504302 - DNA, 75 bp, synthetic construct
  source 1..75: mol_type = other DNA
gaagtgagcgtgccgctggcctcactgattaagtcaccgctgaatgtgcgcacggtgccgtattctgcggagtcc

SEQ ID NO: 504303 - DNA, 75 bp, synthetic construct
  source 1..75: mol_type = other DNA
gaatggcattattccggagcaggacagggtaatcacacaggtggtgatactggatgcggataaaaagcagataca

SEQ ID NO: 504304 - DNA, 75 bp, synthetic construct
  source 1..75: mol_type = other DNA
ctgcgtgctgacgggacgtgggaaaatattggcggaatgaaattggatttgcccctatatttccagacatctgtt

SEQ ID NO: 504305 - DNA, 75 bp, synthetic construct
  source 1..75: mol_type = other DNA
attttcaggcgacagcaaaggtgctgaaattcccggaagtgcaaattcaggaaatcatgagtaactgtgcgagac

SEQ ID NO: 504306 - DNA, 75 bp, synthetic construct
  source 1..75: mol_type = other DNA
attttcaggcgacagcaaaggtgctgaaattcccggaagtgcaaattcaggaaatcatcagtaactgtgcgagag

SEQ ID NO: 504307 - DNA, 75 bp, synthetic construct
  source 1..75: mol_type = other DNA
atggccatgcaaaaaacttctccgtatttattcaggctggcggcagttatcggctcacaccattttatgacatca

SEQ ID NO: 504308 - DNA, 75 bp, synthetic construct
  source 1..75: mol_type = other DNA
tttcaggcgccagcaaaggtgctgaaattaccggaagtgcacattcatgagatcgttagtcactctgcgagaatg

SEQ ID NO: 504309 - DNA, 75 bp, synthetic construct
  source 1..75: mol_type = other DNA
tttcaggcgccagcaaaggtgctgaaattaccggaagtgcatattcatgagatcgttagtcactttgcgagaatg

SEQ ID NO: 504310 - DNA, 75 bp, synthetic construct
  source 1..75: mol_type = other DNA
tttcaggcgccagcaaaggtgctgaaattaccggaagtgcaaattcatgagatcgttagtcactatgcgagaatg

SEQ ID NO: 504311 - DNA, 75 bp, synthetic construct
  source 1..75: mol_type = other DNA
gtggtcgacgatatcaaaacgaataataaatatctgatcgtgaatagcgaagatttcaattatcgctttagtcag

SEQ ID NO: 504312 - DNA, 75 bp, synthetic construct
  source 1..75: mol_type = other DNA
cgtggcctgaccaccaaagcgcgtgaagcacttggtctgccgcacagcgatgtgttccgtcaggcgaaagatgtc

SEQ ID NO: 504313 - DNA, 75 bp, synthetic construct
  source 1..75: mol_type = other DNA
gccaaatccccactgctgactccggaaaaagccattgaactgctgggcactatgcagggtggttacaacattcat

SEQ ID NO: 504314 - DNA, 75 bp, synthetic construct
  source 1..75: mol_type = other DNA
ccgctgatcgacgcgctggatgatgccaaactggcacctatcgctgccaaagcactttctcacacgctgctgatg

SEQ ID NO: 504315 - DNA, 75 bp, synthetic construct
  source 1..75: mol_type = other DNA
cggcaccggatgcgtggtcgcgcccggatatcccattgcacgccctggcgatgctgaaaaatgctcgcgaaggga

SEQ ID NO: 504316 - DNA, 75 bp, synthetic construct
  source 1..75: mol_type = other DNA
gctgagagcgatcgcggcttctcgctggcgcagaaaatggtaggccgtgcctgcggcgtgaaaggcattcgtccg

SEQ ID NO: 504317 - DNA, 75 bp, synthetic construct
  source 1..75: mol_type = other DNA
acgtcgtattcagggcatggaaaaatggctggcgaatcctgagctgctggaagccgatgcagatgcggaatacgc

SEQ ID NO: 504318 - DNA, 75 bp, synthetic construct
  source 1..75: mol_type = other DNA
agaacggcgtgttgaagctgttgatcgaacgaatgcgcccggaggaaaagcaaatggcgctggaactactacagg

SEQ ID NO: 504319 - DNA, 75 bp, synthetic construct
  source 1..75: mol_type = other DNA
gcaagcgtcttgagtgcgggcatacctgggtgatgaatctgacctactcgcacacactgacccccagcggactgg

SEQ ID NO: 504320 - DNA, 75 bp, synthetic construct
  source 1..75: mol_type = other DNA
aaagaaaaagcgccccgttgccggagcgcctttgtgaacaagtcgcttactgcgccatattgcttactgtctacg

SEQ ID NO: 504321 - DNA, 75 bp, synthetic construct
  source 1..75: mol_type = other DNA
agggtaatcacgcaggtggtgatactggatgcggataaaaagcagatacagtgcgtggtaagaccactgcaaatc

SEQ ID NO: 504322 - DNA, 75 bp, synthetic construct
  source 1..75: mol_type = other DNA
ggttctggtgaaccaacagaaaatcaggggccacaccagcatatatcttttgttcctttaatgtcaggatacaga

SEQ ID NO: 504323 - DNA, 75 bp, synthetic construct
  source 1..75: mol_type = other DNA
agaatggcgtgttaaagctgctgattgaacgaatgcgtccggaagaaaaacagatggcgctggagttgttgcagg

SEQ ID NO: 504324 - DNA, 75 bp, synthetic construct
  source 1..75: mol_type = other DNA
acgcggtggtggtctgtgccttggcggcaaaattgcgccaatcttctttaacacgatggaagacgccggtgcgct

SEQ ID NO: 504325 - DNA, 75 bp, synthetic construct
  source 1..75: mol_type = other DNA
cttacagcacaactgcgactggggccggcagacatcctggagtccgatgagaatggtattattccggagcaggac

SEQ ID NO: 504326 - DNA, 75 bp, synthetic construct
  source 1..75: mol_type = other DNA
ggaaagcatgatgaccgtgaacacggggagttacttacagcacaactgcgtctggggccggcagacatcctggag

SEQ ID NO: 504327 - DNA, 75 bp, synthetic construct
  source 1..75: mol_type = other DNA
ctggctgaccttgccccggttatcctcgatgcgctggcagaagactgcatcaccaccgagcactgtcaggcgctg

SEQ ID NO: 504328 - DNA, 75 bp, synthetic construct
  source 1..75: mol_type = other DNA
tgtgtcctgacgttggtagcggtaggggtgattgccattctgcttactgctgttgtgccgaaagtggttgagcag

SEQ ID NO: 504329 - DNA, 75 bp, synthetic construct
  source 1..75: mol_type = other DNA
agccctgaatgatgccggactgtccggtgccgcacgggacgcggagaagatgaagaaaggcgatgcggctgaaca

SEQ ID NO: 504330 - DNA, 75 bp, synthetic construct
  source 1..75: mol_type = other DNA
cggtgaaaatagtggcgaactcgacagcatgctggaacgggccgccgataatcaggatcgtgaattcagcgcaca

SEQ ID NO: 504331 - DNA, 75 bp, synthetic construct
  source 1..75: mol_type = other DNA
cggcaccggatgcatggtcgcgtccggatatcccactgcacgccctggcgatgttgaaaaacgcccgtgaaggca

SEQ ID NO: 504332 - DNA, 75 bp, synthetic construct
  source 1..75: mol_type = other DNA
gggcatcaccctgcgcgatctggtacacgcgatcccgctgtacgcaatcaagcaaggtctgctgaccgttgagaa

SEQ ID NO: 504333 - DNA, 75 bp, synthetic construct
  source 1..75: mol_type = other DNA
ccaaactggcaccgatcgctgctaaagcactgtctcacacgctgctgatgttcgataacttctatgacgtagaag

SEQ ID NO: 504334 - DNA, 75 bp, synthetic construct
  source 1..75: mol_type = other DNA
aagcacttggtctgccgcagagcgatgtgttccgtcaggcgaaagatgtggcggaaagtgaccgtggcttctcgc

SEQ ID NO: 504335 - DNA, 75 bp, synthetic construct
  source 1..75: mol_type = other DNA
cgtttcccgatcggtatctctttcccggcgggctctggtctggtggcatttgcagccgcaacaggcgtaatgccg

SEQ ID NO: 504336 - DNA, 75 bp, synthetic construct
  source 1..75: mol_type = other DNA
aagatcgacgaagtgtttatcggttcttgcatgactaacatcggtcacttccgtgctgcgggtaaactgctggat

SEQ ID NO: 504337 - DNA, 75 bp, synthetic construct
  source 1..75: mol_type = other DNA
ggtggggctggcgttagggctgtttgaaccggcgctggtggtgatgatggcgggcgtggtgctgtttatcgtcat

SEQ ID NO: 504338 - DNA, 75 bp, synthetic construct
  source 1..75: mol_type = other DNA
ccgtctccacccgcacgcttattgccatgagcgatgcgttgcaggccagcggcgtttactggctggcgggtttgc

SEQ ID NO: 504339 - DNA, 75 bp, synthetic construct
  source 1..75: mol_type = other DNA
tcccgcacgttaagcatccttaccgccagcagtgttccgctgctggaaggcattcagaccgctgccgccgtgtcg

SEQ ID NO: 504340 - DNA, 75 bp, synthetic construct
  source 1..75: mol_type = other DNA
acgattctttaccaaggtatgaaaaactaacaactgaatgctatcaacttacaaaaaaatattgggatacattag

SEQ ID NO: 504341 - DNA, 75 bp, synthetic construct
  source 1..75: mol_type = other DNA
ttggggacttcatgggatgtcacaaactaaattattcaatattataaaatcagctaatgcattaggtgttgatgt

SEQ ID NO: 504342 - DNA, 75 bp, synthetic construct
  source 1..75: mol_type = other DNA
tggaagccgcaacgcagctcgaaggcaaaactatgcgtctcttgcgtaataaagtgaccgacgccgaaattgctg

SEQ ID NO: 504343 - DNA, 75 bp, synthetic construct
  source 1..75: mol_type = other DNA
gacgaggcgatggtccgtatagatatgtccgagtttatggagaaacactcggtgtctcgtttggttggtgcgcct

SEQ ID NO: 504344 - DNA, 75 bp, synthetic construct
  source 1..75: mol_type = other DNA
atgaagaaattcgccgtaccattcaggtactgcaacgtcgtactaaaaataacccggtgctgattggtgaacctg

SEQ ID NO: 504345 - DNA, 75 bp, synthetic construct
  source 1..75: mol_type = other DNA
gggatatcgatgtcctgacgcccgaaggcgacattctctcccgccgcgattattcactgccgcctcgccgctgcc

SEQ ID NO: 504346 - DNA, 75 bp, synthetic construct
  source 1..75: mol_type = other DNA
ggaatttcctgccgccgttgccgaggaagctgcgctgctggcgctcgaggctgcgttcgtttctgatgattttgc

SEQ ID NO: 504347 - DNA, 75 bp, synthetic construct
  source 1..75: mol_type = other DNA
ttcgtttctgaagatttcgctgcctcttttgaggccgccgcaccccgtgccgaggtggcagcttctgacgccttc

SEQ ID NO: 504348 - DNA, 75 bp, synthetic construct
  source 1..75: mol_type = other DNA
tttctgccgattttccggcggcggtggcactggctgaggcctgcccggcacttgttgacgcggcactggcagata

SEQ ID NO: 504349 - DNA, 75 bp, synthetic construct
  source 1..75: mol_type = other DNA
gtggcgctcgatgccgccctgctggaaaaactccaggctgttgctgaacaccttcgggaagccgaaggctgggga

SEQ ID NO: 504350 - DNA, 75 bp, synthetic construct
  source 1..75: mol_type = other DNA
cttttgaagcagacgcagatgatgccgatgacgccgccgaactggcggacgatgcggcagccgtttttgaggatt

SEQ ID NO: 504351 - DNA, 75 bp, synthetic construct
  source 1..75: mol_type = other DNA
tcggatgtcttcgctgcggaagcagacctcgctgctgccgtggcctgctcagtggcttcgccagccttcgttgtg

SEQ ID NO: 504352 - DNA, 75 bp, synthetic construct
  source 1..75: mol_type = other DNA
tgacctcgctgctgcgctggcctgtacagcggcttcgccagcattcgttgtggctgttgaagcagacgatgcagc

SEQ ID NO: 504353 - DNA, 75 bp, synthetic construct
  source 1..75: mol_type = other DNA
aagggcgaaaatgaaattaaccaatgggctgaccgtcattctgttgagcgcgctaccgttcaggcgatacaatgg

SEQ ID NO: 504354 - DNA, 75 bp, synthetic construct
  source 1..75: mol_type = other DNA
tggttttattggctttcaggcgcggaccattgcgacatttcaggcttatctcgggcatccggtacgctggttacc

SEQ ID NO: 504355 - DNA, 75 bp, synthetic construct
  source 1..75: mol_type = other DNA
gtgactccttttcatatctatggttttctcgatgccctgccaggtgaccgttacggtgtcgccgcaggcggtcgc

SEQ ID NO: 504356 - DNA, 75 bp, synthetic construct
  source 1..75: mol_type = other DNA
tctcggcgcgcgttgccgcggattccgccgtacttttgctctgtgctgccgccgtcgcactgccagctgcctctg

SEQ ID NO: 504357 - DNA, 75 bp, synthetic construct
  source 1..75: mol_type = other DNA
cggcggatgcagaagtggctgctgattgttgtgacgctgccgcattcgtttctgacgttttcgccgcagcggcac

SEQ ID NO: 504358 - DNA, 75 bp, synthetic construct
  source 1..75: mol_type = other DNA
tttatcgatgagctgcacaccatggtgggcgcaggtaaagccgatggcgcaatggacgccgggaatatgctgaaa

SEQ ID NO: 504359 - DNA, 75 bp, synthetic construct
  source 1..75: mol_type = other DNA
cgcaggatgcgatcccgacgcttatcgatcagggcgataatgatcagtttcttgccgaccagttgcaacccgcag

SEQ ID NO: 504360 - DNA, 75 bp, synthetic construct
  source 1..75: mol_type = other DNA
ctggtgatgccagacaccagcccgcgcggcgaacaggttgccaacgacgatggctacgatttaggccagggcgca

SEQ ID NO: 504361 - DNA, 75 bp, synthetic construct
  source 1..75: mol_type = other DNA
gcccaatgcgacgctcgatctcagccaaagcgttgataatgagtattactgtctgctgctggcgaaagaacttgg

SEQ ID NO: 504362 - DNA, 75 bp, synthetic construct
  source 1..75: mol_type = other DNA
ggggtaatcacgcaggtggtgatactggatgcggataaaaagcagatacagtgcgtggtaagaccgctgcaaatc

SEQ ID NO: 504363 - DNA, 75 bp, synthetic construct
  source 1..75: mol_type = other DNA
gataaaaagcagatacagtgcgtggtaagaccgctgcaaatcctgcgtgctgacgggaggtgggaaaatattggc

SEQ ID NO: 504364 - DNA, 75 bp, synthetic construct
  source 1..75: mol_type = other DNA
agcgtctgtgcgggcacggaaagcatgatgaccgtgaacacggggggttacttacagcacaactgcgactggggc

SEQ ID NO: 504365 - DNA, 75 bp, synthetic construct
  source 1..75: mol_type = other DNA
tgatgaccgtgaacacggggagttacttacagcacaactgcgactgggaccggcagacattctggagtccgatga

SEQ ID NO: 504366 - DNA, 75 bp, synthetic construct
  source 1..75: mol_type = other DNA
cggcagacatcctggagtcagatgagaatggcattattccggagcaggacagggtaatcacgcaggtggtgatac

SEQ ID NO: 504367 - DNA, 75 bp, synthetic construct
  source 1..75: mol_type = other DNA
actaaaaaaacttatgcagcgtctgtgcggttgcggaaagcatgatgaccgtgaacacggggagttacttacagc

SEQ ID NO: 504368 - DNA, 75 bp, synthetic construct
  source 1..75: mol_type = other DNA
gatctcaaactggcaatggggcttaacgcatccaaaggcaaaaaaacggcaatcgataaaatttatccgcgacat

SEQ ID NO: 504369 - DNA, 75 bp, synthetic construct
  source 1..75: mol_type = other DNA
ccacaggaggatatgtgtcagacattcggtttaccttcatcggtgaaatatgaatcagatggaggcccaggcatc

SEQ ID NO: 504370 - DNA, 75 bp, synthetic construct
  source 1..75: mol_type = other DNA
gaaaatgtttggcggaatgaaatagccgacagcttcacaaaaaccggagtccggctccggtttttgttgtcatgt

SEQ ID NO: 504371 - DNA, 75 bp, synthetic construct
  source 1..75: mol_type = other DNA
actgaagatgtcacaatcaatggtaaatctttcagcaatcatattcataaggacggcgacaatgagaatacatca

SEQ ID NO: 504372 - DNA, 75 bp, synthetic construct
  source 1..75: mol_type = other DNA
gccatcgcggtggaggacaagcgatgtcgtcctgaaggcctgtcccccggcgacgtccggctgtatcaccgggac

SEQ ID NO: 504373 - DNA, 75 bp, synthetic construct
  source 1..75: mol_type = other DNA
gactggatgaagtgggcagtgatacaggcagaacaggagaatgacatgaatattttgagaaagcttatggagcgt

SEQ ID NO: 504374 - DNA, 75 bp, synthetic construct
  source 1..75: mol_type = other DNA
gaaaacccgctggcacagcaaatactgtctggtgaattggttccgggtaaagtgattcgcctggaagttaatgaa

SEQ ID NO: 504375 - DNA, 75 bp, synthetic construct
  source 1..75: mol_type = other DNA
atcgctttctggtacgcagaccattaaagcggaactggaacaggcgaaaatcgctattgaacaggctcgccgtgt

SEQ ID NO: 504376 - DNA, 75 bp, synthetic construct
  source 1..75: mol_type = other DNA
tttatcgacgaattacataccatggtcggcgcgggtaaagccgatggcgcaatggacgccggaaacatgctgaaa

SEQ ID NO: 504377 - DNA, 75 bp, synthetic construct
  source 1..75: mol_type = other DNA
cttacagcacaactgcgactggggccggcagacattctggagtcagatgagaatggcattattccggaacaggac

SEQ ID NO: 504378 - DNA, 75 bp, synthetic construct
  source 1..75: mol_type = other DNA
atgaatatactaaaaaaacttatgcagcgtctgtgtggttgcgaaaagcatgatggccgtgaacacgtgcagtcg

SEQ ID NO: 504379 - DNA, 75 bp, synthetic construct
  source 1..75: mol_type = other DNA
acagataaaaagctgatacagtgtgtggtaagaccgctgcaaatcctgcgtgctgacgggacgtgggaaaatatt

SEQ ID NO: 504380 - DNA, 75 bp, synthetic construct
  source 1..75: mol_type = other DNA
aaaagcagatacagtgtgtggtaagaccgctgcaaatcctgcgtgctgacgggacgtgggaaaatattggcggga

SEQ ID NO: 504381 - DNA, 75 bp, synthetic construct
  source 1..75: mol_type = other DNA
ttaaatgagccggttacgaatgacatgaatatactaaaaaaacttatgcagcgtctgtgtggttgcggaaagcat

SEQ ID NO: 504382 - DNA, 75 bp, synthetic construct
  source 1..75: mol_type = other DNA
aaaagcagataccctcgggtcagtgtgtagtaagaccgctgcaaatcctgcgtgctgacgggacgtgggaaaata

SEQ ID NO: 504383 - DNA, 75 bp, synthetic construct
  source 1..75: mol_type = other DNA
atgcagaccagggataatcttgagctcatgatggttatcaaggcgtttatcgcggtacgggggctgggcctgcgg

SEQ ID NO: 504384 - DNA, 75 bp, synthetic construct
  source 1..75: mol_type = other DNA
cagataccaaacgagatgggtttggcggtgatgtgaattgcagctgcaacgacagcaaccagaagatcagcatct

SEQ ID NO: 504385 - DNA, 75 bp, synthetic construct
  source 1..75: mol_type = other DNA
tggtggctggatataatcacggcgttctgagcgagggattcgtgacatggtgttttgttaaatttgatttacgga

SEQ ID NO: 504386 - DNA, 75 bp, synthetic construct
  source 1..75: mol_type = other DNA
ttcgggccgtctggtctggtggcgctgccgctgatgacttccgcgcaaggcatccttccggcaatggcggtttat

SEQ ID NO: 504387 - DNA, 75 bp, synthetic construct
  source 1..75: mol_type = other DNA
tcgccgtcatgagcggcgcagaaagctggctatcgagcgtgatgctatatgcaacatcatcgattcgatcttcgg

SEQ ID NO: 504388 - DNA, 75 bp, synthetic construct
  source 1..75: mol_type = other DNA
cacagacagtgaggaacctgttcaggaagccccaagaaagcgtttaagcctttctgaaaaagcaatatcactcgg

SEQ ID NO: 504389 - DNA, 75 bp, synthetic construct
  source 1..75: mol_type = other DNA
tgtggatcactattgcaccgttcgtgacaacatttgcaggaaatgccaaaactcgccgtcatgagcggcgcagaa

SEQ ID NO: 504390 - DNA, 75 bp, synthetic construct
  source 1..75: mol_type = other DNA
tcaaaccttcagcagggatttaccttaagcggacttggcgcgctggcggaagcctcgctgacctgtgacagggtg

SEQ ID NO: 504391 - DNA, 75 bp, synthetic construct
  source 1..75: mol_type = other DNA
ccctggctcccaagtcctgattaatacagacgatacagagattcatgaggggatctatgcccttgaagacagaaa

SEQ ID NO: 504392 - DNA, 75 bp, synthetic construct
  source 1..75: mol_type = other DNA
tcgcgcacgccctgaaagcatcagcgccttacatcgcgtgcttaacagataacccgttcccaccccagaatacta

SEQ ID NO: 504393 - DNA, 75 bp, synthetic construct
  source 1..75: mol_type = other DNA
agtactacagactttgctacacgtcgtgtttttgttggagattctgccgactcagtcattgaacatataaaaaaa

SEQ ID NO: 504394 - DNA, 75 bp, synthetic construct
  source 1..75: mol_type = other DNA
gcgagctgatgactatttctaagaaagcgcgtgacggtaagctgactgcgggcgaaatgcagggcggttgcttca

SEQ ID NO: 504395 - DNA, 75 bp, synthetic construct
  source 1..75: mol_type = other DNA
ccgggctttaccttaagtggccttggcgctctggcggaagcctcgctgacctgcgacagggtggtacagttctga

SEQ ID NO: 504396 - DNA, 75 bp, synthetic construct
  source 1..75: mol_type = other DNA
taaccaaaataccgacgaatgcagtggaagtatttgcctgccaaacgtagccatttacgcggcaggctaccggaa

SEQ ID NO: 504397 - DNA, 75 bp, synthetic construct
  source 1..75: mol_type = other DNA
cgaagtacaggaactgcgcagggaactttaccaggtcaaacaggcggttaaggggatgcgtgacgggatgtttag

SEQ ID NO: 504398 - DNA, 75 bp, synthetic construct
  source 1..75: mol_type = other DNA
cgtatgccctcgggttcgccatgttccaggatattaaacggatttgtcagtcgccaacggaagaagacaaatact

SEQ ID NO: 504399 - DNA, 75 bp, synthetic construct
  source 1..75: mol_type = other DNA
tgaagtagaacggcttctggactcgtgccacgcgctgatgaactacggcgtggaccggtacaaacgcccgcaaaa

SEQ ID NO: 504400 - DNA, 75 bp, synthetic construct
  source 1..75: mol_type = other DNA
ggttagattaaataggaagaaatcaagggttttgaggaatggtcagtccaaaatcgtacatggtgtaaaagtaat

SEQ ID NO: 504401 - DNA, 75 bp, synthetic construct
  source 1..75: mol_type = other DNA
agaaaattaggtggaatttacacgagatatgtcgatgacataactattagtttcgaatctgaagttaataatgat

SEQ ID NO: 504402 - DNA, 75 bp, synthetic construct
  source 1..75: mol_type = other DNA
gttgcaggagctgcgcgagcagctttatcagactaaacaggtggttaaggggatgcgggacgggatgtttagtgt

SEQ ID NO: 504403 - DNA, 75 bp, synthetic construct
  source 1..75: mol_type = other DNA
catactcagaaagaaaagcgtaaaacgcgtgaatttagcacgaaaggagccgcaatgcgtttccttaacacccgt

SEQ ID NO: 504404 - DNA, 75 bp, synthetic construct
  source 1..75: mol_type = other DNA
gagtattttatggagcggctgcgccattaccggcaggtgagcaccatgctgccgggggcaggagatcttcgctac

SEQ ID NO: 504405 - DNA, 75 bp, synthetic construct
  source 1..75: mol_type = other DNA
atgagaaaaataaaaacaaaaatctacttgcctacagctttaacaggaaacatggataaacactatatccctgtt

SEQ ID NO: 504406 - DNA, 75 bp, synthetic construct
  source 1..75: mol_type = other DNA
aagtcaccatttccaaaacacagcgccgctataaagtcggctatgtcagagcccgccaccaggaccgcaaaaccg

SEQ ID NO: 504407 - DNA, 75 bp, synthetic construct
  source 1..75: mol_type = other DNA
tgcgggaggaactttatcaggttaaacaggtggttaaggggatgcggaacgggatgtttagtgtgctgaacgaga

SEQ ID NO: 504408 - DNA, 75 bp, synthetic construct
  source 1..75: mol_type = other DNA
atgttaaacacaaaaatatcatctccaaaacacagcgccgtcttaaagtcggctatatcggcatctctcactcca

SEQ ID NO: 504409 - DNA, 75 bp, synthetic construct
  source 1..75: mol_type = other DNA
cagcagcgggtacggtcagccaaccggggcgcaatgttcgggcaaaatcaggtttaaaccgttcgatactggatc

SEQ ID NO: 504410 - DNA, 75 bp, synthetic construct
  source 1..75: mol_type = other DNA
ctcgaccattgggtggtgggcacctattttgctggtgacactgcgtgccattcagggatttgccgtcggcggcga

SEQ ID NO: 504411 - DNA, 75 bp, synthetic construct
  source 1..75: mol_type = other DNA
agagcatgacattgttgagcactcagagaaggaccaattttggggggctagtaaagactccgaaggtaactttta

SEQ ID NO: 504412 - DNA, 75 bp, synthetic construct
  source 1..75: mol_type = other DNA
tcgagtttcgattatgaagtggtgtgtatgcgtaaaattatgccagaactgggatacgttctttgcgctgttaga

SEQ ID NO: 504413 - DNA, 75 bp, synthetic construct
  source 1..75: mol_type = other DNA
actatttattccgtagctggaccgacgccagctcgattgtcgattacctgatttttgcccgtaaatacattaccg

SEQ ID NO: 504414 - DNA, 75 bp, synthetic construct
  source 1..75: mol_type = other DNA
tgccatgcgctgatgaactacggtgtggatcgttataaacgcccacaaaaaatctcgctgcaagaggagaaagcc

SEQ ID NO: 504415 - DNA, 75 bp, synthetic construct
  source 1..75: mol_type = other DNA
gaagaacctgatggctgtctctccggcagttgcaaaagctgcccggaaggcaaagcctgtctgcgcgagtggtgg

SEQ ID NO: 504416 - DNA, 75 bp, synthetic construct
  source 1..75: mol_type = other DNA
atgccgcaacatgaccaattacatcgctatctgtttgaaaattttgccgttcgcggcgaactggtaaccgtttcg

SEQ ID NO: 504417 - DNA, 75 bp, synthetic construct
  source 1..75: mol_type = other DNA
atgccgcaacatgaccaattacatcgctatctatttgaaaactttgccgtgcgcggcgaactggtaaccgtttcg

SEQ ID NO: 504418 - DNA, 75 bp, synthetic construct
  source 1..75: mol_type = other DNA
cagggcgtggttggtctggaaggtgataccctggcggcctgcctggaagattactttatgcgttctgaacagctg

SEQ ID NO: 504419 - DNA, 75 bp, synthetic construct
  source 1..75: mol_type = other DNA
aatattgaagactataacgctggtgtcgcaaacgatctggataagattgtatcggcttataagcggggtgagtga

SEQ ID NO: 504420 - DNA, 75 bp, synthetic construct
  source 1..75: mol_type = other DNA
acaaacagcagatgcgtggcgtcgcgcgcgtacagggcgaaattccggaaaatgccgacctgaaaacgctggtcg

SEQ ID NO: 504421 - DNA, 75 bp, synthetic construct
  source 1..75: mol_type = other DNA
gtgaacgttgcgccgacgcgctgaaaacgctgccggatgaagaagtagatagcatcctggcggaagaaggcgaaa

SEQ ID NO: 504422 - DNA, 75 bp, synthetic construct
  source 1..75: mol_type = other DNA
attttcgcccgcaaatacattaccgagtgcgaagaacgttatggcgttgatgaggtagaaaagctgctggactcg

SEQ ID NO: 504423 - DNA, 75 bp, synthetic construct
  source 1..75: mol_type = other DNA
gaccagcgatgcgccgtcagggaaggaaggtgccgcattcatggcgatgatggcagaaaaagcccgtcttgccgc

SEQ ID NO: 504424 - DNA, 75 bp, synthetic construct
  source 1..75: mol_type = other DNA
gcgtaccctgccgaagcgcgaggaagagaaaacggttgctgaagcgcgccgctatccgtccgagccacaagaaaa

SEQ ID NO: 504425 - DNA, 75 bp, synthetic construct
  source 1..75: mol_type = other DNA
taactatccacactggtcattcggtaaaaagtttatcgagactgaacggctgtataagcacggtcagcaaggact

SEQ ID NO: 504426 - DNA, 75 bp, synthetic construct
  source 1..75: mol_type = other DNA
tggtcatactgcgaaagaaaatcgcctgtcacaaagtcaattcagatgccaggtatgtggatatacagcgaacgc

SEQ ID NO: 504427 - DNA, 75 bp, synthetic construct
  source 1..75: mol_type = other DNA
ggtgagccagtatttttatccgcaaaaacagactcaggtgatgaacgaaggctgggcgaccttctggcactacac

SEQ ID NO: 504428 - DNA, 75 bp, synthetic construct
  source 1..75: mol_type = other DNA
tcatcacgctggtatgcccacactgtagccagcattactacaccgaagtcccggccatggaattcatcccttgtg

SEQ ID NO: 504429 - DNA, 75 bp, synthetic construct
  source 1..75: mol_type = other DNA
cgcgggcgcgttatattcccaggataaaggccagacgctggagatgatcaagcgcacgccgctggaatatcagcc

SEQ ID NO: 504430 - DNA, 75 bp, synthetic construct
  source 1..75: mol_type = other DNA
tgttcgaaagcggtcagctaccgattgcaacttatggttgggtagttgatcaggtgtatgcggcgttaaagcagt

SEQ ID NO: 504431 - DNA, 75 bp, synthetic construct
  source 1..75: mol_type = other DNA
atgaaaagtaaccgtaagcgccttgtaagggcatatgacaaagcattaaaggcttttgatgatctgcgacgcaat

SEQ ID NO: 504432 - DNA, 75 bp, synthetic construct
  source 1..75: mol_type = other DNA
gaagcctatgagcgaatgctgcgaggagatgtgaaattagactggccccctgaatctccagacaaccaatatcac

SEQ ID NO: 504433 - DNA, 75 bp, synthetic construct
  source 1..75: mol_type = other DNA
atgaagatcaaagctgttggtgcatattccgctaaacaaccgctggaaccgatggatattaccaggcgtgaaccg

SEQ ID NO: 504434 - DNA, 75 bp, synthetic construct
  source 1..75: mol_type = other DNA
atgggtttgcgggtttatttttaccacgctctttggctgccgaaacgtcaatctggactgattatgaaacggaca

SEQ ID NO: 504435 - DNA, 75 bp, synthetic construct
  source 1..75: mol_type = other DNA
cgctgccattcaatatcgttatgaatcgtgagtattacccagaagctgaaattatcgctaattaccagtcactgg

SEQ ID NO: 504436 - DNA, 75 bp, synthetic construct
  source 1..75: mol_type = other DNA
gatcgaccatgacgctattttactgcatgagccgccagccgcctcacctgaacagggtgtagggttgatggttaa

SEQ ID NO: 504437 - DNA, 75 bp, synthetic construct
  source 1..75: mol_type = other DNA
gcaaagatcctatctggtcgtccgtcgctgtataccgtcaacgtatgccagctactgaagagatgaaagcccagg

SEQ ID NO: 504438 - DNA, 75 bp, synthetic construct
  source 1..75: mol_type = other DNA
gtgaataaagaattgattcaggttaataccaaattaaccgctaataccatccgtcgggaaacatataacgggcgt

SEQ ID NO: 504439 - DNA, 75 bp, synthetic construct
  source 1..75: mol_type = other DNA
aagcacttaaaccagtacaggcaagcgtagaagaattacagaccaatcagaaagcgattaaagaagagatcgcag

SEQ ID NO: 504440 - DNA, 75 bp, synthetic construct
  source 1..75: mol_type = other DNA
cagaaacgttgaattacgcggcaaccgtgtttatgtggaaaaatgggtggatgtggaaaccgccagccattcaga

SEQ ID NO: 504441 - DNA, 75 bp, synthetic construct
  source 1..75: mol_type = other DNA
cccgctcggtgcggctattggcgcgttaaccagtggaaaactggcgcatagcgtacggccaggtctgttgatgtt

SEQ ID NO: 504442 - DNA, 75 bp, synthetic construct
  source 1..75: mol_type = other DNA
gttgttattgctggtgctggtggagttgcgacattttcgccagacgccgccgcaggtgacagcgtccgacagtta

SEQ ID NO: 504443 - DNA, 75 bp, synthetic construct
  source 1..75: mol_type = other DNA
cttaatgcactgctgccggagccgtcattgctggcaatctatttacttggtttatgggatggttttttcgcatcg

SEQ ID NO: 504444 - DNA, 75 bp, synthetic construct
  source 1..75: mol_type = other DNA
gtgggagggattgcgctgctgggtggtttattgacgatggcgagtgcggtgcgggtactgtatccggcgctggct

SEQ ID NO: 504445 - DNA, 75 bp, synthetic construct
  source 1..75: mol_type = other DNA
gggcggtttgggagcgatgatgacaccggttgcttccgcaagcgcgagcggttttggtttgttgattatcggcgt

SEQ ID NO: 504446 - DNA, 75 bp, synthetic construct
  source 1..75: mol_type = other DNA
gttgttgttgctggtgttggtggagttacgccgttttcgccagacgccgccgcaagcggcagcgtctgaaagcta

SEQ ID NO: 504447 - DNA, 75 bp, synthetic construct
  source 1..75: mol_type = other DNA
gtcgattgaccatgacgccatcttactgcatgaaccgccagccgcatcgcctgaacagggcgttggcctgatggt

SEQ ID NO: 504448 - DNA, 75 bp, synthetic construct
  source 1..75: mol_type = other DNA
gtacgctgaccgataacaacggacgcaaagcggacttccgtaacgtggtgttggtgatgaccaccaacgccgggg

SEQ ID NO: 504449 - DNA, 75 bp, synthetic construct
  source 1..75: mol_type = other DNA
atgtcagtgtatgactatcccgtaccaaccacaccgtggctgaatacggcacccggtttatttattgacgattat

SEQ ID NO: 504450 - DNA, 75 bp, synthetic construct
  source 1..75: mol_type = other DNA
ctggatggcgagccgattaaactgacccgcgcagagtatgaaatgttggtggcgtttgtgaccaatcccggcaaa

SEQ ID NO: 504451 - DNA, 75 bp, synthetic construct
  source 1..75: mol_type = other DNA
tagacaaaaatgaacttgaaaccttagtaaagcttaccgaggcagttgcgggtaagattggacagggaaataagt

SEQ ID NO: 504452 - DNA, 75 bp, synthetic construct
  source 1..75: mol_type = other DNA
tcgcgccgatcgtggttcattattgttagtcggtcagcgttcatcacagggttggcaaggcgatatcattccatt

SEQ ID NO: 504453 - DNA, 75 bp, synthetic construct
  source 1..75: mol_type = other DNA
ttaggtgaggatgaaagactttttcttaaatttgacttcgaaaagacagacaaagttgtagttgaatataatctt

SEQ ID NO: 504454 - DNA, 75 bp, synthetic construct
  source 1..75: mol_type = other DNA
ataccaaattaaccgctaataccatccgccgggaaacatataacgggcgtgaacacattgtggtcccgtcatata

SEQ ID NO: 504455 - DNA, 75 bp, synthetic construct
  source 1..75: mol_type = other DNA
gcaaacgcaaataaaaaagaagcagaaaaacgcgccgcagtaatgaaagttcacggcgaaattgttgctaatgct

SEQ ID NO: 504456 - DNA, 75 bp, synthetic construct
  source 1..75: mol_type = other DNA
gcaaagagccgatctggtcatccgtcgccgtatatcgtcaacgtatgccagctactgaagagatgaaagcccagg

SEQ ID NO: 504457 - DNA, 75 bp, synthetic construct
  source 1..75: mol_type = other DNA
cgccataaactcagcgcggatttactggtgacgcaacatggcgaaggttatttcttagccgctgatgtgtgctga

SEQ ID NO: 504458 - DNA, 75 bp, synthetic construct
  source 1..75: mol_type = other DNA
gcagaatcagccagtggatttaattctgctggatatcaatttgcccgatgaaaatggcctgatgttaacccgcgc

SEQ ID NO: 504459 - DNA, 75 bp, synthetic construct
  source 1..75: mol_type = other DNA
ctgctggatatcaatttgcccgatgaaaatggcctgatgttaacccgcgccctgcgagaacgctcaacggtgggg

SEQ ID NO: 504460 - DNA, 75 bp, synthetic construct
  source 1..75: mol_type = other DNA
ggtttattgacgatggcgagcgcggtgcgggtactgtatccggcgctggctgacaactggcagatgtcggcggca

SEQ ID NO: 504461 - DNA, 75 bp, synthetic construct
  source 1..75: mol_type = other DNA
acacccagtcagaaacggcgcgtagcctgcgttcggttgaaaaagtgtcatttagcctggaagatgcgcaagaac

SEQ ID NO: 504462 - DNA, 75 bp, synthetic construct
  source 1..75: mol_type = other DNA
aatcgctattagcggctattttaagcgcaaccttgttaaccggttgtgatggtggtggttcgggatcatcctccg

SEQ ID NO: 504463 - DNA, 75 bp, synthetic construct
  source 1..75: mol_type = other DNA
ttggcgtcaactactacaccaattcagggcgtggtgtaaccggagaaaacggcgagttttcctttagctgggggg

SEQ ID NO: 504464 - DNA, 75 bp, synthetic construct
  source 1..75: mol_type = other DNA
ctgtgtgcctcctgggtcgctcagacggatctttcggagttctttaagaaatggaatccgggtgcgaatgcttac

SEQ ID NO: 504465 - DNA, 75 bp, synthetic construct
  source 1..75: mol_type = other DNA
ctgtcaccgtggcgctggccgacgaccttaccggacgtgagaagcatgaagtcgctctgaaccgtccgccaaaag

SEQ ID NO: 504466 - DNA, 75 bp, synthetic construct
  source 1..75: mol_type = other DNA
taaagcgggcatgatgaacccgagctatccgctcaactatatggaaaaaccgctgacgcgcctgatgctgggtcg

SEQ ID NO: 504467 - DNA, 75 bp, synthetic construct
  source 1..75: mol_type = other DNA
atgcttacgatggtggcacgcagtgctccgcagagctgaaacaatcgctgatcgataacaagatgatctacggtg

SEQ ID NO: 504468 - DNA, 75 bp, synthetic construct
  source 1..75: mol_type = other DNA
gaggtcaactgtctggaataccgcccaggcacgggtgtgccggtaaccggtggcatgtatgttccgcagtatacg

SEQ ID NO: 504469 - DNA, 75 bp, synthetic construct
  source 1..75: mol_type = other DNA
agggcaacagcccaacgaatgagtcagccaacttcacctttactggcgtggtaaaagcgccgttctataaagacg

SEQ ID NO: 504470 - DNA, 75 bp, synthetic construct
  source 1..75: mol_type = other DNA
accaacattcagcgtctgtatcagcatgagctttacttccgtaccaatggtcgcaaaggtgagcgtctgagcagc

SEQ ID NO: 504471 - DNA, 75 bp, synthetic construct
  source 1..75: mol_type = other DNA
ggtatggtgttgctggcgtcaactactacaccaattcaggccgtggcgtgacaggggaaaatggtgaattttcct

SEQ ID NO: 504472 - DNA, 75 bp, synthetic construct
  source 1..75: mol_type = other DNA
aaaaccaagtttggcgaaagaaattactgtgctgagtcaaacggtaacgctgcggacacgctgatgctgtgtgcc

SEQ ID NO: 504473 - DNA, 75 bp, synthetic construct
  source 1..75: mol_type = other DNA
aactgccaccttcaacctgccgtttatctcgctggggcaagtcggcaaaggtaagctgatggttatcggtaaccc

SEQ ID NO: 504474 - DNA, 75 bp, synthetic construct
  source 1..75: mol_type = other DNA
ttaagcatttgaccagctatggcgatctgaatccggaagagattccgttgctgatcctcaacggctttgaatatg

SEQ ID NO: 504475 - DNA, 75 bp, synthetic construct
  source 1..75: mol_type = other DNA
tccttcgtgtcggctaacgcggaacagttttatcagtatcaaccttcggaaatcattctctccgaaggtcgactg

SEQ ID NO: 504476 - DNA, 75 bp, synthetic construct
  source 1..75: mol_type = other DNA
aatggcatttgggtttatgaacgttatcctgccgcagacggtgcgcagccgccgtacaccatcgacccaactaca

SEQ ID NO: 504477 - DNA, 75 bp, synthetic construct
  source 1..75: mol_type = other DNA
agggcggtgtgagccagtcggcatacaacacgctggcgtcgctcaagctgccgaaaccggaacaggggccggaaa

SEQ ID NO: 504478 - DNA, 75 bp, synthetic construct
  source 1..75: mol_type = other DNA
cgatggtgcaggcggcggatttaggcaccaacattcagcgtctgtatcagcacgagctttacttccgtaccaatg

SEQ ID NO: 504479 - DNA, 75 bp, synthetic construct
  source 1..75: mol_type = other DNA
actggaagttgccagctggcaggaggaagttgagggcaaacaggtaacgcgttatgcctttattgatgaggcgga

SEQ ID NO: 504480 - DNA, 75 bp, synthetic construct
  source 1..75: mol_type = other DNA
gctatgacagcagcaaggaagacgagctgggctttaaaacgttcaccgagttcctgaactgctacgccaacgatg

SEQ ID NO: 504481 - DNA, 75 bp, synthetic construct
  source 1..75: mol_type = other DNA
gaccggaagagagaagcatgaagtcgcgctgaaccgtccgccaagagtaaccaaaacgtactctctggacgctag

SEQ ID NO: 504482 - DNA, 75 bp, synthetic construct
  source 1..75: mol_type = other DNA
caccacgccgggaacaaaaccggatctgaacgcttccttcgtgtcggctaacgcggaacagttttatcagtatca

SEQ ID NO: 504483 - DNA, 75 bp, synthetic construct
  source 1..75: mol_type = other DNA
cagaacctgttcctacgaaaacgggttatctgactctgggcggaagccagcggataactggtgctacttgtaatg

SEQ ID NO: 504484 - DNA, 75 bp, synthetic construct
  source 1..75: mol_type = other DNA
agagggaacatcgccggatctcaacgctagcttcgtgtcagctaatgcggaacagttttatcagtatcaacctac

SEQ ID NO: 504485 - DNA, 75 bp, synthetic construct
  source 1..75: mol_type = other DNA
gattagaggagtgtaaggactcgacatatcactacgaaatcaactgcctggaataccgtcctggcacgaacgttc

SEQ ID NO: 504486 - DNA, 75 bp, synthetic construct
  source 1..75: mol_type = other DNA
ggcgaatgggcatctgcaaacagaagtggagccttttgacgtccatttccgtcacctgagcgaggcggagattga

SEQ ID NO: 504487 - DNA, 75 bp, synthetic construct
  source 1..75: mol_type = other DNA
catttaattattggttcagaccaggtatgtgttcttgatggcgaaatcaccggtaaaccgttaacggaagaaaat

SEQ ID NO: 504488 - DNA, 75 bp, synthetic construct
  source 1..75: mol_type = other DNA
cataaagcctggttgttgtggtgttacagcggaaatatttgctgggaacaccagatcgcgataacacagtgggca

SEQ ID NO: 504489 - DNA, 75 bp, synthetic construct
  source 1..75: mol_type = other DNA
gcgtcacgcgcctgaacgaaaaatctccggctgcggtgttagcagaagtgacggccgactggcgtgaagaaaata

SEQ ID NO: 504490 - DNA, 75 bp, synthetic construct
  source 1..75: mol_type = other DNA
tgtggagttaagcctgataactggagccataattatgcgaactactggcgtgagatgtgcgatatttttaagcgc

SEQ ID NO: 504491 - DNA, 75 bp, synthetic construct
  source 1..75: mol_type = other DNA
tgcaatgaaagacattttccaccggctggatagtgaggccttattgtttgtgatgagaacacgttcagaacaaaa

SEQ ID NO: 504492 - DNA, 75 bp, synthetic construct
  source 1..75: mol_type = other DNA
acagcggaaggcaaagaggtaatgaaaaagctgatccgcgaagctgatatcttggtcgagaactttcatccaggg

SEQ ID NO: 504493 - DNA, 75 bp, synthetic construct
  source 1..75: mol_type = other DNA
tcaggttgccataacgcagtgggcatggagcgagtttaaggcgctgttaggtacaagaaaaattgccagtaagac

SEQ ID NO: 504494 - DNA, 75 bp, synthetic construct
  source 1..75: mol_type = other DNA
acgccactggcaggccgggccgggtaaaaaagtgggcgtggtcggcatcggcggtctgggacatatggggattaa

SEQ ID NO: 504495 - DNA, 75 bp, synthetic construct
  source 1..75: mol_type = other DNA
ctggatagtgaggctttattgtttgtgatgagaacacgttcagaacaaaaagcggcattttcaaagcaaagtatt

SEQ ID NO: 504496 - DNA, 75 bp, synthetic construct
  source 1..75: mol_type = other DNA
gatgctgttgtctctgctcagtttctgcaccgcgtgcagcatccacggcgttcagacccgcgagtgtggtcacac

SEQ ID NO: 504497 - DNA, 75 bp, synthetic construct
  source 1..75: mol_type = other DNA
acgtctgatttttggttcgatcaaagggtttgatgagtgttcgccttatgtgaatgtaaaagcctatgaaaacgt

SEQ ID NO: 504498 - DNA, 75 bp, synthetic construct
  source 1..75: mol_type = other DNA
actggggatcgaccaatctgcgcgcctggctttatcagggcgaccactgcctggacagcaggcaatcagaagcag

SEQ ID NO: 504499 - DNA, 75 bp, synthetic construct
  source 1..75: mol_type = other DNA
cgtatggacggcgatcgtctggttatccacgcctccacccaggtaccatggcacttacgccgccaggtcgcgcgc

SEQ ID NO: 504500 - DNA, 75 bp, synthetic construct
  source 1..75: mol_type = other DNA
ctgagttttttggtggggaaggctacgaataccaggaactggcgttactggtgggagtaacaaccaaaaactggt

SEQ ID NO: 504501 - DNA, 75 bp, synthetic construct
  source 1..75: mol_type = other DNA
agttttcaacctcttcatggcgccgcgctgttctgtctctcgatgagcatcagaaagcatggttgctgtggagtt

SEQ ID NO: 504502 - DNA, 75 bp, synthetic construct
  source 1..75: mol_type = other DNA
gcgggcgtagcgaaatccacatggacggaaacgtatttgcctcactggctggcaatgcgtaatagctttaagcga

SEQ ID NO: 504503 - DNA, 75 bp, synthetic construct
  source 1..75: mol_type = other DNA
ggtcaccacctactacagcaacatttgtccaaatggtgcttatcagggctatggcgcgccaaaaggtaactttgc

SEQ ID NO: 504504 - DNA, 75 bp, synthetic construct
  source 1..75: mol_type = other DNA
atggcgcaaactttgctgaagttgccgtcaacacgcgtacgggtgaaatccgcctggataaattctacgccttgc

SEQ ID NO: 504505 - DNA, 75 bp, synthetic construct
  source 1..75: mol_type = other DNA
tattggcgaacaattaacgtctgttggcgacaatatctggattattcccggattatgcgtctctcatgacgataa

SEQ ID NO: 504506 - DNA, 75 bp, synthetic construct
  source 1..75: mol_type = other DNA
tgaccggtgaattacatcatttactgttaaatcactcattgattggcgcaggtttaccgccgcaggaaaactctg

SEQ ID NO: 504507 - DNA, 75 bp, synthetic construct
  source 1..75: mol_type = other DNA
ttgccgcagctttttgaagttcgtgcctcgcatgtgctgggaacacttccccgtgaacaggtcagcgaatttctc

SEQ ID NO: 504508 - DNA, 75 bp, synthetic construct
  source 1..75: mol_type = other DNA
ctcggctgaagggatgaccgcgggagagttggtggcttttcttgcggcaaaaggcaaatttattccctgcgaaga

SEQ ID NO: 504509 - DNA, 75 bp, synthetic construct
  source 1..75: mol_type = other DNA
ttgaacaagtcccatgtcggcaagcatacatacaaacgaaagaaaccgcgcattctggatgaagtgaccggcagg

SEQ ID NO: 504510 - DNA, 75 bp, synthetic construct
  source 1..75: mol_type = other DNA
ataatccgccgatacccggtaagcagtcacgggcgaaaggctcatccattgccctggtcagtccgatcgagttct

SEQ ID NO: 504511 - DNA, 75 bp, synthetic construct
  source 1..75: mol_type = other DNA
tcggcgtgttgttattgctggtgctggtggagttgcgacgttttcgccagacgccgccgcaggtgacagcgtccg

SEQ ID NO: 504512 - DNA, 75 bp, synthetic construct
  source 1..75: mol_type = other DNA
attgagaattggtatctgaaaaccgagcataaacgccgcccgcccattaccgtttttgatgatttctggaaaaaa

SEQ ID NO: 504513 - DNA, 75 bp, synthetic construct
  source 1..75: mol_type = other DNA
tcattgatggttcagccatctgtctttgaaagctacaaggcacgaaaaggggattttgcaaaaggcgttggtttc

SEQ ID NO: 504514 - DNA, 75 bp, synthetic construct
  source 1..75: mol_type = other DNA
tcctcaatattgaaaagaaggcgttggagaagaaaataagaactgaaatctgtcgtgggcaggatcattcagaga

SEQ ID NO: 504515 - DNA, 75 bp, synthetic construct
  source 1..75: mol_type = other DNA
atttgcggctggtggacaatgtgttcagtgtggtggatgtgatttgcctgatcttaatcgtcgtgggcattttcc

SEQ ID NO: 504516 - DNA, 75 bp, synthetic construct
  source 1..75: mol_type = other DNA
aattttttatctcttgtatgcgatgcctttgactcgtcgtcacatgtttttccgcgccttatcctgttttcaata

SEQ ID NO: 504517 - DNA, 75 bp, synthetic construct
  source 1..75: mol_type = other DNA
tgtatcgtctcaacaaacgtcagggtaaacagttactggcggcattaggttgcccggaacacctttataagaaag

SEQ ID NO: 504518 - DNA, 75 bp, synthetic construct
  source 1..75: mol_type = other DNA
acaacattgtcaggattggtaatacctttacaagcttattaaaagaaaagggagaggataacaacagcatcaatt

SEQ ID NO: 504519 - DNA, 75 bp, synthetic construct
  source 1..75: mol_type = other DNA
accgatgcgatggaagagatcaaaaagatctttacgccagagtttcgtaaccgtctcgacaatattatctggttc

SEQ ID NO: 504520 - DNA, 75 bp, synthetic construct
  source 1..75: mol_type = other DNA
ctggtgatgactaccaacgccggggtacgtgaaaccgagcgtaaatcgattgggcttatccaccaggataacagc

SEQ ID NO: 504521 - DNA, 75 bp, synthetic construct
  source 1..75: mol_type = other DNA
taaaatggcggagaatatggcgaggcttgctgccttactacattacttcagtggtgatgagggcgatatatctat

SEQ ID NO: 504522 - DNA, 75 bp, synthetic construct
  source 1..75: mol_type = other DNA
caatatggccctaataaattcaggagtcgtagtaaagcaaatgaattgctgagtgctttgttctctcaaaataaa

SEQ ID NO: 504523 - DNA, 75 bp, synthetic construct
  source 1..75: mol_type = other DNA
aatgaacgtctttgtctgcgcttcttggtagaagcggaaaatcgctggatagaattttataacaaggtggagtca

SEQ ID NO: 504524 - DNA, 75 bp, synthetic construct
  source 1..75: mol_type = other DNA
aaggcgaccacgaaagggtcgccagtggagataaaggaaatcaagcgcattatccacaatgccatatctgaggct

SEQ ID NO: 504525 - DNA, 75 bp, synthetic construct
  source 1..75: mol_type = other DNA
tgttaatggtgttaagctgttggttagcgagcttagcggtgttgagccgaaaatgttgcgtaccatggttgacga

SEQ ID NO: 504526 - DNA, 75 bp, synthetic construct
  source 1..75: mol_type = other DNA
catcaaagttgacgaagctggttttgaagcagcaatggaagagcagcgtcgtcgtgcgcgcgaagccagcggctt

SEQ ID NO: 504527 - DNA, 75 bp, synthetic construct
  source 1..75: mol_type = other DNA
aaatcttctacgatcacggcgaccacatttggggggggcctccgggaagcccggaagaagacggcgaccgctaca

SEQ ID NO: 504528 - DNA, 75 bp, synthetic construct
  source 1..75: mol_type = other DNA
ttcgttgctgcaatatacaatgctgcaaacgcaaaccccggaagcgatgttagggcggattaacggtttgtggac

SEQ ID NO: 504529 - DNA, 75 bp, synthetic construct
  source 1..75: mol_type = other DNA
acttggcaggtggggctttcggtgacgctgaccggcggcgtagcctggaactacgggctggcggcggcgggcacg

SEQ ID NO: 504530 - DNA, 75 bp, synthetic construct
  source 1..75: mol_type = other DNA
accggacgcgcagtaccgggatgctgctgtgtaccgctggcggtgccgtagccgggttaaccggattaggtggcg

SEQ ID NO: 504531 - DNA, 75 bp, synthetic construct
  source 1..75: mol_type = other DNA
agaaaaagaacgggtgaaacgtttccctattgaatcgcgcttattccacaaactctcgacgcgccatcggctggc

SEQ ID NO: 504532 - DNA, 75 bp, synthetic construct
  source 1..75: mol_type = other DNA
taaactggtaccctacgcggcacaacgatttattgataatctgcctgcgattttcgccggaacgtttaatcatgc

SEQ ID NO: 504533 - DNA, 75 bp, synthetic construct
  source 1..75: mol_type = other DNA
cttattccacaaactctcgacgcgccatcggctggccggtaatgactccaacttattgatagtgttttatgttca

SEQ ID NO: 504534 - DNA, 75 bp, synthetic construct
  source 1..75: mol_type = other DNA
acgatggaaccgctgccgaagccgtctgtagataccggtatgggtctggagcgtattgctgcggtgctgcaacac

SEQ ID NO: 504535 - DNA, 75 bp, synthetic construct
  source 1..75: mol_type = other DNA
aaatacggccaggcgattggtcacatcggtaaacttgctgcgggttctctgaaagtgggcgacgcggtgcaggct

SEQ ID NO: 504536 - DNA, 75 bp, synthetic construct
  source 1..75: mol_type = other DNA
tggaagtccagcaggtggggcgctacatcgccaaagaaattttaagccgtctgaaagagcttaaattactggaag

SEQ ID NO: 504537 - DNA, 75 bp, synthetic construct
  source 1..75: mol_type = other DNA
aatcggtatctatgcagcattaggtgttaaatcaagagaaatgagagaaactccgtctgtaaaatgttgggaggt

SEQ ID NO: 504538 - DNA, 75 bp, synthetic construct
  source 1..75: mol_type = other DNA
caagcgccactaacgtaacagaggcgaccagcgtatcctcgctggacctgtcaggctcctcaaaaacgaaatttt

SEQ ID NO: 504539 - DNA, 75 bp, synthetic construct
  source 1..75: mol_type = other DNA
gcggcagtcattttttgtgagcgttacagatctgatggtctctggcgcaaaaggtattccggagacacagaaata

SEQ ID NO: 504540 - DNA, 75 bp, synthetic construct
  source 1..75: mol_type = other DNA
tgtatcggattgctgtgaaaaaccttcaaatatatctctagctgattacctaaacttgattatggctgttcccaa

SEQ ID NO: 504541 - DNA, 75 bp, synthetic construct
  source 1..75: mol_type = other DNA
gatcaccgccacaagtgaagatgccccagcggtaattcccaaaaacatgcctttaatatctgacgaccagtaccc

SEQ ID NO: 504542 - DNA, 75 bp, synthetic construct
  source 1..75: mol_type = other DNA
accgttacggtgtcgccgcaggtggtcgcaggctggcggcactcaatatgctggcagagcgtggcatccttccgg

SEQ ID NO: 504543 - DNA, 75 bp, synthetic construct
  source 1..75: mol_type = other DNA
aaaaggaaaacgacgccggagacgttgaacaaatcccgatgctgaaaacctttaccgtgtttaacgttcagcaaa

SEQ ID NO: 504544 - DNA, 75 bp, synthetic construct
  source 1..75: mol_type = other DNA
ttattcaaaagggcgaggtgctttttaagctcgacccggttcgttaccaggcgcgagttgacagcttcaggctga

SEQ ID NO: 504545 - DNA, 75 bp, synthetic construct
  source 1..75: mol_type = other DNA
ccctctgaaacccgtaacggtaaaaaaccggataagatcactgttgtttgtaattacagagaataatttcagcct

SEQ ID NO: 504546 - DNA, 75 bp, synthetic construct
  source 1..75: mol_type = other DNA
cgaccctcaactgatgaagtctggctaccggagcgctatctgttttcagatgcagctaatttctacgctacaggc

SEQ ID NO: 504547 - DNA, 75 bp, synthetic construct
  source 1..75: mol_type = other DNA
tgttacggaagagtggcgcaaacatcatcgagaaaggacaaaacgcctttttcagcccatcaactgatgaagtct

SEQ ID NO: 504548 - DNA, 75 bp, synthetic construct
  source 1..75: mol_type = other DNA
agtcagtccggaagcgacatttgacccgtttccacaggctgaaaatctgttgcggatgagcggcgcaaaaatcat

SEQ ID NO: 504549 - DNA, 75 bp, synthetic construct
  source 1..75: mol_type = other DNA
cgccaagtgggatgactacatgcaagtgtgggtcggtaagtccggccaagagactaaagtgtggtctggcccaga

SEQ ID NO: 504550 - DNA, 75 bp, synthetic construct
  source 1..75: mol_type = other DNA
cagcggtaaagcgccgcgcgcccagtatgtgctggcggagcaggtgactcgtctggttcacggcgaagaaggttt

SEQ ID NO: 504551 - DNA, 75 bp, synthetic construct
  source 1..75: mol_type = other DNA
tacgctgcaaattggcggttctgaccagtggggtaacattacttctggtatcgatctgacccgtcgtctgcatca

SEQ ID NO: 504552 - DNA, 75 bp, synthetic construct
  source 1..75: mol_type = other DNA
atgatcaacaaagaagcggttaagcagcgtctcaaccgtgaagatcaggggatttcgttcaccgagttttcctac

SEQ ID NO: 504553 - DNA, 75 bp, synthetic construct
  source 1..75: mol_type = other DNA
acgcccagacctgaattaggcgaaggtatttttgttcttccttttgaacgccacgtcatttatttcctgcaatca

SEQ ID NO: 504554 - DNA, 75 bp, synthetic construct
  source 1..75: mol_type = other DNA
ccgctgatcaccaaggctgacggcaccaaatttggtaaaactgaaggcggcgcagtatggctggatccgaagaag

SEQ ID NO: 504555 - DNA, 75 bp, synthetic construct
  source 1..75: mol_type = other DNA
cgcttagcgaagcagacttcgaacaactggcgcaggatggcgtaccgatggttgaaatggaaaaaggcgctgacc

SEQ ID NO: 504556 - DNA, 75 bp, synthetic construct
  source 1..75: mol_type = other DNA
gaagtaagtcggtcgtatgccagacaatgggagccagcctgatgacctatagcctgataagactcataaaaaaac

SEQ ID NO: 504557 - DNA, 75 bp, synthetic construct
  source 1..75: mol_type = other DNA
cgacttttatctggaatttgtcgagtggaatgagtccaacggcttttacgatttcgtttatctggatacagaaaa

SEQ ID NO: 504558 - DNA, 75 bp, synthetic construct
  source 1..75: mol_type = other DNA
acgcattacaatgaaaaccacccgcacagcgcgctgggatatcactccccgagggaataccggcggcagcggaca

SEQ ID NO: 504559 - DNA, 75 bp, synthetic construct
  source 1..75: mol_type = other DNA
gctaaagcttctgcagtgaaacgtcacgcgaagaaactggctcccgaaaaaacacgccgcacccgtctgtactaa

SEQ ID NO: 504560 - DNA, 75 bp, synthetic construct
  source 1..75: mol_type = other DNA
ggtgagaggcacatgccggtaattaaagtaggtgaaaacgagccgttcgacgtagctctgcgtcgcttcaagcgt

SEQ ID NO: 504561 - DNA, 75 bp, synthetic construct
  source 1..75: mol_type = other DNA
cgcgaagtgccgagcaagatgattggcaatctggtgatggagcaattgaaaaagctcgataaagtcgcctatatc

SEQ ID NO: 504562 - DNA, 75 bp, synthetic construct
  source 1..75: mol_type = other DNA
gttttcattttccggggccgcagcggcagtcaagttaaactgctgtggtccaccggtgacgggctgtgcctcctg

SEQ ID NO: 504563 - DNA, 75 bp, synthetic construct
  source 1..75: mol_type = other DNA
gcgggaataacaaccaaaaactggtccaaaacatttactggtcactgggttgcaatgaaacacatttttcatcag

SEQ ID NO: 504564 - DNA, 75 bp, synthetic construct
  source 1..75: mol_type = other DNA
gagaaatgcgtgggttgtctgctttgtggtcacgtctgcccggtaggttgtattgatcttggggaagtgaagttt

SEQ ID NO: 504565 - DNA, 75 bp, synthetic construct
  source 1..75: mol_type = other DNA
gtggtcatgtctgcccggtaggttgtattgatcttggggaagtgaagtttaagaaaggcgagaaagaacacccgg

SEQ ID NO: 504566 - DNA, 75 bp, synthetic construct
  source 1..75: mol_type = other DNA
tggaatgaatttaacgcgcaatctggtaccagaaaaattgcggagaaaacacgggagcgcctgaaaaaattaatc

SEQ ID NO: 504567 - DNA, 75 bp, synthetic construct
  source 1..75: mol_type = other DNA
cataaaacctggttgttgtggtgttacagcggaaatatttgctgggagtatcaggtcaccataacccgctgggca

SEQ ID NO: 504568 - DNA, 75 bp, synthetic construct
  source 1..75: mol_type = other DNA
gatgaagtgaccggaaaaatgattacgcgggataatccaccaatcccggggaaacaatcgctggcgaaggggacg

SEQ ID NO: 504569 - DNA, 75 bp, synthetic construct
  source 1..75: mol_type = other DNA
tcatgcgatgggtagcgatgtcgggcaaagcccggagctggtagaaaaatattgtcgggcagtaaaacgtggttc

SEQ ID NO: 504570 - DNA, 75 bp, synthetic construct
  source 1..75: mol_type = other DNA
gacaaagtattgatcgcttcaatcatgggcgaaaatgagcagcaatgggaagagctggcgcgtctggtgcaagaa

SEQ ID NO: 504571 - DNA, 75 bp, synthetic construct
  source 1..75: mol_type = other DNA
tcggcggcattgaaacctgggaagatgcggcggagtttttattgctcggcgcagcgacgttgcaggtgaccaccg

SEQ ID NO: 504572 - DNA, 75 bp, synthetic construct
  source 1..75: mol_type = other DNA
cggcgtggtgtttaaaacgatcggtttttttatcgccaacgaagtctcgccgcgttttgatcatctggtgaaaga

SEQ ID NO: 504573 - DNA, 75 bp, synthetic construct
  source 1..75: mol_type = other DNA
aggagatggtaggtctggcgaatcacaatattgtcccggcggaagatttagaccgcagttatattgtctatcccc

SEQ ID NO: 504574 - DNA, 75 bp, synthetic construct
  source 1..75: mol_type = other DNA
gtaggcaactgctatgagatgtgcgccaaagcttacgataccggctggggcggtgtcgtgttcaaaaccattggt

SEQ ID NO: 504575 - DNA, 75 bp, synthetic construct
  source 1..75: mol_type = other DNA
tggaaagagtttaaggcacactctggcactaggaaaattgcagggaaaacacaggaacgtctgaaaaaattaatg

SEQ ID NO: 504576 - DNA, 75 bp, synthetic construct
  source 1..75: mol_type = other DNA
cttgatggcgattcactcctctgtactgtgagaacacgatcacaacaaaaagcgactttttcgcagcagggtatt

SEQ ID NO: 504577 - DNA, 75 bp, synthetic construct
  source 1..75: mol_type = other DNA
cgccctcctgtcgctggaagaccaccagaaatcctggttgctgtggaactacagcgacaatatccgctgggagca

SEQ ID NO: 504578 - DNA, 75 bp, synthetic construct
  source 1..75: mol_type = other DNA
acgacgctgaccgcacggaacaggtgcaggaaaaagcgtcagtggaggaaatcagtctgccactgctgacgaaaa

SEQ ID NO: 504579 - DNA, 75 bp, synthetic construct
  source 1..75: mol_type = other DNA
aaatctggctggttgccggtatcaccgatatgagaaatggcttcaacggcctggctgcgaaggtacagactacgc

SEQ ID NO: 504580 - DNA, 75 bp, synthetic construct
  source 1..75: mol_type = other DNA
gcgcgaagaaagtggcgggcaagacgatggagcgcctgaagaagcttgtctggctcgcggctcaggacgtgaaag

SEQ ID NO: 504581 - DNA, 75 bp, synthetic construct
  source 1..75: mol_type = other DNA
ttggtaagaaagtggccggtaagacgatggagcggttgaaggcattaatctggctggcggcgcaggacgtgaaag

SEQ ID NO: 504582 - DNA, 75 bp, synthetic construct
  source 1..75: mol_type = other DNA
actggaacgtttgaagaagttgatctggctggcggcacaggatgtgaagaacgagctggcagggcgtaagaccta

SEQ ID NO: 504583 - DNA, 75 bp, synthetic construct
  source 1..75: mol_type = other DNA
gatgaggtaaccggaaaaatgatcacgcgggataacccaccgatcccgggtaaacaatcactggcgaaaggctca

SEQ ID NO: 504584 - DNA, 75 bp, synthetic construct
  source 1..75: mol_type = other DNA
tgcaatgaagtacatttttcatcggctggatagcgaagctttattgtttgtaatgagtacacgttcaaaacaaaa

SEQ ID NO: 504585 - DNA, 75 bp, synthetic construct
  source 1..75: mol_type = other DNA
ttggacagacaagctttgctgacggtttctcgatcacgttcacaacaaaaaacgactttttcgcggcatggtatt

SEQ ID NO: 504586 - DNA, 75 bp, synthetic construct
  source 1..75: mol_type = other DNA
aaagcaatcgctggcgaaggggacgtcaattcctctggtcagtccgattgagttttcgacatcatcgtggcggcg

SEQ ID NO: 504587 - DNA, 75 bp, synthetic construct
  source 1..75: mol_type = other DNA
gatgaggtaactggcaggatgattacgctggataatccgccgatttccggtaagcagttgtacgcaaaaggttca

SEQ ID NO: 504588 - DNA, 75 bp, synthetic construct
  source 1..75: mol_type = other DNA
gaacccgttgtgatttgtaatcaggagcaccgcttcctggtagctgaacaactaagacaaattaataagctttcc

SEQ ID NO: 504589 - DNA, 75 bp, synthetic construct
  source 1..75: mol_type = other DNA
agtatggtggtgtaagcggctcgctttcagcaacacccgtgatgaaacagcgttcggaatattcgtctgaccagg

SEQ ID NO: 504590 - DNA, 75 bp, synthetic construct
  source 1..75: mol_type = other DNA
gtcgatttagatatggctaccgaggaagaaaagttaagcctgacacactggaaaaaataccgtgtgttactgaat

SEQ ID NO: 504591 - DNA, 75 bp, synthetic construct
  source 1..75: mol_type = other DNA
ccatttatatttctgaacttggcgtattacctccagacgtgacagccatttccccggagggggattatcagaaat

SEQ ID NO: 504592 - DNA, 75 bp, synthetic construct
  source 1..75: mol_type = other DNA
aacgtgttttaccgccagtgccgtaagtacgaagccgccatcgccgaaaaaataggggttgaacctgctgtaatc

SEQ ID NO: 504593 - DNA, 75 bp, synthetic construct
  source 1..75: mol_type = other DNA
gggtgaactgtcctggacgctgaaactgtcaggcaaagagaacgtgagtctgccattctcatacagcgtgaagta

SEQ ID NO: 504594 - DNA, 75 bp, synthetic construct
  source 1..75: mol_type = other DNA
taaaccagccgctgcgtctggtttataaggctaatattcgccagtatacggggttgccctggaaaggcgttaatc

SEQ ID NO: 504595 - DNA, 75 bp, synthetic construct
  source 1..75: mol_type = other DNA
gaacggatttattgagagttttaacggacgctttcgtgatgaatgcctgaatgagcactggttcagcgatattgt

SEQ ID NO: 504596 - DNA, 75 bp, synthetic construct
  source 1..75: mol_type = other DNA
gaatgcctgacggtcactgttgccttcgggatttcaggcgtgcaggtcacgcgtattctggacagcattgcgctg

SEQ ID NO: 504597 - DNA, 75 bp, synthetic construct
  source 1..75: mol_type = other DNA
aacgtcgtgcctgcaggctgacaggtttgtccctgtcgacctgccgctatgaagcgcagcgtccggcgtcggatg

SEQ ID NO: 504598 - DNA, 75 bp, synthetic construct
  source 1..75: mol_type = other DNA
attacctccagacatgacagctatttccccggagggggattatcagaaatgggacggaaatgcgtgggtgaatga

SEQ ID NO: 504599 - DNA, 75 bp, synthetic construct
  source 1..75: mol_type = other DNA
gacgccaaatgccgcatggacgccgctctatgatattcatgccagcgccattaaccagccgctgcgtctggtcta

SEQ ID NO: 504600 - DNA, 75 bp, synthetic construct
  source 1..75: mol_type = other DNA
gaaccgcagacggcgacacaaatataaaagtatcccgtggtcagacttatcccggctcacgacttgcacctgtgg

SEQ ID NO: 504601 - DNA, 75 bp, synthetic construct
  source 1..75: mol_type = other DNA
caaagtcaaggtgctgactttgttcctgtcaatattttttctgtaatgcaaatattgcatttatttatagttgga

SEQ ID NO: 504602 - DNA, 75 bp, synthetic construct
  source 1..75: mol_type = other DNA
ggtggtcggcaagcacggtatgtgggagatgaaagacgttcccgttgagcctttctcgacgcgtacccaggaaat

SEQ ID NO: 504603 - DNA, 75 bp, synthetic construct
  source 1..75: mol_type = other DNA
tcagtcatggaattcacgccagaacaggagaaagcgattcagaaagccatcggtgaaggcgaagttctgcctagt

SEQ ID NO: 504604 - DNA, 75 bp, synthetic construct
  source 1..75: mol_type = other DNA
gccctgtttaccgaactgttgaaagggaagctgccggatggcagcgacctgagccggatccaggacggtatgaat

SEQ ID NO: 504605 - DNA, 75 bp, synthetic construct
  source 1..75: mol_type = other DNA
gcagttgctgaatgcaccggtggcgcacggctacggcaatgacctgctgatttcccgtcagacctgggacgccga

SEQ ID NO: 504606 - DNA, 75 bp, synthetic construct
  source 1..75: mol_type = other DNA
cccggcctcagttacttgtcgccgctcatgagttttctgacggtaccgttccgttctccgatatcgaaaaaacta

SEQ ID NO: 504607 - DNA, 75 bp, synthetic construct
  source 1..75: mol_type = other DNA
ctctcgatacccgcaaagcgaaggaaactctcgacccggcacagaaggtgacggagtggctttccactctgaaag

SEQ ID NO: 504608 - DNA, 75 bp, synthetic construct
  source 1..75: mol_type = other DNA
tattatctttgttctctctggcctggtatcagcgatagccggaattattctggcttcacgtatgaccagtgggca

SEQ ID NO: 504609 - DNA, 75 bp, synthetic construct
  source 1..75: mol_type = other DNA
taattgcctgtgcgggtgtcaccacggcggtggttatcaacctgactgaaagcctgtggattggcgtggcagcgg

SEQ ID NO: 504610 - DNA, 75 bp, synthetic construct
  source 1..75: mol_type = other DNA
atgtttttatacctctcgatatttatatgcatttctattctatcttttctcccgaacaagaaatatttgttaaaa

SEQ ID NO: 504611 - DNA, 75 bp, synthetic construct
  source 1..75: mol_type = other DNA
ccgcgggtaaagccggagattattacaccaaagaagataattattacgttatcggcagcatggatgaacgctggc

SEQ ID NO: 504612 - DNA, 75 bp, synthetic construct
  source 1..75: mol_type = other DNA
tgatggtgccaaagaagcatgcagatcaactgcgtgaatctctggcttcaggcgaaattgctgctgtacagtcga

SEQ ID NO: 504613 - DNA, 75 bp, synthetic construct
  source 1..75: mol_type = other DNA
ggcgtgaaaggctccacgctgggcgcaagtggtccgcagtacgtgatggtgccaaagaagcatgcagatcaactg

SEQ ID NO: 504614 - DNA, 75 bp, synthetic construct
  source 1..75: mol_type = other DNA
cagaacggatttattgagagtttcaacggtcgctttcgggatgaatgcctgaatgaacactggttcagcgatatt

SEQ ID NO: 504615 - DNA, 75 bp, synthetic construct
  source 1..75: mol_type = other DNA
agctgattatctgtgatgagccggtgtcggcgctggacgtgtcaattcaggcacaggtggtcaacctgctccagc

SEQ ID NO: 504616 - DNA, 75 bp, synthetic construct
  source 1..75: mol_type = other DNA
cggagtgtgccaaaacacgtcctgtgctggaggggagtttcagacacgccgtgtcttgcctgaaagtcgatccgc

SEQ ID NO: 504617 - DNA, 75 bp, synthetic construct
  source 1..75: mol_type = other DNA
gtaaagttagaaatgacgggatcgctttaacggccgataaacaggatcacattttattgggtgaacgttatcatt

SEQ ID NO: 504618 - DNA, 75 bp, synthetic construct
  source 1..75: mol_type = other DNA
tgtcacgcttcgcttgtgtgaaggggaaacattgggtgtggtaggagaatcgggatgcggtaagtccacctttgc

SEQ ID NO: 504619 - DNA, 75 bp, synthetic construct
  source 1..75: mol_type = other DNA
gaaccgctgcgcacctaccatccgaaaatgtcacgccaggaagttcgtgagcgcgtgaaggcgatgatgatgaaa

SEQ ID NO: 504620 - DNA, 75 bp, synthetic construct
  source 1..75: mol_type = other DNA
accgctatccgcatgagttctctggtgggcagtgccagcgtatcgggattgctcgtgctcttattcttgaaccga

SEQ ID NO: 504621 - DNA, 75 bp, synthetic construct
  source 1..75: mol_type = other DNA
ttgtcctctttcctccgggcgcgtttggcgatgaactggctacccgactggcctggcgtgtacatggcgccagta

SEQ ID NO: 504622 - DNA, 75 bp, synthetic construct
  source 1..75: mol_type = other DNA
gctgccttcggtcagcggtgaggcgacgtatctgttttatatgggctacatcaggttaattcacttcagcgccgg

SEQ ID NO: 504623 - DNA, 75 bp, synthetic construct
  source 1..75: mol_type = other DNA
tttttgcgccgtttcgttatgtagtggaatttttctactggacgggcggcaactcgctggacattcatagctggc

SEQ ID NO: 504624 - DNA, 75 bp, synthetic construct
  source 1..75: mol_type = other DNA
gtgacatgcaatggctccaaaacgtctccagccacagaggaaaagctggtactgaaagagtgcattgaattcctt

SEQ ID NO: 504625 - DNA, 75 bp, synthetic construct
  source 1..75: mol_type = other DNA
cagtggcagcgaacgcctgcggaagttgttctctttccgtcgggcgcgtttggcgatgaactggctacccggctg

SEQ ID NO: 504626 - DNA, 75 bp, synthetic construct
  source 1..75: mol_type = other DNA
gaaatgcgctaacggcgacgctgcaaacagaaaaacgcccgctatgcctttcgctggcacgtcaggcgggagcag

SEQ ID NO: 504627 - DNA, 75 bp, synthetic construct
  source 1..75: mol_type = other DNA
aagtcctcctcgaaatcgccgacctgaaagtgcactttgaaattaaagatggcaaacaatggttctggcaaccgg

SEQ ID NO: 504628 - DNA, 75 bp, synthetic construct
  source 1..75: mol_type = other DNA
gcagacgacgccgtaaagggctggcaaccgaacggtttccgcttctgcgcccggatgcgccgaacctgacatggt

SEQ ID NO: 504629 - DNA, 75 bp, synthetic construct
  source 1..75: mol_type = other DNA
acgcgtattctggacagcatcgcgctctttcgtggctatccggcgacaataagaaccgatcagggcccggagctt

SEQ ID NO: 504630 - DNA, 75 bp, synthetic construct
  source 1..75: mol_type = other DNA
ctgttgcaagcggtcgatgatttcactgccgaagcacaactggataaagcagagcgacagaacgtgcgccagcag

SEQ ID NO: 504631 - DNA, 75 bp, synthetic construct
  source 1..75: mol_type = other DNA
cgctgctgacgaagcgccaactatcaccagaaaaaaagcttccccggctgcagtgattgcaaaagccagtgctga

SEQ ID NO: 504632 - DNA, 75 bp, synthetic construct
  source 1..75: mol_type = other DNA
ggatagttatcggagtatgatgtttcattcacaaatagcgctgaatcagttggtgttgctggagcggggggattt

SEQ ID NO: 504633 - DNA, 75 bp, synthetic construct
  source 1..75: mol_type = other DNA
gaaacagaattgatttgttgttaaacttcaggatactgaaagtcaaaccattgatgattccggagagaaggctgg

SEQ ID NO: 504634 - DNA, 75 bp, synthetic construct
  source 1..75: mol_type = other DNA
agatgctctataccggctatcactataacgatggcccgtcagcggtgcgctacccgcgtggcaacgcggtcggcg

SEQ ID NO: 504635 - DNA, 75 bp, synthetic construct
  source 1..75: mol_type = other DNA
cgcataaaattttgaccggacgccgcgacaaaatcggcaccatccgtcagaaaggcggcctgcacccgttcccgt

SEQ ID NO: 504636 - DNA, 75 bp, synthetic construct
  source 1..75: mol_type = other DNA
ggtggtcaacctgctccagcagctgcaacgtgagatgggattgtcattaatttttatcgctcatgacctggccgt

SEQ ID NO: 504637 - DNA, 75 bp, synthetic construct
  source 1..75: mol_type = other DNA
gaattatcagacgccatcagagtttgcagcacggtggcgaaatggaaaatgtgaaggtaaacaaaccgaccttac

SEQ ID NO: 504638 - DNA, 75 bp, synthetic construct
  source 1..75: mol_type = other DNA
aacgtcgtgcctgcaggctggcaggtctgtccctgtctacctgccgatattcggctcagcgtccggctgctgacg

SEQ ID NO: 504639 - DNA, 75 bp, synthetic construct
  source 1..75: mol_type = other DNA
ccaagcgatgaaaacgaatgtcgccaaatgctttacaccggttaccactacaacgatggcccgtcagcggtgcgt

SEQ ID NO: 504640 - DNA, 75 bp, synthetic construct
  source 1..75: mol_type = other DNA
caccagaacataatttgtcgtgagagcaggaggagcgaagttatgcagcgtgtgctggcgttctatcggggaaac

SEQ ID NO: 504641 - DNA, 75 bp, synthetic construct
  source 1..75: mol_type = other DNA
gagtgccggaatagtgaagttatgcagcgcgtgctggctttctatcaggggaattttcaggaggcggtactgtga

SEQ ID NO: 504642 - DNA, 75 bp, synthetic construct
  source 1..75: mol_type = other DNA
tgacactgattcgaaagttaccagacggagaaatacgccgctacgacaggagccagaacataatttgccgtgagt

SEQ ID NO: 504643 - DNA, 75 bp, synthetic construct
  source 1..75: mol_type = other DNA
ccggtaaatacggtgtttttgcgtcagagcagacgtatcgcgaatggcgtaagacaccggagaaaacaactgacc

SEQ ID NO: 504644 - DNA, 75 bp, synthetic construct
  source 1..75: mol_type = other DNA
tttcaggaggcggtacgggggtgcggacgatttcttggacggtttatacggacatcaatccgaccgcatgacgat

SEQ ID NO: 504645 - DNA, 75 bp, synthetic construct
  source 1..75: mol_type = other DNA
gtggcaaaagcatatacacccgaacagcgggagaatctgaaggctcgaataatcgatctggtgcgcaaaaatgaa

SEQ ID NO: 504646 - DNA, 75 bp, synthetic construct
  source 1..75: mol_type = other DNA
tagcctgcgcctgacattggtggaaaaactggcggcgatgctggatcccggccatctggcgctgacgcagatcac

SEQ ID NO: 504647 - DNA, 75 bp, synthetic construct
  source 1..75: mol_type = other DNA
tccactctggtgtttggctttttcgctcgcttgctggcgctgcgtcttaagctgggtttacccgtcttttactac

SEQ ID NO: 504648 - DNA, 75 bp, synthetic construct
  source 1..75: mol_type = other DNA
catcagaacataatctgtcgcgagtgccggaaaagcaaggttatgcagcgagtactggcgttttatcagggtaat

SEQ ID NO: 504649 - DNA, 75 bp, synthetic construct
  source 1..75: mol_type = other DNA
atggatcaccgccagcactctgctttcccggagctccctcagcaaattgccgccttgtatgagtggttttcagcc

SEQ ID NO: 504650 - DNA, 75 bp, synthetic construct
  source 1..75: mol_type = other DNA
aaagtatcaatgcggcaccgactactcgccattattaccatcagtggttttcctctcctactaccccgactggcg

SEQ ID NO: 504651 - DNA, 75 bp, synthetic construct
  source 1..75: mol_type = other DNA
gggcccctctgaaggagaaaacagatagatatggtggtttatatatctatcgagatggattaagaattttgccct

SEQ ID NO: 504652 - DNA, 75 bp, synthetic construct
  source 1..75: mol_type = other DNA
ctggtcgtgcataccctgcctggtgagcgctacggtgtcgccgcaggtggtcgcagactggcagcactcaacatg

SEQ ID NO: 504653 - DNA, 75 bp, synthetic construct
  source 1..75: mol_type = other DNA
ggttactactgctttgaggcgcgcagtgccgctgaagccataaaagctatcacggagtatgtttgtcttgattaa

SEQ ID NO: 504654 - DNA, 75 bp, synthetic construct
  source 1..75: mol_type = other DNA
gttgctgcattcaatatcatctgatgactcttgttatgtaaaaaaaaatatatttactgcgaagctcaatgaaat

SEQ ID NO: 504655 - DNA, 75 bp, synthetic construct
  source 1..75: mol_type = other DNA
agcgattaaaggtttccgtaaagataaacataccgaagctgcttttcagtttgccaacgttgctgattcctacgc

SEQ ID NO: 504656 - DNA, 75 bp, synthetic construct
  source 1..75: mol_type = other DNA
aactggaatatgctattcgcgatggtaattttaattctctacctattacgcgggtttatgattcatccaataatg

SEQ ID NO: 504657 - DNA, 75 bp, synthetic construct
  source 1..75: mol_type = other DNA
ggcaggttgcgcaagtaatgcgcagtataatagcagtgcatcgggcaatgtcggcactgcctggggtggagatgt

SEQ ID NO: 504658 - DNA, 75 bp, synthetic construct
  source 1..75: mol_type = other DNA
atggctaaaataagaacaaaggctcgagctttggacatgcttggcagacaacaaattgcaggtatacctactgcc

SEQ ID NO: 504659 - DNA, 75 bp, synthetic construct
  source 1..75: mol_type = other DNA
aaaaagaaatctagaaagtaaaattgagaatacttcaaacgaagtgattaatgaaataagaaaactaaccgacca

SEQ ID NO: 504660 - DNA, 75 bp, synthetic construct
  source 1..75: mol_type = other DNA
tggagttggattaacaaaagagttatctaatttatgggatagatatcaaatagaaagacaaaaaatactgttatc

SEQ ID NO: 504661 - DNA, 75 bp, synthetic construct
  source 1..75: mol_type = other DNA
aaaaacgtaagtatagggctgacatatgtgcatgataaacgtccagcgctgtcgcatttagcagtacctgtgggg

SEQ ID NO: 504662 - DNA, 75 bp, synthetic construct
  source 1..75: mol_type = other DNA
tttatgtaaagtaccgtgagcgctttgcatatgctgagtatatgtcaggcaaaaacgtaagtatagggctgacat

SEQ ID NO: 504663 - DNA, 75 bp, synthetic construct
  source 1..75: mol_type = other DNA
cctgtcggtatcagccagatcatcacagataacgggaaagagttcctgggaagctttgacaaaacgctgcaggaa

SEQ ID NO: 504664 - DNA, 75 bp, synthetic construct
  source 1..75: mol_type = other DNA
tgatgcgctcgggctggtagttttttctattattggtgcacaagtcgcgctggatatggggcacggtccgatcat

SEQ ID NO: 504665 - DNA, 75 bp, synthetic construct
  source 1..75: mol_type = other DNA
gaataaataaatcagagatggacacagtaagatataaatcagaaatagaaaatgaattcttttccattagaaaaa

SEQ ID NO: 504666 - DNA, 75 bp, synthetic construct
  source 1..75: mol_type = other DNA
agatatcacagaaagtgcaggcgtacagtctgctgaataaaagggataaggagatactcattggcattatccgcg

SEQ ID NO: 504667 - DNA, 75 bp, synthetic construct
  source 1..75: mol_type = other DNA
gaatgatggtgttcaactgactcttaaaatattgcttaataataacttcaattcatttggtgttggaaaacgcgg

SEQ ID NO: 504668 - DNA, 75 bp, synthetic construct
  source 1..75: mol_type = other DNA
ctcgttactaaaggggccagggttacacggggaggtgctattgcgttatccggtaacagcggacgttcatccggt

SEQ ID NO: 504669 - DNA, 75 bp, synthetic construct
  source 1..75: mol_type = other DNA
cgggaaaagtgagtccccataatggcattgattattccatgcccatgaacacgaaaatagtcagcgtcatcgacg

SEQ ID NO: 504670 - DNA, 75 bp, synthetic construct
  source 1..75: mol_type = other DNA
cgcttcgcgaatgagtattcagacgctggttcggtacgccagagcctgcggtgttaactttaaaattcagcaggt

SEQ ID NO: 504671 - DNA, 75 bp, synthetic construct
  source 1..75: mol_type = other DNA
tgctctccgacagcgggaagcgcagcgggaccggcagtgcgctgacggtgctgaaggacagcggcgtgaatacgt

SEQ ID NO: 504672 - DNA, 75 bp, synthetic construct
  source 1..75: mol_type = other DNA
gtggtgcggctggccggtgatgaccgcccctggaaccccggggccatgaccggcgggcgggtatgggctgaaccg

SEQ ID NO: 504673 - DNA, 75 bp, synthetic construct
  source 1..75: mol_type = other DNA
cagcgccagaatcatgtctccgtcacgcctgatgcgtctgtggtgcgccaggtccctttcagcgatgccgtcagt

SEQ ID NO: 504674 - DNA, 75 bp, synthetic construct
  source 1..75: mol_type = other DNA
cgttctccacccggtctcaggaggtcagggaggccgcagggcccgatgcctccctgaagtcacgggatgtggccg

SEQ ID NO: 504675 - DNA, 75 bp, synthetic construct
  source 1..75: mol_type = other DNA
agccagtggacgctgttccgggcagatacactgccggtggcagagggggaacgtctggcggtgctcgggaagata

SEQ ID NO: 504676 - DNA, 75 bp, synthetic construct
  source 1..75: mol_type = other DNA
gaagaacagcagcgccgggaaatggaaaaacaggcggaacagactgcccgggaagtggccggggaggcgcgtaaa

SEQ ID NO: 504677 - DNA, 75 bp, synthetic construct
  source 1..75: mol_type = other DNA
ttacggctggactgagtgcgataccttcgaagggtattacgattgttcgagaaacaaatggtgggcagttactga

SEQ ID NO: 504678 - DNA, 75 bp, synthetic construct
  source 1..75: mol_type = other DNA
gccctcctgaatctgctggcatgggagcgggatatcacccgtttcagtggcgagcctctcgatttgtttcgcaag

SEQ ID NO: 504679 - DNA, 75 bp, synthetic construct
  source 1..75: mol_type = other DNA
acaggtgcaggagaaagcgtcagtggaggaaatcagtctgccactgctgacgaaaatgtcttccgaacgcacgct

SEQ ID NO: 504680 - DNA, 75 bp, synthetic construct
  source 1..75: mol_type = other DNA
actggccttaacgccagctttgacctcgattttttcggtcgcttaaagaacatgagcgaagccgagcgacaaaat

SEQ ID NO: 504681 - DNA, 75 bp, synthetic construct
  source 1..75: mol_type = other DNA
tctatcattggcgcacaggttgcgctggatatgggacacggcccgatcattgccgttgtcgcagctgtgacgacc

SEQ ID NO: 504682 - DNA, 75 bp, synthetic construct
  source 1..75: mol_type = other DNA
tccactctggcatttggtttttttgcccgtttgctggcactgcgtcttaaactgggattaccggttttttattac

SEQ ID NO: 504683 - DNA, 75 bp, synthetic construct
  source 1..75: mol_type = other DNA
atgactgagttttcaaccttgcttgccggtctgaaattgccgtcgtggctgaacaaaggcgaccccgccaggctg

SEQ ID NO: 504684 - DNA, 75 bp, synthetic construct
  source 1..75: mol_type = other DNA
gaacaaaggcgagccggcgaagctgctgaaaacggcgcggcggttctggactgaggtttacggctggggtacgtg

SEQ ID NO: 504685 - DNA, 75 bp, synthetic construct
  source 1..75: mol_type = other DNA
ccgggatggtgcttccttcctggatgaatcagggggagccgaacaagctgctgaaaacagcccggcgattctggg

SEQ ID NO: 504686 - DNA, 75 bp, synthetic construct
  source 1..75: mol_type = other DNA
agtgcgggctggcgcaccttttttgttgataatcaggtgaagacgctgattagcgaggcgctggcgaataaccgg

SEQ ID NO: 504687 - DNA, 75 bp, synthetic construct
  source 1..75: mol_type = other DNA
atgtctccttgtaaacttctgacattttgtgtgggtcttgtgctaaccggttgttcgctggcaccggattatcag

SEQ ID NO: 504688 - DNA, 75 bp, synthetic construct
  source 1..75: mol_type = other DNA
agaggtggcgggctttattgccatttttgagcgactggggattggttatgttgaattactggaacggcaggacgg

SEQ ID NO: 504689 - DNA, 75 bp, synthetic construct
  source 1..75: mol_type = other DNA
cgggtcgcagttcggggtgaacttcagttacgccatccagccgtcgccggacggcctggcgcaggcctttatcat

SEQ ID NO: 504690 - DNA, 75 bp, synthetic construct
  source 1..75: mol_type = other DNA
cacccagggcgtctccaagcagctgctgccgatctatgacaagccgatgattttctacccggtgtccgtcctgat

SEQ ID NO: 504691 - DNA, 75 bp, synthetic construct
  source 1..75: mol_type = other DNA
atcaggtgctggatccggagcgctttggcgtggtggagttcgacgataactttaaggcgctgtccatcgaggaga

SEQ ID NO: 504692 - DNA, 75 bp, synthetic construct
  source 1..75: mol_type = other DNA
agggtatgaaggtggcctgcctggaagagattgcgttccgcaagggatggttgagctcagagcaggtagcggagc

SEQ ID NO: 504693 - DNA, 75 bp, synthetic construct
  source 1..75: mol_type = other DNA
gttatcaggtgctcgacccggaacgtttcggcgtggtggaatttgacgagcacttccgggcgctgtctattgaag

SEQ ID NO: 504694 - DNA, 75 bp, synthetic construct
  source 1..75: mol_type = other DNA
ctggaagagatcggttaccgtaatcagtggctgtcggcagaaggggtggcggctcaggcggagcgtcttaagaaa

SEQ ID NO: 504695 - DNA, 75 bp, synthetic construct
  source 1..75: mol_type = other DNA
cctgctactgctactttttatcgcggcgattatgttcccgctgctgatggtcgtcgccatctcgctgcgtcaggg

SEQ ID NO: 504696 - DNA, 75 bp, synthetic construct
  source 1..75: mol_type = other DNA
caaagcgacgctgctgaaagggatgctgattttccagatgttcccggcggtactctcactggtcgcgttgtatgc

SEQ ID NO: 504697 - DNA, 75 bp, synthetic construct
  source 1..75: mol_type = other DNA
cgtgatgtctgccttaccaatcaccatcgtcttcttgctggctcagcgctggctggtcaacggtctgacggcagg

SEQ ID NO: 504698 - DNA, 75 bp, synthetic construct
  source 1..75: mol_type = other DNA
gctccggcacgcgtttatatcccattactcaaggcgtctccaagcagttgctgccgatctatgacaagccgatga

SEQ ID NO: 504699 - DNA, 75 bp, synthetic construct
  source 1..75: mol_type = other DNA
tggtttcgcatggcttgacaccggcacacatgacagtctggttgaggcttcacagtttattcataccattgaaaa

SEQ ID NO: 504700 - DNA, 75 bp, synthetic construct
  source 1..75: mol_type = other DNA
atgaccctgcaccggtggtgcctgcgtttgcagctgtcggctcagttgtttatgcaggatttggatttagtaacg

SEQ ID NO: 504701 - DNA, 75 bp, synthetic construct
  source 1..75: mol_type = other DNA
taacattgatattgatcgcaattccagcaaaatacatcatagttagccattttgggttaactgttatgttgtact

SEQ ID NO: 504702 - DNA, 75 bp, synthetic construct
  source 1..75: mol_type = other DNA
gcgcaacgccagcgaactgacccgctgggcaggcagaaaatgcccgagcggtcgggtaatggggctggcgaataa

SEQ ID NO: 504703 - DNA, 75 bp, synthetic construct
  source 1..75: mol_type = other DNA
tgcgttaccagatatatcactctatcgccaaccgttaattgccattttaatgccagaaatacccgaagtggccca

SEQ ID NO: 504704 - DNA, 75 bp, synthetic construct
  source 1..75: mol_type = other DNA
ccctggctggcagataacgatcccattattcttcccccgaatattgcccgccatgccctcagccaccgcctttgg

SEQ ID NO: 504705 - DNA, 75 bp, synthetic construct
  source 1..75: mol_type = other DNA
ttattcttccgccgaatattgcccgctatgccctcagccaccgcctttggccgggagagacagtaaaaaaaccca

SEQ ID NO: 504706 - DNA, 75 bp, synthetic construct
  source 1..75: mol_type = other DNA
acagttacaccctgacagaagccgaacgcaatgccagcgaactgacccgctggacaggcagaaaatgtccgagcg

SEQ ID NO: 504707 - DNA, 75 bp, synthetic construct
  source 1..75: mol_type = other DNA
gaaagctatggctgggggagtaattcaacacaggaagcgcagctctccgtactcgatgccatcaccgccagcgag

SEQ ID NO: 504708 - DNA, 75 bp, synthetic construct
  source 1..75: mol_type = other DNA
gcataaacgacgcaggaaactggttggtgaataaccaggcactgctgttaagctatgctgtaaacatcgtggcgg

SEQ ID NO: 504709 - DNA, 75 bp, synthetic construct
  source 1..75: mol_type = other DNA
cactcgcgatcatcatcgttggtttgattatcgcgcggatgatttccaacgcggtgaatcgcctgatgatctccc

SEQ ID NO: 504710 - DNA, 75 bp, synthetic construct
  source 1..75: mol_type = other DNA
gcttcatttttatatatattgtaaattactttatatggtataaatgtagttttaaaaaacatatcgatagacagt

SEQ ID NO: 504711 - DNA, 75 bp, synthetic construct
  source 1..75: mol_type = other DNA
aaccgcgtccgtcattgctgtactcggtgccgcaggcttagctgttggtctggctttgcaggggtcactgtctaa

SEQ ID NO: 504712 - DNA, 75 bp, synthetic construct
  source 1..75: mol_type = other DNA
actgcagacggtaaaattatcgttattccgaacggtaaaattattgccggaaatattattaacttctcccgcgag

SEQ ID NO: 504713 - DNA, 75 bp, synthetic construct
  source 1..75: mol_type = other DNA
gcataaacggcgcgggaagctggctggtagctaaccaggcgctgctgctaagttatgcagtaaacatcgtggcgg

SEQ ID NO: 504714 - DNA, 75 bp, synthetic construct
  source 1..75: mol_type = other DNA
caggctttccgccttgtcctgttgccattatcagtaccgattctggcggtagtgttcatcctgtcgtttattgcc

SEQ ID NO: 504715 - DNA, 75 bp, synthetic construct
  source 1..75: mol_type = other DNA
ctaaaacgccctgcagccggcgcaatgaccgctggtcctttcagtgcttctgcaagttacattgttgcatataag

SEQ ID NO: 504716 - DNA, 75 bp, synthetic construct
  source 1..75: mol_type = other DNA
ttaactatcaagtaactagtggcggtattcgatcttttgattacagtgcttcgttagttaaacctactggtactg

SEQ ID NO: 504717 - DNA, 75 bp, synthetic construct
  source 1..75: mol_type = other DNA
taaagtgcactttgaaatcaaagatggcaaacagtggttctggcaaccgccgaaaacgctcaaagccgtcgatgg

SEQ ID NO: 504718 - DNA, 75 bp, synthetic construct
  source 1..75: mol_type = other DNA
ttctccaaccctaaatgcaactggtttgagcaatgaaataacaactggcggaactaatgccactatgattttaac

SEQ ID NO: 504719 - DNA, 75 bp, synthetic construct
  source 1..75: mol_type = other DNA
gcaaaaatgatgcggccagcaacaggggctctgacagctggtccattcagtgcatcagcaagttatgttgttgct

SEQ ID NO: 504720 - DNA, 75 bp, synthetic construct
  source 1..75: mol_type = other DNA
aaacaacctttaattacactggaacgacaattccatcttttgattatggtgccattcttactaaaccaactggta

SEQ ID NO: 504721 - DNA, 75 bp, synthetic construct
  source 1..75: mol_type = other DNA
atgaacagtacacaccactacgagcagttgattgaaatttttaatagctgctttgccgatgattttaatacccgt

SEQ ID NO: 504722 - DNA, 75 bp, synthetic construct
  source 1..75: mol_type = other DNA
gatttcgaaccggaccgcgtggtgtttcaacggcgggtacatgcgcaggtgatggattatctggcaaacggcatt

SEQ ID NO: 504723 - DNA, 75 bp, synthetic construct
  source 1..75: mol_type = other DNA
cctggcggcccttcaggccacccgctacggtgacgacccgctgatgctggttctcgccgccgaccatatcatcaa

SEQ ID NO: 504724 - DNA, 75 bp, synthetic construct
  source 1..75: mol_type = other DNA
gagaagccggaccgcgagcgcgccgaggcttacctcgcctccggggagtactactggaacagcggcatgtttatg

SEQ ID NO: 504725 - DNA, 75 bp, synthetic construct
  source 1..75: mol_type = other DNA
ttctacatgacggaagaaggtcaggaaggtcgcaacgctttcaaccagaaacgtcagcctgatttcagcaaattc

SEQ ID NO: 504726 - DNA, 75 bp, synthetic construct
  source 1..75: mol_type = other DNA
gctgctggacgagcagttggccaccgtcacccgcctggccaaggacaacgagctgcccgatgccatcctcaccga

SEQ ID NO: 504727 - DNA, 75 bp, synthetic construct
  source 1..75: mol_type = other DNA
gagtcgaggaaaatgaagcactctctgcatcccatcacgcgctatgggccttgcttcgcgtcgcggccaacgaac

SEQ ID NO: 504728 - DNA, 75 bp, synthetic construct
  source 1..75: mol_type = other DNA
gcggcgatgcctgatgagcacgaacttacccaactggcgctgccgttgcctgagcaggcgcagcttgatgagctg

SEQ ID NO: 504729 - DNA, 75 bp, synthetic construct
  source 1..75: mol_type = other DNA
ccaccgccggctacgtctttgcctgtcacgagtttcgcggcaagcagacgctgtttctcctgttcctggtgcagc

SEQ ID NO: 504730 - DNA, 75 bp, synthetic construct
  source 1..75: mol_type = other DNA
gcaggctgtaccgcgtaacgtgcccaccagcagggagaaagcacgcgccaatattcaggaaataaaaaagatgct

SEQ ID NO: 504731 - DNA, 75 bp, synthetic construct
  source 1..75: mol_type = other DNA
atgaaacttaaatatcctggcttaactgacagcggcaaaactcgcactaaattcatgcgcggggatatttaccgc

SEQ ID NO: 504732 - DNA, 75 bp, synthetic construct
  source 1..75: mol_type = other DNA
aaacagcgtattccagctggcgagcgtgggctttattgagggattaagcggataccgcgatttccgccgccggga

SEQ ID NO: 504733 - DNA, 75 bp, synthetic construct
  source 1..75: mol_type = other DNA
gtggttgagtttatgctcgtcgcactcaaattcgttggcgttggatggattcttctgacgttttttatttttctg

SEQ ID NO: 504734 - DNA, 75 bp, synthetic construct
  source 1..75: mol_type = other DNA
cttgtacaaaatcagccagaaagcgccagagaagggcgactatgtaattttctgcccgcctgaaaaggctatttt

SEQ ID NO: 504735 - DNA, 75 bp, synthetic construct
  source 1..75: mol_type = other DNA
gctgtataaaatcagctctaaaacgccggagaaaggggattacgtcattttctgcccgccagaaaaagaaatttt

SEQ ID NO: 504736 - DNA, 75 bp, synthetic construct
  source 1..75: mol_type = other DNA
cacaattatcttcaccttcggcaccttcttcgtgcagctgttgaccatcaccaccgccggctacgtctttgcctg

SEQ ID NO: 504737 - DNA, 75 bp, synthetic construct
  source 1..75: mol_type = other DNA
gagagtggttaatccgcgaaggtgaaagctggcgctgccgcattccgctcagcgagattcctgagcctcaggaag

SEQ ID NO: 504738 - DNA, 75 bp, synthetic construct
  source 1..75: mol_type = other DNA
caaggatggtcgcgcagctaaaccggagagggattgccagggctaaccttcaggatctgttcagccattcgacgc

SEQ ID NO: 504739 - DNA, 75 bp, synthetic construct
  source 1..75: mol_type = other DNA
acgggtttaaccccaacattctttacttcagacctgaagagggagaacgactagaagcgatattagccgacgtag

SEQ ID NO: 504740 - DNA, 75 bp, synthetic construct
  source 1..75: mol_type = other DNA
agagcaatggcctgacgcacgaacgagccgaagaaatctggaatatgtttgagaaatccggcgcgtatgccttca

SEQ ID NO: 504741 - DNA, 75 bp, synthetic construct
  source 1..75: mol_type = other DNA
agattgccgagcagatgcagcgtcatgccgtggcgcgcaattttcgtcgtgcggcagaactgattgcgatcccgg

SEQ ID NO: 504742 - DNA, 75 bp, synthetic construct
  source 1..75: mol_type = other DNA
cagaaaatccacgttattctggatggagcaggtttccaccgttcacagttagtgaaagactgggcggaagtggta

SEQ ID NO: 504743 - DNA, 75 bp, synthetic construct
  source 1..75: mol_type = other DNA
tccctcctggtcccagctctgctggtagcaggcgcagcaaacgctgctgaagtttacaataaagacggcaacaaa

SEQ ID NO: 504744 - DNA, 75 bp, synthetic construct
  source 1..75: mol_type = other DNA
ctttaaggcgaagttgcttactgcaggcgatctgcgcatgggcgatctctacgtcacaggcgtgtgcaaaaaggt

SEQ ID NO: 504745 - DNA, 75 bp, synthetic construct
  source 1..75: mol_type = other DNA
attggtgaaacgaccgtcaatatcaccggcagtcagcgccaggccaaaaccatcaatggcggcctgccggggccc

SEQ ID NO: 504746 - DNA, 75 bp, synthetic construct
  source 1..75: mol_type = other DNA
acagcagatgcgcttggccgctgggcgtatcactgccatttgctctatcacatggaaatgggaatgtttcgtgaa

SEQ ID NO: 504747 - DNA, 75 bp, synthetic construct
  source 1..75: mol_type = other DNA
ccatgatgactcaccccattcacctgcatggtatgtggagcgatctggaagatgaaaacggtaatttcatggttc

SEQ ID NO: 504748 - DNA, 75 bp, synthetic construct
  source 1..75: mol_type = other DNA
aacttagtaatcaggctatattttctttgagtaccggagccttttcagcatcggaagtattaactagagttataa

SEQ ID NO: 504749 - DNA, 75 bp, synthetic construct
  source 1..75: mol_type = other DNA
ggtcggcgagcagtgggtgagctgccagcactcgctggcccaccacgccggaccgtggctgtacgacgaaaacat

SEQ ID NO: 504750 - DNA, 75 bp, synthetic construct
  source 1..75: mol_type = other DNA
acagctgatgcactgggccgctgggcttaccattgccatctgctctatcacatggaaatgggaatgtttcgtgaa

SEQ ID NO: 504751 - DNA, 75 bp, synthetic construct
  source 1..75: mol_type = other DNA
ctgctgcgtatgaaaaacggtaaatatgacaaagaaggcgaatttaccccaatcacctgggatcaggccttcgat

SEQ ID NO: 504752 - DNA, 75 bp, synthetic construct
  source 1..75: mol_type = other DNA
gccagttgtgactttgttgtttactataaggtcgggaagactccattaggggttattgaagtggatggaggttat

SEQ ID NO: 504753 - DNA, 75 bp, synthetic construct
  source 1..75: mol_type = other DNA
tcctgaactggtgaatgtcgctgtttcaagggcccgaaataaatttacgctggtgactggtaatgatgtatttga

SEQ ID NO: 504754 - DNA, 75 bp, synthetic construct
  source 1..75: mol_type = other DNA
tttatttaaagcaacatctgcgaagaaatgtttcaacaagaagttcattctcggcagagacatacagggatgaat

SEQ ID NO: 504755 - DNA, 75 bp, synthetic construct
  source 1..75: mol_type = other DNA
atggcgctgcgtgaagacattatgtctgacgacacagtgatctccaccatggtcaacggctaccgcagccacaaa

SEQ ID NO: 504756 - DNA, 75 bp, synthetic construct
  source 1..75: mol_type = other DNA
tcaggttaattcacttcagcgccgggatgatttttaccgtggtcttgctgatgcggatctactgggcttttgttg

SEQ ID NO: 504757 - DNA, 75 bp, synthetic construct
  source 1..75: mol_type = other DNA
aactcaatggacattcacagctggcatcggctgggcatgtggttgattggcgcttttgtgatcggtcatgtctat

SEQ ID NO: 504758 - DNA, 75 bp, synthetic construct
  source 1..75: mol_type = other DNA
caaagcggtgatcttcgcgctgccgtttgaaccggcggcagaagccccggatgaagagtatgacctgtggctttc

SEQ ID NO: 504759 - DNA, 75 bp, synthetic construct
  source 1..75: mol_type = other DNA
cggaactgcgtggcaaaacgctgtacgaagttctgtatgccaccccggaagtgagcaaattcccggtatccgaac

SEQ ID NO: 504760 - DNA, 75 bp, synthetic construct
  source 1..75: mol_type = other DNA
ccctgaaagaaaaaggaccggaatcgatcggtatgttcggttctggtcagtggactatctgggaaggttatgccg

SEQ ID NO: 504761 - DNA, 75 bp, synthetic construct
  source 1..75: mol_type = other DNA
atagtagattgaattcaaatgattcacactttaagtcagaacagattgtggcctgcctgttgcgggatatcctgt

SEQ ID NO: 504762 - DNA, 75 bp, synthetic construct
  source 1..75: mol_type = other DNA
cggacaaatccctggcactgctggcatggacgctctgcctgaatgtgtttgacagcaaagcgcacagtagtcccg

SEQ ID NO: 504763 - DNA, 75 bp, synthetic construct
  source 1..75: mol_type = other DNA
atgattgctcaggctttacgcctgcatcagacaacgattgatcaccatatcagcgaattcctgaataaaggaaaa

SEQ ID NO: 504764 - DNA, 75 bp, synthetic construct
  source 1..75: mol_type = other DNA
ggtcgtggctgcagatggccagtatgtaaacccggttaccgttgacgaattcaggattgccgttgccgaaaccta

SEQ ID NO: 504765 - DNA, 75 bp, synthetic construct
  source 1..75: mol_type = other DNA
gtggcggtgcattctccggtaaagatccatcaaaagtggaccgttccgcagcctacgcagcacgttatgtcgcga

SEQ ID NO: 504766 - DNA, 75 bp, synthetic construct
  source 1..75: mol_type = other DNA
tacgcaatcggcgtggctgaaccgacctccatcatggtggaaactttcggtaccgagaaagtgccttctgaacaa

SEQ ID NO: 504767 - DNA, 75 bp, synthetic construct
  source 1..75: mol_type = other DNA
gatcacccgtaacaccgttcgcgaaattggctatgtacattccgacatgggctttgacgctaactcctgtgcggt

SEQ ID NO: 504768 - DNA, 75 bp, synthetic construct
  source 1..75: mol_type = other DNA
aatcaatgaaggtcctagcatggctggacaccgatcagtttgacattgttctgcctgaaacggtcatgcaattaa

SEQ ID NO: 504769 - DNA, 75 bp, synthetic construct
  source 1..75: mol_type = other DNA
aaggctcctggttttactccagtgtgggagaatgaaacatggagacttattgaagatcatcgaggccaaactgtt

SEQ ID NO: 504770 - DNA, 75 bp, synthetic construct
  source 1..75: mol_type = other DNA
gccggataacgtcactctgctgaagcccgataacgcctttgtccgttgggacggcaaacgctggcggcctgatat

SEQ ID NO: 504771 - DNA, 75 bp, synthetic construct
  source 1..75: mol_type = other DNA
tgatttggggcgtttatagcgccgaaaaccagctactggcttgctttcgcgtagcggaagataacagctacagca

SEQ ID NO: 504772 - DNA, 75 bp, synthetic construct
  source 1..75: mol_type = other DNA
gtgcaacaatgccagcaattactgaatagccgcaatgaagattttgcaaactcagaaatgctaccagtgatatta

SEQ ID NO: 504773 - DNA, 75 bp, synthetic construct
  source 1..75: mol_type = other DNA
tgttaaaactggtagcgacagatcctatcacgcttgaaatacttgaaaactatcaacacattgatgtgtttaaca

SEQ ID NO: 504774 - DNA, 75 bp, synthetic construct
  source 1..75: mol_type = other DNA
tttggtcgcgaacatttcccatgggaaaaaaccgacaaagcgcaactgctgcgcgatgcagccggtctaaagtaa

SEQ ID NO: 504775 - DNA, 75 bp, synthetic construct
  source 1..75: mol_type = other DNA
gaagtgcgtaaaaacggcactctgccgtggctgcgcccggacgcgaaaagccaggtgactttccagtatgacgac

SEQ ID NO: 504776 - DNA, 75 bp, synthetic construct
  source 1..75: mol_type = other DNA
cctccatcatggtggaaactttcggtaccgagaaagtgccttcagaacaactgaccctgctggtgcgcgagttct

SEQ ID NO: 504777 - DNA, 75 bp, synthetic construct
  source 1..75: mol_type = other DNA
tgccagggcgtggggtatcagtggtgaggccgagctggccgtcatgcaggctatcgctgaaaagccgggagcgtt

SEQ ID NO: 504778 - DNA, 75 bp, synthetic construct
  source 1..75: mol_type = other DNA
cgcaaggatttataggtatcggttggtatgattccggcgcacgtaacttttatatgagtaaatcaccaatcaaaa

SEQ ID NO: 504779 - DNA, 75 bp, synthetic construct
  source 1..75: mol_type = other DNA
gattaaagaattatctttctctacattcaatctcaaaagactagataaagtagacttcatctattccactctcta

SEQ ID NO: 504780 - DNA, 75 bp, synthetic construct
  source 1..75: mol_type = other DNA
atgatccaatatttagtaaaaaatcaagtagaccgcattcagtgtaacgacaccggaaaacacacctacgaaacg

SEQ ID NO: 504781 - DNA, 75 bp, synthetic construct
  source 1..75: mol_type = other DNA
ggtcggcgagcagtgggtgagttaccagcactcgctggtccaccacgccggaccgtggctgtacgacgaaaacat

SEQ ID NO: 504782 - DNA, 75 bp, synthetic construct
  source 1..75: mol_type = other DNA
aatgcggctggatttgcccctatatttccagacacctgttatcacttaacccattactggcttgctgccgtagat

SEQ ID NO: 504783 - DNA, 75 bp, synthetic construct
  source 1..75: mol_type = other DNA
aacgccagtaaggattcgtctggccaatattgatgcaccggaaaaaaaacaggcttacggacgctggtcaactga

SEQ ID NO: 504784 - DNA, 75 bp, synthetic construct
  source 1..75: mol_type = other DNA
ttttgactattgtaaaaatattacagtagcttcaaaaatctttgaggattgttactatcgtgcaattgaaagtgg

SEQ ID NO: 504785 - DNA, 75 bp, synthetic construct
  source 1..75: mol_type = other DNA
ctcactgggaattgataatccgcaaaggagtaaaggcgcgctgacccgtgccattcgcaaaaaactgaacggcac

SEQ ID NO: 504786 - DNA, 75 bp, synthetic construct
  source 1..75: mol_type = other DNA
gccagagaggcgggaatttccgatggcacattatcggctttccgtaagggaaaatataaaggcgataacgctgct

SEQ ID NO: 504787 - DNA, 75 bp, synthetic construct
  source 1..75: mol_type = other DNA
caatctggctgatcaggttggtattaaggctgttatggttcatgcaattgatgatgatgccagagcgttttatga

SEQ ID NO: 504788 - DNA, 75 bp, synthetic construct
  source 1..75: mol_type = other DNA
tgagtgatgccattcatcgggttgccaatctggctgaacaggttggcattaaggctgttatggttcatgcaattg

SEQ ID NO: 504789 - DNA, 75 bp, synthetic construct
  source 1..75: mol_type = other DNA
ggtattactcattagctactggttctgtcacacatgccgagcttgggcgcagtttgcgccataatatgcccaatc

SEQ ID NO: 504790 - DNA, 75 bp, synthetic construct
  source 1..75: mol_type = other DNA
gtggtgcagcacagttgtgctcaggtggcgctcagccaaccagactggatgcagcagtgtcaccagcatctggaa

SEQ ID NO: 504791 - DNA, 75 bp, synthetic construct
  source 1..75: mol_type = other DNA
caccgggatcattagccactatttcaaagataaaaatggtctgctggaagcaaccatgcgtgatatcaccagcca

SEQ ID NO: 504792 - DNA, 75 bp, synthetic construct
  source 1..75: mol_type = other DNA
cgttgattgatggattatggctgcgcgcggctctgagcggcaaaccgctggacaaaattcgcgcaaactcgctga

SEQ ID NO: 504793 - DNA, 75 bp, synthetic construct
  source 1..75: mol_type = other DNA
tttcagaactatggggagttggcctgtttgttactctgatagtactgaatatagtatttaatctcttttttagac

SEQ ID NO: 504794 - DNA, 75 bp, synthetic construct
  source 1..75: mol_type = other DNA
ttacagccaccagcagcactgtccgatcgaagccgtgcgctttgccaccggatcacgtgccaatattaaattcag

SEQ ID NO: 504795 - DNA, 75 bp, synthetic construct
  source 1..75: mol_type = other DNA
cccggcgtcccgctctagccttttgtccaccaccattcaggcctccatgctaaccaggcgtatgctcgacaacgc

SEQ ID NO: 504796 - DNA, 75 bp, synthetic construct
  source 1..75: mol_type = other DNA
tgcacaaaacgttatgacgcctgtaatgcgcgtcggaattattttgccgacggtgtgatccattttggcggattt

SEQ ID NO: 504797 - DNA, 75 bp, synthetic construct
  source 1..75: mol_type = other DNA
ggccatcaatctggggggcgtctgcgaagtggtcgatcttagccaggtaagccagcaaatgctggcgaaaatcag

SEQ ID NO: 504798 - DNA, 75 bp, synthetic construct
  source 1..75: mol_type = other DNA
ggcgatgcgtcaggcgggggcatggacccttgcacaaaacgaagcaagttgcgtggtgttcggcatgccgcgcga

SEQ ID NO: 504799 - DNA, 75 bp, synthetic construct
  source 1..75: mol_type = other DNA
gctgcgtgacgcggttttgaatcgattacatgcacttccgcagggcagtgcagagcagcgattacaggcgattgt

SEQ ID NO: 504800 - DNA, 75 bp, synthetic construct
  source 1..75: mol_type = other DNA
ggctggcgttttgggccagcagcatgcatcagccgatgctgtatcgcttacagcaggtcagcagtcgccgtttgc

SEQ ID NO: 504801 - DNA, 75 bp, synthetic construct
  source 1..75: mol_type = other DNA
cactggaagctatcagagacattatccgggaaacaatgttaggcaatgttgccattgtcttactgataaacattt

SEQ ID NO: 504802 - DNA, 75 bp, synthetic construct
  source 1..75: mol_type = other DNA
cagcaggaaaactaacgatagattcagataatagagctattgttatgtcttctgttaaagcaatgggtactttat

SEQ ID NO: 504803 - DNA, 75 bp, synthetic construct
  source 1..75: mol_type = other DNA
atggatatcatttctgtcgccttaaagcgtcattccactaaggcatttgatgccagcaaaaaacttaccccggaa

SEQ ID NO: 504804 - DNA, 75 bp, synthetic construct
  source 1..75: mol_type = other DNA
tgccgcaaagcatgttgtttttacagcactatttacaaaatgcaggcgcattttcactgtctggcgagcgcgtgc

SEQ ID NO: 504805 - DNA, 75 bp, synthetic construct
  source 1..75: mol_type = other DNA
accctgccgcgccgttggcaaaattaagtgaactgccaatgatgaccgcccgtcgtctcagttcaggcagcaaac

SEQ ID NO: 504806 - DNA, 75 bp, synthetic construct
  source 1..75: mol_type = other DNA
gatatgcatcgtaaagatctgcaagatgatgcgcagtggatggcaaaacaggtttatctcaatgtcggtaacttc

SEQ ID NO: 504807 - DNA, 75 bp, synthetic construct
  source 1..75: mol_type = other DNA
tcatcatagcgtcgaagattttaacgctaccctgccgaaatctcgtctgccacaaagtatcactttaaccgaagt

SEQ ID NO: 504808 - DNA, 75 bp, synthetic construct
  source 1..75: mol_type = other DNA
ccacgcaggaagcgaaagccgcgaacgataaaggtcgcaaattcttcgccgatatgcaccgtaaagatctgcatg

SEQ ID NO: 504809 - DNA, 75 bp, synthetic construct
  source 1..75: mol_type = other DNA
ctgcggatagcaaaaaaaatcgatactccgacccaaacactagcacaggccctctgtagctatagggtgttaagg

SEQ ID NO: 504810 - DNA, 75 bp, synthetic construct
  source 1..75: mol_type = other DNA
aggcaggttcagggcggttcatgctctccagtaataccacggctcttacatcgggctatctcgatgtgtataaca

SEQ ID NO: 504811 - DNA, 75 bp, synthetic construct
  source 1..75: mol_type = other DNA
ccgatattggttactatacaataaactcatcatttggtaatggctcaacattgggctatctcgctttaaactttt

SEQ ID NO: 504812 - DNA, 75 bp, synthetic construct
  source 1..75: mol_type = other DNA
agctggcacgcaagccgctgagtgacggtgtgctgaccttcccgtttgtcaccatcgagaacgtggatgtggttg

SEQ ID NO: 504813 - DNA, 75 bp, synthetic construct
  source 1..75: mol_type = other DNA
attaactcataatgacgttaatgttgccgtcattgatattgccatgccggacgaaaacggcctcagtctgcttaa

SEQ ID NO: 504814 - DNA, 75 bp, synthetic construct
  source 1..75: mol_type = other DNA
gtttacaattcgtcgcaacggcgtaccccgcttgataaatgtttccgtcggggaacttacaggaatgaatggact

SEQ ID NO: 504815 - DNA, 75 bp, synthetic construct
  source 1..75: mol_type = other DNA
tatattgcgccgggcgatcggcatatggagctggcgcgtagtggcgcaaattatcaaatcaaaattcacgacggc

SEQ ID NO: 504816 - DNA, 75 bp, synthetic construct
  source 1..75: mol_type = other DNA
gggggattgcccgtgcccatgtcaacgcactttgtctcaatccgctagtaactggtctggccctgtacgatgtga

SEQ ID NO: 504817 - DNA, 75 bp, synthetic construct
  source 1..75: mol_type = other DNA
gtgcttttgcccgttctgtggtgaaagtttgaaaacgtgggaggaaacgagtgagcaatacaaaaaatcatggca

SEQ ID NO: 504818 - DNA, 75 bp, synthetic construct
  source 1..75: mol_type = other DNA
gtgaacgcatcaaaatgtcaggttaatggcaatcagatagaaccgtgcgcggctttggcaaaatctctcgaatat

SEQ ID NO: 504819 - DNA, 75 bp, synthetic construct
  source 1..75: mol_type = other DNA
atcgtctgatcgaagaaatcgaaacggaagatttgttattcacgctgcgtaaggtggagagtaaaggctttctgg

SEQ ID NO: 504820 - DNA, 75 bp, synthetic construct
  source 1..75: mol_type = other DNA
gtcgccactaactggcatggcgagcataaacgctggtctgaacattacgcgaaaacggttatgcgcagactggaa

SEQ ID NO: 504821 - DNA, 75 bp, synthetic construct
  source 1..75: mol_type = other DNA
tgggttatttagccgtgtactcaatgaatatgtcggtacggaagctattccgcttgccgatattcttcgtgatga

SEQ ID NO: 504822 - DNA, 75 bp, synthetic construct
  source 1..75: mol_type = other DNA
tgataggtatttttgttgatggcgatttttcagtcaaccaaaagactgctttttcaaaaatggaacaagattttg

SEQ ID NO: 504823 - DNA, 75 bp, synthetic construct
  source 1..75: mol_type = other DNA
ataatattgaagcggtgacgaaactgcttaaattaccgcagcatgttctgccgctgtttgggctgtgccttggct

SEQ ID NO: 504824 - DNA, 75 bp, synthetic construct
  source 1..75: mol_type = other DNA
aaagaaatcaaaattgccgcagctaacgtaccggcgtttgtttctggcaaggcactgaaagacgcagttaagtaa

SEQ ID NO: 504825 - DNA, 75 bp, synthetic construct
  source 1..75: mol_type = other DNA
tcagtggtttgaacctaatcctgaacgatataagaaagatgaggttccaatagttaatactaagcagcatcccta

SEQ ID NO: 504826 - DNA, 75 bp, synthetic construct
  source 1..75: mol_type = other DNA
atgctttcaccgataaggactatttgccataactccgctgatatattgcagaattcatcctgtcaaacggcttct

SEQ ID NO: 504827 - DNA, 75 bp, synthetic construct
  source 1..75: mol_type = other DNA
atataatatgtgaacaaaagttacgaactgaagacaaaagagatgaatacttgttgaatctgttagagaaagagc

SEQ ID NO: 504828 - DNA, 75 bp, synthetic construct
  source 1..75: mol_type = other DNA
gcaatggtggtcagattatcttgatgcaaacagtgacgggtatgtttcagcttaccagtatgcccgccgcctgaa

SEQ ID NO: 504829 - DNA, 75 bp, synthetic construct
  source 1..75: mol_type = other DNA
atggatgggagcacatcttgtcatatcgggagagataagcatcgggcagttaatcgcgtttaatatgcttgcagg

SEQ ID NO: 504830 - DNA, 75 bp, synthetic construct
  source 1..75: mol_type = other DNA
aaaacacaccagaaaacatcaaacgtctgcggcaaaaaattggtctgacgcagaaagaatgtgccgaaatattca

SEQ ID NO: 504831 - DNA, 75 bp, synthetic construct
  source 1..75: mol_type = other DNA
caggaagcgggctacggccttgccgcgctaattgacggattatggctgcgcgcggcactgagcggcaaaccgctg

SEQ ID NO: 504832 - DNA, 75 bp, synthetic construct
  source 1..75: mol_type = other DNA
atgagtgaagaaaaacgccctgtactgagcctgaaacgaaaaccggcggagaacagtacgacctccgcagaggcg

SEQ ID NO: 504833 - DNA, 75 bp, synthetic construct
  source 1..75: mol_type = other DNA
cgcgctaccggtacgccagcaattcaggtgaacaccggtaaaggctgccatctcgatgcacagatgatcgccgac

SEQ ID NO: 504834 - DNA, 75 bp, synthetic construct
  source 1..75: mol_type = other DNA
tcacgcgccgggcatgagccagcgccggatgctggaagttgaaattgacgtgctggacaaaaacaaccgtctggc

SEQ ID NO: 504835 - DNA, 75 bp, synthetic construct
  source 1..75: mol_type = other DNA
ttatctgctggacggcatgtttataggcgcaacgcgtgccgccgaaatgcgtaacagtatggcggtggccgccgc

SEQ ID NO: 504836 - DNA, 75 bp, synthetic construct
  source 1..75: mol_type = other DNA
ggtttatttgggcggcgtggcggttggtgcaacggcgaccagctttctctttatgctgttgctgtttttacgcat

SEQ ID NO: 504837 - DNA, 75 bp, synthetic construct
  source 1..75: mol_type = other DNA
tctcgctgttgcaggcccgccgcttgcgggaggccgcgcgcaataacattcatgcaggcgtagatcccgctacgg

SEQ ID NO: 504838 - DNA, 75 bp, synthetic construct
  source 1..75: mol_type = other DNA
ttctggcgttgcgcgggctttctctggcggctatctggcggcgtcactggcgcaacggtacctggtttgccgcaa

SEQ ID NO: 504839 - DNA, 75 bp, synthetic construct
  source 1..75: mol_type = other DNA
ggcgcaacgcgcgccgccgaaatgcgtaatagtatggcggtggcagcagccggttttgcgttcacgctactcaca

SEQ ID NO: 504840 - DNA, 75 bp, synthetic construct
  source 1..75: mol_type = other DNA
cattagcgcgtgcgctgatgcagccgctattgctggcattaggggctggggcattaattattctactgcgcacac

SEQ ID NO: 504841 - DNA, 75 bp, synthetic construct
  source 1..75: mol_type = other DNA
attggcgcgctgaatatgttccggtcggggctgtggatacaatttattatggcggcgtggatggtcatcagtgcg

SEQ ID NO: 504842 - DNA, 75 bp, synthetic construct
  source 1..75: mol_type = other DNA
gtcgatggtgtcatccaatgcgatggcggtcattcttgatgagtttccccatatggcgggaacggcatcttcgct

SEQ ID NO: 504843 - DNA, 75 bp, synthetic construct
  source 1..75: mol_type = other DNA
ttctggcgcgcgtacccagttcacgggcgataccgcttcattgctggtggaaaatggtcgtggcaatactctgtg

SEQ ID NO: 504844 - DNA, 75 bp, synthetic construct
  source 1..75: mol_type = other DNA
ctgcaaacctggagcgaagatgacttccgtcgagtgcaggaaaatctgattggccatttggttactcagaaacgt

SEQ ID NO: 504845 - DNA, 75 bp, synthetic construct
  source 1..75: mol_type = other DNA
tgaaagattttactgcacgctactgcgatgcgtggcatgaagagcataaaagctggccgttaagtgaggaactgt

SEQ ID NO: 504846 - DNA, 75 bp, synthetic construct
  source 1..75: mol_type = other DNA
ttgctattgtttttatccttggcctgctggccatgttgatgccgctgtcgattgatatgtatctgcctgcgctac

SEQ ID NO: 504847 - DNA, 75 bp, synthetic construct
  source 1..75: mol_type = other DNA
ctttatatgcccgcattaagcgaaaaaattattaatcacaataccgcagcaggaatgtttatgggaaccgccgcg

SEQ ID NO: 504848 - DNA, 75 bp, synthetic construct
  source 1..75: mol_type = other DNA
ttcagcgggacattgctgggttatgttattccattatccagtgcggcaatcaatgcggtgagtattcctgattat

SEQ ID NO: 504849 - DNA, 75 bp, synthetic construct
  source 1..75: mol_type = other DNA
ttacgttggggcttcacgtctgaaagagctgaccaagcgcaccacgtttattcgcgttcaggaacaagaaaaccg

SEQ ID NO: 504850 - DNA, 75 bp, synthetic construct
  source 1..75: mol_type = other DNA
caccagcccagccgctggcactggtttctggcgcgcgtacccagttcacgggcgataccgcttcattgctggtgg

SEQ ID NO: 504851 - DNA, 75 bp, synthetic construct
  source 1..75: mol_type = other DNA
ccggaattcctgaagccattctccgcaggcatgataaccagagacaaccggagcagttataccagagaaatgcca

SEQ ID NO: 504852 - DNA, 75 bp, synthetic construct
  source 1..75: mol_type = other DNA
atgcatatactggattcacttcttgcctttagtgcctatttttttattggcgtggctatggtgattatttttctg

SEQ ID NO: 504853 - DNA, 75 bp, synthetic construct
  source 1..75: mol_type = other DNA
gaaatcctgactgagcagaccataggccgaggactgcgccttccctacggcaaaagaaccggcgtcgaagccgtc

SEQ ID NO: 504854 - DNA, 75 bp, synthetic construct
  source 1..75: mol_type = other DNA
acagacatagaaatttggcgtcaaccttggatattattttcagttggagtatgtataaatgtatttacaacattt

SEQ ID NO: 504855 - DNA, 75 bp, synthetic construct
  source 1..75: mol_type = other DNA
gcggttgctgcttttggcatgatgaagcagatatatccccagtaccaagatagcacgttagaagaattcctcgct

SEQ ID NO: 504856 - DNA, 75 bp, synthetic construct
  source 1..75: mol_type = other DNA
aattttcatcacctgaaggtcgattatcccggtggtgaaaaatggacgctggctaaacctgactttgtggcgttg

SEQ ID NO: 504857 - DNA, 75 bp, synthetic construct
  source 1..75: mol_type = other DNA
gtatggcggcaagggaggccggtcatgccgtccgtgagatggagcggtggatggtgccgaacaaactccgggagg

SEQ ID NO: 504858 - DNA, 75 bp, synthetic construct
  source 1..75: mol_type = other DNA
cgcagtttttcaccaaaggtgaggaagaacaaacgcttaatcgcggtttgcatcagcgtggcgttaatcgggtaa

SEQ ID NO: 504859 - DNA, 75 bp, synthetic construct
  source 1..75: mol_type = other DNA
caaaaatatatagttactatcattctttccgaataaacaatgagactaatattagaatcatcataaaagatattg

SEQ ID NO: 504860 - DNA, 75 bp, synthetic construct
  source 1..75: mol_type = other DNA
ctctcgatccggttcgtacggctcaaaaacgccttgattaccagggtatctatactcctgatcaggttgagcgcg

SEQ ID NO: 504861 - DNA, 75 bp, synthetic construct
  source 1..75: mol_type = other DNA
agcgtcgttcccgcgtgacaaacccggacggaacaataaaccttcctcctgaatatctaatgaagatccggctct

SEQ ID NO: 504862 - DNA, 75 bp, synthetic construct
  source 1..75: mol_type = other DNA
tgcagcgactgttgactgtcgagcatgacaaagacactgaaatcgtcattcacgtcaacaagttgaaagagggct

SEQ ID NO: 504863 - DNA, 75 bp, synthetic construct
  source 1..75: mol_type = other DNA
aggcagtgaattatcgatgacctttaattttcatcacctgaaggtcgattatcccggtggtgaaaaatggacgct

SEQ ID NO: 504864 - DNA, 75 bp, synthetic construct
  source 1..75: mol_type = other DNA
gggccacgagcacacgagtttttgcacgagatgaaccgcgatgtgtttacgccacgcgggttaatgaccgtaggt

SEQ ID NO: 504865 - DNA, 75 bp, synthetic construct
  source 1..75: mol_type = other DNA
ggaaagaacgtagttgctacggctatgcgtatccgctatgcccagggctggcagtggacggtagacgtagacgga

SEQ ID NO: 504866 - DNA, 75 bp, synthetic construct
  source 1..75: mol_type = other DNA
taggttttaaagacgttctcatccgccctaaacgctccactcttaaaagccgttctgatgttgaactggaacgtc

SEQ ID NO: 504867 - DNA, 75 bp, synthetic construct
  source 1..75: mol_type = other DNA
ttacgttgccgggagccaggagtcatttattggtctgatgaatggttatgccaaaaaactgggtctgaccaacac

SEQ ID NO: 504868 - DNA, 75 bp, synthetic construct
  source 1..75: mol_type = other DNA
gagggtggattctttggtcggatgtgggatttcgtgatgatgaaattccatcagtggttcggcagctggttctct

SEQ ID NO: 504869 - DNA, 75 bp, synthetic construct
  source 1..75: mol_type = other DNA
gcctttaccgaggaatgcagagcattccagaaggccaagcagatgcgtcagtgggagttcaagcccagccctaaa

SEQ ID NO: 504870 - DNA, 75 bp, synthetic construct
  source 1..75: mol_type = other DNA
tggttatggtgccctgatcaccgcaattccgctgattacagtcggcattctggcgcggatgttagccaaaatgaa

SEQ ID NO: 504871 - DNA, 75 bp, synthetic construct
  source 1..75: mol_type = other DNA
aggctataatctggtcgcttcggctacccagggtgatatgcgtcttatctcggtggtgctgggggcgaaaactga

SEQ ID NO: 504872 - DNA, 75 bp, synthetic construct
  source 1..75: mol_type = other DNA
gctatgtggttgggcaggcgcttaaggccgataagattaaactcaccgatatggtgacggtcggtaaagatgcct

SEQ ID NO: 504873 - DNA, 75 bp, synthetic construct
  source 1..75: mol_type = other DNA
gccattctagtaatgcccccgccagagatggctggactgcagtcaccccacgctcatacgcaaggagttataaga

SEQ ID NO: 504874 - DNA, 75 bp, synthetic construct
  source 1..75: mol_type = other DNA
tcactacagctttcattcctggtttctatgctctgctttgtctatgtcggagtctacttctggcgtgaaagcaaa

SEQ ID NO: 504875 - DNA, 75 bp, synthetic construct
  source 1..75: mol_type = other DNA
gttttatcacccacaactgccatcagaaatgccgacctggccgtacgccgtcgcgctggtgattgaagctggcga

SEQ ID NO: 504876 - DNA, 75 bp, synthetic construct
  source 1..75: mol_type = other DNA
caggaagacaccggaacagcgcttcacgcaggaacacagtctgttcttccggttgctgaaccgtcgatatgaaaa

SEQ ID NO: 504877 - DNA, 75 bp, synthetic construct
  source 1..75: mol_type = other DNA
cggctgtttgagagcggcaaatcgttttatatgtgtgcctgtcgtcaggacgattacacgccgaactactttttg

SEQ ID NO: 504878 - DNA, 75 bp, synthetic construct
  source 1..75: mol_type = other DNA
tgaaaccagctatcgtgacatccagcaatttattgagaaaccaccgggcaagctgcggatattcgaaatttatcc

SEQ ID NO: 504879 - DNA, 75 bp, synthetic construct
  source 1..75: mol_type = other DNA
tcttacgccacggtgtatccgttagtcatgttcctgcgcattatcacaccacagttacttgcggtgcttttctgg

SEQ ID NO: 504880 - DNA, 75 bp, synthetic construct
  source 1..75: mol_type = other DNA
atctattaatatctttaatcagataatttgtaagatgccatcaatgcctgatgatgatgttgttattcttccaaa

SEQ ID NO: 504881 - DNA, 75 bp, synthetic construct
  source 1..75: mol_type = other DNA
ttctgattatctccgtgcttatggcaatcggcattatgcgaattatccacacactgaaggatatcgaattattct

SEQ ID NO: 504882 - DNA, 75 bp, synthetic construct
  source 1..75: mol_type = other DNA
cggcagtattggcaagctttactggtttatgccgccaagtgccaacctcgcgctacgcgagctgggtatcgtgtt

SEQ ID NO: 504883 - DNA, 75 bp, synthetic construct
  source 1..75: mol_type = other DNA
cgcacggtctgggcggaatgatcgtcagcgacggtggctgcaccacgccgggcgatgtcgcgaaagcctttggcg

SEQ ID NO: 504884 - DNA, 75 bp, synthetic construct
  source 1..75: mol_type = other DNA
gatgataacgtgttctttaatgcttttgaatttcatcgaatgccaagtagacaaacagccaaaaaaattagattt

SEQ ID NO: 504885 - DNA, 75 bp, synthetic construct
  source 1..75: mol_type = other DNA
gcggttctatgacagtgtgggacgtcggattattaaaagaaccgtgcacaacaatatgaaggctgccgtagaacg

SEQ ID NO: 504886 - DNA, 75 bp, synthetic construct
  source 1..75: mol_type = other DNA
gctcacgattgaaacgagaagaaaccctaaaagtgccttcgccagaaaccgttattcaactgggcgatttgctgc

SEQ ID NO: 504887 - DNA, 75 bp, synthetic construct
  source 1..75: mol_type = other DNA
acgcctcaatttatttgccattctgattgttgtcatcggtggcctggtcactgctcttttgcataaattgttcaa

SEQ ID NO: 504888 - DNA, 75 bp, synthetic construct
  source 1..75: mol_type = other DNA
attccgctgatcacagccggcattctggcgcggatgttagccaaaatgaattatctcactatgtgtgggatgttg

SEQ ID NO: 504889 - DNA, 75 bp, synthetic construct
  source 1..75: mol_type = other DNA
agcctgcagttcggcgatatcctcaacctggtggggcgtccgtccgcaattgatgccgttgccaatgtgctgggg

SEQ ID NO: 504890 - DNA, 75 bp, synthetic construct
  source 1..75: mol_type = other DNA
atgtggctattgcgggtcatgttccgcgtgaacgttgaaacggaagcgcagcagcatgagtccacgcgaaccaac

SEQ ID NO: 504891 - DNA, 75 bp, synthetic construct
  source 1..75: mol_type = other DNA
atgccaccaagcgccaacctcgcgctgcgggagctggggatcgtactgttcctctcggtagtgggtctgaaatcc

SEQ ID NO: 504892 - DNA, 75 bp, synthetic construct
  source 1..75: mol_type = other DNA
gatattgaagacggctttaaacatagcccgctctatttgaatatcggtcttggacagtgcgaaaaatgggatgaa

SEQ ID NO: 504893 - DNA, 75 bp, synthetic construct
  source 1..75: mol_type = other DNA
cgatcgtctggccgatctcgcggttcaggtctggcaagcgccttctcttcctgaagaggttttagctgtttatcg

SEQ ID NO: 504894 - DNA, 75 bp, synthetic construct
  source 1..75: mol_type = other DNA
atgccattctatttcaggaaggagtgtccgttaaactcaggctacctcaaatattttgacagttttatgcgtcat

SEQ ID NO: 504895 - DNA, 75 bp, synthetic construct
  source 1..75: mol_type = other DNA
gcgacctcgaaatttagatcattatttgcctaaagctcactatcctcagttttctatattgcctgttaatcttgt

SEQ ID NO: 504896 - DNA, 75 bp, synthetic construct
  source 1..75: mol_type = other DNA
tgtaatgctgtttccggcatatttcagaagtgactctggtcttattggtgcaactctttgggaccgggattgtat

SEQ ID NO: 504897 - DNA, 75 bp, synthetic construct
  source 1..75: mol_type = other DNA
aactgcaataccgtattccggaccagccttcgctggatggtaataccgtcgatatggatcgcgaacgcacccagt

SEQ ID NO: 504898 - DNA, 75 bp, synthetic construct
  source 1..75: mol_type = other DNA
tgcaccttcgggacaagagtcgatgtgtgccggtgctgcggcttacttgatgaaaataggcaggccgacagtggc

SEQ ID NO: 504899 - DNA, 75 bp, synthetic construct
  source 1..75: mol_type = other DNA
tacgggatgaacttcgagtttatgccggaactgaagtggactttcggctacccgggcgcaattatctttatgatc

SEQ ID NO: 504900 - DNA, 75 bp, synthetic construct
  source 1..75: mol_type = other DNA
gcgtgcccgtagccagtcgatggtagacggtaacgcctacgagttgctgctggatctgttcgaaaccaaaatcga

SEQ ID NO: 504901 - DNA, 75 bp, synthetic construct
  source 1..75: mol_type = other DNA
gctggttgaagatattcacatctacgcggagtattactgtgcaatggcattgggtaaagaaagtgacaaatcgct

SEQ ID NO: 504902 - DNA, 75 bp, synthetic construct
  source 1..75: mol_type = other DNA
atccatatcaaaccccggaacttgttacacacggagacacagattacctctcatggctcaacgcatctttacgct

SEQ ID NO: 504903 - DNA, 75 bp, synthetic construct
  source 1..75: mol_type = other DNA
atgcttgatgaaaaaagttcgaataccgcgtctgtcgtggtgctatgtaccgcaccggatgaagcgacagcccag

SEQ ID NO: 504904 - DNA, 75 bp, synthetic construct
  source 1..75: mol_type = other DNA
accggatgggccgtttccagtatcgtgattggttgtatcatcggcgcgctggtcggtggaaaaattgccgataaa

SEQ ID NO: 504905 - DNA, 75 bp, synthetic construct
  source 1..75: mol_type = other DNA
ggcgcaatatcacaacgatcctcgccttactgtgctggttggcgcagaccttgtggctgctgaagaactacgcct

SEQ ID NO: 504906 - DNA, 75 bp, synthetic construct
  source 1..75: mol_type = other DNA
ttgtggctgctgaagaactacgcctctacaacaaagaggataagcctaccgaaaaagtggccgcacagttgctga

SEQ ID NO: 504907 - DNA, 75 bp, synthetic construct
  source 1..75: mol_type = other DNA
acgcaccgccgccgaccaaaccggtagagacgcaaacgcaatccacggtgccggataaaaacgatcgcgccactg

SEQ ID NO: 504908 - DNA, 75 bp, synthetic construct
  source 1..75: mol_type = other DNA
ccgtcgtgattgccaaaaaagatacctacaaaacgtttgccgacctgaaaggcaaacgtattgggatggaaaacg

SEQ ID NO: 504909 - DNA, 75 bp, synthetic construct
  source 1..75: mol_type = other DNA
gccgtcaggcgattatcccgccgttcatgccgggcaaacgcatggtggttacgccactttcgaacctgcatatct

SEQ ID NO: 504910 - DNA, 75 bp, synthetic construct
  source 1..75: mol_type = other DNA
tatgccgggtaaacgcatggtggttacgccgctgtctaacctgcacatctacacccagcgcaatacccgtatgcg

SEQ ID NO: 504911 - DNA, 75 bp, synthetic construct
  source 1..75: mol_type = other DNA
attatgaagctatctaacgactattcagattttattgcaaaaatgaatcgcctgcatccaaggtttgaggatgtg

SEQ ID NO: 504912 - DNA, 75 bp, synthetic construct
  source 1..75: mol_type = other DNA
ttatcgcatttgtggaagatccggacggttacaaaattgaattaatcgaagagaaagacgccggtcgcggtctgg

SEQ ID NO: 504913 - DNA, 75 bp, synthetic construct
  source 1..75: mol_type = other DNA
tgcgctatattctgctggttggctgttgtatcgctgttttacaacagtttactggtgtcaatgtgatgaactact

SEQ ID NO: 504914 - DNA, 75 bp, synthetic construct
  source 1..75: mol_type = other DNA
gggcaaacgcttcatcattgcgcaccgctgcaccagataccggtattcattcgcgagaaagggaaatatcgccag

SEQ ID NO: 504915 - DNA, 75 bp, synthetic construct
  source 1..75: mol_type = other DNA
tggaaggttacgccgtggagcacgacgaaatttacgcggcctacgacaaactgaccatcaagggcgcagaagccg

SEQ ID NO: 504916 - DNA, 75 bp, synthetic construct
  source 1..75: mol_type = other DNA
ttgacaggcagcgcacactgaagtcaggcatgaaaattgaattagcagaaccgtactgcccaatcgttccacttc

SEQ ID NO: 504917 - DNA, 75 bp, synthetic construct
  source 1..75: mol_type = other DNA
tctcggtggtatccgtggtgttcctgccgccaacgctggttgcttccagctacgggatgaactttgagtttatgc

SEQ ID NO: 504918 - DNA, 75 bp, synthetic construct
  source 1..75: mol_type = other DNA
tcgaatcgccaacaacatgccggaacaatacgacgaaaagccgcaggtgcagcaggtggcgcagatcatcaacgg

SEQ ID NO: 504919 - DNA, 75 bp, synthetic construct
  source 1..75: mol_type = other DNA
tgcacaaacagggttgggcgacgcgctaaaaccgccacgtcgatgtatgatacgcgggcttttgaccaggtctga

SEQ ID NO: 504920 - DNA, 75 bp, synthetic construct
  source 1..75: mol_type = other DNA
ataaaattactggtgctaaggttccacaggattttgtcagcgtattttctgtaaaagccgcaggtagtacgaaag

SEQ ID NO: 504921 - DNA, 75 bp, synthetic construct
  source 1..75: mol_type = other DNA
gaaaaagtcggtgacacctggctgacactcgaagagttgcgttttctaatggaacattttgctgaagcaaccaac

SEQ ID NO: 504922 - DNA, 75 bp, synthetic construct
  source 1..75: mol_type = other DNA
gccgctggcaaggtcctggctggatgggaagagcgcgttgccgcaggtaagccggtaccgccgatccgccgtgct

SEQ ID NO: 504923 - DNA, 75 bp, synthetic construct
  source 1..75: mol_type = other DNA
caatgatggcgcagaatgcattaatcgcagcggaatcgctgggattggggcggggtatatatcggcggcctgcgc

SEQ ID NO: 504924 - DNA, 75 bp, synthetic construct
  source 1..75: mol_type = other DNA
ggcatacacccagtataaagccgaaggcggcgatctgggttatacggccttccgtgaacaggttggcgaggcgct

SEQ ID NO: 504925 - DNA, 75 bp, synthetic construct
  source 1..75: mol_type = other DNA
tgcggattctcgatcgccagaggaaaccgcctggataaaaaaccagatagacgatgaaaatgaagaccgtcgggt

SEQ ID NO: 504926 - DNA, 75 bp, synthetic construct
  source 1..75: mol_type = other DNA
aaatctccctcatgtaatggttgttactgctgagcctactccaagtcgtctggcgtctattgctcttggtactgg

SEQ ID NO: 504927 - DNA, 75 bp, synthetic construct
  source 1..75: mol_type = other DNA
ggggtgaaagtgccgctcacgttgcagcgggtgcgatgatgagcggcgtgtttgccagtgctggtgttgcgcttt

SEQ ID NO: 504928 - DNA, 75 bp, synthetic construct
  source 1..75: mol_type = other DNA
caatgcgtacggtcattaaccgcgtgaagacagcccagcaggaactgggcttactcccgccggatgccgaactga

SEQ ID NO: 504929 - DNA, 75 bp, synthetic construct
  source 1..75: mol_type = other DNA
agcaaaagacattactggtcatagccgatgtatcgaaaaacaagcgtgagcacctgatcccgctgactgaatcgg

SEQ ID NO: 504930 - DNA, 75 bp, synthetic construct
  source 1..75: mol_type = other DNA
tcggctggaaagttcgcctgtgtcttatggatacccagcgtgcgctcaatttcctggtgcgtaaagcgcgtttac

SEQ ID NO: 504931 - DNA, 75 bp, synthetic construct
  source 1..75: mol_type = other DNA
ccgccgacgctcgttgcttccagctatggcatgaactttgagtttatgccagaactgaagtggagcttcggctac

SEQ ID NO: 504932 - DNA, 75 bp, synthetic construct
  source 1..75: mol_type = other DNA
gaacgacgcaccagaaattcattatggataagcacccggaaatcaccactgttccgtatgacagctaccagaatg

SEQ ID NO: 504933 - DNA, 75 bp, synthetic construct
  source 1..75: mol_type = other DNA
gggcgatgagtacgatgaggcgctctccacgctggcggaactggaagatattggctggaaagtacgcctgtgtct

SEQ ID NO: 504934 - DNA, 75 bp, synthetic construct
  source 1..75: mol_type = other DNA
gcaacccgcccggaactggaagacatcgaagcatcggcacgtttctttgaagacgatgacggcctgcatattcac

SEQ ID NO: 504935 - DNA, 75 bp, synthetic construct
  source 1..75: mol_type = other DNA
ctgtttactctgcgtgagcgtgaattgcctgcttttcgcctttaccgtatgcgtgctcgtagccagtcgatggta

SEQ ID NO: 504936 - DNA, 75 bp, synthetic construct
  source 1..75: mol_type = other DNA
cgtaccgttgccgggttgctggcaaatctcggcggctggtgcaccgttttctgggtcgcagcagtattaatggcg

SEQ ID NO: 504937 - DNA, 75 bp, synthetic construct
  source 1..75: mol_type = other DNA
cctgctactgggcattttgctggcgcgtaccgttgccgggttgctggcaaatctcggcggctggtgcaccgtttt

SEQ ID NO: 504938 - DNA, 75 bp, synthetic construct
  source 1..75: mol_type = other DNA
gagctggcgaaaaagtatggtgcctggcttgttgaaggaaaagagccccaacaagagcttgagcaacaacgcctg

SEQ ID NO: 504939 - DNA, 75 bp, synthetic construct
  source 1..75: mol_type = other DNA
ccggggcgttaggcgctcgtccggcgggcggttttgccgataagggcaaatcacacctcaccacaactttcggcc

SEQ ID NO: 504940 - DNA, 75 bp, synthetic construct
  source 1..75: mol_type = other DNA
tcacacttccgtactggcgctgattatcggcatcctggtgctggatctcaccgtacagggcgtgcatatcactaa

SEQ ID NO: 504941 - DNA, 75 bp, synthetic construct
  source 1..75: mol_type = other DNA
aattctggttccgctggcagcgacgctggcttcaccggataaacgcggcaaagtggttggcaccattatgagcgg

SEQ ID NO: 504942 - DNA, 75 bp, synthetic construct
  source 1..75: mol_type = other DNA
ttggtggcacttacgtcgctggcgaggccagtacatggggcgtttacctagccacttctggtgcaatgacactct

SEQ ID NO: 504943 - DNA, 75 bp, synthetic construct
  source 1..75: mol_type = other DNA
cctggatggttttctggatgcgcaaagtgtcgcgcaacgtcaaagtgcaactggaacaggcagtcgatagcgcat

SEQ ID NO: 504944 - DNA, 75 bp, synthetic construct
  source 1..75: mol_type = other DNA
cgccagacgataaaagacaatccgacagtcagccagagcacactgatatggcatctcaacccagtcctcaaaggc

SEQ ID NO: 504945 - DNA, 75 bp, synthetic construct
  source 1..75: mol_type = other DNA
tcttccaaagaagacaaactttatatcctccagaactgcctcgtattacgatctttttaccgccgagaaaaaggc

SEQ ID NO: 504946 - DNA, 75 bp, synthetic construct
  source 1..75: mol_type = other DNA
ctatgccctcggaattgagtagggatttgtataaaatcttgccatttttccgttttatgcgtgataatgtagaag

SEQ ID NO: 504947 - DNA, 75 bp, synthetic construct
  source 1..75: mol_type = other DNA
actgctgatctctgtaccgttgtctaaaaaaggtcgtctggttggattttgcaaggacattagtcttggttattg

SEQ ID NO: 504948 - DNA, 75 bp, synthetic construct
  source 1..75: mol_type = other DNA
ggcgcgggcagccagtcaggttcagacactggcggagaaaaaccagcatcaggcgcaaattgagcgcgatgcctt

SEQ ID NO: 504949 - DNA, 75 bp, synthetic construct
  source 1..75: mol_type = other DNA
aaacttggaaggaagttgttgaaggatttaatctgaaaccaaagatatattattcacatcacgacaaaccccaaa

SEQ ID NO: 504950 - DNA, 75 bp, synthetic construct
  source 1..75: mol_type = other DNA
cgccgtcgaaccatacccatctggcattaagccgtcaggctttcgaaccgctgcgtattcagcgtctggggcagg

SEQ ID NO: 504951 - DNA, 75 bp, synthetic construct
  source 1..75: mol_type = other DNA
gccataaccccggaagggaaaatgctgactctcttccgggcaatggaaacaccgataaagcgccatataaaaatc

SEQ ID NO: 504952 - DNA, 75 bp, synthetic construct
  source 1..75: mol_type = other DNA
ttccgacactgggtattcggcacagaaacagggaagctcctgccatcaggcaaacgtgagttactggcgctatat

SEQ ID NO: 504953 - DNA, 75 bp, synthetic construct
  source 1..75: mol_type = other DNA
gatttcgtgatcacgggaataagccacgatactctgtcagaaaaggttcttcccttgttagaaaactttctggca

SEQ ID NO: 504954 - DNA, 75 bp, synthetic construct
  source 1..75: mol_type = other DNA
attatattttgataaacaattatggatacttggtggacccccatgccagggattttctacggcaggaaatgccag

SEQ ID NO: 504955 - DNA, 75 bp, synthetic construct
  source 1..75: mol_type = other DNA
ctactgccgtggtgctaggcttcctgctctactggggcggtattcgcctcaatcttggtgcattttttaaatgga

SEQ ID NO: 504956 - DNA, 75 bp, synthetic construct
  source 1..75: mol_type = other DNA
ccgctgggtgcaatgctcggtcttgctactgccgtggtgctaggcttcctgctctactggggcggtattcgcctc

SEQ ID NO: 504957 - DNA, 75 bp, synthetic construct
  source 1..75: mol_type = other DNA
atggcagtacagatttcaggcgtgctgaaagacggtgcaggaaaaccaatacagaactgcactattcagctcaaa

SEQ ID NO: 504958 - DNA, 75 bp, synthetic construct
  source 1..75: mol_type = other DNA
gacgatctttaactgcgcctacaattcttcgtatcccgatgatgagacgttagggttaattattactgcccggtg

SEQ ID NO: 504959 - DNA, 75 bp, synthetic construct
  source 1..75: mol_type = other DNA
caggcccgtcaggcgtttaaaaatttgctgtcggtggcagaggccgcaggagggagtgatagggatattgtgaag

SEQ ID NO: 504960 - DNA, 75 bp, synthetic construct
  source 1..75: mol_type = other DNA
ctacagccgtggtgcttggcttcctgctctactggggcggtattcgcctcaatcttggtgcattttttaaatgga

SEQ ID NO: 504961 - DNA, 75 bp, synthetic construct
  source 1..75: mol_type = other DNA
ctctggaagcgataacagggtatgccccgggctataaaacaataaccatcggcagtgatgaaataacaatgcctg

SEQ ID NO: 504962 - DNA, 75 bp, synthetic construct
  source 1..75: mol_type = other DNA
caaagccagcgaaactgcggcaaaaaacagtcaggatgcagcggcccaaagcgagagtgccgcagctggttctgc

SEQ ID NO: 504963 - DNA, 75 bp, synthetic construct
  source 1..75: mol_type = other DNA
taaatgagataaaaccaaacggttttatttttgaaaatgttgctggtttgttgaatatggaaaaaggtaaggtct

SEQ ID NO: 504964 - DNA, 75 bp, synthetic construct
  source 1..75: mol_type = other DNA
tccagccagacggcagcgaagaccagcgaaacgaatgccaaagccagtgaaactgcggcgaaaagcagtcaggat

SEQ ID NO: 504965 - DNA, 75 bp, synthetic construct
  source 1..75: mol_type = other DNA
gcatcagatttatgtaaatttccgctgatgaaaaatatgtataccatgccttttacgttcatggtggaagtccat

SEQ ID NO: 504966 - DNA, 75 bp, synthetic construct
  source 1..75: mol_type = other DNA
tcaatgttcgcgcacgtatccgttttgaacggtataactcggaaggatacactttcctttgtgacgcctatttgt

SEQ ID NO: 504967 - DNA, 75 bp, synthetic construct
  source 1..75: mol_type = other DNA
accagtcgcgatgccagtcactatcaacaagggcaaggaacgcagttacttcatgaaattgcgctgatgttgccg

SEQ ID NO: 504968 - DNA, 75 bp, synthetic construct
  source 1..75: mol_type = other DNA
gctgtaaaatctaaagctgggggaggactctttatacgcgttcgttatggtagcgacaataaaagctggatttat

SEQ ID NO: 504969 - DNA, 75 bp, synthetic construct
  source 1..75: mol_type = other DNA
tacgtttaacggtattcgccagctgaaccgtaacggcctgttatgggataacagcctgaatgtcgacggcatcaa

SEQ ID NO: 504970 - DNA, 75 bp, synthetic construct
  source 1..75: mol_type = other DNA
tgcacggcgtaagttacgatttttactacgttaccgcttacatctatgtcgataaaaaagcccccgtgcatatgc

SEQ ID NO: 504971 - DNA, 75 bp, synthetic construct
  source 1..75: mol_type = other DNA
ggtttgggtatcttcattaatgaaaccaccggcgaattcccgcaaaaagagcaggagctgtttgaagggatcgtg

SEQ ID NO: 504972 - DNA, 75 bp, synthetic construct
  source 1..75: mol_type = other DNA
gcacatctgaactgaccgccagcaataaaaagctggtggggtatgccgttcgctggaacagcctttcagaaatta

SEQ ID NO: 504973 - DNA, 75 bp, synthetic construct
  source 1..75: mol_type = other DNA
tgaaggtgcatatgtttttggttctactagcaaacctggctttcccatcacaaatgacgctctgactcgcgcgtt

SEQ ID NO: 504974 - DNA, 75 bp, synthetic construct
  source 1..75: mol_type = other DNA
aggctcccgccgccgcaaggcagaagatgtgggcgatcgcaaacagttcgaaaactcatactggcgttatgaggg

SEQ ID NO: 504975 - DNA, 75 bp, synthetic construct
  source 1..75: mol_type = other DNA
tacgacaacggttctcacgttctcaccgcagccgtgtcgatcggcgctggcggggattatttaaccctggacgct

SEQ ID NO: 504976 - DNA, 75 bp, synthetic construct
  source 1..75: mol_type = other DNA
tccaccgttggtcatgacctgaacctcgacgtgtgcagtaagtgccacccgttcttcactggcaaacagcgtgat

SEQ ID NO: 504977 - DNA, 75 bp, synthetic construct
  source 1..75: mol_type = other DNA
cgcgaatccgacaacgaaattacggctatcaaagtcgatgatcgcgacattgcgttaacacagggggaagttaaa

SEQ ID NO: 504978 - DNA, 75 bp, synthetic construct
  source 1..75: mol_type = other DNA
aaagtcatccgaacggcgaagacgtcaacatcggctggcatgaaatcgccaaaaagtggggagaacagcccggca

SEQ ID NO: 504979 - DNA, 75 bp, synthetic construct
  source 1..75: mol_type = other DNA
aaagtcacccgaacggcgaagacgtcaacatcggctggcatgaaatcgcccgtcagtggggcgaactggagggta

SEQ ID NO: 504980 - DNA, 75 bp, synthetic construct
  source 1..75: mol_type = other DNA
ggattggtgtgatgtggattggcgtgttgcttgccgccgcgttgtgcctgggactgggcatcttcattaatgaaa

SEQ ID NO: 504981 - DNA, 75 bp, synthetic construct
  source 1..75: mol_type = other DNA
gtcctgactggtgtatctctcgtcagcgtacctggggcgtaccgatgtcactgttcgtgcacaaagacacggaag

SEQ ID NO: 504982 - DNA, 75 bp, synthetic construct
  source 1..75: mol_type = other DNA
ccgtctgggcgtgctgggcgactggtcgcacccgtacctgaccatggacttcaaaactgaagccaacatcatccg

SEQ ID NO: 504983 - DNA, 75 bp, synthetic construct
  source 1..75: mol_type = other DNA
atgaaactgctgcgtaccagcgaaaacccggaatacaaatactcactggcgtttgttggctacggcccggaaacc

SEQ ID NO: 504984 - DNA, 75 bp, synthetic construct
  source 1..75: mol_type = other DNA
aggaaacactcacggagcttgatgaccgggcggttgtcgattatctgattaaaaatcctgagttttttatccgca

SEQ ID NO: 504985 - DNA, 75 bp, synthetic construct
  source 1..75: mol_type = other DNA
cgccgtatcgtcaggtactgactcatggcttcaccgtggatggtcagggtcgtaagatgtccaaatccatcggca

SEQ ID NO: 504986 - DNA, 75 bp, synthetic construct
  source 1..75: mol_type = other DNA
gcgcacctggggcgtaccgatgtcactgttcgtgcacaaagacacggaagagctgcatccgcgtactctcgaact

SEQ ID NO: 504987 - DNA, 75 bp, synthetic construct
  source 1..75: mol_type = other DNA
tggtttatttatctcatcccggcgctggtggcatttgcgctgccgccacgtgcaggggcgacagcgtctcgctcc

SEQ ID NO: 504988 - DNA, 75 bp, synthetic construct
  source 1..75: mol_type = other DNA
gccgagcgtcagcgaagtcgccgtctggtttatttatctcatcccggcgctggtggcgtttgctctgccgccacg

SEQ ID NO: 504989 - DNA, 75 bp, synthetic construct
  source 1..75: mol_type = other DNA
ccacggccgtggtgcttggtttcctgctctactggggcggtattcgcctcaatcttggcgcatttttcaaatgga

SEQ ID NO: 504990 - DNA, 75 bp, synthetic construct
  source 1..75: mol_type = other DNA
cagaaaaataaaagaaattccaccacgagtgaataatacagatgaaggtgtctcagaggggagtggatgtgcgtc

SEQ ID NO: 504991 - DNA, 75 bp, synthetic construct
  source 1..75: mol_type = other DNA
tacagaaaaataaaagaaatttcaccacaagcgaataatacaggtgaaggtgtctcagaggggagtggatgtgcg

SEQ ID NO: 504992 - DNA, 75 bp, synthetic construct
  source 1..75: mol_type = other DNA
aggggcgaaatcttctggtgaatataaaagacatcagtttcgtcgttcagaaaggtattttttgtgaactacata

SEQ ID NO: 504993 - DNA, 75 bp, synthetic construct
  source 1..75: mol_type = other DNA
ttgtcgtctcataaacgctggcagtctcagggactcccttgcgcctccaaaggtagtaagggcattgaatctgta

SEQ ID NO: 504994 - DNA, 75 bp, synthetic construct
  source 1..75: mol_type = other DNA
cggtatctatcgtagagcctggtgtgattatccgcgtatctgaacaggatgccgacgacttgatcgcaaaggggc

SEQ ID NO: 504995 - DNA, 75 bp, synthetic construct
  source 1..75: mol_type = other DNA
cagcttcctccggcagaagggatgaccgtgcgtgaactggtggcgattggtcgttacccgtggcatggcgcgctg

SEQ ID NO: 504996 - DNA, 75 bp, synthetic construct
  source 1..75: mol_type = other DNA
tggttggcttaaaaccgctggcgcatcggctggtcgatagcctctctggcggcgaacgtcagcgggcgtggatcg

SEQ ID NO: 504997 - DNA, 75 bp, synthetic construct
  source 1..75: mol_type = other DNA
gaccagctttatctccccggacatgactacgtagaccgcgtaatgattgacaataatcgcccgcctgcggtgtta

SEQ ID NO: 504998 - DNA, 75 bp, synthetic construct
  source 1..75: mol_type = other DNA
cactgtttttacggggctggatttcatcaaataatcccggctgcgctatacccgatggtgtgaaatcagccagca

SEQ ID NO: 504999 - DNA, 75 bp, synthetic construct
  source 1..75: mol_type = other DNA
tcgcaccattattggcattgttaactgggtgtaattcggttagctcacggtatgctgatttggataagactgaat

SEQ ID NO: 505000 - DNA, 75 bp, synthetic construct
  source 1..75: mol_type = other DNA
tcctccggcgaagaaatcactccctgtgttgcggaaaaaacaaaaagaaaacaaagagattataaaaatactctc

SEQ ID NO: 505001 - DNA, 75 bp, synthetic construct
  source 1..75: mol_type = other DNA
gtttttcgtctattggcgaacaattaacgtcagttggcgacaatatctggattattcccggattatgtgtctctc

SEQ ID NO: 505002 - DNA, 75 bp, synthetic construct
  source 1..75: mol_type = other DNA
gttaaatcactcattgattggcgcaggtttgccgccgcaggaaaactctgccgatgccttcatagctggccttga

SEQ ID NO: 505003 - DNA, 75 bp, synthetic construct
  source 1..75: mol_type = other DNA
gcagcttcctccggcagaagggatgaccgtgcgtgaactggtggcgattggtcgttacccgtggcatggcgcgct

SEQ ID NO: 505004 - DNA, 75 bp, synthetic construct
  source 1..75: mol_type = other DNA
ggtttgccgccgcaggaaaactctgccgatgccttcgcggctggccttgagcgtggccttaatgcgcccgccata

SEQ ID NO: 505005 - DNA, 75 bp, synthetic construct
  source 1..75: mol_type = other DNA
aacgtcggttggcgacaatatctggattattcccggattatgcgtttctcatgacgataaccacaatgtgatgcg

SEQ ID NO: 505006 - DNA, 75 bp, synthetic construct
  source 1..75: mol_type = other DNA
tatctattttggctcggaagagtcacgtcgccagattgaagaaatttctgcggcttttgaacgtgcgcacgagct

SEQ ID NO: 505007 - DNA, 75 bp, synthetic construct
  source 1..75: mol_type = other DNA
gccgggctgaacattgcgccatttattaccctgacgcgcgctaatcgtcacaacatcagttttgccgaagtggag

SEQ ID NO: 505008 - DNA, 75 bp, synthetic construct
  source 1..75: mol_type = other DNA
ccagaaatcaacgataagatccgggcgattgcggttaaggcttaccagacgttgggatgtgctggcatggcgcgt

SEQ ID NO: 505009 - DNA, 75 bp, synthetic construct
  source 1..75: mol_type = other DNA
actggctgcaggtggaagccaatattctggcgctgccggccgtcagcgaggcattttcctttattcgtaatacgc

SEQ ID NO: 505010 - DNA, 75 bp, synthetic construct
  source 1..75: mol_type = other DNA
tgatccaggagggggagggcggaaatttatacgtacttatgctgatggtcgatggaataataacttactgtcatt

SEQ ID NO: 505011 - DNA, 75 bp, synthetic construct
  source 1..75: mol_type = other DNA
ggttttcatcagcctgatagcgggcagattttgatcggcggtaaatcggtaaacagcctgccgccggaaaaacgc

SEQ ID NO: 505012 - DNA, 75 bp, synthetic construct
  source 1..75: mol_type = other DNA
cagggctcttctgttggtgtcagcaaagtaaccagtgaagaacagtacgcaattgccgtcgatctggcgttcgag

SEQ ID NO: 505013 - DNA, 75 bp, synthetic construct
  source 1..75: mol_type = other DNA
gcttggcgtgacgctggtttccccacagttgatgaacgcttatctgctcgggcagcagctgccggaagtatggaa

SEQ ID NO: 505014 - DNA, 75 bp, synthetic construct
  source 1..75: mol_type = other DNA
ggcgttgagcactctgccggagcttcatttgccgctaacccgctctactttgacccgaaaaacattgttgaactg

SEQ ID NO: 505015 - DNA, 75 bp, synthetic construct
  source 1..75: mol_type = other DNA
gggcatggtcaccgtgctgtgggcgtatctgcgtaactctgcatttaagaaagatggcgttgattaccatgtatc

SEQ ID NO: 505016 - DNA, 75 bp, synthetic construct
  source 1..75: mol_type = other DNA
ctccgggaatattcgtttatctgccggggaacatgccgcgcgaagtctggtctggccgaagctaaaaccttttct

SEQ ID NO: 505017 - DNA, 75 bp, synthetic construct
  source 1..75: mol_type = other DNA
cttgctattgatatgcagatgattcaaagcatgggcggcacacctgtctggccgctgattgccctctcaaatatt

SEQ ID NO: 505018 - DNA, 75 bp, synthetic construct
  source 1..75: mol_type = other DNA
cattaccggcgtacaccagaccacgcttgccattgatatgcagatgattcaaagcatgggcggtacgccagtctg

SEQ ID NO: 505019 - DNA, 75 bp, synthetic construct
  source 1..75: mol_type = other DNA
cgactgttactaggaaaatagatattactgatgatggtgacttcaaacaaaaatggcccaaaggtttcttcgaag

SEQ ID NO: 505020 - DNA, 75 bp, synthetic construct
  source 1..75: mol_type = other DNA
ccgctggggatggggctggcgacgctgattggtcgtaaaaatttctccgcagaagagcgcgaaaccggcaaagcg

SEQ ID NO: 505021 - DNA, 75 bp, synthetic construct
  source 1..75: mol_type = other DNA
ctcagggtgtttataccgtggtggctattgccgctgttgggatttgtgttccaccgttgggcatggggctggcga

SEQ ID NO: 505022 - DNA, 75 bp, synthetic construct
  source 1..75: mol_type = other DNA
tgcctgggttggtaacagctttggcgcgggcttctttggtgcactgatcgccgggattatcggcggcatcgtggt

SEQ ID NO: 505023 - DNA, 75 bp, synthetic construct
  source 1..75: mol_type = other DNA
tcacggctttgatcgcaattgctgtcctcttggttgtggggatttggacgatgattgctgcgatgctgctgattt

SEQ ID NO: 505024 - DNA, 75 bp, synthetic construct
  source 1..75: mol_type = other DNA
atagctgattttcgtgcactaccatttgcagacgcatccttttcgatggttgtattcgaccctccgcatcttgag

SEQ ID NO: 505025 - DNA, 75 bp, synthetic construct
  source 1..75: mol_type = other DNA
gtgagtgcaccggcaaccattcttgatatgtgctgtggcagtcgcatgttctggtttgataagaatgacgaactg

SEQ ID NO: 505026 - DNA, 75 bp, synthetic construct
  source 1..75: mol_type = other DNA
tcgctgattcttcttttccggttgtggtgtttgacccgccgcacctcgagcgcgttggccagtctgcctggatgg

SEQ ID NO: 505027 - DNA, 75 bp, synthetic construct
  source 1..75: mol_type = other DNA
catccgcattttcactttgtcgaaggcgatatcagtattcattccgaatggattgagtatcacgtcaaaaaatgt

SEQ ID NO: 505028 - DNA, 75 bp, synthetic construct
  source 1..75: mol_type = other DNA
atcgtcaccggacaggcgggagacggcattactatgcaaggctcgcagttagcgcagtcgctgggtctggtgcaa

SEQ ID NO: 505029 - DNA, 75 bp, synthetic construct
  source 1..75: mol_type = other DNA
aaggggcgattcctttcgccgctgccgatccgctgcgtgtcattccttccatcatggtcggttcagtttgtggtg

SEQ ID NO: 505030 - DNA, 75 bp, synthetic construct
  source 1..75: mol_type = other DNA
gcgggcttctttggtgcgctgatcgccgggattatcggcggcatcgtggtgcattacctgaagaaaattccggtg

SEQ ID NO: 505031 - DNA, 75 bp, synthetic construct
  source 1..75: mol_type = other DNA
cacctggcgcgatgacctgcgtgctgggtttaaagaggcatttcgcgtactgcggccacacggcgttcttatctt

SEQ ID NO: 505032 - DNA, 75 bp, synthetic construct
  source 1..75: mol_type = other DNA
cgttgcgctggattctgaatagcccttctgagtggatcaacgccgctgcggatccggttgtgagccgggaatttc

SEQ ID NO: 505033 - DNA, 75 bp, synthetic construct
  source 1..75: mol_type = other DNA
agtgttgttggttggttttgttgtgacctggctatgggcaccagaaaccaaagcactcccgctggtggcggcggg

SEQ ID NO: 505034 - DNA, 75 bp, synthetic construct
  source 1..75: mol_type = other DNA
acgccagaatcgccacgctggctactgcgccaggggcgttttgcagaagctcacgctatcgtgcatcgctatttt

SEQ ID NO: 505035 - DNA, 75 bp, synthetic construct
  source 1..75: mol_type = other DNA
gatgaagtggcaacggccaccactaagcacatcaaaaccttgttctcttcgcgttactggcggcgcacggtattt

SEQ ID NO: 505036 - DNA, 75 bp, synthetic construct
  source 1..75: mol_type = other DNA
cttgttacaactaaaagtttattaaaatatttcactggattcgcagtatttgagaattatgggaatcccttacta

SEQ ID NO: 505037 - DNA, 75 bp, synthetic construct
  source 1..75: mol_type = other DNA
gcgctctcctgcctgcaggggctcgggcactgttgcaaagttagcgatgaggcagccttttgtcttattcaaagg

SEQ ID NO: 505038 - DNA, 75 bp, synthetic construct
  source 1..75: mol_type = other DNA
ccgaccatattggtcggcaaaaaatcttcaccttcagctttttgctgattacgcttgcttcgtttttacaatttt

SEQ ID NO: 505039 - DNA, 75 bp, synthetic construct
  source 1..75: mol_type = other DNA
gctatgggcaccagaaaccaaagcactcccgctggtggcgggaaatgtaggaggtgcgaatgaacattctgttag

SEQ ID NO: 505040 - DNA, 75 bp, synthetic construct
  source 1..75: mol_type = other DNA
ggcgcacagaatggctgcattatcgcaggcgataacccggatgcggcgctggcgttagaaaaagcccgcgcgttc

SEQ ID NO: 505041 - DNA, 75 bp, synthetic construct
  source 1..75: mol_type = other DNA
tgaagcaacattgcctgcaaacctgcgcgtgacacacaaatccctgttcgacggtacgttacaggggattcatcg

SEQ ID NO: 505042 - DNA, 75 bp, synthetic construct
  source 1..75: mol_type = other DNA
ccagaaaccaaagcactcccgctggtggcggcgggaaatgttggaggtgcgaatgaacattctgttagcgtttaa

SEQ ID NO: 505043 - DNA, 75 bp, synthetic construct
  source 1..75: mol_type = other DNA
ccagcctgatgcttaatgcgttgttaattgtgggcgcgctgctgggattagttctgacgcacctgctggcacatc

SEQ ID NO: 505044 - DNA, 75 bp, synthetic construct
  source 1..75: mol_type = other DNA
tattttgctgggcgcattcagcgtggtgtggacggtgggctatgtgctggcaagtattgccggacatcactttat

SEQ ID NO: 505045 - DNA, 75 bp, synthetic construct
  source 1..75: mol_type = other DNA
gaggaaaagagcaggacgaaggagaagacgacgtccccgcatcagcgtggcacagagaaggcggtggagggaaag

SEQ ID NO: 505046 - DNA, 75 bp, synthetic construct
  source 1..75: mol_type = other DNA
gcggtactgaaccggaccgtcgccggagtgattggcacggcgctgatggcggcaatggcgggcaggaaggtttac

SEQ ID NO: 505047 - DNA, 75 bp, synthetic construct
  source 1..75: mol_type = other DNA
tcacgacacctatctgaagctctatcagctttcctcaccggatctgtcacgcaggtgggatacgatcctttttga

SEQ ID NO: 505048 - DNA, 75 bp, synthetic construct
  source 1..75: mol_type = other DNA
gagccggggccgcagcatttgccggatgaggatgcccgggctggcacggatgtttcagccattctgcaggcagta

SEQ ID NO: 505049 - DNA, 75 bp, synthetic construct
  source 1..75: mol_type = other DNA
ccgctaccctctgcagaagaacgacagaacgaaacaaatctgttgtatgtggccgtgacccgcgcccgtaagacc

SEQ ID NO: 505050 - DNA, 75 bp, synthetic construct
  source 1..75: mol_type = other DNA
cctcggtcaggattaccgggactttgagaaatattgctccattgcgaaggcgacacaggagatggagatgaatca

SEQ ID NO: 505051 - DNA, 75 bp, synthetic construct
  source 1..75: mol_type = other DNA
ccgtgagcgggtgaaagtcggtgcggtgggaacatttgccgcaggctggctgctgccgcgtctggccggattcta

SEQ ID NO: 505052 - DNA, 75 bp, synthetic construct
  source 1..75: mol_type = other DNA
agctgcacgtgctgcccggataatgcgagagcaacttgctgcaggtgatgatcctctggagattaaaaaggctga

SEQ ID NO: 505053 - DNA, 75 bp, synthetic construct
  source 1..75: mol_type = other DNA
ggacgataccagcagaaagaatgaaagataggatacagcatcgtattcctttatcccggcaggccattcacgttc

SEQ ID NO: 505054 - DNA, 75 bp, synthetic construct
  source 1..75: mol_type = other DNA
agggaactggaaaccatcttatcttaggtagtggctcatccgggtatggatacgaagttattaatgcgctctctg

SEQ ID NO: 505055 - DNA, 75 bp, synthetic construct
  source 1..75: mol_type = other DNA
ggctgtagatattcccatcaatataacggggagcattataattccaccatgtgagataaatgatgggaatgcaat

SEQ ID NO: 505056 - DNA, 75 bp, synthetic construct
  source 1..75: mol_type = other DNA
ggtgccgcacgggacgcagagaagatgaagaaaggcgatgccgctgaacatgcagagttccatatgaaagacaac

SEQ ID NO: 505057 - DNA, 75 bp, synthetic construct
  source 1..75: mol_type = other DNA
cagttgtcatccccggacctgtcccgcagatgggacaccattctgtttgatgagtcacaggacgccaatcctgtg

SEQ ID NO: 505058 - DNA, 75 bp, synthetic construct
  source 1..75: mol_type = other DNA
acaaacctgaatgccgttactttgaggtgaacgtgcacgggcagttcggcggcattgtttactatcaggagattc

SEQ ID NO: 505059 - DNA, 75 bp, synthetic construct
  source 1..75: mol_type = other DNA
caccgttcagtgcgtcacatcgttcgctgcacgcaaattccgccacggtcagatgtactgcgcaatgattggcct

SEQ ID NO: 505060 - DNA, 75 bp, synthetic construct
  source 1..75: mol_type = other DNA
gcgatgcggctgaacatgcagagttccacatgaaagacaaccgctgggtgcctggctggatgtgtgctccacgtc

SEQ ID NO: 505061 - DNA, 75 bp, synthetic construct
  source 1..75: mol_type = other DNA
atgctcaatcaagaactggaactcagtttaaacatggctttcgccagagcgcgcgagcaccgtcatgagtttatg

SEQ ID NO: 505062 - DNA, 75 bp, synthetic construct
  source 1..75: mol_type = other DNA
cgttacaaaaatgcgggtattaccaaagttgtcggcaccgaagcacgtggcttcttgtttggtgctccggtagca

SEQ ID NO: 505063 - DNA, 75 bp, synthetic construct
  source 1..75: mol_type = other DNA
aaatcaccctgacattatcgccgggagcaacaacggtgatggatacgactacaaacctgaatgccgttactttga

SEQ ID NO: 505064 - DNA, 75 bp, synthetic construct
  source 1..75: mol_type = other DNA
tataaccgcgctgtacgcgatgaggctgagcgtaaatttccgtttaatgtggagtgcaaaacctcccaccaactg

SEQ ID NO: 505065 - DNA, 75 bp, synthetic construct
  source 1..75: mol_type = other DNA
ccgttaccagcagatttaccgctttcgtggtgcagataatgcgctttctcatcctgttctgaacgatgcagaccg

SEQ ID NO: 505066 - DNA, 75 bp, synthetic construct
  source 1..75: mol_type = other DNA
ttcgtctggcgctcagcagtctgaatcagtttctgtgcagtgcagacacagagccggggctgcagcatttgccgg

SEQ ID NO: 505067 - DNA, 75 bp, synthetic construct
  source 1..75: mol_type = other DNA
aacggttacgcggggccggagccgagttaagccagttacgcctggaagagccgatcaccagctcccagctggaag

SEQ ID NO: 505068 - DNA, 75 bp, synthetic construct
  source 1..75: mol_type = other DNA
cagttgtccggtgcagacctgtctcaccgatgggacactatcctgtttgatgaggcgcaggatgcgaatccggtg

SEQ ID NO: 505069 - DNA, 75 bp, synthetic construct
  source 1..75: mol_type = other DNA
aaaggtttactgggtggggggaatcgaaggttacaggaccggggaacttgaggatctctactggttccaggttga

SEQ ID NO: 505070 - DNA, 75 bp, synthetic construct
  source 1..75: mol_type = other DNA
ggactgactcttcatccttcttcagtaaaggggcgggggaaatgggtttttcgttatgtaagtccggtgacacaa

SEQ ID NO: 505071 - DNA, 75 bp, synthetic construct
  source 1..75: mol_type = other DNA
cgttgcaaatcaggcacatgctggcgcgacgctcgatgctgtaaagaaaaaaggttttgtgcaatgcgggatcag

SEQ ID NO: 505072 - DNA, 75 bp, synthetic construct
  source 1..75: mol_type = other DNA
tccgctgaaaattaaacggggtcaaaataacctctggaataacggtggcatccaatatgcaccgcccgtgcgtta

SEQ ID NO: 505073 - DNA, 75 bp, synthetic construct
  source 1..75: mol_type = other DNA
gtagttcgtcgtggcgatgatgaatggttctcgattgtacgctggacgcttttcgccatgctgaatgctgaatag

SEQ ID NO: 505074 - DNA, 75 bp, synthetic construct
  source 1..75: mol_type = other DNA
cggaactgctgcgttacgctagtgatgcagcgattgaagctgttcgcttggctcataaagtgttttcgctggaag

SEQ ID NO: 505075 - DNA, 75 bp, synthetic construct
  source 1..75: mol_type = other DNA
ccttaataaagaaactagaatttatacatctgaatacgagtttacagatgctttaaaagactttgtaccgaagcc

SEQ ID NO: 505076 - DNA, 75 bp, synthetic construct
  source 1..75: mol_type = other DNA
ttattccaaaagatgcattaaaaacaaatagcgagacattccgcaactggtttcattctgcaattagctgcggaa

SEQ ID NO: 505077 - DNA, 75 bp, synthetic construct
  source 1..75: mol_type = other DNA
taagcaacccagctgaatggattgtcttaccggaggttatctctaaagaaccgcttgggccggtagttcgtcgtg

SEQ ID NO: 505078 - DNA, 75 bp, synthetic construct
  source 1..75: mol_type = other DNA
cgaaggcactggaatctggtcgctgcgatacgctggcctcggatcagtcgcaactgtatgccctgcgcatcaaat

SEQ ID NO: 505079 - DNA, 75 bp, synthetic construct
  source 1..75: mol_type = other DNA
tcacttattacgacggcattggcttcctgacgcacgataaagcggggctaaaaagcgcgaaagaactggatggcg

SEQ ID NO: 505080 - DNA, 75 bp, synthetic construct
  source 1..75: mol_type = other DNA
cgatactctggcttcggatcaatcacaactgtatgccttgcgtatcaaattaagtaaccctgccgaatggattgt

SEQ ID NO: 505081 - DNA, 75 bp, synthetic construct
  source 1..75: mol_type = other DNA
gtattgatgtagatgtttgtcgtggtgttgccgctgctgtatttggtgacgacacgaaagtgaaatataccccgc

SEQ ID NO: 505082 - DNA, 75 bp, synthetic construct
  source 1..75: mol_type = other DNA
tttacagtcaggggaggtggatttgctctcccgtaatacgacctggacttcatcacgcgacgcaggaatgggaat

SEQ ID NO: 505083 - DNA, 75 bp, synthetic construct
  source 1..75: mol_type = other DNA
gttgtataagcaatggctaacatctgacaatgtgcgaaagcagcgtgctgaatatgttgaagttgccctagaata

SEQ ID NO: 505084 - DNA, 75 bp, synthetic construct
  source 1..75: mol_type = other DNA
ctgaacgtgcactggctcacactatcaggaacaaatctgaagctgcctaccatcgtacagatttgttgaatgaac

SEQ ID NO: 505085 - DNA, 75 bp, synthetic construct
  source 1..75: mol_type = other DNA
ggttaaacagcgcattcatgttgttatgcagtggggctgggcgcatggtttttgtgtggcgaatcctgttgatgt

SEQ ID NO: 505086 - DNA, 75 bp, synthetic construct
  source 1..75: mol_type = other DNA
attcagggactggtgtagcgaacaggggtattcgcgggatctggcggaaagggcgctcgctcatacgctgaaaaa

SEQ ID NO: 505087 - DNA, 75 bp, synthetic construct
  source 1..75: mol_type = other DNA
gctaccagtacactgaatcagacggtatggatctgacttatttccttgaatatcaggcgggtgtcattaaacgtg

SEQ ID NO: 505088 - DNA, 75 bp, synthetic construct
  source 1..75: mol_type = other DNA
cccgtctggcgcgcaacgcggcgatccagcgaatcaattattgcaatgaagcgggtgagcaggccggattcaaca

SEQ ID NO: 505089 - DNA, 75 bp, synthetic construct
  source 1..75: mol_type = other DNA
gggttatgaatgagttgaaaagtcgtggccgcaagaacgctcatatcctgagcatccttcaattcgactggcccg

SEQ ID NO: 505090 - DNA, 75 bp, synthetic construct
  source 1..75: mol_type = other DNA
acctggtaggatcctgagcatcacagaatatgctgacgatctggctgcacaatgccaaatgtatgccggtttaaa

SEQ ID NO: 505091 - DNA, 75 bp, synthetic construct
  source 1..75: mol_type = other DNA
tgagcgagctcgagaagaacaaacgctccgagaaaacccttttaaatatccagataggtagctggagtaatctgt

SEQ ID NO: 505092 - DNA, 75 bp, synthetic construct
  source 1..75: mol_type = other DNA
tggtgaagtggtttactgaatttggccacctgaacagaggtgatatgctcacctcagaacaacacaggtgccata

SEQ ID NO: 505093 - DNA, 75 bp, synthetic construct
  source 1..75: mol_type = other DNA
aggacaacactgcagtagtcagaatcagagcggcaggaaaaagaagagcagtagcagtagcagtagcagtagcag

SEQ ID NO: 505094 - DNA, 75 bp, synthetic construct
  source 1..75: mol_type = other DNA
agagattacaacatttgcttgagaaaatggggcgtgatcgtatttcacttaacgagttatttgatcttacccagc

SEQ ID NO: 505095 - DNA, 75 bp, synthetic construct
  source 1..75: mol_type = other DNA
atgaagtgctgggcgatttggagagggtcggtacagggatctcgcaggtattcgaagctgtgcaggacagcctcg

SEQ ID NO: 505096 - DNA, 75 bp, synthetic construct
  source 1..75: mol_type = other DNA
atgaaaacatactcaattctcgcagttctcctttcgacttttctattaacagcctgtaattccgaaccttctgaa

SEQ ID NO: 505097 - DNA, 75 bp, synthetic construct
  source 1..75: mol_type = other DNA
aggcagcttggacgttcgagacaatattgagcgccgtgcttatgaaattgcactggcatcgctggaagcagaacc

SEQ ID NO: 505098 - DNA, 75 bp, synthetic construct
  source 1..75: mol_type = other DNA
ttctttgttgtcttccccctgatctctatccgcttcgttgatcaaatgggctgggcagccgtgatggtcggtatt

SEQ ID NO: 505099 - DNA, 75 bp, synthetic construct
  source 1..75: mol_type = other DNA
actggcgattaaagaagcctctcgctgtttattatgtcatgacgctccctgtagtcaggcttgcccggcacagac

SEQ ID NO: 505100 - DNA, 75 bp, synthetic construct
  source 1..75: mol_type = other DNA
acctgcaaaaacgcaggaaactgtcctgtctgccctgctggcgcagacggaggaagtgagcgtgccgctggattc

SEQ ID NO: 505101 - DNA, 75 bp, synthetic construct
  source 1..75: mol_type = other DNA
ctcagtcaggaggtgctgttatccctgctcagtttctgcaccgcatgcagcatccacggtgttcagacccgtgag

SEQ ID NO: 505102 - DNA, 75 bp, synthetic construct
  source 1..75: mol_type = other DNA
gccaacggtaacggaagagggcatcgtctggccggaaggaccacgcccaccgtcgcgtgactatacgccgctgta

SEQ ID NO: 505103 - DNA, 75 bp, synthetic construct
  source 1..75: mol_type = other DNA
tctggaatatgccaaaggcttatcgttcaatttatcagccacagcggaccactcctgatgagcaggtcgtaaacc

SEQ ID NO: 505104 - DNA, 75 bp, synthetic construct
  source 1..75: mol_type = other DNA
caaaaaatgaaagagtatacttctcatgcagttcctgctgatcgtgaagcctggctggattctcgtcttgaatcg

SEQ ID NO: 505105 - DNA, 75 bp, synthetic construct
  source 1..75: mol_type = other DNA
ctctgccgttaaatggatgtatgccattgaagcatgtctctccttaaccttgctctaccctatcgctcgctggag

SEQ ID NO: 505106 - DNA, 75 bp, synthetic construct
  source 1..75: mol_type = other DNA
cgggccttggcggcacgttgtttgatccccctcgttcagcgctggtggtcaaactgatccgcccagagcaacgcg

SEQ ID NO: 505107 - DNA, 75 bp, synthetic construct
  source 1..75: mol_type = other DNA
ccggttttcagcgcattgtcctcggcggcgaggcgctggacggttttacatcgcgcggctttgacgatcacagca

SEQ ID NO: 505108 - DNA, 75 bp, synthetic construct
  source 1..75: mol_type = other DNA
aaagtcgcgattattggcgcaggtcctgccggattgcaggccagtgtgacactgacaaaccagggttatgacgtc

SEQ ID NO: 505109 - DNA, 75 bp, synthetic construct
  source 1..75: mol_type = other DNA
cagcttgtgcaagtgaacagcaatccttccggtgcgagctttaaggtaaaagacgaatcaggcgtgattgttgcg

SEQ ID NO: 505110 - DNA, 75 bp, synthetic construct
  source 1..75: mol_type = other DNA
atagataaaatgaagataggtgaaataagtggtttttttaatacacttcattctccaaaagttaaagcaagatat

SEQ ID NO: 505111 - DNA, 75 bp, synthetic construct
  source 1..75: mol_type = other DNA
tttctttactcattagattggcttttcataatcggcgcaattgagttagatggaaatggtggaatagtatatgag

SEQ ID NO: 505112 - DNA, 75 bp, synthetic construct
  source 1..75: mol_type = other DNA
gagttgttcccgtactgggaaaaacgttcgatgaaagatttcatcaacgggcagatgacagatgaagtaaaagcc

SEQ ID NO: 505113 - DNA, 75 bp, synthetic construct
  source 1..75: mol_type = other DNA
acttcgaaacgccagaaggcgaaaaaatccgtgctcgtttaattaaccgctttgagaagtacggcaacgatatcg

SEQ ID NO: 505114 - DNA, 75 bp, synthetic construct
  source 1..75: mol_type = other DNA
tcggcaccggtattccgcaaatctttaacgatgaagtggtggtgccagcgttcctcaaccgtggcgtttcgctgg

SEQ ID NO: 505115 - DNA, 75 bp, synthetic construct
  source 1..75: mol_type = other DNA
tggttgacacctttttatgtctccccacagatcgataacggatacgacgtagcgaactatacggcgattgatccc

SEQ ID NO: 505116 - DNA, 75 bp, synthetic construct
  source 1..75: mol_type = other DNA
gggccacgtgtacacgagtttttgcacgaaatgaaccgtgatgtgtttacgccacgcgggttaatgaccgtaggc

SEQ ID NO: 505117 - DNA, 75 bp, synthetic construct
  source 1..75: mol_type = other DNA
tccgcaattccggttaccgcaatcagtgctggatgcagaaatcgcccgtatagaaaaaatgggcgtgaccattaa

SEQ ID NO: 505118 - DNA, 75 bp, synthetic construct
  source 1..75: mol_type = other DNA
cgactcatggtgtgggctcaggaaagggttcagattatcggatagttcgatcgccaccctgagtaatatcctctg

SEQ ID NO: 505119 - DNA, 75 bp, synthetic construct
  source 1..75: mol_type = other DNA
accatgcgcaaagatttaattgccgctggcgtcgatccggctgatattgttctcgactacgccggttttcgtacc

SEQ ID NO: 505120 - DNA, 75 bp, synthetic construct
  source 1..75: mol_type = other DNA
ctgtcagtacgtattcgcgaatttgctgcccgtttcggtgcgctggctgacctttatatttttaaacgtgaaccg

SEQ ID NO: 505121 - DNA, 75 bp, synthetic construct
  source 1..75: mol_type = other DNA
ggcatgactcaaaatcatcgcaccttgctgacccaagaagggagcataccctgcactagtatccgcacagctaat

SEQ ID NO: 505122 - DNA, 75 bp, synthetic construct
  source 1..75: mol_type = other DNA
aatgaatcactttgcgaagcatgtgatcattactggcggcggttcgaacagcgatctgtttatgcagatttttgc

SEQ ID NO: 505123 - DNA, 75 bp, synthetic construct
  source 1..75: mol_type = other DNA
gctggcgacacatttcccggctgggctgccggttgtttgtaccaccagtgataaaccggtagaagcactgggagc

SEQ ID NO: 505124 - DNA, 75 bp, synthetic construct
  source 1..75: mol_type = other DNA
gatcctgaaaaaatcgtatgaagtgatgcatggtgagttggggaatgaagattcgatccagagctggtcgaatgc

SEQ ID NO: 505125 - DNA, 75 bp, synthetic construct
  source 1..75: mol_type = other DNA
ttggttctatgtgaggaattattagaaagcactaagctggaactggcaatggcgataatggatcatcaaaataac

SEQ ID NO: 505126 - DNA, 75 bp, synthetic construct
  source 1..75: mol_type = other DNA
atggacgatatacaattcaattattttgatattgaacacgccattagggttcatgattggatcattgagaaaacg

SEQ ID NO: 505127 - DNA, 75 bp, synthetic construct
  source 1..75: mol_type = other DNA
atgtggttatggtccttatttgacattaaattcttatctatttttgccgcaggcttcactatatattttggcgta

SEQ ID NO: 505128 - DNA, 75 bp, synthetic construct
  source 1..75: mol_type = other DNA
ggaaataaattcacgtttatataatgatggtatagttcgtgcttccatcaggaaatatgttcaggataataaaga

SEQ ID NO: 505129 - DNA, 75 bp, synthetic construct
  source 1..75: mol_type = other DNA
ccggcaccattgactatgaacgctaccggctcacaaaagcgcaggcagatgcgcaggaactgaaaaatgcccgtg

SEQ ID NO: 505130 - DNA, 75 bp, synthetic construct
  source 1..75: mol_type = other DNA
gggctgagagttttgtcggggggaggcaaaggtatcgaagccatgttcaatactgcagaagccattgagtggtat

SEQ ID NO: 505131 - DNA, 75 bp, synthetic construct
  source 1..75: mol_type = other DNA
gagtccagaggtttattccgccgggctgcaacggtgtggatggaggcattccgtgaaagccactcccagccagag

SEQ ID NO: 505132 - DNA, 75 bp, synthetic construct
  source 1..75: mol_type = other DNA
ggtagattcagtgaagaaaaaattccaaatgggtacttcagatcactaatatctgtgtcgtttagcgcatttgat

SEQ ID NO: 505133 - DNA, 75 bp, synthetic construct
  source 1..75: mol_type = other DNA
tgctgattgaaacacagggcgagctctgcctccttccccttcccggcgatgcagcagaacgcttgttcccgtcgg

SEQ ID NO: 505134 - DNA, 75 bp, synthetic construct
  source 1..75: mol_type = other DNA
ctgctgaagcagtcgcacggaaactgggaatagatgaggttgaagccgggattctgccggatggcaaaaaagcag

SEQ ID NO: 505135 - DNA, 75 bp, synthetic construct
  source 1..75: mol_type = other DNA
gcggctgtgtcggtcctgattattgcctgcccctgcgcactggggctggccacaccgatgtcgataatggtgggg

SEQ ID NO: 505136 - DNA, 75 bp, synthetic construct
  source 1..75: mol_type = other DNA
caggaaaaggggatcgcgatacccgcagtcactaatttcaatgccccgtcgggtaaaggtgtctcaggcgatgtt

SEQ ID NO: 505137 - DNA, 75 bp, synthetic construct
  source 1..75: mol_type = other DNA
gttgatgaatcgatggtgaccggggagtctatgccggttaccaaaacggagggtgcccctgtcattggggggacg

SEQ ID NO: 505138 - DNA, 75 bp, synthetic construct
  source 1..75: mol_type = other DNA
cggtattgccagtattcgccagggcgttccatccttagcagaatatcagcaaagcctgccactgcttagagaact

SEQ ID NO: 505139 - DNA, 75 bp, synthetic construct
  source 1..75: mol_type = other DNA
taaaaatgacaggtccgcgggttttttaaatcatatatcaatgcacgacagatataatgtctctgcattgtttat

SEQ ID NO: 505140 - DNA, 75 bp, synthetic construct
  source 1..75: mol_type = other DNA
attctggatgaattacaaaaaagtatctcaggaatatgttttttcattgccactgtggcaggcatatagtccgaa

SEQ ID NO: 505141 - DNA, 75 bp, synthetic construct
  source 1..75: mol_type = other DNA
caaccacgccggatgcgcttaaagctttgcgtcaggcggggatccgcatcgttatgctcaccggggataaccagc

SEQ ID NO: 505142 - DNA, 75 bp, synthetic construct
  source 1..75: mol_type = other DNA
agcccatcccgatcgttatcttaccgaagatgccagtgaacattcccatcaccatcaccacgatcatcacgaagt

SEQ ID NO: 505143 - DNA, 75 bp, synthetic construct
  source 1..75: mol_type = other DNA
aggccatgtggtggcgatggcgggagacggcgtgaatgatgcacctgcacttgcggccgctgacgtggggattgc

SEQ ID NO: 505144 - DNA, 75 bp, synthetic construct
  source 1..75: mol_type = other DNA
ctcaggtgccattactgcgcttctgaaccttgcccccaaaaccgccaggcggctggaccatgacggtcatgaaac

SEQ ID NO: 505145 - DNA, 75 bp, synthetic construct
  source 1..75: mol_type = other DNA
taaggcgcacagcagcattcgataccaggagcatcagctttatttctgctccgccagctgtgagagcaaatttaa

SEQ ID NO: 505146 - DNA, 75 bp, synthetic construct
  source 1..75: mol_type = other DNA
gtttcaggctggtttgttcctctggtgatacttatcgcggttgttgctttcgtgatctggtctgtctgggggccc

SEQ ID NO: 505147 - DNA, 75 bp, synthetic construct
  source 1..75: mol_type = other DNA
acatgtgctgtggcagtcgcatgttctggttcgataagaaggacgaccgggcgatatttagcgatatcagaaagg

SEQ ID NO: 505148 - DNA, 75 bp, synthetic construct
  source 1..75: mol_type = other DNA
ctcggtcgctggtcgttaatcatggaaatcgatgaaggctttgcggtaggcatgtcgccagccgaactcagcgct

SEQ ID NO: 505149 - DNA, 75 bp, synthetic construct
  source 1..75: mol_type = other DNA
atggggctggcgaataaaggctggataaagggcgaaccacaggatggaggctggatcggatggatgatcaaacct

SEQ ID NO: 505150 - DNA, 75 bp, synthetic construct
  source 1..75: mol_type = other DNA
taacccgccgttcagtctggataagtggggccatgatgaggccgagaacgataagtttggtcgtttccgtcgcgg

SEQ ID NO: 505151 - DNA, 75 bp, synthetic construct
  source 1..75: mol_type = other DNA
gagaaggcgataacgtcgagaaatacgcctatctcgccagcctgaaagagattcaggacaacgactataacctga

SEQ ID NO: 505152 - DNA, 75 bp, synthetic construct
  source 1..75: mol_type = other DNA
cgatcaacaaagccctgtgggccgcgtgtgatacgttccgtggcaccatcagtgctgatacttacaaagacttta

SEQ ID NO: 505153 - DNA, 75 bp, synthetic construct
  source 1..75: mol_type = other DNA
gcaggggcgggtttagttgtgtcgtcactgggtgacttcgcaaacattttccagcatgcctttggtattcagggt

SEQ ID NO: 505154 - DNA, 75 bp, synthetic construct
  source 1..75: mol_type = other DNA
aaactggccagagccttacattaagatcaacggtaattgttccataattggtactgtgattttctcaggaaaacc

SEQ ID NO: 505155 - DNA, 75 bp, synthetic construct
  source 1..75: mol_type = other DNA
cgctgggttccaggctggatgtgtgctccacatccacagacagatgccactgaacgcaccgataacctggctgat

SEQ ID NO: 505156 - DNA, 75 bp, synthetic construct
  source 1..75: mol_type = other DNA
ctgaggttgatttgagcacagcagaaacgtatccctgccctgtaccctgtggcgaaatgacttatatcttgcggg

SEQ ID NO: 505157 - DNA, 75 bp, synthetic construct
  source 1..75: mol_type = other DNA
aaaattccggcaattgttgatcacgcgccagacgatggcggcgaaccgttaagcctctttgagtccggtgcaatt

SEQ ID NO: 505158 - DNA, 75 bp, synthetic construct
  source 1..75: mol_type = other DNA
caccaaatggtcacaaaattacgctgtttctcgaagaagcagagcttgattatcgcttgattaaggtagacctgg

SEQ ID NO: 505159 - DNA, 75 bp, synthetic construct
  source 1..75: mol_type = other DNA
cggttcgttgttgatgaagtgcggacgtaaaattgtctccgggcatgacagccgtaactatgccttgttcggtca

SEQ ID NO: 505160 - DNA, 75 bp, synthetic construct
  source 1..75: mol_type = other DNA
taatttctgttgcaccactgcgggtggcctgtggtcatggcgctctggaaatcatcaccgggcaggcaggcgatg

SEQ ID NO: 505161 - DNA, 75 bp, synthetic construct
  source 1..75: mol_type = other DNA
tgctggctgccggttacgaaattagcgccatttttacccatactgataatcccggtgaaaaagccttttatggtt

SEQ ID NO: 505162 - DNA, 75 bp, synthetic construct
  source 1..75: mol_type = other DNA
gcataacatggtgcgcgcggtagccgatccgtggcccggcgctttcagctacgccggcaatcaaaaattcaccgt

SEQ ID NO: 505163 - DNA, 75 bp, synthetic construct
  source 1..75: mol_type = other DNA
gaaagaggcattccggtttatgcgccggataacgttaatcatccgctgtgggtggaacgcattgcccaactgtca

SEQ ID NO: 505164 - DNA, 75 bp, synthetic construct
  source 1..75: mol_type = other DNA
cgaaaattgatatgcaggaaaccatcgacgaaacactggatttcttcctgcgcactgtcgatcttacggaaaaat

SEQ ID NO: 505165 - DNA, 75 bp, synthetic construct
  source 1..75: mol_type = other DNA
gatccgtggcctggcgccttcagctatgtaggcaatcagaaattcaccgtctggtcgtcacgcgtgcattctcat

SEQ ID NO: 505166 - DNA, 75 bp, synthetic construct
  source 1..75: mol_type = other DNA
gtgaaggcgataacgtcgagaaatacgcctatctcgccagcctgaaagagattcaggacaacgactataacctta

SEQ ID NO: 505167 - DNA, 75 bp, synthetic construct
  source 1..75: mol_type = other DNA
atccaaaagatcgttaacacctatcgtgaaggcgataacgtcgagaaatacgcctatctcgccagcctgaaggag

SEQ ID NO: 505168 - DNA, 75 bp, synthetic construct
  source 1..75: mol_type = other DNA
catgatggcgaatgaacgtttcgtattgccgaaaagcgccagtttctatgcgctgtatgaacgtcgtcatgaacc

SEQ ID NO: 505169 - DNA, 75 bp, synthetic construct
  source 1..75: mol_type = other DNA
gcctgctgcgcgaagatcattatgaagtttacggtctggatattggcagcgatgcgataagccgttttctgaatc

SEQ ID NO: 505170 - DNA, 75 bp, synthetic construct
  source 1..75: mol_type = other DNA
atcgctgcgacggtgaaattatcaacattggcaatcctgagaacgaagcgagcattgaggaactgggcgagatgc

SEQ ID NO: 505171 - DNA, 75 bp, synthetic construct
  source 1..75: mol_type = other DNA
ttgccgaaaagcgccagcttttatgcgctgtatgagcgccgtcatgagccaggcaacggtgaacgtatcgatcag

SEQ ID NO: 505172 - DNA, 75 bp, synthetic construct
  source 1..75: mol_type = other DNA
cagctgacctgatggaaaagcgcgcacgcggcgcgaataacatgcctacggtgaccaataccttgctgcctatta

SEQ ID NO: 505173 - DNA, 75 bp, synthetic construct
  source 1..75: mol_type = other DNA
cgacacctgctcaacaccattatccagcgcggtggcctgtcaaacttggaaattgccaagtggtcggggcgggca

SEQ ID NO: 505174 - DNA, 75 bp, synthetic construct
  source 1..75: mol_type = other DNA
cgctgcatgaagacataacccgatacgaggctcgcttcagggctgcgggtatcatggtggattgtgagacgctca

SEQ ID NO: 505175 - DNA, 75 bp, synthetic construct
  source 1..75: mol_type = other DNA
agccatgacggcaacgttaattcaacgctgcacgacgacatcacgcgatatgaggcccgcttcgacgcagcaggt

SEQ ID NO: 505176 - DNA, 75 bp, synthetic construct
  source 1..75: mol_type = other DNA
gagatgtggctaagcaccttcctgtgactattcaagagttcaatacgttagatcatgccgcagtccatgtgacgg

SEQ ID NO: 505177 - DNA, 75 bp, synthetic construct
  source 1..75: mol_type = other DNA
catgccagtatctttgatcgctataattaccatgctgaaaacggtgaacgggttaaattaacctcgcaccaagct

SEQ ID NO: 505178 - DNA, 75 bp, synthetic construct
  source 1..75: mol_type = other DNA
aaccaaaaccccaagagatgcaagatccagagttcatcgatttcgctaaagcttatttccgttaccagcaggggc

SEQ ID NO: 505179 - DNA, 75 bp, synthetic construct
  source 1..75: mol_type = other DNA
atttatctgttatgacaagtggaatgagaccccggcagaatacagggatgtgacggaagaagagcattctgcagg

SEQ ID NO: 505180 - DNA, 75 bp, synthetic construct
  source 1..75: mol_type = other DNA
gcctatcagagcgtgcaattaccgcaaccgaacctcggcgtgcgcactaatgctttgatagacacaccgttactg

SEQ ID NO: 505181 - DNA, 75 bp, synthetic construct
  source 1..75: mol_type = other DNA
ttgattacccgcgcctgctgaatcacgggctgggtgagctggtggcgcagatgcagcaacattgccagcaacagc

SEQ ID NO: 505182 - DNA, 75 bp, synthetic construct
  source 1..75: mol_type = other DNA
tatgccatcgatgtgctgattgaaacacagggcgaggtttgcctccttccccttccaggcgatgcagcagaacgc

SEQ ID NO: 505183 - DNA, 75 bp, synthetic construct
  source 1..75: mol_type = other DNA
ccatccagatgtcgagcagcttgaattgcagggctatcgggtcattagcggattattagagatttatcgtccttt

SEQ ID NO: 505184 - DNA, 75 bp, synthetic construct
  source 1..75: mol_type = other DNA
tgggtgtgctggctttgatgggaagcttgagcttagagaaaatttatttttatatggcccggggctaggggtgga

SEQ ID NO: 505185 - DNA, 75 bp, synthetic construct
  source 1..75: mol_type = other DNA
tgttgccgaaaagaagtccattgagcaaaaaggaaaagtaaacgaagaagctgtgatgttagatgatttgacaaa

SEQ ID NO: 505186 - DNA, 75 bp, synthetic construct
  source 1..75: mol_type = other DNA
ccaggatattaaagttggagaagattacagcctgacagttaccaacagcctcaccattaaagtcggtgaatgctt

SEQ ID NO: 505187 - DNA, 75 bp, synthetic construct
  source 1..75: mol_type = other DNA
atacctcccccggaagctggctggacgccgccgcccgctaccaccaccccgccggaggcaaacctgccgccgtct

SEQ ID NO: 505188 - DNA, 75 bp, synthetic construct
  source 1..75: mol_type = other DNA
tgcacgcattgcacttaataaatcctatgccggaggtgactttgatggaacggtgaggagagttgattttgagta

SEQ ID NO: 505189 - DNA, 75 bp, synthetic construct
  source 1..75: mol_type = other DNA
gggacaggtataacccggcaacggaggcgagttcgtgctgggtgagggtgtcacaggcgtgggcggggccgggtt

SEQ ID NO: 505190 - DNA, 75 bp, synthetic construct
  source 1..75: mol_type = other DNA
tcctgaacggagacccggaccagccggtggtcatggggcggacgtaccatgaagataaccgctccccgggtgacc

SEQ ID NO: 505191 - DNA, 75 bp, synthetic construct
  source 1..75: mol_type = other DNA
gagcctgcgcagtgatgcggaaaaggtcacagggcagagtaattcaccgaagctgtggccgggaacgcggtttac

SEQ ID NO: 505192 - DNA, 75 bp, synthetic construct
  source 1..75: mol_type = other DNA
gacgatgaaatcggtatgttggtgcgcagttacaacctcaaccagcaattgctgcagcgccattatgaagaacag

SEQ ID NO: 505193 - DNA, 75 bp, synthetic construct
  source 1..75: mol_type = other DNA
atatcaacgcctgttattatgttcactcctccccccaagcgaacctaaatgttacatcaacatttatatcactta

SEQ ID NO: 505194 - DNA, 75 bp, synthetic construct
  source 1..75: mol_type = other DNA
gccagacctgctctcgattgcccggtcatcttcccttacgcacctaacgctgtactggttggtttcctgagtagc

SEQ ID NO: 505195 - DNA, 75 bp, synthetic construct
  source 1..75: mol_type = other DNA
gtgccggatatgctggagctgctgacccgttatcgcattcagcctgggacactgattctggaagtcacagaaagt

SEQ ID NO: 505196 - DNA, 75 bp, synthetic construct
  source 1..75: mol_type = other DNA
ccggtaatggttactcgcctgtttgagctaccggttcaaatctcgctgggcgtctactcgctcgaacgtccggca

SEQ ID NO: 505197 - DNA, 75 bp, synthetic construct
  source 1..75: mol_type = other DNA
cgtggtcagtcgcgccgacgtggtgctgcctaatcagttccaggcactgcgtaaaagttttattccagagcgccc

SEQ ID NO: 505198 - DNA, 75 bp, synthetic construct
  source 1..75: mol_type = other DNA
catcaatgatgaagctgttatcgagcgcatcaaaggtaaagttctcgacatctgcgcacgttatccggtttacgc

SEQ ID NO: 505199 - DNA, 75 bp, synthetic construct
  source 1..75: mol_type = other DNA
aaaaacctgaccggtaaagaagcagacgccgctctgggccgtgctaacatcaccgttaacaaaaacagcgtaccg

SEQ ID NO: 505200 - DNA, 75 bp, synthetic construct
  source 1..75: mol_type = other DNA
aaactgaactctgccgttttccctggtggtcagggcggtccgttgatgcacgtaatcgccggtaaagcggttgct

SEQ ID NO: 505201 - DNA, 75 bp, synthetic construct
  source 1..75: mol_type = other DNA
caagggaaacagattaagagtgtggatgatgcactgaacgcttttgataaattccgtaataatctgaacaagaaa

SEQ ID NO: 505202 - DNA, 75 bp, synthetic construct
  source 1..75: mol_type = other DNA
cgcctgacggcaaaacgatagtttcccctgaaaaattcccggggcgttcatcaacaaatcattctattgttgtga

SEQ ID NO: 505203 - DNA, 75 bp, synthetic construct
  source 1..75: mol_type = other DNA
aggatggacgcagtgatgtggccatcagctgttgctgccaggtgagtggtgatgtgcagcaatgctataccgcca

SEQ ID NO: 505204 - DNA, 75 bp, synthetic construct
  source 1..75: mol_type = other DNA
tcactggtgataacactctgagcttttatgctcttaaccaggcagaaggagtcgagtttgggactgtaacggaaa

SEQ ID NO: 505205 - DNA, 75 bp, synthetic construct
  source 1..75: mol_type = other DNA
actcggtggccagtttttgttgaccacttcactgatagtcatgatttctcaggtgttaagaaagaaatcaccttt

SEQ ID NO: 505206 - DNA, 75 bp, synthetic construct
  source 1..75: mol_type = other DNA
gctgtggcctggtttctcccgttccggggccaccatttcaggtgggatgctgatgggcgtgagccgttacgctgc

SEQ ID NO: 505207 - DNA, 75 bp, synthetic construct
  source 1..75: mol_type = other DNA
acttctccggtaaactgtacaacatcgttccttacggtatcgatgcaacaggtcatatcgactacgcagatctgg

SEQ ID NO: 505208 - DNA, 75 bp, synthetic construct
  source 1..75: mol_type = other DNA
gtagacattcagttggttgacgccaataacaatacgtttaccggtgatgtaaatttaacgatcaccccatcgacg

SEQ ID NO: 505209 - DNA, 75 bp, synthetic construct
  source 1..75: mol_type = other DNA
attaaggccaaaataacgaatagcaaaaatacatatgagaaaacaataaggacttatgttgtaaaactacctgaa

SEQ ID NO: 505210 - DNA, 75 bp, synthetic construct
  source 1..75: mol_type = other DNA
ttgtgttacgcaagacttatcagaacgagcaggcagcaagacgcgcagcggcggcaaagtggcagcaactacaac

SEQ ID NO: 505211 - DNA, 75 bp, synthetic construct
  source 1..75: mol_type = other DNA
ttatcactggattaaggccaaaataacgaatagcaaaaatacatatgagaaaacaataaggacttatgttgtaaa

SEQ ID NO: 505212 - DNA, 75 bp, synthetic construct
  source 1..75: mol_type = other DNA
tgttttctacgattatgatttaagtcgcagccactctcgcgcaggttttggggttgagtactggagagattattt

SEQ ID NO: 505213 - DNA, 75 bp, synthetic construct
  source 1..75: mol_type = other DNA
atttagtccagctcaggccgttgaaattgcgcaaatagcgccgtcgctggcgccgaactgtacgctggcgctgac

SEQ ID NO: 505214 - DNA, 75 bp, synthetic construct
  source 1..75: mol_type = other DNA
atgattgcccaacggggaatgtctgggcgggtgcgttttgaacagggcgatgcgtttaacccggaggaactcagc

SEQ ID NO: 505215 - DNA, 75 bp, synthetic construct
  source 1..75: mol_type = other DNA
gcgctggcaaacgagcctgccgtaagcgatattttgttacgtgattacagcgagttaaatgttgcacaggggcaa

SEQ ID NO: 505216 - DNA, 75 bp, synthetic construct
  source 1..75: mol_type = other DNA
tcccaatatgctggtccgctgggccagacgcggttttggtgtatggagcgcctggcgtctggtgaaaacaaccct

SEQ ID NO: 505217 - DNA, 75 bp, synthetic construct
  source 1..75: mol_type = other DNA
tctgatatatcgtctaatctgaacagattcagtcggggactgggatatgcaggaaaatttacaagtcttgctgac

SEQ ID NO: 505218 - DNA, 75 bp, synthetic construct
  source 1..75: mol_type = other DNA
ggaaacagattaagagtgtggatgatgcactgaacgcttttgataaattccgtaataatctgaacaagaaatata

SEQ ID NO: 505219 - DNA, 75 bp, synthetic construct
  source 1..75: mol_type = other DNA
tggtgcaaaagctgagcagttagccagagagatggccgggcaggctaaagggaagaaaatacgtaatgttgaaga

SEQ ID NO: 505220 - DNA, 75 bp, synthetic construct
  source 1..75: mol_type = other DNA
ctgatgcaacaaccgacaatgttgcgccacgcttgctgagaaatattttagccctgctaaataatcctgccgtag

SEQ ID NO: 505221 - DNA, 75 bp, synthetic construct
  source 1..75: mol_type = other DNA
ggcagaaaagggtgatatgacggaattgcaccgcctgcatgaggcgttgcgaaatcctttcagcgacagagatga

SEQ ID NO: 505222 - DNA, 75 bp, synthetic construct
  source 1..75: mol_type = other DNA
aatttacagcgtctggcgcagacattgtcgccatttgttgccgtagatggcctgaatgaggccctggacagctat

SEQ ID NO: 505223 - DNA, 75 bp, synthetic construct
  source 1..75: mol_type = other DNA
gatttcctgcgctacccggctgtccaccccgaactggtctggcgggagctggcgaggcttgccggtgcgctgctg

SEQ ID NO: 505224 - DNA, 75 bp, synthetic construct
  source 1..75: mol_type = other DNA
gcttggtcgtcacgacgccaccatcaccctgtttgatctcagcagcaaagtgctggcagaagaacattacccgct

SEQ ID NO: 505225 - DNA, 75 bp, synthetic construct
  source 1..75: mol_type = other DNA
gcttaacagcgcggcggtttatcgcctgattgaccaacatgggccaatctcgcgaattcagattgccgaacaaag

SEQ ID NO: 505226 - DNA, 75 bp, synthetic construct
  source 1..75: mol_type = other DNA
gcttaacagcgcggcggtttatcgcctgattgaccagtacgggccaatctcgcggattcagattgccgagcaaag

SEQ ID NO: 505227 - DNA, 75 bp, synthetic construct
  source 1..75: mol_type = other DNA
ccagcttgcccccgccagcgtaacaaaaattacgcgtcagcttatcgaacgcgggctgatcaaagaagttgatca

SEQ ID NO: 505228 - DNA, 75 bp, synthetic construct
  source 1..75: mol_type = other DNA
ttaatacccaggcgctgaaggcgtttcgcactaatctgccgatggtacgttctgagctggatcaccgctcggcaa

SEQ ID NO: 505229 - DNA, 75 bp, synthetic construct
  source 1..75: mol_type = other DNA
ggtgcgtgtccatcgcggaaccggggccgggattatctctaaccgggcgcatttttattggaccgcaacggcaac

SEQ ID NO: 505230 - DNA, 75 bp, synthetic construct
  source 1..75: mol_type = other DNA
ctggtgtccggtttcgttgattatctgtgtgaatcagtaggccgggaacatacgccagccctgagtgatgccgca

SEQ ID NO: 505231 - DNA, 75 bp, synthetic construct
  source 1..75: mol_type = other DNA
tgtgcgaatcagtaggtcgggaacatacgccagccctgagtgatgccgcagagcaataccttaacaccgttgcga

SEQ ID NO: 505232 - DNA, 75 bp, synthetic construct
  source 1..75: mol_type = other DNA
tcgattactggactccgatcggtggggcgatcacacctcgagaacgagaaatggtatcaggattcgttgattacc

SEQ ID NO: 505233 - DNA, 75 bp, synthetic construct
  source 1..75: mol_type = other DNA
atctgtactgaatgtgctgtggaactggatcctgtgccggaaattctcctctccggaggaagtcgaaaatgtggc

SEQ ID NO: 505234 - DNA, 75 bp, synthetic construct
  source 1..75: mol_type = other DNA
gcgtaactacgcattccataagcgttttttcaaacttctgcaattcggcttcgattattggaccccggtcagtgg

SEQ ID NO: 505235 - DNA, 75 bp, synthetic construct
  source 1..75: mol_type = other DNA
ggcgacgccggagagttgcgattttctgcatcaaataaaaataggcgagtggatacacgctgactttaagcgtgt

SEQ ID NO: 505236 - DNA, 75 bp, synthetic construct
  source 1..75: mol_type = other DNA
cgcatcgctacatcacgcgcgacgccagcgccggaagtgaaaaccatatcgccctgagtgagcgggagtttttta

SEQ ID NO: 505237 - DNA, 75 bp, synthetic construct
  source 1..75: mol_type = other DNA
ggacagtggtgcagggacccgcgttttattccccctctgctgacgctgtctgccagtccttcgctgatgactgag

SEQ ID NO: 505238 - DNA, 75 bp, synthetic construct
  source 1..75: mol_type = other DNA
cctttgctttctttgctgaaccagctgctggaggcaagcctgccttcccgtgtggttttcattgaactgaaacaa

SEQ ID NO: 505239 - DNA, 75 bp, synthetic construct
  source 1..75: mol_type = other DNA
agcgtcaccgcgatctgctgggcgcgaccaatccggcaaacgcactggctggtactctgcgcgctgattacgctg

SEQ ID NO: 505240 - DNA, 75 bp, synthetic construct
  source 1..75: mol_type = other DNA
cgcgatgccctgacgtccggaaagctgaaaacgcaggctgtacgcctgcgttttgctgatggcacgctgatcgat

SEQ ID NO: 505241 - DNA, 75 bp, synthetic construct
  source 1..75: mol_type = other DNA
actctgcgcatggctcatcaggaaaatgctgcctggctgacctgtcccgttacccgtcttgttcgtgatgcacag

SEQ ID NO: 505242 - DNA, 75 bp, synthetic construct
  source 1..75: mol_type = other DNA
tgctggaggcaagcctgccttcccgtgtggtcttcattgaactgaaacaaaaaggtgtgatgtgggagggggcat

SEQ ID NO: 505243 - DNA, 75 bp, synthetic construct
  source 1..75: mol_type = other DNA
cgggaacaaactcagctactggtagcgcatcgctacatcacgcgcgccgccagcgccggaagtgaaaaccatatc

SEQ ID NO: 505244 - DNA, 75 bp, synthetic construct
  source 1..75: mol_type = other DNA
gccctgagcgagcaggagttttttacccgcgcggggcaaaatctgctggccttaagctggcacgctaacggtctg

SEQ ID NO: 505245 - DNA, 75 bp, synthetic construct
  source 1..75: mol_type = other DNA
ggcgcgctatcaatcggcgctgctgcccgtctgtttacaggtttcgccggagatcctgcgccagcgcctggaaaa

SEQ ID NO: 505246 - DNA, 75 bp, synthetic construct
  source 1..75: mol_type = other DNA
tctacggcagtgacagtgaagatatggccgttgagcgtcatgcgctgtccctgcgctttgctcatgataacaatc

SEQ ID NO: 505247 - DNA, 75 bp, synthetic construct
  source 1..75: mol_type = other DNA
gatcgcgctggatctggaatccctgccgggcaaccgctggaaagccgacctgcacgatccgcgcctgcgggaaga

SEQ ID NO: 505248 - DNA, 75 bp, synthetic construct
  source 1..75: mol_type = other DNA
gccatcccgggtcattgctctggaaatgtcccggccggatggacagacctggaaggccagccttcacgatatccg

SEQ ID NO: 505249 - DNA, 75 bp, synthetic construct
  source 1..75: mol_type = other DNA
gattgcgtcactgattattggaccgttgcttacaccgctagatacattacaggcattattagcgggtttgttaat

SEQ ID NO: 505250 - DNA, 75 bp, synthetic construct
  source 1..75: mol_type = other DNA
tcagcggatcgatggcggctcctttctggtggacccgtgccattatcgccggttgatttggcgtatcgctttatg

SEQ ID NO: 505251 - DNA, 75 bp, synthetic construct
  source 1..75: mol_type = other DNA
ttaatagctggttaaaagttgcagttctcaaaaatggtgatttatctctgtctgaccttaaacatgataaagaca

SEQ ID NO: 505252 - DNA, 75 bp, synthetic construct
  source 1..75: mol_type = other DNA
ataatcttgcggatatgcccaatatcgacgtaatcgtcgggcaagcggagtttatcaataatcatattctgcgta

SEQ ID NO: 505253 - DNA, 75 bp, synthetic construct
  source 1..75: mol_type = other DNA
caagggcaactgccttgataatgcggtaatggagaacttctttggtcacctgaaagaagaaatgtactatcgccg

SEQ ID NO: 505254 - DNA, 75 bp, synthetic construct
  source 1..75: mol_type = other DNA
gccatccgcgtggttgacattgccgcagggcatgggcgctatgtactggatgcgctggagaatgaacctgccgta

SEQ ID NO: 505255 - DNA, 75 bp, synthetic construct
  source 1..75: mol_type = other DNA
atcgccgatcgcgtcgagtataaacgcgatgtgctgttgccgcgctgggttcccactgtggaagcctatctggag

SEQ ID NO: 505256 - DNA, 75 bp, synthetic construct
  source 1..75: mol_type = other DNA
tcggttgcgcagtaattttcccacgttcgtggccgatacgatgctggcctgggcgcaggaaacatccgggcgcgg

SEQ ID NO: 505257 - DNA, 75 bp, synthetic construct
  source 1..75: mol_type = other DNA
accgtaggaaaatatccactaatgactttgcaggaggcaagagataaagcatggaccgcgaggaaagacatctcg

SEQ ID NO: 505258 - DNA, 75 bp, synthetic construct
  source 1..75: mol_type = other DNA
gtgcaatcaaaacaagcctatgctgaatatcaagacaaaaagaatgatgcagctagaattatgaaaatagttgag

SEQ ID NO: 505259 - DNA, 75 bp, synthetic construct
  source 1..75: mol_type = other DNA
gatccataagatcctgaaaggtaatgatgatcgcctgttggttgtgattggcccatgctcaattcatgatcctgt

SEQ ID NO: 505260 - DNA, 75 bp, synthetic construct
  source 1..75: mol_type = other DNA
acagcgcacgaattgaagcggagcggttactgcgacagcagcagtctctggacacggaaaccagcctgcatattc

SEQ ID NO: 505261 - DNA, 75 bp, synthetic construct
  source 1..75: mol_type = other DNA
aatcaaatgcaatgtatggcgggacctgtattaatatcggctgcatcccaaccaaaacattggttcatgacgcac

SEQ ID NO: 505262 - DNA, 75 bp, synthetic construct
  source 1..75: mol_type = other DNA
ttccgagttctcgttcctgctggcggtgccgatgatgatgggcgcaacggcgctcgatctctacaaaagctgggg

SEQ ID NO: 505263 - DNA, 75 bp, synthetic construct
  source 1..75: mol_type = other DNA
atgagcgatatgcactcgctgatgatagcggcaatattgggtgtggtcgaaggattgacagaatttctgccggta

SEQ ID NO: 505264 - DNA, 75 bp, synthetic construct
  source 1..75: mol_type = other DNA
ctgataatatcgcgacgattttacgcgatcagggcgtcgatattatcctcaatgcccatgtggagcgaatcagtc

SEQ ID NO: 505265 - DNA, 75 bp, synthetic construct
  source 1..75: mol_type = other DNA
cgctattgaagtgcaactggcacatgccaacggcggatctgtgcgtggaatttacaaccatgctcagtatctcga

SEQ ID NO: 505266 - DNA, 75 bp, synthetic construct
  source 1..75: mol_type = other DNA
cggcagaagcactgcgccagtcacttattgatgcagcaatggcttccattagtctgattcaactgaaactacagg

SEQ ID NO: 505267 - DNA, 75 bp, synthetic construct
  source 1..75: mol_type = other DNA
ttgcagatgcttaatgcgcctttagaaaaatggcgtgtatttctgcatccgagccagcgaaaattggtggagtcg

SEQ ID NO: 505268 - DNA, 75 bp, synthetic construct
  source 1..75: mol_type = other DNA
cattgcctgtagctgcaattccgcgtgccagagtgatgaacgatacccgtggggtattaaaagcgattgttgata

SEQ ID NO: 505269 - DNA, 75 bp, synthetic construct
  source 1..75: mol_type = other DNA
ataaaacccaacgtatattaggggcatcactgctgtgtgttgactcccacgagatgattaatatagtgaaaatgg

SEQ ID NO: 505270 - DNA, 75 bp, synthetic construct
  source 1..75: mol_type = other DNA
cttattccgtatttatgacaccgcccctgtccagggttggtatgacagaagaacaagccagagagagtggtgctg

SEQ ID NO: 505271 - DNA, 75 bp, synthetic construct
  source 1..75: mol_type = other DNA
atgtgtatctaccttaacttaatgattttgataaaaatcattaggggattcatcagcgcacagcagcacacagat

SEQ ID NO: 505272 - DNA, 75 bp, synthetic construct
  source 1..75: mol_type = other DNA
gttgacaagcaattacataccaccgcagacaatatttgggcgatgggagatgttaccggcgggctgcaatttact

SEQ ID NO: 505273 - DNA, 75 bp, synthetic construct
  source 1..75: mol_type = other DNA
gaaccctctcacttaaagcagcgattaaggtcaagcgataccgctcttacagaggagaagtagggcaaaccgccc

SEQ ID NO: 505274 - DNA, 75 bp, synthetic construct
  source 1..75: mol_type = other DNA
tttacaaccatgctcagtatctcgataagcgcagagaaatgatgcagtggtgggcggattggcttgatgagaagg

SEQ ID NO: 505275 - DNA, 75 bp, synthetic construct
  source 1..75: mol_type = other DNA
gtgaagaccggggataataactgggatgtttacacccaggacagcagtgatccaacaggcacagcgaaccacgca

SEQ ID NO: 505276 - DNA, 75 bp, synthetic construct
  source 1..75: mol_type = other DNA
ggcaactattccaacgaacaaacccaactgctggggcagattgtactggcgaactttgccaacaacgaaggtctg

SEQ ID NO: 505277 - DNA, 75 bp, synthetic construct
  source 1..75: mol_type = other DNA
caaaccgggcgatctggtgagttatcaaatcaatgatgacggtacggttgtcggcaactattccaacgaacaaac

SEQ ID NO: 505278 - DNA, 75 bp, synthetic construct
  source 1..75: mol_type = other DNA
cggtgaacgctctacttgcgctcgatcccttagataatcacccgacaaaaatccccactcttccgaccttttatc

SEQ ID NO: 505279 - DNA, 75 bp, synthetic construct
  source 1..75: mol_type = other DNA
gaaaaaatcgccgattccggtgctggatttagcaccgctcaacctcgaatccatatgcacaataaccgacacaga

SEQ ID NO: 505280 - DNA, 75 bp, synthetic construct
  source 1..75: mol_type = other DNA
cgatctcagtaaagaactggtcaatatgatcgttgcccagcgtaactatcagtctaacgcccagaccatcaaaac

SEQ ID NO: 505281 - DNA, 75 bp, synthetic construct
  source 1..75: mol_type = other DNA
tgaacagcgatttccagtccagccagtttgcggataacgccaatacggtgaaagagagcgccgacggcagtaccg

SEQ ID NO: 505282 - DNA, 75 bp, synthetic construct
  source 1..75: mol_type = other DNA
cgttctctggcgcaatttcaggaaatacagccacaaccaacggtgatatcacttcgaataatggctggctggtca

SEQ ID NO: 505283 - DNA, 75 bp, synthetic construct
  source 1..75: mol_type = other DNA
atcagaaacctgatcaacgtcgaatcaaaatagcactgccatatgtcgtaggcgcgggctcgtgcattgtattga

SEQ ID NO: 505284 - DNA, 75 bp, synthetic construct
  source 1..75: mol_type = other DNA
ccggcgttgaacgtgctctatcacctgactgacagctggaatctttatgcaaacactgaaggctcgttcggcacc

SEQ ID NO: 505285 - DNA, 75 bp, synthetic construct
  source 1..75: mol_type = other DNA
ttgtatcaggataaaattcttgtccgccagctcggtcttcagccttacgagccaatctcccaggctatgcatgaa

SEQ ID NO: 505286 - DNA, 75 bp, synthetic construct
  source 1..75: mol_type = other DNA
ggcaccgaggcgcacgcctggtatctggatgacaaaatcgacatcggcaactggaccatcacgccgggtatgcgt

SEQ ID NO: 505287 - DNA, 75 bp, synthetic construct
  source 1..75: mol_type = other DNA
caggtgaaagatgcctgtaccaccgactcactggctgaatttgcctgggatctgtttaccgcctggcagaccgct

SEQ ID NO: 505288 - DNA, 75 bp, synthetic construct
  source 1..75: mol_type = other DNA
acaataggtaaatatcctttcatgtcattgcaggaagcaagagacaaggcatggcttgcgaaaaaagatgtgtct

SEQ ID NO: 505289 - DNA, 75 bp, synthetic construct
  source 1..75: mol_type = other DNA
tcgagctgcagcttgtggacgggaacggtcagggaattgagctaagtgattttaaagtgacctttacgatcgact

SEQ ID NO: 505290 - DNA, 75 bp, synthetic construct
  source 1..75: mol_type = other DNA
caccgaacgaataatcctgtcggaaaaagaggaaccagatgaagaagcctctcttccaatactggtacgtagata

SEQ ID NO: 505291 - DNA, 75 bp, synthetic construct
  source 1..75: mol_type = other DNA
tttacaaccatgcgcagtatctcgataagcgcagagaaatgatgcagtggtgggcagactggcttgataaaaagg

SEQ ID NO: 505292 - DNA, 75 bp, synthetic construct
  source 1..75: mol_type = other DNA
ttggcgtaactgagcggctcagtagctggaatcaacgtactgaagttcatgactggaagagacgctctgaacgcc

SEQ ID NO: 505293 - DNA, 75 bp, synthetic construct
  source 1..75: mol_type = other DNA
gttcggctctatataccaggaatggtacgagcataaaaaacaggtatggtcggaggtatacagcacagaactgtc

SEQ ID NO: 505294 - DNA, 75 bp, synthetic construct
  source 1..75: mol_type = other DNA
tcaggaatagatcattcaaaattaacggccattccagatatgattgatattgcaagacgtaaaaatcaatacatc

SEQ ID NO: 505295 - DNA, 75 bp, synthetic construct
  source 1..75: mol_type = other DNA
tacacggatagatggagggaaatttataacaacgctgctcccgaagaagggatgcatttatcagatgcttgtcca

SEQ ID NO: 505296 - DNA, 75 bp, synthetic construct
  source 1..75: mol_type = other DNA
gacagaagccgagcgcaatgccagcgaactgacacgctgggcaggcagaaaatgcccgagtggtcgggtaatggg

SEQ ID NO: 505297 - DNA, 75 bp, synthetic construct
  source 1..75: mol_type = other DNA
tctaattgacactatcgatcccgaatatatacaggaactggaagaccatctggctaaggttagtcatcgtaagat

SEQ ID NO: 505298 - DNA, 75 bp, synthetic construct
  source 1..75: mol_type = other DNA
aagccgctgcgtaaacccatcaatactgaattcctaaagcaccgttggcaggtttttcagcaccggaaccaaact

SEQ ID NO: 505299 - DNA, 75 bp, synthetic construct
  source 1..75: mol_type = other DNA
caacaactgttatgaccaatgtgtgattacaggctctagactgcgccagcgcactgaggctgctcatctgatgga

SEQ ID NO: 505300 - DNA, 75 bp, synthetic construct
  source 1..75: mol_type = other DNA
ccgttgaagcattaaaagttattgcccagccaatgggggagccgtccggcgatttgctgccgttcgccaatggtg

SEQ ID NO: 505301 - DNA, 75 bp, synthetic construct
  source 1..75: mol_type = other DNA
tgaaaagcgttttacggcggtaatcagggcggtggtgctggcaaccaataacaatccgatgatattcaccgaacg

SEQ ID NO: 505302 - DNA, 75 bp, synthetic construct
  source 1..75: mol_type = other DNA
ttgagcttccggtaaagcaaaaggcgcaactttcgcagatggcggacagtgagcgcgcgcagctgcttgccgatc

SEQ ID NO: 505303 - DNA, 75 bp, synthetic construct
  source 1..75: mol_type = other DNA
tagcaaacctggggagcctgggtgatcaggtaaacgttaaagcgggctatgctcgtaacttcctggtaccgcagg

SEQ ID NO: 505304 - DNA, 75 bp, synthetic construct
  source 1..75: mol_type = other DNA
ttgttcagtcttatagacataagactgaatatggtggttttttcgttttaagtttatcgatagcaacagttactt

SEQ ID NO: 505305 - DNA, 75 bp, synthetic construct
  source 1..75: mol_type = other DNA
atgggcttatgcaaacaataaggtcattacagatacaggttgcggaaatatttgtcttgcaggtgctgtggtgga

SEQ ID NO: 505306 - DNA, 75 bp, synthetic construct
  source 1..75: mol_type = other DNA
ggaaaagattgcggctgaaatccctgtcattatccgccgattgctggcgaactttaccgaccctgagaaggcacg

SEQ ID NO: 505307 - DNA, 75 bp, synthetic construct
  source 1..75: mol_type = other DNA
ttccgttttgacaatatcgtcagcgaggcagaaaaagacagggcgttaccggaaaaaatcgcggctgaaatcccc

SEQ ID NO: 505308 - DNA, 75 bp, synthetic construct
  source 1..75: mol_type = other DNA
ccgatcgttgagcagcagaaaatccagcaggctaaggatgcccaacagagtcaaattgaagcggaacaacaggtg

SEQ ID NO: 505309 - DNA, 75 bp, synthetic construct
  source 1..75: mol_type = other DNA
tcttccaatgggggaaccgtccggcgatttgctgccatttgccaatggcgtactcaaccttaagaccggtgaatt

SEQ ID NO: 505310 - DNA, 75 bp, synthetic construct
  source 1..75: mol_type = other DNA
aacagccgcgagggaaaaaacacgccgatacggaagtgattattttcgctggcagtgatgcgtgggcgcacgcga

SEQ ID NO: 505311 - DNA, 75 bp, synthetic construct
  source 1..75: mol_type = other DNA
gcgcgaatatctggcccgtgagcgccagaatctttctgaaggtctgttcgttgagcttccggtaaagcaaaaggc

SEQ ID NO: 505312 - DNA, 75 bp, synthetic construct
  source 1..75: mol_type = other DNA
gtggtgtggtgtgagaaagtgctggagtcagaaatgttttatgcaatgaaacgagaattggagaaagaatttcca

SEQ ID NO: 505313 - DNA, 75 bp, synthetic construct
  source 1..75: mol_type = other DNA
tttgttgccggggggatccggcttgaggattcctcaccgtgcctgtttgtgaaaacggcagatatatcgcagtta

SEQ ID NO: 505314 - DNA, 75 bp, synthetic construct
  source 1..75: mol_type = other DNA
atgctgcccttgccggggtggacagtacgattgttgaagtgatggggctctgtgcacagttcacctcgggggcac

SEQ ID NO: 505315 - DNA, 75 bp, synthetic construct
  source 1..75: mol_type = other DNA
atgaccacttttaccgacgacgacaagggactgattaaagaaatcagagagcgaatcggcagcctggacgtccga

SEQ ID NO: 505316 - DNA, 75 bp, synthetic construct
  source 1..75: mol_type = other DNA
ggatgtgaacaacattattttcacgcctgttcagcaggttgatgattttaatgtggaaaatcccgatgcgatcta

SEQ ID NO: 505317 - DNA, 75 bp, synthetic construct
  source 1..75: mol_type = other DNA
ttcgttgccggaggagtacggtttgaagattcttcaccgtctttgtttgtgaaaacagcagatattacggggcta

SEQ ID NO: 505318 - DNA, 75 bp, synthetic construct
  source 1..75: mol_type = other DNA
ggggatgctgttatatccggttaaggcggggcagtcctgccccacagaataatgccagaatgaggcgatatgatg

SEQ ID NO: 505319 - DNA, 75 bp, synthetic construct
  source 1..75: mol_type = other DNA
acgcgcaagaactggcgggttccgacaacaagaaaagcaatgcgctctcgctggtcacctccatgaacagttgcc

SEQ ID NO: 505320 - DNA, 75 bp, synthetic construct
  source 1..75: mol_type = other DNA
gatgattcccctggaggtgcaatcaacgttataggtcgcctgatgattcgtagccagtggagtgatgacaaggcc

SEQ ID NO: 505321 - DNA, 75 bp, synthetic construct
  source 1..75: mol_type = other DNA
ttcatcgtgaaagccctgtccgtgatgtagctattaggcgatattgcaatcgcgacagcacgcaagatatcgcca

SEQ ID NO: 505322 - DNA, 75 bp, synthetic construct
  source 1..75: mol_type = other DNA
actgtttgatgtttacaccctgggggcggatggtcaggaaaacggggaaggcgctggcgcagatatcggtaactg

SEQ ID NO: 505323 - DNA, 75 bp, synthetic construct
  source 1..75: mol_type = other DNA
ccagtcggcttacaacacgctcgcgtcactcgatctgccgaaaccggaacagggaccggaaaccattaatcaggt

SEQ ID NO: 505324 - DNA, 75 bp, synthetic construct
  source 1..75: mol_type = other DNA
ccgtttatttcgctggggcaagtcggtgagggcaaactgatggttatcggtaagatgaaccgtgtcgctgacgat

SEQ ID NO: 505325 - DNA, 75 bp, synthetic construct
  source 1..75: mol_type = other DNA
tctcgataagcaaatggaaagcctgtttttggagaacaacgcaaacgccttttcaaaacgtatcacctacaccgt

SEQ ID NO: 505326 - DNA, 75 bp, synthetic construct
  source 1..75: mol_type = other DNA
acacgcgacagccagcgtcaggcagcggcacagcggtttaatgaagctgaacactatgggagctatgacgacttc

SEQ ID NO: 505327 - DNA, 75 bp, synthetic construct
  source 1..75: mol_type = other DNA
gcactggctgcgttaattaagaatggcccgctctggcaggagttgagggcatctttgctgaaggccattacccga

SEQ ID NO: 505328 - DNA, 75 bp, synthetic construct
  source 1..75: mol_type = other DNA
gttaatcgcagcaatgatgtatccgcagggaatttttccggtactggcagcatccggcgtttgggtagcctgtct

SEQ ID NO: 505329 - DNA, 75 bp, synthetic construct
  source 1..75: mol_type = other DNA
agacagcgttaacgcaattcgcgtaccgcaggattacgttacgcaaagcggcccactgcgtgaaatgaacggttc

SEQ ID NO: 505330 - DNA, 75 bp, synthetic construct
  source 1..75: mol_type = other DNA
tgaacccccttcccttctggcggcgctggaatcccacaatgtggcggttgagtaccagtgtcgcgaaggttactg

SEQ ID NO: 505331 - DNA, 75 bp, synthetic construct
  source 1..75: mol_type = other DNA
atgacgacttccgcgacttcagccgtcgccaacccctgacccagcaacaaaaggacgccgctcgtcagcgttatc

SEQ ID NO: 505332 - DNA, 75 bp, synthetic construct
  source 1..75: mol_type = other DNA
acaaaagacgcactggcggaaattctaaaacgtccgggcgctgcgcttcagcttgcgggaaaggtaaatgagatt

SEQ ID NO: 505333 - DNA, 75 bp, synthetic construct
  source 1..75: mol_type = other DNA
aaccgttagcctttattcagccgggggaaattttgccttgttgttgccgggcaaaaggcgatattgaaatcgagt

SEQ ID NO: 505334 - DNA, 75 bp, synthetic construct
  source 1..75: mol_type = other DNA
ggacaagcgcgtggacgttgcagaacaggccgcactggaaagaaccattgatcacaacgatgcgctgtcgccaac

SEQ ID NO: 505335 - DNA, 75 bp, synthetic construct
  source 1..75: mol_type = other DNA
tgatgcgattgctgattgtcgtaagtctcgcctggacggggtgggccattaccctggtcttttatctgctgaccg

SEQ ID NO: 505336 - DNA, 75 bp, synthetic construct
  source 1..75: mol_type = other DNA
tcagctttgttgcgcccacggttgaacagcgcaccggaccagaacggatagcactggctgcgttaattaagaatg

SEQ ID NO: 505337 - DNA, 75 bp, synthetic construct
  source 1..75: mol_type = other DNA
tcactggctgcgttaattaagaacggcccgctctggcaggagttgagggcatctttgctgaagacaattacccga

SEQ ID NO: 505338 - DNA, 75 bp, synthetic construct
  source 1..75: mol_type = other DNA
gattccggcggctcaaacgttcacgcagcaactggtgatggtgggggactacattgctcaacaaggtactcaggt

SEQ ID NO: 505339 - DNA, 75 bp, synthetic construct
  source 1..75: mol_type = other DNA
ggtgatgaagctctggcaataaagcaacagacggatccggttattgagttttgccagttcctgaattttctggag

SEQ ID NO: 505340 - DNA, 75 bp, synthetic construct
  source 1..75: mol_type = other DNA
ttatcgtcctggctgaccagccgaaatatacaggcgaaggaacgggcatcaagaaaatcacaggcggcgaccccg

SEQ ID NO: 505341 - DNA, 75 bp, synthetic construct
  source 1..75: mol_type = other DNA
gtctatctggcgtttatggcatacgcaggcagaagcaagccgctaaacgtggctgatttcagcaaggccatgaag

SEQ ID NO: 505342 - DNA, 75 bp, synthetic construct
  source 1..75: mol_type = other DNA
gtcgataaataccctgatgtcactaatcagaccaaacgaagcacactggacaagatcaaactagccatctctgag

SEQ ID NO: 505343 - DNA, 75 bp, synthetic construct
  source 1..75: mol_type = other DNA
aagcatgggagcctcccgaccactggttctccggcatcggcaaatctgagggaaagacgcttctcatcgctttcc

SEQ ID NO: 505344 - DNA, 75 bp, synthetic construct
  source 1..75: mol_type = other DNA
gttctccggcaccggcaaatctgagggaaaggcgcttctcatcgctttcctgcgtaactgcaaggggtttcgcac

SEQ ID NO: 505345 - DNA, 75 bp, synthetic construct
  source 1..75: mol_type = other DNA
agacatcatggctatcagcttgtcgtcgtgcaggaattgaagatttccgtttccatgacctcagacacacctggg

SEQ ID NO: 505346 - DNA, 75 bp, synthetic construct
  source 1..75: mol_type = other DNA
gcggcaactttggctgcctggaaactatcgccgccaatgctgccattgaacaacgggtgttgaatctgttaaagc

SEQ ID NO: 505347 - DNA, 75 bp, synthetic construct
  source 1..75: mol_type = other DNA
ttcccgacgtcacagcaggcaagtgaatataacaaactgattgcgccattaccggcacaacatcaggcgtttaat

SEQ ID NO: 505348 - DNA, 75 bp, synthetic construct
  source 1..75: mol_type = other DNA
ggcgatctattcagagcacagggccacattcagcaagcgtgcaattaataacgccgtggaggcgttaaaagttat

SEQ ID NO: 505349 - DNA, 75 bp, synthetic construct
  source 1..75: mol_type = other DNA
acacgccaccagtaccaggggagaacatccgcgacaacgcgccaaactttcataaatggcttgatcacgccgcag

SEQ ID NO: 505350 - DNA, 75 bp, synthetic construct
  source 1..75: mol_type = other DNA
gcggtggtactggcaaccaataacgacccgatgatctttaccgaacgggccggaggtgtgtcacgccgtcgggtg

SEQ ID NO: 505351 - DNA, 75 bp, synthetic construct
  source 1..75: mol_type = other DNA
agataacagctacagcaccgctgacgatgatcttttcaccctgccggaaggcgatatctctattggtattcctca

SEQ ID NO: 505352 - DNA, 75 bp, synthetic construct
  source 1..75: mol_type = other DNA
atgagacactttatctttcaggacgaaaaatcacataaattctgggcggtggagcaacagggaaacgagctgcat

SEQ ID NO: 505353 - DNA, 75 bp, synthetic construct
  source 1..75: mol_type = other DNA
caacgctgtgtagataaattcattacagctttacctgatattcctcccgttcaacaaccgatggtagcgctaatg

SEQ ID NO: 505354 - DNA, 75 bp, synthetic construct
  source 1..75: mol_type = other DNA
ctgaaattacccctttgccacaagacaaaccagcatttgctggtgacctcctcccctggctggcagacggtgccc

SEQ ID NO: 505355 - DNA, 75 bp, synthetic construct
  source 1..75: mol_type = other DNA
ctccgcttcccccaggaagaggcgctttatccggggttattacaggtgaaagatgcctgcacttccgactcactg

SEQ ID NO: 505356 - DNA, 75 bp, synthetic construct
  source 1..75: mol_type = other DNA
atgacaccgcccgcaaactgacgccattaatacgcgcctggcctggtgaatcccagcataaacgcgccaccgttg

SEQ ID NO: 505357 - DNA, 75 bp, synthetic construct
  source 1..75: mol_type = other DNA
actcaatccccacataccgataccgaatacgtcatgttacatctgggtctcatgggtttaccggggttagtgaac

SEQ ID NO: 505358 - DNA, 75 bp, synthetic construct
  source 1..75: mol_type = other DNA
gatgatcttttcaccctgccggaaggcgatatctctgttggcattcctcacgttctggaaatatcacccacggat

SEQ ID NO: 505359 - DNA, 75 bp, synthetic construct
  source 1..75: mol_type = other DNA
aacggcattgctcagaaactgaaattcaaagctttacaggagcgggcaaaagagaaaattgccgatattgccgag

SEQ ID NO: 505360 - DNA, 75 bp, synthetic construct
  source 1..75: mol_type = other DNA
acaggttgttctggtttcgcgtaaattctggggcgaatgccctgaactcatggatgaaattgtctatgtctacgg

SEQ ID NO: 505361 - DNA, 75 bp, synthetic construct
  source 1..75: mol_type = other DNA
ccgagcgcaatgccagcgaattgatccgctgggcaggcagaaaatgcccgagcggtcgggtaatggggctggcga

SEQ ID NO: 505362 - DNA, 75 bp, synthetic construct
  source 1..75: mol_type = other DNA
tcactggctgaatttgcctgggatctatttatcgcctggcagacggctggcgcgccatcgaaagagagttgggcg

SEQ ID NO: 505363 - DNA, 75 bp, synthetic construct
  source 1..75: mol_type = other DNA
atgccgaatgccactggcgttaggtcattgggggatttgttcggtctgttcacgcgcacccgcacagataaaacg

SEQ ID NO: 505364 - DNA, 75 bp, synthetic construct
  source 1..75: mol_type = other DNA
taccgttgcgacatgcagaacccgggatacggcattgctaaagtcgtttgacgctttccgcgagtgggtaaccat

SEQ ID NO: 505365 - DNA, 75 bp, synthetic construct
  source 1..75: mol_type = other DNA
tttacaccgagcatttttatccggacggtagccgtgggcgtcgggcgaaatccatcgcttttgcgaatatggacg

SEQ ID NO: 505366 - DNA, 75 bp, synthetic construct
  source 1..75: mol_type = other DNA
atggcgcatatacaactggtcaaacaaacatcttctggattacttctcccggcgacaccggagagttgtgatttc

SEQ ID NO: 505367 - DNA, 75 bp, synthetic construct
  source 1..75: mol_type = other DNA
tggattctgttccgtaaattttcctctccggaacaagtcgaaaatgtggccgcgcagctactggagtttgcgtaa

SEQ ID NO: 505368 - DNA, 75 bp, synthetic construct
  source 1..75: mol_type = other DNA
gacgatcacgccccgcgaacgagaactggtgtttggtttcgttgattacctgtgcgaatcagtaggtcgggaaca

SEQ ID NO: 505369 - DNA, 75 bp, synthetic construct
  source 1..75: mol_type = other DNA
tacgccagctctgagcgaagccgcagagcaatatctgaatacagttgcgacacgcagaacccgggatacggcatt

SEQ ID NO: 505370 - DNA, 75 bp, synthetic construct
  source 1..75: mol_type = other DNA
caagagcgaattgaagatactcagctaattttttatatcctagatgagaaagcccctgaacgggcaaaactagat

SEQ ID NO: 505371 - DNA, 75 bp, synthetic construct
  source 1..75: mol_type = other DNA
gctattgatatccgccgctttagtcatggtaaccctgtgcctgagggcaggtattattctgatatttatgttaat

SEQ ID NO: 505372 - DNA, 75 bp, synthetic construct
  source 1..75: mol_type = other DNA
atgccactggcgttaggtcattgggggatttgttcggtctgttcacgcgccacccgcacagataaaacgttatgc

SEQ ID NO: 505373 - DNA, 75 bp, synthetic construct
  source 1..75: mol_type = other DNA
acgaataccagatgcctgacggtagccgtcgtcgtgtcgcaaagtcgatctccttcgccagcatggacgacagcc

SEQ ID NO: 505374 - DNA, 75 bp, synthetic construct
  source 1..75: mol_type = other DNA
tttttcaagcttctgactctcgggtatcactattggacgccttccggtggtctcattgagcccgcggagcgcaac

SEQ ID NO: 505375 - DNA, 75 bp, synthetic construct
  source 1..75: mol_type = other DNA
taagtcattcgatgcatatcgtgcatgggtcactattgagtccggccattacgacgccattcagctgcctgacgg

SEQ ID NO: 505376 - DNA, 75 bp, synthetic construct
  source 1..75: mol_type = other DNA
gcgctggcgcatgatgctaatgacgatgcttatctcgcaaccgatactagcagaacaggtcattccctggctctc

SEQ ID NO: 505377 - DNA, 75 bp, synthetic construct
  source 1..75: mol_type = other DNA
gccgcgagtttctgatttgcgacgagaagaccatgcgccgcattaacaggggcatgagtaaactggaagcgatgc

SEQ ID NO: 505378 - DNA, 75 bp, synthetic construct
  source 1..75: mol_type = other DNA
tggcctttggcgataagctaccgaggcaccgcaacgcacaacaactggcgggactagcagccggggcgttccggg

SEQ ID NO: 505379 - DNA, 75 bp, synthetic construct
  source 1..75: mol_type = other DNA
atgcctgccagtgagtgtgtggaacatatcttggccagtggcttggtctgtgatgtgctgcgtataccgggtgaa

SEQ ID NO: 505380 - DNA, 75 bp, synthetic construct
  source 1..75: mol_type = other DNA
ccagcgaactgacccgctgggcaggcagaaaatgcccgagcggccgggtcatggggctggcaaataaaggctgga

SEQ ID NO: 505381 - DNA, 75 bp, synthetic construct
  source 1..75: mol_type = other DNA
gggttgtaatattcctgtcctgcactggttacatcgtaatctggtcaatttcgaacattgaccgtggcggggaat

SEQ ID NO: 505382 - DNA, 75 bp, synthetic construct
  source 1..75: mol_type = other DNA
aatccgtggttgctcaaatcaaagatggcaatcgctcaattattggtctgatgatcgaaagtaatatccacgagg

SEQ ID NO: 505383 - DNA, 75 bp, synthetic construct
  source 1..75: mol_type = other DNA
gcggcgtaatgcgcagcaacttgcggggctggctgctggcgctttccgcgtcgctgtcgtttcgccggagcatct

SEQ ID NO: 505384 - DNA, 75 bp, synthetic construct
  source 1..75: mol_type = other DNA
gagtctgacgcgggtgacggtctgaccgttattgttgtgccgacgaacaccatcaagcagcaggtgttacagcag

SEQ ID NO: 505385 - DNA, 75 bp, synthetic construct
  source 1..75: mol_type = other DNA
cctgccggtccccggacagagcacaaaggaagtcgccgccggctccgctttacccggccatgcggggcatggcct

SEQ ID NO: 505386 - DNA, 75 bp, synthetic construct
  source 1..75: mol_type = other DNA
cttggccagtggcttggtctgtgatgtgctgcgtataccgggtgaaccgccccgccgcttgtttgaccgctatat

SEQ ID NO: 505387 - DNA, 75 bp, synthetic construct
  source 1..75: mol_type = other DNA
gtggcgactggcgacccggccagcaggacgtagccgccgctgtgtttgcccgtgaccgcgatatgttggccgtgc

SEQ ID NO: 505388 - DNA, 75 bp, synthetic construct
  source 1..75: mol_type = other DNA
ggcatgagccaactggaagcgatgcgccatgctgactttacgcgaatgggtgacagcccggctttccgtcagttg

SEQ ID NO: 505389 - DNA, 75 bp, synthetic construct
  source 1..75: mol_type = other DNA
ataaattcattacagctttacctgatattcctcccgttcaacaaccgatggtagcgctaatgctaccggaacgcc

SEQ ID NO: 505390 - DNA, 75 bp, synthetic construct
  source 1..75: mol_type = other DNA
acgcggtgactcgctcaatgtcgttaactcgccgttcaatagcagtgacgaaagcggcggagaactgccgttctg

SEQ ID NO: 505391 - DNA, 75 bp, synthetic construct
  source 1..75: mol_type = other DNA
acatccgcgacaaccgccagttctggccgctctaccagcgtgcactggcccgcagtgtgggcgaccagatgtttg

SEQ ID NO: 505392 - DNA, 75 bp, synthetic construct
  source 1..75: mol_type = other DNA
tatgagtggttttctacagtcgttttcacgctaccctcaagaaggttttgcggttgctaattattttgccgcaac

SEQ ID NO: 505393 - DNA, 75 bp, synthetic construct
  source 1..75: mol_type = other DNA
attgacgccgccgcctttggccagctttttgccgactatgaactgttgccgccgttccgtcagcttgaccgcaac

SEQ ID NO: 505394 - DNA, 75 bp, synthetic construct
  source 1..75: mol_type = other DNA
acattatccagaacaacatttagtcgctctgatgtaacgcgtaaaggttatagtttgcattccagctatagtgtc

SEQ ID NO: 505395 - DNA, 75 bp, synthetic construct
  source 1..75: mol_type = other DNA
taccggatttgaccagtctgataaatctcgcttaagtgctcttgcaaaagaaaatggtattgatgttaagtctga

SEQ ID NO: 505396 - DNA, 75 bp, synthetic construct
  source 1..75: mol_type = other DNA
tgtatccgggattattgcaggtgaaagccgcctgtaccgccgactcactggctgaatttgcctgggatctgttta

SEQ ID NO: 505397 - DNA, 75 bp, synthetic construct
  source 1..75: mol_type = other DNA
cttgcgctcgatcccttagataatcacccgacaaaaatccccactcttccggccttttatcagccatcgctctgg

SEQ ID NO: 505398 - DNA, 75 bp, synthetic construct
  source 1..75: mol_type = other DNA
taaccagccggaagtaacagatgcggtgaacgctatgcttgcgctcgatcccttagataatcatccgacaaaaat

SEQ ID NO: 505399 - DNA, 75 bp, synthetic construct
  source 1..75: mol_type = other DNA
atcgccgctgggattttgacacacataaatatatcggcgcttctgactcggcaattgacgcatgggaacgtgagg

SEQ ID NO: 505400 - DNA, 75 bp, synthetic construct
  source 1..75: mol_type = other DNA
ctcatgagattgccagacatttttgcgggcaaaaagggttatatgcgctggaatggctaaaactgacggtcaccg

SEQ ID NO: 505401 - DNA, 75 bp, synthetic construct
  source 1..75: mol_type = other DNA
gcagcgctggcggcattagcagaacttctggcacaaaaagatcaaaagcgttggcgcatgatgctaatgacaatg

SEQ ID NO: 505402 - DNA, 75 bp, synthetic construct
  source 1..75: mol_type = other DNA
gttggcatcgatccggtaaaagcgaaaaaggcttcgtctaacaacaattcctttagcgccatttacaaggaatgg

SEQ ID NO: 505403 - DNA, 75 bp, synthetic construct
  source 1..75: mol_type = other DNA
tgccggtggtgcctccagcttcctcgcggaccgtgtggaagaagagggcgaagtccgcgtatttatcgaacataa

SEQ ID NO: 505404 - DNA, 75 bp, synthetic construct
  source 1..75: mol_type = other DNA
tgttaaccagaaaattaccgggcgtaactctgaaaaagacgttcgccatatcgaaattgacttaggtgactcggg

SEQ ID NO: 505405 - DNA, 75 bp, synthetic construct
  source 1..75: mol_type = other DNA
tataaattcaaacaaatcgccagcgaaaaactgcttatcgtggtgacgtcaacgcaaggggaaggggaaccgccg

SEQ ID NO: 505406 - DNA, 75 bp, synthetic construct
  source 1..75: mol_type = other DNA
ggttcactggttcgtcatgaaatcatcaaaacgactctgcctaaagcgaaagagctgcgccgcgtagttgagccg

SEQ ID NO: 505407 - DNA, 75 bp, synthetic construct
  source 1..75: mol_type = other DNA
taaaacaccgatcgtaatgggcatgttgctgtcgatggtgatggtgttctgcaactacgtcaacgttgagtggat

SEQ ID NO: 505408 - DNA, 75 bp, synthetic construct
  source 1..75: mol_type = other DNA
acactttacggaagatttcctctaccaggtggaatggcagcgttacgtcaaagaaggcgtgctgacgcgcatcga

SEQ ID NO: 505409 - DNA, 75 bp, synthetic construct
  source 1..75: mol_type = other DNA
agttcggtgatgcttccatcgctgcatgctgccagtcgagaacttcgtcgcgccaaaaaacaggtccagaagtgg

SEQ ID NO: 505410 - DNA, 75 bp, synthetic construct
  source 1..75: mol_type = other DNA
accagtgatggtctggcaatctgggatgagcaggcaatctccatccacgccgatagcgacagtgaaattctgctg

SEQ ID NO: 505411 - DNA, 75 bp, synthetic construct
  source 1..75: mol_type = other DNA
ttaacgacgacgtgattgaagcagggcagggcttcggcactcacccgcataaagatatggaaattttgacctacg

SEQ ID NO: 505412 - DNA, 75 bp, synthetic construct
  source 1..75: mol_type = other DNA
cgttgcttccgttgaacccggagcaactggcacgccttcaggcggccacgaccgatttaactcctacccagcttg

SEQ ID NO: 505413 - DNA, 75 bp, synthetic construct
  source 1..75: mol_type = other DNA
atgatgacactgactactgtctcgaagaaaacttctaataattcagcccttgtattctggcgcgttggtacaaaa

SEQ ID NO: 505414 - DNA, 75 bp, synthetic construct
  source 1..75: mol_type = other DNA
gaacggccaaagagcgacatcctgactgtcagatagtgaagcgcaaagggcgattgtatgtaatttgtaaatcca

SEQ ID NO: 505415 - DNA, 75 bp, synthetic construct
  source 1..75: mol_type = other DNA
cgatgtgggaaaaccctgaaaggtgcgacgggtttctgtatcaccttattggcagtaccgtcagttcggatatct

SEQ ID NO: 505416 - DNA, 75 bp, synthetic construct
  source 1..75: mol_type = other DNA
ggcagcgcggtcggcgatatccgcagcgctggtgaacaggtcgggaaaatgatcgtcagaaaacacgcattccct

SEQ ID NO: 505417 - DNA, 75 bp, synthetic construct
  source 1..75: mol_type = other DNA
tcggctactgaaacaggtcgataccacgctctggcagcaactacaaaaactgggacagtcgaaagaggagtatga

SEQ ID NO: 505418 - DNA, 75 bp, synthetic construct
  source 1..75: mol_type = other DNA
taatgaactcagcggccagagtgcttccgttccggtgtggtggtacttcacccatgcgctgggcaagggcattac

SEQ ID NO: 505419 - DNA, 75 bp, synthetic construct
  source 1..75: mol_type = other DNA
ctgttctggcttgccatgctggaaggcagcaacttccgcaagccgaccaacctgtttgttcatggctatgtgacg

SEQ ID NO: 505420 - DNA, 75 bp, synthetic construct
  source 1..75: mol_type = other DNA
actatcaagccccttttcactacaaagaagtaatgcctactatgacccaagtcgcgaagaaaattctggtgacgt

SEQ ID NO: 505421 - DNA, 75 bp, synthetic construct
  source 1..75: mol_type = other DNA
aatctggccgggatccagaactcgcaggatgatgtgattatcaatctggtgatgggtcgatgtttctggtgctgc

SEQ ID NO: 505422 - DNA, 75 bp, synthetic construct
  source 1..75: mol_type = other DNA
catcctctggcgccactggggctgctgatggcagccccagtgctggcgctgctgatgctgctgcggttgcccggc

SEQ ID NO: 505423 - DNA, 75 bp, synthetic construct
  source 1..75: mol_type = other DNA
ctggggaaagcaaatttcccgtactggcagtaaacctgtggtgttgtgggctctgggaggatatggcataagctt

SEQ ID NO: 505424 - DNA, 75 bp, synthetic construct
  source 1..75: mol_type = other DNA
tggccgacggcgcaggcgcgggctggctcgcttgcagtcacacacttggctatgggctttgcgcgttgttggtac

SEQ ID NO: 505425 - DNA, 75 bp, synthetic construct
  source 1..75: mol_type = other DNA
acaaacttgagattccaatcaagttgtcctttccagtcatcaacgttagcacttttgagctgggccgcgcagaga

SEQ ID NO: 505426 - DNA, 75 bp, synthetic construct
  source 1..75: mol_type = other DNA
agctgcgcttatcgcgcagttcgtggtactccgtccacagcgcctgactccagtggctctgctcctgagggcact

SEQ ID NO: 505427 - DNA, 75 bp, synthetic construct
  source 1..75: mol_type = other DNA
gcttcgatgccgtacagggcaaacaactggtgctctcgccggatgcgcgtgacggttcgttgaaggtgcatcagg

SEQ ID NO: 505428 - DNA, 75 bp, synthetic construct
  source 1..75: mol_type = other DNA
ctgattctgaacctcaagggcaaacgcggtgagctcgtacagctctatagccgtgtcggtttcgccctcaacctc

SEQ ID NO: 505429 - DNA, 75 bp, synthetic construct
  source 1..75: mol_type = other DNA
atgtcagctaaaaatgaacttgtcgaactgatgaaagcaaaaggtcttaaccagacgcaggtcgcccgcgctatt

SEQ ID NO: 505430 - DNA, 75 bp, synthetic construct
  source 1..75: mol_type = other DNA
aaccacgaagaaatagacgaccatgacctttctgttattgcggacttatcaaacaactttccagcaatgtggcgg

SEQ ID NO: 505431 - DNA, 75 bp, synthetic construct
  source 1..75: mol_type = other DNA
atgctactagagataccccacctacatccagatgataaagaaagatttaaaagaagcggaatgttatttctggcg

SEQ ID NO: 505432 - DNA, 75 bp, synthetic construct
  source 1..75: mol_type = other DNA
gtatcacgcaaagagtccgcgcgcagtgggctgcgtggctataacccgaatgatagctggaacccatatctggag

SEQ ID NO: 505433 - DNA, 75 bp, synthetic construct
  source 1..75: mol_type = other DNA
tcgtttgaatgagatcggggatattatgatttcaccggatcttgatgcctacgatgaatactcagaagatgagga

SEQ ID NO: 505434 - DNA, 75 bp, synthetic construct
  source 1..75: mol_type = other DNA
gcggaatattgcgggaaagttaaaactaccatcttacaaatttgtacgattgacgttttagaaattctcgaatct

SEQ ID NO: 505435 - DNA, 75 bp, synthetic construct
  source 1..75: mol_type = other DNA
cccgcgtctgctggtcgatgagaaagcgcctgccgggcagtatgaactcaacgaagctgcattcgaaaaaatggt

SEQ ID NO: 505436 - DNA, 75 bp, synthetic construct
  source 1..75: mol_type = other DNA
gggaaaaggaaaacagccgccgtattaaagcgaaatttgttgccaccggtatggctgccaaaggactggaggtgt

SEQ ID NO: 505437 - DNA, 75 bp, synthetic construct
  source 1..75: mol_type = other DNA
aaaggttcacggcgatattcgcgagaagattgatgcctgtgtgcgtgaactgcgtgggtcaggtcgtctgctgat

SEQ ID NO: 505438 - DNA, 75 bp, synthetic construct
  source 1..75: mol_type = other DNA
acgatgaatactcagaagatgaggaagtgaagcaggaagaaccggaagaagaacaagaagacgatgaatttgatg

SEQ ID NO: 505439 - DNA, 75 bp, synthetic construct
  source 1..75: mol_type = other DNA
gatttctgacgcaattgctcttggcgtagcacaaaagcccgatttgatattgctgggcggcgattacgtattatt

SEQ ID NO: 505440 - DNA, 75 bp, synthetic construct
  source 1..75: mol_type = other DNA
atgtttatgcagatgaaaatgagcaacgtgttgatgcacataaatgggagactacgttaagaagtgaacacaaat

SEQ ID NO: 505441 - DNA, 75 bp, synthetic construct
  source 1..75: mol_type = other DNA
attaatacccttccattgttagcaatgcctgaaggtaaggctgtagcaaaatttgttttgcatccggcattctta

SEQ ID NO: 505442 - DNA, 75 bp, synthetic construct
  source 1..75: mol_type = other DNA
taccgaacaggtgaaacgcttcacgctggtggcaaccgatggcaaaccgctgcctgcgttcaacggcggaagtca

SEQ ID NO: 505443 - DNA, 75 bp, synthetic construct
  source 1..75: mol_type = other DNA
ggtcagccaccttatgacgccggtttttatgaactgactgagcaatgcatagctgtcggaaagtatcacaggctt

SEQ ID NO: 505444 - DNA, 75 bp, synthetic construct
  source 1..75: mol_type = other DNA
atgaacaaccagaatactcaaccgcaaataatgaactatgacccgaatctgacgtcgtgcggacgcatggcaaaa

SEQ ID NO: 505445 - DNA, 75 bp, synthetic construct
  source 1..75: mol_type = other DNA
gaggtcgccttacatactcctgatacaagttcctctattgtcgatagttttgaagtttttgcttcgcaaaatggt

SEQ ID NO: 505446 - DNA, 75 bp, synthetic construct
  source 1..75: mol_type = other DNA
gatcaaccctatggatgcgcagaaacgcgggattgccaacggcgatatggtgcgagtgtttaaccgtcgcggcga

SEQ ID NO: 505447 - DNA, 75 bp, synthetic construct
  source 1..75: mol_type = other DNA
gaaaagccagttaaaacacaaatttccgtttttacctggactgatgcaattgttcgcgggcctgaaatgacggct

SEQ ID NO: 505448 - DNA, 75 bp, synthetic construct
  source 1..75: mol_type = other DNA
tgatatgccgctgaatttttcggcgttcagtgacgtactctctccccttgccaaatgtgcaccgacatttgcctg

SEQ ID NO: 505449 - DNA, 75 bp, synthetic construct
  source 1..75: mol_type = other DNA
gataaccagtacagcaatgcttattcactcctgagctcgccgcatgacacctctagttatcagattgccgttcgg

SEQ ID NO: 505450 - DNA, 75 bp, synthetic construct
  source 1..75: mol_type = other DNA
tgcaacacagcgacgtcgactggcagctacattactgctcgcgaaatccagaaagttgcgcatttcgtgatgagc

SEQ ID NO: 505451 - DNA, 75 bp, synthetic construct
  source 1..75: mol_type = other DNA
atgtttgaagtacaggtgagccaggttgaaccccttaccgaacaggtgaaacgcttcacgctggtggcaaccgat

SEQ ID NO: 505452 - DNA, 75 bp, synthetic construct
  source 1..75: mol_type = other DNA
cgacagaagcgttccagcgtgaaaccattcgtcaggcgctggcgcaaaatcatcacaactgggccgcctgtgcgc

SEQ ID NO: 505453 - DNA, 75 bp, synthetic construct
  source 1..75: mol_type = other DNA
gttggcattgcaggccaagctgctgcgggtgttgcagtatggcgatattcagcgcgttggcgatgaccgcagttt

SEQ ID NO: 505454 - DNA, 75 bp, synthetic construct
  source 1..75: mol_type = other DNA
ggcgcattgacgctcgacgggatgcagcccgatcagttcgatgttttcagtgacgaagagttacggctgattgcc

SEQ ID NO: 505455 - DNA, 75 bp, synthetic construct
  source 1..75: mol_type = other DNA
cgacagaagcgttccagcgtgaaactattcgccaggcactggcacaaaatcatcacaactgggctgcctgcgcgc

SEQ ID NO: 505456 - DNA, 75 bp, synthetic construct
  source 1..75: mol_type = other DNA
catcacaactgggctgcctgcgcgcgaatgctggaaactgacgtcgccaacctgcatcggttggcgaaacgtctg

SEQ ID NO: 505457 - DNA, 75 bp, synthetic construct
  source 1..75: mol_type = other DNA
tgtcgtttgcggctggggctctcccgcgtggtattaagtgccggagcgcgaaatttactgcaacactacagtttt

SEQ ID NO: 505458 - DNA, 75 bp, synthetic construct
  source 1..75: mol_type = other DNA
cggacgaacgtggtactccggaatacaacatctccctgggtgaacgtcgtgcgaacgccgttaagatgtatctgc

SEQ ID NO: 505459 - DNA, 75 bp, synthetic construct
  source 1..75: mol_type = other DNA
aaagaaaaacctgcagtacggggtcatgacgaagcggcgtatgccaaaaaccgtcgtgcggtactggtttactaa

SEQ ID NO: 505460 - DNA, 75 bp, synthetic construct
  source 1..75: mol_type = other DNA
aacatgtcttccgaagagcaggctcgtctgcaaatgcaacagctgcagcagaacaatatcgtttacttcgatctg

SEQ ID NO: 505461 - DNA, 75 bp, synthetic construct
  source 1..75: mol_type = other DNA
gcgggtcgatgtgcgcgtgctggcggcgactaaccgcgacttgcgcgaagaggtgctggcagggcgattccgcgc

SEQ ID NO: 505462 - DNA, 75 bp, synthetic construct
  source 1..75: mol_type = other DNA
cgacgaagagttacggctgattgctgcgctggcggcgggagcgttaagcaatgcgttgctgattgaacaactgga

SEQ ID NO: 505463 - DNA, 75 bp, synthetic construct
  source 1..75: mol_type = other DNA
agcccgatcagttcgatgttttcagcgacgaagagttacggctgattgccgcgctggcggcgggagcgttaagca

SEQ ID NO: 505464 - DNA, 75 bp, synthetic construct
  source 1..75: mol_type = other DNA
aggcatgacgcaattgaaaaaagagattgagattgtggcggcgtccgatctcaacgtcttaatcagcggtgagac

SEQ ID NO: 505465 - DNA, 75 bp, synthetic construct
  source 1..75: mol_type = other DNA
acgataaatcccttgagagggataactgtggtttcggcctgatcgcccacatagaaggcgaacctagccacaagg

SEQ ID NO: 505466 - DNA, 75 bp, synthetic construct
  source 1..75: mol_type = other DNA
tgaccattctggtggggaactccggtgaccgcagcaatgaccatattgctgccttgcgcgccgttcatcagcaat

SEQ ID NO: 505467 - DNA, 75 bp, synthetic construct
  source 1..75: mol_type = other DNA
taatcgggaaaacccgttctggcaggatatgacggagcaacatttgccggtgctgtttaccactgacgatctcaa

SEQ ID NO: 505468 - DNA, 75 bp, synthetic construct
  source 1..75: mol_type = other DNA
tctatcgaagacttagcgcagctcattttcgacctcaagcaggttaacccgaaagcgatgatctccgtgaagctg

SEQ ID NO: 505469 - DNA, 75 bp, synthetic construct
  source 1..75: mol_type = other DNA
tgtattctgggtaaaaccggcgttaacttcggtgcgggcatgaccggcggcttcgcttacgttctcgatgaaagc

SEQ ID NO: 505470 - DNA, 75 bp, synthetic construct
  source 1..75: mol_type = other DNA
tggtggatctgattggtcgcaccgacctgctgaaagaactggacggtttcaccgccaaacagcaaaaactggcgc

SEQ ID NO: 505471 - DNA, 75 bp, synthetic construct
  source 1..75: mol_type = other DNA
cgcccattacgatgcccttgaaacccgcttctggcagttttatccccggatgatggcgcaggcgtcgcgcaaggc

SEQ ID NO: 505472 - DNA, 75 bp, synthetic construct
  source 1..75: mol_type = other DNA
cgcccattatgacgccctcgaaacccgcttctggcggttttatccgtggatgatggcgcaggcgtcacgcaaagc

SEQ ID NO: 505473 - DNA, 75 bp, synthetic construct
  source 1..75: mol_type = other DNA
acgatttaaacgcccattatgccgccctcgaaacccgcttctggcagttttatccgcggatgatggcgcaggcgt

SEQ ID NO: 505474 - DNA, 75 bp, synthetic construct
  source 1..75: mol_type = other DNA
attgccttctttagccctaactatctacaaggctggcagcgggcgttggcgattgccgccggggaggtcgcatga

SEQ ID NO: 505475 - DNA, 75 bp, synthetic construct
  source 1..75: mol_type = other DNA
gccttacgcgccgttcatcagcaatttggcgatacggtaaaagtggtggtgccgatgggatatccgcctaataac

SEQ ID NO: 505476 - DNA, 75 bp, synthetic construct
  source 1..75: mol_type = other DNA
atttttcttccacggtcagttcaacaccacgctgtggctggcgttgctgagtggtggtatcaaacccagccagtt

SEQ ID NO: 505477 - DNA, 75 bp, synthetic construct
  source 1..75: mol_type = other DNA
gacaagtacgatatccgttatgacttcgctcaaatgctggatgcacacgcaaacttcctgcgtagcaacccgtct

SEQ ID NO: 505478 - DNA, 75 bp, synthetic construct
  source 1..75: mol_type = other DNA
ttaactcaaaaagaaatgatagagcactggattttgaaagaaaaagctgcgatgactgatgcgaatagaaggtaa

SEQ ID NO: 505479 - DNA, 75 bp, synthetic construct
  source 1..75: mol_type = other DNA
atgggtaacgtgttacaagccgggctggggcaaaatccggcgcgtcaggcactgttaaaaagcgggctggcagaa

SEQ ID NO: 505480 - DNA, 75 bp, synthetic construct
  source 1..75: mol_type = other DNA
gcaattcaggccggtcaggcacagagcatcgtagcgggtggaatggagaacatgagtttagcgccctatttactc

SEQ ID NO: 505481 - DNA, 75 bp, synthetic construct
  source 1..75: mol_type = other DNA
tacactggtttactcgacctgtaccttaaaccgggaagaaaacgaatccgtttgcctgtggcttaaagagactta

SEQ ID NO: 505482 - DNA, 75 bp, synthetic construct
  source 1..75: mol_type = other DNA
ctgatcggtaaagtccgattttctcgcctggggattaaacttgccgaaacgcacaacaaaggttatcgctggcag

SEQ ID NO: 505483 - DNA, 75 bp, synthetic construct
  source 1..75: mol_type = other DNA
atgtcgcagacagaaaatgcagtgacttcctcatctggcgcaaaacgagcatacagaaagggtaaacctttgagc

SEQ ID NO: 505484 - DNA, 75 bp, synthetic construct
  source 1..75: mol_type = other DNA
gcgcatcgagttctgaagtcactgctttactcggaagtaatccgttaagaatttaccctttcggcattcaggatg

SEQ ID NO: 505485 - DNA, 75 bp, synthetic construct
  source 1..75: mol_type = other DNA
agatgagatgagaaccaaaataaaatttgggaaactaattctgttcgcatccttggcaacgcagttacttttttt

SEQ ID NO: 505486 - DNA, 75 bp, synthetic construct
  source 1..75: mol_type = other DNA
catggtatccagcaaccgctgctgggccataaagtgaatctgttcaaggcactgtataaccgtatcgatatgaaa

SEQ ID NO: 505487 - DNA, 75 bp, synthetic construct
  source 1..75: mol_type = other DNA
tcgaattattcattaaaaatccgcttgataacgggcttaccagtggcgaacaaatggaactggcacgaattgcgc

SEQ ID NO: 505488 - DNA, 75 bp, synthetic construct
  source 1..75: mol_type = other DNA
atgaaaagagcatttggcaaaaaggaactgatggcagtggtgccggtatctatgagcaccattgatcgcatggag

SEQ ID NO: 505489 - DNA, 75 bp, synthetic construct
  source 1..75: mol_type = other DNA
atggaaccgtgatgaagttgagcgttggcttgatgaacgtcaggcagcaagcccggcagagttccagggtaaaaa

SEQ ID NO: 505490 - DNA, 75 bp, synthetic construct
  source 1..75: mol_type = other DNA
gtttagcccagtaaaagatcgcgaaaccgcacaaattcggcaggcggctgcgaatgttggcttacagtgggacaa

SEQ ID NO: 505491 - DNA, 75 bp, synthetic construct
  source 1..75: mol_type = other DNA
catgtttcaggttaattttgttagttcaacacaaaacgccacaatctcctgggattatttactaaaaataacgcc

SEQ ID NO: 505492 - DNA, 75 bp, synthetic construct
  source 1..75: mol_type = other DNA
tatttattggatggaattcgctgtaaataacggtaatattgatgcaaagagacaaacttcaagagctacaaaaaa

SEQ ID NO: 505493 - DNA, 75 bp, synthetic construct
  source 1..75: mol_type = other DNA
ccagacctgcgaggcgctggccaacaacgtgctgaagcgtgaactgaaagtggatacgacaaagggcggaaagac

SEQ ID NO: 505494 - DNA, 75 bp, synthetic construct
  source 1..75: mol_type = other DNA
atgaaatcaggaggttgaacgtagtttttagttgtgggactggaggtatagttgatctatcctctctggacttac

SEQ ID NO: 505495 - DNA, 75 bp, synthetic construct
  source 1..75: mol_type = other DNA
gggattatttactaaaaataacgcctgttttaataagcattagcgatatgtattctgaaaaaaatcaagtttgtc

SEQ ID NO: 505496 - DNA, 75 bp, synthetic construct
  source 1..75: mol_type = other DNA
atgtcccctgtttcatcaattggtaatgatattagtagtgatttagtccgtcgaaaaatgaatgaccttcctgaa

SEQ ID NO: 505497 - DNA, 75 bp, synthetic construct
  source 1..75: mol_type = other DNA
cagcgtgagcaactggacgtgttgttagcccgtcgtcgtgccggtgaacctgttgcccatttaaccggtgtgcgt

SEQ ID NO: 505498 - DNA, 75 bp, synthetic construct
  source 1..75: mol_type = other DNA
gcgtgaactggtgcgcgacgggaaactttttaccggtaacgccttacagcgcacaaaaaaagcgcactttttgac

SEQ ID NO: 505499 - DNA, 75 bp, synthetic construct
  source 1..75: mol_type = other DNA
ccaatcggtttagccaaacgtattggttcacggctgaaaaacagttacccacgggagctggtgcgcgacgggaaa

SEQ ID NO: 505500 - DNA, 75 bp, synthetic construct
  source 1..75: mol_type = other DNA
attggcccccgtgccagcgccgatacgctgttcggtctgatgatggcggacagctatggcttctactatcagggc

SEQ ID NO: 505501 - DNA, 75 bp, synthetic construct
  source 1..75: mol_type = other DNA
ccccggtcatcgcgtcgcctggcagcagttaccgcttgccacgccgctggtgatctgtgaggcgtccgccggagg

SEQ ID NO: 505502 - DNA, 75 bp, synthetic construct
  source 1..75: mol_type = other DNA
gcataaaccacagcagcatctgagcgatgtgcatctcactcctcaacctgatgacctctgtcgtgatgcacagtt

SEQ ID NO: 505503 - DNA, 75 bp, synthetic construct
  source 1..75: mol_type = other DNA
cggaggggaaaaagccgatctgtgttgaatcttgcccgctgcgggcgctggatttcggccctatcgacgagctgc

SEQ ID NO: 505504 - DNA, 75 bp, synthetic construct
  source 1..75: mol_type = other DNA
tgaacgtgactataaaaccggaattgttcctcagttttttctaagctgcctgtacggcagtgaacccgacattcc

SEQ ID NO: 505505 - DNA, 75 bp, synthetic construct
  source 1..75: mol_type = other DNA
ctgcctgtacggcagtgaactcaaatactacacgtttagcccgttgttaataaagcaaaaccatctcaatctcct

SEQ ID NO: 505506 - DNA, 75 bp, synthetic construct
  source 1..75: mol_type = other DNA
tgcaaaaggctcgtgttcttataaacagaggttattctgtttcacagacggctgctttatgtggttatgcaagtg

SEQ ID NO: 505507 - DNA, 75 bp, synthetic construct
  source 1..75: mol_type = other DNA
ggcagttaccattgctctgtggctgtttgcctctttcccagcccgtaaagtgctgccattttgtgtggcgcaatt

SEQ ID NO: 505508 - DNA, 75 bp, synthetic construct
  source 1..75: mol_type = other DNA
atgaatgattcactcaaggcgcaatgcgttgccgagtttttgggcaccggactgttcctcttttttggcattggt

SEQ ID NO: 505509 - DNA, 75 bp, synthetic construct
  source 1..75: mol_type = other DNA
gcgttaactccgcggcctacgctggcgattgtctctggcctgtatgagctttttcccgaaaatgagcaggtaaaa

SEQ ID NO: 505510 - DNA, 75 bp, synthetic construct
  source 1..75: mol_type = other DNA
aactcactcgcaggtcttgccaatgccatcgaccgggcggcattctcatctacaccgggcagccgtggcaccctc

SEQ ID NO: 505511 - DNA, 75 bp, synthetic construct
  source 1..75: mol_type = other DNA
aaggcagcgttctggtccattgcgcgttgggattatcgcgcagtgcgctggtggtggcggcatggctgttatgtt

SEQ ID NO: 505512 - DNA, 75 bp, synthetic construct
  source 1..75: mol_type = other DNA
ccacgatcggcaacgggtggcgagtttcaataatgatccgctgatcacacgggcgattgccgtcaatatcttgct

SEQ ID NO: 505513 - DNA, 75 bp, synthetic construct
  source 1..75: mol_type = other DNA
tggtcagtctggttatgttggccagtattatcgctactcataattggccgtgggtacggtgggcttggcgcgata

SEQ ID NO: 505514 - DNA, 75 bp, synthetic construct
  source 1..75: mol_type = other DNA
ggtatgttgattgactggatggtgcccgtcgaccgtcgttggaattatcagaaacctgatcaacgtcgaatcaaa

SEQ ID NO: 505515 - DNA, 75 bp, synthetic construct
  source 1..75: mol_type = other DNA
gtgatgagcaggggtactggacgcatcctgcactgtcaggcagcggctgtgagagcgctgcagactttcatgact

SEQ ID NO: 505516 - DNA, 75 bp, synthetic construct
  source 1..75: mol_type = other DNA
tctgcgccctggtgtccgccctgtcaggccagcgaagagatgttcagccagtttgcagaccggctcgatggagat

SEQ ID NO: 505517 - DNA, 75 bp, synthetic construct
  source 1..75: mol_type = other DNA
aacacaaattggccaataccccgctactcctaaatactttgattacaacgttttcctcaacggatattcaaaaca

SEQ ID NO: 505518 - DNA, 75 bp, synthetic construct
  source 1..75: mol_type = other DNA
atacacaaacgtattactgcacgtactcacacgaccagtccatcatcgccgttggtgttacactggctgctggaa

SEQ ID NO: 505519 - DNA, 75 bp, synthetic construct
  source 1..75: mol_type = other DNA
cgctatcaggcgattaaaggcggaatgcttttgttggttgtgactgaaacatgcggcagtttgccaatgattaca

SEQ ID NO: 505520 - DNA, 75 bp, synthetic construct
  source 1..75: mol_type = other DNA
cacatcagcgcagaagggcaggcataccgtgataacgtcgcccgaatcattaaaggctcaatgctggatatcggt

SEQ ID NO: 505521 - DNA, 75 bp, synthetic construct
  source 1..75: mol_type = other DNA
tatgcctgtgaaaatccgcattgagtgccacatgccggatcgccgtcgccgtgacctggataatctgcaaaaagc

SEQ ID NO: 505522 - DNA, 75 bp, synthetic construct
  source 1..75: mol_type = other DNA
tgtatggcttcgttttatggaccggcgggggtggtgtatgcgtcccgggttcgtgactgtatatctgtgccgcag

SEQ ID NO: 505523 - DNA, 75 bp, synthetic construct
  source 1..75: mol_type = other DNA
catgtggagtcctggctttcgccgtgggggaacgccagtgttgacgtcaaagtggataacgaagggcatttcacc

SEQ ID NO: 505524 - DNA, 75 bp, synthetic construct
  source 1..75: mol_type = other DNA
gatgatgactggttcctgggatctgtccatgacacccactacgggcctgcttgttactggttacgtcatatcaga

SEQ ID NO: 505525 - DNA, 75 bp, synthetic construct
  source 1..75: mol_type = other DNA
gttttgttcagcaggcggtggatcactggccaaatctgttggcatttcacttcacgttccattcgacagaaggaa

SEQ ID NO: 505526 - DNA, 75 bp, synthetic construct
  source 1..75: mol_type = other DNA
tgcatggcgtcgttctatggtccggctggtatgtcttatgcgtcccgttttcgcgatggtatatctgtcccgcaa

SEQ ID NO: 505527 - DNA, 75 bp, synthetic construct
  source 1..75: mol_type = other DNA
ccgcgctggcagaaaaatcagccgccactgccacccgttgaaacgaactggtgcgcgtttggcgttaccgggttg

SEQ ID NO: 505528 - DNA, 75 bp, synthetic construct
  source 1..75: mol_type = other DNA
tttcatcagtacagcaaatcacagaccgtcaacttgaaggggtcacactggataaggtattcattgacaaggcat

SEQ ID NO: 505529 - DNA, 75 bp, synthetic construct
  source 1..75: mol_type = other DNA
accgctttggtgtaccgctcaaaaaacaactttctgcgggcgaggttgccgaaagtcagtcgttacgtggtagtc

SEQ ID NO: 505530 - DNA, 75 bp, synthetic construct
  source 1..75: mol_type = other DNA
ctggattatatcgacgagctgaacgcactggatatcagcacggagcctgaaataagctggccggaaacaccacca

SEQ ID NO: 505531 - DNA, 75 bp, synthetic construct
  source 1..75: mol_type = other DNA
cgaaaaacgttaacggtgtttctggcgacaccgccgtgggatctaaaacctggcgaaacagtgccgctgaaatta

SEQ ID NO: 505532 - DNA, 75 bp, synthetic construct
  source 1..75: mol_type = other DNA
aatctggtcgtgcataacctcccggatggtcgctgtggtgtggctgccggtggtcgtcgcctgaaagcgctgcag

SEQ ID NO: 505533 - DNA, 75 bp, synthetic construct
  source 1..75: mol_type = other DNA
gaccatcgcggtgaaacggtctatagcaccaaaacaggagaatcaaaagaaatcaccgctccgggtgattaccct

SEQ ID NO: 505534 - DNA, 75 bp, synthetic construct
  source 1..75: mol_type = other DNA
gcacagcatagcgccgcagtagacgcagcagaagcacagcgtcagtcactgattgatgctgcaatggcttccatt

SEQ ID NO: 505535 - DNA, 75 bp, synthetic construct
  source 1..75: mol_type = other DNA
tttacaaccatgctcagtatctcgataagcgcagggagatgatgcaatggtgggcggactggcttgatgggatgg

SEQ ID NO: 505536 - DNA, 75 bp, synthetic construct
  source 1..75: mol_type = other DNA
agggctaaatataacccggcacctgaccttgctgacgccatgaagggataccgcaagaagaacttcccgtttctt

SEQ ID NO: 505537 - DNA, 75 bp, synthetic construct
  source 1..75: mol_type = other DNA
cagctaagccgaaagaaaaaccataccgccttctcgatggtaatggcctgtacctttatgtccctgtatccggga

SEQ ID NO: 505538 - DNA, 75 bp, synthetic construct
  source 1..75: mol_type = other DNA
ctatatcaaagacaacctggcaccggatctgagctaccgctggtcctgccgtatggcgatttgtggttcctgcgg

SEQ ID NO: 505539 - DNA, 75 bp, synthetic construct
  source 1..75: mol_type = other DNA
gccaacggcggatctgtgcgcggaatttacaaccatgctcagtatctcgacaagcgcagagaaatgatgcagtgg

SEQ ID NO: 505540 - DNA, 75 bp, synthetic construct
  source 1..75: mol_type = other DNA
tttacaaccatgcgcagtatctcgataaacgcagggaaatgatgcaatggtgggcggactggcttgatgagaagg

SEQ ID NO: 505541 - DNA, 75 bp, synthetic construct
  source 1..75: mol_type = other DNA
aaatccgggttgatctcttcagcagcgaaaacggcggctatgtcaaaagtgcatcgctcgataccgccctgctgg

SEQ ID NO: 505542 - DNA, 75 bp, synthetic construct
  source 1..75: mol_type = other DNA
agccgcagctttcactggctcccgtttcgctcggcaacatggatgccattgacgtggtacgcggtggtggtgcgg

SEQ ID NO: 505543 - DNA, 75 bp, synthetic construct
  source 1..75: mol_type = other DNA
cgtgaaaacgacgtatttgaacatgctggcgcgcgtgacgtgatccgccgtgaggatttcgccaaaaccggcgca

SEQ ID NO: 505544 - DNA, 75 bp, synthetic construct
  source 1..75: mol_type = other DNA
tagtgaacggcgctctactgtacgggctgagcgggacctgctgtctgaatggtatcaatccgcaagcatatctgc

SEQ ID NO: 505545 - DNA, 75 bp, synthetic construct
  source 1..75: mol_type = other DNA
cttggcgcatgtctggcaatgtaccatacggcaaagccggagaatagaaaggttgtcgccggactacttttgtcg

SEQ ID NO: 505546 - DNA, 75 bp, synthetic construct
  source 1..75: mol_type = other DNA
cggcagtggcaacgtgtgaacgtgaactgatgttagaacgtaaacgagaagcgcaagccgtcaatcctacaaagc

SEQ ID NO: 505547 - DNA, 75 bp, synthetic construct
  source 1..75: mol_type = other DNA
gcgggcagttgccgtccggctcaagcccttacgaccgcgatacgcgttccggcaccgaggcgcacgcctggtatc

SEQ ID NO: 505548 - DNA, 75 bp, synthetic construct
  source 1..75: mol_type = other DNA
attctggaattagacttgatataaattcagatagaaaagaactttttaaaagtcctgctttccgttacctcacct

SEQ ID NO: 505549 - DNA, 75 bp, synthetic construct
  source 1..75: mol_type = other DNA
gcaaggatgaatctggtcgtaaacaccagagttcgctggatggggtggaaaacgccattcagtttgaccttcgtg

SEQ ID NO: 505550 - DNA, 75 bp, synthetic construct
  source 1..75: mol_type = other DNA
acgtcttgaagccctgctgccggaaaactggcgaaaggatatgaccaccttctttacgctcgatggcgcaaccct

SEQ ID NO: 505551 - DNA, 75 bp, synthetic construct
  source 1..75: mol_type = other DNA
agtggataacgaagggcatttcaccggcagccgggggagctggtttgtaccgttgcaggataacgagcgttatct

SEQ ID NO: 505552 - DNA, 75 bp, synthetic construct
  source 1..75: mol_type = other DNA
aacgttggggagcatgggctgcgagtgataactctggtgttgattattcacctatagctgctgggtttaagggac

SEQ ID NO: 505553 - DNA, 75 bp, synthetic construct
  source 1..75: mol_type = other DNA
tatgcacgcgaccagtaaggaccgccttcactgggtgaaacacccgcaggacaccctgttacccggcggtaacta

SEQ ID NO: 505554 - DNA, 75 bp, synthetic construct
  source 1..75: mol_type = other DNA
aacagagtctcaggctctgaatcgtgatatcagccaactggaagccttgatcgaagaactgctgacctatgcccg

SEQ ID NO: 505555 - DNA, 75 bp, synthetic construct
  source 1..75: mol_type = other DNA
atgaaaaaactgtttatccagttttacctgttattgtttgtctgcttccttgtgatgtctctgctggttgggttg

SEQ ID NO: 505556 - DNA, 75 bp, synthetic construct
  source 1..75: mol_type = other DNA
gtccactctatagcactggcaatgggcggtacggttaattgtgacaccagcgaactgggtggtgcccgcttctcg

SEQ ID NO: 505557 - DNA, 75 bp, synthetic construct
  source 1..75: mol_type = other DNA
ggtggttgccgaacagttcagaaagtggaagtcatgataatataagtaaagccccgaaaatttttcggggcttta

SEQ ID NO: 505558 - DNA, 75 bp, synthetic construct
  source 1..75: mol_type = other DNA
ataaaacgccagtgacgcctgaacaaataattactccccgtcgttgggaggataaacagaacgatctctggacaa

SEQ ID NO: 505559 - DNA, 75 bp, synthetic construct
  source 1..75: mol_type = other DNA
ggcataatgcttttttccctgtggatatgattgataaatataaatcagagggatggaatttatcagacgctaagg

SEQ ID NO: 505560 - DNA, 75 bp, synthetic construct
  source 1..75: mol_type = other DNA
ggacgggtcagggccgtactcctaaagcgatcgctgctgctatcgaagctggtaaaacactggaagacttcgcgc

SEQ ID NO: 505561 - DNA, 75 bp, synthetic construct
  source 1..75: mol_type = other DNA
ggacgggtcagggccgcacgcctaaagcaatcgccgctgctatcgaaactggtaaaacgctggaagactttgcaa

SEQ ID NO: 505562 - DNA, 75 bp, synthetic construct
  source 1..75: mol_type = other DNA
aagcattccgtcagaagttgttggaagatggcatagacccggcagagttgctttcaactgttagcccatcttctt

SEQ ID NO: 505563 - DNA, 75 bp, synthetic construct
  source 1..75: mol_type = other DNA
tattcaggcggtgaatcccgataaaacagtacggctaaaaacactcatacccggaaattacgcggcgctggacat

SEQ ID NO: 505564 - DNA, 75 bp, synthetic construct
  source 1..75: mol_type = other DNA
acgacttggtatcgcatttaaccagatggcggacaatatcaacgccttgattgccagcaaaaaacagcttattga

SEQ ID NO: 505565 - DNA, 75 bp, synthetic construct
  source 1..75: mol_type = other DNA
ggacaggtcagggccgtactcctaaagcaattgctgctgctattaacgcaggtaaaaaactcgaagactttgcga

SEQ ID NO: 505566 - DNA, 75 bp, synthetic construct
  source 1..75: mol_type = other DNA
atcgagggagcgtatgaagtgctcggtgtctttgataaggtcactgataatatggaggcgatgaaagaaattcat

SEQ ID NO: 505567 - DNA, 75 bp, synthetic construct
  source 1..75: mol_type = other DNA
ttttctactgattcgcgcaattctctcagttactggtgcctccctgttaacgcttctgctcaggagggactatga

SEQ ID NO: 505568 - DNA, 75 bp, synthetic construct
  source 1..75: mol_type = other DNA
tcttctgagtaaaggaatgtctcgggaagacgttgcagaggtgacagctttatctcttgcagagattgataagct

SEQ ID NO: 505569 - DNA, 75 bp, synthetic construct
  source 1..75: mol_type = other DNA
tgcgatggttgttattcgcgcgtcgccgaggggaaacaacccatatgcgtcgaatcctgcccgctgcgtgcactt

SEQ ID NO: 505570 - DNA, 75 bp, synthetic construct
  source 1..75: mol_type = other DNA
aatatgtaagtgcctttggatatattgttggggtgatctctggatgtatagcaatatatcagactatgcaagtaa

SEQ ID NO: 505571 - DNA, 75 bp, synthetic construct
  source 1..75: mol_type = other DNA
accctgtattttctctgcccgcttttccacttattcacgcaattctctcagttactggtgcctccctgttaacgc

SEQ ID NO: 505572 - DNA, 75 bp, synthetic construct
  source 1..75: mol_type = other DNA
accctgcatttttgccgcacgcttcactcttgatgcgatggagatcctcaattactggaatctgccgatgaactg

SEQ ID NO: 505573 - DNA, 75 bp, synthetic construct
  source 1..75: mol_type = other DNA
tcttgattcaatagatacactgaaagaccagcttagcccacagcgagtggcgatcattaataatgctttgggtaa

SEQ ID NO: 505574 - DNA, 75 bp, synthetic construct
  source 1..75: mol_type = other DNA
cgttgttaatgctaatgacgcaataatggcaatactccgtcaggaaacaggggcagctatcgtacctgctgaaat

SEQ ID NO: 505575 - DNA, 75 bp, synthetic construct
  source 1..75: mol_type = other DNA
tgaaaggccagcttagcccacagcgagtggcgatcattaataatgctttgggtaatgggacgctggctaacttaa

SEQ ID NO: 505576 - DNA, 75 bp, synthetic construct
  source 1..75: mol_type = other DNA
gatgagttcatgaatgttaaggcggcatcccgtgatgatgtgctggctgcgcaccgtgtcccgccgcaactgatg

SEQ ID NO: 505577 - DNA, 75 bp, synthetic construct
  source 1..75: mol_type = other DNA
aggttatccgcttccattccggcgtgaatggctattacggcccggttatctggaagggggtggcttacaacagct

SEQ ID NO: 505578 - DNA, 75 bp, synthetic construct
  source 1..75: mol_type = other DNA
tgatgagcattggaaaacagcaaaaagtgctttagatagaattgtcaccgcgttcaattctaaacaagtcagccc

SEQ ID NO: 505579 - DNA, 75 bp, synthetic construct
  source 1..75: mol_type = other DNA
aacagtgacgagcaacatttatttggcagagctgcactgatggtcaggtatgaagatgaaaataaaacgccagtg

SEQ ID NO: 505580 - DNA, 75 bp, synthetic construct
  source 1..75: mol_type = other DNA
atgaagcagattgaagatctgacccgcgaagcgatgggcttttctgaaaaacgcggcgactcgctcaatgtcgtc

SEQ ID NO: 505581 - DNA, 75 bp, synthetic construct
  source 1..75: mol_type = other DNA
tggtggatcagggcggacatctgttaacccaatccaacaccagcgggcgtgaccttaatgacgtccagttgaaat

SEQ ID NO: 505582 - DNA, 75 bp, synthetic construct
  source 1..75: mol_type = other DNA
aactcgccgttcaatagcagtgacgaaagcggcggagaactgccgttctggcaacagcaagcgtttatcgatcag

SEQ ID NO: 505583 - DNA, 75 bp, synthetic construct
  source 1..75: mol_type = other DNA
taacgggaaagaagttcctgaaattatcctgcttaattcacatgatggttcatccagttatcagatgatcccagg

SEQ ID NO: 505584 - DNA, 75 bp, synthetic construct
  source 1..75: mol_type = other DNA
gtttggtatcagccagttcagcgaacaggtgaattatcagcgagcgctggaaggtgaactttcccgtaccatcga

SEQ ID NO: 505585 - DNA, 75 bp, synthetic construct
  source 1..75: mol_type = other DNA
caaaatgaacgtgggcgatgtgcagcgtctgtctgttgcggtggtggtgaatgacaaaacgctacccgatggcaa

SEQ ID NO: 505586 - DNA, 75 bp, synthetic construct
  source 1..75: mol_type = other DNA
ttgggcaaaatccgcgttccacataaaggtgatattgtcgggcaggttattgagggatcgtatgaagtgcccggt

SEQ ID NO: 505587 - DNA, 75 bp, synthetic construct
  source 1..75: mol_type = other DNA
aactgcaacaaaaaatcacctcgaaacattcgactaacggccttgaggaattccgtaaagcacgggcgctgaaaa

SEQ ID NO: 505588 - DNA, 75 bp, synthetic construct
  source 1..75: mol_type = other DNA
cgatcaactggagtcaatgcaacagcaactgcaacaaaaaatcacctcgaaacattcgactaacggccttgagga

SEQ ID NO: 505589 - DNA, 75 bp, synthetic construct
  source 1..75: mol_type = other DNA
ctgctggctgccggacgctggttgctggtgctactggtggcgtggctgttgtggcgtaaagcggtacgcccgcag

SEQ ID NO: 505590 - DNA, 75 bp, synthetic construct
  source 1..75: mol_type = other DNA
atctccatgggcgacaactgggacatgatgtacgtgggtatgtaccaggatatcaactgggataacgacaacggc

SEQ ID NO: 505591 - DNA, 75 bp, synthetic construct
  source 1..75: mol_type = other DNA
agatgaaaataaaacgccagtgacgcctgaacaaataattactccccgtcgttgggaggataaacagaacgatct

SEQ ID NO: 505592 - DNA, 75 bp, synthetic construct
  source 1..75: mol_type = other DNA
cgatattgtcgggcaggttatcgagggagcatatgaagtgctcgatgtctttgataaggtcactgataatatgga

SEQ ID NO: 505593 - DNA, 75 bp, synthetic construct
  source 1..75: mol_type = other DNA
atcctgcttaattcacatgatggttcatccagttatcagatgatcccaggaatttttcgttttgtctgcacaaat

SEQ ID NO: 505594 - DNA, 75 bp, synthetic construct
  source 1..75: mol_type = other DNA
aaggtttccagccattctttgcctgtcagagtcgggttcgtgatttgggacgccgcgaatacagtaaacatatgt

SEQ ID NO: 505595 - DNA, 75 bp, synthetic construct
  source 1..75: mol_type = other DNA
agtgacgaccaacatttatttggcagagctgcagtgatggccaggtaggaagatgaaaataaaacgccagtgacg

SEQ ID NO: 505596 - DNA, 75 bp, synthetic construct
  source 1..75: mol_type = other DNA
gcctggtgtgtgggaataattttggcgaaatccgcgttccacataaaggtgatattgtcgggcaggttattgagg

SEQ ID NO: 505597 - DNA, 75 bp, synthetic construct
  source 1..75: mol_type = other DNA
taattttggcgaaatccgcgttccacataaaggtgatattgtcgggcaggttattgagggagcgtatgaagtgct

SEQ ID NO: 505598 - DNA, 75 bp, synthetic construct
  source 1..75: mol_type = other DNA
ggcctggtgtgtgggaataattttggcgaaatccgcgttccacataaaggtgatattgtcgggcaggttattgag

SEQ ID NO: 505599 - DNA, 75 bp, synthetic construct
  source 1..75: mol_type = other DNA
gcaccggggaaatgtggtggacagagtgattgaaggggcttacgaggtggtgggcgtgtttgaccggattgagga

SEQ ID NO: 505600 - DNA, 75 bp, synthetic construct
  source 1..75: mol_type = other DNA
gcaccggggaaatgtggtggatacagttattgaaggggcttacgaggtggtgggcgtgtttgaccggattgagga

SEQ ID NO: 505601 - DNA, 75 bp, synthetic construct
  source 1..75: mol_type = other DNA
gcaccggggaaatgtggtggatatagtcattgaaggggcttacgaggtggtgggcgtgtttgaccggattgagga

SEQ ID NO: 505602 - DNA, 75 bp, synthetic construct
  source 1..75: mol_type = other DNA
agtgacgaacaacatttatttggcagagctgcactgatggacaggtaggaagatgaaaataaaacgccagtgacg

SEQ ID NO: 505603 - DNA, 75 bp, synthetic construct
  source 1..75: mol_type = other DNA
gactacaaagatttgacgcctgaagtcagcttccgccgcatttatgaatatgctggcggtgactggcaggaggat

SEQ ID NO: 505604 - DNA, 75 bp, synthetic construct
  source 1..75: mol_type = other DNA
gcaccggggaaatgtggtggagaaagtaattgaaggggcttacgaggtggtgggcgtgtttgaccggattgagga

SEQ ID NO: 505605 - DNA, 75 bp, synthetic construct
  source 1..75: mol_type = other DNA
cttcttcggcgcactgaaagcgctgttcagcggtggtgaagaaaccaaaccgaccgagcaaccagcaccgaaagc

SEQ ID NO: 505606 - DNA, 75 bp, synthetic construct
  source 1..75: mol_type = other DNA
cattcaacgcaaatgcaaacgatgtaataaatataaactgcgatgaagtagcaaataacgttgccgaataccata

SEQ ID NO: 505607 - DNA, 75 bp, synthetic construct
  source 1..75: mol_type = other DNA
aacgttactctaaagagttcaaagccgaagctgtcagaacggttcttgaaaatcaactttcgatcagtgaaggcg

SEQ ID NO: 505608 - DNA, 75 bp, synthetic construct
  source 1..75: mol_type = other DNA
aaggcagcggaggatatcgggcagcttgtcaccgttgcacgcgaagaactccagcgtcgcaagacccaagaatca

SEQ ID NO: 505609 - DNA, 75 bp, synthetic construct
  source 1..75: mol_type = other DNA
agcgcaggttgaaaaaatcggagtcaaagccgccgaggagatcgggcaactcgtcaccgtcgcgcgtgaagaact

SEQ ID NO: 505610 - DNA, 75 bp, synthetic construct
  source 1..75: mol_type = other DNA
atgaaaaatgaaggtatagccaaggctgtagatattgcgggaagccagattgctctggctaggcgttgtggtcgc

SEQ ID NO: 505611 - DNA, 75 bp, synthetic construct
  source 1..75: mol_type = other DNA
tctgcaacgacaaatcctctttaccactgaagatatcgatcgcccgaaatcgcaggtcagccaacagcgactgac

SEQ ID NO: 505612 - DNA, 75 bp, synthetic construct
  source 1..75: mol_type = other DNA
gctgctgaaaataaaaatacttatggtgcgctggcttctttggaacttgcgcagcaatttgttgacaaaaatgaa

SEQ ID NO: 505613 - DNA, 75 bp, synthetic construct
  source 1..75: mol_type = other DNA
tgtacccgctgttgtcatgcattacggtgtcttcattcaaaacgtatttgattttctgattgttgcctttgccat

SEQ ID NO: 505614 - DNA, 75 bp, synthetic construct
  source 1..75: mol_type = other DNA
tcgtattgaacaacatcttagtgaaaccaaaaaccagattgttcaactggaaactattcttgatcgtaatgacat

SEQ ID NO: 505615 - DNA, 75 bp, synthetic construct
  source 1..75: mol_type = other DNA
atatcttcgactgtttgacggtaaattaaaccaatggcgcaacctggcgttgcgccgcgccagcagttgcccggt

SEQ ID NO: 505616 - DNA, 75 bp, synthetic construct
  source 1..75: mol_type = other DNA
cgcaaaccaaacagatgccttctgcaccgcaggggctggaacagctggcacggcatgttgagcgcctggcggatt

SEQ ID NO: 505617 - DNA, 75 bp, synthetic construct
  source 1..75: mol_type = other DNA
taaggtcgaacaaatcggcatcaaggtagcggaggaaatcgggcaactcgtagccgtcgctcgtgaagaactcca

SEQ ID NO: 505618 - DNA, 75 bp, synthetic construct
  source 1..75: mol_type = other DNA
tgcggataaattaaatctcctgtctgatgtggtcaatttacttgttaaacgcgctgtatttcacaagcaaatttc

SEQ ID NO: 505619 - DNA, 75 bp, synthetic construct
  source 1..75: mol_type = other DNA
cggtggtactgagcgcagcattttccggccctgcattggccgaaggcatcaatagtttttcccaggcgaaaacag

SEQ ID NO: 505620 - DNA, 75 bp, synthetic construct
  source 1..75: mol_type = other DNA
ttctgcttgatgttcggttttttaagacaaatgtttaataactggttgcaatcagttttttcttcaatacttaca

SEQ ID NO: 505621 - DNA, 75 bp, synthetic construct
  source 1..75: mol_type = other DNA
gaccgaagcactggaaagagcaaaacgacagaccggaacacgggggaatcagccaccagcgggaggtgatgaccc

SEQ ID NO: 505622 - DNA, 75 bp, synthetic construct
  source 1..75: mol_type = other DNA
atgacgctggcgcgtatggcggtatctttgccatgcagtcaggcacaggacggacaggcgacgttatggctatca

SEQ ID NO: 505623 - DNA, 75 bp, synthetic construct
  source 1..75: mol_type = other DNA
cccttccgtgcagccaggcagatgacggaacggctacgttatggctatcggtgatggcatttggtaagcaggccg

SEQ ID NO: 505624 - DNA, 75 bp, synthetic construct
  source 1..75: mol_type = other DNA
actggcagcagagccggtggcaaagattatagctcattacccattaggagttgacgtaggcaaacaaaaattcgt

SEQ ID NO: 505625 - DNA, 75 bp, synthetic construct
  source 1..75: mol_type = other DNA
tttacgatgctgacccggtatttaagaaagaccttgatgatgcactgaagtcagcaggactcaccgggttaacgg

SEQ ID NO: 505626 - DNA, 75 bp, synthetic construct
  source 1..75: mol_type = other DNA
atcaggtaatgctgatatcgtcgctttgtttgatttccgccggagtttacgccgccggtgttgcaaaaacggcag

SEQ ID NO: 505627 - DNA, 75 bp, synthetic construct
  source 1..75: mol_type = other DNA
tgctgacaatcaagcagtggcgcgaaacatacggacttggtagcaacgttgtactgccagcagaagaagcggaag

SEQ ID NO: 505628 - DNA, 75 bp, synthetic construct
  source 1..75: mol_type = other DNA
agttggacaactatcaaaactatttgggctaaagggtgtgagcacttttcaatagtagcaccgcagcaagatggg

SEQ ID NO: 505629 - DNA, 75 bp, synthetic construct
  source 1..75: mol_type = other DNA
tttcgggaaaataaagattcgtcaaccaataattttcggaaaatcccggaagcgtcaaccagctctccggtaact

SEQ ID NO: 505630 - DNA, 75 bp, synthetic construct
  source 1..75: mol_type = other DNA
ggatttggcagtgggtgtcattatcggtgcggccttcggtaagattgtctcttcactggttgcagatatcatcat

SEQ ID NO: 505631 - DNA, 75 bp, synthetic construct
  source 1..75: mol_type = other DNA
gctggattatctggaagcactggaactggtggatacgtccagtgcgccagatattgaatggcctactcctccggc

SEQ ID NO: 505632 - DNA, 75 bp, synthetic construct
  source 1..75: mol_type = other DNA
atccgtatcgctggagaaaatggttttcctgcatggtctgaaattccaccaccaacatatgaggaacagattgct

SEQ ID NO: 505633 - DNA, 75 bp, synthetic construct
  source 1..75: mol_type = other DNA
gctcttcatagttctcaacgagctgagcggatatttgcaaaccaaaagttcataacgctaagagcggcaaagctt

SEQ ID NO: 505634 - DNA, 75 bp, synthetic construct
  source 1..75: mol_type = other DNA
cggcccgatatgtattactcgaaaggtgcgctatgtctcatggcgaccgctgaagggttgaccccgatggacttc

SEQ ID NO: 505635 - DNA, 75 bp, synthetic construct
  source 1..75: mol_type = other DNA
gctggattatctggaagcactggagctggtggatacatccagtgcgccagatattgaatggcctactcctccggc

SEQ ID NO: 505636 - DNA, 75 bp, synthetic construct
  source 1..75: mol_type = other DNA
gctggattatctggaagcactggatctggtggatacttccagtgcgccagatattgaatggcctactcctccggc

SEQ ID NO: 505637 - DNA, 75 bp, synthetic construct
  source 1..75: mol_type = other DNA
gtgtcgcaatcgcgctgattatggcagcattatttgcaactatattatttaccattgtgtctgtatttatctggc

SEQ ID NO: 505638 - DNA, 75 bp, synthetic construct
  source 1..75: mol_type = other DNA
ggaagggattagaggaaaactaaaacacaaactgtggtggtacggcttttttcctggaaaatcggtgtttagtag

SEQ ID NO: 505639 - DNA, 75 bp, synthetic construct
  source 1..75: mol_type = other DNA
gattaaacgcacctttaatccgggcttcaaaatcgctctgcaccagaaagatctcaacctggcactgcaaagtgc

SEQ ID NO: 505640 - DNA, 75 bp, synthetic construct
  source 1..75: mol_type = other DNA
tcaatggctggttaaaagttgccgttctcaaaaatggtgatttatctctgtctgacctcaaaagcgataaagaat

SEQ ID NO: 505641 - DNA, 75 bp, synthetic construct
  source 1..75: mol_type = other DNA
cctgactgattcatcattcctttcatattgccagtcacagctgcttgcatcgaaccgtacttgtgttgatgcgtc

SEQ ID NO: 505642 - DNA, 75 bp, synthetic construct
  source 1..75: mol_type = other DNA
gacattattttggatgatgacgttgaaggttatggttcttctttcctcgttgaaggttttgccggtatagtaaaa

SEQ ID NO: 505643 - DNA, 75 bp, synthetic construct
  source 1..75: mol_type = other DNA
gtacgccgatgatgcgcgcaatggtgatggagttcccggacgatccggcctgtgattatcttgaccgtcaataca

SEQ ID NO: 505644 - DNA, 75 bp, synthetic construct
  source 1..75: mol_type = other DNA
agatattctcctgtatgtcttacagagttttcaaatggtagattcacacaccgtcagactataaacataggcaga

SEQ ID NO: 505645 - DNA, 75 bp, synthetic construct
  source 1..75: mol_type = other DNA
cgcatgtcaaagtttatgtaaaaggcaatctttacgatctttggactaacaccgaaaatcttcagtccgagaagg

SEQ ID NO: 505646 - DNA, 75 bp, synthetic construct
  source 1..75: mol_type = other DNA
aatcagattgttcaactggaaactattcttgatcgtaatgacatttcacgttcagtcattaaagattccatgagt

SEQ ID NO: 505647 - DNA, 75 bp, synthetic construct
  source 1..75: mol_type = other DNA
cggcggcgaagggcagtacgggcagtgtgccatgaaggtggatttcaaagaaaaagtggctgaaccacccgctca

SEQ ID NO: 505648 - DNA, 75 bp, synthetic construct
  source 1..75: mol_type = other DNA
ccgttgtgactatctccgcagaaggcgaagacgagcagaaagcggttgaacatctggttaaactgatggcggaac

SEQ ID NO: 505649 - DNA, 75 bp, synthetic construct
  source 1..75: mol_type = other DNA
ccaacttatttatataatagaatggagtatcttacgagaattaaaaattatggcagtagagacttttccgctcaa

SEQ ID NO: 505650 - DNA, 75 bp, synthetic construct
  source 1..75: mol_type = other DNA
cctactggcgctgggcaacaacgatcaacgtcccgattacgcgtggcacgaaggcacggcattccacctctttaa

SEQ ID NO: 505651 - DNA, 75 bp, synthetic construct
  source 1..75: mol_type = other DNA
tggcgatttatgactttactaatccggatgcctgcaaatggtacgccgataaactgaaaggtctgatcgcgatgg

SEQ ID NO: 505652 - DNA, 75 bp, synthetic construct
  source 1..75: mol_type = other DNA
ccagccatagccgtttacacggtagcaaatcttatcgtgtgccgtgggcctacgatgatgagtcctgtgatgtgg

SEQ ID NO: 505653 - DNA, 75 bp, synthetic construct
  source 1..75: mol_type = other DNA
attcagcatattccgcaaacaactgagaaattcttaattcgctctgaaactgatggcgtagaagcgaagaaataa

SEQ ID NO: 505654 - DNA, 75 bp, synthetic construct
  source 1..75: mol_type = other DNA
taccgctccggcgcacgtttacaaacgctggtgcgcgtttggtttgctctccagccatagccgtttacatggcag

SEQ ID NO: 505655 - DNA, 75 bp, synthetic construct
  source 1..75: mol_type = other DNA
atgaaaatcagcgatggaaactggcttattcaacctggtcttaatttgattcaccccatccaggtttttgatgtt

SEQ ID NO: 505656 - DNA, 75 bp, synthetic construct
  source 1..75: mol_type = other DNA
agacatggggcgtgcgttatcacgaggacagcaacggacgttttctggtgttgcccgaggggatgaaagccgaaa

SEQ ID NO: 505657 - DNA, 75 bp, synthetic construct
  source 1..75: mol_type = other DNA
cctggaagaaatcaggatacaggaagaaacattgcagaaactgaacgcgaagacatggggcgtggagtttgtgca

SEQ ID NO: 505658 - DNA, 75 bp, synthetic construct
  source 1..75: mol_type = other DNA
ggaaggggtgaaagaggcgatgatgcagcacaggaaggacgtgttaaagctggcagggaatacgggcgtgatgtt

SEQ ID NO: 505659 - DNA, 75 bp, synthetic construct
  source 1..75: mol_type = other DNA
cagaaaacacaccgaaccttcccgggagctaagggctttaacgccatgttagcagttagcagcgtggaagcggca

SEQ ID NO: 505660 - DNA, 75 bp, synthetic construct
  source 1..75: mol_type = other DNA
aacttacgttttcacggcctgatgcaggcattttcccgcaccaaccgcatttatgacgccactaaaaccttcggt

SEQ ID NO: 505661 - DNA, 75 bp, synthetic construct
  source 1..75: mol_type = other DNA
aactgatgagaaaaaactcagcgcggctgaaaaccagcaggcctttctgcacccaatgcgtattctggaaataac

SEQ ID NO: 505662 - DNA, 75 bp, synthetic construct
  source 1..75: mol_type = other DNA
gccagcgtatttggccgtgaattgcattcgtatgtgattaccgatgcgattcgtgacgaaaaagtgctcaaattc

SEQ ID NO: 505663 - DNA, 75 bp, synthetic construct
  source 1..75: mol_type = other DNA
cctcgattatcagaccatgaaagagtatcagcgtttctcaccggacagcgtcaacggctctgacagcaccgcggg

SEQ ID NO: 505664 - DNA, 75 bp, synthetic construct
  source 1..75: mol_type = other DNA
aaagcgggataaaaacagtttcgatttcaccatgaactgggcgcggtctgacaatacactgattaaagacctgag

SEQ ID NO: 505665 - DNA, 75 bp, synthetic construct
  source 1..75: mol_type = other DNA
tatggaaaatcaacagctcctataaagcgaaaaactggtctaaccccgaaagcggtggctttatctggcacacta

SEQ ID NO: 505666 - DNA, 75 bp, synthetic construct
  source 1..75: mol_type = other DNA
gcaatatattctgaataacttccgccagaagacccaccatactttcccaagttccaaaggctttaatgccatgct

SEQ ID NO: 505667 - DNA, 75 bp, synthetic construct
  source 1..75: mol_type = other DNA
gttccaaaggttttaatgccatgctggcagtaagcagcgtggatgccgcgaaagcctattacgcgacgtttaaac

SEQ ID NO: 505668 - DNA, 75 bp, synthetic construct
  source 1..75: mol_type = other DNA
cgatgctggccaacgttcgggaacagcttcagagcctcaatggtgtggtgtttaatgacagcgagtggcggcgtt

SEQ ID NO: 505669 - DNA, 75 bp, synthetic construct
  source 1..75: mol_type = other DNA
gctcagcgctctggtaaatctgaactggaagcattcgaagtagctcttgaaaacgtgcgcccgactgtagaagtt

SEQ ID NO: 505670 - DNA, 75 bp, synthetic construct
  source 1..75: mol_type = other DNA
caagttgacggcacaagtgactacatcaaggatggggaatggcctattgataatgggattattgaggtctacgcc

SEQ ID NO: 505671 - DNA, 75 bp, synthetic construct
  source 1..75: mol_type = other DNA
ttgcgaatggacagcgaacggcgcatgaaaacgctgggtgaggcggtgaaaaatacgcttctcacgcccaatgag

SEQ ID NO: 505672 - DNA, 75 bp, synthetic construct
  source 1..75: mol_type = other DNA
ggttacaagaggaagccgctaataaatctgctacctataaaccactgcgtgttgcgacaatcttctcctttgccg

SEQ ID NO: 505673 - DNA, 75 bp, synthetic construct
  source 1..75: mol_type = other DNA
tcgtgatgaaaaagtgctcaaattcaaggtggactacaacgatgtgcggccacagtttaagtctttagagacaga

SEQ ID NO: 505674 - DNA, 75 bp, synthetic construct
  source 1..75: mol_type = other DNA
agcagaaagcgacctgcctgtatacaatcagcaagtggtgtttatatttgatgaatgtcaccgcagccagtttgg

SEQ ID NO: 505675 - DNA, 75 bp, synthetic construct
  source 1..75: mol_type = other DNA
ctgaatccaataactttatcgtccttgataagtacactaaagcgcaggaaactggtgagagttaccagagcgaat

SEQ ID NO: 505676 - DNA, 75 bp, synthetic construct
  source 1..75: mol_type = other DNA
ctttaccgctacctttttccagaaacatactctgcttaatgtcttagtgaactacagcgtgttcgatattagcca

SEQ ID NO: 505677 - DNA, 75 bp, synthetic construct
  source 1..75: mol_type = other DNA
tcacggagcagtatctggataacccgagcgatggcattctggataagacccgtaaaatccatatcgactatatct

SEQ ID NO: 505678 - DNA, 75 bp, synthetic construct
  source 1..75: mol_type = other DNA
atgactcatcagacacacaccattgctgaatccaataactttattgtccttgataagtacatcaaagctgagcca

SEQ ID NO: 505679 - DNA, 75 bp, synthetic construct
  source 1..75: mol_type = other DNA
ttattcagcaaactaaccttgatgacatgccggacaaggccagtatcattgatgcattctttacctatgctcagc

SEQ ID NO: 505680 - DNA, 75 bp, synthetic construct
  source 1..75: mol_type = other DNA
tcaacgagtgaaaaatcaggatattgaccttctcatcgtggtgggaatgttcttaaccggctttgatgctccgac

SEQ ID NO: 505681 - DNA, 75 bp, synthetic construct
  source 1..75: mol_type = other DNA
gaagcctttaaccagatacaccgctacagcaaagagagttttaacagcgaaaactcgttattcaagttccttcag

SEQ ID NO: 505682 - DNA, 75 bp, synthetic construct
  source 1..75: mol_type = other DNA
gcgccagccatgaagaagattacacgcgccagacgcgcggcatgtatctggcggggctgtatcatcgggcgggaa

SEQ ID NO: 505683 - DNA, 75 bp, synthetic construct
  source 1..75: mol_type = other DNA
caacttaagcgcgcgtgtcagcaaaggtgagttctggtcactggattttctgcgcaacggcgaacgtattaccgg

SEQ ID NO: 505684 - DNA, 75 bp, synthetic construct
  source 1..75: mol_type = other DNA
ttttgaagtgggatcggagaaagtctccaaagtacagttcagcgttgagagtgaatatctcgaatactttgttat

SEQ ID NO: 505685 - DNA, 75 bp, synthetic construct
  source 1..75: mol_type = other DNA
gtcttggcatttggcaggcaggccgaagcgctggcaaagcaccgcaagggggaactcctgagcgtggctggtaac

SEQ ID NO: 505686 - DNA, 75 bp, synthetic construct
  source 1..75: mol_type = other DNA
tactgatgcactgaacagggcaaagcaacagacaggccagcacgatgatccgtacggggacgggataccgtttta

SEQ ID NO: 505687 - DNA, 75 bp, synthetic construct
  source 1..75: mol_type = other DNA
gctactgacgcactgaacagggcaaaacaacagtcagggaatgatgaaccgtacggcgataatataccgttttaa

SEQ ID NO: 505688 - DNA, 75 bp, synthetic construct
  source 1..75: mol_type = other DNA
tcaatattttgcaggacgtgaaggtcacaatcgaaaacacagaacgttacgctgagtttaaaagtggcaacttaa

SEQ ID NO: 505689 - DNA, 75 bp, synthetic construct
  source 1..75: mol_type = other DNA
aatcaatggcggaaagcctgcgcggtggtttgtctattggcctttcaggttttggtttctggagccacgatatcg

SEQ ID NO: 505690 - DNA, 75 bp, synthetic construct
  source 1..75: mol_type = other DNA
ggcggctggtggacgacccgcaggtaaaacagaccagcaagggtacaccgatgacgctggttcgtatggcggtat

SEQ ID NO: 505691 - DNA, 75 bp, synthetic construct
  source 1..75: mol_type = other DNA
aacgatgaactcgacggtagtcgctggcataaacagcagcacggcttcctgagtctgcccgtttatgtgcgtgat

SEQ ID NO: 505692 - DNA, 75 bp, synthetic construct
  source 1..75: mol_type = other DNA
tctgcaagacgggcatgaagccatctgtgaagtgcccgctgccgatggttccgttcttttcaccctgaaagcggc

SEQ ID NO: 505693 - DNA, 75 bp, synthetic construct
  source 1..75: mol_type = other DNA
aactgaaaggtctggtcgcgatgggcgttgattgctttaagaccgactttggcgaacgtatcccaaccgatgttc

SEQ ID NO: 505694 - DNA, 75 bp, synthetic construct
  source 1..75: mol_type = other DNA
gcaggttattgcagacagcgtaatcagtgcgcgaacggcgcgaccgggcggcaaaaaaggtcaacagggccaggc

SEQ ID NO: 505695 - DNA, 75 bp, synthetic construct
  source 1..75: mol_type = other DNA
atgctcaataacaaagtgctacctgtaaccatttacaacgtagtaccattcaataaaaaattctggaatttaatc

SEQ ID NO: 505696 - DNA, 75 bp, synthetic construct
  source 1..75: mol_type = other DNA
atcgacgatttcagtggcttgatcattaaagctcagggccatgttgtggcgggtcaaacaccgctgtatgaaatc

SEQ ID NO: 505697 - DNA, 75 bp, synthetic construct
  source 1..75: mol_type = other DNA
attagcccggtggtttgcagcaatatcgacgatttcagtggcttgatcattaaagctcagggccatgttgtggcg

SEQ ID NO: 505698 - DNA, 75 bp, synthetic construct
  source 1..75: mol_type = other DNA
ccccagtgatactcttatcgataaaacccgtaagattcatgataactacatttgtgatttcacttttgatgatgg

SEQ ID NO: 505699 - DNA, 75 bp, synthetic construct
  source 1..75: mol_type = other DNA
atgctttcttacctcctgaaagtatatttacactgactcacacaggcatcatgctcaataacaaagtgctacctg

SEQ ID NO: 505700 - DNA, 75 bp, synthetic construct
  source 1..75: mol_type = other DNA
attcagataacgtattgaatgaatgctttaataaccattgcattctgcaaatatgcccttacggactaaaacaac

SEQ ID NO: 505701 - DNA, 75 bp, synthetic construct
  source 1..75: mol_type = other DNA
atgcaggtaagccagtggacaggccagaacggggaaacgcggcagggctggcaggttatcgcagacagtgtaatc

SEQ ID NO: 505702 - DNA, 75 bp, synthetic construct
  source 1..75: mol_type = other DNA
gcaaaaaaggccagcagggccaggctactgacgcactgaacagggcaaaacaacagacaggccagcacgatgacc

SEQ ID NO: 505703 - DNA, 75 bp, synthetic construct
  source 1..75: mol_type = other DNA
ggcggctggtggctgacccgcagttaaagaccaccagcaagggcacacaaatggcgatggcgagtatggcggtcc

SEQ ID NO: 505704 - DNA, 75 bp, synthetic construct
  source 1..75: mol_type = other DNA
gtgaaaatcttcaacaccaaccacgcgttctgcctggaaaccgaaaaaggcgcggagatcgtcgtccatatgggt

SEQ ID NO: 505705 - DNA, 75 bp, synthetic construct
  source 1..75: mol_type = other DNA
gcaaaaaaggccagcaggggcaggctactgatgcactgaacagggcaaaacaacaggcgggtaacgatgatccgt

SEQ ID NO: 505706 - DNA, 75 bp, synthetic construct
  source 1..75: mol_type = other DNA
cgctgccatgcagccaggcacaggacggacaggcgacgttatggctgtcggtcatcgcatttggcaagcaggccg

SEQ ID NO: 505707 - DNA, 75 bp, synthetic construct
  source 1..75: mol_type = other DNA
gccgtggatcctggcatatggcccgatatatcatttgaacctgttcttccggaccttccagaagctggaaaaaat

SEQ ID NO: 505708 - DNA, 75 bp, synthetic construct
  source 1..75: mol_type = other DNA
cggcgtcgttgccgcacgtggatgccgtggaggatacgccgccagagtcagaacaggataataccggtgctaaac

SEQ ID NO: 505709 - DNA, 75 bp, synthetic construct
  source 1..75: mol_type = other DNA
aagagacgctcgctaccattattgccgggaaactggcccgcctggataacgtgctgcgcagccgctttggcgcgg

SEQ ID NO: 505710 - DNA, 75 bp, synthetic construct
  source 1..75: mol_type = other DNA
ggcatcagcagcaggcgctggtccgggagattatcgcgctgcgtcagcagttgctgggtgtgacaaacggtacag

SEQ ID NO: 505711 - DNA, 75 bp, synthetic construct
  source 1..75: mol_type = other DNA
agcgggcttgcccgctacgccaaaaacatgaccgaagatgcccgtaacggcaaacttgaccctgtactgtgccgc

SEQ ID NO: 505712 - DNA, 75 bp, synthetic construct
  source 1..75: mol_type = other DNA
agcgacttaagggtgatcgctgagcgggccgacatcgacctgaatgagcttcgccgggcgctgacggtggagaac

SEQ ID NO: 505713 - DNA, 75 bp, synthetic construct
  source 1..75: mol_type = other DNA
caaaaaccttatctgggatacgttaagtaaaaacggtcttctggccaatgaccgtgcgctgaaggaactggtcat

SEQ ID NO: 505714 - DNA, 75 bp, synthetic construct
  source 1..75: mol_type = other DNA
cattaacagtatgaacctcagtagctgtcaggtggcccaggggatagttggcgggttgtttcctcagacgcagga

SEQ ID NO: 505715 - DNA, 75 bp, synthetic construct
  source 1..75: mol_type = other DNA
acgccaacggcacgcagcatatcggcctgcaccccatcccggatcgctccggactgtggcgctatctgggcacga

SEQ ID NO: 505716 - DNA, 75 bp, synthetic construct
  source 1..75: mol_type = other DNA
gtggtgccttacctaccgctgtcgaaagagacgctcgctaccattattgccgggaaactggcccgcctggataac

SEQ ID NO: 505717 - DNA, 75 bp, synthetic construct
  source 1..75: mol_type = other DNA
aggcccgggtgcaggctggcagtaaaaacttcccggaagaacagatgaagatgttacgggagaatttctctgaag

SEQ ID NO: 505718 - DNA, 75 bp, synthetic construct
  source 1..75: mol_type = other DNA
tccggcgggtaacgttgtcatgtctggttgctgctgtgctggcgttgcctgcgcaggctgacgtcaataacgacc

SEQ ID NO: 505719 - DNA, 75 bp, synthetic construct
  source 1..75: mol_type = other DNA
atgccgtagtggatacgccgtcagagtcagaacaggataataccggtgccataccggctgatgatactggcagcg

SEQ ID NO: 505720 - DNA, 75 bp, synthetic construct
  source 1..75: mol_type = other DNA
gttcgtttgtttgaatcaccggaatatcgcacgataccaaagttttttgaaatagatgaggcacagtacaccctg

SEQ ID NO: 505721 - DNA, 75 bp, synthetic construct
  source 1..75: mol_type = other DNA
atgaatctgtttttatccccgacgcttaaacataaattatgcagaaatcgaggtggcattccagctttattgtta

SEQ ID NO: 505722 - DNA, 75 bp, synthetic construct
  source 1..75: mol_type = other DNA
atgcgccagcagttgtctgcccgtatgctcagccgttaccagaataattatcacttcgggggaggcgtacagtga

SEQ ID NO: 505723 - DNA, 75 bp, synthetic construct
  source 1..75: mol_type = other DNA
ttattgtcctgctggtagcctgtggtgcacttagtctggggctgaatcattaccgcgataacgccataacctaca

SEQ ID NO: 505724 - DNA, 75 bp, synthetic construct
  source 1..75: mol_type = other DNA
ctcaaggcggacgtctctatttcggtcaccgagcttggttcgttgctcgaccacaccgggccacacctggaagcg

SEQ ID NO: 505725 - DNA, 75 bp, synthetic construct
  source 1..75: mol_type = other DNA
cggctggatttaacccatgagtatctgcacctggcctttgatggttatcccaccgggcttgatgagaactatatc

SEQ ID NO: 505726 - DNA, 75 bp, synthetic construct
  source 1..75: mol_type = other DNA
ttagacgtaaattatgcagaaatcgtggttgtattccagctttattgttgtgcagctgcctgagctttatgccat

SEQ ID NO: 505727 - DNA, 75 bp, synthetic construct
  source 1..75: mol_type = other DNA
caaaaatgttcagctgatttccatgacgctgccggatatcaatgccggatgtggcggcatcgacgcctatctcgg

SEQ ID NO: 505728 - DNA, 75 bp, synthetic construct
  source 1..75: mol_type = other DNA
ctttaaaccagccctgctggcgcgtatggaagtggtgccgtacctgcctctgtcgaaagagacgctcaccaccat

SEQ ID NO: 505729 - DNA, 75 bp, synthetic construct
  source 1..75: mol_type = other DNA
atgcttcgcattaaacctcttctggttctttgtgccgctttactgacggtcacacctgcagcgtcagcggatgtg

SEQ ID NO: 505730 - DNA, 75 bp, synthetic construct
  source 1..75: mol_type = other DNA
gcgggcttttcccccggacgcaggtgtcccagcagaaagtctgtcaggacattgccggtgagagcaatatttttg

SEQ ID NO: 505731 - DNA, 75 bp, synthetic construct
  source 1..75: mol_type = other DNA
accttgccctgcagacgacagtgccggaaatcaaaaccgccaaggatttcctgcagaaaatggcgaacgacatta

SEQ ID NO: 505732 - DNA, 75 bp, synthetic construct
  source 1..75: mol_type = other DNA
acagaccgtgctggacagtgtgctggagaatctgaatcaggcacagcaacagattgccattttccagggtcaggt

SEQ ID NO: 505733 - DNA, 75 bp, synthetic construct
  source 1..75: mol_type = other DNA
ggaaaacacttctttaaagtaagtggctgtgaacttgatagtttgcgaacctctcaaagatgtttacaaatttcc

SEQ ID NO: 505734 - DNA, 75 bp, synthetic construct
  source 1..75: mol_type = other DNA
agcgaagcaaggggttatttcaaaagaagcgctggagcataccaaagatacgttaataagtagcaaagcggcatt

SEQ ID NO: 505735 - DNA, 75 bp, synthetic construct
  source 1..75: mol_type = other DNA
gccttctggcatgatttagcggctccggtcattgctggcattcttgccagtatgatcgtgaactggctgaacaag

SEQ ID NO: 505736 - DNA, 75 bp, synthetic construct
  source 1..75: mol_type = other DNA
tcctctggacagaacgcggagcagcccgtcatgcaaaaatgctcgaaaccgatcaggcgtgggaagtgttcgaaa

SEQ ID NO: 505737 - DNA, 75 bp, synthetic construct
  source 1..75: mol_type = other DNA
ctgtttacctctttctcaggaagtttagtctccaggattcccggggcggttcaggtcgtttcattgaggaaaaac

SEQ ID NO: 505738 - DNA, 75 bp, synthetic construct
  source 1..75: mol_type = other DNA
gctgtgaacttgatagtttgcgaacctctcaaagatgtttacaaatttccccaaaaacccgctccctcatcctct

SEQ ID NO: 505739 - DNA, 75 bp, synthetic construct
  source 1..75: mol_type = other DNA
gccgaagggagataaaggagagcgtggagacaccggtccggcaggggcaaccggtgaacggggaccgggaggaga

SEQ ID NO: 505740 - DNA, 75 bp, synthetic construct
  source 1..75: mol_type = other DNA
tgattttctcggtgccatgtcggaggatgacgtccggccggaggcactgcgtcgttttgaactgatggtggaaga

SEQ ID NO: 505741 - DNA, 75 bp, synthetic construct
  source 1..75: mol_type = other DNA
gataagggcgaaatggcagacggtgaaggccgcctgattgactgcaaaaatatcgtcttcttcctgacgtccaac

SEQ ID NO: 505742 - DNA, 75 bp, synthetic construct
  source 1..75: mol_type = other DNA
ggctgatggcggaggtcatttcctccccggtgccggtcattctgtttatcgacgaagcacataccctgattggcg

SEQ ID NO: 505743 - DNA, 75 bp, synthetic construct
  source 1..75: mol_type = other DNA
ctgttgctggcacgcgcgttacagggcgttggcggcgcgatgatggtgccggtcggcagattgacggtgatgaaa

SEQ ID NO: 505744 - DNA, 75 bp, synthetic construct
  source 1..75: mol_type = other DNA
agctcaacgggctttccgcaaaagaaacagacagccttgtatggctgtgggattatgctaaccgctcacaggcat

SEQ ID NO: 505745 - DNA, 75 bp, synthetic construct
  source 1..75: mol_type = other DNA
gcgggattgatgtctatcttgggtctttctcctttattaactccgaccagattatggcgtttgtgaaacagacga

SEQ ID NO: 505746 - DNA, 75 bp, synthetic construct
  source 1..75: mol_type = other DNA
caagaatcttatctgggacacgctcagcaaaaacgggttgctggctggcgatcgtgcactgaaagaactggtgat

SEQ ID NO: 505747 - DNA, 75 bp, synthetic construct
  source 1..75: mol_type = other DNA
ccgtttttatcaggctctaccgaaaatcgttgtggattacccgtcttcccgatggttgtttctgacgttaactgt

SEQ ID NO: 505748 - DNA, 75 bp, synthetic construct
  source 1..75: mol_type = other DNA
ttacgacatcatgctccagtacattcaggaactgcttcagcaggcccgggcgatgatttccaccgggaactaccc

SEQ ID NO: 505749 - DNA, 75 bp, synthetic construct
  source 1..75: mol_type = other DNA
acgctgatggagctggagcagcgtatgggctatctgcgccagcaggtatccacgcaactgatgagtcgttatgag

SEQ ID NO: 505750 - DNA, 75 bp, synthetic construct
  source 1..75: mol_type = other DNA
acagtgacggtcagccagaacaacagcctgaaccagcgtgtgcagaacatgataaagaatatctctgacaaactg

SEQ ID NO: 505751 - DNA, 75 bp, synthetic construct
  source 1..75: mol_type = other DNA
acctggcgatccgtgacgataaaaccgccttcatccgaagttatgcgccaggccagctggtgacggttgaagaag

SEQ ID NO: 505752 - DNA, 75 bp, synthetic construct
  source 1..75: mol_type = other DNA
ctattccggcagatgctacgactacggtcatgagttctcgtatgttattggaatggcgagagatgttttaatcaa

SEQ ID NO: 505753 - DNA, 75 bp, synthetic construct
  source 1..75: mol_type = other DNA
gctatgagttctcgtatatcatcgggagggcgaggggcgttttaattaatcacacacgagatgttgatatcaatg

SEQ ID NO: 505754 - DNA, 75 bp, synthetic construct
  source 1..75: mol_type = other DNA
gcctggcggcgatgccaacgtcaccgtacccgtatgctaaaaattcaggaatactacgaaaactgcctgaattcg

SEQ ID NO: 505755 - DNA, 75 bp, synthetic construct
  source 1..75: mol_type = other DNA
gaagccgaaggacggcgaatcgctggcctgcgcgaccgccgaactggtgcgcggtgcggtggccgaaaccctgaa

SEQ ID NO: 505756 - DNA, 75 bp, synthetic construct
  source 1..75: mol_type = other DNA
ttgttccgtgagttgtatcccgcattaaaactgattcagtctggctattccggcatatgccacgactacggctat

SEQ ID NO: 505757 - DNA, 75 bp, synthetic construct
  source 1..75: mol_type = other DNA
aaactcatggctacctcagtaagccatatccctgctccgcgtgatggtcgtgattacgatccggatgttctgcgg

SEQ ID NO: 505758 - DNA, 75 bp, synthetic construct
  source 1..75: mol_type = other DNA
tgaccggtgataaacccggagaagctcattcatcaggctggaccctggctgcaaaacgtgggcgggatgcaggag

SEQ ID NO: 505759 - DNA, 75 bp, synthetic construct
  source 1..75: mol_type = other DNA
cactgcaacagtatgaccggtgataaacccggagaagctcattcatcaggctggaccctggctgccaaacgggga

SEQ ID NO: 505760 - DNA, 75 bp, synthetic construct
  source 1..75: mol_type = other DNA
gggctcgttgtggcactgcaacagcatgaccggtgataagcccggtgaagcccattcatcaggctggaccctggc

SEQ ID NO: 505761 - DNA, 75 bp, synthetic construct
  source 1..75: mol_type = other DNA
tctgtggtggtccggcagagcagtggccagtgtacggaaaaaacattttccctgccggtgatgctctaccgcggt

SEQ ID NO: 505762 - DNA, 75 bp, synthetic construct
  source 1..75: mol_type = other DNA
gctgtggcactgcaacagtatgaccggtgataaacccggagaagctcattcatcagcctggaccctggctgcaaa

SEQ ID NO: 505763 - DNA, 75 bp, synthetic construct
  source 1..75: mol_type = other DNA
aggcacaagcgtttgaagagaaactggcttccctgtcggcggtattacagaagcatgtgacggtggatgaggtac

SEQ ID NO: 505764 - DNA, 75 bp, synthetic construct
  source 1..75: mol_type = other DNA
agaataccggtaccgtcggacggcaaaagtctcagcccggatgatgtgcgtccgatgcttgagcaaatggtgaag

SEQ ID NO: 505765 - DNA, 75 bp, synthetic construct
  source 1..75: mol_type = other DNA
gccctgccggctccgcaggacgggcgtgatgccacggcactggaaatactccctgccattgacgatcaaaaatcc

SEQ ID NO: 505766 - DNA, 75 bp, synthetic construct
  source 1..75: mol_type = other DNA
ctctgtggtggtccggcagagcagtggccagcgtacggaaaaaacattttccctgccggtgatgctctaccgcgg

SEQ ID NO: 505767 - DNA, 75 bp, synthetic construct
  source 1..75: mol_type = other DNA
ccgcaggacgggcgtgatgccacggcactggaaatactccccgccattgacgatcaaaaatcctttccccggggc

SEQ ID NO: 505768 - DNA, 75 bp, synthetic construct
  source 1..75: mol_type = other DNA
gtgatgccacggcactggaagtgctccccgccattgacgatcaaaaatcctttccccggggcacgtatgccacac

SEQ ID NO: 505769 - DNA, 75 bp, synthetic construct
  source 1..75: mol_type = other DNA
ctggcggatttacagcgcacatttgaggagaagatggccgcgcaggcacaagcgtttgaagagaaactggcttcc

SEQ ID NO: 505770 - DNA, 75 bp, synthetic construct
  source 1..75: mol_type = other DNA
gaaggcggtgaatgatgcggtcgcaaatattcctgtaccggcgaacggtaaaagtatcactcccgatgatgtgcg

SEQ ID NO: 505771 - DNA, 75 bp, synthetic construct
  source 1..75: mol_type = other DNA
tgaacggttgttctctgtggtggtccggcagagcagtggccagcgtacggaaaaaacattttcccttccggtgat

SEQ ID NO: 505772 - DNA, 75 bp, synthetic construct
  source 1..75: mol_type = other DNA
ggcagagcagtggccagcgtacggaaaaaacattttccctgccggtgatgctctaccgtggtgtgttcagaaccg

SEQ ID NO: 505773 - DNA, 75 bp, synthetic construct
  source 1..75: mol_type = other DNA
acagtatgaccgaagataaacccggagaagctcattcatcagcctggaccctggctgcaaaacgtgggcgggatg

SEQ ID NO: 505774 - DNA, 75 bp, synthetic construct
  source 1..75: mol_type = other DNA
tgatgcggtcgcaaatattccgcagccggcggacggtaaaagtatcaccccggatgatgtgcgtccgatgcttga

SEQ ID NO: 505775 - DNA, 75 bp, synthetic construct
  source 1..75: mol_type = other DNA
taagccatattcctgttccgcgcgacggtcgtgactacgatccggatgttctgcagaaggcggtgaatgatgcgg

SEQ ID NO: 505776 - DNA, 75 bp, synthetic construct
  source 1..75: mol_type = other DNA
gatgttctgcagaaggcggttctggatgcggtgagtgccctgccggctccgcaggacgggcgtgatgccacggca

SEQ ID NO: 505777 - DNA, 75 bp, synthetic construct
  source 1..75: mol_type = other DNA
tgacgcagtgggggctattccgctaccgcgtgatggtcgcgattatgatccggaagtactgcagcaggcagtgaa

SEQ ID NO: 505778 - DNA, 75 bp, synthetic construct
  source 1..75: mol_type = other DNA
tctgcaggcgatggtggatgacgctgtggggaccattccggtaccgcgtgatggtcgtgattatgatccggatgt

SEQ ID NO: 505779 - DNA, 75 bp, synthetic construct
  source 1..75: mol_type = other DNA
gtgactatgatcccgatgttctgcagaaggcggtgaatgatgcggtcgcaaatattcctgtaccggcgaacggta

SEQ ID NO: 505780 - DNA, 75 bp, synthetic construct
  source 1..75: mol_type = other DNA
gcggtgaatgatgcggtcgcaaatattccgcagccggcggacggtaaaagtctcaccccggatgatgtgcgtccg

SEQ ID NO: 505781 - DNA, 75 bp, synthetic construct
  source 1..75: mol_type = other DNA
gaagtactgaagcaggcggttctggaggcggtgaatgcccttccggctccgcaggacgggcgtgatgccacggca

SEQ ID NO: 505782 - DNA, 75 bp, synthetic construct
  source 1..75: mol_type = other DNA
cggtgacggcgtgatgaccaccggtctgctggataatacgcagggacagcttgtcagcgcatccggttcgctgtc

SEQ ID NO: 505783 - DNA, 75 bp, synthetic construct
  source 1..75: mol_type = other DNA
tacggcgggtattcaactttattgaaaacccataccgcccggtgacatttgattatttaatggtgtcaccgcaaa

SEQ ID NO: 505784 - DNA, 75 bp, synthetic construct
  source 1..75: mol_type = other DNA
ggtggaccgcgaaatcgccaacgcgcagcaagggctgcccagtggtatcaccctgaagctaaataaccttgtcga

SEQ ID NO: 505785 - DNA, 75 bp, synthetic construct
  source 1..75: mol_type = other DNA
cctgatggagttgatgtcttccagtctcaagcagcgtttaactgctgagccggtgcgttttgtttatcagcgcga

SEQ ID NO: 505786 - DNA, 75 bp, synthetic construct
  source 1..75: mol_type = other DNA
aatgggcggtgaccagcaggtgggcgcactgatttcggaaggaaaaattgatgtgctgattttcttctgggatcc

SEQ ID NO: 505787 - DNA, 75 bp, synthetic construct
  source 1..75: mol_type = other DNA
cagcgcggaaacatattgcgctggtggcacacgatcactgtaaacaaatgctcatgagctgggtggaacggcatc

SEQ ID NO: 505788 - DNA, 75 bp, synthetic construct
  source 1..75: mol_type = other DNA
taaaggtctggtcgaccgtctgtatgcggcttccagctccggcgtgccggtgaatctgctggttcgcggcatgtg

SEQ ID NO: 505789 - DNA, 75 bp, synthetic construct
  source 1..75: mol_type = other DNA
aacctcctgtctgatgtggtcaatttacttgttaaacgcgctgtatttcacaagcaaatttcctccgtggatgaa

SEQ ID NO: 505790 - DNA, 75 bp, synthetic construct
  source 1..75: mol_type = other DNA
ttattctggatcccgctggatatgccgctgaaattcactctctcatggatgaaaggcgcgcagaccattgaagcc

SEQ ID NO: 505791 - DNA, 75 bp, synthetic construct
  source 1..75: mol_type = other DNA
ctccggcgtggataatgcaaccggtccccgactggcagaagccgctgaacgggattatttcatcctcagagaacg

SEQ ID NO: 505792 - DNA, 75 bp, synthetic construct
  source 1..75: mol_type = other DNA
gggtgttacttgtcgccgtacctgaaatgatgagtcgcagccagaaacagttagggatatccactatatccattg

SEQ ID NO: 505793 - DNA, 75 bp, synthetic construct
  source 1..75: mol_type = other DNA
cgcacaactgtttgtaatgtcatgccggagcaaactgactaagttcctgctgctcattcccatgatgttgctgcc

SEQ ID NO: 505794 - DNA, 75 bp, synthetic construct
  source 1..75: mol_type = other DNA
catgggcgaattcatcatcgacggataaaaaacaatctttgtggataaggttgatttcaaaagtaaaaaaatttt

SEQ ID NO: 505795 - DNA, 75 bp, synthetic construct
  source 1..75: mol_type = other DNA
cggggctttcgttcctcactcactggctgttatgcaatttagtgctgatatggcgctgaatgaggcaggcaaaat

SEQ ID NO: 505796 - DNA, 75 bp, synthetic construct
  source 1..75: mol_type = other DNA
aaagccgccggtaagatcgttgcctccggaaccggtgtggatgtcagcggcagccggacagaggcaaaagccgtc

SEQ ID NO: 505797 - DNA, 75 bp, synthetic construct
  source 1..75: mol_type = other DNA
tattttaaataacagtcacagtaatacacagacccgtctggccggcaatattaccggtaatccctggctggcaaa

SEQ ID NO: 505798 - DNA, 75 bp, synthetic construct
  source 1..75: mol_type = other DNA
cggggacggggcggaaatacacgtcgtggacgtcgcgtcccggcagggattattgtctccctgtccccggtgtgt

SEQ ID NO: 505799 - DNA, 75 bp, synthetic construct
  source 1..75: mol_type = other DNA
atgggggggaataaaaaggaaagcagccataacaccacgcatgcagcagtctctgacggtaaatggattatccgg

SEQ ID NO: 505800 - DNA, 75 bp, synthetic construct
  source 1..75: mol_type = other DNA
gagtataggcggcgaatctattgatataaatggttcttcaggaactgaaaaatacaagtatgaatttaataatag

SEQ ID NO: 505801 - DNA, 75 bp, synthetic construct
  source 1..75: mol_type = other DNA
gccaatacgacgaaaactcaatggacggaaataaacagggctgttgagtatggcaaaagtcagggtgttaaggta

SEQ ID NO: 505802 - DNA, 75 bp, synthetic construct
  source 1..75: mol_type = other DNA
atgtgcaataacacccgtccggacgcagccgccgaagcaatcaaaacactgattgatgcgctgattgatatttca

SEQ ID NO: 505803 - DNA, 75 bp, synthetic construct
  source 1..75: mol_type = other DNA
caaccgccgcgctcactacgctgatgcacgcgctgattgatatttcatgcacggcagcaaccgcagaaaaacaca

SEQ ID NO: 505804 - DNA, 75 bp, synthetic construct
  source 1..75: mol_type = other DNA
gctgttatgcaatttagtgctgatatggcgctgaatgaggcaggcaaaattcttaccgcagatattcagggggcg

SEQ ID NO: 505805 - DNA, 75 bp, synthetic construct
  source 1..75: mol_type = other DNA
aaaacagcgtatattcattgcccgagctttataccggaaacctggaatattatttatggatgaggctacaagttc

SEQ ID NO: 505806 - DNA, 75 bp, synthetic construct
  source 1..75: mol_type = other DNA
cttccattatttaacatttgtgcagctaaaagccgatcaggcactggataaggccggaaaaattatcatggctga

SEQ ID NO: 505807 - DNA, 75 bp, synthetic construct
  source 1..75: mol_type = other DNA
atgtgcaataacacccgtccggacgcagctgccgaagctatcagaacgctgatgcacgcgctgattgatatttca

SEQ ID NO: 505808 - DNA, 75 bp, synthetic construct
  source 1..75: mol_type = other DNA
gggtgtggatcgactggcgggacgacagacaagccgctttagacgaatggggcagtgcgtcgcttcgtcagcttg

SEQ ID NO: 505809 - DNA, 75 bp, synthetic construct
  source 1..75: mol_type = other DNA
cttccgggccggatcgtttaccattgttaatggcgacggtgttgaaaaaacgaattcgtttgcaaggctttatta

SEQ ID NO: 505810 - DNA, 75 bp, synthetic construct
  source 1..75: mol_type = other DNA
cggatcgtgggggttgctggcggcgcagaaaaatgccgccatgcaaccgaggtgttgggttttgatgtttgcctt

SEQ ID NO: 505811 - DNA, 75 bp, synthetic construct
  source 1..75: mol_type = other DNA
tttggagaacgccccacagacgtttattggcctgctgaacggcaaaaacttcggtaaagttgttattcgcgtcgc

SEQ ID NO: 505812 - DNA, 75 bp, synthetic construct
  source 1..75: mol_type = other DNA
cccaccggcagcaaaccgaggaaacctactgtagttacacccccatggacgccggaagaggatgcaatcttggga

SEQ ID NO: 505813 - DNA, 75 bp, synthetic construct
  source 1..75: mol_type = other DNA
aggaccgcgctatagctgatcgcttatacagagaatacccggcaatgcggtggatcagcaccaaattggtccagg

SEQ ID NO: 505814 - DNA, 75 bp, synthetic construct
  source 1..75: mol_type = other DNA
atgaagttatggacttctctgggcgtcgcttttcttctgattgccgcattgcgtctgtcgtggtcgctgggccgg

SEQ ID NO: 505815 - DNA, 75 bp, synthetic construct
  source 1..75: mol_type = other DNA
cctgtattttgtgtcgttttccattcccgaagaggggctgaaacggatgctgggcgaaacccggcactacggtat

SEQ ID NO: 505816 - DNA, 75 bp, synthetic construct
  source 1..75: mol_type = other DNA
tgaagcagcaggaaacactgagtcagcagttacgtgaaaaaccggacacacagctgcaggcatgggcagaacagc

SEQ ID NO: 505817 - DNA, 75 bp, synthetic construct
  source 1..75: mol_type = other DNA
gacccgacgctgttttcacagtacggcattcgcagcgttccggccctggtggtgttctgcagccaggggcacgac

SEQ ID NO: 505818 - DNA, 75 bp, synthetic construct
  source 1..75: mol_type = other DNA
actatcgtgaacaaattaccaacggtttggagaacgccccacagacgtttattggcctgctgaacggcaaaaact

SEQ ID NO: 505819 - DNA, 75 bp, synthetic construct
  source 1..75: mol_type = other DNA
gcaacgatattgcaaaagatgaatgcgccctcgctttgcctgacgctcgttttactgacaggttgcgcaggcacg

SEQ ID NO: 505820 - DNA, 75 bp, synthetic construct
  source 1..75: mol_type = other DNA
aatcccctcagcatgccgataaccagtttctcgatgaactggtccgtaaacagcaggctgctcagaaagacaaac

SEQ ID NO: 505821 - DNA, 75 bp, synthetic construct
  source 1..75: mol_type = other DNA
gaatgcgtaaaggtgcggttatcgcggaaggggtagcaagtggttatacctataccgctttagcaaaagagttag

SEQ ID NO: 505822 - DNA, 75 bp, synthetic construct
  source 1..75: mol_type = other DNA
cgttcatggaggcaggcacgccagaggcaataatcaaggcggtaacagatactatcgatgatttgcgtgggacaa

SEQ ID NO: 505823 - DNA, 75 bp, synthetic construct
  source 1..75: mol_type = other DNA
ttatctgcccgacgcggttctgccacgctggaagaactttttgccgcagcatacctgcgttactgtcgctatatc

SEQ ID NO: 505824 - DNA, 75 bp, synthetic construct
  source 1..75: mol_type = other DNA
gctgtcggggtttgaagcgttattacatggtaagcacgtacattgttacggcctgcccttctatgctggttgggg

SEQ ID NO: 505825 - DNA, 75 bp, synthetic construct
  source 1..75: mol_type = other DNA
atctctcgctaatgaaagaatacgccaaccgtcaggatgtgtttaatgacgcgctggcgcaacatctgacgttgc

SEQ ID NO: 505826 - DNA, 75 bp, synthetic construct
  source 1..75: mol_type = other DNA
atgttatggcctgaccttgaaattaaaggagtaagtgcagctacaggcaaaaatgatcggataactcactactgg

SEQ ID NO: 505827 - DNA, 75 bp, synthetic construct
  source 1..75: mol_type = other DNA
aactatggcccgagctggaattgatgggtgtcacaggagccaccggtaaaaatggcgcgataactcactactggc

SEQ ID NO: 505828 - DNA, 75 bp, synthetic construct
  source 1..75: mol_type = other DNA
accggagtcgggctgagaatatacaaaaacactgacagtaggcccctgaagtttgggcctgattcgccggtaaag

SEQ ID NO: 505829 - DNA, 75 bp, synthetic construct
  source 1..75: mol_type = other DNA
tacccgtggttggcagtcttgacgggcagagtatttatgggctgacggaggaggtgggactccttatatggatgg

SEQ ID NO: 505830 - DNA, 75 bp, synthetic construct
  source 1..75: mol_type = other DNA
agcagtcattaagttattcacgagaagttgaacaagatggcgttgaatataaatcttgcccaaaatgttctgctg

SEQ ID NO: 505831 - DNA, 75 bp, synthetic construct
  source 1..75: mol_type = other DNA
gaaaaacggtcatccgtctggaagatggatttgtgcgctcgctggatcttggcgtcaatggtgcgccgccgcttt

SEQ ID NO: 505832 - DNA, 75 bp, synthetic construct
  source 1..75: mol_type = other DNA
caggcttaacgctgtggaagtcggcaatcctgaaacctttcttgcgtaccgcaacaaacagactgagttattcac

SEQ ID NO: 505833 - DNA, 75 bp, synthetic construct
  source 1..75: mol_type = other DNA
ccctcagtctggttgtatgtaaagtatgtgaatactggtgagggaattaatccgggtacggttaacggaatatca

SEQ ID NO: 505834 - DNA, 75 bp, synthetic construct
  source 1..75: mol_type = other DNA
aacaatgacctgaagaccaccgctgaagccgtgctgtccctggtgaaagacggcgcgactgatggtgttcagatc

SEQ ID NO: 505835 - DNA, 75 bp, synthetic construct
  source 1..75: mol_type = other DNA
cttatttcagtcgctgaagaatctgttttctgtttaggggattttattttgcccttcaatgggaccgctaccacg

SEQ ID NO: 505836 - DNA, 75 bp, synthetic construct
  source 1..75: mol_type = other DNA
gatatgctgcaggttattacgcttatctgtggacgcaaatgttggccgatgatggttatcagtggtttgttgagc

SEQ ID NO: 505837 - DNA, 75 bp, synthetic construct
  source 1..75: mol_type = other DNA
agaaaacgaagcaatgcaggatgtcgatgattttgaattgcgggcgctggtggcggaaaatatggatcttcctgc

SEQ ID NO: 505838 - DNA, 75 bp, synthetic construct
  source 1..75: mol_type = other DNA
cacctgccagagattttaaatgtggttgtgtggttgaaattaatgtcgagccttatttcgtaaaagtcgaaacac

SEQ ID NO: 505839 - DNA, 75 bp, synthetic construct
  source 1..75: mol_type = other DNA
atgaatgcgaagaactttaataagcagtatccggtagggactcgcttcatgcacactgcacatccggcgttgcgt

SEQ ID NO: 505840 - DNA, 75 bp, synthetic construct
  source 1..75: mol_type = other DNA
ggcaaaaagtggcctcggcgcaggcggaacatcatctggtggccgatatcgcctgggcggttattcaatactggc

SEQ ID NO: 505841 - DNA, 75 bp, synthetic construct
  source 1..75: mol_type = other DNA
ctggaggaacaaaatacgatattaaaaaaggctaccgcgctcttgatatcagacttcctgaatagttaccgataa

SEQ ID NO: 505842 - DNA, 75 bp, synthetic construct
  source 1..75: mol_type = other DNA
taagttgtgtctcttaagagagcttcaggctatgaaagaccttatttctgcatatgaaacgcagaagaaggttgc

SEQ ID NO: 505843 - DNA, 75 bp, synthetic construct
  source 1..75: mol_type = other DNA
tgaagcattacttgagcttgaaaagaaatattacccactgctaaaagcacagcgtattaaacttgatgacgctta

SEQ ID NO: 505844 - DNA, 75 bp, synthetic construct
  source 1..75: mol_type = other DNA
gtcttttagtagcctcggttataccgagcgctatcacctgcaggagtggctggcaaaaaacccccaagcactgac

SEQ ID NO: 505845 - DNA, 75 bp, synthetic construct
  source 1..75: mol_type = other DNA
tactgcgccaatctgcgcaaagaacagatcctcgacatcttccagctctatctcgacaaatacgagccggaagag

SEQ ID NO: 505846 - DNA, 75 bp, synthetic construct
  source 1..75: mol_type = other DNA
gtcttttagtagcctcggttttaccgagcgctatcatcttcaggagtggttggcgaagaaccctcaggcgttgac

SEQ ID NO: 505847 - DNA, 75 bp, synthetic construct
  source 1..75: mol_type = other DNA
atgaatacccaatatttacagtatgtccgcgagcaactcatggtggctaccgctgacttgagcggagcaacgaaa

SEQ ID NO: 505848 - DNA, 75 bp, synthetic construct
  source 1..75: mol_type = other DNA
ggtgttctgcagtcagggatacgacatcatccggggaaacctgcgggtcggccaggcgctggagaaagtggccgc

SEQ ID NO: 505849 - DNA, 75 bp, synthetic construct
  source 1..75: mol_type = other DNA
cggctgccagaaattcagcccgacggcgttttgccgcaggatgattcgtttatggctaagccggcgattaatctg

SEQ ID NO: 505850 - DNA, 75 bp, synthetic construct
  source 1..75: mol_type = other DNA
tgagcgaaccccggcactacggtattcccgccacgctgcggggcatggtgaacaacgacctgaaggccacggctg

SEQ ID NO: 505851 - DNA, 75 bp, synthetic construct
  source 1..75: mol_type = other DNA
aacaacgacctgaaagccacggctgaagcagtgctgtctctggtgaaagacggtgcgaccgatggtgttcagatc

SEQ ID NO: 505852 - DNA, 75 bp, synthetic construct
  source 1..75: mol_type = other DNA
aatatccgcctgaaagcggcgctggagcgggtggcgaaggaaggggagtgtgccccggtggctgaggcgattctc

SEQ ID NO: 505853 - DNA, 75 bp, synthetic construct
  source 1..75: mol_type = other DNA
tctctgtctgcagcatagccatgacctgcatactgtcatccagcattgtctgtgcttcgcaggacagtgcggctt

SEQ ID NO: 505854 - DNA, 75 bp, synthetic construct
  source 1..75: mol_type = other DNA
cgttatcccgcgaagcctggcagcgtgagcttgactttgccagtggcgaattacgccgcaacgttgtctggtgta

SEQ ID NO: 505855 - DNA, 75 bp, synthetic construct
  source 1..75: mol_type = other DNA
gcgtgggactggcgttattttacggtgatttcttcgcccgtgattcaaaaagcggcggtgcatggatgggcaatt

SEQ ID NO: 505856 - DNA, 75 bp, synthetic construct
  source 1..75: mol_type = other DNA
tgctggataatcagccgatttccggtaaacagtcgtacgcaaaaggttcatctgtcgccctgatcagtccggttg

SEQ ID NO: 505857 - DNA, 75 bp, synthetic construct
  source 1..75: mol_type = other DNA
actggaagcgggctgccatgtgatgtgcgaaaaaccgcccgccatgacgccagaacaggcgcgggaaatgtgcga

SEQ ID NO: 505858 - DNA, 75 bp, synthetic construct
  source 1..75: mol_type = other DNA
gtggtgttctgcagccaggggcacgacatcatccggggaaatctgcgcgtcaggcaggcgctggagaaagtggcc

SEQ ID NO: 505859 - DNA, 75 bp, synthetic construct
  source 1..75: mol_type = other DNA
tgagatgtgcgatatttttaagagtctcgatagagaatctgtgatttgcaccgtgaaaataagagcgcaacaaaa

SEQ ID NO: 505860 - DNA, 75 bp, synthetic construct
  source 1..75: mol_type = other DNA
actgcaacgtatttgtgtactaccagaacgatacggccattctgcagcagggcgtcatgtccagcggtgatttct

SEQ ID NO: 505861 - DNA, 75 bp, synthetic construct
  source 1..75: mol_type = other DNA
ggctgaaagcggttcgacggaaacgctgctgcaggcggtgaacgccgttctgaattacacgaattggtacggtct

SEQ ID NO: 505862 - DNA, 75 bp, synthetic construct
  source 1..75: mol_type = other DNA
gtgaaacatcccgaacaagatcttgaaccgaaatccatgcgtaattactcgcgcatgaaaaatcaggttacggtc

SEQ ID NO: 505863 - DNA, 75 bp, synthetic construct
  source 1..75: mol_type = other DNA
ggggattgcagacgatgcagatattccggatgcagactggctgaaagtggctgcggcgatcgaatcctcttctgt

SEQ ID NO: 505864 - DNA, 75 bp, synthetic construct
  source 1..75: mol_type = other DNA
gcgcggctatatttccggcctgatggaaaactggctctttgccccgcaatcttttgatcttaaaaaagaagcccg

SEQ ID NO: 505865 - DNA, 75 bp, synthetic construct
  source 1..75: mol_type = other DNA
attgttgtcatgctagtcacactattttctatagcactggcaatcaatttagaaaaacatcttgacacaataaaa

SEQ ID NO: 505866 - DNA, 75 bp, synthetic construct
  source 1..75: mol_type = other DNA
tggaaggggcggcgttgcaggtggtggtcaatcgctatgagcgcgaccgtcaggctcgtcaggcggcgcttcgcc

SEQ ID NO: 505867 - DNA, 75 bp, synthetic construct
  source 1..75: mol_type = other DNA
gataaaaaagctcgcgagaaagcagtcgaatatcacggatgccagtgcaacgtatgcggcgttgatctggtgaag

SEQ ID NO: 505868 - DNA, 75 bp, synthetic construct
  source 1..75: mol_type = other DNA
atgaaaaaattcgcagcagtaatcgcagtaatggccctgtgcagcgcaccggtgatggcagcagagcagggtggc

SEQ ID NO: 505869 - DNA, 75 bp, synthetic construct
  source 1..75: mol_type = other DNA
ttcgttgaatgaagatggtcaaaccgacgatagcatttatctcagcttcacgattccaatagaaaatttactggg

SEQ ID NO: 505870 - DNA, 75 bp, synthetic construct
  source 1..75: mol_type = other DNA
atcaggtcacggtcagtatcaaccaaccgctgaaatttgagaaaaaggattacggttcattttatctctcgggaa

SEQ ID NO: 505871 - DNA, 75 bp, synthetic construct
  source 1..75: mol_type = other DNA
ttgctgattttgaaaccgtgcaagggcaatcagccattatgaacatcacacgaagtgatggtaaaaatattccat

SEQ ID NO: 505872 - DNA, 75 bp, synthetic construct
  source 1..75: mol_type = other DNA
agtaggagagaaagcacttcgtgacattattcgggaagcagaatcgaaaaaaccatcccgccgttcttcctctaa

SEQ ID NO: 505873 - DNA, 75 bp, synthetic construct
  source 1..75: mol_type = other DNA
ggcattgacgccacgcaaaccaaccacggacgacaacatctcgacgaaacccaggtgcgggtgtttggtcagcat

SEQ ID NO: 505874 - DNA, 75 bp, synthetic construct
  source 1..75: mol_type = other DNA
cgcgcttaatactaaggctttttgatgatgttaaattggtttttgataaagtgcctctcagcattttagtgaatg

SEQ ID NO: 505875 - DNA, 75 bp, synthetic construct
  source 1..75: mol_type = other DNA
cgtgacattattcgggaagcagaatcgaaaaaaccatcccgccgttcttcctctaaaacagcacctaaaaagaca

SEQ ID NO: 505876 - DNA, 75 bp, synthetic construct
  source 1..75: mol_type = other DNA
ctgatttctgggccagactgggtatgctggtaccggataagattaataagaaagaagccgaactgatgcaaaatt

SEQ ID NO: 505877 - DNA, 75 bp, synthetic construct
  source 1..75: mol_type = other DNA
caggttgacgccccggtgcttgatgatgacgatgatatttacgttgacctggaaattgcacaagaactcaaagga

SEQ ID NO: 505878 - DNA, 75 bp, synthetic construct
  source 1..75: mol_type = other DNA
cgacggtggttgataaaggacaacctgtttgcgccgaactggcgctggcatggatacactattttcctgattaca

SEQ ID NO: 505879 - DNA, 75 bp, synthetic construct
  source 1..75: mol_type = other DNA
ggatgacgcattagcagaaatcagagcgaaagctgtcgctgcaaaagctgattattacgttgtcgtcatggtgga

SEQ ID NO: 505880 - DNA, 75 bp, synthetic construct
  source 1..75: mol_type = other DNA
gcggcgtacgcgcgacggaaggtcagggctttaaagcggccgatatcatcggtatcggtattaacggtgtggatg

SEQ ID NO: 505881 - DNA, 75 bp, synthetic construct
  source 1..75: mol_type = other DNA
ttgccgtggatgaccagtttgttaacgccaaaggtaagccaatggataccgttccgctggtgatgatggcggcga

SEQ ID NO: 505882 - DNA, 75 bp, synthetic construct
  source 1..75: mol_type = other DNA
gattacggatttattagaaaaaccattgaataatgcattattagcaataaggaaagaacatctgctattaatgcc

SEQ ID NO: 505883 - DNA, 75 bp, synthetic construct
  source 1..75: mol_type = other DNA
acctgatggtttgactaatcgttatgaaggaaagtcctttgaaagaaaagatgagagttcattacacctgattac

SEQ ID NO: 505884 - DNA, 75 bp, synthetic construct
  source 1..75: mol_type = other DNA
gcgaaagctgtcgcagcaaaagctgattattacgttgtcgtcatggtggacgaaaccatcgtgacaggacagtgg

SEQ ID NO: 505885 - DNA, 75 bp, synthetic construct
  source 1..75: mol_type = other DNA
ccgaaagatacggttgagattcagggggaagtggataaagactggaactctgttgagattgacgtgaaacagatc

SEQ ID NO: 505886 - DNA, 75 bp, synthetic construct
  source 1..75: mol_type = other DNA
gctgacggcgctggatgaactggaggccgcctggcatcagcaacagacgctggtgcaggagattatcgccctgcg

SEQ ID NO: 505887 - DNA, 75 bp, synthetic construct
  source 1..75: mol_type = other DNA
cggcgtcgttgccggacgcagatgccgcggaggatacgccgccagagtcagagtcagagtcagagtcagagtcag

SEQ ID NO: 505888 - DNA, 75 bp, synthetic construct
  source 1..75: mol_type = other DNA
taacaaggttctggcgtgttaccaacgcgaagctaacaagaatatggcgcttctattaaataatcatcagttgaa

SEQ ID NO: 505889 - DNA, 75 bp, synthetic construct
  source 1..75: mol_type = other DNA
cgcctgattgactgtaaaaacatcgtcttcttcctcacctccaaccttggctaccaggtgattgtcgaacacgcc

SEQ ID NO: 505890 - DNA, 75 bp, synthetic construct
  source 1..75: mol_type = other DNA
tattacgctacgccagcagttactgggcgttgcagaggacacagatgccgtagtggatacgccgccagagtcaga

SEQ ID NO: 505891 - DNA, 75 bp, synthetic construct
  source 1..75: mol_type = other DNA
tggacgacgagtccgtcacagaggatgaaccggttttatgcgcaggttgcgcgttttccggcagacaggatggtt

SEQ ID NO: 505892 - DNA, 75 bp, synthetic construct
  source 1..75: mol_type = other DNA
atgtgctggagagcgccagagcgatgggcatgagcggggcgcagcgattcctgcatgttcttaccgctggcgtta

SEQ ID NO: 505893 - DNA, 75 bp, synthetic construct
  source 1..75: mol_type = other DNA
cccaactggcgcaaaatggcagtgcgctggcgcgtaccagcctcggcagtggtttctggctggctgcggcgctgg

SEQ ID NO: 505894 - DNA, 75 bp, synthetic construct
  source 1..75: mol_type = other DNA
atgctggtgggcgttggttgcgcatggctgactgcttgtttcgttcccggaagaaaaggcagcatttttgctttt

SEQ ID NO: 505895 - DNA, 75 bp, synthetic construct
  source 1..75: mol_type = other DNA
caattttaaacaaaaaagtgaagttttaaatacctggcgtgttggaatgaataattttgcccgtaatgccggggg

SEQ ID NO: 505896 - DNA, 75 bp, synthetic construct
  source 1..75: mol_type = other DNA
gactgccgaataatctttttccacggcaaaccgcgacctcgcgaagtgtcagaggattggcttcccctcattagc

SEQ ID NO: 505897 - DNA, 75 bp, synthetic construct
  source 1..75: mol_type = other DNA
tggtgctacttttccaccgcgcggcagggggcgattttttctctgctcaatgtcattcagaccgtgccttcggtg

SEQ ID NO: 505898 - DNA, 75 bp, synthetic construct
  source 1..75: mol_type = other DNA
acagccggaagagaccgctgaaacagtttccccggtacagcggctggcccagctcactgccgaactggacgccct

SEQ ID NO: 505899 - DNA, 75 bp, synthetic construct
  source 1..75: mol_type = other DNA
tcgtcttcgtaaagacaaaaaacgtgaaaaggtaatgattaacctggctgctctgactgttgatgctttgtctgt

SEQ ID NO: 505900 - DNA, 75 bp, synthetic construct
  source 1..75: mol_type = other DNA
tttacggcagacaggatggtttatcgcgggcctgatgacgggcttacccgccactgccgcgcccgcagaagcatc

SEQ ID NO: 505901 - DNA, 75 bp, synthetic construct
  source 1..75: mol_type = other DNA
gccgcttaaccgcctgtcgcagaatgaaatgtcggtcatcaccgacctgccggtatggctgggcgacaccatcaa

SEQ ID NO: 505902 - DNA, 75 bp, synthetic construct
  source 1..75: mol_type = other DNA
gaacggcagcgtaacgaccgtagaaagcgcaaaatccctgcgtgacgacacctgggtaaccctgcgcggcaatat

SEQ ID NO: 505903 - DNA, 75 bp, synthetic construct
  source 1..75: mol_type = other DNA
tcgtgagatatattggaaaaaccagttgggacgggaagttaatgtaattaggttggataacatcactgattttat

SEQ ID NO: 505904 - DNA, 75 bp, synthetic construct
  source 1..75: mol_type = other DNA
ccgtctgcgcaaagataaaaaacgcgaaaaagtgatgatcaacatagcagcaatgaccgttgatgcgctttcaga

SEQ ID NO: 505905 - DNA, 75 bp, synthetic construct
  source 1..75: mol_type = other DNA
gtaatcgcagaatggaccggcgtaccgcttaaccgcctgtcgcagaatgaaatgtcggtcatcaccaacctgccc

SEQ ID NO: 505906 - DNA, 75 bp, synthetic construct
  source 1..75: mol_type = other DNA
caaacttgaccctgtactgtgccgtgaccatgaaatcgacctgatgatcgacattctctgccgccgtcgtaaaaa

SEQ ID NO: 505907 - DNA, 75 bp, synthetic construct
  source 1..75: mol_type = other DNA
cgtcgataaaaaacagattgcggcggtgattgccgaatggaccggcgtaccgcttaaccgcctgtcgcagaatga

SEQ ID NO: 505908 - DNA, 75 bp, synthetic construct
  source 1..75: mol_type = other DNA
gaacaggataatatcggtgtcgcaccggctgatgaagctggcagcgcacagccggaagaaaccgcagaaacggtt

SEQ ID NO: 505909 - DNA, 75 bp, synthetic construct
  source 1..75: mol_type = other DNA
cgtggaggatacgccgtcagagtcagaacaggataatatcggtgtcgcaccggctgatgaagctggcagcgcaca

SEQ ID NO: 505910 - DNA, 75 bp, synthetic construct
  source 1..75: mol_type = other DNA
agagcgatattggcatggaagagttgcgccaggcgctgacggtggagaaatacccaaccgcccgttctgcggaca

SEQ ID NO: 505911 - DNA, 75 bp, synthetic construct
  source 1..75: mol_type = other DNA
ggcaacagtgatccctgagcatctgctgcatcactcaaccacgctgaatattaaggggggaaagctagctaccac

SEQ ID NO: 505912 - DNA, 75 bp, synthetic construct
  source 1..75: mol_type = other DNA
ggatacagccgccctctctgcctgcatttacctgccaaccatctggcgacgcgtcgtcgtcgtcgggggcttgat

SEQ ID NO: 505913 - DNA, 75 bp, synthetic construct
  source 1..75: mol_type = other DNA
aggtggctctgcaacagcctgttgccattttcgaaacacaaatcagtcaaatcacaacattaaaaaacaactgga

SEQ ID NO: 505914 - DNA, 75 bp, synthetic construct
  source 1..75: mol_type = other DNA
ggggtaaaagttgccggtatcactcaggactttaccgatggcacgaccaccaacaccgggcgaggtctggacgtt

SEQ ID NO: 505915 - DNA, 75 bp, synthetic construct
  source 1..75: mol_type = other DNA
cggtcgcgttttgcgttatttgtttcctgtttgcggttgtgctttgtggcgcacttgcggcagtgattagcttta

SEQ ID NO: 505916 - DNA, 75 bp, synthetic construct
  source 1..75: mol_type = other DNA
acgttaataatgcactttacgcacattcactgattgaaaaaattcgcattatttcagatgcaatagaagtttacc

SEQ ID NO: 505917 - DNA, 75 bp, synthetic construct
  source 1..75: mol_type = other DNA
attaaacgcttcataaaagcactaaaagccaaagtgcaaaaatgcactctggaacaaaatcaaccacttaaggta

SEQ ID NO: 505918 - DNA, 75 bp, synthetic construct
  source 1..75: mol_type = other DNA
ataaaacgcttcataaaagcactggaggccaaagtgcaaaaaagcactttggaacaaattcagccacttaaaata

SEQ ID NO: 505919 - DNA, 75 bp, synthetic construct
  source 1..75: mol_type = other DNA
accattattttatccgctcacggttggtgaaacgctttaccctactgaatcaggccgttgtgcaaattggtctgg

SEQ ID NO: 505920 - DNA, 75 bp, synthetic construct
  source 1..75: mol_type = other DNA
aacgatcttaaaaatgctgccaccgaaatactgaaaactaatgtgccagaggtcttgttggtgaaaacaggtatg

SEQ ID NO: 505921 - DNA, 75 bp, synthetic construct
  source 1..75: mol_type = other DNA
gcgcgtcctctgctcggctttaccggtgaggatgtgcagatgattgaagagattattctggcgcacctcgaccgt

SEQ ID NO: 505922 - DNA, 75 bp, synthetic construct
  source 1..75: mol_type = other DNA
gcggcgtttccgttcgcgttgatgacgaagggcgctataaccttaatgatcttcatgcagccgcagtggcaaacg

SEQ ID NO: 505923 - DNA, 75 bp, synthetic construct
  source 1..75: mol_type = other DNA
aagaattaagtgcccctccggattgaatataaattcttgctatccattagctttggttgatgaagctatcgctat

SEQ ID NO: 505924 - DNA, 75 bp, synthetic construct
  source 1..75: mol_type = other DNA
tgcgtgagcgcggtaaagtcatcgccgattacgaagaacgtaaagcgaagattaaagccgatgctgaagaagcgg

SEQ ID NO: 505925 - DNA, 75 bp, synthetic construct
  source 1..75: mol_type = other DNA
agggcgttatggggatgcactacgcacgtcacgatggcgaagcggaagatgtggcagtggcgctgaacgagcagt

SEQ ID NO: 505926 - DNA, 75 bp, synthetic construct
  source 1..75: mol_type = other DNA
gaaattcctcgcggtgccgtctgaagcactggtttacaccatgaaaggtgaccagaagtacttcccggtgtatgc

SEQ ID NO: 505927 - DNA, 75 bp, synthetic construct
  source 1..75: mol_type = other DNA
gggcgattcccgtcagtttccgctgtgtgaggaactgttcacttatgacaaaaacctgaatatcacccgccgcca

SEQ ID NO: 505928 - DNA, 75 bp, synthetic construct
  source 1..75: mol_type = other DNA
gcgtcatgatggtgaagcggaagatgtcgcggtggcgctgaacgagcagtatcaaccgcgctttgccggtgattc

SEQ ID NO: 505929 - DNA, 75 bp, synthetic construct
  source 1..75: mol_type = other DNA
gtgaacgcatctaccctgaaagagccggaagaaattaagctggcgatgcaggtggttgtactgcgcgacaagcta

SEQ ID NO: 505930 - DNA, 75 bp, synthetic construct
  source 1..75: mol_type = other DNA
ccgcgtcgtctggcgctgaaagtggctaatctggcgcaagcacagcccgatcgcgaaatcgaaaaacgcggcccg

SEQ ID NO: 505931 - DNA, 75 bp, synthetic construct
  source 1..75: mol_type = other DNA
ctaccgataaaggtgaatggctgctgtatcgcgcccacgtgaagggcgaaagcaccgaagcactgctgccgaata

SEQ ID NO: 505932 - DNA, 75 bp, synthetic construct
  source 1..75: mol_type = other DNA
gtacactgcgcgacaaaactgaccgcattcaggcgctggctggctggattgctgaacagattggcgctgacgtta

SEQ ID NO: 505933 - DNA, 75 bp, synthetic construct
  source 1..75: mol_type = other DNA
agcactgaagcactgctgccgaatatggttgcgacttcgctggcgaaactgccgattccgaaactgatgcgctgg

SEQ ID NO: 505934 - DNA, 75 bp, synthetic construct
  source 1..75: mol_type = other DNA
ccgcgtcgtctggcgctgaaagtcgctaacctggcggaggcgcaaccggatcgtgaaatagaaaaacgcggcccg

SEQ ID NO: 505935 - DNA, 75 bp, synthetic construct
  source 1..75: mol_type = other DNA
gctgggcgataaagttattccggcaaccattctggggattcaggccgatcgcgtgattcgtggtcatcgctttat

SEQ ID NO: 505936 - DNA, 75 bp, synthetic construct
  source 1..75: mol_type = other DNA
gcagaccatcgatgaattgctggatatgggaatcgtaaaaaacaaaatgccggatacgatgcgtgaatatgtcgc

SEQ ID NO: 505937 - DNA, 75 bp, synthetic construct
  source 1..75: mol_type = other DNA
ggaattatctttgacaacgatgaggataaaacggattcggcagcactgctgtcctgcattgaacaggcgagggag

SEQ ID NO: 505938 - DNA, 75 bp, synthetic construct
  source 1..75: mol_type = other DNA
aaaaactggccaccgagttagagttttttccagtatcgattttccgattcgtttggtggtaacccaccattatat

SEQ ID NO: 505939 - DNA, 75 bp, synthetic construct
  source 1..75: mol_type = other DNA
cgctggatattctgattgcgtggctgcaggacaatatcgactgcggatcgggaattatctttgacaacgatgagg

SEQ ID NO: 505940 - DNA, 75 bp, synthetic construct
  source 1..75: mol_type = other DNA
cgatcagcttaatgaacgtgcagaaaactttcttaacctggttgataaagtagataatcaggttgagcaacacct

SEQ ID NO: 505941 - DNA, 75 bp, synthetic construct
  source 1..75: mol_type = other DNA
ctgccctgcattgaacaggccagggaagatatccgtacactgcgccagttgcagcttctgcaacagaaccggtga

SEQ ID NO: 505942 - DNA, 75 bp, synthetic construct
  source 1..75: mol_type = other DNA
gagaatacagaatggcatcgagttgttatttataacaaactggcagagatatccagagattttttatgtaaagga

SEQ ID NO: 505943 - DNA, 75 bp, synthetic construct
  source 1..75: mol_type = other DNA
atgcctgccgggtttacccactttcaactggtaaccagtaacaacatgaaatcattaaccacggaaactgctctg

SEQ ID NO: 505944 - DNA, 75 bp, synthetic construct
  source 1..75: mol_type = other DNA
cactggatattctgattgcgtggctgcaggacaatatcgactgtgaatccgggattatcttcgacaacgatgagg

SEQ ID NO: 505945 - DNA, 75 bp, synthetic construct
  source 1..75: mol_type = other DNA
gcgtgcgtgacggtgaattacatctcaatccggcgttacctgagcagtggcaacagttgtctttccctctgttct

SEQ ID NO: 505946 - DNA, 75 bp, synthetic construct
  source 1..75: mol_type = other DNA
atgcctgccgggtttacccactttcgactggtaaccagcaacaacatgaaatcattaaccacggaaacagctctg

SEQ ID NO: 505947 - DNA, 75 bp, synthetic construct
  source 1..75: mol_type = other DNA
atgcctgccgggtttacccactttccactggtaaccaggaacaacatgaaatcattaaccacggaaacagctctg

SEQ ID NO: 505948 - DNA, 75 bp, synthetic construct
  source 1..75: mol_type = other DNA
atgcctgccgggtttacccactttctactggtaaccagtaacaacatgaaatcattaaccacggaaacggctctg

SEQ ID NO: 505949 - DNA, 75 bp, synthetic construct
  source 1..75: mol_type = other DNA
acaattaaacgaacgtgctgagaactttctaaatctggttgagaaaatagatagttcggttgagagtcaccttgt

SEQ ID NO: 505950 - DNA, 75 bp, synthetic construct
  source 1..75: mol_type = other DNA
ggaattatctttgacaacgatgaggatagaacggattcggcagcactgttgccctgtatcgaacaggcccgggag

SEQ ID NO: 505951 - DNA, 75 bp, synthetic construct
  source 1..75: mol_type = other DNA
cgctggatattctgattgcgtggctgcaggacaatatcgactgcgaatcggaaattatctttgacaacgatgagg

SEQ ID NO: 505952 - DNA, 75 bp, synthetic construct
  source 1..75: mol_type = other DNA
gctgccctgcattgaacagggaggatatccataccctgcgccaactgcagcttctgcaacagaaccggtgagcct

SEQ ID NO: 505953 - DNA, 75 bp, synthetic construct
  source 1..75: mol_type = other DNA
tgtcattccgggaacgccaacaactgacggtcattttgcaggacagtcgcttactgttatccgggttggatcgcg

SEQ ID NO: 505954 - DNA, 75 bp, synthetic construct
  source 1..75: mol_type = other DNA
acggattcggcagcactgttgccctgtattgaacaggccagggaggatatccgtaccctgcgccaactgcagctt

SEQ ID NO: 505955 - DNA, 75 bp, synthetic construct
  source 1..75: mol_type = other DNA
atgaaatcattaaccacggaaaccgcactggatattctgattgcgtggctgcaggacaatattgactgcgaatcg

SEQ ID NO: 505956 - DNA, 75 bp, synthetic construct
  source 1..75: mol_type = other DNA
acccacatcatccgtaacatacaggctgacggtctcgctgattttgccggtgctgcggaggctgtgagtgcggta

SEQ ID NO: 505957 - DNA, 75 bp, synthetic construct
  source 1..75: mol_type = other DNA
cccggcataaccagcggtaacagcgccgttcttcgcaggcttaaaggtatcgagggtaatacgtcgggcatgctt

SEQ ID NO: 505958 - DNA, 75 bp, synthetic construct
  source 1..75: mol_type = other DNA
gtcactgggaacaggttaaggcgttcatgctcggcacattccggtcgctgtgggctggccttgcgcctgttcgtg

SEQ ID NO: 505959 - DNA, 75 bp, synthetic construct
  source 1..75: mol_type = other DNA
tttaccaaagatgatgagttgaaactcggtgatgttcttggatggtgctttaatgattatgaaaaagatccgaaa

SEQ ID NO: 505960 - DNA, 75 bp, synthetic construct
  source 1..75: mol_type = other DNA
tccacgggcgctggcggtccgggggcagtggcatgaacctgtcgtcgcgccgtcttccggtggaatgcgcgcgct

SEQ ID NO: 505961 - DNA, 75 bp, synthetic construct
  source 1..75: mol_type = other DNA
tcacgagtattcgacccattttcgtaacatggggctgacagggtcggaaaccatgacgctccttgcggatatggc

SEQ ID NO: 505962 - DNA, 75 bp, synthetic construct
  source 1..75: mol_type = other DNA
gacagggtctgtcagcacttgaacagtcaggtgaacagcttgcgcgcgcaggtcgagagcttgagcagcaatgtc

SEQ ID NO: 505963 - DNA, 75 bp, synthetic construct
  source 1..75: mol_type = other DNA
gctgatcgacggctgcgactttgcccgcgcctacacctccggcgtgctgtcatttcaggagccagacattgcaga

SEQ ID NO: 505964 - DNA, 75 bp, synthetic construct
  source 1..75: mol_type = other DNA
gtgcaggttccggcagtggtcctgtggattacctgctgggaaaagaccgtcagcgcgaacaggccagcgtactgc

SEQ ID NO: 505965 - DNA, 75 bp, synthetic construct
  source 1..75: mol_type = other DNA
ctctctaccagccgaagccaaagataaaaaagttatcctggtgccgggtcaggtagaggacgatgcctctattaa

SEQ ID NO: 505966 - DNA, 75 bp, synthetic construct
  source 1..75: mol_type = other DNA
atcctcaagccgaaatttgggtgaaggtgcatccggatgtcctggaaggaaagaaaacaggttatttcgctgatc

SEQ ID NO: 505967 - DNA, 75 bp, synthetic construct
  source 1..75: mol_type = other DNA
gttctggttgtcgatcagacatttaatgatatgtcagtgacgtatggcaatgctggcccgcatgagtttgctgcc

SEQ ID NO: 505968 - DNA, 75 bp, synthetic construct
  source 1..75: mol_type = other DNA
gcggtgtacgcgcgacagaaggccagggctttaaagcggcggatatcattggtatcggtatcaatggcgtggatg

SEQ ID NO: 505969 - DNA, 75 bp, synthetic construct
  source 1..75: mol_type = other DNA
aaaaacactgaatgccattgatagccttgctgccagcggcgcgaaaggtttcgtcatttgtacgccggacccgaa

SEQ ID NO: 505970 - DNA, 75 bp, synthetic construct
  source 1..75: mol_type = other DNA
ctgcaggattcccggaaaaacaaatttatcaggtacctaccaaatctaacgacatcccgggggcatttgacgctg

SEQ ID NO: 505971 - DNA, 75 bp, synthetic construct
  source 1..75: mol_type = other DNA
gtgatcgttaaaattcattcgcggggtgcgggttcgggcagcgggccggtggattacctgctgggaaaagaccgg

SEQ ID NO: 505972 - DNA, 75 bp, synthetic construct
  source 1..75: mol_type = other DNA
cctaaattcactgaagttactgacgttgtgctgatcacgcgtgacaacttcaaagaagaactggagaaaaaaggg

SEQ ID NO: 505973 - DNA, 75 bp, synthetic construct
  source 1..75: mol_type = other DNA
ctgccaagcccggatgtccacggttataaatccagcgaaatgctttacaactgggtagcgaaagatgttgaaccg

SEQ ID NO: 505974 - DNA, 75 bp, synthetic construct
  source 1..75: mol_type = other DNA
gcctgcccttctatgccggttggggtttaaccgttgatgaacatcattgcccgcgccgcgagcgcagattaacga

SEQ ID NO: 505975 - DNA, 75 bp, synthetic construct
  source 1..75: mol_type = other DNA
atgacaaatgatttatatattaacggcagaaagattgatagcttcggggactggtcaccacagactgaacatcca

SEQ ID NO: 505976 - DNA, 75 bp, synthetic construct
  source 1..75: mol_type = other DNA
aatatgaagatgctaagaaggttgctatgcaggctgatattgagcagttagtgaagatttctcagaaatacgcaa

SEQ ID NO: 505977 - DNA, 75 bp, synthetic construct
  source 1..75: mol_type = other DNA
catatgaaacgcagaagaaggttgctatgcaggctgatattgagcagcttacgaagatttctcagaagtatagca

SEQ ID NO: 505978 - DNA, 75 bp, synthetic construct
  source 1..75: mol_type = other DNA
atgaagatgctaagaaggttgctatgcaggctgatattgagcagttagtgaagatttctagcaaatatgcaaagg

SEQ ID NO: 505979 - DNA, 75 bp, synthetic construct
  source 1..75: mol_type = other DNA
ctggtcgccacagactgaacatccagctatcactattcagcgcaaagaacacgatgaaagaattgcacttgagca

SEQ ID NO: 505980 - DNA, 75 bp, synthetic construct
  source 1..75: mol_type = other DNA
ttcaggatgaattgtcacagaagccgtatgtttattactcatacgaagacaatgatggttttggtatttatccag

SEQ ID NO: 505981 - DNA, 75 bp, synthetic construct
  source 1..75: mol_type = other DNA
cagcgaactgtccgccctgcagcgccttgagtatctggcctgggtgaaggagaaggaagaacagcggggggaggg

SEQ ID NO: 505982 - DNA, 75 bp, synthetic construct
  source 1..75: mol_type = other DNA
ttcgagaagcacgagaaacgtatcaccgaggccttgaaattaagctcagggaacatacagaccgctatccaagaa

SEQ ID NO: 505983 - DNA, 75 bp, synthetic construct
  source 1..75: mol_type = other DNA
gtcatcaagtacagcgccaaataacctcatcagacgccacagaatcgattctgggcggttttatctatcagggtg

SEQ ID NO: 505984 - DNA, 75 bp, synthetic construct
  source 1..75: mol_type = other DNA
gctgggaaacgatgctctcggttatttactgaaaaaaggtgatatcactgacgcagaataccgggcggccctgga

SEQ ID NO: 505985 - DNA, 75 bp, synthetic construct
  source 1..75: mol_type = other DNA
aggaaaaaatatcctcatcattggcggcggtgtcagcggtgcggatattgcctcagaccttgttccctttgccag

SEQ ID NO: 505986 - DNA, 75 bp, synthetic construct
  source 1..75: mol_type = other DNA
cgctattaagttcgtcgacgcatctcaggaaaaatatgatgtaatcataacctgtacaggctatgaaatgcctga

SEQ ID NO: 505987 - DNA, 75 bp, synthetic construct
  source 1..75: mol_type = other DNA
tcgttatttgtactccggacccgaaactcggctctgccatcgtggcgaaagcgcgtggctacgatatgaaagtca

SEQ ID NO: 505988 - DNA, 75 bp, synthetic construct
  source 1..75: mol_type = other DNA
gatatgctgggccgcctgctgagtgtgaaagacccgctgggcttcaccacgcagttccgccacagcaaaacccac

SEQ ID NO: 505989 - DNA, 75 bp, synthetic construct
  source 1..75: mol_type = other DNA
atagcggaccatgccccgctgacatttgagcatgacctgcgcggcatggaaacctcccgacgcagcgaggccgga

SEQ ID NO: 505990 - DNA, 75 bp, synthetic construct
  source 1..75: mol_type = other DNA
ccgcttcattctggaggattcatggccattacagcagatggctgacacctgccgggatacggtcgtcctgctgga

SEQ ID NO: 505991 - DNA, 75 bp, synthetic construct
  source 1..75: mol_type = other DNA
gcaggttcgagatctgatgaccaaatatcctagtcaattagagaagattcagtctggtatgaagtgggcagacga

SEQ ID NO: 505992 - DNA, 75 bp, synthetic construct
  source 1..75: mol_type = other DNA
tttaccggggatgctgatgctataaataccactttattacgccttacttccagcgcggatagtgcaactggagtg

SEQ ID NO: 505993 - DNA, 75 bp, synthetic construct
  source 1..75: mol_type = other DNA
atagccgaccatgccccgctgacatttgaacatgacctgcgcggcatggaaacgtcccgacgcagcgaggccggg

SEQ ID NO: 505994 - DNA, 75 bp, synthetic construct
  source 1..75: mol_type = other DNA
tgacctgctgactacgctggttcgtcctgacggcgagcggctggcgtgtcgctacgataaacttacccgcttaac

SEQ ID NO: 505995 - DNA, 75 bp, synthetic construct
  source 1..75: mol_type = other DNA
caaaggctggcggcatcagacacaccgcatcaacccggacacaggaaagccggaagagggaaaatttgtccgggt

SEQ ID NO: 505996 - DNA, 75 bp, synthetic construct
  source 1..75: mol_type = other DNA
ctgttgcgccagacggcggcatcacgcagaccgaacaggatattctcgggcgtctgctgagtgtcaaagatccac

SEQ ID NO: 505997 - DNA, 75 bp, synthetic construct
  source 1..75: mol_type = other DNA
tgttgcgggagaaaatggacggaatggcgcttatcctgctgccggattcgtttcctgacaaaaagtacgtcatgt

SEQ ID NO: 505998 - DNA, 75 bp, synthetic construct
  source 1..75: mol_type = other DNA
tgatgccaataacgtttatctggcaacaacctattctgaaacacagaatatgacagcttttgctggtgactttat

SEQ ID NO: 505999 - DNA, 75 bp, synthetic construct
  source 1..75: mol_type = other DNA
ttcggtcggcgcatcagcaaacggtgtaccaaccgtgataagcccggaatggattttcactggaatggcgatcag

SEQ ID NO: 506000 - DNA, 75 bp, synthetic construct
  source 1..75: mol_type = other DNA
cgaggcatcagtgctgatctcaacaggcattaacgccacgcaaaccaaccacggtcgccagcatctggatgaaac

SEQ ID NO: 506001 - DNA, 75 bp, synthetic construct
  source 1..75: mol_type = other DNA
ccgtgcgcgagcgtaacccggaggcgtttatcgtttttaagccgcacccggatgtgctggtcggtaatcgtaaag

SEQ ID NO: 506002 - DNA, 75 bp, synthetic construct
  source 1..75: mol_type = other DNA
cgcctgatgctggagaccgcgaaagcggaaaaccccaacgccgaagtgtgggtgaaagtgcacccggacgtattg

SEQ ID NO: 506003 - DNA, 75 bp, synthetic construct
  source 1..75: mol_type = other DNA
accaggccaagcgatctggagaacctgctgaacgccagcaacctgagcgaacgccagcgcgcccgtgcgcaggcg

SEQ ID NO: 506004 - DNA, 75 bp, synthetic construct
  source 1..75: mol_type = other DNA
agtaactgctcatcgatcttgcaatcgatgagtatgagcctgagagatgctataaaaatatacgaaagattaatc

SEQ ID NO: 506005 - DNA, 75 bp, synthetic construct
  source 1..75: mol_type = other DNA
aaagccggtacaatgaaagtgaactaaaaattcatcaatatttcgatttaattgaactgagcacaacatttgatt

SEQ ID NO: 506006 - DNA, 75 bp, synthetic construct
  source 1..75: mol_type = other DNA
caaccatttcgcataccgcagtggtctggttgattgcctttggcgggatggtgatcagcaagcgctttactgctc

SEQ ID NO: 506007 - DNA, 75 bp, synthetic construct
  source 1..75: mol_type = other DNA
ctgctgttggcgattgcagtagtgtgggtaatcaagacgattaaagcaccaaaagtgccgaaatatcagcgctat

SEQ ID NO: 506008 - DNA, 75 bp, synthetic construct
  source 1..75: mol_type = other DNA
atctaagaatagatttatacaatgttgatggggaaatatatttaggagaaataactatttatcatgggggagggt

SEQ ID NO: 506009 - DNA, 75 bp, synthetic construct
  source 1..75: mol_type = other DNA
atgaatttaatattctctaaatattctgtattttttattcttttcgttttttttgcttttccgctctcagggcag

SEQ ID NO: 506010 - DNA, 75 bp, synthetic construct
  source 1..75: mol_type = other DNA
gttaatactgtcagtatctttagggggaaaggaacgccgggagacctgtattatgacacttctaccgggcaatat

SEQ ID NO: 506011 - DNA, 75 bp, synthetic construct
  source 1..75: mol_type = other DNA
acgtatcaatgccccaaaaaacttcaacccgctatcgcaatcccggaggacgctagtgcatctttattaccttca

SEQ ID NO: 506012 - DNA, 75 bp, synthetic construct
  source 1..75: mol_type = other DNA
cgaatgtaaggcgtttcctcaatcaagggctgttacctccgccagacgctgtgcgggtggaggagatagtcaatt

SEQ ID NO: 506013 - DNA, 75 bp, synthetic construct
  source 1..75: mol_type = other DNA
ttgccaaactgcgctattcggtgccgggcgtgacgctgatctccccgccgccgcaccatgatatctactctatcg

SEQ ID NO: 506014 - DNA, 75 bp, synthetic construct
  source 1..75: mol_type = other DNA
aagggcaagttggcgcttttggtgaaggtggacgccacggatgaactggtcgaactgaagaagaaacgccagaaa

SEQ ID NO: 506015 - DNA, 75 bp, synthetic construct
  source 1..75: mol_type = other DNA
tgcgcagggtgcttcatgaggtcagcccttttgcacaggagcctgtggactgtgtgttgtgggtgaaagcggatg

SEQ ID NO: 506016 - DNA, 75 bp, synthetic construct
  source 1..75: mol_type = other DNA
attggcacagaactgggaatggaccaggatgaggtgttgagactgaaacagattagcgggctgacggagctgttt

SEQ ID NO: 506017 - DNA, 75 bp, synthetic construct
  source 1..75: mol_type = other DNA
cgttatgtgcgttcctatgcacctgcacagcaaagtgttgcgccagggagcgaatggatcgggatgcaggtgaaa

SEQ ID NO: 506018 - DNA, 75 bp, synthetic construct
  source 1..75: mol_type = other DNA
gcgaaacagcaggggcaattgctggaaaaagcgcgtaatgaaatgggcgaactggcctatatggtgccggtgaaa

SEQ ID NO: 506019 - DNA, 75 bp, synthetic construct
  source 1..75: mol_type = other DNA
gtcaccgaacagggcgacagttatgatttgcagattcggggcttgagtatagatcaacttgttaaaattacaggg

SEQ ID NO: 506020 - DNA, 75 bp, synthetic construct
  source 1..75: mol_type = other DNA
ggaaaggtgctgcagcacgtattgccgccaccatcagacataaccgggcaagaggaaaacatcagataacgtcaa

SEQ ID NO: 506021 - DNA, 75 bp, synthetic construct
  source 1..75: mol_type = other DNA
tactgggtaacatgatttgtcagtatttcagtcaggtacgaactgaagaagagaccatacagactctgaatcatc

SEQ ID NO: 506022 - DNA, 75 bp, synthetic construct
  source 1..75: mol_type = other DNA
tactgggtgaaatgattcaccggtatttcagtcaggcactaactgaagaagaaaccatacaggccctgaattatc

SEQ ID NO: 506023 - DNA, 75 bp, synthetic construct
  source 1..75: mol_type = other DNA
tgtctcagaagagaaggattattatctggtcgtggatggttttcatcgtcagttactgggcagggaagcagatac

SEQ ID NO: 506024 - DNA, 75 bp, synthetic construct
  source 1..75: mol_type = other DNA
gagaaaacgtctgaagggctggctgccagtgacctgtattaatccggaaagaaagggacaggcatcacgtattgc

SEQ ID NO: 506025 - DNA, 75 bp, synthetic construct
  source 1..75: mol_type = other DNA
cttcagccaggaacgagcagaagaagagactatacaggccctgaatcacctgcgcagggtgcttcatgaggtcag

SEQ ID NO: 506026 - DNA, 75 bp, synthetic construct
  source 1..75: mol_type = other DNA
cggcagatcatgaggtggtttattacggtcaggagtaccggatccggcgaatacgcgacctgaacggtcagcggc

SEQ ID NO: 506027 - DNA, 75 bp, synthetic construct
  source 1..75: mol_type = other DNA
aattccgccactatgggcgctctgttatttggaggcgctacggctgctgctggcgtgatggctatgaataaagca

SEQ ID NO: 506028 - DNA, 75 bp, synthetic construct
  source 1..75: mol_type = other DNA
gggaattccgccactatgggcgctctgttatttggaggcgctacagcggctgctggcgtgatggctgttagtaaa

SEQ ID NO: 506029 - DNA, 75 bp, synthetic construct
  source 1..75: mol_type = other DNA
cttggtggagttgattacaacttacttaataatcttgagcgttgggcatatgacaacgggatcgatagcctccag

SEQ ID NO: 506030 - DNA, 75 bp, synthetic construct
  source 1..75: mol_type = other DNA
ccgagcatgttgaccgcacgctgcaactgattaaagaaaatggctgtaaagcgggtctggtatttaacccggcga

SEQ ID NO: 506031 - DNA, 75 bp, synthetic construct
  source 1..75: mol_type = other DNA
atggataaccactatgttcccaatctgacgattgggccaatggtgctgaaatccttgcgtaactacggcattacc

SEQ ID NO: 506032 - DNA, 75 bp, synthetic construct
  source 1..75: mol_type = other DNA
acggcattaccgcccctatcgacgtacatctgatggtgaaaccagttgatcgcattgtgccggatttcgttgccg

SEQ ID NO: 506033 - DNA, 75 bp, synthetic construct
  source 1..75: mol_type = other DNA
caattttcaatgagacaacgatagagggaatgttaaaatattattccgacagcaatcgctcttttgctcttgtat

SEQ ID NO: 506034 - DNA, 75 bp, synthetic construct
  source 1..75: mol_type = other DNA
ggtttctgcttcttgagtgcaccgaactgggtttatttacagaaaataccggagggaattccagtggcggaaccc

SEQ ID NO: 506035 - DNA, 75 bp, synthetic construct
  source 1..75: mol_type = other DNA
aactggctggcgaaatatatggcgacaatgcctccagttgttttgcctgcgcctgcgggcgcatgggctaaacat

SEQ ID NO: 506036 - DNA, 75 bp, synthetic construct
  source 1..75: mol_type = other DNA
caatttttaatgagacaacgatagagggaatgttaaaatattactccgacagcaatcgctcttttgctcttgtat

SEQ ID NO: 506037 - DNA, 75 bp, synthetic construct
  source 1..75: mol_type = other DNA
agggagtctcttttttatctgaatgtgctggacattccagcaaaaccagaaaataaggattccgggagtgctgag

SEQ ID NO: 506038 - DNA, 75 bp, synthetic construct
  source 1..75: mol_type = other DNA
tggctcgctgattatgatcttcgaagttgaaggcgcagcgcctgcggcagctcctgcgaaacaggaagcggcagc

SEQ ID NO: 506039 - DNA, 75 bp, synthetic construct
  source 1..75: mol_type = other DNA
caattgaccgacgcgctggcgcaggtcaccgatccgatagacattgttttttgttgccttggcaccacgcggcgg

SEQ ID NO: 506040 - DNA, 75 bp, synthetic construct
  source 1..75: mol_type = other DNA
atgggggatcctttaacgccggaaatactggcagccatgatccgtcagtatttctgtcagcacctgtcagaagaa

SEQ ID NO: 506041 - DNA, 75 bp, synthetic construct
  source 1..75: mol_type = other DNA
aaatttcagcagggtggggaagcaatagttatcagaactatgatgtctctacgcagcaacaactgggggataaga

SEQ ID NO: 506042 - DNA, 75 bp, synthetic construct
  source 1..75: mol_type = other DNA
ctatgataaccgtaccaattatgacgcgtattattctcccggctcaccgttgctcgatacccgtaaactctatag

SEQ ID NO: 506043 - DNA, 75 bp, synthetic construct
  source 1..75: mol_type = other DNA
cgcgaggcgcaacaaaaagctgaacgtgaggctgcagaacaagctaagcgtgaagctgctgaacaagcgaaacgt

SEQ ID NO: 506044 - DNA, 75 bp, synthetic construct
  source 1..75: mol_type = other DNA
atcgtcagctgctgggcaggaaagtggatacgagaaaacgtctgaagggctggctgccagtggcctgtattaatc

SEQ ID NO: 506045 - DNA, 75 bp, synthetic construct
  source 1..75: mol_type = other DNA
gaaagggacaggcctcacgtattgctgcgaccatccgacataaccgggccagggggaaacatcagataacctcaa

SEQ ID NO: 506046 - DNA, 75 bp, synthetic construct
  source 1..75: mol_type = other DNA
cttcaatgtctgaaattgtcagggacctatcacggctgggctggacagatgaccgaattggaacagaggctgggc

SEQ ID NO: 506047 - DNA, 75 bp, synthetic construct
  source 1..75: mol_type = other DNA
cgggccagggggaaacaccagataacgtcaatgtctgaaattgtcagggacctttcccggctgggctggacagat

SEQ ID NO: 506048 - DNA, 75 bp, synthetic construct
  source 1..75: mol_type = other DNA
cgggccagggggaaacaccagataacgtcaatgtctgaaattgtcagggacctttcccgtctgggctggactgat

SEQ ID NO: 506049 - DNA, 75 bp, synthetic construct
  source 1..75: mol_type = other DNA
ttaaaatgggcggtgtgagcttgtgggatcttgcggttgcgtatccggtcacctctcatctgacagttcgtggta

SEQ ID NO: 506050 - DNA, 75 bp, synthetic construct
  source 1..75: mol_type = other DNA
cttcaatgtctgaaattgtcagggacctgtcacgactgggctggacagatgagcgaattggaacagaggctgggc

SEQ ID NO: 506051 - DNA, 75 bp, synthetic construct
  source 1..75: mol_type = other DNA
cttcaatgtctgaaattgtcagggacctctcacggctgggctggacagatgaacgaattggaacagaggctgggc

SEQ ID NO: 506052 - DNA, 75 bp, synthetic construct
  source 1..75: mol_type = other DNA
gcggtaaaggcggaaaacgtaaaggttcttccctgcagcaaggcttccagaagcctgctcaggccgttaaccgtg

SEQ ID NO: 506053 - DNA, 75 bp, synthetic construct
  source 1..75: mol_type = other DNA
tttaatccccatgatccgcaactgagtgacgcgctggcgcaggtcaccgatcccatcgacattgtgttttgttgt

SEQ ID NO: 506054 - DNA, 75 bp, synthetic construct
  source 1..75: mol_type = other DNA
agcgattatcacgttactacttctcaacatgctcgccaggcagaagacgaaagcgatcgtgaagtcgaaggcggc

SEQ ID NO: 506055 - DNA, 75 bp, synthetic construct
  source 1..75: mol_type = other DNA
gcggtaatgagtgaccgtgatacaggtgctgcggctgaaccgcgtgcaccggttgtgaccatcatgggacacgtt

SEQ ID NO: 506056 - DNA, 75 bp, synthetic construct
  source 1..75: mol_type = other DNA
gggtcatgctggcagaagccatgcggcctgaacatgaaggggtgactattttaagctcttcagaactacgcaaaa

SEQ ID NO: 506057 - DNA, 75 bp, synthetic construct
  source 1..75: mol_type = other DNA
gggtcatgctggcagaggcgatgcggcccgagcatgaaggtgtgacgattttaagctcttcagaattacgcaaaa

SEQ ID NO: 506058 - DNA, 75 bp, synthetic construct
  source 1..75: mol_type = other DNA
atgaaacgctttttgcgccgctttttcgtttgctaccgggtaactggaaatccattgatgcacgagacgtggcgc

SEQ ID NO: 506059 - DNA, 75 bp, synthetic construct
  source 1..75: mol_type = other DNA
gaaacgcgatccgcaagaggctgaacgccttgcagcggaagagcaagcccgtcgtgaggcagaagaatcggctaa

SEQ ID NO: 506060 - DNA, 75 bp, synthetic construct
  source 1..75: mol_type = other DNA
taaaggcgacatcgttctgtgtggtttcgaatacggccgtgttcgtgcaatgcgtaacgaactgggtcaggaagt

SEQ ID NO: 506061 - DNA, 75 bp, synthetic construct
  source 1..75: mol_type = other DNA
tttacgtcaatgcgtgcacgtggtgcgcaggcaacggacatcgtcgtcctggttgtcgctgcagatgacggcgta

SEQ ID NO: 506062 - DNA, 75 bp, synthetic construct
  source 1..75: mol_type = other DNA
gcggtaaaggcggaaaacgcaaaggttcttcactgcagcagggcttccagaagccagctcaggccgttaaccgtg

SEQ ID NO: 506063 - DNA, 75 bp, synthetic construct
  source 1..75: mol_type = other DNA
cagaaaaattcagggccggacaaattaacgctgcaacgtaaaacacgtagcacccttaacattcctggtaccggt

SEQ ID NO: 506064 - DNA, 75 bp, synthetic construct
  source 1..75: mol_type = other DNA
acagactttaattgaccacctgaatcagaaaaattcagggccggacaaattaacgctgcaacgtaaaacacgtag

SEQ ID NO: 506065 - DNA, 75 bp, synthetic construct
  source 1..75: mol_type = other DNA
tttatggtaaagctgtaggcagtggcggaggtagtgagtgcagaagtgctgaaaaggatttttttaatattctga

SEQ ID NO: 506066 - DNA, 75 bp, synthetic construct
  source 1..75: mol_type = other DNA
cgctgatagatgccgatatgccggttatcgtcgttgcgccgaacaacgagttgttggaaaaactgaaatctaaca

SEQ ID NO: 506067 - DNA, 75 bp, synthetic construct
  source 1..75: mol_type = other DNA
gtaacagcaatcagggaggccgccaccacagggaaaatcacaccggcaattgcggatgtcgtaaacgacggctct

SEQ ID NO: 506068 - DNA, 75 bp, synthetic construct
  source 1..75: mol_type = other DNA
tatgagatcaccacagcacagtttggcaccattggcatttacagcaataaagacgagatcaagcagacaatggac

SEQ ID NO: 506069 - DNA, 75 bp, synthetic construct
  source 1..75: mol_type = other DNA
tccagccagcatcgcacaacgtaacggtcgcggtgcacgagttggctccaaccgtgcaagcgttcgcgttcacta

SEQ ID NO: 506070 - DNA, 75 bp, synthetic construct
  source 1..75: mol_type = other DNA
ccgttcagtaaacatcttcgataaatctggcacggaagttaaacgccaggatatcgaatccaatctgcaatatga

SEQ ID NO: 506071 - DNA, 75 bp, synthetic construct
  source 1..75: mol_type = other DNA
atggaagcggataaaaagcttatccattattggcaggatactttgagcaggaaaaacaacaatatcaaaatattg

SEQ ID NO: 506072 - DNA, 75 bp, synthetic construct
  source 1..75: mol_type = other DNA
atatgatggaagcagataaaaaactcatccattactggcaggatacattaagcagaaaacataacaacatcaaaa

SEQ ID NO: 506073 - DNA, 75 bp, synthetic construct
  source 1..75: mol_type = other DNA
cgcgctgttcctgggccgtggcgatcagtatcccatcgcgctggaaggcgcattgaagctgaaagagatctccta

SEQ ID NO: 506074 - DNA, 75 bp, synthetic construct
  source 1..75: mol_type = other DNA
ccgttcggtaaacatcttcgataaatctggcgcggtagtaaaacgccaggatatcgaatccaatctgcaatatga

SEQ ID NO: 506075 - DNA, 75 bp, synthetic construct
  source 1..75: mol_type = other DNA
cggtgattatggacacccgcaacccggatactttgctggcggcacgttctggtagcccgctggtgattggcctcg

SEQ ID NO: 506076 - DNA, 75 bp, synthetic construct
  source 1..75: mol_type = other DNA
ttgaagtcaccaatgccattttcggtaccaatgagttccgggcgtcagattatgagatcaccacagcacagtttg

SEQ ID NO: 506077 - DNA, 72 bp, synthetic construct
  source 1..72: mol_type = other DNA
atgtccttaaaaggtcttcgctttacgctggaggttgacggccaggagccggacacctttgcagtggtgaat

SEQ ID NO: 506078 - DNA, 75 bp, synthetic construct
  source 1..75: mol_type = other DNA
ttgatcagattcgtgaagttagcgaccgtgagtttgctgcggtgccaatccgtaccggtcatccgcaaaacgaag

SEQ ID NO: 506079 - DNA, 75 bp, synthetic construct
  source 1..75: mol_type = other DNA
ctccgctgccgtgacgctgtaaaacagggcacgaccgcgtggcgttttcgtaaatgggtaacgaacgaggtcttg

SEQ ID NO: 506080 - DNA, 75 bp, synthetic construct
  source 1..75: mol_type = other DNA
gaaggtgcatattcccacgcatggcgatcgctcaataacattcatgccgatcacgtaataacatccatgccgatc

SEQ ID NO: 506081 - DNA, 75 bp, synthetic construct
  source 1..75: mol_type = other DNA
agtgctgaacaaatcgaacagcagcgcctttctctggtatcccgtttgcaggcagagattgaccgttttggtaac

SEQ ID NO: 506082 - DNA, 75 bp, synthetic construct
  source 1..75: mol_type = other DNA
cggtttcaccgtatggcgggattgttccgttcgcccgcgccaccagcggcgacattaacgagatagtggctccaa

SEQ ID NO: 506083 - DNA, 75 bp, synthetic construct
  source 1..75: mol_type = other DNA
cgacaactatggtgaagacagttacaacgaagtcttatcattaaaacgggcgaatgtcgtggccgatgcatgggc

SEQ ID NO: 506084 - DNA, 75 bp, synthetic construct
  source 1..75: mol_type = other DNA
gtctgggagatcatgaagctctacggcgcggacgtaggtaacactctggaaccatcggcgggcaccggcgttttt

SEQ ID NO: 506085 - DNA, 75 bp, synthetic construct
  source 1..75: mol_type = other DNA
gcgtggaaaaggtggaaggcaaaagctatgaccgactgcgccgggaggcgaatcagaaggcgatagatttgctta

SEQ ID NO: 506086 - DNA, 75 bp, synthetic construct
  source 1..75: mol_type = other DNA
gtgattttaatactccaccctttaaaaaagtgccggcttactggcttcatccggggctgacttatcttaaagtgc

SEQ ID NO: 506087 - DNA, 75 bp, synthetic construct
  source 1..75: mol_type = other DNA
aggatttgtttgaacagaggataaatgaactcattgatgaaagcctggctatgaggggagagcggcgttgccttc

SEQ ID NO: 506088 - DNA, 75 bp, synthetic construct
  source 1..75: mol_type = other DNA
taaaaaagataaactcaactggttactgggtttactgtatgagcaaaacagagttgtacagtttattgacgacaa

SEQ ID NO: 506089 - DNA, 75 bp, synthetic construct
  source 1..75: mol_type = other DNA
atggtcatacattattgttgatcactaaaccgtctttgcaagcgacagctctcttgcagcaccttaaacaatcgc

SEQ ID NO: 506090 - DNA, 75 bp, synthetic construct
  source 1..75: mol_type = other DNA
tcttgaaggtttacgtcgtctggaataccgcggatatgactctgccggtctggccgttgttgatgcagaaggtca

SEQ ID NO: 506091 - DNA, 75 bp, synthetic construct
  source 1..75: mol_type = other DNA
caacacaccaggcaatgatgattacgaggtcgatccttttacgccagcagagacagcagcaatctatgacgcctg

SEQ ID NO: 506092 - DNA, 75 bp, synthetic construct
  source 1..75: mol_type = other DNA
caacacaccaggcagtgatgattacgaggtcgatccttttacaccagcggagacggcagcaatctatgacgcctg

SEQ ID NO: 506093 - DNA, 75 bp, synthetic construct
  source 1..75: mol_type = other DNA
ctattgactctggttaaaaacacgcttgatacgcgtactgttcgcggacttggcttaatctcccgccattcgttg

SEQ ID NO: 506094 - DNA, 75 bp, synthetic construct
  source 1..75: mol_type = other DNA
tggcttaccacgttgcgctgatcaaaggcacagacgttgaccagccgcgtaacctggcaaaatcggttacggttg

SEQ ID NO: 506095 - DNA, 75 bp, synthetic construct
  source 1..75: mol_type = other DNA
tggcctatcacgttgcgctgattaaaggcactgacgttgaccagccgcgtaatctggcaaaatcggtaacggttg

SEQ ID NO: 506096 - DNA, 75 bp, synthetic construct
  source 1..75: mol_type = other DNA
gtatcgcccgtaccgtcgcagaacgcgtgtcagacctgaaacactcaccactgagcgaacagccgctaaaacgcc

SEQ ID NO: 506097 - DNA, 75 bp, synthetic construct
  source 1..75: mol_type = other DNA
cttcttgaacaaaagacgaacggcaaatgtagcgcttcactgtacgattgcagcgaagaggaaaagctgtttgtt

SEQ ID NO: 506098 - DNA, 75 bp, synthetic construct
  source 1..75: mol_type = other DNA
ctcaggttgatccgctctgatatccacagtcaactccgcagcgttaactgcgatgtcatgggagaagacgacaaa

SEQ ID NO: 506099 - DNA, 75 bp, synthetic construct
  source 1..75: mol_type = other DNA
gataccgcggcctgccgtgaagtctggcaacatgccaaacgaatgctggcagatccttcactggatatggttttg

SEQ ID NO: 506100 - DNA, 75 bp, synthetic construct
  source 1..75: mol_type = other DNA
taccgcgcggcgtaacaatcaggaaacaccgccagggagaaacgatcaatataactttcacctacaaaggagtta

SEQ ID NO: 506101 - DNA, 75 bp, synthetic construct
  source 1..75: mol_type = other DNA
caggcattatggttcgtatctcgtagactatgatggcaagacagcttgtaaggaccaagtatcaaaaaatccgga

SEQ ID NO: 506102 - DNA, 75 bp, synthetic construct
  source 1..75: mol_type = other DNA
ctggatattatttggatcttttgcgcgacgctggcagcaagtttgttactttctgtgctggtgcaacgaatcgac

SEQ ID NO: 506103 - DNA, 75 bp, synthetic construct
  source 1..75: mol_type = other DNA
aacttaccgggttatttgctgcgttatcagtgatgttctggtgttttgtcggtctggaagcatttgcccatcttg

SEQ ID NO: 506104 - DNA, 75 bp, synthetic construct
  source 1..75: mol_type = other DNA
ataatctcccgaagggaaaagccgatgaggccatttcaggcgtacttcaacatgcattcgtcagtgtcatctgcc

SEQ ID NO: 506105 - DNA, 75 bp, synthetic construct
  source 1..75: mol_type = other DNA
cctcaagcgtgcaaaagatggcgagcaccagacagtaatgatgggctggactggcgacaatggggacccggataa

SEQ ID NO: 506106 - DNA, 75 bp, synthetic construct
  source 1..75: mol_type = other DNA
ctgaaggtattgccctgacatttcgtgttcctgaaggaaatataaaacatcctttgattatcttatgccatggat

SEQ ID NO: 506107 - DNA, 75 bp, synthetic construct
  source 1..75: mol_type = other DNA
tgaaggggaacgaggtcgtctggttccggcaatgcagaccgaagatattatttcagttatcaattgggcagaaaa

SEQ ID NO: 506108 - DNA, 75 bp, synthetic construct
  source 1..75: mol_type = other DNA
ccgggcctcgctgaaaagtgggaagtcagcgaagacggtaaaacctataccttccatctgcgtaaaggtgtgaag

SEQ ID NO: 506109 - DNA, 75 bp, synthetic construct
  source 1..75: mol_type = other DNA
gcatcccgaaatggatataaaaatacctttccttacggtcatggaaacgttgcaatataaaccggcagagagcgc

SEQ ID NO: 506110 - DNA, 75 bp, synthetic construct
  source 1..75: mol_type = other DNA
cgtgtcagcgtaccgctatttttcatgatttccggctatctctttttcggcgaacggagtgcccagccgcgtcat

SEQ ID NO: 506111 - DNA, 75 bp, synthetic construct
  source 1..75: mol_type = other DNA
ctgatcatcgctcactccaccgtgtttgaaccggtacgcaaagaagttaaaggctatgtggttgatccattaggc

SEQ ID NO: 506112 - DNA, 75 bp, synthetic construct
  source 1..75: mol_type = other DNA
cagaagaatgaatgccaggtgatgccgtacccgaacccggcagatatcgctcgcatgaagcaggataaatccatc

SEQ ID NO: 506113 - DNA, 75 bp, synthetic construct
  source 1..75: mol_type = other DNA
taaaatcggcaccaccgaagtgattccgggcctcgctgaaaagtgggaagtcagcgaagacggtaaaacctatac

SEQ ID NO: 506114 - DNA, 75 bp, synthetic construct
  source 1..75: mol_type = other DNA
tggtcaggcggtaagcacgaccctcgcaaagataatttcatgtggatgatgtttgaaaaaaaagactgctgcgtg

SEQ ID NO: 506115 - DNA, 75 bp, synthetic construct
  source 1..75: mol_type = other DNA
tacagcctttaactcactaattccgttagcacatgctgagtgcaaaacatcatttttgaatcctgttacagacat

SEQ ID NO: 506116 - DNA, 75 bp, synthetic construct
  source 1..75: mol_type = other DNA
agtaatcattccatcatacaaagatcacgtagcgatcttgcaaaaacaattaggaatagaaaaacattcttttca

SEQ ID NO: 506117 - DNA, 75 bp, synthetic construct
  source 1..75: mol_type = other DNA
ctgccgattgctggctggaggtcactgatgctaccggtaaaaaactgtttagcggtatgcagcgtaaagacggta

SEQ ID NO: 506118 - DNA, 75 bp, synthetic construct
  source 1..75: mol_type = other DNA
atgttgcttagcataatcaccgtcgcgtttcgtaacatcgaagggatagtcaaaacgcacgcctcgctggcgcat

SEQ ID NO: 506119 - DNA, 75 bp, synthetic construct
  source 1..75: mol_type = other DNA
cctggcttctgggcagaattatcctggcatttacgccaacgtactacctcaaagacgaaagccttatataacaaa

SEQ ID NO: 506120 - DNA, 75 bp, synthetic construct
  source 1..75: mol_type = other DNA
gagcaggccggaaatttgccgaaacactgcgcggtaatgcggctacccattacggccacgccgggccggagtttg

SEQ ID NO: 506121 - DNA, 75 bp, synthetic construct
  source 1..75: mol_type = other DNA
gagacggcggagaactccggcaggaactgctacgcatgggcgttaccattccctacaaacaacggcaggcactga

SEQ ID NO: 506122 - DNA, 75 bp, synthetic construct
  source 1..75: mol_type = other DNA
aacgatgaactggttgttctggttacagggcgcggcaccgttcctcggcggtggttttggtcacttttaccatta

SEQ ID NO: 506123 - DNA, 75 bp, synthetic construct
  source 1..75: mol_type = other DNA
agttgaagttactgtataaacagtcagtgctcattccatcatacaaagatcacgtagcgatcttgcaaaaacaat

SEQ ID NO: 506124 - DNA, 75 bp, synthetic construct
  source 1..75: mol_type = other DNA
ttaaaaaacttgctcttggctcagtaagcgagctttataataaagatgcaaatattattttgcgtgattatttaa

SEQ ID NO: 506125 - DNA, 75 bp, synthetic construct
  source 1..75: mol_type = other DNA
gaatatgcttctaataatttggttagacagttggcagaactgcaaaaaaacgcaatcattccatcgtatagagaa

SEQ ID NO: 506126 - DNA, 75 bp, synthetic construct
  source 1..75: mol_type = other DNA
ccttctggcatgatttagcggctccggtcattgctggcattcttgcatggcaatttgcgcccggaccaggccgca

SEQ ID NO: 506127 - DNA, 75 bp, synthetic construct
  source 1..75: mol_type = other DNA
atgcgcccaatcagcgggcatcgaaagtttgtttttccacataacagcgaccccatgcgtgggatgcatcaacag

SEQ ID NO: 506128 - DNA, 75 bp, synthetic construct
  source 1..75: mol_type = other DNA
aagaaatcgacctggacgcgcaacaatggacgataccagccggacgtatgaagatgcgacgtgatcacgttatcc

SEQ ID NO: 506129 - DNA, 75 bp, synthetic construct
  source 1..75: mol_type = other DNA
cgtttctgaccaaagcagagcaaaaagggagtgaggttatgaatgacaaaaatctatctcctgttgcagtctcaa

SEQ ID NO: 506130 - DNA, 75 bp, synthetic construct
  source 1..75: mol_type = other DNA
ccctggaaaaatacgtattcccgtacatcggaaacacgccaatagataccctcaccgctcgccgctttgttgaga

SEQ ID NO: 506131 - DNA, 75 bp, synthetic construct
  source 1..75: mol_type = other DNA
ctggcggcgcgctggcgcaaagtgcatggtgatatcgactttgtcatgctggcgaaaaaaccgaccatcgacgcc

SEQ ID NO: 506132 - DNA, 75 bp, synthetic construct
  source 1..75: mol_type = other DNA
gcatggtttacgctctgtagcaagtacggcgcttaatcgagtaggcagcctggcggctgcggcttgtcatggtct

SEQ ID NO: 506133 - DNA, 75 bp, synthetic construct
  source 1..75: mol_type = other DNA
agagctgcgccatgaagtgaccccgaaaaatatcctgatgatcggcccgaccggcgtcggtaaaactgaaatcgc

SEQ ID NO: 506134 - DNA, 75 bp, synthetic construct
  source 1..75: mol_type = other DNA
tcggcattatgctgactgaaatgcacggcacacaacaagatacgcaagccgccattgcctggctgcaggaacacc

SEQ ID NO: 506135 - DNA, 75 bp, synthetic construct
  source 1..75: mol_type = other DNA
cctgctctcttcgcgtactgtttttggcaacgtggctctgccgctggagctggacaacacaccgaaagacgagat

SEQ ID NO: 506136 - DNA, 75 bp, synthetic construct
  source 1..75: mol_type = other DNA
cagaccatccttaaagcctgttatgatagcgccctgaaatcctacccagccgggcaggttgcgctgagacacgcg

SEQ ID NO: 506137 - DNA, 75 bp, synthetic construct
  source 1..75: mol_type = other DNA
aagggaaacctgtcgatctgaatcgttttatcagaactaaccaggttgcgcgtctgaccctcaatgccgaacaat

SEQ ID NO: 506138 - DNA, 75 bp, synthetic construct
  source 1..75: mol_type = other DNA
accatacaaactgaaaattggtgcgccagccgcagtacagatccagtatcaagggaaacctgtcgatctgagtcg

SEQ ID NO: 506139 - DNA, 75 bp, synthetic construct
  source 1..75: mol_type = other DNA
gtctggatcgattctgctttatctggcggagaaatttggctacttcctgccgcaggatctggcaaagcgtactga

SEQ ID NO: 506140 - DNA, 75 bp, synthetic construct
  source 1..75: mol_type = other DNA
cgcaatttacgggatggtattcctctatgttgccgagccaggaccatggacgaatttaatcgttgcctgcggtat

SEQ ID NO: 506141 - DNA, 75 bp, synthetic construct
  source 1..75: mol_type = other DNA
atattactgctacgttaagcacgtctgaacaacaatcactgacacagcagcttcaggatattacacaaaaaacac

SEQ ID NO: 506142 - DNA, 75 bp, synthetic construct
  source 1..75: mol_type = other DNA
attctggaataaagaagatcctttccattttgatcgctttgcagacgcagccgccatgttcgatgtggtgtatac

SEQ ID NO: 506143 - DNA, 75 bp, synthetic construct
  source 1..75: mol_type = other DNA
gggcgcaggtcgctatattagtggtgccatccactggggaagattccattgaacaatatgcaacacgcgtttttg

SEQ ID NO: 506144 - DNA, 75 bp, synthetic construct
  source 1..75: mol_type = other DNA
aggggtggttaccgacctgcaagcggcaaagattatccgtgatatattaatccctgctttcaaaagtgatgacct

SEQ ID NO: 506145 - DNA, 75 bp, synthetic construct
  source 1..75: mol_type = other DNA
gaaaatatcggcgcgcttctgttgaatggtgaattatcggaagacagggggattattacagtatcaatcccttta

SEQ ID NO: 506146 - DNA, 75 bp, synthetic construct
  source 1..75: mol_type = other DNA
aaggtaaaatagcaagttatgaaaacaaaccagataataataatgaattaaagaaaatagttgaattttgcaaaa

SEQ ID NO: 506147 - DNA, 75 bp, synthetic construct
  source 1..75: mol_type = other DNA
agttcgcgttgtttctcaactcgggcgatatttttcatcaggatgccgcaaattttgtccgtaagttaaaaatgc

SEQ ID NO: 506148 - DNA, 75 bp, synthetic construct
  source 1..75: mol_type = other DNA
ccgcttcacggtgaaaaccgtggagggtgaaaaactgacgcttgaggacaaaaaagggcgcacggttgagctgga

SEQ ID NO: 506149 - DNA, 75 bp, synthetic construct
  source 1..75: mol_type = other DNA
tcttttagatttattcctgttctccgataaaactttttccattgctgtatttttcttcttttttactttcaccac

SEQ ID NO: 506150 - DNA, 75 bp, synthetic construct
  source 1..75: mol_type = other DNA
tgtgcttgcccagcaaattgctgtgccggagctgcgccaacaggtgaccgatattactggtaccttaagcacgtc

SEQ ID NO: 506151 - DNA, 75 bp, synthetic construct
  source 1..75: mol_type = other DNA
ttgggggaacgcgcaaaagaaattgtattatctcaacatacctggcatcatcgccttcagcagatgaatcgggat

SEQ ID NO: 506152 - DNA, 75 bp, synthetic construct
  source 1..75: mol_type = other DNA
tcagacgccacagaaaatttttatgctggcagtctctgccgtgctgattggtggcaactggctactgtttatctg

SEQ ID NO: 506153 - DNA, 75 bp, synthetic construct
  source 1..75: mol_type = other DNA
gtataaactgaaaattggtgcgccagccgcagtgcagatccagtatcaagggaaacctgtcgatctgagtcgttt

SEQ ID NO: 506154 - DNA, 75 bp, synthetic construct
  source 1..75: mol_type = other DNA
tactgatcagaacagtaccactacgtcgccatcggcggcggagaccaccgttacgaacacgcaagcgccagccgt

SEQ ID NO: 506155 - DNA, 75 bp, synthetic construct
  source 1..75: mol_type = other DNA
cgcaagcgaatgttgatacggctgccactaccgcacctgctgttccggccacgacaacgacgccagagaccgcag

SEQ ID NO: 506156 - DNA, 75 bp, synthetic construct
  source 1..75: mol_type = other DNA
tgtcgaagtgaacccaaattcgaagatcccggcgctgcgcgatcatacgcataatccgccgatccgcgtgtttga

SEQ ID NO: 506157 - DNA, 75 bp, synthetic construct
  source 1..75: mol_type = other DNA
atcccggcattgcgcgatcatacccataatccgccgatccgcgtgtttgagtcaggctcgattctgctttatctg

SEQ ID NO: 506158 - DNA, 75 bp, synthetic construct
  source 1..75: mol_type = other DNA
atgccaacgaaaccgccttatcctcgtgaagcatatattgtaacgattgaaaaaggaaaaccagggcagaccgta

SEQ ID NO: 506159 - DNA, 75 bp, synthetic construct
  source 1..75: mol_type = other DNA
tgctcacaatatcagcgcggcacaagtattgttggcgtgggtaatcagccatcagggtgtgatggcgattccaaa

SEQ ID NO: 506160 - DNA, 75 bp, synthetic construct
  source 1..75: mol_type = other DNA
accgctccgtcgacagtcagaagaaagtaccgcactttggcgccaacaactacaaaggcggccaggcgattggcg

SEQ ID NO: 506161 - DNA, 75 bp, synthetic construct
  source 1..75: mol_type = other DNA
cggcgcggagatcattctgttgaccggtcaaccgggttcctcctccaacattgaacgcaccaaagggatccgcga

SEQ ID NO: 506162 - DNA, 75 bp, synthetic construct
  source 1..75: mol_type = other DNA
gacgacgccagcacccgctgtagcgccgcagcaggacgcagttgttcctccttcacaggcaaatgttgatatcgc

SEQ ID NO: 506163 - DNA, 75 bp, synthetic construct
  source 1..75: mol_type = other DNA
gagtacgatctactcccctggtgccagcaacagcagatgccggtgatggcttacagtccgttagcccaggccggg

SEQ ID NO: 506164 - DNA, 75 bp, synthetic construct
  source 1..75: mol_type = other DNA
tttcgcttttgaagagactgtcgcagcgatggaaaaactgatcgctcagggcaaaatccgtcgctggggtgtttc

SEQ ID NO: 506165 - DNA, 75 bp, synthetic construct
  source 1..75: mol_type = other DNA
tccttttgcacaggagcctgtggactgtgtgttgtgggtgaaagcggatgaggtggtggccaacgattacaatcc

SEQ ID NO: 506166 - DNA, 75 bp, synthetic construct
  source 1..75: mol_type = other DNA
tacgccacgctgaattatcgcggtggttacggcaatgccaatatcggttacagccatagtgatgatattaagcag

SEQ ID NO: 506167 - DNA, 75 bp, synthetic construct
  source 1..75: mol_type = other DNA
ctcagcggaatgcctttagcgggaaaagttcaggtgaaatggggagaagaggaaaatgctcactgtgtcgccaat

SEQ ID NO: 506168 - DNA, 75 bp, synthetic construct
  source 1..75: mol_type = other DNA
ggtgtctgaggaaaagaaccattacctggtggtggatggttttcatcgccaggtgctgggcagggaggcaggcac

SEQ ID NO: 506169 - DNA, 75 bp, synthetic construct
  source 1..75: mol_type = other DNA
ataggtacagagctgggtatggatcaggatgaagtgctgagactgaaacagattagtgggctgacggagctgttt

SEQ ID NO: 506170 - DNA, 75 bp, synthetic construct
  source 1..75: mol_type = other DNA
cggaaagaaagggacaggcatcacgtattgccgcaaccatacggcataaccgtgccagggggaaaacaccagata

SEQ ID NO: 506171 - DNA, 75 bp, synthetic construct
  source 1..75: mol_type = other DNA
ggagtttttactggatgaacagaacggggaagtcacccggctggtactggcaccgcgtgacggctttatcgttcc

SEQ ID NO: 506172 - DNA, 75 bp, synthetic construct
  source 1..75: mol_type = other DNA
tgctggctgggagtttattgatggctaccaggcaacactttcttacggtaccagttttctttcgccttctcttgg

SEQ ID NO: 506173 - DNA, 75 bp, synthetic construct
  source 1..75: mol_type = other DNA
gttaaatccgcgaccattaagggcctggaatggacgggtaatttcacaactggtcctatcgatcatcgtttaacg

SEQ ID NO: 506174 - DNA, 75 bp, synthetic construct
  source 1..75: mol_type = other DNA
aggtgctgggcagggaagcaggtacgggaaaacgtctgaagggctggctgccggtggtctgtattaatccggaga

SEQ ID NO: 506175 - DNA, 75 bp, synthetic construct
  source 1..75: mol_type = other DNA
ggtgtcagaggaaaaggagcactacctggtggtggacggttatcaccgtcagttactgggacgcgggagaaatgc

SEQ ID NO: 506176 - DNA, 75 bp, synthetic construct
  source 1..75: mol_type = other DNA
gttctttatacggttgatatgcttgaaacagctccagagcaaagtcttttcgtactagaagaaccagaaacatct

SEQ ID NO: 506177 - DNA, 75 bp, synthetic construct
  source 1..75: mol_type = other DNA
gaaagggacaggctgaacgcattgccgcgaccatacgacataaccgggccagaggaaaacatcagataacctcaa

SEQ ID NO: 506178 - DNA, 75 bp, synthetic construct
  source 1..75: mol_type = other DNA
cgtgccagggggaaacaccagataacgtcaatgtctgaaattgtcagggacctttcccgtctgggctggacagat

SEQ ID NO: 506179 - DNA, 75 bp, synthetic construct
  source 1..75: mol_type = other DNA
cgtgccagggggaaacaccagataacgtcaatgtctgaaattgtcagggacctttcccgactgggctggactgat

SEQ ID NO: 506180 - DNA, 75 bp, synthetic construct
  source 1..75: mol_type = other DNA
cgagccagggggaaacaccagataacgtcaatgtctgaaattgtcagggacctttcccgactgggctggacagat

SEQ ID NO: 506181 - DNA, 75 bp, synthetic construct
  source 1..75: mol_type = other DNA
cgggccagggggaaacaccagataacgtcaatgtctgaaattgtcagggacctttcccgactgggctggacggat

SEQ ID NO: 506182 - DNA, 75 bp, synthetic construct
  source 1..75: mol_type = other DNA
cgcgccagggggaaacaccagataacgtcaatgtctgaaattgtcagggacctttcccgcctgggctggacagat

SEQ ID NO: 506183 - DNA, 75 bp, synthetic construct
  source 1..75: mol_type = other DNA
cgcgccagggggaaacaccagataacgtcaatgtctgaaattgtcagggacctttcccgactgggctggaccgat

SEQ ID NO: 506184 - DNA, 75 bp, synthetic construct
  source 1..75: mol_type = other DNA
atcgattttgtcatgctggcgaaaaacccaaccattgatgcctggtggaaactgctctcccgcgaggtgaaataa

SEQ ID NO: 506185 - DNA, 75 bp, synthetic construct
  source 1..75: mol_type = other DNA
tgtgtgctgtgggtgaaagcagatgaggtggtggccaacgattataaccccaatgtcatggcaccgggtgagaag

SEQ ID NO: 506186 - DNA, 75 bp, synthetic construct
  source 1..75: mol_type = other DNA
cgggccaggggtaaacaccagataacctctatgtccgatattgtcagggatctttcacgcctgggctggatggat

SEQ ID NO: 506187 - DNA, 75 bp, synthetic construct
  source 1..75: mol_type = other DNA
gcccgatgatggagcaggtgatcgcgaatattgctgcgctgcgcgactactgcaaacagcacaatatcccggttt

SEQ ID NO: 506188 - DNA, 75 bp, synthetic construct
  source 1..75: mol_type = other DNA
tgatatgtgggggccgggcctgacccgttcaccggaacagcaaaaggtggtggatcgcctgacgccagatgccga

SEQ ID NO: 506189 - DNA, 75 bp, synthetic construct
  source 1..75: mol_type = other DNA
tgtcagcttctggggcgaaaattgcccgatgatggagcaggtgatcgctaacattgccgcgctgcgtgactactg

SEQ ID NO: 506190 - DNA, 75 bp, synthetic construct
  source 1..75: mol_type = other DNA
atatggagcaacgttacatccagtggggtaacaatgtcattgttgggcatggtgctatcagcgcaggagcagact

SEQ ID NO: 506191 - DNA, 75 bp, synthetic construct
  source 1..75: mol_type = other DNA
aaaaatatcaccggcgtgaacgaactgaaggaagaagcgccccgactctctcaactagccgatcgctacctgtct

SEQ ID NO: 506192 - DNA, 75 bp, synthetic construct
  source 1..75: mol_type = other DNA
ccgtcatgttggaaatgattgtgctgtctgccacggagtctgtggtggggatggtgaatccggttctgccggatg

SEQ ID NO: 506193 - DNA, 75 bp, synthetic construct
  source 1..75: mol_type = other DNA
ccatgaacaactgaaaacggccatgcttcatgcaccggatggtcgcctccgtctgcgtaatgtgctccagcatcc

SEQ ID NO: 506194 - DNA, 75 bp, synthetic construct
  source 1..75: mol_type = other DNA
ccctgttgatcgacggcgatcattcccagccgacagccagcagtctgtttaaactcgaatacgaagcgccaaacg

SEQ ID NO: 506195 - DNA, 75 bp, synthetic construct
  source 1..75: mol_type = other DNA
atgtgcgcgagtttattcgcggcactgtcaacgttatggagaacctgctgccttaccgggaactggggatacccc

SEQ ID NO: 506196 - DNA, 75 bp, synthetic construct
  source 1..75: mol_type = other DNA
tgcggctggtcaacccgttcatcgtctcgaaaaagaatccacacgtcgcagtgattctgcgcttgtcacgatgca

SEQ ID NO: 506197 - DNA, 75 bp, synthetic construct
  source 1..75: mol_type = other DNA
attccgtaaactctctgttgatttgtgctcaagcggcactattaggcggtaccgcttcaaaccatgacgtcatca

SEQ ID NO: 506198 - DNA, 75 bp, synthetic construct
  source 1..75: mol_type = other DNA
gataagagcgattatctagaagaacagcgtaaagcttacctggcatggtgggagagagttgaatcgatcgttact

SEQ ID NO: 506199 - DNA, 75 bp, synthetic construct
  source 1..75: mol_type = other DNA
ctctatgaacaacggttccgatatgctttttaccaaggaaggaagcaaggagccagttggtcgaacatcattgca

SEQ ID NO: 506200 - DNA, 75 bp, synthetic construct
  source 1..75: mol_type = other DNA
atttttgggtttaactcttgatcgtttgctttatcttgatgcggatgtcgtttgtaagggagatatcagtcaact

SEQ ID NO: 506201 - DNA, 75 bp, synthetic construct
  source 1..75: mol_type = other DNA
taacgcaaaactaacagaaaaagcgttgtctattcttatgagtaaagataatgtgtataaataccctgatcagga

SEQ ID NO: 506202 - DNA, 75 bp, synthetic construct
  source 1..75: mol_type = other DNA
aactataaaaagctgattacagaaagtactcttcttattcattatacaggtgcaactaaaccgtggcacaaatgg

SEQ ID NO: 506203 - DNA, 75 bp, synthetic construct
  source 1..75: mol_type = other DNA
ctgcagcatgaatccccttgtggtctctatgaattgctgatgcaaatggtcagtgaccatacgcaatgcatttcg

SEQ ID NO: 506204 - DNA, 75 bp, synthetic construct
  source 1..75: mol_type = other DNA
gaagccgcccgtagtgaccgcccagtgcagtgcctcacggtcacagcagtccagcgcgaacgtgactcgcagttt

SEQ ID NO: 506205 - DNA, 75 bp, synthetic construct
  source 1..75: mol_type = other DNA
cagcgcgaacgtgacacgcagtctctctccgttatcacagcagaactcgaacccgtcagagcaccatcgctgatt

SEQ ID NO: 506206 - DNA, 75 bp, synthetic construct
  source 1..75: mol_type = other DNA
gatggatacctgtaaaattggccccggcttatatcagtacacatctattgatgattgcactcgctacagagtcct

SEQ ID NO: 506207 - DNA, 75 bp, synthetic construct
  source 1..75: mol_type = other DNA
accgggatgagatgaaacaatacaatctacagtggacaaatagcgtcacagtcggccacggtaatgttggcgctg

SEQ ID NO: 506208 - DNA, 75 bp, synthetic construct
  source 1..75: mol_type = other DNA
gcggccatccatccagtcatcggttcgtctgagaatgacgtgcaactgcgcacgcgacacccggagacaacggct

SEQ ID NO: 506209 - DNA, 75 bp, synthetic construct
  source 1..75: mol_type = other DNA
ccaaaggtggtgaaggtaaatcaacacaatccgcaaatcttgctggttttctggccgatgcaggtatacgtaccc

SEQ ID NO: 506210 - DNA, 75 bp, synthetic construct
  source 1..75: mol_type = other DNA
aattacggtatacacctgcccgacatatctattctcgtgaactgtttcgaaaatacgctgcttgaccgggaggcg

SEQ ID NO: 506211 - DNA, 75 bp, synthetic construct
  source 1..75: mol_type = other DNA
aattacggtatccgccttcctgatatttccattctcgtcaactgtatcgaaaacactctgcttgatcgtgaagca

SEQ ID NO: 506212 - DNA, 75 bp, synthetic construct
  source 1..75: mol_type = other DNA
cggccgcagcggtcaccatgcacgacctcgcgtgtgaactgttccctgagtggcagagccatttcagtgacgttc

SEQ ID NO: 506213 - DNA, 75 bp, synthetic construct
  source 1..75: mol_type = other DNA
tgactgagctttccctcctgtcctctaccggtaatgtgatgggcattgttaaacccatccttccggatgtccgtg

SEQ ID NO: 506214 - DNA, 75 bp, synthetic construct
  source 1..75: mol_type = other DNA
ccaaaggtggagaaggcaaatccacgtttgctgcttaccttgccggttttcttgccgatgccggcctgaacaccc

SEQ ID NO: 506215 - DNA, 75 bp, synthetic construct
  source 1..75: mol_type = other DNA
tcgcattgtcgaactgggggctcctgaagtcagtagtctctggcatcagcaacaaaaaaatcccccctttgtgct

SEQ ID NO: 506216 - DNA, 75 bp, synthetic construct
  source 1..75: mol_type = other DNA
atcattatgctgtgcatgaccgtctgggcgttgtacctgatctttcgtaataaaaaagagattacccagcatttg

SEQ ID NO: 506217 - DNA, 75 bp, synthetic construct
  source 1..75: mol_type = other DNA
tgctaacttcgtccgtggcattggttcggtggtagcaaactatgatgtcgatcggcatgaggatgccgataaagc

SEQ ID NO: 506218 - DNA, 75 bp, synthetic construct
  source 1..75: mol_type = other DNA
gcagacttatcaggtgctgcctgctccgggcgcgcccccggctgaaccgctgccgccgggggagccaacgcttta

SEQ ID NO: 506219 - DNA, 75 bp, synthetic construct
  source 1..75: mol_type = other DNA
ttcgcgcgccagtgcagacttatcaggtgctgcctgctccgggcgcggccccggctgaaccgctgccgccggggg

SEQ ID NO: 506220 - DNA, 75 bp, synthetic construct
  source 1..75: mol_type = other DNA
aaacgtggctgaactgcgcccgttcacgattcaggacgagagcgcccgttactggagtcgtcgcctgagctggtt

SEQ ID NO: 506221 - DNA, 75 bp, synthetic construct
  source 1..75: mol_type = other DNA
gagcgcagtaactggttgcagcttccggcgatgattatcggggcgtttattatcgacctgctgttactggcactg

SEQ ID NO: 506222 - DNA, 75 bp, synthetic construct
  source 1..75: mol_type = other DNA
cggcgttgatatttgataaaacactgcccgctaacagcccgtccggtatgagtgacagtggtacagactcagtat

SEQ ID NO: 506223 - DNA, 75 bp, synthetic construct
  source 1..75: mol_type = other DNA
gaacggaagtggccattgcctttgaggaaggtgatccggatcgcccctatattgcgcatgccctgcatgattcac

SEQ ID NO: 506224 - DNA, 75 bp, synthetic construct
  source 1..75: mol_type = other DNA
caaagtgactgtttctgctaatcaggaactgatactggcatgtggtggagcttatatcaaactaagcggtggaaa

SEQ ID NO: 506225 - DNA, 75 bp, synthetic construct
  source 1..75: mol_type = other DNA
gatgatgtcctccctgcctctgagtctgctcacaaaagcgctgttttcgttactgtctctcttgtccgtgcaata

SEQ ID NO: 506226 - DNA, 75 bp, synthetic construct
  source 1..75: mol_type = other DNA
gtctgtggtatttacccgctggcgggagcgcagcatacgacgttctgctgaacctgacgacagtcactattccag

SEQ ID NO: 506227 - DNA, 75 bp, synthetic construct
  source 1..75: mol_type = other DNA
ttgcaggaaatcacaacagaacttgattcactgatttatgcggtagagtcccacacccctgtttttagaaagaaa

SEQ ID NO: 506228 - DNA, 75 bp, synthetic construct
  source 1..75: mol_type = other DNA
acacctcgcgtaaagagttgatcgaccagttgcgcaccgtcgccgcgacgccccctgcggaacccgtaccgaaga

SEQ ID NO: 506229 - DNA, 75 bp, synthetic construct
  source 1..75: mol_type = other DNA
gaacgaactgatggcacgttacgacgcactggaaaaccagtgtgaggaatccgacctgctggaagcagaaatgaa

SEQ ID NO: 506230 - DNA, 75 bp, synthetic construct
  source 1..75: mol_type = other DNA
ctggacagcatcggcctgaccctgcagcacgacgacgctattgcgtcttatgaagcaaaacaacctgcgtttatg

SEQ ID NO: 506231 - DNA, 75 bp, synthetic construct
  source 1..75: mol_type = other DNA
cctcgcgtgagcacgcgccgtgggcattgaccgattacggttttaaagtggtgattgccccgagttttgctgaca

SEQ ID NO: 506232 - DNA, 75 bp, synthetic construct
  source 1..75: mol_type = other DNA
cgtgaacgagcgtggcggcgagatcgatctgataatgcgtgaaggccggaccaccgtttttgtcgaggtacgcta

SEQ ID NO: 506233 - DNA, 75 bp, synthetic construct
  source 1..75: mol_type = other DNA
ttgaggaagcagaagattccttttttgatcctatcataacatttttcacccaagcagcagataatgattacttta

SEQ ID NO: 506234 - DNA, 75 bp, synthetic construct
  source 1..75: mol_type = other DNA
ttcatatccacaatttgtcaatcaaatggtcttgttagaaattttttatgtgagaaaggctatattgatgtatca

SEQ ID NO: 506235 - DNA, 75 bp, synthetic construct
  source 1..75: mol_type = other DNA
aactacgatgttgatcgccatgaagatgctgataaagccaatcaggcactgaaagatgcggtagcggaattaatg

SEQ ID NO: 506236 - DNA, 75 bp, synthetic construct
  source 1..75: mol_type = other DNA
gctggcgaacgtcatcattatgctgtgcatgaccgtctgggcgttgtacctgatctttcgtaataaaaaagagat

SEQ ID NO: 506237 - DNA, 75 bp, synthetic construct
  source 1..75: mol_type = other DNA
caccattgcttttcaacagagtctgtttctcaatgctttcgccctgattgaatttttcaaagctgttttacgcct

SEQ ID NO: 506238 - DNA, 75 bp, synthetic construct
  source 1..75: mol_type = other DNA
ctggacagcatcggcctgaccttgcagcatgacgacgcgatcgccgcttatgaggcgaaacaaccagcgtttatg

SEQ ID NO: 506239 - DNA, 75 bp, synthetic construct
  source 1..75: mol_type = other DNA
ttgtcggaaatcggcgtcaatatcgcgccattgctggcaggtgccggggcattaggtctggctatctcgtttggt

SEQ ID NO: 506240 - DNA, 75 bp, synthetic construct
  source 1..75: mol_type = other DNA
tcgccacatactcagcgtaactatccggagctgcaaaaacggttgaatggctggctgtcggcggcgctgaaaacg

SEQ ID NO: 506241 - DNA, 75 bp, synthetic construct
  source 1..75: mol_type = other DNA
tcgccgtatatcgggctccgccgaccaggcaaaataccaggtgatactggaaccatttattaaactactggacag

SEQ ID NO: 506242 - DNA, 75 bp, synthetic construct
  source 1..75: mol_type = other DNA
cagtgtatctacttctggtaataatgactactacaatactattgatgcaacctataccgcagttaagaaccagta

SEQ ID NO: 506243 - DNA, 75 bp, synthetic construct
  source 1..75: mol_type = other DNA
caaattaataaagctggtactttctatattaatggatctggcggtactggtcgaatggtaatcagtaatacaatg

SEQ ID NO: 506244 - DNA, 75 bp, synthetic construct
  source 1..75: mol_type = other DNA
aggctatgtaacagtaactgccatagaatatccagatgaaatctttgatggtgatgatctaggtatatggagtcc

SEQ ID NO: 506245 - DNA, 75 bp, synthetic construct
  source 1..75: mol_type = other DNA
aggaacgtctgcgcaaagaaattgcagaattacgtgccaaaattgaacgcgtcccttttattgacaccttcgatt

SEQ ID NO: 506246 - DNA, 75 bp, synthetic construct
  source 1..75: mol_type = other DNA
tacaggcagtacgcaaaggtaacacaacaaacggctcccttgtcgatctcacatgggatgcgtcacaagatccgt

SEQ ID NO: 506247 - DNA, 75 bp, synthetic construct
  source 1..75: mol_type = other DNA
ggcggtacggcattagccgcgattggctggggggctgcggcaggtgctgcaagccttgttgcaacaagtatgctg

SEQ ID NO: 506248 - DNA, 75 bp, synthetic construct
  source 1..75: mol_type = other DNA
ctttgcatcatctctattgcgctggcgatgatttccttgctgatttcagaatggctggcaagaatcagccgtgag

SEQ ID NO: 506249 - DNA, 75 bp, synthetic construct
  source 1..75: mol_type = other DNA
aagatagcagtactccatccatttggtcaggtggcttttgccgcaaagcgtaagcctacagcgtcacagaacagg

SEQ ID NO: 506250 - DNA, 75 bp, synthetic construct
  source 1..75: mol_type = other DNA
atgaagtgagatcggcagaccttctggccattctcaaggcactgaaggccaaaggcgttcatgccaaactgctct

SEQ ID NO: 506251 - DNA, 75 bp, synthetic construct
  source 1..75: mol_type = other DNA
tttacaactgccgaaggttgggatcttcgtgtctgggatagtatcaatgttaactttaaagaattagcagtctct

SEQ ID NO: 506252 - DNA, 75 bp, synthetic construct
  source 1..75: mol_type = other DNA
gtgattctcaatatctcttttcagaacaggctgtagcatatgcgggtactgaaaagaatattttacagatttata

SEQ ID NO: 506253 - DNA, 75 bp, synthetic construct
  source 1..75: mol_type = other DNA
gcaagaacgctgggggccgggcgctggcgagtcttcttcaccattacgctaccgctgacgttaccgggaattatc

SEQ ID NO: 506254 - DNA, 75 bp, synthetic construct
  source 1..75: mol_type = other DNA
cgcaggaaacgggtggcaccattgtttccagcgctctgaaactgatggatgaggtggtgaaagagcgttataacc

SEQ ID NO: 506255 - DNA, 75 bp, synthetic construct
  source 1..75: mol_type = other DNA
ccatgttgaagccggtctacgcaccggaaatatttattctccatggcctgaagaaggtatgcgtcgactaacggg

SEQ ID NO: 506256 - DNA, 75 bp, synthetic construct
  source 1..75: mol_type = other DNA
gcgccaacgctgggtaaacctgtactgtgtatgcgcgacacaacagaacgccctgcagcggtaaaagctggcact

SEQ ID NO: 506257 - DNA, 75 bp, synthetic construct
  source 1..75: mol_type = other DNA
ggcggacaacgtacgagctgcaccttattccagcaccgaaccattccgccgtcgctgtacaacccgcttttcact

SEQ ID NO: 506258 - DNA, 75 bp, synthetic construct
  source 1..75: mol_type = other DNA
cggacttcgtgctgaacttcccgcagtatcagggcgcttccattttgctggcacgagaaaacttcggctgcggtt

SEQ ID NO: 506259 - DNA, 75 bp, synthetic construct
  source 1..75: mol_type = other DNA
agcatcggcctgactctgcagcacgacgatgctattgcgtcttatgaagagaagcaaccggcgtttatgcgttag

SEQ ID NO: 506260 - DNA, 75 bp, synthetic construct
  source 1..75: mol_type = other DNA
atgtgcgcttttttattgagcttagtgcttcctgcgcaggccaccagctttaccgaatatctgccgatgagtgac

SEQ ID NO: 506261 - DNA, 75 bp, synthetic construct
  source 1..75: mol_type = other DNA
tcagttatcaaaaaacctataaagataatattgaaaatatctgtcagtcatttggcggcatcatgtatgtacatg

SEQ ID NO: 506262 - DNA, 75 bp, synthetic construct
  source 1..75: mol_type = other DNA
catcgggcgggttataccgctaacggcgttccggccaatatcagcgttgtacgttcattgcagaactcactggcg

SEQ ID NO: 506263 - DNA, 75 bp, synthetic construct
  source 1..75: mol_type = other DNA
atgcaacatattcgcgatcaggacgatatttatccagtgttccgtgagctgttccataaacaaaataccaccagt

SEQ ID NO: 506264 - DNA, 75 bp, synthetic construct
  source 1..75: mol_type = other DNA
attaaagcactgatccaggagtggtggcggacaacgtacgagctgcaccttattccagcaccgaaccattccgcc

SEQ ID NO: 506265 - DNA, 75 bp, synthetic construct
  source 1..75: mol_type = other DNA
cgctggcgcgttaggcgcaggtgaaatcaaagcgctgatccaagagtggtggcggaacacttacgagcttcacct

SEQ ID NO: 506266 - DNA, 75 bp, synthetic construct
  source 1..75: mol_type = other DNA
aacttagggctggtatccaagaagctttccctaactggcattgttccaacattcaactttgcactacctgcggta

SEQ ID NO: 506267 - DNA, 75 bp, synthetic construct
  source 1..75: mol_type = other DNA
gaagcctctaacgaacgtgaatttggttatgcgcaggttgaagtacaaactgatagcgcgctgattcatggtatc

SEQ ID NO: 506268 - DNA, 75 bp, synthetic construct
  source 1..75: mol_type = other DNA
atctgcaaaaatgcgaaagcaaaattaagcagaaaatgattaaaggcattattatgctcagttcgcctgccgatg

SEQ ID NO: 506269 - DNA, 75 bp, synthetic construct
  source 1..75: mol_type = other DNA
atgctaagttcgccagcggatgagtcattttttgcccaactcgataaatatgatattccggtggtggtaattggc

SEQ ID NO: 506270 - DNA, 75 bp, synthetic construct
  source 1..75: mol_type = other DNA
cacgggcgtggatgacttttctgcctttgcgtcggttgttgcgacattgaataacctggggccagggcttggcgt

SEQ ID NO: 506271 - DNA, 75 bp, synthetic construct
  source 1..75: mol_type = other DNA
atgtttatcggcgtacagtttacgctggtggttatttgtaccctcgtactgtggtttcataatgtctacagttcg

SEQ ID NO: 506272 - DNA, 75 bp, synthetic construct
  source 1..75: mol_type = other DNA
ttgtcagtatgctggcgattatcgccacgggcgtggatgacttttctgcctttgcttcggttgtggcgacattga

SEQ ID NO: 506273 - DNA, 75 bp, synthetic construct
  source 1..75: mol_type = other DNA
tcagacagcgcgtcgctggttgatcagtcagcaaacggtgcggctattctgcacgcttatgttcaacacaccttt

SEQ ID NO: 506274 - DNA, 75 bp, synthetic construct
  source 1..75: mol_type = other DNA
tgtctgcaaattcatcgtcaataattctattccaggtcaaaacaaaggacactaccgtttctatgattttgaaag

SEQ ID NO: 506275 - DNA, 75 bp, synthetic construct
  source 1..75: mol_type = other DNA
tctcaaaatctttatcaactgatgaattacttatggtcgttaaagcctgaaaatggcgaaaacataggggggtta

SEQ ID NO: 506276 - DNA, 75 bp, synthetic construct
  source 1..75: mol_type = other DNA
ttattattccgcttaattgccggaaaaccgtcaccacaaaatattaccgttgccacgcatatgacgctgaaataa

SEQ ID NO: 506277 - DNA, 75 bp, synthetic construct
  source 1..75: mol_type = other DNA
gagttaggtcaacaaagctgcgagttattattccagttaattgccggaaaaccgtcaccacaaaatattaccgtt

SEQ ID NO: 506278 - DNA, 75 bp, synthetic construct
  source 1..75: mol_type = other DNA
gatgcattaattgaaagtgggcatcaaaatattgcctgcctgcatgctccgcttgatgtccatgtttcagtggat

SEQ ID NO: 506279 - DNA, 75 bp, synthetic construct
  source 1..75: mol_type = other DNA
cttttttgtcgccctcgccattggctctatgctttggtggccgaaccgcaaagagaagggtgaactgaaatcccg

SEQ ID NO: 506280 - DNA, 75 bp, synthetic construct
  source 1..75: mol_type = other DNA
gtctggttttcacactaatccaacgttatggcgtcagtctcattcatctggatgccagcgctgaatgcctgccgg

SEQ ID NO: 506281 - DNA, 75 bp, synthetic construct
  source 1..75: mol_type = other DNA
gtctggttatcacactaagcccacgttatggcgtcagtctcattcatctggatgccagcgctgaatgcctgccgg

SEQ ID NO: 506282 - DNA, 75 bp, synthetic construct
  source 1..75: mol_type = other DNA
gtctggttatcacactaacccgacgttatggcgtcagtctcattcatctggatgccagcgctgaatgcctgccgg

SEQ ID NO: 506283 - DNA, 75 bp, synthetic construct
  source 1..75: mol_type = other DNA
atggctaagtcactgttcagggcgctggtcgccctgtcttttctcgcgccgctgtggctcaacgccgcgccgcgc

SEQ ID NO: 506284 - DNA, 75 bp, synthetic construct
  source 1..75: mol_type = other DNA
ggggatgaatctggaacgcattgtcgcgctgaaacccgatctggtgattgcctggcgtggaggtaatgccgagcg

SEQ ID NO: 506285 - DNA, 75 bp, synthetic construct
  source 1..75: mol_type = other DNA
gtctggttgtcacactaatcctacgttatggcgtcagtctcattcatctggatgccagcgctgaatgcctgccgg

SEQ ID NO: 506286 - DNA, 75 bp, synthetic construct
  source 1..75: mol_type = other DNA
tctgcggcttaaacgcctggggctgtcaaaaacgttccgtcgtctggttatcacactgaaccaacgttatggcgt

SEQ ID NO: 506287 - DNA, 75 bp, synthetic construct
  source 1..75: mol_type = other DNA
tctgcggcttaaacgcctggggctgtcaaaaacgttccgtcgtctggttatcacactaaaccgacgttatggcgt

SEQ ID NO: 506288 - DNA, 75 bp, synthetic construct
  source 1..75: mol_type = other DNA
ctgccctgtattgaacaggccagggaggatatccgtaccctgcaccaactgcaacttctgcaccagaaccggtga

SEQ ID NO: 506289 - DNA, 75 bp, synthetic construct
  source 1..75: mol_type = other DNA
tctgcggcttaaacgcctggggctgtcaaaaacgttccgtcgtctggttgtcacactaaaccaacgttatggcgt

SEQ ID NO: 506290 - DNA, 75 bp, synthetic construct
  source 1..75: mol_type = other DNA
tctgcggcttaaacgcctggggctgtcaaaaacgttccgtcgtctggttctcacactcaacccacgttatggcgt

SEQ ID NO: 506291 - DNA, 75 bp, synthetic construct
  source 1..75: mol_type = other DNA
tctgcggcttaaacgcctggggctgtcaaaaacgttccgtcgtctggttttcacacttaaccaacgttatggcgt

SEQ ID NO: 506292 - DNA, 75 bp, synthetic construct
  source 1..75: mol_type = other DNA
atagagtttgctaaaacaatacgcggcttccatcttaatcatgggaaaaccgtcagtacttttgatatgcttaat

SEQ ID NO: 506293 - DNA, 75 bp, synthetic construct
  source 1..75: mol_type = other DNA
tcgctgccaggtgagttgcgcccgctgatcctctgtgaatacgcccacgcgatgggtaacagcctcggcggcttc

SEQ ID NO: 506294 - DNA, 75 bp, synthetic construct
  source 1..75: mol_type = other DNA
caactgctgacgccgctgcgcgatcagttcacccgcgcgccgctggataacgacattggcgtaagtgaagcgacc

SEQ ID NO: 506295 - DNA, 75 bp, synthetic construct
  source 1..75: mol_type = other DNA
ttttgacctgtagaaacattcgcggcgtccagcaatggttaaaactcagtaaccgcagaatggggctgttcacaa

SEQ ID NO: 506296 - DNA, 75 bp, synthetic construct
  source 1..75: mol_type = other DNA
gatgcacggttacgatgcgcccatctacaccaacgtgacctatcccattacggtcaatccgccgtttgttcccgc

SEQ ID NO: 506297 - DNA, 75 bp, synthetic construct
  source 1..75: mol_type = other DNA
tttatcagccggaaaacctaccgtatcgatgggcacggtgagatggtcgtcagtgtggatgttgaagtagcgagc

SEQ ID NO: 506298 - DNA, 75 bp, synthetic construct
  source 1..75: mol_type = other DNA
ttttgcatcgagctgggtaataagcgttggcaatttaaccgccagtcaggctttctttcacagatgtggattggc

SEQ ID NO: 506299 - DNA, 75 bp, synthetic construct
  source 1..75: mol_type = other DNA
cgaactggctggtgcctggaaacacagtcgtgcacgtccgtttgtccatatcatgcaggacaaagatatcgagga

SEQ ID NO: 506300 - DNA, 75 bp, synthetic construct
  source 1..75: mol_type = other DNA
tttcttttgttggttatcacaatgtctggtgaaaactctactctgatgaacaacttaagcaaattagacgctgca

SEQ ID NO: 506301 - DNA, 75 bp, synthetic construct
  source 1..75: mol_type = other DNA
aaggactgcggtttgtcgccgctaacgtgaacgagcgtggcggcgagatcgatctgataatgcgtgaaggccgga

SEQ ID NO: 506302 - DNA, 75 bp, synthetic construct
  source 1..75: mol_type = other DNA
tttaaagacaccggccatgtcgccatcattacccaattgcatggcaacaaagtccgtattgcggaacagaacgtg

SEQ ID NO: 506303 - DNA, 75 bp, synthetic construct
  source 1..75: mol_type = other DNA
agtgatccccggcaacaaagcgattctgccgatcctctggtcgctgttcccgcaccatcgttacctactggatac

SEQ ID NO: 506304 - DNA, 75 bp, synthetic construct
  source 1..75: mol_type = other DNA
aaaatgcctacgtgcaggccaacggtcaggtgatcaatcaggatccgtatcattactacaccattaccgagagtg

SEQ ID NO: 506305 - DNA, 75 bp, synthetic construct
  source 1..75: mol_type = other DNA
atggcaagccgctggcaagcggtgaagtgcctctggatgtcgctccacaaggtaaacagttgattgaactgcctg

SEQ ID NO: 506306 - DNA, 75 bp, synthetic construct
  source 1..75: mol_type = other DNA
agtcagcccgttcctggcgaggaggagactgatatcaccgatgggataaggctgtctgattggtattataaatgt

SEQ ID NO: 506307 - DNA, 75 bp, synthetic construct
  source 1..75: mol_type = other DNA
atagttttcgtgaggacagggagagaagcaggcgttctgataattgcagagttgttttcggaggtggttacagtg

SEQ ID NO: 506308 - DNA, 75 bp, synthetic construct
  source 1..75: mol_type = other DNA
acggtctgcgttgtggcactcgcgaattgaattatggctcacaccagtggcgcggcgactttcagttcaatatca

SEQ ID NO: 506309 - DNA, 75 bp, synthetic construct
  source 1..75: mol_type = other DNA
cgatttgttcagcgacgacgagggtggctatgtggactgcgtggcactcgatgctgccctgctggaaaaactcca

SEQ ID NO: 506310 - DNA, 75 bp, synthetic construct
  source 1..75: mol_type = other DNA
caagctggattgagtaccgattttttacgcggcgattatgctgacaagttgttgaataaaatcaacgataactag

SEQ ID NO: 506311 - DNA, 75 bp, synthetic construct
  source 1..75: mol_type = other DNA
aagaggttagccgtcgattgtcattactggaattgaagctgcgacaagctggattgagtaccgattttttacgcg

SEQ ID NO: 506312 - DNA, 75 bp, synthetic construct
  source 1..75: mol_type = other DNA
atccgccatttgttcccacagaaaacccgacaggttgttactcactcacattttctattgatgaaagctggctgc

SEQ ID NO: 506313 - DNA, 75 bp, synthetic construct
  source 1..75: mol_type = other DNA
tatacgatgtcgcagagtatgccggtgtctcttatcagaccgtttcccgcgtggtgaaccaggccagccacgttt

SEQ ID NO: 506314 - DNA, 75 bp, synthetic construct
  source 1..75: mol_type = other DNA
tacttgcccgccgcgactgggaaaaccctgacgttacacaactcaatcgccttacagcgcatcctcctttttcca

SEQ ID NO: 506315 - DNA, 75 bp, synthetic construct
  source 1..75: mol_type = other DNA
ggaaatcggcgggccattatcagacacaagccgcgttgctacagtgtacggcagataaactcatcgacgcagttc

SEQ ID NO: 506316 - DNA, 75 bp, synthetic construct
  source 1..75: mol_type = other DNA
tgtatgaacggcctgctctttgccgatcgcacgccgcatccggcactaacggaagcgaaacacgcgcagcagttt

SEQ ID NO: 506317 - DNA, 75 bp, synthetic construct
  source 1..75: mol_type = other DNA
atacctgttccgtcatagcgataacgagttcctgcactggtcggtggcgctggatggcaagccgctggcaagcgg

SEQ ID NO: 506318 - DNA, 75 bp, synthetic construct
  source 1..75: mol_type = other DNA
atatggttatcccgtggaatgcgccactctcccgctgtctgacgatgatcgaaagcgtgcaagggcagaagttta

SEQ ID NO: 506319 - DNA, 75 bp, synthetic construct
  source 1..75: mol_type = other DNA
ctgtcaatgacccagccgctgaaactacgcggttttcagaagtgggatgtgttctgtgatgcggtcaataacatg

SEQ ID NO: 506320 - DNA, 75 bp, synthetic construct
  source 1..75: mol_type = other DNA
acgcagcgacgaaaaacgcattctgagtaatgttgctgtactggaaggtgcgccgccgctatcggaacactggca

SEQ ID NO: 506321 - DNA, 75 bp, synthetic construct
  source 1..75: mol_type = other DNA
gtccgctctcaggcccgtgaacagtttaccggtgcggtggaccggatatttgacacagcggagagcgtctgtgtt

SEQ ID NO: 506322 - DNA, 75 bp, synthetic construct
  source 1..75: mol_type = other DNA
ggtgcaaatgcgtttactcgccccggaacaatgggggatgccgctgcctttaacgcagggttccacgccagtcat

SEQ ID NO: 506323 - DNA, 75 bp, synthetic construct
  source 1..75: mol_type = other DNA
ctgcgcgccaccgatgaacgtttgttattggcctgcggtgcaaatatggttatcccgtggaatgcgccactctcc

SEQ ID NO: 506324 - DNA, 75 bp, synthetic construct
  source 1..75: mol_type = other DNA
cgtgactgatgtcctccctgactctgagtctgctcacaaaagcgctgttttcgttactgtctctcttgtccgtgc

SEQ ID NO: 506325 - DNA, 75 bp, synthetic construct
  source 1..75: mol_type = other DNA
cagaatattcgcgaaaaaacggaggcggtattccgtctgttccggcccgtgaacagtttaccggtgcggtggacc

SEQ ID NO: 506326 - DNA, 75 bp, synthetic construct
  source 1..75: mol_type = other DNA
ctggaacatctgcgcaaactcaccagccacgaacccgtgattggcattatgggaaaaagcggggccggtaaatcc

SEQ ID NO: 506327 - DNA, 75 bp, synthetic construct
  source 1..75: mol_type = other DNA
aattgcatcccaggctgcaaccgcacacgtcgcggtcattagcatggacagcgatccggcgaaaatctttcaatt

SEQ ID NO: 506328 - DNA, 75 bp, synthetic construct
  source 1..75: mol_type = other DNA
tgccggtgactggtcgcttggcttatccgacactattctgtttgctaaaaatgactacaaactgcttccggaaag

SEQ ID NO: 506329 - DNA, 75 bp, synthetic construct
  source 1..75: mol_type = other DNA
tgctgcgtaccaaaggtattgacggcctgaccgcgcaactgaaatcaatttctcaacagaaaatcactctggaag

SEQ ID NO: 506330 - DNA, 75 bp, synthetic construct
  source 1..75: mol_type = other DNA
aaactcaccagtcacgaacccgtgattggcattatgggtaaaagcggggccggtaaatcctcactctgtaatgca

SEQ ID NO: 506331 - DNA, 75 bp, synthetic construct
  source 1..75: mol_type = other DNA
tttgtgtcgactcccgttggaagaatcgcggcgtcgccagcgcccttatgcgagagatgattgaaatgtgcgaca

SEQ ID NO: 506332 - DNA, 75 bp, synthetic construct
  source 1..75: mol_type = other DNA
ggagcgactcgccgaacgccccggcatcaagcaactcgtcgcctgtattgatggaaccgtagtaggtcatctcac

SEQ ID NO: 506333 - DNA, 75 bp, synthetic construct
  source 1..75: mol_type = other DNA
atgagtgagatagtaatacgccatgctgaaacgcgcgattacgaggccatcaggcagattcacgcccagccggag

SEQ ID NO: 506334 - DNA, 75 bp, synthetic construct
  source 1..75: mol_type = other DNA
cacagaatattcgcgaaaaaacggaggcggtattccgtctgttccggcccgtacatccggttgttgccgtatcgg

SEQ ID NO: 506335 - DNA, 75 bp, synthetic construct
  source 1..75: mol_type = other DNA
actggttacgggtagatcgcattgaactaaccgtgtttgtcgataacgccccggcaattaaggtctataaaaaat

SEQ ID NO: 506336 - DNA, 75 bp, synthetic construct
  source 1..75: mol_type = other DNA
gtcgactctcgttggaagaaccgcggcgtcgccagcgccctgatgcgagagatgattgaaatgtgcgacaactga

SEQ ID NO: 506337 - DNA, 75 bp, synthetic construct
  source 1..75: mol_type = other DNA
gttgcacgcacggttctgcgtgccgtccgtgacacagtggtctctgttgcccgcgcggtatggaactggatcttc

SEQ ID NO: 506338 - DNA, 75 bp, synthetic construct
  source 1..75: mol_type = other DNA
cctgccatgaatgggatatggccggtattaagccttctcccgcacaggcacagaatattcgcgaaaaaacggagg

SEQ ID NO: 506339 - DNA, 75 bp, synthetic construct
  source 1..75: mol_type = other DNA
gtcacgaacccgtgattggcattatgggtaaaagcggggccggtaaatccgtaagcgactcgtcagaaccgtatt

SEQ ID NO: 506340 - DNA, 75 bp, synthetic construct
  source 1..75: mol_type = other DNA
ttggctttgagattgaagggactggcaagaagtacgcgctgcgtaatggtgaatatgtcgatgcgtattatatgg

SEQ ID NO: 506341 - DNA, 75 bp, synthetic construct
  source 1..75: mol_type = other DNA
cagaacattcgcgaaaaaacggaggcggtattccgtctgttccggcctgtacatccggttgtggccgtatcggtc

SEQ ID NO: 506342 - DNA, 75 bp, synthetic construct
  source 1..75: mol_type = other DNA
tgcctctgttgtccgtacggccctgcgcgctgttcgtgacacggtggtctctgttgcccgtgcggtatggaactg

SEQ ID NO: 506343 - DNA, 75 bp, synthetic construct
  source 1..75: mol_type = other DNA
cgctggtcagtgcgctaatgacagcacttcccgaccatgccgccagtcccctgatgacccgcctgcaggacgagc

SEQ ID NO: 506344 - DNA, 75 bp, synthetic construct
  source 1..75: mol_type = other DNA
tgctgtcaggacaccgacgaagacaggagtaccgtgctgtacttgcaggactgcgcccagcaggcagggcaggag

SEQ ID NO: 506345 - DNA, 75 bp, synthetic construct
  source 1..75: mol_type = other DNA
gtttacaccatcctttttggccttcgcacaacaagccaaaaatgcgctgattgaaagcaaattaaagatctcttc

SEQ ID NO: 506346 - DNA, 75 bp, synthetic construct
  source 1..75: mol_type = other DNA
tgacaatctgcggttatccaaaaaacgcgctcaaaaacatgagttcaagcagaaagtagaggcggcagcgcggaa

SEQ ID NO: 506347 - DNA, 75 bp, synthetic construct
  source 1..75: mol_type = other DNA
ttttgtcttttttcaccgggaatacatgtatgaatccgtctgatgccattgaggcaattgaaaaaccgctctcct

SEQ ID NO: 506348 - DNA, 75 bp, synthetic construct
  source 1..75: mol_type = other DNA
atgaagcgtgcggaatggggatccgtgaagataacacgctgatcaccaaagacacctcacgtttcgttccgcatt

SEQ ID NO: 506349 - DNA, 75 bp, synthetic construct
  source 1..75: mol_type = other DNA
atgcgccggtgaagctgctggagtacaacgccgatacgccgacctcgttgtatgagtcggcttatttccagtggc

SEQ ID NO: 506350 - DNA, 75 bp, synthetic construct
  source 1..75: mol_type = other DNA
gcctgcgtctgtcaaaagagctgggttaccttggttcactggcaatctgtaacgttccgggttcttctctggtgc

SEQ ID NO: 506351 - DNA, 75 bp, synthetic construct
  source 1..75: mol_type = other DNA
aacagccgaacgcgatcaaaaatacccttaccggacgcatcagccacggtcaggttgatttaagcgagctgggac

SEQ ID NO: 506352 - DNA, 75 bp, synthetic construct
  source 1..75: mol_type = other DNA
ttgaagaagttcgtgcgcgtggcggtcaactgtacgtcttcgccgatcaggatgctggttttgtaggtagcgata

SEQ ID NO: 506353 - DNA, 75 bp, synthetic construct
  source 1..75: mol_type = other DNA
ttgccgccctggttattgccgccgccagcggatttcgtggtgggcgaatcttcccggccgtgtttgttggcgtag

SEQ ID NO: 506354 - DNA, 75 bp, synthetic construct
  source 1..75: mol_type = other DNA
ggcgaaactgtctcgtctgaaaggccttgatgcctctattgagcacgatattgttcacggtctgcaggcgctgcc

SEQ ID NO: 506355 - DNA, 75 bp, synthetic construct
  source 1..75: mol_type = other DNA
cctgatgatcactctgtcacagtctggcgaaacggcggataccctggcaggtctgcgtctgtcgaaagagctggg

SEQ ID NO: 506356 - DNA, 75 bp, synthetic construct
  source 1..75: mol_type = other DNA
gagtatcggggaactgatgatctctggcctgggtctggcaatggttgcacaactcgttccgcagcgtctgatggg

SEQ ID NO: 506357 - DNA, 75 bp, synthetic construct
  source 1..75: mol_type = other DNA
tggcattatgggtaaaagcggggccggtaaatcctcactctgtaatgcactgtttcagggggaggtcaccccggt

SEQ ID NO: 506358 - DNA, 75 bp, synthetic construct
  source 1..75: mol_type = other DNA
gagcatcggggaactgatgatctctggtctgggtctggcaatggttgcacaactcgttccgcagcgtctgatggg

SEQ ID NO: 506359 - DNA, 75 bp, synthetic construct
  source 1..75: mol_type = other DNA
gggcaaaagcggggccggtaaatcctcactctgtaatgcactgtttcagggggaggtcaccccggtcagtgatgt

SEQ ID NO: 506360 - DNA, 75 bp, synthetic construct
  source 1..75: mol_type = other DNA
tgaaattggcctggcgaaagggatcaaactcggctacttcgcccagcatcaactggaatatctgcgcgccgacga

SEQ ID NO: 506361 - DNA, 75 bp, synthetic construct
  source 1..75: mol_type = other DNA
gtggttgagcgacgttcagaagcaggaaaaccaatctgacgaagcgccgaaagaaaacgctaacagcgcccaggc

SEQ ID NO: 506362 - DNA, 75 bp, synthetic construct
  source 1..75: mol_type = other DNA
gtgggtgaatcaggaaacgccggcgctaccgcaacctgcgctggaatatgtcattgatggcgaccgcgaatatcg

SEQ ID NO: 506363 - DNA, 75 bp, synthetic construct
  source 1..75: mol_type = other DNA
atttctggcgacacatactgcaccggggacatcagcaggtgctgtttgtggtgacgcaggccgacaaaacggagc

SEQ ID NO: 506364 - DNA, 75 bp, synthetic construct
  source 1..75: mol_type = other DNA
atgacccgcctgcaggacgagctgtgcacggaatctgtccggtctcaggcccgtgaacagtttaccggcgcggtg

SEQ ID NO: 506365 - DNA, 75 bp, synthetic construct
  source 1..75: mol_type = other DNA
atgaatgggatatggccggtattcagccttctcccgcacaggcacagaacattcgcgaaaaaacggaggcggtat

SEQ ID NO: 506366 - DNA, 75 bp, synthetic construct
  source 1..75: mol_type = other DNA
actgtttgtggtgatgcaggccgataaaacggagccctgccatgaatgggatatggccggtattcagccttcccc

SEQ ID NO: 506367 - DNA, 75 bp, synthetic construct
  source 1..75: mol_type = other DNA
gacagttacgcatccggaaaatacagctggaagagagtgaagataacgccagtgtcagcgaacaaactcgacagc

SEQ ID NO: 506368 - DNA, 75 bp, synthetic construct
  source 1..75: mol_type = other DNA
gatgcagagtatgaagccctgtaccgtaacattctgtctgaactggacctggtactgtggctgattaaagccgat

SEQ ID NO: 506369 - DNA, 75 bp, synthetic construct
  source 1..75: mol_type = other DNA
ttgatccatctgctgtttctcaatggggggaagccgcaaacgatcgtcggtttcaaaattggtaatgcgctggtg

SEQ ID NO: 506370 - DNA, 75 bp, synthetic construct
  source 1..75: mol_type = other DNA
taacgttgtggtgaacagctcgaacccgccagtaaaagatcgcgttaactcaatgaatgcaatgttctgcaatgc

SEQ ID NO: 506371 - DNA, 75 bp, synthetic construct
  source 1..75: mol_type = other DNA
taccctccagagctgattaaagcctatcttcgaggacagtttactaacctgacaagtggtactgtttaccattag

SEQ ID NO: 506372 - DNA, 75 bp, synthetic construct
  source 1..75: mol_type = other DNA
gtgaataatatccaactcgcccacggcagcggcggccaggcgatgcagcaattaatcaacagcctgtttatggaa

SEQ ID NO: 506373 - DNA, 75 bp, synthetic construct
  source 1..75: mol_type = other DNA
gctgatacggtaagagatattcgaggctgggcaacaaaattctatactaaagaaggcacttttgatctcgtaggt

SEQ ID NO: 506374 - DNA, 75 bp, synthetic construct
  source 1..75: mol_type = other DNA
ttccagaaaatcaagtaacgcaagtacgacggatatagcccagcttaagcaggctggttttaacgttgtggtgaa

SEQ ID NO: 506375 - DNA, 75 bp, synthetic construct
  source 1..75: mol_type = other DNA
ttgattcccttcgtcaggctatgcagcttctggagcacaagcacgaaccttcttcaccaccccattccccgtggt

SEQ ID NO: 506376 - DNA, 75 bp, synthetic construct
  source 1..75: mol_type = other DNA
ttcgttgttgatccgcccgaaggcactctcatccgcaaaattaactatgacgaaaatccgtttctgtctgacacc

SEQ ID NO: 506377 - DNA, 75 bp, synthetic construct
  source 1..75: mol_type = other DNA
ctgaatgaacagggtgaggagcttttggctaaagcgatcttaaatgcaacgcttcggcaaggaattgttccagga

SEQ ID NO: 506378 - DNA, 75 bp, synthetic construct
  source 1..75: mol_type = other DNA
ggtagaaatgatccccgcaaaccaattagtaaggaaagcattaatcaagtaattgaattacttggatataaggga

SEQ ID NO: 506379 - DNA, 75 bp, synthetic construct
  source 1..75: mol_type = other DNA
cgttatgccatagccacaggacgagccactgtcaatccagcctcagaactgagcagcacgctggcggcaccaaaa

SEQ ID NO: 506380 - DNA, 75 bp, synthetic construct
  source 1..75: mol_type = other DNA
atggccagagtgtctattagtgaagcagcacggcttgttaaggttagtcgccctactatttacaagatgattaac

SEQ ID NO: 506381 - DNA, 75 bp, synthetic construct
  source 1..75: mol_type = other DNA
gcggtactgacgccgcttattcagacgctgcgtgacattcccggcgtgaaagcgctgcgtgatgccacccgtggt

SEQ ID NO: 506382 - DNA, 75 bp, synthetic construct
  source 1..75: mol_type = other DNA
ggcagccgacaaaagcaaacttcttcggatacctgaaaaagccgcagattatcgcagctctgaatgatgccggac

SEQ ID NO: 506383 - DNA, 75 bp, synthetic construct
  source 1..75: mol_type = other DNA
cagggggtggccctgacctcaggtgaacaccttcagctctgcagtacccgtaacaccatgatcaatgcaggtcag

SEQ ID NO: 506384 - DNA, 75 bp, synthetic construct
  source 1..75: mol_type = other DNA
tgagagtcacgagaagaacgatatctacgcccatctggacgatcaggggcgttaccgggtgaagctggacttcga

SEQ ID NO: 506385 - DNA, 75 bp, synthetic construct
  source 1..75: mol_type = other DNA
caccatggaaggcttcggcattcacaccttccgcctgattaacgccgaaggtaaagcaacctttgtgcgtttcca

SEQ ID NO: 506386 - DNA, 75 bp, synthetic construct
  source 1..75: mol_type = other DNA
gggccgaaacgcggaggttttgaatcctatcaggagcgcgtagaaggcaataaggtgcgcgagcgtagcccatcg

SEQ ID NO: 506387 - DNA, 75 bp, synthetic construct
  source 1..75: mol_type = other DNA
tgacgaccaactgaatatcaccccgccaccggacgtaagcgggcttaaaaaagatcctgcgttaagtttgtatgc

SEQ ID NO: 506388 - DNA, 75 bp, synthetic construct
  source 1..75: mol_type = other DNA
cagggaagatggccacgccagcccaggctaaaaagctacgggcgctggggtaccgggtgcgcagtggcaagcgct

SEQ ID NO: 506389 - DNA, 75 bp, synthetic construct
  source 1..75: mol_type = other DNA
agaatgctcagttacagctttataatgctctggatattgagtttgcaaaggatttacaagactgggatgcagaga

SEQ ID NO: 506390 - DNA, 75 bp, synthetic construct
  source 1..75: mol_type = other DNA
gtgagctgctggggctggacgccctcaactttgccaatgaaggtaagctggtgattgccgtagagcgtaacgcgg

SEQ ID NO: 506391 - DNA, 75 bp, synthetic construct
  source 1..75: mol_type = other DNA
aggggccggtactggaaatggcggcagcgataagtcagattaaccaggctaacagccagatgcaggccctgaaca

SEQ ID NO: 506392 - DNA, 75 bp, synthetic construct
  source 1..75: mol_type = other DNA
ccgggcagaccggcccggcaacattgcggcaggcaaagcgtctgcgtaaagccgggtttaaggtgcgcagcggta

SEQ ID NO: 506393 - DNA, 75 bp, synthetic construct
  source 1..75: mol_type = other DNA
agcgccagctggcggagctgaaaaaggcgctggccagcatggagctgccgcccaaaaaacggcagcggctgctgt

SEQ ID NO: 506394 - DNA, 75 bp, synthetic construct
  source 1..75: mol_type = other DNA
aaaaaagcgcataaagaagggataaccttaaaagcctccgctatggagctggggtatctcaccgagtcagatttt

SEQ ID NO: 506395 - DNA, 75 bp, synthetic construct
  source 1..75: mol_type = other DNA
ggttatatcagtaaccattttctagaaataggcgatcctaagaaattaggacttactattgggcttaatgaaatc

SEQ ID NO: 506396 - DNA, 75 bp, synthetic construct
  source 1..75: mol_type = other DNA
agggaatgttaggggtctttattaaggctggcggaccattgatatcagctaatgaccttaaaaaagctggatacg

SEQ ID NO: 506397 - DNA, 75 bp, synthetic construct
  source 1..75: mol_type = other DNA
tacttgatatgggatcttggcattacgtccataaagtattagaaagaatacacaaggaaactggttttaatatta

SEQ ID NO: 506398 - DNA, 75 bp, synthetic construct
  source 1..75: mol_type = other DNA
cacggctgctgcaatggttgcctttgatacctggcacattgaacacggttataaggccaatcagcctcattctaa

SEQ ID NO: 506399 - DNA, 75 bp, synthetic construct
  source 1..75: mol_type = other DNA
cactacgactcgacagagtatttgcttgatggtggcattgttcaggatctgcatttgagttactcgacagcagac

SEQ ID NO: 506400 - DNA, 75 bp, synthetic construct
  source 1..75: mol_type = other DNA
agggaatgttgggggtctttattaaggctgatgacccattgatagctgctactgatcttaaagaggctggatacg

SEQ ID NO: 506401 - DNA, 75 bp, synthetic construct
  source 1..75: mol_type = other DNA
gaactggacctggtactgtggctgattaaagccgatgaccgtgccctgtctgtggatgagtatttctggcgacac

SEQ ID NO: 506402 - DNA, 75 bp, synthetic construct
  source 1..75: mol_type = other DNA
caggcccgtgaacagtttaccggtgcggtggaccggatatttgacacggcggagagcgtctgcattgcctctgtt

SEQ ID NO: 506403 - DNA, 75 bp, synthetic construct
  source 1..75: mol_type = other DNA
gagcgtctgtattgcctctgttgcacgcacggttctgcgtgccgtccgtgactcggtggtctctgttgcccgcgc

SEQ ID NO: 506404 - DNA, 75 bp, synthetic construct
  source 1..75: mol_type = other DNA
tttcactataaaaaaataccataaacaagcattaataaataaatctgattaccttgaaagcatgagagtattttt

SEQ ID NO: 506405 - DNA, 75 bp, synthetic construct
  source 1..75: mol_type = other DNA
cttgatagaacaatttctgctgtaagagaggtggttattaaatgcaacgagattaaaacaataggaggaataata

SEQ ID NO: 506406 - DNA, 75 bp, synthetic construct
  source 1..75: mol_type = other DNA
ggcccgtacatcgggttgttgccgtatcggcccgcaccggctgggaactggatacgctggtcagtgcgctcatga

SEQ ID NO: 506407 - DNA, 75 bp, synthetic construct
  source 1..75: mol_type = other DNA
ttcgttgttgatccgcccgaaggtactctcatccgcaaaattaactacgacgaaaatccgtttctgtctgacacc

SEQ ID NO: 506408 - DNA, 75 bp, synthetic construct
  source 1..75: mol_type = other DNA
aagccgtacgtgaaaaaacagagctggcctcactgtatggcctggtacaggcatctactttcgataatgaaaaga

SEQ ID NO: 506409 - DNA, 75 bp, synthetic construct
  source 1..75: mol_type = other DNA
ggtatatgccgaatctctggagcaacaggtctgggatgataagggtgagcctgataaaaaatctggcaacgatca

SEQ ID NO: 506410 - DNA, 75 bp, synthetic construct
  source 1..75: mol_type = other DNA
aatcgttgcacgcaggtgatccacgtttgaatcaaaaactcgcagattacttgggttgttatgcagatgaagccc

SEQ ID NO: 506411 - DNA, 75 bp, synthetic construct
  source 1..75: mol_type = other DNA
gagcctagagcgattatccattctgttacttttgaaagaacggacgtttctgatggttttattaggccaaaactt

SEQ ID NO: 506412 - DNA, 75 bp, synthetic construct
  source 1..75: mol_type = other DNA
agtcttgttgatagccccagtccaatttttattgctacagcaacacgagaaataattcaaaaaattagtgagttt

SEQ ID NO: 506413 - DNA, 75 bp, synthetic construct
  source 1..75: mol_type = other DNA
tcacttgttcagaatctaattgattatcaatctgatggtatacaatatcagatattttgctcttcaaaaaaaata

SEQ ID NO: 506414 - DNA, 75 bp, synthetic construct
  source 1..75: mol_type = other DNA
gaccggatatttgacacggcggagaaaccctcttcaccggcaccatcaaccgcacggaagtccatccccgggaag

SEQ ID NO: 506415 - DNA, 75 bp, synthetic construct
  source 1..75: mol_type = other DNA
gaccggatatttgacacggcggagagcgtctgtgttgtctctgttgcccgcgctgtatggaactggattttcttc

SEQ ID NO: 506416 - DNA, 75 bp, synthetic construct
  source 1..75: mol_type = other DNA
gcattcagccttctcccgcacaggcacagaatattcgacgaaaaaacggaggcggtattccgtctgttccggtcc

SEQ ID NO: 506417 - DNA, 75 bp, synthetic construct
  source 1..75: mol_type = other DNA
cccggaggcgctgccggggcgtcgttccatttctgatgatgacctgtgcacctggtgtacccgtctgctttaccg

SEQ ID NO: 506418 - DNA, 75 bp, synthetic construct
  source 1..75: mol_type = other DNA
atgcagcctgtccctgaaggcgtgattcaggcaccagaatcacccgacgccccggaggcgctgccggggtgtcgt

SEQ ID NO: 506419 - DNA, 75 bp, synthetic construct
  source 1..75: mol_type = other DNA
catccgtaaagagggatcagagtgctggtttatctttaaccccgggctggtgactgatttcgtgtggcgtaactt

SEQ ID NO: 506420 - DNA, 75 bp, synthetic construct
  source 1..75: mol_type = other DNA
tattggtcgttatgccaaccgcatcgccaatagccgttatacctttgacggtgaaaccgtgacgctttcgccaag

SEQ ID NO: 506421 - DNA, 75 bp, synthetic construct
  source 1..75: mol_type = other DNA
gaaccatcctgaatggccgcagccggactgtttcttacgcccaggcgaagagtattccagccagacggaatatca

SEQ ID NO: 506422 - DNA, 75 bp, synthetic construct
  source 1..75: mol_type = other DNA
accaccgcacctgccctgcaattttattccggcaacttcctcggcggtacaccgtcgcggggaatcgaaccttac

SEQ ID NO: 506423 - DNA, 75 bp, synthetic construct
  source 1..75: mol_type = other DNA
tcgttaccagaccaccaccattgttaacaccgacgacgcgattccgggttcagggatgtttgtgcgcagcagtct

SEQ ID NO: 506424 - DNA, 75 bp, synthetic construct
  source 1..75: mol_type = other DNA
tgctctatcagagccaatttgcagatacgcgcattttggttacgataagtgatcagcatattcgcggcgcgctta

SEQ ID NO: 506425 - DNA, 75 bp, synthetic construct
  source 1..75: mol_type = other DNA
tatttctataaacctgttacatacatcgacctggtcaaaattatcctttctaaaccgaaggtgaggttgtggttg

SEQ ID NO: 506426 - DNA, 75 bp, synthetic construct
  source 1..75: mol_type = other DNA
gctggcctgcacagggtgactttaacgatctgctgcaaaacggctccgaagtattcgaatgggtattccacaggg

SEQ ID NO: 506427 - DNA, 75 bp, synthetic construct
  source 1..75: mol_type = other DNA
atggatatggatttaaacaatcgcctgactgaagatgaaacgcttgagcaggcctacgatatttttctcgaactg

SEQ ID NO: 506428 - DNA, 75 bp, synthetic construct
  source 1..75: mol_type = other DNA
ccgttactgaataaaccactgtatttcggttcatgtattatgttcccattacactcgattccaaagcaatattgg

SEQ ID NO: 506429 - DNA, 75 bp, synthetic construct
  source 1..75: mol_type = other DNA
gacgctttcgccaagtcagggcgttaaccagctgcacggcggcccggaagggttcgacaaacgtcgctggcagat

SEQ ID NO: 506430 - DNA, 75 bp, synthetic construct
  source 1..75: mol_type = other DNA
accgacgataaccgtatctccattacttatcgcgccacagttgataaaccttgcccggtgaatatgactaaccac

SEQ ID NO: 506431 - DNA, 75 bp, synthetic construct
  source 1..75: mol_type = other DNA
aacactggacacacagagtgccgcgaacgacggcgaaatgggcactggtagcgatactggtgcctttttttctgg

SEQ ID NO: 506432 - DNA, 75 bp, synthetic construct
  source 1..75: mol_type = other DNA
cattactctatcttgcctttaactatgccgatccgattacccgcgaagggtgggctattccggcggcgacagata

SEQ ID NO: 506433 - DNA, 75 bp, synthetic construct
  source 1..75: mol_type = other DNA
agcgatctgtggcaatttttactgtttctctttccactgctggcgacaatgcagcttcttaaattgcagatgccc

SEQ ID NO: 506434 - DNA, 75 bp, synthetic construct
  source 1..75: mol_type = other DNA
tgccagtcagagacacaacgggagtgtattccagtctctttattcacttgctacggacgataaaggggagctgtg

SEQ ID NO: 506435 - DNA, 75 bp, synthetic construct
  source 1..75: mol_type = other DNA
tattattctgcatgagatatggcacggagtcttgtcgggtaaaattccggtaaatcatccttctgttttcaaatt

SEQ ID NO: 506436 - DNA, 75 bp, synthetic construct
  source 1..75: mol_type = other DNA
gtcacgtcttcatagaccatcttgctttcacttttccaataagtgagcttaagaatcttgagactttcgacggtg

SEQ ID NO: 506437 - DNA, 75 bp, synthetic construct
  source 1..75: mol_type = other DNA
atgaagccggttcaggaaaccatacgtcacgtcttcatagaccatcttgcattcactttccccatgagtgagctg

SEQ ID NO: 506438 - DNA, 75 bp, synthetic construct
  source 1..75: mol_type = other DNA
caggatgcgctggctcgccgttggttattacgctggggtgtagtgctgctgaactgttctcatgttgtctggcaa

SEQ ID NO: 506439 - DNA, 75 bp, synthetic construct
  source 1..75: mol_type = other DNA
accaaaacctgtaaaattgattaaacgcattttagatttggcgacaaacaaagataagaatgcaattgtacttga

SEQ ID NO: 506440 - DNA, 75 bp, synthetic construct
  source 1..75: mol_type = other DNA
aattaagcagggacgtaatgaggcggacttgcttattgaacttatgctcaaacgtggtatagacctgagtgtaaa

SEQ ID NO: 506441 - DNA, 75 bp, synthetic construct
  source 1..75: mol_type = other DNA
tcctggttgaacgggtccagaagggagatcagaaaacctttaacttactggtagtgcgctatcagcataaagtgg

SEQ ID NO: 506442 - DNA, 75 bp, synthetic construct
  source 1..75: mol_type = other DNA
tggatatacaaccatttgtccgtgatgcctatcagcagaaattctcatcgagagagcaattttataaacattccg

SEQ ID NO: 506443 - DNA, 75 bp, synthetic construct
  source 1..75: mol_type = other DNA
gttcccggtggtacatgggaaatgttctctggttcggaggctacaacagcaaaacggatcgggagaataactttg

SEQ ID NO: 506444 - DNA, 75 bp, synthetic construct
  source 1..75: mol_type = other DNA
ccgttgcccgcaaccgtggcatcagcgcggatgcggtgcgtgcacttgaggcccggacgttgcgggctgacgaag

SEQ ID NO: 506445 - DNA, 75 bp, synthetic construct
  source 1..75: mol_type = other DNA
ggttacattatgcaccgcacgatgccagacatctcgttcccggtgtttttacttaatggcctgattccctttttt

SEQ ID NO: 506446 - DNA, 75 bp, synthetic construct
  source 1..75: mol_type = other DNA
gatttaacgccattaccgttggagtcatgctgtacattgactgagacggcagaaaaagagattcatacaaggcat

SEQ ID NO: 506447 - DNA, 75 bp, synthetic construct
  source 1..75: mol_type = other DNA
gatgaaaccttaaaaccgtttgtgcgtgacgcttccggcagccgcctgaaagacctgcccaaaccaaacaaaagc

SEQ ID NO: 506448 - DNA, 75 bp, synthetic construct
  source 1..75: mol_type = other DNA
gatgcggttaaccgctacaaattgctgaaaaaagatgcgcgtaccgtcgccgcccagcaggtagcaaggctggaa

SEQ ID NO: 506449 - DNA, 75 bp, synthetic construct
  source 1..75: mol_type = other DNA
taaccgctacaaactgctgaaaaaagatgcgcgtaccgttgccgcccagcaggtggcaaggctggaatccgccat

SEQ ID NO: 506450 - DNA, 75 bp, synthetic construct
  source 1..75: mol_type = other DNA
tacttcgcagcgagtgagctggctcctgccgtcgcccgcgccttcaacaaactcaaaaccctacgacaagacgcc

SEQ ID NO: 506451 - DNA, 75 bp, synthetic construct
  source 1..75: mol_type = other DNA
gctggttcgtcacttaacccgccgtctgatttggggcgtttatagcgcgaaaaccagctactggcttgctttcgc

SEQ ID NO: 506452 - DNA, 75 bp, synthetic construct
  source 1..75: mol_type = other DNA
tgttcagcaagtagacgaattgacccagttacgccgcttagcctgtagcgtgtcgcaacgggataataaaacaac

SEQ ID NO: 506453 - DNA, 75 bp, synthetic construct
  source 1..75: mol_type = other DNA
cagccctgccccgatttgctccctatgccgcaagtgactactgcgccgatgtgttgcgtcatatcaatcatccgt

SEQ ID NO: 506454 - DNA, 75 bp, synthetic construct
  source 1..75: mol_type = other DNA
acgttctggaaatatcaccgacggatgctgccgcctttggtcagctttttgccgactacgaactgctaccaccgt

SEQ ID NO: 506455 - DNA, 75 bp, synthetic construct
  source 1..75: mol_type = other DNA
caggtgaaagacgcctgtaccgctgactctctggctgaatttgcctgggatctgtttaccgcctggctgactgcg

SEQ ID NO: 506456 - DNA, 75 bp, synthetic construct
  source 1..75: mol_type = other DNA
cgctgacgatgatcttttcaccctgccggaaggcgatatctctatcggcactcctcacgttctggaaatatcacc

SEQ ID NO: 506457 - DNA, 75 bp, synthetic construct
  source 1..75: mol_type = other DNA
ttactaagtgaatttaaggtgtttcattcacctaccgggcattattggcagttggggattttgacaacattgccg

SEQ ID NO: 506458 - DNA, 75 bp, synthetic construct
  source 1..75: mol_type = other DNA
atgcccttactctatctccacataccgataccgaatacgccatgttacattttggactcaaaggtttacctggtt

SEQ ID NO: 506459 - DNA, 75 bp, synthetic construct
  source 1..75: mol_type = other DNA
ctgaaacagtgggacagcctgaacgtgtactgcagtaatggctgggtggaaatcgacaacaacatcgcagagaac

SEQ ID NO: 506460 - DNA, 75 bp, synthetic construct
  source 1..75: mol_type = other DNA
gatgtgcgccgtccgacagaaatgacacaggaagcgctcagacggatggcagagttatacgacatagaagcagag

SEQ ID NO: 506461 - DNA, 75 bp, synthetic construct
  source 1..75: mol_type = other DNA
ttgccgaccgcgacgagacaagcgctacgggtttagctgctgcctgcgaatgcgctcacgcaaatctgatggcta

SEQ ID NO: 506462 - DNA, 75 bp, synthetic construct
  source 1..75: mol_type = other DNA
cgttgctgtttatattctgcttatgctcattgtctggatggcaggcgaatatttcgagataacaaattttttaca

SEQ ID NO: 506463 - DNA, 75 bp, synthetic construct
  source 1..75: mol_type = other DNA
aaccgttgttgaaatccctggaaagctggttgcgtgaaaagatgaagaccctgtcgcgacactcagagttggcga

SEQ ID NO: 506464 - DNA, 75 bp, synthetic construct
  source 1..75: mol_type = other DNA
aaaatggctgcattacgtcattgagcatatccaggactggccggcaaaccgggtacgcgatctgttgccctggaa

SEQ ID NO: 506465 - DNA, 75 bp, synthetic construct
  source 1..75: mol_type = other DNA
cggtcgctgggggctccgtcagaggttctctctaagctgtcccacgccaatgcgattgttcctgatcctattatg

SEQ ID NO: 506466 - DNA, 75 bp, synthetic construct
  source 1..75: mol_type = other DNA
ggtacggagaagcatcgacgttgcttgaacaggcgatcatgcctgttctggaaggcaaaacgacgttgggagaag

SEQ ID NO: 506467 - DNA, 75 bp, synthetic construct
  source 1..75: mol_type = other DNA
gaaactgaaattcaaagcattacaggagcgggcaaaagaaaaattgccgacattgccgagagccgcgaactcacg

SEQ ID NO: 506468 - DNA, 75 bp, synthetic construct
  source 1..75: mol_type = other DNA
aggagaagggggagcgtgcgtattaccgctactgggaagttttgcctgagatgctccaggaagctgctggtccgg

SEQ ID NO: 506469 - DNA, 75 bp, synthetic construct
  source 1..75: mol_type = other DNA
gaaaacaaacccgaaagacatcaacgcggaagatttcttgccgtctggtgttacgcctcagaaagcactccagat

SEQ ID NO: 506470 - DNA, 75 bp, synthetic construct
  source 1..75: mol_type = other DNA
gaaagcaagagaagcagccaaaacaggacttcgttccacaagaacaaaactccctgcagggcgatgactttccaa

SEQ ID NO: 506471 - DNA, 75 bp, synthetic construct
  source 1..75: mol_type = other DNA
aatgtctggcccactgcgttgacagccaggtgctggatctcggcctgaccagtctctatccccatgtggatgagc

SEQ ID NO: 506472 - DNA, 75 bp, synthetic construct
  source 1..75: mol_type = other DNA
gacatgacccagcttgacctgattggaatggtcgagctcggaagtgaaatcgaagatggggagtgtgctggaggt

SEQ ID NO: 506473 - DNA, 75 bp, synthetic construct
  source 1..75: mol_type = other DNA
gaaattgatatgaatagtaaaaagatcaccatttcgcatgaagcaatcccggcggtgggctggcctgcaatgacc

SEQ ID NO: 506474 - DNA, 75 bp, synthetic construct
  source 1..75: mol_type = other DNA
tagcacgaggattaccaccagcagcggtccaggataggttagagatcagcaaagcaaccttctaccgacttaagt

SEQ ID NO: 506475 - DNA, 75 bp, synthetic construct
  source 1..75: mol_type = other DNA
ggatcctggcccgaaaggcacagctcgagccgatgctgggtcacccgttacacgccttcaaatccagcatgcagc

SEQ ID NO: 506476 - DNA, 75 bp, synthetic construct
  source 1..75: mol_type = other DNA
tgtactgcttcggcatgccgttctacgccggttgggggttgacccacgacagcaaacagtgtgcacgtcgcgaga

SEQ ID NO: 506477 - DNA, 75 bp, synthetic construct
  source 1..75: mol_type = other DNA
ggccgcattaaagattaagccgggccatacgctaggcgtcattgatgccatgttggttcatgaaatggctaaggc

SEQ ID NO: 506478 - DNA, 75 bp, synthetic construct
  source 1..75: mol_type = other DNA
aaatccagtgggcaaaggacggtagcctggtgccggaagaagtagatcatgttattgcgttggcacataagctga

SEQ ID NO: 506479 - DNA, 75 bp, synthetic construct
  source 1..75: mol_type = other DNA
caaaagtggaatagcacgcaactggcgggaaaagttcgtattatccagtatattgccgggcgaaagtcggcaaag

SEQ ID NO: 506480 - DNA, 75 bp, synthetic construct
  source 1..75: mol_type = other DNA
atgaagctgtacagtttttttaatagttcagcgtcgtaccgggtacgcattgcgctggctctgaagggcattgat

SEQ ID NO: 506481 - DNA, 75 bp, synthetic construct
  source 1..75: mol_type = other DNA
ctttgctggacgctttttttgtctctgtcgcccagctcaacattgaacaagctaatattaatatgcaaaaaaccg

SEQ ID NO: 506482 - DNA, 75 bp, synthetic construct
  source 1..75: mol_type = other DNA
cgatgtggactgcggttgtgtgtctgcggaaacattcatgcactggttgcggatagcttatgaggctgggaacca

SEQ ID NO: 506483 - DNA, 75 bp, synthetic construct
  source 1..75: mol_type = other DNA
gagtttccacctgcgaccagaacgttgaaaaccagaagcagcagataaccgatgctggttatagcgttactcgct

SEQ ID NO: 506484 - DNA, 75 bp, synthetic construct
  source 1..75: mol_type = other DNA
cagccgcagacgctggactcagatatcatggccgttggccgctatgtgctttctgccgatatttggccggaactt

SEQ ID NO: 506485 - DNA, 75 bp, synthetic construct
  source 1..75: mol_type = other DNA
ggggacgtattcagctgactgatgccattgctgaactggcgaaaaaacagtccgttgatgcaatgctgatgactg

SEQ ID NO: 506486 - DNA, 75 bp, synthetic construct
  source 1..75: mol_type = other DNA
gggctatatgcaggcgttcgtgaagtatggactacgcaacctcaaagaaggggcgaagttccgtaaaggtattga

SEQ ID NO: 506487 - DNA, 75 bp, synthetic construct
  source 1..75: mol_type = other DNA
tctatttcatcgaaatgaatacccgtattcaggtagaacacccggttactgaaatgatcaccggcgttgacctga

SEQ ID NO: 506488 - DNA, 75 bp, synthetic construct
  source 1..75: mol_type = other DNA
gctgaactggcacaatccatctccatgacccgtgcggaagcgaaagcagctttcagcaacgatatggtttacatg

SEQ ID NO: 506489 - DNA, 75 bp, synthetic construct
  source 1..75: mol_type = other DNA
aactgctggcggaagtacagtccatttgcccgccgggcgtgaccattatgaacgtgcgtcagggcgaacctttag

SEQ ID NO: 506490 - DNA, 75 bp, synthetic construct
  source 1..75: mol_type = other DNA
ggtgcaacataggttaggcatcagcaaagccaccttctaccgattaaagacatccggtcatctctctgatatttg

SEQ ID NO: 506491 - DNA, 75 bp, synthetic construct
  source 1..75: mol_type = other DNA
gggtttagtgaactactcaactatgtacgtgaaggcgatacgctggttgtgattggtatagaccgtctgggacgt

SEQ ID NO: 506492 - DNA, 75 bp, synthetic construct
  source 1..75: mol_type = other DNA
ggttcagcgatgaagcggtgagtggtgcaatcaaggcaggagagcgcccagggtttggtgaactactcagttatg

SEQ ID NO: 506493 - DNA, 75 bp, synthetic construct
  source 1..75: mol_type = other DNA
ttcaaatacggtcaattcatgatgaatgcgaaggaaaacgagtaccgtgatttcttcctgaaagtggtcaactaa

SEQ ID NO: 506494 - DNA, 75 bp, synthetic construct
  source 1..75: mol_type = other DNA
gacgcattcaaatacggtcaattcatgatgaatgcgaaagaagatgaataccgggacttcttcctgaaggcactt

SEQ ID NO: 506495 - DNA, 75 bp, synthetic construct
  source 1..75: mol_type = other DNA
gctgggtgggggttaacgcatgacagtaaacgttgtatacgccgtgaagaagcaatgtcagccgaaggcgtttca

SEQ ID NO: 506496 - DNA, 75 bp, synthetic construct
  source 1..75: mol_type = other DNA
ggcaaccatccggattttccggatagttcccaacaatcgcccaagaaaagcgtaaaaaccactctggaaagaggc

SEQ ID NO: 506497 - DNA, 75 bp, synthetic construct
  source 1..75: mol_type = other DNA
gtagatgcgatgctgatgacgggcgacagctacgactgcgggaagaaaatggggtatatgcaggcgtttgttaag

SEQ ID NO: 506498 - DNA, 75 bp, synthetic construct
  source 1..75: mol_type = other DNA
cgaaattgtagctgcaggtatcaaagaaatcgtgctggtgactcatgcgtctaagaacgcggttgagaaccactt

SEQ ID NO: 506499 - DNA, 75 bp, synthetic construct
  source 1..75: mol_type = other DNA
gcgtccgatcgttggcgataacccgtttgtggttgttctgcccgatatcattcttgatggcgcatccgccgaccc

SEQ ID NO: 506500 - DNA, 75 bp, synthetic construct
  source 1..75: mol_type = other DNA
tgcgatgaagaagatgcgcgtaatgcgattaacgcgggtgtcgtggcgctttccaccacgaataccggggtctgg

SEQ ID NO: 506501 - DNA, 75 bp, synthetic construct
  source 1..75: mol_type = other DNA
agataatgccagcctgcaactggccattaattctgaatgccagtttatttccgtgctgtacggcaatatctgcac

SEQ ID NO: 506502 - DNA, 75 bp, synthetic construct
  source 1..75: mol_type = other DNA
atcaaagagattgtcctggtgacgcactcctcgaagaatgcagtggaaaaccacttcgacacctcctatgagctg

SEQ ID NO: 506503 - DNA, 75 bp, synthetic construct
  source 1..75: mol_type = other DNA
caaccgtaagcaatatcagaatacctaatattaaagcattaaaaatacctttaccaaaaatcactattcaacgga

SEQ ID NO: 506504 - DNA, 75 bp, synthetic construct
  source 1..75: mol_type = other DNA
ccgatatgctgcctgagtttggcggtgacacggcatacagcgatgacttcttcgttggtcgtgtacggcgttgct

SEQ ID NO: 506505 - DNA, 75 bp, synthetic construct
  source 1..75: mol_type = other DNA
ttgctcagggaaaagcggtacgtttggggcaagagcctcaggcttttactgaggaagagttgtatattatcggaa

SEQ ID NO: 506506 - DNA, 75 bp, synthetic construct
  source 1..75: mol_type = other DNA
ttgcccaccgggcgtaaccatcatgaacgtgcgtcaggcacagccgctgggcctgggccactccattctgtgcgc

SEQ ID NO: 506507 - DNA, 75 bp, synthetic construct
  source 1..75: mol_type = other DNA
ttgcttgagcagcgtgttaaacgccagctattagccgaggtgcagtctatctgtcctccaggcgtgactattatg

SEQ ID NO: 506508 - DNA, 75 bp, synthetic construct
  source 1..75: mol_type = other DNA
catggggccgtatccagctgaccgacgccattgccgaactggcgaagaagcagttcgtcgatgcgatgctgatga

SEQ ID NO: 506509 - DNA, 75 bp, synthetic construct
  source 1..75: mol_type = other DNA
gtacccaggtgctggcaaaacgtatgccgggcgacctctcggaatactccgttattcagaccaaagagccgctgg

SEQ ID NO: 506510 - DNA, 75 bp, synthetic construct
  source 1..75: mol_type = other DNA
acttacaggttggattttgggcaatggctggaacagcaacgcgggaaaatcgatgtggactgtggttgtgtgtcc

SEQ ID NO: 506511 - DNA, 75 bp, synthetic construct
  source 1..75: mol_type = other DNA
aagccggggcatacgcttggcattattgatgcactattggttcataagatggccagggctttattgccgctggtg

SEQ ID NO: 506512 - DNA, 75 bp, synthetic construct
  source 1..75: mol_type = other DNA
cggcgtttacagcaccgccgcaggctataccggcggctatacgccaaatccgacttatcgggaagtgtgctccgg

SEQ ID NO: 506513 - DNA, 75 bp, synthetic construct
  source 1..75: mol_type = other DNA
aatgagtggaccggcaatcctgatattgataacgccatcatcatgctcgatcgcatagatacgctggaaagttgc

SEQ ID NO: 506514 - DNA, 75 bp, synthetic construct
  source 1..75: mol_type = other DNA
gcattaaacattaagccggggcatacgcttggcattattgatgcactattggttcataagatggccagggcttta

SEQ ID NO: 506515 - DNA, 75 bp, synthetic construct
  source 1..75: mol_type = other DNA
tggctattatcgacgatcttggggccatcattatcatcgcattgttctacactaatgacttatcgatggcctctc

SEQ ID NO: 506516 - DNA, 75 bp, synthetic construct
  source 1..75: mol_type = other DNA
tagcgctgtttgcctgaccggttatctcactggcatggggtatatttttctgccaaagtttacccaaactggaca

SEQ ID NO: 506517 - DNA, 75 bp, synthetic construct
  source 1..75: mol_type = other DNA
atgccaatccgtgatcgaatagagcggaatacgcattcccttgagcttttgtttgcccgcgatgatgacaagcct

SEQ ID NO: 506518 - DNA, 75 bp, synthetic construct
  source 1..75: mol_type = other DNA
gtaatcaatagctggctacaaaaagttacctccctgatagatatcagtttaatcgatgtggagagtgcgaaatga

SEQ ID NO: 506519 - DNA, 75 bp, synthetic construct
  source 1..75: mol_type = other DNA
aatggaaatcgccatttttgctatgggctgtttctggggcgtggaacgccttttctggcaacttcccggtgttta

SEQ ID NO: 506520 - DNA, 75 bp, synthetic construct
  source 1..75: mol_type = other DNA
gccacgctgcatgcggtcaacggtcactcaatgaccaatgtacctgacggaatggagattgccatttttgcgatg

SEQ ID NO: 506521 - DNA, 75 bp, synthetic construct
  source 1..75: mol_type = other DNA
gcctataccagtttgttggggcgaagttattccggtggtggtgctggcggcggcgcgggtggcggaggcggtggt

SEQ ID NO: 506522 - DNA, 75 bp, synthetic construct
  source 1..75: mol_type = other DNA
tgttgttggcgatgccagaaacggtgaagcgtggtgcggttccgttcagcgctgttagcgtactgcgcgattttc

SEQ ID NO: 506523 - DNA, 75 bp, synthetic construct
  source 1..75: mol_type = other DNA
agcctagctgggggttttctgtgcacaatcagacgccagaacaaatattctggcgtctcagagaaaagaatctta

SEQ ID NO: 506524 - DNA, 75 bp, synthetic construct
  source 1..75: mol_type = other DNA
aacacggcagaggtttctcctgtaattcattgtgtccagaagtttggtaatattcgagaaacacttctcgatctg

SEQ ID NO: 506525 - DNA, 75 bp, synthetic construct
  source 1..75: mol_type = other DNA
tccgtcgtatatggtcggcgcgattgtcggctcaaccgccgctgtctggctgggcgcagtgcaatggttcccgga

SEQ ID NO: 506526 - DNA, 75 bp, synthetic construct
  source 1..75: mol_type = other DNA
ctcagctttatccgcagggtaaaaccgccatgttcctggcgtttatggggatcagtgaaggtgcgattccgtttg

SEQ ID NO: 506527 - DNA, 75 bp, synthetic construct
  source 1..75: mol_type = other DNA
attatgggcggtgtgatcctcgctttcagccagctgattgcttatagctggcttaaaattcctgctgagatcggc

SEQ ID NO: 506528 - DNA, 75 bp, synthetic construct
  source 1..75: mol_type = other DNA
gtgtaagcggatcacctaactggattaagctcggtcagacttcacagcaaattttcaatgtcaatgcactggcta

SEQ ID NO: 506529 - DNA, 75 bp, synthetic construct
  source 1..75: mol_type = other DNA
aaatcagcaagccttagatgtggttatcaacggtgaaactaacaagtttagtgacctgtttgaagcctacattat

SEQ ID NO: 506530 - DNA, 75 bp, synthetic construct
  source 1..75: mol_type = other DNA
gtcagagttgtataatagggcgtatggcggtaatactggtctttactcaggtgttattgatatgccagcgggtaa

SEQ ID NO: 506531 - DNA, 75 bp, synthetic construct
  source 1..75: mol_type = other DNA
gttgatatccttcaaccaaatagccaggtagcggtcgatgttatgggcttaaagattcgtaaccttgaaactaat

SEQ ID NO: 506532 - DNA, 75 bp, synthetic construct
  source 1..75: mol_type = other DNA
gccagcgggtaagggtagcgtgactttagagtttaaagcatggcctgtttcaacccgtagatcgggtagtgcgac

SEQ ID NO: 506533 - DNA, 75 bp, synthetic construct
  source 1..75: mol_type = other DNA
acagaagcctactaatttcagaattaaggcaactggtgagacaatccacggtaaaaacgtaactttgacatggga

SEQ ID NO: 506534 - DNA, 75 bp, synthetic construct
  source 1..75: mol_type = other DNA
cgcaatgggaattgccgcagcaacggcaattgacctgggggggccaatcaacaaagcggcaggtttcgttgcctt

SEQ ID NO: 506535 - DNA, 75 bp, synthetic construct
  source 1..75: mol_type = other DNA
gaacgcctgctcgaccgggtcgatgccgatgttgaatatcaggcagccgccagcgaatggcgtgcccacgtagtt

SEQ ID NO: 506536 - DNA, 75 bp, synthetic construct
  source 1..75: mol_type = other DNA
cgatgcagatgattcacgacgaactgccgggaacgaccttctccaaccctgacgctgcgcgagctagagcgctgg

SEQ ID NO: 506537 - DNA, 75 bp, synthetic construct
  source 1..75: mol_type = other DNA
ggccgccctgacgctgcgcgagctagagcgctggctcacattggcggtcggcacctaccacggttcggtgcacaa

SEQ ID NO: 506538 - DNA, 75 bp, synthetic construct
  source 1..75: mol_type = other DNA
gaactgggcggtgaacgcctgctcgaccgtgtcgatgccgacgttgaataccaggccgctgccagcgagtggcgc

SEQ ID NO: 506539 - DNA, 75 bp, synthetic construct
  source 1..75: mol_type = other DNA
cgccgcgtctgtattccatcgcctcctcgcaggcggaagtcgagaacgaagtacacgtcaccgttggtgtggtgc

SEQ ID NO: 506540 - DNA, 75 bp, synthetic construct
  source 1..75: mol_type = other DNA
tggtgcctccagcttcctcgcggatcgcgtgggagaagagggcgaagttcgcgtctttatcgaacataacgacaa

SEQ ID NO: 506541 - DNA, 75 bp, synthetic construct
  source 1..75: mol_type = other DNA
aacattacaatgaaaaccatccgcacagtacgttgggttatcgctctccgcgagaatatcgacgtcagcgggtaa

SEQ ID NO: 506542 - DNA, 75 bp, synthetic construct
  source 1..75: mol_type = other DNA
atggccattaaaaaacgcagtgcaaccgttgtgcttggcgcatccggtgcggcagcggcagttaagaatccgcag

SEQ ID NO: 506543 - DNA, 75 bp, synthetic construct
  source 1..75: mol_type = other DNA
attactgcgctgatggtggtgttcctgcgtctgatgatgttccgcaaaggcaaattgttaatcgatagcctgtaa

SEQ ID NO: 506544 - DNA, 75 bp, synthetic construct
  source 1..75: mol_type = other DNA
aatacactggtaagaataaaatactgttatgaacagatggggatatatctcccgatatggtgttgtaataagctg

SEQ ID NO: 506545 - DNA, 75 bp, synthetic construct
  source 1..75: mol_type = other DNA
agccctcagagtaatgaaatggcagaatggttcgtgaaaacgatgcaggaaaactacatcgcgttcatgccgaaa

SEQ ID NO: 506546 - DNA, 75 bp, synthetic construct
  source 1..75: mol_type = other DNA
tatctttcgacggacctgatccagccggggatcattaatgtggtccgtgattttaatgccgatgtcagtctggct

SEQ ID NO: 506547 - DNA, 75 bp, synthetic construct
  source 1..75: mol_type = other DNA
gattctggtattgctgggatgatgactatcaccgccacagaatataattctcaggtttatactgacctgaactat

SEQ ID NO: 506548 - DNA, 75 bp, synthetic construct
  source 1..75: mol_type = other DNA
aagaatcactatcacggcctgccgttcaaggtgacgaattactttgagtttatcgcccgtgaaacccgcgagctg

SEQ ID NO: 506549 - DNA, 75 bp, synthetic construct
  source 1..75: mol_type = other DNA
tgcatatggagccgtgggatggcccggcgggcatcgtgatgtctgacggtcgttttgccgcctgtaacctcgacc

SEQ ID NO: 506550 - DNA, 75 bp, synthetic construct
  source 1..75: mol_type = other DNA
ccactgcgtgaagcgcatgttatgtcgctcgccaccagcattggtcgtgaaatgaacgtcttctgtgaagcagag

SEQ ID NO: 506551 - DNA, 75 bp, synthetic construct
  source 1..75: mol_type = other DNA
ccgggtgataaagtcactccgtacatcgccaaactgcgttattccgtgccaggcgtgacgctgatctccccgccg

SEQ ID NO: 506552 - DNA, 75 bp, synthetic construct
  source 1..75: mol_type = other DNA
tccgataaagacttctacatctgtagcctgtcgaatctggtcaacatctataaaggtctgtgtatgccggcggat

SEQ ID NO: 506553 - DNA, 75 bp, synthetic construct
  source 1..75: mol_type = other DNA
ctctccagccagccgcgcattatttacgactacttccgccagcagtttgcccaggtcactaacccgccaatcgac

SEQ ID NO: 506554 - DNA, 75 bp, synthetic construct
  source 1..75: mol_type = other DNA
cccagacgcacggcgatcaggggctggctgccgatcctatcaaagcgtacttcaacggcaccgcaggccagagct

SEQ ID NO: 506555 - DNA, 75 bp, synthetic construct
  source 1..75: mol_type = other DNA
cggacctgcgtctggaatcggctatctgcctgtttcaccagcgcttttccactaacaccgtaccgcgctggccgc

SEQ ID NO: 506556 - DNA, 75 bp, synthetic construct
  source 1..75: mol_type = other DNA
tacgttctcgatgaaagcggcgatttccgcaaacgcgttaacccggaactggtcgaggtattaagcgttgacgat

SEQ ID NO: 506557 - DNA, 75 bp, synthetic construct
  source 1..75: mol_type = other DNA
aaagagctggacggtttcaccgccaaacagcagaaactggcgctgtcgaaactgctggagaccgccgagccgcat

SEQ ID NO: 506558 - DNA, 75 bp, synthetic construct
  source 1..75: mol_type = other DNA
aagtggtcgaaaaaggccgcgtcgggccaggcgaactgatggtgatcgacactcgcagtgggcgtattctgcact

SEQ ID NO: 506559 - DNA, 75 bp, synthetic construct
  source 1..75: mol_type = other DNA
gatccggcgcgctacggcaccaacaaagtctcgcgcattaaacaggtcgcttccggtcgcttcggcgtcactccg

SEQ ID NO: 506560 - DNA, 75 bp, synthetic construct
  source 1..75: mol_type = other DNA
ccaggtcaccaacccgccaatcgacccactgcgtgaagcgcatgttatgtcgctcgccaccagcatcgggcgtga

SEQ ID NO: 506561 - DNA, 75 bp, synthetic construct
  source 1..75: mol_type = other DNA
ggcgcggcgggtgttgttccgttcggtgtcgaagggaacaaggtgtacatggactggtcaatgatccgtaatgcc

SEQ ID NO: 506562 - DNA, 75 bp, synthetic construct
  source 1..75: mol_type = other DNA
aacagcgtaatcaaaaaacgccagtggtcgcgcaggtatggttcaggggttattgcaggagttttcgttgtcatc

SEQ ID NO: 506563 - DNA, 75 bp, synthetic construct
  source 1..75: mol_type = other DNA
gctgaatattgtgcgcaatgcgctacaggcgctgggccggaaggcggtgaaatcattctgcgtacccgcaccgcg

SEQ ID NO: 506564 - DNA, 75 bp, synthetic construct
  source 1..75: mol_type = other DNA
agaagaatatcgtaaagtattagaagtcgagttccgcacgggcaagaatcctaacaccgctttgtcgctggcaaa

SEQ ID NO: 506565 - DNA, 75 bp, synthetic construct
  source 1..75: mol_type = other DNA
atgggatttgaaatattagtaggcgcggttattgctggtgcgtctgctgggatggctgctgctgcaacattttct

SEQ ID NO: 506566 - DNA, 75 bp, synthetic construct
  source 1..75: mol_type = other DNA
atggcccgcgaattaatgctttattgtgttgagggtggcgtaggtagtaatgcctatgtcgccgggaaaggctat

SEQ ID NO: 506567 - DNA, 75 bp, synthetic construct
  source 1..75: mol_type = other DNA
ctgggtgaaatcgccctctcctctctgccacgcattgagcaaatttttgtgaacgccccggcaggctggcgtccg

SEQ ID NO: 506568 - DNA, 75 bp, synthetic construct
  source 1..75: mol_type = other DNA
ggtggaagtattaagcgttgacgatttggcgatccatgaagagcatctgcgtggtcttatcaccgagcatgtgca

SEQ ID NO: 506569 - DNA, 75 bp, synthetic construct
  source 1..75: mol_type = other DNA
attgctgatgttgaaccagccagtgaactgtttaaacgcttcgataccgcagcgatgtctatcggcgcattaagc

SEQ ID NO: 506570 - DNA, 75 bp, synthetic construct
  source 1..75: mol_type = other DNA
taccaaagtgattatcgaacaggcggaccggctgcgaaatctggtcgaccgtctgttggggccgcaactgcccgg

SEQ ID NO: 506571 - DNA, 75 bp, synthetic construct
  source 1..75: mol_type = other DNA
tgttagtaccacccgcctggcagaacaacccggatatggacccggaactgcgtgccttctttgactttaactcca

SEQ ID NO: 506572 - DNA, 75 bp, synthetic construct
  source 1..75: mol_type = other DNA
ttaatcaccatcgcgggctatgacggcggcaccggcgcaagcccgctctcatcggtgaaatacgcaggctgcccg

SEQ ID NO: 506573 - DNA, 75 bp, synthetic construct
  source 1..75: mol_type = other DNA
taaaagctgtatgttggcttgtccgtttggtgcaatggaggtcgtttcattgcgcacaaaagcgagggcgattaa

SEQ ID NO: 506574 - DNA, 75 bp, synthetic construct
  source 1..75: mol_type = other DNA
aatctgtggtttttactgagcgcggtgtacacggtggaacatatggcgggaagtttgttgcttacgattatgcgg

SEQ ID NO: 506575 - DNA, 75 bp, synthetic construct
  source 1..75: mol_type = other DNA
tcattaaccctcttcaatcagccaatccgtatcggtgaagatggcatgatctgcctcactgatatgtggaaagcc

SEQ ID NO: 506576 - DNA, 75 bp, synthetic construct
  source 1..75: mol_type = other DNA
gagaaacgccctgcctgaagggtatgcgccagccaaagtagccgaacggctgaatgaggtggcgcataaagttat

SEQ ID NO: 506577 - DNA, 75 bp, synthetic construct
  source 1..75: mol_type = other DNA
gaacagcgggcggctggccatcagacgctggccgatgttccggcacccgtaattaacggagaaagcgtcaatctc

SEQ ID NO: 506578 - DNA, 75 bp, synthetic construct
  source 1..75: mol_type = other DNA
gtgctggcatcgggagacgggaccggcctgtgttgaagcctgcccgacaaaggcgttgcagtgcatggatgtcga

SEQ ID NO: 506579 - DNA, 75 bp, synthetic construct
  source 1..75: mol_type = other DNA
ccgtgagctggaagcgtggcagcaggaacagcaggcagccggacacgaaacactggccgatgtcccggcgccatt

SEQ ID NO: 506580 - DNA, 75 bp, synthetic construct
  source 1..75: mol_type = other DNA
acgaagcattcaatcttaacagtcttcagcctggttctgtcattgtagtcaccactcaaagcggcatgacgatac

SEQ ID NO: 506581 - DNA, 75 bp, synthetic construct
  source 1..75: mol_type = other DNA
tttctgatggccgacaaaaagcagctcggcttgcacgtgatattcctagagatattgagcttgatttgtttcggc

SEQ ID NO: 506582 - DNA, 75 bp, synthetic construct
  source 1..75: mol_type = other DNA
gagctggagaaaaaccacgaatctgtggtttttactgagcgcggtgtacacggtggaacatatggcgggaagttt

SEQ ID NO: 506583 - DNA, 75 bp, synthetic construct
  source 1..75: mol_type = other DNA
cgtaccactacctgcgaaacaagcagaccaaagagttcttagccgagctggagaaaaaccacgaatctgtggttt

SEQ ID NO: 506584 - DNA, 75 bp, synthetic construct
  source 1..75: mol_type = other DNA
ctggagcgttaccgcgatgcggacacaacggacaagggcgaccgccgggcggacgcactggatatacagacatcg

SEQ ID NO: 506585 - DNA, 75 bp, synthetic construct
  source 1..75: mol_type = other DNA
ccagacccgcagaggacgacatcaccgataccgatgatggtgatacccgtatttcagcgggtgcattctggccgg

SEQ ID NO: 506586 - DNA, 75 bp, synthetic construct
  source 1..75: mol_type = other DNA
ctttttgtgcacttttaatgttttttttggggctaactatttatcgggtatttgaaaaaaggatatttacattat

SEQ ID NO: 506587 - DNA, 75 bp, synthetic construct
  source 1..75: mol_type = other DNA
ggatatattatgcacagaaccatgcctgacatatcttatcctgcatgtttattaaacggcgtcataccatatttt

SEQ ID NO: 506588 - DNA, 75 bp, synthetic construct
  source 1..75: mol_type = other DNA
ttataagcacgttaatattattgtttttaggattggcgctatattcatctcgtgaagaatacatgttaacatcat

SEQ ID NO: 506589 - DNA, 75 bp, synthetic construct
  source 1..75: mol_type = other DNA
gcagacgttgcatcaagttgagccattgcgggaagttgaacctggcagaaagcgcctggtatttgatgagaatct

SEQ ID NO: 506590 - DNA, 75 bp, synthetic construct
  source 1..75: mol_type = other DNA
tcggcagcccggcgaaagcgattcgtgaactcagtgagcaggagttggcatggaaaaagcagggtacgcatgagt

SEQ ID NO: 506591 - DNA, 75 bp, synthetic construct
  source 1..75: mol_type = other DNA
accaggtgctggtgacacgctgtaagcagacgttacatcaagtcgagccattgcgggaaattgaacctggcagga

SEQ ID NO: 506592 - DNA, 75 bp, synthetic construct
  source 1..75: mol_type = other DNA
ctgacgttgcccggaagaatgccgcctgcggtgggtgatcgtttcacctggtcagaacgtaatgccctgctgttt

SEQ ID NO: 506593 - DNA, 75 bp, synthetic construct
  source 1..75: mol_type = other DNA
tttggggtagatttgggggtgagtcggattatttatgttccagagacttctggtgagaacgttgctgtaaaaaat

SEQ ID NO: 506594 - DNA, 75 bp, synthetic construct
  source 1..75: mol_type = other DNA
attctggccggatattgtgctgcgtgagctgcgtctggcggtacgactgccgggccgtgtgaccacctcccgcct

SEQ ID NO: 506595 - DNA, 75 bp, synthetic construct
  source 1..75: mol_type = other DNA
aatttaaaatatataatatattgctgttgtttagcgcatggattttactggctttattttcatgtggaattgggt

SEQ ID NO: 506596 - DNA, 75 bp, synthetic construct
  source 1..75: mol_type = other DNA
actgcttattacgttgagatcaaagataataataagttagatctccgatacttgttttatattctgagcggaatt

SEQ ID NO: 506597 - DNA, 75 bp, synthetic construct
  source 1..75: mol_type = other DNA
atgcgacgtacattccgcaagaaaaagcaaaacgtattttcgaagttgatgatgttatgattgctcgttatgggc

SEQ ID NO: 506598 - DNA, 75 bp, synthetic construct
  source 1..75: mol_type = other DNA
tggaattggatggttttcaatgcataattaagggaactcaggaggcacctatgattgtgagtttgaatgaccgtt

SEQ ID NO: 506599 - DNA, 75 bp, synthetic construct
  source 1..75: mol_type = other DNA
catattgcgcaatgcgcaggggcaattcagtctgtggctgcaacaatgcgtcttaccggcaggctgggacattgt

SEQ ID NO: 506600 - DNA, 75 bp, synthetic construct
  source 1..75: mol_type = other DNA
cccgccgtgtatgtgttgatcgacgctatcgacaccacgcaccgcgcccacgaactgccgtgtaatgcggatttc

SEQ ID NO: 506601 - DNA, 75 bp, synthetic construct
  source 1..75: mol_type = other DNA
ggtggccgcaccggagcggtcagcaagagggcatgttacttgaacagctcaaagctggtgaagttagcgccgaag

SEQ ID NO: 506602 - DNA, 75 bp, synthetic construct
  source 1..75: mol_type = other DNA
ttccggttgagggagttcgcttcaacagccagcaaaattataacgggcgcatgttccagtctctttatgccctgg

SEQ ID NO: 506603 - DNA, 75 bp, synthetic construct
  source 1..75: mol_type = other DNA
atgtccgctatctgaaagaaaataacattcgctatcgcacactgtcagcgacagaaatcccgcgctttattgacg

SEQ ID NO: 506604 - DNA, 75 bp, synthetic construct
  source 1..75: mol_type = other DNA
gatcacgctggcctttcgtgccactataaacaatcagcgtatatatgaaaccctgggtcagttccctcagctctg

SEQ ID NO: 506605 - DNA, 75 bp, synthetic construct
  source 1..75: mol_type = other DNA
ctgcaaccgggatgggattgtccgcaagcgccagaaatacctgccaaagaaattatctggaaaagtgaacggttg

SEQ ID NO: 506606 - DNA, 75 bp, synthetic construct
  source 1..75: mol_type = other DNA
gctgctgccgctggtgggcgataaagcgaagttgcagcattacgccgcgacgacgccgattgtcgacatggtgcg

SEQ ID NO: 506607 - DNA, 75 bp, synthetic construct
  source 1..75: mol_type = other DNA
gcccaggcaccggtatcgcgccgttccgcgcctttatgcagcaacgcgccgccgacgaagcgccgggtaaaaact

SEQ ID NO: 506608 - DNA, 75 bp, synthetic construct
  source 1..75: mol_type = other DNA
ctcgacgataaagcgcgtatgggtctacatcactggtgtgaccgatcaccatcagaacagccagccccagtcgat

SEQ ID NO: 506609 - DNA, 75 bp, synthetic construct
  source 1..75: mol_type = other DNA
aaacgccagaaacgcctgctaaagaaattacctggaaaagtgaacgtctgggaaattcacgccgtgtatggattt

SEQ ID NO: 506610 - DNA, 75 bp, synthetic construct
  source 1..75: mol_type = other DNA
gatccgctgaatccacaaagctggaaaggcgggcgagggcacgctgtttctgcactcgaaatgccgcaagcgcct

SEQ ID NO: 506611 - DNA, 75 bp, synthetic construct
  source 1..75: mol_type = other DNA
catttccatgttttaccttcttcactgcctgcctggaaatatatctacaaaaagctgtgtaatacgcaatgcggc

SEQ ID NO: 506612 - DNA, 75 bp, synthetic construct
  source 1..75: mol_type = other DNA
cagcctgtacgcttttggtattggtttgattttcccgtcgctataccgctttacgctgttttcgaacaacctgcc

SEQ ID NO: 506613 - DNA, 75 bp, synthetic construct
  source 1..75: mol_type = other DNA
ttaaaaaggagcacagcgatgagatcagtaaccacagcgtgaaccccgtcttttctgaggtagtcagcgctttta

SEQ ID NO: 506614 - DNA, 75 bp, synthetic construct
  source 1..75: mol_type = other DNA
atattggtgttggaactgggttttaccttactcacgtacctgagagtagtctgatatctttaatggatttgaacg

SEQ ID NO: 506615 - DNA, 75 bp, synthetic construct
  source 1..75: mol_type = other DNA
aattcatgctgggtttgattgggacagcaacaccatcctgatctacccggaagagcagctcacccggttgacgcc

SEQ ID NO: 506616 - DNA, 75 bp, synthetic construct
  source 1..75: mol_type = other DNA
ggctgtggtcggtgctgggcaccagtttgtatgctttcgggattggtttaatcttcccgaccttattccgcttta

SEQ ID NO: 506617 - DNA, 75 bp, synthetic construct
  source 1..75: mol_type = other DNA
gtcgttttcaccctggccggattgcttaatcgcgtgcgccaacatcaggctgccgagctggcggaggagcggtga

SEQ ID NO: 506618 - DNA, 75 bp, synthetic construct
  source 1..75: mol_type = other DNA
ggtcaggaacactacgacactgcgcgtggcgttcagtccatcctgcaacgttatcaggaactgaaagacattatc

SEQ ID NO: 506619 - DNA, 75 bp, synthetic construct
  source 1..75: mol_type = other DNA
accatggctgagaaattccgtgatgaaggtcgtgacgttctgctgttcgttgacaacatctatcgttacaccctg

SEQ ID NO: 506620 - DNA, 75 bp, synthetic construct
  source 1..75: mol_type = other DNA
tctggaaaccgccgccagcggtcagccgaccgaaggtgtgccgggcgaagatgggcttggcaccttgcaggacaa

SEQ ID NO: 506621 - DNA, 75 bp, synthetic construct
  source 1..75: mol_type = other DNA
ctgttcaaggccattctatggctgtatatgatgcatatggcactcagcagttctatttccctaatgtgctgaagt

SEQ ID NO: 506622 - DNA, 75 bp, synthetic construct
  source 1..75: mol_type = other DNA
tctgtatgctttcgggattggtttgatcttcccgaccttattccgctttacgctttttccaataacttaccgaaa

SEQ ID NO: 506623 - DNA, 75 bp, synthetic construct
  source 1..75: mol_type = other DNA
ctggtcggcctcgcgctgttgattatcggcaatctgctgtcaccgcacgtctggctgtggtcggtgctgggcacc

SEQ ID NO: 506624 - DNA, 75 bp, synthetic construct
  source 1..75: mol_type = other DNA
cacctggcggttttggcgtgcgttgggagtctcatatctacgctggctacaccgtgccgccgtactatgactcaa

SEQ ID NO: 506625 - DNA, 75 bp, synthetic construct
  source 1..75: mol_type = other DNA
cgtttgattttcaggccaatacggtagttcagacttccgcgactattcagcgttccggccagggcgtctgggttc

SEQ ID NO: 506626 - DNA, 75 bp, synthetic construct
  source 1..75: mol_type = other DNA
catttgctaaagtggaaaaaaagaatcctggtgtggcagcagcaatgcagctttcttatgttctgggtttaagaa

SEQ ID NO: 506627 - DNA, 75 bp, synthetic construct
  source 1..75: mol_type = other DNA
ccccagcacacaccaaaggcaagaaaaaccgcaaagccaacctgatcggcacgtatagctacgactttaaaaccg

SEQ ID NO: 506628 - DNA, 75 bp, synthetic construct
  source 1..75: mol_type = other DNA
cctgaaatgggcggctgattatcaggaagacagaatcaccattttctacgacaccatgtcgaataacacccgcat

SEQ ID NO: 506629 - DNA, 75 bp, synthetic construct
  source 1..75: mol_type = other DNA
gacatttgactgaacatattgttcatgaaagtgaagaacagaaacgagaagaagacctggacgttgtgctgaagg

SEQ ID NO: 506630 - DNA, 75 bp, synthetic construct
  source 1..75: mol_type = other DNA
ggtttattgcgtgaagtgattaaaggacatttgactgaacatattgttcatgaaagtgaagaacagaaacgagaa

SEQ ID NO: 506631 - DNA, 75 bp, synthetic construct
  source 1..75: mol_type = other DNA
tggggtgttattcagcaatcctccaggggcgttactgccatttggtgagcataaaggatttggcctggcactgat

SEQ ID NO: 506632 - DNA, 75 bp, synthetic construct
  source 1..75: mol_type = other DNA
ttcttaaaaagagaaaaccgtacgagcattctttgatagtggctcattacctgtatggcatatcgaaaagaaaac

SEQ ID NO: 506633 - DNA, 75 bp, synthetic construct
  source 1..75: mol_type = other DNA
atgcgtgatattcaaatggttcttgaacgttggggggcatgggtggcaaataatcacgaggatgtggaatggtca

SEQ ID NO: 506634 - DNA, 75 bp, synthetic construct
  source 1..75: mol_type = other DNA
cagtgatttgggccaagtcggtgctcaaccttctgcacaaactgccggttctggctgctgctttttggattctgg

SEQ ID NO: 506635 - DNA, 75 bp, synthetic construct
  source 1..75: mol_type = other DNA
gatgaaggacgtcatttggcctgcggctgaaaaagaagcctacgacaaaatgggtgatgctgccaacttactgat

SEQ ID NO: 506636 - DNA, 75 bp, synthetic construct
  source 1..75: mol_type = other DNA
ccggattacagccttttcagtctgccgttcttattccgcgaccgtgatcactattatcgtgttctgcaaagtgat

SEQ ID NO: 506637 - DNA, 75 bp, synthetic construct
  source 1..75: mol_type = other DNA
ctgccgcagagcacggtgaatacggtggttaaagaagaaacctctgccaccacgacggctgacctcggcccacgg

SEQ ID NO: 506638 - DNA, 75 bp, synthetic construct
  source 1..75: mol_type = other DNA
cgaggtgggagagaaactggtcgggtatgcctgggtaatggaatatacggaacgtaaagggcttcacattcattt

SEQ ID NO: 506639 - DNA, 75 bp, synthetic construct
  source 1..75: mol_type = other DNA
ttaccgaaaaaacacattcagctacagatgtgcctgcaggtacgccatgtgcgcagagatgctgcgactgattaa

SEQ ID NO: 506640 - DNA, 75 bp, synthetic construct
  source 1..75: mol_type = other DNA
cgggcaactcacctggctatcaggaactgcaaccggtctgacaccccggcaggcattactgctggttctgtcgtc

SEQ ID NO: 506641 - DNA, 75 bp, synthetic construct
  source 1..75: mol_type = other DNA
ttattgaggagggattacgggttcaccagccgacgctttctgccgcacaacgcgaagaacaagtgaaagcggtga

SEQ ID NO: 506642 - DNA, 75 bp, synthetic construct
  source 1..75: mol_type = other DNA
aaaatttgtcggtgggttttcgccatcagcaaaccgtacgtacagtagtcaatgatgtttcactacagattgagg

SEQ ID NO: 506643 - DNA, 75 bp, synthetic construct
  source 1..75: mol_type = other DNA
gggcttcctgaaaaaagtaatcggggtcgaccgcgactggacagaaagttccttgccggggatatgttctctggt

SEQ ID NO: 506644 - DNA, 75 bp, synthetic construct
  source 1..75: mol_type = other DNA
cgaggatattgcgctaacggtagggaagctgcgtgttgagctggaagctgcagagaagcgcattgcagaactgga

SEQ ID NO: 506645 - DNA, 75 bp, synthetic construct
  source 1..75: mol_type = other DNA
cgacggcgttagtcgctttgatgtttccgctatccgtaagtggcttgcagaccgcaaaggcacaaccagcacacg

SEQ ID NO: 506646 - DNA, 75 bp, synthetic construct
  source 1..75: mol_type = other DNA
aagatattcagggagaaagaccttttattttagatttaacatcgaatgagaaatatatcaacgatcaaattcgac

SEQ ID NO: 506647 - DNA, 75 bp, synthetic construct
  source 1..75: mol_type = other DNA
acattaacaccgggcatgatcaccactggattcaatatgaccctactgcctttaattcagaaaacaggcaatctc

SEQ ID NO: 506648 - DNA, 75 bp, synthetic construct
  source 1..75: mol_type = other DNA
cggacatttcagtatttatgagcgcattcttcataagctggaaggcaacgggcaactcgcgcgcgccgcgaagat

SEQ ID NO: 506649 - DNA, 75 bp, synthetic construct
  source 1..75: mol_type = other DNA
gcaactatccggtaactccggatggttggataagctgtagtgagcgaatgcccgctcaagatgattggattttaa

SEQ ID NO: 506650 - DNA, 75 bp, synthetic construct
  source 1..75: mol_type = other DNA
agattcgataatatctattgtgatcagttagcgtgtttatttacacaagaaacagggttacataccgtgttatag

SEQ ID NO: 506651 - DNA, 75 bp, synthetic construct
  source 1..75: mol_type = other DNA
tctgaatgttgaaggcgctgtcaaagaagccgctattgccgctctggctgcaaaaggtttccagatggctggctt

SEQ ID NO: 506652 - DNA, 75 bp, synthetic construct
  source 1..75: mol_type = other DNA
gttaacgtgctgcgtagcaatgccggactggtttgcatcaagtctgatgctctgaatgttgaaggcgctgttaaa

SEQ ID NO: 506653 - DNA, 75 bp, synthetic construct
  source 1..75: mol_type = other DNA
tgcgtaccactggcgagaaatatcgcttcattgaagcccggaacgtgtcggagcacccggaaaacacgtttgtta

SEQ ID NO: 506654 - DNA, 75 bp, synthetic construct
  source 1..75: mol_type = other DNA
catctgaaatccctgaaggaatggaaatatctgttaacgagaagggagaacccattctgattgagattaaaccgt

SEQ ID NO: 506655 - DNA, 75 bp, synthetic construct
  source 1..75: mol_type = other DNA
tgactgaagtaatccccggtcttcatgacgtgaccggggctgtggaattaccagaagataactggttttttactg

SEQ ID NO: 506656 - DNA, 75 bp, synthetic construct
  source 1..75: mol_type = other DNA
cgacaatctcaacgcagctaaccacgcagcagcgatcagcgcattacaggcgcaaggcttcgccactcgtgaatt

SEQ ID NO: 506657 - DNA, 75 bp, synthetic construct
  source 1..75: mol_type = other DNA
gattttggcgctggccgaagaccaacagaaagcgattgagtcaattaagcaggctgattcggctgttaagttggc

SEQ ID NO: 506658 - DNA, 75 bp, synthetic construct
  source 1..75: mol_type = other DNA
aaataatttttatttatttgataatcgtgttgaaattgattttaatgggttttctttttttattgaaataattga

SEQ ID NO: 506659 - DNA, 75 bp, synthetic construct
  source 1..75: mol_type = other DNA
atgaatcttttaattaaaagaaacgtagaagagtttttaagattattaggaaatgatttttatttgtttgataat

SEQ ID NO: 506660 - DNA, 75 bp, synthetic construct
  source 1..75: mol_type = other DNA
gtgtcgagctgaacccgaatgcgcatctgcatattccgttatggtacacgggtgatgatgacattctcgaccata

SEQ ID NO: 506661 - DNA, 75 bp, synthetic construct
  source 1..75: mol_type = other DNA
gcgcttattacagcgatgaatcattttcgtgcagtagtgagcttatttcccaaacggctaaccatgccgaattaa

SEQ ID NO: 506662 - DNA, 75 bp, synthetic construct
  source 1..75: mol_type = other DNA
tgaagttgggccaaacaagaacgttccggggctgattagaggcgcagagatatgcgtaagtattgctgaacagct

SEQ ID NO: 506663 - DNA, 75 bp, synthetic construct
  source 1..75: mol_type = other DNA
ttcttacagattttctcactctatatcctgccggtaatttgtattgctgcggggtatgtgttcttttctttgctt

SEQ ID NO: 506664 - DNA, 75 bp, synthetic construct
  source 1..75: mol_type = other DNA
gaaacaaaattctccgagctattggaaaaagatgcggcgaatccgtatggcaagaccataagagctttttgccag

SEQ ID NO: 506665 - DNA, 75 bp, synthetic construct
  source 1..75: mol_type = other DNA
gtacagggttaggggcagcgagtcgaatggggggtagagctgcgcggtatttaatgaaaagaaggggaaaccgaa

SEQ ID NO: 506666 - DNA, 75 bp, synthetic construct
  source 1..75: mol_type = other DNA
gcatggacggggtgggggaggttttcaggacaaacctcaaggtgccaggcaccgcccgccccctcaaatttttac

SEQ ID NO: 506667 - DNA, 75 bp, synthetic construct
  source 1..75: mol_type = other DNA
tttccgtttgccgtcaaattttgcaatgaaaggcatcaacttagtaaaaattaaactggattttactgatacgta

SEQ ID NO: 506668 - DNA, 75 bp, synthetic construct
  source 1..75: mol_type = other DNA
atgatcaaagtcatgggcggtaacccgacgccactggattacggcgagttgtatacagccttacagcagggtgtg

SEQ ID NO: 506669 - DNA, 75 bp, synthetic construct
  source 1..75: mol_type = other DNA
cctgggcctggacgcaatgtggcagctggtagggttctacctcggctggctgggcggcgaaggtaaaggtcgcgc

SEQ ID NO: 506670 - DNA, 75 bp, synthetic construct
  source 1..75: mol_type = other DNA
aacagattgcgtttgcgctgaaacaggccgaaaccggcacccgcgtcggggaagtctgcagaaagatgggtattt

SEQ ID NO: 506671 - DNA, 75 bp, synthetic construct
  source 1..75: mol_type = other DNA
gatgccgtgggtacacggtcccggtttaccggtcatggatgtgacgaacatgccggctgaaccgctggttttcca

SEQ ID NO: 506672 - DNA, 75 bp, synthetic construct
  source 1..75: mol_type = other DNA
cccccttacccgcctggtttacaccaatcgcaataccggcaggacggacagtgtctcccttcagtcggtggctaa

SEQ ID NO: 506673 - DNA, 75 bp, synthetic construct
  source 1..75: mol_type = other DNA
agccttcttttgatgttcttgatgattgggatgcgcctttaccctgggagacggaagaaacacctgtttcatcaa

SEQ ID NO: 506674 - DNA, 75 bp, synthetic construct
  source 1..75: mol_type = other DNA
aacactatgacacgtttgataatgtatcaaagatttattctgataaattccctcaaggaaaagatttagatttat

SEQ ID NO: 506675 - DNA, 75 bp, synthetic construct
  source 1..75: mol_type = other DNA
aggatcaccgcagataacgaacgatcagcgcggcgcagacttgccccggactatgtactgagctttgccgggcgc

SEQ ID NO: 506676 - DNA, 75 bp, synthetic construct
  source 1..75: mol_type = other DNA
ccatttataattttcattttagcagcttcatgctttaaatttataaataattgtaaagatcatattagtgtaaga

SEQ ID NO: 506677 - DNA, 75 bp, synthetic construct
  source 1..75: mol_type = other DNA
agctgatttaccgtccggcatccattaaggacggtcgtaaggatgcggagaagcagctgaaactggagcagcgtg

SEQ ID NO: 506678 - DNA, 75 bp, synthetic construct
  source 1..75: mol_type = other DNA
actggcacatttgctggtatggaaacatttcggccgcgtagcgccacatggcaaagagtggaagtggatgatgga

SEQ ID NO: 506679 - DNA, 75 bp, synthetic construct
  source 1..75: mol_type = other DNA
atgccctggacattccgtttggcgagaaggcttctgaccgcgattacaaagaaaatctggtcaataatttactca

SEQ ID NO: 506680 - DNA, 75 bp, synthetic construct
  source 1..75: mol_type = other DNA
caacagaaaatattacccagaccatccggcgccttgaccggtacgaacgggactacttcattgtgtttgcgcacg

SEQ ID NO: 506681 - DNA, 75 bp, synthetic construct
  source 1..75: mol_type = other DNA
ttgtcggcggaggcgtggatgcccctcttgtacaacagcacattatttcggtaatggaaggaggtgtcaacgacg

SEQ ID NO: 506682 - DNA, 75 bp, synthetic construct
  source 1..75: mol_type = other DNA
aaatgatactgaaggcaatatgctggctattgccatgaatacccgtgtaaaactgatttatcggccattatccat

SEQ ID NO: 506683 - DNA, 75 bp, synthetic construct
  source 1..75: mol_type = other DNA
cgtttggcggcgtataaagatgttgatatgttgtgttttgatcacggtaacaataaggacatggaggcgttaatg

SEQ ID NO: 506684 - DNA, 75 bp, synthetic construct
  source 1..75: mol_type = other DNA
gtggctgccggtggaattactactggcgctcggcatcgtgccttatggcgtggcagacaccatcaactatcgact

SEQ ID NO: 506685 - DNA, 75 bp, synthetic construct
  source 1..75: mol_type = other DNA
ggccgcgtagcgccacatggcaaagagtggaagtggatgatggaaagcgtgctgggcgctgagagatcccctcat

SEQ ID NO: 506686 - DNA, 75 bp, synthetic construct
  source 1..75: mol_type = other DNA
agtggaagtggatgatggaaagtgtgctgggcgttccagcccgccgtacgcatcagttcgaactgcaatccgtgc

SEQ ID NO: 506687 - DNA, 75 bp, synthetic construct
  source 1..75: mol_type = other DNA
agtggaagtggatgatggaaagcgtgctgggcgttcccgcccgtcgtacgcatcagttcgaactgcaatccgtgc

SEQ ID NO: 506688 - DNA, 75 bp, synthetic construct
  source 1..75: mol_type = other DNA
gaacttaatacgaagcagcaggcctttctggagaaaaaacaggctctgacggaggaatttgccgaaatagagcgt

SEQ ID NO: 506689 - DNA, 75 bp, synthetic construct
  source 1..75: mol_type = other DNA
atgggtaatcagccatctgaaaataatgctgcgcggcgacacgaggtgatgtatcgcctctggaatagttactgg

SEQ ID NO: 506690 - DNA, 75 bp, synthetic construct
  source 1..75: mol_type = other DNA
gtttgtactgatgctatagctcttctctctgggacggttgaaagtggatataaagttgttgcaccaatttattca

SEQ ID NO: 506691 - DNA, 75 bp, synthetic construct
  source 1..75: mol_type = other DNA
atggttttattggtcgtaatttatgtttgaggcttgaggaacatggttataaagatcttattagaattgatcgag

SEQ ID NO: 506692 - DNA, 75 bp, synthetic construct
  source 1..75: mol_type = other DNA
catgacccagcgcgtggacggccagtggcgcgcgctcaaaaacgacgagctgatgcgtaacaaaatgcacctggg

SEQ ID NO: 506693 - DNA, 75 bp, synthetic construct
  source 1..75: mol_type = other DNA
ccaaatcggcagcggattttctaaaagagcagggcgtacacgtcaccagtcttgccccctacggtagccaggtta

SEQ ID NO: 506694 - DNA, 75 bp, synthetic construct
  source 1..75: mol_type = other DNA
aaacgccacggcattcgtctgggctttatgtccttctacgtgaaagcggtggttgaagccctgaaacgttacccg

SEQ ID NO: 506695 - DNA, 75 bp, synthetic construct
  source 1..75: mol_type = other DNA
gcagatattgcacgtgcctggcttttgggctgaattatcctggcatttacgccaacgtactacctcaaagacgaa

SEQ ID NO: 506696 - DNA, 75 bp, synthetic construct
  source 1..75: mol_type = other DNA
tcttgtacaacagcacattatttcagtgatggagggaggacgggaggcattcgagcgacgcagggaagtttacgg

SEQ ID NO: 506697 - DNA, 75 bp, synthetic construct
  source 1..75: mol_type = other DNA
ctgccggtggaggcgtggatgcccctcttgtacaacagcacattatttcagtgatggagggaggacgggaggcat

SEQ ID NO: 506698 - DNA, 75 bp, synthetic construct
  source 1..75: mol_type = other DNA
ccaaacattaatcaccgaagatgtaggtaatggatttacacgtgcattgtactcaacatggttaagttacctgtc

SEQ ID NO: 506699 - DNA, 75 bp, synthetic construct
  source 1..75: mol_type = other DNA
ttttgttctgacatattaaagctattagaaggagcgaacgaaactggttacaggacatttggtccaatttattct

SEQ ID NO: 506700 - DNA, 75 bp, synthetic construct
  source 1..75: mol_type = other DNA
gtcgggatgccaaaaaagtacagcgccagatattacacatgccaaatttttggaccggtttgtcagaatatttac

SEQ ID NO: 506701 - DNA, 75 bp, synthetic construct
  source 1..75: mol_type = other DNA
gcagaaacgcatttagcgcactatgaagactttatccgcagcatgaaaccccgctttgtgaagcgtggtgcgcgc

SEQ ID NO: 506702 - DNA, 75 bp, synthetic construct
  source 1..75: mol_type = other DNA
gtatgaaggccagattgttggctatggttcaaaggagctgcgcgttgaaaccatatcctgctggctggcccgcac

SEQ ID NO: 506703 - DNA, 75 bp, synthetic construct
  source 1..75: mol_type = other DNA
gtgggaaaagagaaaaaatcacgcattctgacgaaaccgtgcgttattgagtatgaaggccagattgttggctat

SEQ ID NO: 506704 - DNA, 75 bp, synthetic construct
  source 1..75: mol_type = other DNA
cagctacgcgctgaaaaccatcaggttactgtatccgtcagtggagtgggttcagtcctttgcagacgaacgctg

SEQ ID NO: 506705 - DNA, 75 bp, synthetic construct
  source 1..75: mol_type = other DNA
ttaataaccagctggtaacccgtaacaacgaattgctggaacgtcttatcaccgcgctggcctctggcgtacctc

SEQ ID NO: 506706 - DNA, 75 bp, synthetic construct
  source 1..75: mol_type = other DNA
actacgacgcctggcgcgtcagcggcatgtcccggaccgcgtatgcccggcaacacggcatcaacaacaaaactt

SEQ ID NO: 506707 - DNA, 75 bp, synthetic construct
  source 1..75: mol_type = other DNA
ggcagacatcgagaagaaaatcaaagagctggcagttaaaggccgtgacggcaagctgacggttgaagatctgac

SEQ ID NO: 506708 - DNA, 75 bp, synthetic construct
  source 1..75: mol_type = other DNA
atttcaggatccaaactcctcgctcaacccacgactcaacgttttgcaaattattgaggaaggcttacgggttca

SEQ ID NO: 506709 - DNA, 75 bp, synthetic construct
  source 1..75: mol_type = other DNA
gcgaaccgtcaggcgatccagtgccgttgccacaaccagcctcaacgttgcttgatgttgaacagcttcaggtcg

SEQ ID NO: 506710 - DNA, 75 bp, synthetic construct
  source 1..75: mol_type = other DNA
ggttgattcactctcagggcagcatcatctttgacggtcagccattgcagaatttaaaccgccgccagctattac

SEQ ID NO: 506711 - DNA, 75 bp, synthetic construct
  source 1..75: mol_type = other DNA
taacgaacttctctcccgcgtgctggaatacgagacgcgcttctctgaactctttttcgattacttgcactgcat

SEQ ID NO: 506712 - DNA, 75 bp, synthetic construct
  source 1..75: mol_type = other DNA
atggaaggctggcagcgcgcattcgtactgcatagtcgtccctggagcgaaaccagcctgatgctggacgtcttc

SEQ ID NO: 506713 - DNA, 75 bp, synthetic construct
  source 1..75: mol_type = other DNA
tggcggtaaacctttaaaaagcagggaactgttccggcagtttatgcctaagcgaacagtgaaaacacataatga

SEQ ID NO: 506714 - DNA, 75 bp, synthetic construct
  source 1..75: mol_type = other DNA
ctcctaccgcatttgcgatgcatctacatgagtatatcagtcagggccttgagtccattcttggcgcgctggata

SEQ ID NO: 506715 - DNA, 75 bp, synthetic construct
  source 1..75: mol_type = other DNA
aaaccgccctggcggccctgctggccaccaccctggcgggggaggcgatggccgccttcaccctgaacgggaccc

SEQ ID NO: 506716 - DNA, 75 bp, synthetic construct
  source 1..75: mol_type = other DNA
tattgatgattttattcttctttagtacatatagttacgcagcgtttgtattaaatggaacacgatttatttatg

SEQ ID NO: 506717 - DNA, 75 bp, synthetic construct
  source 1..75: mol_type = other DNA
ttttgccgatttaaacgcgcaggttgagcaactcagcaagcgttgttcaaaggcttttggctcacatggccgtta

SEQ ID NO: 506718 - DNA, 75 bp, synthetic construct
  source 1..75: mol_type = other DNA
gcgcgtacccgccgtctggttctatggtgcgacgctctcggcaatgcattttgtacgtattctggataacgccat

SEQ ID NO: 506719 - DNA, 75 bp, synthetic construct
  source 1..75: mol_type = other DNA
gcgacgccgctgtggcaggcaatgccgtttgtccgtgccggacgctttcagcgcgtacccgccgtctggttctat

SEQ ID NO: 506720 - DNA, 75 bp, synthetic construct
  source 1..75: mol_type = other DNA
agtagtgtatctctgggggttagtgcccgtgggagccttaaaattgccgcgataaatgactgggggggcgtgcag

SEQ ID NO: 506721 - DNA, 75 bp, synthetic construct
  source 1..75: mol_type = other DNA
gcggtgtacctgaatttttggtctgcgggatgcggggggtgcctagcggaaatggacacgctggaagcgctgagc

SEQ ID NO: 506722 - DNA, 75 bp, synthetic construct
  source 1..75: mol_type = other DNA
aaaaacacatcagacagggttttgaagaatgtacaaatgagcattaacgtctatcagaacggacgtgttgttgac

SEQ ID NO: 506723 - DNA, 75 bp, synthetic construct
  source 1..75: mol_type = other DNA
ctcgtttccggcctgatgcatcacgatattctgaccggaagcgcaaagtcttttgctgatttaaacgggcaggtt

SEQ ID NO: 506724 - DNA, 75 bp, synthetic construct
  source 1..75: mol_type = other DNA
cttaaagttacaaactaagccagccttaagaattaaaaacaaacgtcaagttatcacctcacacaaaccaaaaac

SEQ ID NO: 506725 - DNA, 75 bp, synthetic construct
  source 1..75: mol_type = other DNA
acgccgacctccgtactgattgactccgaaggacgcgttctggagctacaccagggtatgcgtaagccgcctgag

SEQ ID NO: 506726 - DNA, 75 bp, synthetic construct
  source 1..75: mol_type = other DNA
tgaggagcgcgggcagggcgtggtgcataaacctattccaggttggcagagtactcttgagcaacgtggatttgt

SEQ ID NO: 506727 - DNA, 75 bp, synthetic construct
  source 1..75: mol_type = other DNA
tgcgtgcaaaatcagacagttccgcaaaccgccggtgaacaggcggtgctggcgcagcgcatcgttgacaagatc

SEQ ID NO: 506728 - DNA, 75 bp, synthetic construct
  source 1..75: mol_type = other DNA
agttgggccaaacaagaacgttccggggctgattagaggcgcagagatatgcgtaagtattgctgaacagcttcg

SEQ ID NO: 506729 - DNA, 75 bp, synthetic construct
  source 1..75: mol_type = other DNA
cccatgatgatatggaaatcgacgtcgcgctggcagcacgcccttcttatatcgcgctgggacatgtgttcccga

SEQ ID NO: 506730 - DNA, 75 bp, synthetic construct
  source 1..75: mol_type = other DNA
cgttctgctggaatcacgattgataaccttgaggccaagtgcgcggcgctggcggcggagaatgcggggctgaaa

SEQ ID NO: 506731 - DNA, 75 bp, synthetic construct
  source 1..75: mol_type = other DNA
tctggcggcaaagcctcccttgacggtggttcgctgttgactaacgagtctggcgaaatgttgtttgccgagcac

SEQ ID NO: 506732 - DNA, 75 bp, synthetic construct
  source 1..75: mol_type = other DNA
atcgaaacccaagccaccgacgctttcctggctgaagtacgggcgcagggggtggatgctgttatagaagctgca

SEQ ID NO: 506733 - DNA, 75 bp, synthetic construct
  source 1..75: mol_type = other DNA
attctctcgttcatccaccagcaggatattgcatcactggtgtccggcctgttctcccgtctgcggggtggagga

SEQ ID NO: 506734 - DNA, 75 bp, synthetic construct
  source 1..75: mol_type = other DNA
gcacggctgcggcgctcggtggggcgacggtgtacgggctgtttaccggaacggatttcgggattgtgtttggtg

SEQ ID NO: 506735 - DNA, 75 bp, synthetic construct
  source 1..75: mol_type = other DNA
gtaaatttgctgaagcggaggccaagatttcggctctgtccgaagaccagcagaaagcgattgagtcaattaagc

SEQ ID NO: 506736 - DNA, 75 bp, synthetic construct
  source 1..75: mol_type = other DNA
cgatttcaaacgcctttctccttactatgattttatctctgtagggcgtacccgtattgctgaccgcttgtgtga

SEQ ID NO: 506737 - DNA, 75 bp, synthetic construct
  source 1..75: mol_type = other DNA
attctctcgtttatccatcagcaggatatcggttcgttgatatcgggcctgttttcccggctgcgtgggggaggt

SEQ ID NO: 506738 - DNA, 75 bp, synthetic construct
  source 1..75: mol_type = other DNA
cacatgacgatatggaaatcgacgtcgcgctggcagcacgcccctcttatatcgcgctgggacatgtgttcccga

SEQ ID NO: 506739 - DNA, 75 bp, synthetic construct
  source 1..75: mol_type = other DNA
ttgatggcgagcaggatgagctatctgatgcgtatatctgcgcaatagacggaaagatgccgcaaaccccagcca

SEQ ID NO: 506740 - DNA, 75 bp, synthetic construct
  source 1..75: mol_type = other DNA
tgacccgtgcggaagcgaaagctgctttcagcaacgatatggtttacatggagaaatacctggaaaatcctcgcc

SEQ ID NO: 506741 - DNA, 75 bp, synthetic construct
  source 1..75: mol_type = other DNA
gttgcgctaaagcatgtgttgatatcggctatcgcggtgcaggtactttcgagttcctgttcgaaaacggcgagt

SEQ ID NO: 506742 - DNA, 75 bp, synthetic construct
  source 1..75: mol_type = other DNA
tccttacgctctggcagctccgttgccgatgattaccgccaatacgctggcgggcggcattaccggcgtgctggt

SEQ ID NO: 506743 - DNA, 75 bp, synthetic construct
  source 1..75: mol_type = other DNA
ttattaatgatgccctgcaccacagcgaaacgccagccaccgatgcttttctagctgaagtgaagactgaagcac

SEQ ID NO: 506744 - DNA, 75 bp, synthetic construct
  source 1..75: mol_type = other DNA
cgttctgctggaatcacgattgataaccttgaggccaagtgcgcggcgctggcggcggagaatgcgggaataaag

SEQ ID NO: 506745 - DNA, 75 bp, synthetic construct
  source 1..75: mol_type = other DNA
cagcctgccgcgcgcacctgcggtgatggcgacaggtgttggcagtatcgccgtcgtcagtgccattacccaggc

SEQ ID NO: 506746 - DNA, 75 bp, synthetic construct
  source 1..75: mol_type = other DNA
atttggggcaggaagatttgcaatccaccgatctcgacgctatccgcgcggcaggcctgcggctgggcgtttcga

SEQ ID NO: 506747 - DNA, 75 bp, synthetic construct
  source 1..75: mol_type = other DNA
atgtatcagcctgagtttcctcctgtaccgtttcgtttaggactgtacccggtggttgacagcgtacagtggatc

SEQ ID NO: 506748 - DNA, 75 bp, synthetic construct
  source 1..75: mol_type = other DNA
gtgatgacgtcgaaacccgtatgatgagcaactatacgctgaagcgtgaactcgccgagtttgccgcgtcactgg

SEQ ID NO: 506749 - DNA, 75 bp, synthetic construct
  source 1..75: mol_type = other DNA
atgtatcagcctgattttcctcacgtaccttttcgtttaggactgtacccggtagtggacagcgtacagtggatc

SEQ ID NO: 506750 - DNA, 75 bp, synthetic construct
  source 1..75: mol_type = other DNA
ccgtcgtcagtgccattacccaggccgcagactggcgtttggcaacggaacagttgctggaaattgcaggagttg

SEQ ID NO: 506751 - DNA, 75 bp, synthetic construct
  source 1..75: mol_type = other DNA
ctggcctgacttgccggattttaacgacatgcttattcagggatgtgaagcccgtgaacatgtgctgacgcgcaa

SEQ ID NO: 506752 - DNA, 75 bp, synthetic construct
  source 1..75: mol_type = other DNA
ggtttcgttgccgggcgtctgacacgtgaactgctgacaagcgttcctgatttagcctctcgtactgtgatgacc

SEQ ID NO: 506753 - DNA, 75 bp, synthetic construct
  source 1..75: mol_type = other DNA
tgtggcccggctccgtatatggattgggtagagcaggaagtgaaagcgctcggcgtgacgcgtttctttaaagag

SEQ ID NO: 506754 - DNA, 75 bp, synthetic construct
  source 1..75: mol_type = other DNA
ggtagcggaaaataacattaccgaggggttcgttgccggacgtctgacccgcgaactgctggaaagtgttcctga

SEQ ID NO: 506755 - DNA, 75 bp, synthetic construct
  source 1..75: mol_type = other DNA
tttccgccgggcatgagatggcttcggaactgaaagcagaatgtggtgcagttgatatgcgtagtgtggcaaagc

SEQ ID NO: 506756 - DNA, 75 bp, synthetic construct
  source 1..75: mol_type = other DNA
cgaggggattaactataccgcaagccgtcttgctgctgcgttcaatcacggatttatcaataagtctttacgtga

SEQ ID NO: 506757 - DNA, 75 bp, synthetic construct
  source 1..75: mol_type = other DNA
caaactgcaaccggcgcaagaattttacgcacctgttggcaccacactgctggaggctttggaaagcaacaaagt

SEQ ID NO: 506758 - DNA, 75 bp, synthetic construct
  source 1..75: mol_type = other DNA
gaatttgtggcacgcttcccgaataagatcatcaatattcaccattcattcctaccagcgtttatcggcgcacgt

SEQ ID NO: 506759 - DNA, 75 bp, synthetic construct
  source 1..75: mol_type = other DNA
agcaggcttaccgtattgttgacttcaaacgcaataaagacggtatcccggcagttgttgaacgtcttgagtacg

SEQ ID NO: 506760 - DNA, 75 bp, synthetic construct
  source 1..75: mol_type = other DNA
aagatggcagatgctattgatgcttatcagcctgattacgtggtgctggcgaaatatatgcgtgtattaacgccg

SEQ ID NO: 506761 - DNA, 75 bp, synthetic construct
  source 1..75: mol_type = other DNA
atgacgatgccaacgaatcaatgcccgtggcggatgcaggttcatcacattacgcaagaaacgccggatgtgtgg

SEQ ID NO: 506762 - DNA, 75 bp, synthetic construct
  source 1..75: mol_type = other DNA
ggcggtcagctggcacgttctgctggtacttacgttcagatcgttgctcgtgatggtgcttatgtcaccctgcgt

SEQ ID NO: 506763 - DNA, 75 bp, synthetic construct
  source 1..75: mol_type = other DNA
gttgagatgatgcgcgaacacccatcaatcaaactttgctctttgacgcacatatgtgacgagttagccgcccag

SEQ ID NO: 506764 - DNA, 75 bp, synthetic construct
  source 1..75: mol_type = other DNA
tgttgaattcatcgaaaagccggatcagccgcagacgctggactcagacatcatggccgttggtcgctatgtgct

SEQ ID NO: 506765 - DNA, 75 bp, synthetic construct
  source 1..75: mol_type = other DNA
gaccaccagagagcgattgagtcaattaagcaggctgatgcagctgttaagttggcacacgagaagttttcgacg

SEQ ID NO: 506766 - DNA, 75 bp, synthetic construct
  source 1..75: mol_type = other DNA
ttctgaaaggtaaatgcattccacgagatttaaaggttaacgaaacaaacgctgaatatctggtgcgtaagttcg

SEQ ID NO: 506767 - DNA, 75 bp, synthetic construct
  source 1..75: mol_type = other DNA
gggctatatgcaggcgtttgtgaagtatggactacgcaacctgaaagaaggggcgaagttccgtaaagggattga

SEQ ID NO: 506768 - DNA, 75 bp, synthetic construct
  source 1..75: mol_type = other DNA
acgatggcgacatcgttacggtgaaagaagcgaaggacgccctgctgcattgtgcggaacagcttcgcaaaggag

SEQ ID NO: 506769 - DNA, 75 bp, synthetic construct
  source 1..75: mol_type = other DNA
gctggacgatggcgactgcgttacggtgaaagaggcgactgacgccctgctgcattgtgcggaacagcttcacaa

SEQ ID NO: 506770 - DNA, 75 bp, synthetic construct
  source 1..75: mol_type = other DNA
cggaaggcgattttgatcgctcattctctgatggcgttctcgaagatatcgccgaacagcttcgtaaaggagtca

SEQ ID NO: 506771 - DNA, 75 bp, synthetic construct
  source 1..75: mol_type = other DNA
gggctatatgcaggcgtttgtgaagtatggactgcgcaacctgaaagaaggggcgactttaagaaattacattac

SEQ ID NO: 506772 - DNA, 75 bp, synthetic construct
  source 1..75: mol_type = other DNA
tgctgaactggcgaaaaaacagtccgttgatgcaatgctgatgactggtgacagctacgactgcggtaaaaaaat

SEQ ID NO: 506773 - DNA, 75 bp, synthetic construct
  source 1..75: mol_type = other DNA
gggttatatgcaggcgtttgtgaagtatgggctgcgtaacctgaaggagggggcgaagttcagaacccgtattga

SEQ ID NO: 506774 - DNA, 75 bp, synthetic construct
  source 1..75: mol_type = other DNA
gggttatatgcaagcgttcgtgaagtatgggctgcgcaacctccaagaaggggcgaagttccgtaaagagattga

SEQ ID NO: 506775 - DNA, 75 bp, synthetic construct
  source 1..75: mol_type = other DNA
aacgtgcgtcagggcgaacctttaggtctgggccactccattttgtgtgcgcgacctgccattggtgacaaccca

SEQ ID NO: 506776 - DNA, 75 bp, synthetic construct
  source 1..75: mol_type = other DNA
tggttatatgcaggcgtttgtgaagtatggactgcgcaatctgaaagaaggggcgaagttccgcaaagggattga

SEQ ID NO: 506777 - DNA, 75 bp, synthetic construct
  source 1..75: mol_type = other DNA
cggaacatgaacgcgcttctgccgttggtttttatacgtctggtcatgcgcctataaggctctcttaccagccgc

SEQ ID NO: 506778 - DNA, 75 bp, synthetic construct
  source 1..75: mol_type = other DNA
gcggaaatgggctatgtattttcggccttcgcctggctttatacgctatgtcagatccccggcggttggttttta

SEQ ID NO: 506779 - DNA, 75 bp, synthetic construct
  source 1..75: mol_type = other DNA
ttacaataaccgcaacgtacagttatatgaataaagaagttgttgaaaaaaacaatatagacttaagccctttca

SEQ ID NO: 506780 - DNA, 75 bp, synthetic construct
  source 1..75: mol_type = other DNA
tcggatgccggatgcggcgtgaacgccttatccggcatccgagatgaagcgattttttggccttacgcgaccttt

SEQ ID NO: 506781 - DNA, 75 bp, synthetic construct
  source 1..75: mol_type = other DNA
tggcaggccgtaacattatggttacggtaaagcctgatggcagtgtgattggagaggaagttcgtcctttcccaa

SEQ ID NO: 506782 - DNA, 75 bp, synthetic construct
  source 1..75: mol_type = other DNA
gaaaggtaatctgctaaaccgctttgtttatgttatttcaggtatttttacgcctctgatcggtctgatggcggc

SEQ ID NO: 506783 - DNA, 75 bp, synthetic construct
  source 1..75: mol_type = other DNA
gttccccgccgtgagatcgcagaaaaactcgaaatgcccctgggcatgattaatcagtacgtttatttcgaaagg

SEQ ID NO: 506784 - DNA, 75 bp, synthetic construct
  source 1..75: mol_type = other DNA
atgaaggtaaaaagcattggcgcgcttatcggacgaactgaagcggcagtgagaacgaaggcacgggcgctgggc

SEQ ID NO: 506785 - DNA, 75 bp, synthetic construct
  source 1..75: mol_type = other DNA
gcaaccggctctggctgcacgtagcgaaaaacgtgttccgatgactcgcctgcgtaagcgtgtggcagagcgtct

SEQ ID NO: 506786 - DNA, 75 bp, synthetic construct
  source 1..75: mol_type = other DNA
cgggcgtggcctgagcggtgatgatcgcgcgcggtttgccgggaagaaagtttatgagattgccatctcccaggc

SEQ ID NO: 506787 - DNA, 75 bp, synthetic construct
  source 1..75: mol_type = other DNA
gtacgccatcgtcggcgttgtcgcgctgatgccgcctgtcgcggcgggtcttgcgacgttcattgcgcccaagct

SEQ ID NO: 506788 - DNA, 75 bp, synthetic construct
  source 1..75: mol_type = other DNA
ccttatccggcatccgagatgaagcgattttttggccttacgcgacctttttgcacgtttttcccggcgtgccaa

SEQ ID NO: 506789 - DNA, 75 bp, synthetic construct
  source 1..75: mol_type = other DNA
ggcgtgggggataaagggtatgttatgggcgactggagttttgctaaaaataacacccggcgcgctggaaattat

SEQ ID NO: 506790 - DNA, 75 bp, synthetic construct
  source 1..75: mol_type = other DNA
cgtgtgcatataaccccagatacgttgacttttttaaatccggatgatgttatcaggcaaagttattttgctgga

SEQ ID NO: 506791 - DNA, 75 bp, synthetic construct
  source 1..75: mol_type = other DNA
tcctcacgttatcgcgttatcaggcaccatcaaactcaaatggaatgagtagtgatacccgtttgcagataaatg

SEQ ID NO: 506792 - DNA, 75 bp, synthetic construct
  source 1..75: mol_type = other DNA
cgcggcgctggcggcggagaatgagctggctcgtaaagctgttcaggcattctgtgaggttgttggcgacaacac

SEQ ID NO: 506793 - DNA, 75 bp, synthetic construct
  source 1..75: mol_type = other DNA
attggacctacgggtgatgtgatgacgcttaatggacattatccctataccgagaaggttcactccacaaaatat

SEQ ID NO: 506794 - DNA, 75 bp, synthetic construct
  source 1..75: mol_type = other DNA
acttaaataccgaacaagagagcgttgcttctccactaacggtaatactgacagacgcggcacgcattgatattt

SEQ ID NO: 506795 - DNA, 75 bp, synthetic construct
  source 1..75: mol_type = other DNA
caaccctttgggccgaagtcgctcctttatccgcacgtgagtttatcgccgcccaggcctctcagggcgaagtta

SEQ ID NO: 506796 - DNA, 75 bp, synthetic construct
  source 1..75: mol_type = other DNA
acatccatggtgttctgcccgatccaaaaagcggacgtgaatacctgacgcttccctgttctgagggtgttaatg

SEQ ID NO: 506797 - DNA, 75 bp, synthetic construct
  source 1..75: mol_type = other DNA
gccgatggtcattgaacagacctcacgaggtgagcgctcttttgatatctattctcgtctacttaaggaacgcgt

SEQ ID NO: 506798 - DNA, 75 bp, synthetic construct
  source 1..75: mol_type = other DNA
gattcaggcattcaacccctttacacccgaaacaataagaaccattctcgtactgagatagctgccggggttcgt

SEQ ID NO: 506799 - DNA, 75 bp, synthetic construct
  source 1..75: mol_type = other DNA
acagttaacacaaggtggagggcacaatgagttatttctgctgcccgggcatgtaaaactgaccaagttgtatag

SEQ ID NO: 506800 - DNA, 75 bp, synthetic construct
  source 1..75: mol_type = other DNA
tgtggattaagcgactgagttcctctctcaaaaacgcaaaaccagacagcaagttgccggatgacgcaatgatct

SEQ ID NO: 506801 - DNA, 75 bp, synthetic construct
  source 1..75: mol_type = other DNA
gattttcaccagtcagcaaaatatccgctgcgcgatatcgagctggtgcggaatcttcatcagtgcggtatgtcc

SEQ ID NO: 506802 - DNA, 75 bp, synthetic construct
  source 1..75: mol_type = other DNA
atggctgacgtactggatcatttacagaagcaggaagacctgctgaaccggctgcatattcaggccgcccggcag

SEQ ID NO: 506803 - DNA, 75 bp, synthetic construct
  source 1..75: mol_type = other DNA
gctggtgcaatgcacttccgcagtgaagatgatccgcaggctcaggaactggcagcactgatcgctgacaaaggt

SEQ ID NO: 506804 - DNA, 75 bp, synthetic construct
  source 1..75: mol_type = other DNA
gaaaccttcagcgaatggattgtcgataaaacgcagttcaaaggcgcactgccgaacatcccaggcatggagtta

SEQ ID NO: 506805 - DNA, 75 bp, synthetic construct
  source 1..75: mol_type = other DNA
caggagccttgaaccgtatcgtaagtgccttagcggaggcagatccacgttctatcagtagcaatccatcctggt

SEQ ID NO: 506806 - DNA, 75 bp, synthetic construct
  source 1..75: mol_type = other DNA
ttacgcgaagtaccagaagaaccgaaagccgacgacctgaatattgtctttgataagccgcgtgaacgatttgcc

SEQ ID NO: 506807 - DNA, 75 bp, synthetic construct
  source 1..75: mol_type = other DNA
atgggcggtagcgtgtccggacagcgtaaacaaggagaaccgatggccgacgttctggaccatttacagaagcag

SEQ ID NO: 506808 - DNA, 75 bp, synthetic construct
  source 1..75: mol_type = other DNA
ccctcaatgaaatttgcggcggcgtttctggtcggtgcgatgctggcgttcgatatgggtggccccatcaataaa

SEQ ID NO: 506809 - DNA, 75 bp, synthetic construct
  source 1..75: mol_type = other DNA
tgatgtccgacattatgggcggtctgctgcacttcctgaacaccatccctccctcaatgaaatttgcggcggcgt

SEQ ID NO: 506810 - DNA, 75 bp, synthetic construct
  source 1..75: mol_type = other DNA
cgggcgtctctgcggcactgccgtttgtcatcggcggcggtattctggtggcgcttgccaacatgctggtgcagt

SEQ ID NO: 506811 - DNA, 75 bp, synthetic construct
  source 1..75: mol_type = other DNA
aaggtaatgaatctccgctgaacatcatcgcctgtgaaaacatggtacgcggtaccacgcagctgaaaggccatg

SEQ ID NO: 506812 - DNA, 75 bp, synthetic construct
  source 1..75: mol_type = other DNA
tgctgcactgcaaaggcgaattgacccgctcactggcgctaatgcagcaaaccgaacagatggcacgccagcacg

SEQ ID NO: 506813 - DNA, 75 bp, synthetic construct
  source 1..75: mol_type = other DNA
atgcatgagtttctggtgcgcattcgtgcgcagctgttatgggcctgggcgcggctggatgaagccgaagcgtcg

SEQ ID NO: 506814 - DNA, 75 bp, synthetic construct
  source 1..75: mol_type = other DNA
ggatgagcgtcggaaatgagagtccccctgctccgccggagacaatgccggacatacagacacgggaactggtga

SEQ ID NO: 506815 - DNA, 75 bp, synthetic construct
  source 1..75: mol_type = other DNA
aaccggacagtagcgtggtgcgtgcggcgcaggactggctgtgcgacagaaaacttgtgagcatcacggatgttc

SEQ ID NO: 506816 - DNA, 75 bp, synthetic construct
  source 1..75: mol_type = other DNA
tcgctgaaagcggtgaaaccggacagttgtgtggtgcgtgaagcgcaggactggctgcgcgacagaaaacttgtg

SEQ ID NO: 506817 - DNA, 75 bp, synthetic construct
  source 1..75: mol_type = other DNA
tgttatatacacaacaaacaatccgctatagtaagagatgccataggcataccatataaaaatatgatgtactat

SEQ ID NO: 506818 - DNA, 75 bp, synthetic construct
  source 1..75: mol_type = other DNA
ggcgcggcagcttcatcagtgtggcgttccccgccgtgagatcgcggaaaaactcgaaatgcccctgggcatgat

SEQ ID NO: 506819 - DNA, 75 bp, synthetic construct
  source 1..75: mol_type = other DNA
ctggcaaacttgaccggatacagtgataaacctctggatgctattggtgccgtaatcgtctctgctttagccgtt

SEQ ID NO: 506820 - DNA, 75 bp, synthetic construct
  source 1..75: mol_type = other DNA
agcatcggttatctgattggccgtagtgagtcagccgtcaggacgaaagcgcgggaactgggtatcagcatgatg

SEQ ID NO: 506821 - DNA, 75 bp, synthetic construct
  source 1..75: mol_type = other DNA
gaccacgcaaaaacgtcaatgaacaagccccagcaaagccataccagcttaatccaaatgcagcggtgaacgggg

SEQ ID NO: 506822 - DNA, 75 bp, synthetic construct
  source 1..75: mol_type = other DNA
ggatgagcgtcgggtcggaaatgagagtccccctgctccgccggagacaatgccggacatacagacacgggaact

SEQ ID NO: 506823 - DNA, 75 bp, synthetic construct
  source 1..75: mol_type = other DNA
ggtaaccacgatactttacgttctctggttgagcgttttgatattccgtttgagctggtaagccatgaagggtta

SEQ ID NO: 506824 - DNA, 75 bp, synthetic construct
  source 1..75: mol_type = other DNA
tatccttcaacaataaaacagttgaattcaataaaacttatagccttgccgattgcaagaggctacgaaacgtat

SEQ ID NO: 506825 - DNA, 75 bp, synthetic construct
  source 1..75: mol_type = other DNA
gtgagagatgtctatactcttccattattgtttcttctcaggagattaaaaactgtcggaacgggtgctgaacga

SEQ ID NO: 506826 - DNA, 75 bp, synthetic construct
  source 1..75: mol_type = other DNA
tttttagaagctgaagatccggacaaagatatatatctatatataaatagcccaggcggagtcgtaacgagcgga

SEQ ID NO: 506827 - DNA, 75 bp, synthetic construct
  source 1..75: mol_type = other DNA
agaatcgggctgagatgggtttttctgcgttcctggggaaaatgggcatcagtatgaatgacagggcgcgggcaa

SEQ ID NO: 506828 - DNA, 75 bp, synthetic construct
  source 1..75: mol_type = other DNA
ggtggccttgctcggtgacgagggggcggcaaaccacaatcgtctgggcggccattatggtgaaccgggtattca

SEQ ID NO: 506829 - DNA, 75 bp, synthetic construct
  source 1..75: mol_type = other DNA
gctgacaacccgattagcgaactaaaagtctttgatttacgtgaaagcatggcgaatggcggcggcccggcgtgc

SEQ ID NO: 506830 - DNA, 75 bp, synthetic construct
  source 1..75: mol_type = other DNA
tcggcggcgcacaggccattgccgcactggcgtttggtacggaatctgtgccgaaagtggacaaaatcttcgggc

SEQ ID NO: 506831 - DNA, 75 bp, synthetic construct
  source 1..75: mol_type = other DNA
gccgcgtgccgaaaccgcccgccaggcactgagcgccagccgcctgatcgtgactaaagatttagcgcagtgcgt

SEQ ID NO: 506832 - DNA, 75 bp, synthetic construct
  source 1..75: mol_type = other DNA
taaaacaggcgatggcagtggcagtaaagaatattgaaaccttccacactgcgcaaaaactgccgccggtagatg

SEQ ID NO: 506833 - DNA, 75 bp, synthetic construct
  source 1..75: mol_type = other DNA
ctgcggatatgctaccgcagctatttgtcgctccaccgtgggtaataaataagaagaaaaatgtaatacccgtat

SEQ ID NO: 506834 - DNA, 75 bp, synthetic construct
  source 1..75: mol_type = other DNA
gcttgtcaaactgattaccatcacgccagagttagtatgcgacgtcattccctgggttaatgctaaggcggcagg

SEQ ID NO: 506835 - DNA, 75 bp, synthetic construct
  source 1..75: mol_type = other DNA
tcaaaagatgcgctgagtatcactgatgtgatggccgcgcagggcatgacacagaatcgggctgagatgggtttt

SEQ ID NO: 506836 - DNA, 75 bp, synthetic construct
  source 1..75: mol_type = other DNA
acttagatataaaccagtaaaaggcgcagtaaccaccaccattccacctaatcacaaagcagaatcgctacctag

SEQ ID NO: 506837 - DNA, 75 bp, synthetic construct
  source 1..75: mol_type = other DNA
ccacgcccacggttgccggaaatggagcaactggctctggcactgctgcgcaaggtcgacagcgccgcgctgctg

SEQ ID NO: 506838 - DNA, 75 bp, synthetic construct
  source 1..75: mol_type = other DNA
cccattaccaaagccactcctgaagttgaaacttcccctgagagtaaaaaccaacgcccctggctggctgatgat

SEQ ID NO: 506839 - DNA, 75 bp, synthetic construct
  source 1..75: mol_type = other DNA
cgtactaccgacttacggttataccgcgacgtgttccagcctcggcctggctgatttccagaagcgtatgaccgt

SEQ ID NO: 506840 - DNA, 75 bp, synthetic construct
  source 1..75: mol_type = other DNA
cagaattgtgattctgaaatatggttttctggtattgatattgatacgcaaattttatttcagactgctgaagtt

SEQ ID NO: 506841 - DNA, 75 bp, synthetic construct
  source 1..75: mol_type = other DNA
ccaccccggacggtgcggggcgtgtggcagcccatgccatggtgaatgccgcactggctgtggcacagggtaaga

SEQ ID NO: 506842 - DNA, 75 bp, synthetic construct
  source 1..75: mol_type = other DNA
tgaaacagcagctaatacggcagcagcaatagctggtgctacaggtaatgccagtaaggataccgggaatgataa

SEQ ID NO: 506843 - DNA, 75 bp, synthetic construct
  source 1..75: mol_type = other DNA
tttacaacattgagccaagcatgaatcactgctggagtcactttacccaaaccactgcggccagtagttgcgaca

SEQ ID NO: 506844 - DNA, 75 bp, synthetic construct
  source 1..75: mol_type = other DNA
gaaagaaaattcagcctccggctcaggaactgtgaatttaacagtcagggtgggaaccttttctctgattcccgg

SEQ ID NO: 506845 - DNA, 75 bp, synthetic construct
  source 1..75: mol_type = other DNA
atgagcctgcgattctctgttccacttttcttttttggctgtgcgtttgttcgtggtgtttttgctggtccgttt

SEQ ID NO: 506846 - DNA, 75 bp, synthetic construct
  source 1..75: mol_type = other DNA
cagaaagcgattgagtcaattaagcaggctgattcggctgttaagttggcacacgagaagttttcggctctggcg

SEQ ID NO: 506847 - DNA, 75 bp, synthetic construct
  source 1..75: mol_type = other DNA
cgccgtttatcagcagatgggcgtcggatgtgatgctcctgaattctccattacggtaggtttgagtaacttacg

SEQ ID NO: 506848 - DNA, 75 bp, synthetic construct
  source 1..75: mol_type = other DNA
ccgtcgaacgccaactggcagaactgccgcgtgccgaaaccgcccgccaggcactgagcgccagccgcctgatcg

SEQ ID NO: 506849 - DNA, 75 bp, synthetic construct
  source 1..75: mol_type = other DNA
atcaggaggttcagcaacaacgatttgatgaactgagtaaaatatatgataaaagtcacccggtcggagagttaa

SEQ ID NO: 506850 - DNA, 75 bp, synthetic construct
  source 1..75: mol_type = other DNA
tgagacagagaagcagacggtctccacactggcaacggttgctgccggtctggccggcggtctggtgggagactc

SEQ ID NO: 506851 - DNA, 75 bp, synthetic construct
  source 1..75: mol_type = other DNA
aagccgcactgctggcggtaacgattgccggtggcggtgtgggtggttatcaggaaatgacccgtcagtctctga

SEQ ID NO: 506852 - DNA, 75 bp, synthetic construct
  source 1..75: mol_type = other DNA
agatccagtatccggatggtaagccgccagtatgggcaaagtgcacaaaaggcgtgtatccgtcttactgggagg

SEQ ID NO: 506853 - DNA, 75 bp, synthetic construct
  source 1..75: mol_type = other DNA
ccgaatccgtggccattgatattgcttatgaagggtccggcagtggagactggcgcactgacggtttcatcgtgg

SEQ ID NO: 506854 - DNA, 75 bp, synthetic construct
  source 1..75: mol_type = other DNA
ccgaattcgtggccattgatattgcttatgaagggtccgggagtggtgactggcgcactgacggtttcatcgtgg

SEQ ID NO: 506855 - DNA, 75 bp, synthetic construct
  source 1..75: mol_type = other DNA
ccgaatacgtggccattgatattgcttatgaagggtccgggagtggggactggcgcactgacggtttcatcgtgg

SEQ ID NO: 506856 - DNA, 75 bp, synthetic construct
  source 1..75: mol_type = other DNA
acaagaatcgccagcttacccgttacagcgatacccgctggcatgaagattcagtgcgtaaccgctggttcagcg

SEQ ID NO: 506857 - DNA, 75 bp, synthetic construct
  source 1..75: mol_type = other DNA
cgttgacgtcgcttatgaaggctccggcagcggtgactggcgtaccaacagtttcatcgttggtgtcggttataa

SEQ ID NO: 506858 - DNA, 75 bp, synthetic construct
  source 1..75: mol_type = other DNA
ccgaatgcgtggccattgatattgcttatgaagggtccgggagtggagactggcgcactgacggtttcatcgtgg

SEQ ID NO: 506859 - DNA, 75 bp, synthetic construct
  source 1..75: mol_type = other DNA
atgcgtaaactttatgccgccattttgtccgcagccatctgtctggccgtatccggtgcgcctgcatgggcggct

SEQ ID NO: 506860 - DNA, 75 bp, synthetic construct
  source 1..75: mol_type = other DNA
gttcagcgcgtatgcgatggcgggtgtggcttacagccgtgtgtcgactttttccggggattatctctgcgtaac

SEQ ID NO: 506861 - DNA, 75 bp, synthetic construct
  source 1..75: mol_type = other DNA
taactgacaataaggggaaaacgtacgatgtgctgaacggaagtgatgacggtcgccacagcgacacgtctctgg

SEQ ID NO: 506862 - DNA, 75 bp, synthetic construct
  source 1..75: mol_type = other DNA
ccgaatacgtggccattgatattgcttatgaagggtccggcagtggcgactggcgcactgacggtttcatcgtgg

SEQ ID NO: 506863 - DNA, 75 bp, synthetic construct
  source 1..75: mol_type = other DNA
ccgaatacgtggccattgatattgcttatgaagggtccggaagtggagactggcgcactgacggtttcatcgtgg

SEQ ID NO: 506864 - DNA, 75 bp, synthetic construct
  source 1..75: mol_type = other DNA
tcagttatgccaatgccaaagatgagcaaaaaacgcattacagcgatacccgctggcatgaagattcagtgcgta

SEQ ID NO: 506865 - DNA, 75 bp, synthetic construct
  source 1..75: mol_type = other DNA
gcgtaatggcggggccgtctgtgcgcgtgaatgaatggttcagcgcgtatgcgatggcgggtgtggcttacagcc

SEQ ID NO: 506866 - DNA, 75 bp, synthetic construct
  source 1..75: mol_type = other DNA
gtgagcagcttgctgcgtatgaaagcagcctggcggacagtaatgccagtacccgggcgtctaacgacgcgcagt

SEQ ID NO: 506867 - DNA, 75 bp, synthetic construct
  source 1..75: mol_type = other DNA
agaaaaataacgagctgctgagacagtatcaggccggagaaattgaagaagccctgtggaaacaggagaaagaac

SEQ ID NO: 506868 - DNA, 75 bp, synthetic construct
  source 1..75: mol_type = other DNA
taccgctgaaaccgctgccgctgaaagtggtttatcacactccatgccatatggaaaaaatgggctggacgctct

SEQ ID NO: 506869 - DNA, 75 bp, synthetic construct
  source 1..75: mol_type = other DNA
cgcaattcatcgtgaagagtcggaaaaacagggcgtgccggttttcagaaactgccagcgttgtggggggcgtgg

SEQ ID NO: 506870 - DNA, 75 bp, synthetic construct
  source 1..75: mol_type = other DNA
gtatcactgatgtgatggccgcgcagggcatgacacagaatcgggctgagatggggttttctgcgttccttggga

SEQ ID NO: 506871 - DNA, 75 bp, synthetic construct
  source 1..75: mol_type = other DNA
tgccattcatcgtgaagagtcggtaaaacttggtttgcctgttttcagatactgccagcgttgtggtggtcgtgg

SEQ ID NO: 506872 - DNA, 75 bp, synthetic construct
  source 1..75: mol_type = other DNA
cggatttccagaagcggatgaccgttcaggaattatcccgtgacggattctcggccattgccgccaccattgaaa

SEQ ID NO: 506873 - DNA, 75 bp, synthetic construct
  source 1..75: mol_type = other DNA
attaacgtgaaataccattatgagtttacggacacgctggggctgattacgtcattcagttatgccaacgctgaa

SEQ ID NO: 506874 - DNA, 75 bp, synthetic construct
  source 1..75: mol_type = other DNA
gctggcgtgcagtttaacccgaccgaatccgtgaccattgaccttgcttatgaaggttccggtagtggcgactgg

SEQ ID NO: 506875 - DNA, 75 bp, synthetic construct
  source 1..75: mol_type = other DNA
atgaaactggaagatttaccgaaatactactccccaaaatcccctggcctgaccgatgcatcggcctcaacgtcg

SEQ ID NO: 506876 - DNA, 75 bp, synthetic construct
  source 1..75: mol_type = other DNA
attactcgccaaaatctcccggcctgactgatgcatcagcctcaacgtcagaagatgcgctgagcattactgatg

SEQ ID NO: 506877 - DNA, 75 bp, synthetic construct
  source 1..75: mol_type = other DNA
tgaagacctatttggttctctaatggctcagcttgcaacacgcgctcaacgtcttctcctcggtcaagaatggac

SEQ ID NO: 506878 - DNA, 75 bp, synthetic construct
  source 1..75: mol_type = other DNA
ttcttgaacgagtgcgccgcctggcaccaccgcacgtgacagcaccgttccggacgaccgacgagtggcgggaat

SEQ ID NO: 506879 - DNA, 75 bp, synthetic construct
  source 1..75: mol_type = other DNA
gcaggagggattcagtaactgggtggataatgcgtccgattacgcctcacaggcagcacagcttgcgacggaggg

SEQ ID NO: 506880 - DNA, 75 bp, synthetic construct
  source 1..75: mol_type = other DNA
gattatggatcgcatgaccatgaacggcggacgctgggggaattttaactgggagagctggcgtccgaatgtcgt

SEQ ID NO: 506881 - DNA, 75 bp, synthetic construct
  source 1..75: mol_type = other DNA
atgaacggtggtcgctgggtgagttttaactgggaaagctggcgtcctaatgtcagccatctgagtgtggcgaag

SEQ ID NO: 506882 - DNA, 75 bp, synthetic construct
  source 1..75: mol_type = other DNA
ttctggagcgtatccgcagactgaccccaccacatgtaaccgccccattcagaacggttgcggagtggcgtgagt

SEQ ID NO: 506883 - DNA, 75 bp, synthetic construct
  source 1..75: mol_type = other DNA
ctgaaagacggccagacagtgatagtggttactgtggctgatgttatgagtgccctgcacgccagctatgacgac

SEQ ID NO: 506884 - DNA, 75 bp, synthetic construct
  source 1..75: mol_type = other DNA
tcaaaatttcggcaaattcacagtcattccagtcggagatccagcgtgcttcccgcatgggcagtgaatattacc

SEQ ID NO: 506885 - DNA, 75 bp, synthetic construct
  source 1..75: mol_type = other DNA
ttcttgaacgtatccgcagactggccccgtcgcatgtaaccgcgccattcaagacggtagcggagtggcgcgagt

SEQ ID NO: 506886 - DNA, 75 bp, synthetic construct
  source 1..75: mol_type = other DNA
acgttgcgtgccaagctgcgcgccatcaaccccgatctttcaccgattaatactcatcgcggcacgcggcatggg

SEQ ID NO: 506887 - DNA, 75 bp, synthetic construct
  source 1..75: mol_type = other DNA
agcattggtgactggctgggcggtgcggtggccaatgcaaaaggcggcgtgtatacctcggcaaacctgagcgcg

SEQ ID NO: 506888 - DNA, 75 bp, synthetic construct
  source 1..75: mol_type = other DNA
tgtacaaacttcgtgttcagcggtaaacctggtaccggtaaaaatcacctggcagcagcgattggcaatcggctg

SEQ ID NO: 506889 - DNA, 75 bp, synthetic construct
  source 1..75: mol_type = other DNA
gggagagctggcgcccgaatgttggtcagccaggaattgagaagcaatttttaccgggaggaaattttaatggag

SEQ ID NO: 506890 - DNA, 75 bp, synthetic construct
  source 1..75: mol_type = other DNA
gagccaagcgtatttttgctcgatgaaccgctctccaacctcgatgctgcactgcgtgtgcaaatgcgtatcgaa

SEQ ID NO: 506891 - DNA, 75 bp, synthetic construct
  source 1..75: mol_type = other DNA
ggtgatggaccgcatgtccatgaacggtggtcgctgggtgacgtttaactgggagagttggcgtccgaacgtcag

SEQ ID NO: 506892 - DNA, 75 bp, synthetic construct
  source 1..75: mol_type = other DNA
gattatggatcgcatgaccatgaacggcgggcgatgggtgaattttaactgggagagctgggtgatgctgccaac

SEQ ID NO: 506893 - DNA, 75 bp, synthetic construct
  source 1..75: mol_type = other DNA
gggaactgtgcgaagttgatctgctggttcttgatgaaattggtattcagcgcgagacgaaaaacgagcaggttg

SEQ ID NO: 506894 - DNA, 75 bp, synthetic construct
  source 1..75: mol_type = other DNA
ctggcgaaaggtcgcagtgtgattgtgataacagtggcggatgtgatgctggcgttacatggcagctacgacaac

SEQ ID NO: 506895 - DNA, 75 bp, synthetic construct
  source 1..75: mol_type = other DNA
ttaatcagattgttgaccgcagaacgtcatcattacgcagtgtagggatgctgacgaacctgaatcatgtcgcaa

SEQ ID NO: 506896 - DNA, 75 bp, synthetic construct
  source 1..75: mol_type = other DNA
gatacgcgcaatgagcaagtcacgcttaatcagattgttgaccgcagaacgtcatcattacgcagtgtagggatg

SEQ ID NO: 506897 - DNA, 75 bp, synthetic construct
  source 1..75: mol_type = other DNA
atcgatcaagtgcaggtggagctgccgatgccgaatcgtcagcaagtctggctaccggtcgaaagccgtgatgtc

SEQ ID NO: 506898 - DNA, 75 bp, synthetic construct
  source 1..75: mol_type = other DNA
tcggttcaccaaagatgaacttcctgccggtaaaagtgaccgccactgccattgatcaagttcaggttgagttgc

SEQ ID NO: 506899 - DNA, 75 bp, synthetic construct
  source 1..75: mol_type = other DNA
atcgatcaagtgcaggtggagctgccgatgccaaatcgtcagcaagtctggctacctgttgaaagccgtgatgtc

SEQ ID NO: 506900 - DNA, 75 bp, synthetic construct
  source 1..75: mol_type = other DNA
ttcttgagcgtatccgtaagctggccccgcagcatgtaatcgcgccgtaccggacagtggacgagtggcgcgagt

SEQ ID NO: 506901 - DNA, 75 bp, synthetic construct
  source 1..75: mol_type = other DNA
tggctggtgaggccagagtcaggattttacaaattaccgacactcacctgtttgcacaaaagcacgaagccctgt

SEQ ID NO: 506902 - DNA, 75 bp, synthetic construct
  source 1..75: mol_type = other DNA
atcagtgaggatttttacagacaggctctggcacagaacgcgcagtatctgagtgaacgccttaaagaccaggaa

SEQ ID NO: 506903 - DNA, 75 bp, synthetic construct
  source 1..75: mol_type = other DNA
caaaacctggcaggacaacggcggggcgcttgccgagtgcgccattctctaccgcagcaacgcccagtcgcgtgt

SEQ ID NO: 506904 - DNA, 75 bp, synthetic construct
  source 1..75: mol_type = other DNA
cggtttaccgcgctcttgtagtcgtattgaacagcgccttggtcgtctgaacaggtacagtgcaaacctgaaagg

SEQ ID NO: 506905 - DNA, 75 bp, synthetic construct
  source 1..75: mol_type = other DNA
ttagaacaactcaccctgacaatcccgcacgaagagacggtaatttattgcattgagccacatagccaacgatgg

SEQ ID NO: 506906 - DNA, 75 bp, synthetic construct
  source 1..75: mol_type = other DNA
ttattccattaacacctattgaacgatttatccgtattcgccctccagaacggcttaacacaatccttttactgg

SEQ ID NO: 506907 - DNA, 75 bp, synthetic construct
  source 1..75: mol_type = other DNA
tcaggtgaggaaacaaaaatttctgactacggtattacattcaggaattcacaccgcattcataaatatgagttg

SEQ ID NO: 506908 - DNA, 75 bp, synthetic construct
  source 1..75: mol_type = other DNA
catagcgaacgccgaaaaacgcgagtttatacagggctaccgcgaccggagaaccctcagcgatttactggagtt

SEQ ID NO: 506909 - DNA, 75 bp, synthetic construct
  source 1..75: mol_type = other DNA
agcagcttggcaaaattattaatgagcttggagctgacatgtttgcggtagaactcgacaaattaaaaatcattg

SEQ ID NO: 506910 - DNA, 75 bp, synthetic construct
  source 1..75: mol_type = other DNA
acaatggtgccagattatatcaggtaaaggtttgtatgcagaggtgtgctctgttgatgaaatgaacctcgccaa

SEQ ID NO: 506911 - DNA, 75 bp, synthetic construct
  source 1..75: mol_type = other DNA
acaccttatggttatcgccttgtaaaatcttgtaatggcgatcattacagaatgattactaccagcgatactcca

SEQ ID NO: 506912 - DNA, 75 bp, synthetic construct
  source 1..75: mol_type = other DNA
agataccgctcgtgtactcggacgcatgtatgacggtattgagtatcgcggttatggtcagaatatcgttgaaga

SEQ ID NO: 506913 - DNA, 75 bp, synthetic construct
  source 1..75: mol_type = other DNA
ttaacgtacaggcgctggatatggggcacattgtcgttgacattgatggtgttaaggaaggtgcgaataagcggg

SEQ ID NO: 506914 - DNA, 75 bp, synthetic construct
  source 1..75: mol_type = other DNA
tatccctggtggcattggttgctggaaagagaaaacccccgcacgttgagaggtttaacctgacaacagaacggg

SEQ ID NO: 506915 - DNA, 75 bp, synthetic construct
  source 1..75: mol_type = other DNA
ggcacggatacttaaagccattcttgatgaacgaacggccagcaaaaatcgagaagccacactgactgccggaca

SEQ ID NO: 506916 - DNA, 75 bp, synthetic construct
  source 1..75: mol_type = other DNA
gactttctctgccactgtcatcgactccgatccaggcaatggtcatatctgggtaaaaaccaacacaggggatga

SEQ ID NO: 506917 - DNA, 75 bp, synthetic construct
  source 1..75: mol_type = other DNA
cgttaatcagccagctggggacattgcgtgatgaatatgccgccatgccggaaacggtctctgacgggatcacaa

SEQ ID NO: 506918 - DNA, 75 bp, synthetic construct
  source 1..75: mol_type = other DNA
ttgatttatccagatattccccagaactcgatagtcacggacaatactcactccctgcttctggcaaatatgagc

SEQ ID NO: 506919 - DNA, 75 bp, synthetic construct
  source 1..75: mol_type = other DNA
cggctggtttctctgattggccgcgtctcacaaacccggctacgcagtggcgatctcagtgataacgactggcag

SEQ ID NO: 506920 - DNA, 75 bp, synthetic construct
  source 1..75: mol_type = other DNA
aacggtttatggaactgatcgacgccttagcgcaggaaactgccgatatgccgctgcatgtacagactgaccggg

SEQ ID NO: 506921 - DNA, 75 bp, synthetic construct
  source 1..75: mol_type = other DNA
gcgagttgccggaagagtgtgtggaagaggtgcgtttacgcgctacggtaagccgcccggtcagccatcaacgga

SEQ ID NO: 506922 - DNA, 75 bp, synthetic construct
  source 1..75: mol_type = other DNA
tatcgcctggctgatgagcgtggaaaactgctcgccatactcgattatggcggtgacgtttaccaacaaagcggc

SEQ ID NO: 506923 - DNA, 75 bp, synthetic construct
  source 1..75: mol_type = other DNA
catcgcggacgaacttatgaccaggtgcacaaatttcgtgttcagcggtaagccgggtaccggaaaaaatcacct

SEQ ID NO: 506924 - DNA, 75 bp, synthetic construct
  source 1..75: mol_type = other DNA
ttcttgaacgtatccgcagactggccccacagcatgtaaccgcgccgtaccggacacgggaagagtggtacgagt

SEQ ID NO: 506925 - DNA, 75 bp, synthetic construct
  source 1..75: mol_type = other DNA
agtctcctcccaattactgaccaagtttgggttaaaaccgatacgggggatgagacacagattccagcctttggt

SEQ ID NO: 506926 - DNA, 75 bp, synthetic construct
  source 1..75: mol_type = other DNA
catcgcggacgtactgataaccggatgcacaaatttcgtgttcagcggtaagccgggtaccggaaaaaatcacct

SEQ ID NO: 506927 - DNA, 75 bp, synthetic construct
  source 1..75: mol_type = other DNA
tgtgatggaccgcatggtcatgaacggtggtcgctgggtgacgtttaactgggagagctggcgtccgaacgtcag

SEQ ID NO: 506928 - DNA, 75 bp, synthetic construct
  source 1..75: mol_type = other DNA
gagcactcatacgtcaatcaggcctgccggaaattattttatccgcaaaatatccagtctgtgtccgcacagagt

SEQ ID NO: 506929 - DNA, 75 bp, synthetic construct
  source 1..75: mol_type = other DNA
ggccattgatattgcttatgaaggctccggtagtggtgactggcgcactgacggtttcatcgtgggtgtcggtta

SEQ ID NO: 506930 - DNA, 75 bp, synthetic construct
  source 1..75: mol_type = other DNA
cggggccgtccgtgcgcgtgaatgaatggttcagcacgtatgcgatggcgggtgtggcttacagccgtgtgtcgg

SEQ ID NO: 506931 - DNA, 75 bp, synthetic construct
  source 1..75: mol_type = other DNA
atacccgctggcatgaagattcagtgcgtaaccgctggttcagcgtgatggcggggccctctgtgcgcgtgaatg

SEQ ID NO: 506932 - DNA, 75 bp, synthetic construct
  source 1..75: mol_type = other DNA
attacctcaatcaaatgcgcccggaacgattaccgaataatttctgggtgccgcggcaattgttttcgccacaga

SEQ ID NO: 506933 - DNA, 75 bp, synthetic construct
  source 1..75: mol_type = other DNA
atggtggggccgtctgtgcgcgtgaatgaatggttcagcgcgtatgcgatggcgggtatggcttacagccgtgtg

SEQ ID NO: 506934 - DNA, 75 bp, synthetic construct
  source 1..75: mol_type = other DNA
cgactgcgaaacctgcaaatggcagattgagatgtccacgagccttcgctgcgaacatccgattactctgttggc

SEQ ID NO: 506935 - DNA, 75 bp, synthetic construct
  source 1..75: mol_type = other DNA
ataacgttcgattctatgttcacggtgaacgttggactgctagccaatctggcgcatggaatgaccaatggtcat

SEQ ID NO: 506936 - DNA, 75 bp, synthetic construct
  source 1..75: mol_type = other DNA
aaaggcgtcgaaatgactcatgtcaataacgttcgattctatgttcacggtgaacgttggactgctagccaatct

SEQ ID NO: 506937 - DNA, 75 bp, synthetic construct
  source 1..75: mol_type = other DNA
gtcgttcagctatgcaggagacaagaatcgccagctgacccgttacagcgatacccgctggcatgaagattccgt

SEQ ID NO: 506938 - DNA, 75 bp, synthetic construct
  source 1..75: mol_type = other DNA
tgattataagtattatgatttcagccagatttacagttgttctgacagaacattaaatgattatgcggttatttt

SEQ ID NO: 506939 - DNA, 75 bp, synthetic construct
  source 1..75: mol_type = other DNA
taaaggtggtcttgtcagttgtcgttttaaactcgatggcgcgcttacggctaatcagtacgcactggcgctgta

SEQ ID NO: 506940 - DNA, 75 bp, synthetic construct
  source 1..75: mol_type = other DNA
gatattgcttatgaaggttccggcagtggcgactggcgcactgacggcttcatcgtgggtgtcggctataaattc

SEQ ID NO: 506941 - DNA, 75 bp, synthetic construct
  source 1..75: mol_type = other DNA
ccgtgtgtcgacgttctccggggattatctccgcgtaactgacaacaaggggaaaacgcacgatgtgctgaccgg

SEQ ID NO: 506942 - DNA, 75 bp, synthetic construct
  source 1..75: mol_type = other DNA
atccgtggccattgatattgcttatgaaggctccggcagtggcgactggcgcactgacggtttcatcgtgggtgt

SEQ ID NO: 506943 - DNA, 75 bp, synthetic construct
  source 1..75: mol_type = other DNA
acaaggggaaaacgcacgacgtgctgaccggaagtgatgacggtcgccacagcaacacgtctctggcgtggggag

SEQ ID NO: 506944 - DNA, 75 bp, synthetic construct
  source 1..75: mol_type = other DNA
aaggccgacgtagatatggataagcgaattatccgtttccataaggtattactggtcaacaaagacaatattgac

SEQ ID NO: 506945 - DNA, 75 bp, synthetic construct
  source 1..75: mol_type = other DNA
atcaaacctggattagaaatgcagaatctgggtaaggccgacgtagatatggataagcgaattatccgtttccat

SEQ ID NO: 506946 - DNA, 75 bp, synthetic construct
  source 1..75: mol_type = other DNA
agcgtaatggcggggccgtctgtgcgcgtgaatgaatggttcagcgcgtatgcgatggcgggtgtagcttacagc

SEQ ID NO: 506947 - DNA, 75 bp, synthetic construct
  source 1..75: mol_type = other DNA
gcgtcacgcactggcgaaacgcacaccgtggagtggcaggctccggctgtggcgattacccgcacggcaacccag

SEQ ID NO: 506948 - DNA, 75 bp, synthetic construct
  source 1..75: mol_type = other DNA
actggcaatccagtttggcgctaatcatgtctggaaattaagcggcaaaccggacgatcggatgatcgaagatta

SEQ ID NO: 506949 - DNA, 75 bp, synthetic construct
  source 1..75: mol_type = other DNA
cgccagcacggcgcagacggcctggtgctgttgccaaacacccgtcgcggcaaattactggcggcaaaactgggt

SEQ ID NO: 506950 - DNA, 75 bp, synthetic construct
  source 1..75: mol_type = other DNA
ccgtgaccattgaccttgcttatgaaggttccggtagtggcgactggcgaacggatgcatttattgttggtatcg

SEQ ID NO: 506951 - DNA, 75 bp, synthetic construct
  source 1..75: mol_type = other DNA
tatccgcagtagtctggctggttgccgctggtacgccagcgagcgcagcagagcatcagtccacactaagcgccg

SEQ ID NO: 506952 - DNA, 75 bp, synthetic construct
  source 1..75: mol_type = other DNA
gcggttacccgcacggcaacgcaggcgcgccagagcaacagtgtcgatctcgacaaagcccgtctggtggttagc

SEQ ID NO: 506953 - DNA, 75 bp, synthetic construct
  source 1..75: mol_type = other DNA
aaagccgtattgatgcagccgatggatctagtgacggtaagtacatcaaaaaacacgtaaacacttatactgatg

SEQ ID NO: 506954 - DNA, 75 bp, synthetic construct
  source 1..75: mol_type = other DNA
gatgcgatgcccgaacaggaccccgtgtttaaactggcgggagttgcccccggattatgcggcccgtctggattt

SEQ ID NO: 506955 - DNA, 75 bp, synthetic construct
  source 1..75: mol_type = other DNA
gaacatcagtccacgctgagcgcggggtatctccatgcctcgacgaacgttcccggtagtgatgatctgaacggg

SEQ ID NO: 506956 - DNA, 75 bp, synthetic construct
  source 1..75: mol_type = other DNA
tgcccttgctgatttccgcaaacttccctctccggcggcccttcataaaatgaagatccggcaggaacgtgagga

SEQ ID NO: 506957 - DNA, 75 bp, synthetic construct
  source 1..75: mol_type = other DNA
tgctgaccaccattcagacccggctgaaagcaatggaggccagtggtgagatggcccgggagcaggaagcattca

SEQ ID NO: 506958 - DNA, 75 bp, synthetic construct
  source 1..75: mol_type = other DNA
tatgcagtcgcatggaaaagcgcttattcagacgctgagcctgcttaaatccacaatgggccgggaagccagtgc

SEQ ID NO: 506959 - DNA, 75 bp, synthetic construct
  source 1..75: mol_type = other DNA
atccgccagcgccgcgctgaaatggaaaccacgacgaacgccctgaatgaggagtggcgcacactgtttcgtgaa

SEQ ID NO: 506960 - DNA, 75 bp, synthetic construct
  source 1..75: mol_type = other DNA
taaaaatccccgtaatcctccacctgatacggttgggatactactacctgtcccttaaagaacaacgctgggaca

SEQ ID NO: 506961 - DNA, 75 bp, synthetic construct
  source 1..75: mol_type = other DNA
ctcagcgcaaaagcggctagcgacatcaaccgcctgattgtggcggaatacctgaacgaatttaataccggagca

SEQ ID NO: 506962 - DNA, 75 bp, synthetic construct
  source 1..75: mol_type = other DNA
ggcctgcttaaccgggcgctggaagaagtgatctttgaattccacaaagtgggtgaagaagagctggtgctggct

SEQ ID NO: 506963 - DNA, 75 bp, synthetic construct
  source 1..75: mol_type = other DNA
tggacaaagtgatctgggggccaaactgggaagaactgctgggcggcgagtttgaaaaacgtgcccgcgaccgca

SEQ ID NO: 506964 - DNA, 75 bp, synthetic construct
  source 1..75: mol_type = other DNA
tgatggcgatgcgccactatatgcgttcacaaaccgtggaaggcgttactgatactcgtgccatcgacgaagtag

SEQ ID NO: 506965 - DNA, 75 bp, synthetic construct
  source 1..75: mol_type = other DNA
cgaccagccatcgggaaatggcgggcgatgccttcgcagaacgcaacggctgcggttttacctttggcgacggtt

SEQ ID NO: 506966 - DNA, 75 bp, synthetic construct
  source 1..75: mol_type = other DNA
gtgacgctggcggaagatcgtcgccgtctgcgggtggattcgtttgcactggatgtgccggaggtgaagccatga

SEQ ID NO: 506967 - DNA, 75 bp, synthetic construct
  source 1..75: mol_type = other DNA
ccatccggtgttaatcatgctcgtggttttgagttcacttatgggtctaatccacatgctactgtaagaacatac

SEQ ID NO: 506968 - DNA, 75 bp, synthetic construct
  source 1..75: mol_type = other DNA
aaagcaattaatgacaaggttgatttgattaaggccgagactgatcggactatcgcagcaaataaaacctatgcg

SEQ ID NO: 506969 - DNA, 75 bp, synthetic construct
  source 1..75: mol_type = other DNA
tttaaactaggcactttgacaatgccacaacaacacggtcgcacggctaagatccgtttggttggtggtaacggt

SEQ ID NO: 506970 - DNA, 75 bp, synthetic construct
  source 1..75: mol_type = other DNA
gatagtgctcatgctatttggaaagcggttgattggggtcgtcaatatatcgcagcaatggatgtgcattgtccc

SEQ ID NO: 506971 - DNA, 75 bp, synthetic construct
  source 1..75: mol_type = other DNA
tcaaaaactctgctggtgctcgccacgtctggtttagagatgatagcgaggcagaaaaggctgttatctgggcta

SEQ ID NO: 506972 - DNA, 75 bp, synthetic construct
  source 1..75: mol_type = other DNA
ttatcgcactggtcaagatgttcgtaatggttggtttggttttggtgatttgacgaccaaagattttatttggtg

SEQ ID NO: 506973 - DNA, 75 bp, synthetic construct
  source 1..75: mol_type = other DNA
aaacctatgataaagttaaatctctttctgaccgcgaagttatcggccatgagattggtattatcgcacaggatt

SEQ ID NO: 506974 - DNA, 75 bp, synthetic construct
  source 1..75: mol_type = other DNA
cagtccggcgagctggaccggcttcgcgaagaggcgattgagcgggtgaagcgaaatgcggtgcgccccgcaccg

SEQ ID NO: 506975 - DNA, 75 bp, synthetic construct
  source 1..75: mol_type = other DNA
atcgacgcggataacccgcagcagctggcgtggatgaaggcgcagaagcccggcacattgacgtaccgcgtgatt

SEQ ID NO: 506976 - DNA, 75 bp, synthetic construct
  source 1..75: mol_type = other DNA
ctaatgtttctggcaaaaagccaacgccggaacaattacaggtcggtgaggtagcaatcaaccttaaagaccatg

SEQ ID NO: 506977 - DNA, 75 bp, synthetic construct
  source 1..75: mol_type = other DNA
gtgttccatataatagtgaatacgctcttatccgtggtgatatttccggtggtgcatgggtagactggcgagcgc

SEQ ID NO: 506978 - DNA, 75 bp, synthetic construct
  source 1..75: mol_type = other DNA
tttaattaaagcggtccaagaaatgagcgaagaaaataaaatccttcgtgaacgtcttgctgcaattgaggctaa

SEQ ID NO: 506979 - DNA, 75 bp, synthetic construct
  source 1..75: mol_type = other DNA
accagcatcgggttactgcttctctatattctccatgcgcgacgcacgccaaacccattaatttcattagattta

SEQ ID NO: 506980 - DNA, 75 bp, synthetic construct
  source 1..75: mol_type = other DNA
cgataaaaccatcgtgatggccggttcagtcaccgacaacttctcaacccgcgaaacgtctggcgtgatccgtgg

SEQ ID NO: 506981 - DNA, 75 bp, synthetic construct
  source 1..75: mol_type = other DNA
acgatccgggtgaaatcaccaatgaagtgacgccgattaaagtgggcgacaccctttacctgtgtaccgctcacc

SEQ ID NO: 506982 - DNA, 75 bp, synthetic construct
  source 1..75: mol_type = other DNA
acagcaacacatctctggcgtggggggctggcgtgcagtttaacccgaccgaatcagtggccgttgatgtcgctt

SEQ ID NO: 506983 - DNA, 75 bp, synthetic construct
  source 1..75: mol_type = other DNA
attaacgtgaaataccgttatgagtttacggacacgttggggctggtgacgtcattcagctatgcaggagacaag

SEQ ID NO: 506984 - DNA, 75 bp, synthetic construct
  source 1..75: mol_type = other DNA
aaagcaacggatggtaataatttaattaaaagacagcgcaaatctaagccgagccacgcgccatcagaaccggag

SEQ ID NO: 506985 - DNA, 75 bp, synthetic construct
  source 1..75: mol_type = other DNA
tgtccgcagccatttgtctgtccgtatccggagcgcctgcatgggcgtctgagcagcaggccacgctgagcgcgg

SEQ ID NO: 506986 - DNA, 75 bp, synthetic construct
  source 1..75: mol_type = other DNA
atgagtttacggacacctggggatggtgacgtcttcagctatgcaggagacaagaatcgccagcttacccgttac

SEQ ID NO: 506987 - DNA, 75 bp, synthetic construct
  source 1..75: mol_type = other DNA
ctggcatgaagattccgtgcgtaaccgctggttcagcgtgatggcggggccgtctgtgcgcgtgaatgaatggtt

SEQ ID NO: 506988 - DNA, 75 bp, synthetic construct
  source 1..75: mol_type = other DNA
ccaaggtgctgccgaaggcgattacgtaaccccaactcaaccgttttctgaactgagcttccgtccgacgaaaga

SEQ ID NO: 506989 - DNA, 75 bp, synthetic construct
  source 1..75: mol_type = other DNA
agcatggggttatatctcggcgctggatctgaaaaccaatgaagtggtgtggaagaaacgtattggtacgccgca

SEQ ID NO: 506990 - DNA, 75 bp, synthetic construct
  source 1..75: mol_type = other DNA
ccgttcaccacgacctgtgggatatggatcttccggcacagccgacgctggcggacatcaccgttaatggtcaga

SEQ ID NO: 506991 - DNA, 75 bp, synthetic construct
  source 1..75: mol_type = other DNA
ggtatcttcatgtctcgacgaacgttcccggcagcgatgaactgaacgggattaacgtgaaataccgttatgagt

SEQ ID NO: 506992 - DNA, 75 bp, synthetic construct
  source 1..75: mol_type = other DNA
gggtgtggcttacagccgtgtgtcgactttctccggggattatctccgcgtaactgacaacaaggggaaaagcac

SEQ ID NO: 506993 - DNA, 75 bp, synthetic construct
  source 1..75: mol_type = other DNA
atgcgtaaagtttgtgcagccattttttccgcagccatctgtctggccgtatccggtgcgcctgcatgggcgtct

SEQ ID NO: 506994 - DNA, 75 bp, synthetic construct
  source 1..75: mol_type = other DNA
cggggccgtctgtgcgcgtgaatgaatggttcagcgcgtatgcgatggcgggagtggcttacagccgtgtgtcga

SEQ ID NO: 506995 - DNA, 75 bp, synthetic construct
  source 1..75: mol_type = other DNA
atacccgctggcataaagattccgtgcgtaaccgctggttcagcgtgatggcggggccgtctgtgcgcgtgaatg

SEQ ID NO: 506996 - DNA, 75 bp, synthetic construct
  source 1..75: mol_type = other DNA
tcccggcagcgatgatctgaacgggattaacgtgaaataccgttatgagtttacggacacgctggggctggtgac

SEQ ID NO: 506997 - DNA, 75 bp, synthetic construct
  source 1..75: mol_type = other DNA
aatggttcagcgtgtatgcgatggcgggtgtggcttacagccgtgtgtcgactttcttcggggattatctccgcg

SEQ ID NO: 506998 - DNA, 75 bp, synthetic construct
  source 1..75: mol_type = other DNA
tgaatggttcagcgcgtatgcgatggcgggtgtggcttacagccgtgtgtcgactttctccggggattatcttcg

SEQ ID NO: 506999 - DNA, 75 bp, synthetic construct
  source 1..75: mol_type = other DNA
acaagaatcgccagctgacccattacagcgatacccgctggcatgaagattccgttcgtaaccgctggttcagcg

SEQ ID NO: 507000 - DNA, 75 bp, synthetic construct
  source 1..75: mol_type = other DNA
attaacgtgaaataccgttatgagtttacggacatactggggctggtgacgtcattcagctatgcaggagacaag

SEQ ID NO: 507001 - DNA, 75 bp, synthetic construct
  source 1..75: mol_type = other DNA
atacccgctggcatgaagattccgtgcgtaaccggctggttcagcgtaatggcggggccgtctgtgcgcgtgaat

SEQ ID NO: 507002 - DNA, 75 bp, synthetic construct
  source 1..75: mol_type = other DNA
attaacgtgaaataccgttatgaatttacggacacgctggggctggtgacgtcattcagttatgccggagacaag

SEQ ID NO: 507003 - DNA, 75 bp, synthetic construct
  source 1..75: mol_type = other DNA
tttgtctggccgtatccggtgcgcctgcatgggcgtctgaacatcagtccacgctgagcgcgggttatcttcatg

SEQ ID NO: 507004 - DNA, 75 bp, synthetic construct
  source 1..75: mol_type = other DNA
gaacatcagtccacgctgagcgcggggtatcttcatgcctcgacgaacgtccccggcagcgatgatctgaacggg

SEQ ID NO: 507005 - DNA, 75 bp, synthetic construct
  source 1..75: mol_type = other DNA
gttcctcgaagtctatccgcaaggtttcagtggcgaaaatattactgatgccattgctgaatttgagaaaacatt

SEQ ID NO: 507006 - DNA, 75 bp, synthetic construct
  source 1..75: mol_type = other DNA
cccgattgaaatggcgtcaaaatcctgggacgaaatcatcgcgaagctggaaaaagatccgacgctgaaagcgca

SEQ ID NO: 507007 - DNA, 75 bp, synthetic construct
  source 1..75: mol_type = other DNA
tgctgtcagtgaaaataatcaggttttaggctttctccgcgaaaaaggatgcgactattgccatacgccttcggc

SEQ ID NO: 507008 - DNA, 75 bp, synthetic construct
  source 1..75: mol_type = other DNA
tcttttgccggtgattatgtgaccctcacgtcagatgagggtaaaaagcaggagcacctgacccgttcggacagc

SEQ ID NO: 507009 - DNA, 75 bp, synthetic construct
  source 1..75: mol_type = other DNA
attaacgtgaaataccgttatgagtttacggacacgctggggctgattacgtcattcagttatgccaacgctgga

SEQ ID NO: 507010 - DNA, 75 bp, synthetic construct
  source 1..75: mol_type = other DNA
tgtgcaacgtgtcatggcggtattattctcggtggacgttctttcgaaccgctgggtctgaaaaaagactttaac

SEQ ID NO: 507011 - DNA, 75 bp, synthetic construct
  source 1..75: mol_type = other DNA
gtggccgttgatgtcgcttatgaaggctccggcagtggcaactggcgcactgacgggttcatcgtgggtgtcggt

SEQ ID NO: 507012 - DNA, 75 bp, synthetic construct
  source 1..75: mol_type = other DNA
ccggggattatctccgcgtaactgacaacaaggggaaaacgcacgacgtgctgaccggaagtgatgacggtcgcc

SEQ ID NO: 507013 - DNA, 75 bp, synthetic construct
  source 1..75: mol_type = other DNA
tgcgggtgcgcccgcaggtgcagcagaacatccctccacactgagtgccgggtatcttcatattcattctgatat

SEQ ID NO: 507014 - DNA, 75 bp, synthetic construct
  source 1..75: mol_type = other DNA
ctatcaattatttaaagataataaatgtgcaacttgtcatggtggtattattctcggcggacgttcctttgaacc

SEQ ID NO: 507015 - DNA, 75 bp, synthetic construct
  source 1..75: mol_type = other DNA
ttctcggcggacgttcctttgaaccgttggggctgaaaaaagactttaactttggtgaaattacggcggcggata

SEQ ID NO: 507016 - DNA, 75 bp, synthetic construct
  source 1..75: mol_type = other DNA
gaatccgtggccattgatgtcgcttatgaaggctccggcagtggcgactggcgcactgacggtttcatcgtgggt

SEQ ID NO: 507017 - DNA, 75 bp, synthetic construct
  source 1..75: mol_type = other DNA
cccgacagaaaatatcgtggtcgacctggcttatgaagcctcaggacgtggtgactggcgtacggaggcgtttat

SEQ ID NO: 507018 - DNA, 75 bp, synthetic construct
  source 1..75: mol_type = other DNA
gtcattcagctatgcaggagacaggaatcgccagctgacccgttacagcgatacccgctggcatgaagattccgt

SEQ ID NO: 507019 - DNA, 75 bp, synthetic construct
  source 1..75: mol_type = other DNA
gatgagcaaaaaacgcattacagcgatacccgctggcatgaggattccgtgcgtaaccgctggttcagcgtgatg

SEQ ID NO: 507020 - DNA, 75 bp, synthetic construct
  source 1..75: mol_type = other DNA
tgaccgacaacaaggggaaaacgcatgatgtgctgaccggaagtgatgacggtcgccacagcaacacgtctctgg

SEQ ID NO: 507021 - DNA, 75 bp, synthetic construct
  source 1..75: mol_type = other DNA
gttcccggtagacgtctaccagggcggcgcaggtacttccgtaaacatgaacaccaacgaagggctggccaatat

SEQ ID NO: 507022 - DNA, 75 bp, synthetic construct
  source 1..75: mol_type = other DNA
cgtaaagctgtcgaattccaggacatcctgaaaatggggcgtacccagctgcaggacgcagtaccgatgaccctc

SEQ ID NO: 507023 - DNA, 75 bp, synthetic construct
  source 1..75: mol_type = other DNA
attaacgtgaaataccgttatgagtttacggacatgctgggtgttgtgacgtcattcagttatgccaatgccaaa

SEQ ID NO: 507024 - DNA, 75 bp, synthetic construct
  source 1..75: mol_type = other DNA
gggtgtggcttacagccgtgtgtcgactttctccggggattatctccgcgtaactatacagcaaataaaccaaca

SEQ ID NO: 507025 - DNA, 75 bp, synthetic construct
  source 1..75: mol_type = other DNA
tccgtggccattgatgtcgcttatgaaggctccggcagtggtgactggcgcactgacggtttcatcgtgggtgtc

SEQ ID NO: 507026 - DNA, 75 bp, synthetic construct
  source 1..75: mol_type = other DNA
acgtcattcagctatgcaggagacaagaatcgccagcttacccgttacagcgatacccgctggcatgaagattcc

SEQ ID NO: 507027 - DNA, 75 bp, synthetic construct
  source 1..75: mol_type = other DNA
tgtccgcagtcgtctgtctgtttgtctctggtgcgcctgcgtgggcgtctgagcatcagtccacactgagcgcgg

SEQ ID NO: 507028 - DNA, 75 bp, synthetic construct
  source 1..75: mol_type = other DNA
gcgatggcgggtgtggcttacagccgtgtgtcgactttctccggggattatcttcgcgtaactgacaacaagggg

SEQ ID NO: 507029 - DNA, 75 bp, synthetic construct
  source 1..75: mol_type = other DNA
cattgcggcagagctggaaggcggctgtacgaattttgttttcagtggccgacctggcacagggaaaaaccaccc

SEQ ID NO: 507030 - DNA, 75 bp, synthetic construct
  source 1..75: mol_type = other DNA
ggtgggcagtatgaacggcagtgccggtctggtgtattccccggtctaccatatcgccattcagaatgacggggc

SEQ ID NO: 507031 - DNA, 75 bp, synthetic construct
  source 1..75: mol_type = other DNA
cctgtcagccttcgctgcgctcagggagccgatctctaaagcttactacacacgcaaaataaaccaagggaaacg

SEQ ID NO: 507032 - DNA, 75 bp, synthetic construct
  source 1..75: mol_type = other DNA
atcgaactggcaagctttatgacgccaccattaccactatccaccaaccgaaagatgaactgggggagctggcga

SEQ ID NO: 507033 - DNA, 75 bp, synthetic construct
  source 1..75: mol_type = other DNA
acagaacaccccgtgtcacagccagcaccaaccacacagataaccagtcagatggccggaaatatccgggcgtta

SEQ ID NO: 507034 - DNA, 75 bp, synthetic construct
  source 1..75: mol_type = other DNA
cggtggccaatgcaaaaggcggcgtgtatacctcggcaaacctgagtgcgtacagcaacagcattgtggatacgc

SEQ ID NO: 507035 - DNA, 75 bp, synthetic construct
  source 1..75: mol_type = other DNA
aagggggaaaaatataccattgtggaagagtggtgttttggttatatgaaaggaaagtcactggatgactggtct

SEQ ID NO: 507036 - DNA, 75 bp, synthetic construct
  source 1..75: mol_type = other DNA
aggctggcttatatgtcccgcaggatatcgcggtgattggctatgacgatattgaactggcaagctttatgacgc

SEQ ID NO: 507037 - DNA, 75 bp, synthetic construct
  source 1..75: mol_type = other DNA
ctcatccaccggatagcacagccaaatctacagcaacaacgactacaacttacgccgatactgatggagcgcggc

SEQ ID NO: 507038 - DNA, 75 bp, synthetic construct
  source 1..75: mol_type = other DNA
atctcggctttgtgggagaggcgtatcagacagccagacagaattatatcaataactcactggatgcctggcgaa

SEQ ID NO: 507039 - DNA, 75 bp, synthetic construct
  source 1..75: mol_type = other DNA
catcgcggtgattggttatgacgatattgaactggcacgttatatgacgccaccgctcaccacaattcatcaacc

SEQ ID NO: 507040 - DNA, 75 bp, synthetic construct
  source 1..75: mol_type = other DNA
attgatgtactcatccatcggataacccagccgacccttcagcaacaacgattacaacttactccgattctgatg

SEQ ID NO: 507041 - DNA, 75 bp, synthetic construct
  source 1..75: mol_type = other DNA
ctttaccggaaatgacgctatggctgttggcgtttaccaggcgtttaccaggcgttatatcaggcagagttacag

SEQ ID NO: 507042 - DNA, 75 bp, synthetic construct
  source 1..75: mol_type = other DNA
atcaacctgatttgggcctggggacacccggaagtttacatcctgatcctgcctgttttcggtgtgttctccgaa

SEQ ID NO: 507043 - DNA, 75 bp, synthetic construct
  source 1..75: mol_type = other DNA
gccgcagtaacgatatccttcgccaggcttccacttattttgcgaaggcggagttcgaccgcccctggaaaaaat

SEQ ID NO: 507044 - DNA, 75 bp, synthetic construct
  source 1..75: mol_type = other DNA
acgtgcggactggcagaaaggactgcaggagggggtcagcaactgggtggacagcgcatcagattacgcttcaca

SEQ ID NO: 507045 - DNA, 75 bp, synthetic construct
  source 1..75: mol_type = other DNA
aagagaaactggcttccctgtcggcggtattacagaagcatgtgacggtggatgaggtacatccggttctgcagg

SEQ ID NO: 507046 - DNA, 75 bp, synthetic construct
  source 1..75: mol_type = other DNA
catcacgggaggcccttacctgcgcgggctggcaatgaccgacacccccgccagcctgggcacggaacgtctggc

SEQ ID NO: 507047 - DNA, 75 bp, synthetic construct
  source 1..75: mol_type = other DNA
tgccgatttcgctatcgccacggaagcacttcatttgtatgaagatttggtgatgctgccatgctatcactggaa

SEQ ID NO: 507048 - DNA, 75 bp, synthetic construct
  source 1..75: mol_type = other DNA
catacccaggcacgctacgcgttaccaaacgtcatcaaaggctttattgagcgttatccccgcgtttctttgcat

SEQ ID NO: 507049 - DNA, 75 bp, synthetic construct
  source 1..75: mol_type = other DNA
tggattactacgtgccggtggcagaaatcgaaaaactggaaaaccagcatttagatgagattactaaggcagggc

SEQ ID NO: 507050 - DNA, 75 bp, synthetic construct
  source 1..75: mol_type = other DNA
ctggcagtaccgggcgcagacttcgttctgcataacagcctgttcctgattgcacacttccataacgttatcatc

SEQ ID NO: 507051 - DNA, 75 bp, synthetic construct
  source 1..75: mol_type = other DNA
ccatcggttttatcgtcaccttctcggtgggcggtatgacaggcgtgctgctggcagtaccgggcgcggacttcg

SEQ ID NO: 507052 - DNA, 75 bp, synthetic construct
  source 1..75: mol_type = other DNA
tggacgttaacacctgtggtctgttgctgttcaccaccgacggtgaactggcaaaccgtttaatgcatccaagcc

SEQ ID NO: 507053 - DNA, 75 bp, synthetic construct
  source 1..75: mol_type = other DNA
taaccgtgaagttcgtcgtctgtgggaagcggttggtgtgcaggtaagccgcctgatccgtgttcgttacggtga

SEQ ID NO: 507054 - DNA, 75 bp, synthetic construct
  source 1..75: mol_type = other DNA
aacctcttccccgcctccgttctataactttgccgtagtgccgcacgttcacgagcgtgatgcattctgggaaat

SEQ ID NO: 507055 - DNA, 75 bp, synthetic construct
  source 1..75: mol_type = other DNA
gcgcggcgggttacgacaaaccgttcaaaaccgttgctgaaggtgtaacggaatatatggcctggctgaatcgcg

SEQ ID NO: 507056 - DNA, 75 bp, synthetic construct
  source 1..75: mol_type = other DNA
ggtggttataagagtgcaggtataaaatactacaatggtgattttaaagaaaggcatattataaagcctggggat

SEQ ID NO: 507057 - DNA, 75 bp, synthetic construct
  source 1..75: mol_type = other DNA
gtggttaatggggcgcctgacgtcacgctgagtattcagcgtgatattgcgaagcggatgcagggaggcagggaa

SEQ ID NO: 507058 - DNA, 75 bp, synthetic construct
  source 1..75: mol_type = other DNA
tttgatatgaagaaaacgctcgacagctttatggacagtgtgagtcagaagcagctgacagaggcgcagtccaaa

SEQ ID NO: 507059 - DNA, 75 bp, synthetic construct
  source 1..75: mol_type = other DNA
gatgatgacgccgcgcgtaaaggttactgcctgtacaaaatgggctgcaaagggcctaccacctataacgcctgt

SEQ ID NO: 507060 - DNA, 75 bp, synthetic construct
  source 1..75: mol_type = other DNA
gatttacagccattacctgcagactgagcacaaaaggtttgtgaagctggctgatgagctggctgccgaccgctg

SEQ ID NO: 507061 - DNA, 75 bp, synthetic construct
  source 1..75: mol_type = other DNA
agctgtatggaaggttcaagtggcagacaacgagttaacttggatcatcttaagaagttcaatgttaatctgcca

SEQ ID NO: 507062 - DNA, 75 bp, synthetic construct
  source 1..75: mol_type = other DNA
actggtggaactaccgccagaaaccagctctaaagtcgctgtagaaaaagaccgtcgtcgtatgaaggcgaatca

SEQ ID NO: 507063 - DNA, 75 bp, synthetic construct
  source 1..75: mol_type = other DNA
agcctttaaaaccatcaagttcagcggcggcgaagggatcaaccagtggtacaacgttactctgaccgaaggccg

SEQ ID NO: 507064 - DNA, 75 bp, synthetic construct
  source 1..75: mol_type = other DNA
gctgttcaccaccgacggtgaactggcaaaccgtttaatgcatccaagccgtgaagttgaacgtgaatatgccgt

SEQ ID NO: 507065 - DNA, 75 bp, synthetic construct
  source 1..75: mol_type = other DNA
ctagaagcaataagccatcacaaataattagaccattagatgattactcgacactgtctttttttgaccttgatt

SEQ ID NO: 507066 - DNA, 75 bp, synthetic construct
  source 1..75: mol_type = other DNA
tttataggtaatgtcgatgcatatcttagacagaaacatttttttggtgaaagaagtattgcttatgtgatggat

SEQ ID NO: 507067 - DNA, 75 bp, synthetic construct
  source 1..75: mol_type = other DNA
tcaacagattcattagaatataaatatattgcagagaaatatggcgcggaagtaatattacgcacaaaagaatta

SEQ ID NO: 507068 - DNA, 75 bp, synthetic construct
  source 1..75: mol_type = other DNA
tggctgcccgccgatcccggatgtgatgagcgccatcattacttacatggtgacctttgatcgcttgccagatgt

SEQ ID NO: 507069 - DNA, 75 bp, synthetic construct
  source 1..75: mol_type = other DNA
aataattgagccagttactgaattgtataacgacgttgtatgggcgtcattcaacacactgcacaataaaattaa

SEQ ID NO: 507070 - DNA, 75 bp, synthetic construct
  source 1..75: mol_type = other DNA
ggggcgtcgtgaaactaagggctatgaagagatggtgaacaacggacgtaccgcgttcgtgactgcgccgttact

SEQ ID NO: 507071 - DNA, 75 bp, synthetic construct
  source 1..75: mol_type = other DNA
gtcagaactcagcagaacttacagcattgttagaatactctcgctttaccaagaaagtgcttgcgaagcctgcta

SEQ ID NO: 507072 - DNA, 75 bp, synthetic construct
  source 1..75: mol_type = other DNA
gtgacttcgtctatgtgggcgacgtggcagatgtaaacctgtggttcctggaaaatggcgtttccggtatcttca

SEQ ID NO: 507073 - DNA, 75 bp, synthetic construct
  source 1..75: mol_type = other DNA
gttgtctggagattcagggggccagtctaataccgatatccccgctattactggtctggataattggaaggacat

SEQ ID NO: 507074 - DNA, 75 bp, synthetic construct
  source 1..75: mol_type = other DNA
gtgcctacattattcagaaaagaatatccgcgaaaaagtagagcgacagaatttttgtttctcattctgtttatc

SEQ ID NO: 507075 - DNA, 75 bp, synthetic construct
  source 1..75: mol_type = other DNA
ttctatggtcagcgtatccacgataaatgctatcgccgcgctcacttcgacgccggagagttcgtccagagttgg

SEQ ID NO: 507076 - DNA, 75 bp, synthetic construct
  source 1..75: mol_type = other DNA
tgcagtcgccagcgccgttgaccagcgcagacgtcataaccagcaacttgcagaaacagaacaacagtcgggcaa

SEQ ID NO: 507077 - DNA, 75 bp, synthetic construct
  source 1..75: mol_type = other DNA
cgccggagagttcgtccagagttgggatgatgacgctgcccgcaaaggttactgcctgtacaaaatgggctgcaa

SEQ ID NO: 507078 - DNA, 75 bp, synthetic construct
  source 1..75: mol_type = other DNA
gtgattcggtaatcggttctttcgatgattttattgttgaaaatcctgaatttacttgggattgcacagagctaa

SEQ ID NO: 507079 - DNA, 75 bp, synthetic construct
  source 1..75: mol_type = other DNA
gccgccgctacgtgactgtccgcaggacatcatgccgttaaccgagctgttcgtcgcccgctttgccgacgagca

SEQ ID NO: 507080 - DNA, 75 bp, synthetic construct
  source 1..75: mol_type = other DNA
aggctatgcggcgtcagggggttacccgacgcagttttctcaaatactgcagcctggctgccacctcgctgggat

SEQ ID NO: 507081 - DNA, 75 bp, synthetic construct
  source 1..75: mol_type = other DNA
gggtttggcattggtaggctcgccttgctggggatacagcatggcttcctgagtgagtcagttctaagagagcat

SEQ ID NO: 507082 - DNA, 75 bp, synthetic construct
  source 1..75: mol_type = other DNA
ttgtggggttgggaatatctatggtgcttgtgcgtcggtcttcacggaaggggatggatctagagctgacatggt

SEQ ID NO: 507083 - DNA, 75 bp, synthetic construct
  source 1..75: mol_type = other DNA
tcgtaaaattgagatggcgctaaaaaatctacagacatttgaagtcgttgctaatgcatggttcgcttttaaaaa

SEQ ID NO: 507084 - DNA, 75 bp, synthetic construct
  source 1..75: mol_type = other DNA
gctggatcgtttgatggaaatagcacccggtgcactcccagcaggtagcgcatcttctgatgccgctgacgattt

SEQ ID NO: 507085 - DNA, 75 bp, synthetic construct
  source 1..75: mol_type = other DNA
atggccaaaccatcaactatagccggaactgcaggcgctttggcaactgccggtactgcagcctcaacagcatca

SEQ ID NO: 507086 - DNA, 75 bp, synthetic construct
  source 1..75: mol_type = other DNA
tacaagaacagccattgcaatttgtgccttgtgcacattatgcctgtctgcggcattttctggcgcaacctggta

SEQ ID NO: 507087 - DNA, 75 bp, synthetic construct
  source 1..75: mol_type = other DNA
gcacattatgcctgtctgcggcattttctggcgcaacctggtatgttgcacaacatgaaaaagaggcaagtctgc

SEQ ID NO: 507088 - DNA, 75 bp, synthetic construct
  source 1..75: mol_type = other DNA
atggataccctcactgccggatatcagttttccgcagatgcattccggcgctttattatccggacgctgactgac

SEQ ID NO: 507089 - DNA, 75 bp, synthetic construct
  source 1..75: mol_type = other DNA
tgaatttctgagttggtgggatagtgtgcctcataagtatcaaatagctcacaatgcacttttattccagatatt

SEQ ID NO: 507090 - DNA, 75 bp, synthetic construct
  source 1..75: mol_type = other DNA
cgtgaacatgttgtgcctctctcatcacaggctattagaatcctaagaacaatgcaggaaataaaaagagggcgt

SEQ ID NO: 507091 - DNA, 75 bp, synthetic construct
  source 1..75: mol_type = other DNA
atgggaatacgcccggaagatattcatccggacgcgcaagaggaaaataacatttccgccaaaattagcgtggcg

SEQ ID NO: 507092 - DNA, 75 bp, synthetic construct
  source 1..75: mol_type = other DNA
tgaccctgcagcgggcgcaactgttgatatcagcagccaggtggcagcggcggtcgcagccgaaaacggtcgcat

SEQ ID NO: 507093 - DNA, 75 bp, synthetic construct
  source 1..75: mol_type = other DNA
ggcgaatgacctcaccgcggtgggtttttatcggctggcacatgtgttggcacaatttcgtaatacagagcgagg

SEQ ID NO: 507094 - DNA, 75 bp, synthetic construct
  source 1..75: mol_type = other DNA
ggctggaagaactggctaccctgcccgatgccacccgcaaacgcgcgcaggcgctggtcgctaaaggcatcacca

SEQ ID NO: 507095 - DNA, 75 bp, synthetic construct
  source 1..75: mol_type = other DNA
gatatcatttatattgggttgagtttgtctctttttatatttatggggcagtatactattcttgaaacaacacta

SEQ ID NO: 507096 - DNA, 75 bp, synthetic construct
  source 1..75: mol_type = other DNA
cgaggcacgggtagaagcaatgaataacggtgttttgctgtgcgaacaattattccccatgcttcagcaacaagg

SEQ ID NO: 507097 - DNA, 75 bp, synthetic construct
  source 1..75: mol_type = other DNA
ctggggagcaacagcgatggcatgacgagtgcagcagattcaatttctttatccgctgaactgcccggcgagcgc

SEQ ID NO: 507098 - DNA, 75 bp, synthetic construct
  source 1..75: mol_type = other DNA
cgcgtggcgtcagccaggcattgaagcgccatagtgacctggtggcgcaaaggtcgattaatgccaacgctattc

SEQ ID NO: 507099 - DNA, 75 bp, synthetic construct
  source 1..75: mol_type = other DNA
gctggtcagtaaaacccgctcactccagccgtattcggggatgacggggtacaacggcatcatcgcccgcctcca

SEQ ID NO: 507100 - DNA, 75 bp, synthetic construct
  source 1..75: mol_type = other DNA
ttgtattgaaggaacactttgcgaacatgtcgtactggcagtacaggcctttgtccaggccaaagcgcagcaagc

SEQ ID NO: 507101 - DNA, 75 bp, synthetic construct
  source 1..75: mol_type = other DNA
gtaagtagatgtgaagagttaaccgctgatttgggggcgatgattaatgacggacttccttcatgggccatgatc

SEQ ID NO: 507102 - DNA, 75 bp, synthetic construct
  source 1..75: mol_type = other DNA
gagtggtggacttggggaaggcggttggcagcaaacagctatccaggccgcattacgtgcgaactggatcagaca

SEQ ID NO: 507103 - DNA, 75 bp, synthetic construct
  source 1..75: mol_type = other DNA
aactatctctcatggatggatattgccgtatccggtctcccggaattaccggatatgcccttctgtgattttttc

SEQ ID NO: 507104 - DNA, 75 bp, synthetic construct
  source 1..75: mol_type = other DNA
tcagaccatcggtgattcgattatcgaaccgctgcgcgtacacggtttattgccaggtaaagaagcggctgcacg

SEQ ID NO: 507105 - DNA, 75 bp, synthetic construct
  source 1..75: mol_type = other DNA
acgggttaggtgcggtagggttatatctggcggcgatggccggcttgacgctaatcgctctgctgctgacgcatg

SEQ ID NO: 507106 - DNA, 75 bp, synthetic construct
  source 1..75: mol_type = other DNA
ctgttcccgacagaagtgcgttacaccggagcatcgttctcttacaacgtagcgtcgattctcggggcttccgtt

SEQ ID NO: 507107 - DNA, 75 bp, synthetic construct
  source 1..75: mol_type = other DNA
cgcgggaagtgcacgccgttgaaaaggttagttttgatctctggccgggtgaaacgttgtcgctggtgggggagt

SEQ ID NO: 507108 - DNA, 75 bp, synthetic construct
  source 1..75: mol_type = other DNA
tgagacgctggcaattgttggagagtccggttccggcaagtcagtcacagcactggcgttgatgcgtctgttaga

SEQ ID NO: 507109 - DNA, 75 bp, synthetic construct
  source 1..75: mol_type = other DNA
ttgccacacagtgatgagcttgaagccgatgatgtgctggctgttgataatctcaatattgcctttatgcaggac

SEQ ID NO: 507110 - DNA, 75 bp, synthetic construct
  source 1..75: mol_type = other DNA
aaggaaaaactgcgcacgcaggacggcgatccgcagaaccggttcaccgcaacgggcgcagcctccgatcaactg

SEQ ID NO: 507111 - DNA, 75 bp, synthetic construct
  source 1..75: mol_type = other DNA
aaaaacagactgcgcggactggacgctgatcaggaaagtcgttttacggcaaccggcgggcagtccagacaactg

SEQ ID NO: 507112 - DNA, 75 bp, synthetic construct
  source 1..75: mol_type = other DNA
gcaatccgagcaaattgatcgcttcagtgccgcagagcaggagcgccaggaggataaggccgctatccagaagct

SEQ ID NO: 507113 - DNA, 75 bp, synthetic construct
  source 1..75: mol_type = other DNA
gtactgggtacgttcatcatgctggcaacctatacgctgttttacatcatgacggtctactctatgaccttcagt

SEQ ID NO: 507114 - DNA, 75 bp, synthetic construct
  source 1..75: mol_type = other DNA
caacctacacgctgttttacatcatgactgtctattcaatgaccttcagcaccgccaccgcgccagtcgggcttg

SEQ ID NO: 507115 - DNA, 75 bp, synthetic construct
  source 1..75: mol_type = other DNA
ctgttgctggcgctggctcgatttggtcagggtctgggtttaggcggcgaatggggcggtgcggcgctactggcg

SEQ ID NO: 507116 - DNA, 75 bp, synthetic construct
  source 1..75: mol_type = other DNA
cgttgcgtggctactggaacgcgttggtctgttacccgaacatgcgtggcgctacccgcatgagttttccggcgg

SEQ ID NO: 507117 - DNA, 75 bp, synthetic construct
  source 1..75: mol_type = other DNA
ccgccgagaacttcaacccggatgtttacgccgcccgcgtgaacgttgagcactatctctcgccatgcccgtcaa

SEQ ID NO: 507118 - DNA, 75 bp, synthetic construct
  source 1..75: mol_type = other DNA
agggcgatctttttttacgtactttagccatgcccgccgataccaatgccaatggtgacatctttggtggttggt

SEQ ID NO: 507119 - DNA, 75 bp, synthetic construct
  source 1..75: mol_type = other DNA
ttacaaaaaatggtttaagacctgttgataagaatattctcttaactatgatgaaagaatgtaaggagagtgata

SEQ ID NO: 507120 - DNA, 75 bp, synthetic construct
  source 1..75: mol_type = other DNA
atggataccctcactgccggatatcagttttccgcagattcattccggcgctttattatccggacgctgacggac

SEQ ID NO: 507121 - DNA, 75 bp, synthetic construct
  source 1..75: mol_type = other DNA
catataaagcaaggtgttactattggtctaagaaccccttccaatgaggcaatgattactattggagataatgtt

SEQ ID NO: 507122 - DNA, 75 bp, synthetic construct
  source 1..75: mol_type = other DNA
aaggaaaaactgcgcacgcaggacggcgatccgcagaaccgcttcaccgcaacaggtgcagcctccgaccagctg

SEQ ID NO: 507123 - DNA, 75 bp, synthetic construct
  source 1..75: mol_type = other DNA
aagatttagctgaaatggatttgctggattaccaggcattgcagaaacgatttcaatccatgcttagcgtggtta

SEQ ID NO: 507124 - DNA, 75 bp, synthetic construct
  source 1..75: mol_type = other DNA
actcacgatatgggcgtggtggcagagattgccgatcgggtgctggtgatgtatcagggcgaggcggtggaaacg

SEQ ID NO: 507125 - DNA, 75 bp, synthetic construct
  source 1..75: mol_type = other DNA
gttacccgcatgagttttccggcggccagcgacagcgcatctgcattgctcgcgcgttggcattgaatccaaaag

SEQ ID NO: 507126 - DNA, 75 bp, synthetic construct
  source 1..75: mol_type = other DNA
cttattatcttgaagtgattgataaaaaataccattttgtaaaaaaaataagcagttattcaaaggagttcactg

SEQ ID NO: 507127 - DNA, 75 bp, synthetic construct
  source 1..75: mol_type = other DNA
cgggggagctggcgggcgctgggcagcatcggcggacgaaccatcttactgctgctgatcagcttctggctggta

SEQ ID NO: 507128 - DNA, 75 bp, synthetic construct
  source 1..75: mol_type = other DNA
cgtctgagctggcagagctttggcgcggtggcggcccattcactgttactggtgctagtcagcttctggctggta

SEQ ID NO: 507129 - DNA, 75 bp, synthetic construct
  source 1..75: mol_type = other DNA
ttatttttcttatattccccatcttatcttatttatattgtagttagtgcgtttgttttgattaagttcaataat

SEQ ID NO: 507130 - DNA, 75 bp, synthetic construct
  source 1..75: mol_type = other DNA
tattttaaataaattagactacacttttcgtatgtttaatgaaccagaaaaaataaagcaatctgtatttacatc

SEQ ID NO: 507131 - DNA, 75 bp, synthetic construct
  source 1..75: mol_type = other DNA
atgtcggctgaaatcagtcgtagaagtctgatgaaaacctccgcacttggcagtctcgcgctggcaagcagtgct

SEQ ID NO: 507132 - DNA, 75 bp, synthetic construct
  source 1..75: mol_type = other DNA
gagcacctgatcattcagacccgcaacgctcgcgaactggtcgatggcatcaccagcgccggttcggtatttctt

SEQ ID NO: 507133 - DNA, 75 bp, synthetic construct
  source 1..75: mol_type = other DNA
gaaacgtcaggtgagccagcgtctggacggtgcggcgatcgatatgcccgcaggcccgtcggaagtgctggtgat

SEQ ID NO: 507134 - DNA, 75 bp, synthetic construct
  source 1..75: mol_type = other DNA
cggatttccagaagcgtatgaccgtgcaggaactgtcgaaagaaggtttctccgcgctggcttcgaccattgaaa

SEQ ID NO: 507135 - DNA, 75 bp, synthetic construct
  source 1..75: mol_type = other DNA
tgattgagtttcatgaccgcttgatttcgcgtgatggtggcgtggcggggatgccagaacccggtcgcgctgacg

SEQ ID NO: 507136 - DNA, 75 bp, synthetic construct
  source 1..75: mol_type = other DNA
gaattgacggttgatgtggcggcgggaaaagtatcgttagaagatatcgttacccgcttgcgtcaacacggaacc

SEQ ID NO: 507137 - DNA, 75 bp, synthetic construct
  source 1..75: mol_type = other DNA
tcataatacgtccggaaatatggataaacttaaaattaagtttgattcattagcctctcacgatattacctttgt

SEQ ID NO: 507138 - DNA, 75 bp, synthetic construct
  source 1..75: mol_type = other DNA
ggtgctacgccagtaacacattgatcaatcaacatggcgcatcaatcacacccatgaggtgcttcaggatgacag

SEQ ID NO: 507139 - DNA, 75 bp, synthetic construct
  source 1..75: mol_type = other DNA
tatccgtcatggcgataccgtgcgggtatttaacaataacggacaaatgctgatcgccgcaaaagtgacaccgcg

SEQ ID NO: 507140 - DNA, 75 bp, synthetic construct
  source 1..75: mol_type = other DNA
atgaaggctgaaatcagccgtagaagtctggcacttggcagtcttgcgctggcaagcagtgctttcattctgcca

SEQ ID NO: 507141 - DNA, 75 bp, synthetic construct
  source 1..75: mol_type = other DNA
ccagcaagtcacgcgcccggtagcttcagttgggttgtatattcctggcggctccgccccgctcttctcaacggt

SEQ ID NO: 507142 - DNA, 75 bp, synthetic construct
  source 1..75: mol_type = other DNA
gaactacctgatccagctggataaggtcaacagtttatcgccggacagcccggattatgccaaagagttacagca

SEQ ID NO: 507143 - DNA, 75 bp, synthetic construct
  source 1..75: mol_type = other DNA
gccgagagctgaaaccgcccgccaggcactgagcgccagccgcctgattgtgaccaacgatttagcgcagtgcgt

SEQ ID NO: 507144 - DNA, 75 bp, synthetic construct
  source 1..75: mol_type = other DNA
caggcccgtcggaagtgctggtgattgctgacagcggcgcaacaccggattttgtcgcctctgatttgctctccc

SEQ ID NO: 507145 - DNA, 75 bp, synthetic construct
  source 1..75: mol_type = other DNA
catcccaaaccggatccagtgctgaggcggcccagaactcactggagagcctggcgcgttttatgcgaagcaatc

SEQ ID NO: 507146 - DNA, 75 bp, synthetic construct
  source 1..75: mol_type = other DNA
ggttaaaaggctggatggcttatgctgcgtatttgtactctgatcgcgaaaatattggtgccagtgcgaagtcat

SEQ ID NO: 507147 - DNA, 75 bp, synthetic construct
  source 1..75: mol_type = other DNA
tgcgcaaaaagataattgaaaattttcccaaaattgaagtcaccatcacaaaggtcataaaggggatcctctggc

SEQ ID NO: 507148 - DNA, 75 bp, synthetic construct
  source 1..75: mol_type = other DNA
ccgatttccagaaacgcatgaccgtgcaggaactctcccgtgaagggtttgcctcgctggcgtccaccatcgaga

SEQ ID NO: 507149 - DNA, 75 bp, synthetic construct
  source 1..75: mol_type = other DNA
gctccgccccgcttttctcaaccgtattaatgttggccaccccggcgcgtattgccggttgccagaaagtggtgc

SEQ ID NO: 507150 - DNA, 75 bp, synthetic construct
  source 1..75: mol_type = other DNA
tgactaaagatttagcgcagtgcgtaacgatttccaaccagtacggcccggagcacctgatcattcagacccgca

SEQ ID NO: 507151 - DNA, 75 bp, synthetic construct
  source 1..75: mol_type = other DNA
aaaacgccaggtaagccagcgtcttgacggtgcggctatcgatatgcccgcaggcccgtcggaagtgttggtgat

SEQ ID NO: 507152 - DNA, 75 bp, synthetic construct
  source 1..75: mol_type = other DNA
attgcaggctgtaaaaaagtggtgctgtgctcaccgccgccgattgccgatgagatcctttacgcggcgcagctg

SEQ ID NO: 507153 - DNA, 75 bp, synthetic construct
  source 1..75: mol_type = other DNA
ataaaaccaaggttaccgcgctgaaagtgtctgctgaagaaatcgccgcagcctgcgaacgcctgagcgacgacc

SEQ ID NO: 507154 - DNA, 75 bp, synthetic construct
  source 1..75: mol_type = other DNA
tttgaagtgggggattacatttacatccctggcattaaagcggcgctggataatcctggaacgacgtttaaaggt

SEQ ID NO: 507155 - DNA, 75 bp, synthetic construct
  source 1..75: mol_type = other DNA
aacagccgtatgaacacgaccgtggcgcagcgcattcccggcctgaactgggacccgaaacatcgtctgagcagt

SEQ ID NO: 507156 - DNA, 75 bp, synthetic construct
  source 1..75: mol_type = other DNA
atcagcggtgagccgctgtatacagtgatgtacgaaatcccgtttatcgtgcgggaaacacctgagcatgttcgt

SEQ ID NO: 507157 - DNA, 75 bp, synthetic construct
  source 1..75: mol_type = other DNA
ttgctgaaggacgaaaacgcagcgaggagattaaccgcctgaatcatcaggtgcgggttgaaaaaatcctgaacc

SEQ ID NO: 507158 - DNA, 75 bp, synthetic construct
  source 1..75: mol_type = other DNA
acaaagcggatggtatgctggttgggccatacagtaattatggacctggctttgattatgtcggcggcaccggtt

SEQ ID NO: 507159 - DNA, 75 bp, synthetic construct
  source 1..75: mol_type = other DNA
ccgggaaacacctgagcatattcgtgttgctgaacgctggcaggtgccaaataagctggctgatcggagtggtgt

SEQ ID NO: 507160 - DNA, 75 bp, synthetic construct
  source 1..75: mol_type = other DNA
gagagagacgccggagtctgtgcgtcaggcagaacgctggcaggtcccgaacaagctgacacaccggagccacgg

SEQ ID NO: 507161 - DNA, 75 bp, synthetic construct
  source 1..75: mol_type = other DNA
tcacaggaagtgctcattcgggaactaccgggtgcagaacgacggtcagcgccatgctctgagtcaggcaaaatc

SEQ ID NO: 507162 - DNA, 75 bp, synthetic construct
  source 1..75: mol_type = other DNA
cgccagatccgggtggaaaaaattctgaatcgttccggtatccagccgttgcaccagaaatgttcgtttgcgaat

SEQ ID NO: 507163 - DNA, 75 bp, synthetic construct
  source 1..75: mol_type = other DNA
tgaaatcggaatgcagcgggatacgcgcaacgagcaggtcacactgaaccagatagtcgaccgcagaactgcttc

SEQ ID NO: 507164 - DNA, 75 bp, synthetic construct
  source 1..75: mol_type = other DNA
cgtgttgcatgacagctacgacaacggcaaatccggggaaaaatttttacaggagctttgcagtgttgatttgct

SEQ ID NO: 507165 - DNA, 75 bp, synthetic construct
  source 1..75: mol_type = other DNA
ttgcgaggagatcaaccgtctgaatcaccagttgcgggtggaaaaaatcctgaatcgttcgggcatccagcctct

SEQ ID NO: 507166 - DNA, 75 bp, synthetic construct
  source 1..75: mol_type = other DNA
gtgcatgtgagtatctctaatgaaggcgctgatacttacctcttcgggccaggaatcgatgattctgttgattta

SEQ ID NO: 507167 - DNA, 75 bp, synthetic construct
  source 1..75: mol_type = other DNA
ttggagcgaactgtgggcgcagcgcaatatcttcaacgctcagcatgacgccatgattgcagcaaacaaagcaaa

SEQ ID NO: 507168 - DNA, 75 bp, synthetic construct
  source 1..75: mol_type = other DNA
atgatgtggtctccatacttcgggtcttactggaagtactgaacactttcgcgtcaagttctccgaagttcattc

SEQ ID NO: 507169 - DNA, 75 bp, synthetic construct
  source 1..75: mol_type = other DNA
atttaatagataactattgcaggaattataacaaggaaaataaaaaggaaatttattcttgctggtattatatac

SEQ ID NO: 507170 - DNA, 75 bp, synthetic construct
  source 1..75: mol_type = other DNA
gctgtcagctttttgggcaaaaattggatcgcctgcgcaaccataccgccgcacaattgattaacggctttaatt

SEQ ID NO: 507171 - DNA, 75 bp, synthetic construct
  source 1..75: mol_type = other DNA
cgagttggtaaaacagctgcttaatgacacctgggatatcgactatccgggagttgttgcggtgcatctgaccgg

SEQ ID NO: 507172 - DNA, 75 bp, synthetic construct
  source 1..75: mol_type = other DNA
gaaacagcgttgttggtgttgtgaataaatctttcggaaaagtattaaccgaccagaggaatacatctttgaacc

SEQ ID NO: 507173 - DNA, 75 bp, synthetic construct
  source 1..75: mol_type = other DNA
gtggtgtctgaggttggagctttgagtctgaccagcaggcttgaggagaccatgagtttatcttgttatggattg

SEQ ID NO: 507174 - DNA, 75 bp, synthetic construct
  source 1..75: mol_type = other DNA
aaccgcctataaagcagtggatgggacagtcagtaaaggggtggaatttgaactcaacggcgcaattaccgacaa

SEQ ID NO: 507175 - DNA, 75 bp, synthetic construct
  source 1..75: mol_type = other DNA
aacctacgataccaacgtggaaggttctatcgtctacggcacaccgcataatttcagcattaccagcacgtatca

SEQ ID NO: 507176 - DNA, 75 bp, synthetic construct
  source 1..75: mol_type = other DNA
aacgctgttggtggcttcgcaaaagagttctggaaagaaattgataaccagatcatcgaactgaacaccgaggaa

SEQ ID NO: 507177 - DNA, 75 bp, synthetic construct
  source 1..75: mol_type = other DNA
cgttactggaagcgttgcctgaacctgtgctctctgtcgatatgaaaagcaaagtggatatggcgaacccggcga

SEQ ID NO: 507178 - DNA, 75 bp, synthetic construct
  source 1..75: mol_type = other DNA
tgatgtctgtgcaaaccgtattgccaatcggtaaaaccgagaaaatgtacagcgtatccggtgatattaacgatg

SEQ ID NO: 507179 - DNA, 75 bp, synthetic construct
  source 1..75: mol_type = other DNA
tcccgatgttcgcggctggttatggtgtcaactggcgtcttgctcagggtcttaatactgtaggtatcgaccttg

SEQ ID NO: 507180 - DNA, 75 bp, synthetic construct
  source 1..75: mol_type = other DNA
caaacaaggcatccagaagcgcccctgaccatgaaagaaaggataagactactccacgtcaggataatattttca

SEQ ID NO: 507181 - DNA, 75 bp, synthetic construct
  source 1..75: mol_type = other DNA
tgaacatattaagaggcaacagactactacacatcaagataatgtttttaaacgtatcactaccattttattcga

SEQ ID NO: 507182 - DNA, 75 bp, synthetic construct
  source 1..75: mol_type = other DNA
tacgcactgaatatgagaaacgagctaagtttaaccaagatgactacaagccaacaccggatgagattagacgtt

SEQ ID NO: 507183 - DNA, 75 bp, synthetic construct
  source 1..75: mol_type = other DNA
aagaagcggtagtcgcaccggtggttgaagaaactgtcgctgccgaaccaattgttcaggaagcgccagctccac

SEQ ID NO: 507184 - DNA, 75 bp, synthetic construct
  source 1..75: mol_type = other DNA
taagtcgttttcgtaaaaataaacgccgcctgcgcgagcgtttgcgtcagcgtattttttcagagataaagtggt

SEQ ID NO: 507185 - DNA, 75 bp, synthetic construct
  source 1..75: mol_type = other DNA
ggcaatgatcagccaattctagatattagcgttgaaaacggaacagacaaagcggttgccagagtattcttcaaa

SEQ ID NO: 507186 - DNA, 75 bp, synthetic construct
  source 1..75: mol_type = other DNA
agtttttaacagtaatggcaataaaccaataggtaatgaaatgaaacgttttgcatctcgcccaaaatacgaaca

SEQ ID NO: 507187 - DNA, 75 bp, synthetic construct
  source 1..75: mol_type = other DNA
cagaggggttaaatcctatcgtgataaatccaaagtcagtaaggttgttgctggtaagaaaccatcggtcaggat

SEQ ID NO: 507188 - DNA, 75 bp, synthetic construct
  source 1..75: mol_type = other DNA
tgcccgcgcggtatggaactggattttcttctgaacccggtggtgatgtaccaggctgttgttacagatttttaa

SEQ ID NO: 507189 - DNA, 75 bp, synthetic construct
  source 1..75: mol_type = other DNA
tacagcattgtggaatgaagttgaaagagttgagcgtcaacaaaatggtcaaacatcccgttattttgacgttgc

SEQ ID NO: 507190 - DNA, 75 bp, synthetic construct
  source 1..75: mol_type = other DNA
catgctcgtacacgtataacagatgaaagaacaggcgatacatatgattatagccgccgtactgatttatatggg

SEQ ID NO: 507191 - DNA, 75 bp, synthetic construct
  source 1..75: mol_type = other DNA
aaaaaagaaagaagctggaacgacagaaaaatgtctgtgttgtggcgtgaatcatgggcatctatggctaacagc

SEQ ID NO: 507192 - DNA, 75 bp, synthetic construct
  source 1..75: mol_type = other DNA
aaactgctgaggttgtggttgctgaacctgaagttgttgctcaacctgccgcgccagtcgtcgctgaagtcgcag

SEQ ID NO: 507193 - DNA, 75 bp, synthetic construct
  source 1..75: mol_type = other DNA
acattcagtgagctaccactggagatcgtggttgatgtcagaagctttacgattacacatcctgctgaacccgaa

SEQ ID NO: 507194 - DNA, 75 bp, synthetic construct
  source 1..75: mol_type = other DNA
atgttgggtggagcggacaatccaaatggtgaattactgtcttatatcattggcgctgacactcaacgtgatcag

SEQ ID NO: 507195 - DNA, 75 bp, synthetic construct
  source 1..75: mol_type = other DNA
ccatctcttcaaaacaccagagcgatgaaacgtgctcctgtgaggagtaggaaacagaccaagccccgtcagagc

SEQ ID NO: 507196 - DNA, 75 bp, synthetic construct
  source 1..75: mol_type = other DNA
ttgataactgggagttatctgatttagcaggtaaggaggtaaataattatggtgtctcaggtattacatctgaag

SEQ ID NO: 507197 - DNA, 75 bp, synthetic construct
  source 1..75: mol_type = other DNA
tatttcacggatgttacaaaaaaataaaaataaaatagacaaagaagctgttgcgcgacgaattaaacaaaaatt

SEQ ID NO: 507198 - DNA, 75 bp, synthetic construct
  source 1..75: mol_type = other DNA
actgccagaaaaactttgtcgataagggaatgatagctgatatcgcatttcatgatctggacggtaagaatcccc

SEQ ID NO: 507199 - DNA, 75 bp, synthetic construct
  source 1..75: mol_type = other DNA
ggtttgtttaaacgtttcacactactcatcgtggacttcttgaaagagagatttgtatgggcgagaaggaaaact

SEQ ID NO: 507200 - DNA, 75 bp, synthetic construct
  source 1..75: mol_type = other DNA
atttgtatgggccagaaggaaacccgataccactgatgctgaccatgataagcgtatcgcagagaactatgtcta

SEQ ID NO: 507201 - DNA, 75 bp, synthetic construct
  source 1..75: mol_type = other DNA
atgcaacgtgttcatcgtgctaaatggaatgacattgaatcacaggaacagcgagctgctgaacaagcccagcgt

SEQ ID NO: 507202 - DNA, 75 bp, synthetic construct
  source 1..75: mol_type = other DNA
tgacgaagtattaggtcaccctgttccacgtgctgaatatgagaaacgaactaagtttaaccaagatgattgcaa

SEQ ID NO: 507203 - DNA, 75 bp, synthetic construct
  source 1..75: mol_type = other DNA
ggtttgtttaaacgttttacactgctcatcgtggacttcttgaaagagagatttgtatgggcgagaaggaaaccc

SEQ ID NO: 507204 - DNA, 75 bp, synthetic construct
  source 1..75: mol_type = other DNA
aggtctacaccacattcagtgagctaccactggagatcgttgttgatgtcagaagctttacgataacacatcttg

SEQ ID NO: 507205 - DNA, 75 bp, synthetic construct
  source 1..75: mol_type = other DNA
tcagttcagctacaacgaagaagacgaagatttaatgccgttgcaggcattcctttctcacgcggcactggaagc

SEQ ID NO: 507206 - DNA, 75 bp, synthetic construct
  source 1..75: mol_type = other DNA
ggacgcggcgcgaacctctctggaaagcctctcccggtttgttcgtaacaatcccggcgcggaaggcttcctgaa

SEQ ID NO: 507207 - DNA, 75 bp, synthetic construct
  source 1..75: mol_type = other DNA
gtcgatgccgcgctgaagatggttcgtgacctgaaagggtctgttaatgaactggcgaaagtgctggcgaaactg

SEQ ID NO: 507208 - DNA, 75 bp, synthetic construct
  source 1..75: mol_type = other DNA
tggcggagatccgcacgctgtcggtaatgaggttgcacgtcggcaacagtctgcaaatgctcaggtcatgcgaag

SEQ ID NO: 507209 - DNA, 75 bp, synthetic construct
  source 1..75: mol_type = other DNA
agctgtaatttgttgtccctgtgtgtgctggcaccggtattctgtacacccagaaagctggctgaagtttccagg

SEQ ID NO: 507210 - DNA, 75 bp, synthetic construct
  source 1..75: mol_type = other DNA
cgcctgactgacattgttacagagaaggtctcttccggcaggactgcaggcgggcatcaccaccggcatacaggg

SEQ ID NO: 507211 - DNA, 75 bp, synthetic construct
  source 1..75: mol_type = other DNA
ggccgtttttatgaaccggacacagttctggatcaccgtgaacgggtacgcctttttattcagatccagtttccg

SEQ ID NO: 507212 - DNA, 75 bp, synthetic construct
  source 1..75: mol_type = other DNA
tccggacagatgcgcgacatgtcggctatcttcaccggcgtcggccagcgcctcagcagcatgccctattatcga

SEQ ID NO: 507213 - DNA, 75 bp, synthetic construct
  source 1..75: mol_type = other DNA
cgagaagcatcgggcagactttcaatggatggctgttaggagatggcggcggatcaggcaaaacacttgcagacc

SEQ ID NO: 507214 - DNA, 75 bp, synthetic construct
  source 1..75: mol_type = other DNA
agcagttcagcaaccttctgcaggccatgtccaggaaggaaggttacggtcagtggaattccccattggccagcg

SEQ ID NO: 507215 - DNA, 75 bp, synthetic construct
  source 1..75: mol_type = other DNA
ggaaggaaggcggcaacagccttattgactggggcaagtggaaaccggaggttgatgccgcgctgaagatggttc

SEQ ID NO: 507216 - DNA, 75 bp, synthetic construct
  source 1..75: mol_type = other DNA
agagcgtctcagcgatcagcaggattattatgcaaaggccgatgctttacgtaataactggaatgcaggactcca

SEQ ID NO: 507217 - DNA, 75 bp, synthetic construct
  source 1..75: mol_type = other DNA
tctggcttgcaaacgccttcacacgaatggcgtggcggcttatacagggcgctggctctgtcattgactggtgga

SEQ ID NO: 507218 - DNA, 75 bp, synthetic construct
  source 1..75: mol_type = other DNA
tcctgggcattgttttctctccacagaaggaagttatacgaataccggaatgctaatggcgtgaaaatttctgtg

SEQ ID NO: 507219 - DNA, 75 bp, synthetic construct
  source 1..75: mol_type = other DNA
tatggaaggcagcggcgagcatagccgtttgcaggtggcattccagggccagggtattaaatggctggtggcggc

SEQ ID NO: 507220 - DNA, 75 bp, synthetic construct
  source 1..75: mol_type = other DNA
aacgtcaggaaatcaaagatgcgctctcgtatctgcgcctgatcgccaaccgtaacgatgacgcggcatttgagc

SEQ ID NO: 507221 - DNA, 75 bp, synthetic construct
  source 1..75: mol_type = other DNA
gaactcgacgaagcgcgttttgtcgttaaccgcatcaaaacctggcaggacaacggcggggcgctcgctgagtgc

SEQ ID NO: 507222 - DNA, 75 bp, synthetic construct
  source 1..75: mol_type = other DNA
ccttaatgatttccccggtgccgaaaccattcgtctggagcagaactaccgctccactagcaacattctgagcgc

SEQ ID NO: 507223 - DNA, 75 bp, synthetic construct
  source 1..75: mol_type = other DNA
gccattctctaccgcagcaacgcccagtcgcgtgtgctggaagaggcgttattgcaggcgagtatgccgtatcgt

SEQ ID NO: 507224 - DNA, 75 bp, synthetic construct
  source 1..75: mol_type = other DNA
cggtgaacatagccgtttgcaggtggcgttccagggccagggtattaaatggctggtggcggcttacgcccggct

SEQ ID NO: 507225 - DNA, 75 bp, synthetic construct
  source 1..75: mol_type = other DNA
atcatttttttagcgctaccaaatcttatatattttgcccgctcatcattatttgattttattactaaggtttga

SEQ ID NO: 507226 - DNA, 75 bp, synthetic construct
  source 1..75: mol_type = other DNA
atacaaaaaatttattatattaggtcaggtttcagtatttgaggctgacgcatatggactacatgatgagttatt

SEQ ID NO: 507227 - DNA, 75 bp, synthetic construct
  source 1..75: mol_type = other DNA
cgctgtaatttgttgtccctgtgtgtgctggccccggtattctgtacccccaaaaagctggcagaagtctccaga

SEQ ID NO: 507228 - DNA, 75 bp, synthetic construct
  source 1..75: mol_type = other DNA
aactgacgctgacctacgcggaaactcgccgtctgtatggcaaagaggtttaccatcgcccgtcgcgctttatcg

SEQ ID NO: 507229 - DNA, 75 bp, synthetic construct
  source 1..75: mol_type = other DNA
gaagatttaatgccgctgcaggctttcctctcgcatgcggcactggaagcgggtgaagggcaggcggatacctgg

SEQ ID NO: 507230 - DNA, 75 bp, synthetic construct
  source 1..75: mol_type = other DNA
tattggtgaccggacgctggacgtggtgcgtcaggcatcgcgcgatcgacagttaacgctgtggcaagcgtgccg

SEQ ID NO: 507231 - DNA, 75 bp, synthetic construct
  source 1..75: mol_type = other DNA
tctcgtcgaagtgctccaacgtcagtgtcacaattaatagatcatcaggcaattaatttgtatcttcccacatcg

SEQ ID NO: 507232 - DNA, 75 bp, synthetic construct
  source 1..75: mol_type = other DNA
tgatggcgtttgtcgttgttgcagaggagcgtagcttcactcgcgcagcagcccgcctgagcatggcgcagtcag

SEQ ID NO: 507233 - DNA, 75 bp, synthetic construct
  source 1..75: mol_type = other DNA
tctcgccgaagtgttccaacgtcagtgtcacaattaatagatcatcaggcaattaatttgtatcttcccacatcg

SEQ ID NO: 507234 - DNA, 75 bp, synthetic construct
  source 1..75: mol_type = other DNA
ttatctgagtctgcataacgccactcatcaccaggcgatcaaccatcaggcgatcgatcaggtcgtactgatcaa

SEQ ID NO: 507235 - DNA, 75 bp, synthetic construct
  source 1..75: mol_type = other DNA
ggcagaccgccgcgaactcatcatcctcgacgactccccgcaaagccatcaacacatcatcgaccgcctgaccaa

SEQ ID NO: 507236 - DNA, 75 bp, synthetic construct
  source 1..75: mol_type = other DNA
gttatcagcgaccgggctttagcgatatccagaaaaaacgactgataatattgctcgctatttcaataagttacc

SEQ ID NO: 507237 - DNA, 75 bp, synthetic construct
  source 1..75: mol_type = other DNA
atggcaattgttggcgcgccggattatctctcgcgaaaaggtattccagtgtctgtggcgcacctggtcgatcat

SEQ ID NO: 507238 - DNA, 75 bp, synthetic construct
  source 1..75: mol_type = other DNA
aatgtcgccacaaccgaaatcattaaagcaactgaagaaagtaacggccatcgtgtcagtctgccgttatcggtt

SEQ ID NO: 507239 - DNA, 75 bp, synthetic construct
  source 1..75: mol_type = other DNA
ttttatggctgctgcaaaaagcatggaccgtaatggctctcagttaatccgggattttatgcgtcagaccgttga

SEQ ID NO: 507240 - DNA, 75 bp, synthetic construct
  source 1..75: mol_type = other DNA
ggacgcctggggtaaagcctatggcgtgctggcgaatgtgtttatcaatcgcgaggcagagatttataacgagaa

SEQ ID NO: 507241 - DNA, 75 bp, synthetic construct
  source 1..75: mol_type = other DNA
tcgtattgcggtgaaacgcgaagagggtgggcaggtatccaactggttgcacaatcacgccaatgttggcgatgt

SEQ ID NO: 507242 - DNA, 75 bp, synthetic construct
  source 1..75: mol_type = other DNA
cgttaagctggtggctccggctggtgatttctttatggatgtagcgaatgacacgccagtgaccttaatctctgc

SEQ ID NO: 507243 - DNA, 75 bp, synthetic construct
  source 1..75: mol_type = other DNA
gattttctccctctccctgtgggagagggtcggggtgagggcatcagcgcgcacgttcatcacattcacacatta

SEQ ID NO: 507244 - DNA, 75 bp, synthetic construct
  source 1..75: mol_type = other DNA
actctacatcaacagaaaagcgtgggatgaagcatgcgatcgcctcatcgaaaacgcacctcaggaatggcacga

SEQ ID NO: 507245 - DNA, 75 bp, synthetic construct
  source 1..75: mol_type = other DNA
catcggcgaacccgaagtcttttactgcaagcccgcggatgactatttaccccagccaggagcagtattaattac

SEQ ID NO: 507246 - DNA, 75 bp, synthetic construct
  source 1..75: mol_type = other DNA
ttcgcggaagccgaaccgtttacaccttcagataacgtggatgcacagctttataatggctttttcagtgacgcc

SEQ ID NO: 507247 - DNA, 75 bp, synthetic construct
  source 1..75: mol_type = other DNA
ctaaatcgggtaaaagcgcaattgttgaagtgctatcgcccggtcaacgcccgactaaacgcggattaatttacg

SEQ ID NO: 507248 - DNA, 75 bp, synthetic construct
  source 1..75: mol_type = other DNA
actctgacgaacttatcaaagataaaaataccacttagccatgataatcccattgcatcggtagttcttcccggt

SEQ ID NO: 507249 - DNA, 75 bp, synthetic construct
  source 1..75: mol_type = other DNA
cctgtcatggccggttgattctgcagacagatgctcagggggcgtggtttgagcatgatttacatgccctgagtg

SEQ ID NO: 507250 - DNA, 75 bp, synthetic construct
  source 1..75: mol_type = other DNA
gcgcctggcgcaacggcagggctggcaaaactaccttttactggaagatgacgcggtcattctcaagcaggagaa

SEQ ID NO: 507251 - DNA, 75 bp, synthetic construct
  source 1..75: mol_type = other DNA
ttaaaccatttctggatgaaatgctggcgacgctaaaaagcatcgacgatccgcagctcaaaggaatgcgcttat

SEQ ID NO: 507252 - DNA, 75 bp, synthetic construct
  source 1..75: mol_type = other DNA
cagcagatgagcagcgatgagcactcgctggaagacggctggcagccactgctacgcgccgacaaatggctggcc

SEQ ID NO: 507253 - DNA, 75 bp, synthetic construct
  source 1..75: mol_type = other DNA
atatcgctccagtgactcccggtgtggctgtcgatctgagccatatccctactgctgtgaaaatcaaaggttttt

SEQ ID NO: 507254 - DNA, 75 bp, synthetic construct
  source 1..75: mol_type = other DNA
agtttgccggggctggtgcacgcgcgggactgccgcaaagtgtgcgcttatctggtgaacagccgctactacccg

SEQ ID NO: 507255 - DNA, 75 bp, synthetic construct
  source 1..75: mol_type = other DNA
gcggtgatgtgaacctgatttgcaaactgcaccacggtacctgctcgcgcccggaagaagccgcatcgctgaccc

SEQ ID NO: 507256 - DNA, 75 bp, synthetic construct
  source 1..75: mol_type = other DNA
cttccccatgacatggtcgaatcttctgctgctgcatggcgggatgaaatgagcaggaaggtcgccggtaaatga

SEQ ID NO: 507257 - DNA, 75 bp, synthetic construct
  source 1..75: mol_type = other DNA
tcgcagtacggtgacaccgggcggtgcagcatgcaaatataacgacatcattccggcggaccattgtctgcatga

SEQ ID NO: 507258 - DNA, 75 bp, synthetic construct
  source 1..75: mol_type = other DNA
ctctagttgttccgctgtcatttacacgaaactttggtaaagaaccagcattgtttgcagggttagaccatgcaa

SEQ ID NO: 507259 - DNA, 75 bp, synthetic construct
  source 1..75: mol_type = other DNA
cttatcggcattggcgttcttggagagtacattggaaggatttacgtcgaggttaaacaaagacccaaatatata

SEQ ID NO: 507260 - DNA, 75 bp, synthetic construct
  source 1..75: mol_type = other DNA
ctggttccgtgaccaggttgaggcaggacgccagcaactcgggcgcggtgatgtgcttccccatgacatggtcga

SEQ ID NO: 507261 - DNA, 75 bp, synthetic construct
  source 1..75: mol_type = other DNA
atggcacaggttaatatgagtttaagaatcgacgctgaactgaaggatgcttttatggccgctgcaaaaagcatg

SEQ ID NO: 507262 - DNA, 75 bp, synthetic construct
  source 1..75: mol_type = other DNA
acgacctgcgtcatgccacgctggtagccctgcctgttccgggacatggtgcaggcgaaccgattggaatactga

SEQ ID NO: 507263 - DNA, 75 bp, synthetic construct
  source 1..75: mol_type = other DNA
cttattggcattggggtgcttggtgagtacatcgggaggatttacaccgaatccaagaacaggcctagatatatt

SEQ ID NO: 507264 - DNA, 75 bp, synthetic construct
  source 1..75: mol_type = other DNA
tcttcaatgaagaggccacgataccgattttctataaaacggtgcgagagttcgaggggctaaagcaatacgatg

SEQ ID NO: 507265 - DNA, 75 bp, synthetic construct
  source 1..75: mol_type = other DNA
tgtcgacttacaagatccgattgaagttatacctcatctgattgagaagtggcaggcaggcgcggacatggtgct

SEQ ID NO: 507266 - DNA, 75 bp, synthetic construct
  source 1..75: mol_type = other DNA
tgtctcgcgaggtggtggaaaacattaagctcatgccagagcgcaacctgtttatgaagggcgtgctgagctggg

SEQ ID NO: 507267 - DNA, 75 bp, synthetic construct
  source 1..75: mol_type = other DNA
gagggtacccatcacttctcgtctcaattctatttttaggcggcatccaacttatcggcattggcgttcttggag

SEQ ID NO: 507268 - DNA, 75 bp, synthetic construct
  source 1..75: mol_type = other DNA
gaggttatccatccctgctagtatctatacttttccttggtggtatccaactcattggtattggtgttcttggtg

SEQ ID NO: 507269 - DNA, 75 bp, synthetic construct
  source 1..75: mol_type = other DNA
cttccccatgacatggtcgaatcttccgctgctgcatggcgggatgaaatgagcaggaaggttgccggtaaatga

SEQ ID NO: 507270 - DNA, 75 bp, synthetic construct
  source 1..75: mol_type = other DNA
ctcattaggttcattatcttttgatgtcacacgatctgatgctcagttgcataatcaggataaagaaacgggtta

SEQ ID NO: 507271 - DNA, 75 bp, synthetic construct
  source 1..75: mol_type = other DNA
ggggtgacaaatcttgttttattcaaccacccaatagcagcaacttaaccaccggaacggttattttaccgtgta

SEQ ID NO: 507272 - DNA, 75 bp, synthetic construct
  source 1..75: mol_type = other DNA
attccttatctgacgcgtaaagggcagattcgctacaccactgctatgggtaaaccgaccagcgttggtggtgat

SEQ ID NO: 507273 - DNA, 75 bp, synthetic construct
  source 1..75: mol_type = other DNA
cattcacggcgactcgtcacggagccgctttccatgactatagtggtagtgctgactcgcgttttatgatcgacg

SEQ ID NO: 507274 - DNA, 75 bp, synthetic construct
  source 1..75: mol_type = other DNA
accactggggattagcgtaaaagatgaaaccagccacaaagaattaggactggttgctgatggcggctttgtata

SEQ ID NO: 507275 - DNA, 75 bp, synthetic construct
  source 1..75: mol_type = other DNA
aactcagcaaaacctgatcgatggttgttaccctatcgaaaaagaaaaacaaattacaacttatctcgataaagg

SEQ ID NO: 507276 - DNA, 75 bp, synthetic construct
  source 1..75: mol_type = other DNA
aactcgaacgcggtgatatgctttcccatgacatggtcgaatcttctgctgctgcatggcgggatgaaatgagca

SEQ ID NO: 507277 - DNA, 75 bp, synthetic construct
  source 1..75: mol_type = other DNA
agaccgtggaacggcagcataatacctggttccgtgaccaggttgaggcaggacgtcagcaactcgagcgcggcg

SEQ ID NO: 507278 - DNA, 75 bp, synthetic construct
  source 1..75: mol_type = other DNA
gaccgtaatggctctcagttaatccgggattttatgcgccagaccgttgaacggcagcacaattcttggttccgt

SEQ ID NO: 507279 - DNA, 75 bp, synthetic construct
  source 1..75: mol_type = other DNA
atgtgcttccccatgacatggtcgaatcttccgctgctgcatggcgggatgaaatgagcaggaaggtcgccggta

SEQ ID NO: 507280 - DNA, 75 bp, synthetic construct
  source 1..75: mol_type = other DNA
gaccaggttgcggcaggacgtcagcaactcgagcgcggcgatgtgcttccccatgacatggtcgaatcttctgcc

SEQ ID NO: 507281 - DNA, 75 bp, synthetic construct
  source 1..75: mol_type = other DNA
gggattttatgcgccagaccgtggaacggcagcataatacctggttccgtgaccaggttgaggcaggacgtcagc

SEQ ID NO: 507282 - DNA, 75 bp, synthetic construct
  source 1..75: mol_type = other DNA
aatttgaacgcattcagtccggggaattatcagcaataccgcatcagcttattatggataaaatttatgatgttt

SEQ ID NO: 507283 - DNA, 75 bp, synthetic construct
  source 1..75: mol_type = other DNA
tttttgtctcttttttcagcatatttcctttcatcaatattctgggcattcctggtaacaggcaccagtatttca

SEQ ID NO: 507284 - DNA, 75 bp, synthetic construct
  source 1..75: mol_type = other DNA
attcacggcgcaatggttgaaacgaatatgagcgaaaaaacactctctatcgaaatgaataaattaaagcaggca

SEQ ID NO: 507285 - DNA, 75 bp, synthetic construct
  source 1..75: mol_type = other DNA
ccccctggtatgtctttttccgccgtggattaattaccgatctctctaacccgcaaaccgttttattttttatca

SEQ ID NO: 507286 - DNA, 75 bp, synthetic construct
  source 1..75: mol_type = other DNA
gtgcgtcgtgcttatgggcgtatgcaacgcgttgccagtcgggttattggtgcaattattggtgtattcgcgcta

SEQ ID NO: 507287 - DNA, 75 bp, synthetic construct
  source 1..75: mol_type = other DNA
catcaaagtccgcatcccgcagaaagtctggaacgggcagcacttcgatgctcaggacctggtacgggtcagtgg

SEQ ID NO: 507288 - DNA, 75 bp, synthetic construct
  source 1..75: mol_type = other DNA
ggtacagcaaatcgctggagattaatacgcggtggacgtgaagttcgtgttcgcatggaaggtcagcttggtgat

SEQ ID NO: 507289 - DNA, 75 bp, synthetic construct
  source 1..75: mol_type = other DNA
ggtacagcaaatcgctggagattaatacgcggtggacgtgaagttctgatgaatcccctaatgatttttatcaaa

SEQ ID NO: 507290 - DNA, 75 bp, synthetic construct
  source 1..75: mol_type = other DNA
gaacggatgccgtatttgaacttgatttcaccggtaataatttaaaatggaataagcttgctcccgtctcatcac

SEQ ID NO: 507291 - DNA, 75 bp, synthetic construct
  source 1..75: mol_type = other DNA
tggtcgtcagggggcgcaacttaccttacccggcgaacaatttttaacgcatgcagtcagagttcttgacgccat

SEQ ID NO: 507292 - DNA, 75 bp, synthetic construct
  source 1..75: mol_type = other DNA
acccgcgtagatgcgacgttctcttctggttgccagttgatgattaacgctattcgaaaatcaatgccgttctga

SEQ ID NO: 507293 - DNA, 75 bp, synthetic construct
  source 1..75: mol_type = other DNA
cgcgtcttgagccgtcggtggcggcagcgaaagcggggaaactgccggaggcgtttttctggacggatgcggaca

SEQ ID NO: 507294 - DNA, 75 bp, synthetic construct
  source 1..75: mol_type = other DNA
gaccgctcgcgaagtgatggatattgacgaagcccgggaaaaatatgctcgcgggcttgctatctcgctgacgga

SEQ ID NO: 507295 - DNA, 75 bp, synthetic construct
  source 1..75: mol_type = other DNA
ggcgaagaaagcggctccgtgtatcatctttattgatgaaatcgatgccgtaggccgccagcgtggcgcgggtct

SEQ ID NO: 507296 - DNA, 75 bp, synthetic construct
  source 1..75: mol_type = other DNA
agcggcactgttcgctgctcgtggcaacaaacgcgttgtgtcgatggttgagtttgagaaagcgaaagacaaaat

SEQ ID NO: 507297 - DNA, 75 bp, synthetic construct
  source 1..75: mol_type = other DNA
ggctaagaaagcggcaccgtgcatcatctttatcgatgaaatcgacgccgtaggccgccagcgtggcgctggtct

SEQ ID NO: 507298 - DNA, 75 bp, synthetic construct
  source 1..75: mol_type = other DNA
tgtggaagtgaactgcgccaccctgcgcggcgataccgccatgtcgacgctgtttggtcatgtgaaaggcgcgtt

SEQ ID NO: 507299 - DNA, 75 bp, synthetic construct
  source 1..75: mol_type = other DNA
ctggctggtcacagggatccacgttcgatggaggtttataccagagtttttgcgctggatatggctgccacgctg

SEQ ID NO: 507300 - DNA, 75 bp, synthetic construct
  source 1..75: mol_type = other DNA
cggccccgtcgtcgtgaaccattatgggccgtgactgacgaaaccatgcgcaactggctgaagcaggctgtcaga

SEQ ID NO: 507301 - DNA, 75 bp, synthetic construct
  source 1..75: mol_type = other DNA
gctatgccgcagctatcaatgccgcgatggcgattgtaaacctgcgtgaagagattaaagatctccttgcaatta

SEQ ID NO: 507302 - DNA, 75 bp, synthetic construct
  source 1..75: mol_type = other DNA
gagcttccggcaaaagttgtcgaactgccttatcagaaagcgaaagcgacaaaaggtgaagtgaagggcaatatc

SEQ ID NO: 507303 - DNA, 75 bp, synthetic construct
  source 1..75: mol_type = other DNA
ctgaatatggataatttcgcgcagaaacatcaggttgcgtctggtgctgactggaatattgatgtgaagaagtga

SEQ ID NO: 507304 - DNA, 75 bp, synthetic construct
  source 1..75: mol_type = other DNA
ggtgaacgaagcggcactgtttgcggcacgtggcaacaaacgcgttgtatcaatggttgaattcgaaaaagcgaa

SEQ ID NO: 507305 - DNA, 75 bp, synthetic construct
  source 1..75: mol_type = other DNA
ggtgaacgaagctgcactgttcgcagctcgtggcaataaacgcgttgtgtcgatggttgagttcgagaaagcgaa

SEQ ID NO: 507306 - DNA, 75 bp, synthetic construct
  source 1..75: mol_type = other DNA
attggcacccgatatcgacgcggcaatcattgcccgtggtactcctggtttctccggtgctgacctggcgaacct

SEQ ID NO: 507307 - DNA, 75 bp, synthetic construct
  source 1..75: mol_type = other DNA
cggtgaaactgcaggcggcaaagcagtgatggattcagttttaatttctgtgaaggataataaagtcacagtaca

SEQ ID NO: 507308 - DNA, 75 bp, synthetic construct
  source 1..75: mol_type = other DNA
tgcgttttctggcgtaacggcaaacccggcggttgggtatgcgtctgatctactggtgcgctgcggcgcaacggt

SEQ ID NO: 507309 - DNA, 75 bp, synthetic construct
  source 1..75: mol_type = other DNA
ggaacggatgatgtgcaagctattccagtagaaagcgccagcattgtcagtttgcaggatgaaaagcatgtcggt

SEQ ID NO: 507310 - DNA, 75 bp, synthetic construct
  source 1..75: mol_type = other DNA
attattgatgtgatactaaaacacccacgattcgaaaaatacacactctggttaatgacagataagacagcaccg

SEQ ID NO: 507311 - DNA, 75 bp, synthetic construct
  source 1..75: mol_type = other DNA
tctcaatatgggaaaaaccgaccgcagcgccaacccttcgccgggcaacgacaagggcggactcgcaaacgtggt

SEQ ID NO: 507312 - DNA, 75 bp, synthetic construct
  source 1..75: mol_type = other DNA
tctcaatatgggaaaaaccgaccgcagcgccaacccttcgccgggcaacgataacggcggtctcgcaaacgtggt

SEQ ID NO: 507313 - DNA, 75 bp, synthetic construct
  source 1..75: mol_type = other DNA
tctcaatatgggaaaaaccgaccgcagcgccaacccttcgccgggcaacgaaaagggcggcctcgcaaacgtggt

SEQ ID NO: 507314 - DNA, 75 bp, synthetic construct
  source 1..75: mol_type = other DNA
ttgaaaaacctgacgacgctgttttctctcgcccggcatcttaaccataagataatgatcgcgtttatcgatctg

SEQ ID NO: 507315 - DNA, 75 bp, synthetic construct
  source 1..75: mol_type = other DNA
ggaataccatcaggagcagcaatttgtgtttatggggttgaagaaaacatctttcgtatccatatgatcgaaagg

SEQ ID NO: 507316 - DNA, 75 bp, synthetic construct
  source 1..75: mol_type = other DNA
ccactgtgtggcaggcgtggtggactatgtagtaaaaatcattgaacgcgatctgctaccgaaatacccgaacgt

SEQ ID NO: 507317 - DNA, 75 bp, synthetic construct
  source 1..75: mol_type = other DNA
ggcgtggtgagcatctctatcaattacaacgagaacttgttgctggaacaacagttaaagcacaaatttggcctg

SEQ ID NO: 507318 - DNA, 75 bp, synthetic construct
  source 1..75: mol_type = other DNA
ccgtccatgacagccgtagcaggcttatcgatcagcatacagtcgatatgatcggcaacactatacttgatgctt

SEQ ID NO: 507319 - DNA, 75 bp, synthetic construct
  source 1..75: mol_type = other DNA
atgactgctaatgctgcacgcgctgttaaagcaacaagagaactggtcaatgcagtcccctttctgggaggcagt

SEQ ID NO: 507320 - DNA, 75 bp, synthetic construct
  source 1..75: mol_type = other DNA
tctcaatatgggaaaaaccgaccgcagcgccaacccttcgccgggcaacgagaaaggcgggctcgcaaacgtggt

SEQ ID NO: 507321 - DNA, 75 bp, synthetic construct
  source 1..75: mol_type = other DNA
gcgggattggggaaaaaattcgagctataagggatgcagaagggctatccagaactcaattctttgaattgacag

SEQ ID NO: 507322 - DNA, 75 bp, synthetic construct
  source 1..75: mol_type = other DNA
atacacgctctggcttatgactgataagaccgcccctcaagctggtcaaatcgcaccggccctcgcacacattgg

SEQ ID NO: 507323 - DNA, 75 bp, synthetic construct
  source 1..75: mol_type = other DNA
tctctcttgatggctctattcagtcggagggcgatcaggtttcaatcggtattacccaaaaatcaccccgatcag

SEQ ID NO: 507324 - DNA, 75 bp, synthetic construct
  source 1..75: mol_type = other DNA
agaatggctcacatgcttagatttgagtttagtataaatgaaaaatccccatccttttcggaagatgatatggca

SEQ ID NO: 507325 - DNA, 75 bp, synthetic construct
  source 1..75: mol_type = other DNA
tgatttaaaaaatttagctgatgaacttgggatactatcatctaagaataaaatacctgatcgcttggatttaaa

SEQ ID NO: 507326 - DNA, 75 bp, synthetic construct
  source 1..75: mol_type = other DNA
agaactcaattctttgaattgacaggtattccggcaggcactcaaaagcattacgagatggggagaagagaaggc

SEQ ID NO: 507327 - DNA, 75 bp, synthetic construct
  source 1..75: mol_type = other DNA
gcaattgttgaagtgctgtcgcccggtcaactcccgactaaacgcggattaatttacgccgcgacgccagccagg

SEQ ID NO: 507328 - DNA, 75 bp, synthetic construct
  source 1..75: mol_type = other DNA
gcaattgttgaagtgctgtcgcccggtcaacacccgactaaacgcggattaatttacgccgcgacgccagccagt

SEQ ID NO: 507329 - DNA, 75 bp, synthetic construct
  source 1..75: mol_type = other DNA
gcaattgttgaagtgctgtcgcccggtcaacacccgactaaacgcgtattaatttacgccgcgacgccagccagg

SEQ ID NO: 507330 - DNA, 75 bp, synthetic construct
  source 1..75: mol_type = other DNA
aatatcttgttagccctgggtatgatgatggtatcgccggttacaatttcgataccttttaaaatcctgttattc

SEQ ID NO: 507331 - DNA, 75 bp, synthetic construct
  source 1..75: mol_type = other DNA
tattgcgatagatttgatcatttccaatatcttattggccttgggtatgatgatggtatcgccagtaacaatttc

SEQ ID NO: 507332 - DNA, 75 bp, synthetic construct
  source 1..75: mol_type = other DNA
ctgctggaggagatggagtggtacgataactatctcaatatgggaaaaaccgaccgcagcgccaacccttcgccg

SEQ ID NO: 507333 - DNA, 75 bp, synthetic construct
  source 1..75: mol_type = other DNA
tgaagccgtcggatggagaaggcgcagttatcagcaccaccagcaacccggagtattactttgttgttgccctgg

SEQ ID NO: 507334 - DNA, 75 bp, synthetic construct
  source 1..75: mol_type = other DNA
gccgggctcactggtgccgaatcagtttgccctgggtatttactggcagttgtcgtccctgccggagggagtgac

SEQ ID NO: 507335 - DNA, 75 bp, synthetic construct
  source 1..75: mol_type = other DNA
agaaaggtggacgtgtgagcgtgcggtttaaggtgccgggcgcactggtgccgaatcagtttgccctgggtattt

SEQ ID NO: 507336 - DNA, 75 bp, synthetic construct
  source 1..75: mol_type = other DNA
gcgccagcaggtgccaacattgaacagttcatttttgcgggtaaaacaatatactaccgtaatggactttgtgtg

SEQ ID NO: 507337 - DNA, 75 bp, synthetic construct
  source 1..75: mol_type = other DNA
ggtgatcggcagttcgccgcaaatgtggctgaatctgcaaaacgcctggagtctggcagaggcagaaaaaacggt

SEQ ID NO: 507338 - DNA, 75 bp, synthetic construct
  source 1..75: mol_type = other DNA
gtactggatgagaaacgggggacgccgttcacactggtgaaatctccggcatcaggggcggcggacaaactgcaa

SEQ ID NO: 507339 - DNA, 75 bp, synthetic construct
  source 1..75: mol_type = other DNA
agaacccgaaaaatgtgctgtttgccgtggtgtggatgcagggggaatttgattttggcggtacgccggcaaatc

SEQ ID NO: 507340 - DNA, 75 bp, synthetic construct
  source 1..75: mol_type = other DNA
caaaacggaaaagaatatccatttcgtaccgttcatgacggatgagaacggggtgaatgtgccgacgaacaaacc

SEQ ID NO: 507341 - DNA, 75 bp, synthetic construct
  source 1..75: mol_type = other DNA
gtgaacatatgactctcgaagggatggccaaactttactgtcgtggcctcgatgatcagtggccggaagaagcta

SEQ ID NO: 507342 - DNA, 75 bp, synthetic construct
  source 1..75: mol_type = other DNA
atggcatttaaacactacgatgtggtcagggcggcgtcgccgtcagaccttgcggagcgactgactcaaaaactg

SEQ ID NO: 507343 - DNA, 75 bp, synthetic construct
  source 1..75: mol_type = other DNA
ttccgaccgtctggcaacggcgattctggtgcatgccgggagaaccgctgaattcattaccggaaaacagcctga

SEQ ID NO: 507344 - DNA, 75 bp, synthetic construct
  source 1..75: mol_type = other DNA
cgaccatgcacgctctgttaaatgagccactcaccgccggtatcagcaccccgctgacatccaccattctggagt

SEQ ID NO: 507345 - DNA, 75 bp, synthetic construct
  source 1..75: mol_type = other DNA
attacagtaacgactggcagacgctggagctggtgttcaccgccggcagtgccacggttactccgaaactgaatg

SEQ ID NO: 507346 - DNA, 75 bp, synthetic construct
  source 1..75: mol_type = other DNA
gtactggcgctgaactgctgaaaaatggaggtttaatcagttgccgctttaaggcatccggtgaactggtggcaa

SEQ ID NO: 507347 - DNA, 75 bp, synthetic construct
  source 1..75: mol_type = other DNA
tgtgacagacattaccaggaatgcgacttacccggtactgatagacagcattgtggtggaagtgaacagcacaga

SEQ ID NO: 507348 - DNA, 75 bp, synthetic construct
  source 1..75: mol_type = other DNA
accggcatcgggggcggcggacaaactgcaactgaccgatatatcaaaatcggcgacgtatacgctgctgattga

SEQ ID NO: 507349 - DNA, 75 bp, synthetic construct
  source 1..75: mol_type = other DNA
gatggcacatacagtgacactactggcgcctcagagagttccacccgctggggggtggacaagccgctgtataag

SEQ ID NO: 507350 - DNA, 75 bp, synthetic construct
  source 1..75: mol_type = other DNA
agacggtgtatggtagttacaaaaataaaacggaaaagaatatccatttcgtgccgttcatgaccgatgagaacg

SEQ ID NO: 507351 - DNA, 75 bp, synthetic construct
  source 1..75: mol_type = other DNA
tatcacaaaccggcgggcggagacagtgttaacaaaaacattgctgaagcggtggtcagtgatgcgggggctacg

SEQ ID NO: 507352 - DNA, 75 bp, synthetic construct
  source 1..75: mol_type = other DNA
acagggctggagtgctggcggaggtaaagcggaaattgttgccgatgaaggtgcaacaggtggtaccgcgatgaa

SEQ ID NO: 507353 - DNA, 75 bp, synthetic construct
  source 1..75: mol_type = other DNA
cacgctggggagccggtaaacccctgtatcaggacctgctcagtcgcaccagagcggcgctggcgaagaaccaga

SEQ ID NO: 507354 - DNA, 75 bp, synthetic construct
  source 1..75: mol_type = other DNA
ccgcagaatgccgggattcttctggtgccctgttgccgtggcgggtctggtttaaccgtgggtaatgacggcacg

SEQ ID NO: 507355 - DNA, 75 bp, synthetic construct
  source 1..75: mol_type = other DNA
gagggtgccaccggtggtaaggccctgcaactgaacaaaccggaaagccacatctggtttctggagcatgatgca

SEQ ID NO: 507356 - DNA, 75 bp, synthetic construct
  source 1..75: mol_type = other DNA
atgtcggcgtcgccgtcagatcttgcggaaaagctgacacacaaactgaaagagggctggcagccgtttggtagt

SEQ ID NO: 507357 - DNA, 75 bp, synthetic construct
  source 1..75: mol_type = other DNA
tttgaccgatattactggcacagctgaaacgtatcctgtccttattgagacaatcgaagttaaagcaaaccaggc

SEQ ID NO: 507358 - DNA, 75 bp, synthetic construct
  source 1..75: mol_type = other DNA
ggtgcacgccgggagaaccgctgaattcattaccggaaaacagcctgatatggtgaggcccaccgtaccttccgg

SEQ ID NO: 507359 - DNA, 75 bp, synthetic construct
  source 1..75: mol_type = other DNA
gaggcttctgcgacacctgcaaatgcaaaaattataggtgagtggtttccaaaatctgaacgtcctgttgctgct

SEQ ID NO: 507360 - DNA, 75 bp, synthetic construct
  source 1..75: mol_type = other DNA
ccgggggacattattcaggaatcactggacgaacttaatgtcagcctgcgcgagtttgccagagcaatggaaatt

SEQ ID NO: 507361 - DNA, 75 bp, synthetic construct
  source 1..75: mol_type = other DNA
ggtatttccaaccagatgctggcagccgtagcgctggtactgggcaccgttgtgctgattaagatgaagcgcacc

SEQ ID NO: 507362 - DNA, 75 bp, synthetic construct
  source 1..75: mol_type = other DNA
tatgatctgcgcgggactgtgggcactggcctgtctgatgcatgcgggggcgggaaactgggtacatctggcgct

SEQ ID NO: 507363 - DNA, 75 bp, synthetic construct
  source 1..75: mol_type = other DNA
catttgcgacgtttgtcgatccggccagccatctcaatatgcccgttttagcgcgtatcatggatatgctggcgt

SEQ ID NO: 507364 - DNA, 75 bp, synthetic construct
  source 1..75: mol_type = other DNA
tatttactttgcacatgcgtcatttggttggcagggtgcatttatgtttacaggtgcacttgcaattctttgggt

SEQ ID NO: 507365 - DNA, 75 bp, synthetic construct
  source 1..75: mol_type = other DNA
tcagattcgtgaaaaccacgaagaaatgaaacgtgctgctgcacagagtgcggcactggcaggtttgttccagcc

SEQ ID NO: 507366 - DNA, 75 bp, synthetic construct
  source 1..75: mol_type = other DNA
atgtatccaagattattacctccaaaaccgcggccgattataaccaggctgtaaaaaatggtatgagttctgaag

SEQ ID NO: 507367 - DNA, 75 bp, synthetic construct
  source 1..75: mol_type = other DNA
tcaacaggagttgcagaaaatagcgaataaaatatcatttcctgtgtattcagatgcatttaaattacaaaatct

SEQ ID NO: 507368 - DNA, 75 bp, synthetic construct
  source 1..75: mol_type = other DNA
caggaaaacctatcctgacctgcattctcagggtaaagcgaatcgcagcaacaaaaacagaataatagctaactg

SEQ ID NO: 507369 - DNA, 75 bp, synthetic construct
  source 1..75: mol_type = other DNA
ccggtttcattatcgtatatttggtattataagctttagtctgttattaacgggttttttggtaatgactccaac

SEQ ID NO: 507370 - DNA, 75 bp, synthetic construct
  source 1..75: mol_type = other DNA
gacgcacaaggaaaagaggttttaggtgctattaatacaacaacaggaagcatcatggcctttaatgaaaaggag

SEQ ID NO: 507371 - DNA, 75 bp, synthetic construct
  source 1..75: mol_type = other DNA
atcatcggtcagtggcgcattcttgatggtttcgctggcggtgatggcctttaccaataacccgtatatcgccat

SEQ ID NO: 507372 - DNA, 75 bp, synthetic construct
  source 1..75: mol_type = other DNA
ttatctgtatacggatgctcccgttcctgatggtgtggctatgacgggtaccggtaatccgttcctgatgtcgta

SEQ ID NO: 507373 - DNA, 75 bp, synthetic construct
  source 1..75: mol_type = other DNA
gcgtatttacgccagcataaattacgagaaaggtgatgggatggaatcgccgtggaccgggaatgcgggttttag

SEQ ID NO: 507374 - DNA, 75 bp, synthetic construct
  source 1..75: mol_type = other DNA
ttcatttcgcaaagcgataattactggctatcgaacggtatgcaggcacatcccggcacggctaaatccgcgctg

SEQ ID NO: 507375 - DNA, 75 bp, synthetic construct
  source 1..75: mol_type = other DNA
gtgccagtgagtctgaagggaggctgaccgaacagggctggagtgctggcggaggtaaagcggaaattgttgccg

SEQ ID NO: 507376 - DNA, 75 bp, synthetic construct
  source 1..75: mol_type = other DNA
gacaaactgcaactgacagacatatcaaaggcggcggcatatacgttgctgattgacagtgtgaaggtggaagtg

SEQ ID NO: 507377 - DNA, 75 bp, synthetic construct
  source 1..75: mol_type = other DNA
aataaaacttggtccctgatgcatccggtggatgacgcagtctccctgctgacacggggtggcagactgagctgt

SEQ ID NO: 507378 - DNA, 75 bp, synthetic construct
  source 1..75: mol_type = other DNA
aaacctcaccggcactcgaaactggtcccggtaaagacgtcatgctgttcattcaagaaaccgctgaactaacta

SEQ ID NO: 507379 - DNA, 75 bp, synthetic construct
  source 1..75: mol_type = other DNA
gaaaaaaaacctcgtgttgctgaagtccaaaaagacattacgccgcaaaagaatgaaaacatcattcaggacgat

SEQ ID NO: 507380 - DNA, 75 bp, synthetic construct
  source 1..75: mol_type = other DNA
gctgggtattctcgcccccgaactgaaaagcagcctggggattaccaccgaacaatattcctggattgtaggtgc

SEQ ID NO: 507381 - DNA, 75 bp, synthetic construct
  source 1..75: mol_type = other DNA
gcaactggtcgctgacgccgcaggcaactcccacgccatcaactgaagccgttctggcgatggcaaatgtcactc

SEQ ID NO: 507382 - DNA, 75 bp, synthetic construct
  source 1..75: mol_type = other DNA
ggtacttaacgaaggcgcaaaaacttccggcctgagcttagcgctggatggcgtactttccctgcaaaacggcag

SEQ ID NO: 507383 - DNA, 75 bp, synthetic construct
  source 1..75: mol_type = other DNA
atatatccaatgtaagcggcaatctgagttcagagcgcattattgttctccccgtctctatccactgtatgacga

SEQ ID NO: 507384 - DNA, 75 bp, synthetic construct
  source 1..75: mol_type = other DNA
gtctgcatgatgtgcaggacatgagccgtcttaaccatccgaaagcggaactgtcaaaggggcagtacggaaccg

SEQ ID NO: 507385 - DNA, 75 bp, synthetic construct
  source 1..75: mol_type = other DNA
gtctggcaacggcgattctggtgcacgccgggagaaccgctgaattcattaccggaaaacagcctgatatggtga

SEQ ID NO: 507386 - DNA, 75 bp, synthetic construct
  source 1..75: mol_type = other DNA
gcgagtttgatattgatgcgaagccgacggagcattctgcgctgtttctggcgatggtggaaaaattccgcgcag

SEQ ID NO: 507387 - DNA, 75 bp, synthetic construct
  source 1..75: mol_type = other DNA
aaaatggcggtgaaataaaacttgaattcaggttgccggatggtacccaggttgcagatgacaaatacctctttg

SEQ ID NO: 507388 - DNA, 75 bp, synthetic construct
  source 1..75: mol_type = other DNA
caaggaatctgaagttcttacgaatctggaaatccttgaacgcggattcgagcaagcctctccctccacagtgac

SEQ ID NO: 507389 - DNA, 75 bp, synthetic construct
  source 1..75: mol_type = other DNA
gtacgtcgtgtacatataacgacatcattccggcagatcactgcctgcatgatgttcaggatatgagcgggataa

SEQ ID NO: 507390 - DNA, 75 bp, synthetic construct
  source 1..75: mol_type = other DNA
gatgcgacagaccttaacgtgatgtaccacaagggcgatacggcgcaaaacatgaaactggggtcattcggtgca

SEQ ID NO: 507391 - DNA, 75 bp, synthetic construct
  source 1..75: mol_type = other DNA
acaggaagttcctcgtggtttatgcagcatgatgccggtaatggcgcagacctgctggagaagggcgggcttatc

SEQ ID NO: 507392 - DNA, 75 bp, synthetic construct
  source 1..75: mol_type = other DNA
agtgcgtgagcggaaatgccgccacggtgccgtggatttgtggtgataccacgtattactggaaaaacaaatatg

SEQ ID NO: 507393 - DNA, 75 bp, synthetic construct
  source 1..75: mol_type = other DNA
agaccgtgcgagccatttcagctcatgggcacgcagggggattatttctgaccgtcttgcctcagcgattcttct

SEQ ID NO: 507394 - DNA, 75 bp, synthetic construct
  source 1..75: mol_type = other DNA
gcataccaggcaatctatggcggctacaaaaataaaacagataaaaacattcatttcgtcccattaatgacagat

SEQ ID NO: 507395 - DNA, 75 bp, synthetic construct
  source 1..75: mol_type = other DNA
ttccggcagaccactgcctgcatgatgtgcaggacatgagcgggataaaccacccaaaagctgacctgaacaagg

SEQ ID NO: 507396 - DNA, 75 bp, synthetic construct
  source 1..75: mol_type = other DNA
aatacttttcttgggtggagtgcaactgatcgggattggtgttctcggtgaatatataggtagaatttacttaga

SEQ ID NO: 507397 - DNA, 75 bp, synthetic construct
  source 1..75: mol_type = other DNA
ctgatcgggattggtgttctcggtgaatatataggcagaatctatattgaaagcaaacatcgtcccaaatacatc

SEQ ID NO: 507398 - DNA, 75 bp, synthetic construct
  source 1..75: mol_type = other DNA
aattacaagtttctcgaccttccccttacgcgtgtggacttacatcggcctacttgttgcgggactctcgttcct

SEQ ID NO: 507399 - DNA, 75 bp, synthetic construct
  source 1..75: mol_type = other DNA
taaaatcagcaatccaaaaattgaagagaatgttggtgacttccgtctgatgtcacgagaggtcgtagagaatat

SEQ ID NO: 507400 - DNA, 75 bp, synthetic construct
  source 1..75: mol_type = other DNA
tgttgacctgcaggacccgattgaagtcattccttatctcatcgagaagtggcaggcaggcgctgacatggtcct

SEQ ID NO: 507401 - DNA, 75 bp, synthetic construct
  source 1..75: mol_type = other DNA
agtacatcggcagaatttacactgaagttaagcagcgtcctaggtatattttgaagggcattaaaaatgaaaaaa

SEQ ID NO: 507402 - DNA, 75 bp, synthetic construct
  source 1..75: mol_type = other DNA
gcggatacccatcacttttggtatctatattatttctaggagggattcaactgattggcattggcgcccttggcg

SEQ ID NO: 507403 - DNA, 75 bp, synthetic construct
  source 1..75: mol_type = other DNA
ctgattgggataggggttcttggtgagtatataggtagaatatatatagagtctaaatcaagaccaagatatatc

SEQ ID NO: 507404 - DNA, 75 bp, synthetic construct
  source 1..75: mol_type = other DNA
cactcgccacccagcgcgaaaaaccgttcgtcagcgtcgtcacgccaacctggaaccgcagcgcattcctgccgt

SEQ ID NO: 507405 - DNA, 75 bp, synthetic construct
  source 1..75: mol_type = other DNA
aatacattggcaggatatatgtcgaagtaaaatcaagaccacgttacataattaaaggaataaaaaatgaacgtc

SEQ ID NO: 507406 - DNA, 75 bp, synthetic construct
  source 1..75: mol_type = other DNA
agtacataggaaggatttatacggaaaccaaagcaaggccacggtatataatcaagaaaaacagtacaagggaag

SEQ ID NO: 507407 - DNA, 75 bp, synthetic construct
  source 1..75: mol_type = other DNA
ctgagtggttctataaattacacaacaaaataagcaccccaaaaatagaggaaaatgtcggagattttcgactca

SEQ ID NO: 507408 - DNA, 75 bp, synthetic construct
  source 1..75: mol_type = other DNA
caggagatgccgtaattccaattgatgttgacctgcaagacccaattgaggttattcctcatcttattgaaaagt

SEQ ID NO: 507409 - DNA, 75 bp, synthetic construct
  source 1..75: mol_type = other DNA
cgcactggcgctgtactggccggtttctgccctgccacaaggggttaccctggaaggtaatgccggtcataacct

SEQ ID NO: 507410 - DNA, 75 bp, synthetic construct
  source 1..75: mol_type = other DNA
ggcattattccgatcacatctgacgtggccggaacactcacgccttctgactggaatgcaccggataacgccgga

SEQ ID NO: 507411 - DNA, 75 bp, synthetic construct
  source 1..75: mol_type = other DNA
gcgatggtggaaaaattccgcgcagacttggctgaacaggcggaacagtgtaccggtggcagtgctgctggcgtt

SEQ ID NO: 507412 - DNA, 75 bp, synthetic construct
  source 1..75: mol_type = other DNA
cataccatcatacaggtaatcaacaaaaagaacttggcacgtttggcgcattcgaccatgactggcatacgcttg

SEQ ID NO: 507413 - DNA, 75 bp, synthetic construct
  source 1..75: mol_type = other DNA
accactgcctgcatgatgtgcaggacatgagcgggataaaccacccgaaagctgacctgaacaaggggcagtatg

SEQ ID NO: 507414 - DNA, 75 bp, synthetic construct
  source 1..75: mol_type = other DNA
tagggcagacaagttacgcgtgactgatatcactaatggtgcgacatacccggtgctgattgacagcattgtggt

SEQ ID NO: 507415 - DNA, 75 bp, synthetic construct
  source 1..75: mol_type = other DNA
agaagtctggcaaatgttggcggcgaaagaggtgtttgactgccagacggattttaatattcacctctggcagcg

SEQ ID NO: 507416 - DNA, 75 bp, synthetic construct
  source 1..75: mol_type = other DNA
cgcttcaactatgcaaagcatttcgaatcgacaggtagtcagattaccttcgcgggttatcgcttctcagataaa

SEQ ID NO: 507417 - DNA, 75 bp, synthetic construct
  source 1..75: mol_type = other DNA
tggaatgggtaaaagccgataatgaaagtggttcgttactctgcttaaccaaagaaaatctgactagtttcggtc

SEQ ID NO: 507418 - DNA, 75 bp, synthetic construct
  source 1..75: mol_type = other DNA
aacgtcaatcttgaaacaaccagaaacaagtatgcctttggtttgtactggcgaatagcggaatggccgggtgag

SEQ ID NO: 507419 - DNA, 75 bp, synthetic construct
  source 1..75: mol_type = other DNA
gatattacaggtactgctgaaacttaccctgtacttattgatacggtggaagttaaagcaaacaaagctggagca

SEQ ID NO: 507420 - DNA, 75 bp, synthetic construct
  source 1..75: mol_type = other DNA
gtttaacctggggtaacaccacctgtgaagttacgccgcctaatcagagcaacatcagcgaaagcgccattattt

SEQ ID NO: 507421 - DNA, 75 bp, synthetic construct
  source 1..75: mol_type = other DNA
cgacaatttgcgtggttacagctatcggtttaactatgcaaaacatttcgaatcaacgggcagccagattacctt

SEQ ID NO: 507422 - DNA, 75 bp, synthetic construct
  source 1..75: mol_type = other DNA
tgtcacgccgggtggtgcgttctgtaactacaatgacattattcctgcggaccactgcctgcatgatgttcagga

SEQ ID NO: 507423 - DNA, 75 bp, synthetic construct
  source 1..75: mol_type = other DNA
gcctgcagatataacgatattattccggccgaccactgcctgcatgatgtgcaggatatgagtacgctgaatcat

SEQ ID NO: 507424 - DNA, 75 bp, synthetic construct
  source 1..75: mol_type = other DNA
ccacaacactgctgtcttaccgtgtcagtgagtcagaaggaaatctgaaagcccagggctgggagccggctggcg

SEQ ID NO: 507425 - DNA, 75 bp, synthetic construct
  source 1..75: mol_type = other DNA
cccggatattgaatccattggttattacggctcaacgtggcgtaacagtgccgccacctggacatctgcggaccg

SEQ ID NO: 507426 - DNA, 75 bp, synthetic construct
  source 1..75: mol_type = other DNA
gtaccgttcctgacggatgagaatggacagagcacgccaacgaatgctccggcggaagacccggatattgtggct

SEQ ID NO: 507427 - DNA, 75 bp, synthetic construct
  source 1..75: mol_type = other DNA
acgacgtattactggaaaaacacctacggcacgcagtacgacaccgtttacggggcgtataaaaacagggagaac

SEQ ID NO: 507428 - DNA, 75 bp, synthetic construct
  source 1..75: mol_type = other DNA
acggtaacggcgtcaataccgccactaacgcgccggcagaagatccggatattccggcatcaggatattacggtg

SEQ ID NO: 507429 - DNA, 75 bp, synthetic construct
  source 1..75: mol_type = other DNA
ggaagaagacccggacattgcggatagcgggtattacggttcgaaatggcgtgacagctcagcgacctggacgtc

SEQ ID NO: 507430 - DNA, 75 bp, synthetic construct
  source 1..75: mol_type = other DNA
aagccggtgtttatgacaaaaataaactgttcggcgttaccacgctggatatcattcgttccaacacctttgttg

SEQ ID NO: 507431 - DNA, 75 bp, synthetic construct
  source 1..75: mol_type = other DNA
gtgacgccggtactggatgagaaacgggggacgccgttcacactggtgaaatctccggcatcaggggcggcggac

SEQ ID NO: 507432 - DNA, 75 bp, synthetic construct
  source 1..75: mol_type = other DNA
cggcggataaactgcatgtgacagacattaccaaaagtgcgacttacccggtactgatagacagcattgcggtgg

SEQ ID NO: 507433 - DNA, 75 bp, synthetic construct
  source 1..75: mol_type = other DNA
cagctgccgctttaaggcatccggtgaactggtagcaaatcagtatgttattgcactttactggccggtttcctc

SEQ ID NO: 507434 - DNA, 75 bp, synthetic construct
  source 1..75: mol_type = other DNA
taaggcgatgaagattgccaaggaaaccgggaaatcctcctggtttatcgggcatgatgcagctaatggcgcaga

SEQ ID NO: 507435 - DNA, 75 bp, synthetic construct
  source 1..75: mol_type = other DNA
cgtcgcacagatttgctggtttctgctggcggaagcgcgttacctgcccgcccggctgatacaatcttcccctcc

SEQ ID NO: 507436 - DNA, 75 bp, synthetic construct
  source 1..75: mol_type = other DNA
caatatcagcagccgcaacagccggttgcgccgcagcagcagtatcaacagctgcaacaaccggttgcaccgcag

SEQ ID NO: 507437 - DNA, 75 bp, synthetic construct
  source 1..75: mol_type = other DNA
tgcggggactaccggttccggtaagtctgtcggggtgaacgcgatgatcctgagcatgctttataaagcacagcc

SEQ ID NO: 507438 - DNA, 75 bp, synthetic construct
  source 1..75: mol_type = other DNA
ctgggctacagcggtattgtggcggtggattacaaagaggcgcgagtgatgcgccgcgcaggtttgccggtggcg

SEQ ID NO: 507439 - DNA, 75 bp, synthetic construct
  source 1..75: mol_type = other DNA
accagaatatcttcaatggctattttgaagatctcaacgaggctggaaaagattcaaccgctatagataaaatca

SEQ ID NO: 507440 - DNA, 75 bp, synthetic construct
  source 1..75: mol_type = other DNA
gcatggtacaagctggatacacaggccaaagataaaaaatggacagcgttagctgcattccctggtggaccgaga

SEQ ID NO: 507441 - DNA, 75 bp, synthetic construct
  source 1..75: mol_type = other DNA
ggtatgggggatatgctttactctgggccgaactccacgttgccggtacgtgttcatggtgcttttgttcgcgat

SEQ ID NO: 507442 - DNA, 75 bp, synthetic construct
  source 1..75: mol_type = other DNA
caatatcagcagccacaacaaccggttgcacagcagccgcagtatcagcagccgcaacagccggttgtaccacag

SEQ ID NO: 507443 - DNA, 75 bp, synthetic construct
  source 1..75: mol_type = other DNA
gtagatacctttgcgcttgaacaaatggctcgcctggtggaagcgcgtctggctgatttccgtattaaagccgat

SEQ ID NO: 507444 - DNA, 75 bp, synthetic construct
  source 1..75: mol_type = other DNA
atgaaagatgccgccaacgcgctgcgctggtgtgttaacgagatggagcgtcggtataaactgatgtctgcgctg

SEQ ID NO: 507445 - DNA, 75 bp, synthetic construct
  source 1..75: mol_type = other DNA
acgtggatcaggtactggaaaacggtaagcggctgattgagacggcgcggctttacggcattgaactgtatctga

SEQ ID NO: 507446 - DNA, 75 bp, synthetic construct
  source 1..75: mol_type = other DNA
gcgatgtggtgctggtgtccggtattcagcgcggcgaaccagaaatagttggtcgttatgacagcctcggcaacc

SEQ ID NO: 507447 - DNA, 75 bp, synthetic construct
  source 1..75: mol_type = other DNA
tggattacaaagaggcgcgagtcatgcgccgcgctggtttgccggtggcgcatcaggggcatctggtacaaatcc

SEQ ID NO: 507448 - DNA, 75 bp, synthetic construct
  source 1..75: mol_type = other DNA
ctgtcatgatgagttcatttgcggcaaacgcgtccgtactaccggaaacaccagtaccgtttaaaagtggtactg

SEQ ID NO: 507449 - DNA, 75 bp, synthetic construct
  source 1..75: mol_type = other DNA
tggcagggcagaatactgaactggctaagatgaaatatcaggtcagtcagggcgaattatcaaccctgtcagaag

SEQ ID NO: 507450 - DNA, 75 bp, synthetic construct
  source 1..75: mol_type = other DNA
gatgctgtcgtttccacgatggacgggctggtatcaaatatttccgatgcactggccgggaatgttgtggactgg

SEQ ID NO: 507451 - DNA, 75 bp, synthetic construct
  source 1..75: mol_type = other DNA
caatatcagcagccgcaacagccagttgcgccgcagccgcatgataccctgcttcatccgctgttgatgcgcaat

SEQ ID NO: 507452 - DNA, 75 bp, synthetic construct
  source 1..75: mol_type = other DNA
ttatgcaaaggccgatgctttacgcagtaactggaatgccgggctcaaagaggggctgacgaactgggcagacag

SEQ ID NO: 507453 - DNA, 75 bp, synthetic construct
  source 1..75: mol_type = other DNA
tgaccgacaatacggggaaaacgcatgatgtgctgaccggaagtgatgacgctcgccacagtaacacctctctgg

SEQ ID NO: 507454 - DNA, 75 bp, synthetic construct
  source 1..75: mol_type = other DNA
atcagataaatacggctaaatcttcggcactgagtatggcgggagcatttgccggggtttttgccaccgggcatc

SEQ ID NO: 507455 - DNA, 75 bp, synthetic construct
  source 1..75: mol_type = other DNA
gtgccccaaatgctcttgaatacgccctggatcaagctctgcttatccgtgcggccaaagaggagcgtgaagcca

SEQ ID NO: 507456 - DNA, 75 bp, synthetic construct
  source 1..75: mol_type = other DNA
atgtctgcgctgggtgtgcgtaatctggcgggttataacgaaaaaattgctgaagccgatcgcatgatgcgtccg

SEQ ID NO: 507457 - DNA, 75 bp, synthetic construct
  source 1..75: mol_type = other DNA
aaaaaatcctacagcgctgatattcatctttggcataacggaaaatgggataaatctggcgaactatcggaaggc

SEQ ID NO: 507458 - DNA, 75 bp, synthetic construct
  source 1..75: mol_type = other DNA
ttttacccctggtgatggatacgctttctggcatcggcgtcgatctgatttatggcgatgtgattgccgatgccc

SEQ ID NO: 507459 - DNA, 75 bp, synthetic construct
  source 1..75: mol_type = other DNA
ggttcggattgctaatcaggtccgcaaactgtttcttggcgaaaacggtgaagatggtcagatcagcgtcaccat

SEQ ID NO: 507460 - DNA, 75 bp, synthetic construct
  source 1..75: mol_type = other DNA
cggacctaccgggtctggtaaaacctctggtatcaccgagatcgctggtcgtcttaactggcctgttcagcaaat

SEQ ID NO: 507461 - DNA, 75 bp, synthetic construct
  source 1..75: mol_type = other DNA
gtttatctgcgcgaagttttggataacgccaaattccgcgataatccgtcgccattaaccgtggtgctgggtaaa

SEQ ID NO: 507462 - DNA, 75 bp, synthetic construct
  source 1..75: mol_type = other DNA
caaagcttcaaatcgtatgtaatggacttggcgacccgattgcatctcgccttaccgcgaaagactgggctcatt

SEQ ID NO: 507463 - DNA, 75 bp, synthetic construct
  source 1..75: mol_type = other DNA
acacatgaccagattgcagagttgctgtatgactgccagctccaaaacaagctattaacgctcgttgtgaaaatt

SEQ ID NO: 507464 - DNA, 75 bp, synthetic construct
  source 1..75: mol_type = other DNA
gggccatcagttatctaaataccgaatcacctacaccaaaacaaagggcaagaaaaaccgaacggttcctatatc

SEQ ID NO: 507465 - DNA, 75 bp, synthetic construct
  source 1..75: mol_type = other DNA
gatgtcgggtggaaacatcctggccttacaaaaaattctcggacatcacgatataaaaatgacgatgcgttacgc

SEQ ID NO: 507466 - DNA, 75 bp, synthetic construct
  source 1..75: mol_type = other DNA
acaaattgctgttgatggttgacgctctgggcaatccccttgcaactgatctcacctctaaaatgtttgcccact

SEQ ID NO: 507467 - DNA, 75 bp, synthetic construct
  source 1..75: mol_type = other DNA
cccgttctgcagcttccatgcgggagtatggctacagttctgaggaggtactgaaagtcaccgaggcgatctcca

SEQ ID NO: 507468 - DNA, 75 bp, synthetic construct
  source 1..75: mol_type = other DNA
aagaacagagggaagttattcacgccatgtagaaaagcctttgaacgagcagtaaagcgagccggcatcgagttg

SEQ ID NO: 507469 - DNA, 75 bp, synthetic construct
  source 1..75: mol_type = other DNA
ggaatctgtcagaagtgatagagcaatggcactcactctacggacaaacgcttgcagaccccaaacgcctgatgg

SEQ ID NO: 507470 - DNA, 75 bp, synthetic construct
  source 1..75: mol_type = other DNA
gcaggtgactaagtaccgcatcaccttcaccaggactaagggtaaaaaaaatagaagcatccccatcagcaaaga

SEQ ID NO: 507471 - DNA, 75 bp, synthetic construct
  source 1..75: mol_type = other DNA
tggctaggcgaaaaggatgatcggcgccaattgtcagaagtaattaagcagtggcattcactttacggacagact

SEQ ID NO: 507472 - DNA, 75 bp, synthetic construct
  source 1..75: mol_type = other DNA
aaaaatagagggaaattattcacaccatgcagaaaagcctttgagcgggcagtaaagcgggccggtatcgaactg

SEQ ID NO: 507473 - DNA, 75 bp, synthetic construct
  source 1..75: mol_type = other DNA
ccagagggacaatgtacccacgtcttgcgccatacattcgccagttactttatgatgaatggagggaatattctt

SEQ ID NO: 507474 - DNA, 75 bp, synthetic construct
  source 1..75: mol_type = other DNA
catctgctgcttgatgaatgttgcaggcatgaacacccggatctggaaatggttgtacgaatctgcctttcaaca

SEQ ID NO: 507475 - DNA, 75 bp, synthetic construct
  source 1..75: mol_type = other DNA
ggaaatggctttgcgaatgttcccccgccggacgtagtgggcgtcgtgtgcgtaaacaattcgccaccaaaggcg

SEQ ID NO: 507476 - DNA, 75 bp, synthetic construct
  source 1..75: mol_type = other DNA
atggcagtacgaaaactcaccacaggaaaatggctttgcgaatgttaccccgccggacgtagtggacgtcgtgtg

SEQ ID NO: 507477 - DNA, 75 bp, synthetic construct
  source 1..75: mol_type = other DNA
gagaagcaataaaccttacccgatcacaggtgactaaataccgaattacctttgtaagaacgaaggggaagaaaa

SEQ ID NO: 507478 - DNA, 75 bp, synthetic construct
  source 1..75: mol_type = other DNA
acaaatggctcgcctggtggaagcgcgtctggctgatttccgtattaatgccgatgtcgtcaattactctccggg

SEQ ID NO: 507479 - DNA, 75 bp, synthetic construct
  source 1..75: mol_type = other DNA
tgattaaagcgaatattccgacccgtatcgcctttaccgtatccagtaagattgactcacgtaccattcttgatc

SEQ ID NO: 507480 - DNA, 75 bp, synthetic construct
  source 1..75: mol_type = other DNA
atgcgtaatggtgacagccgtccgttgcataaaccgacgacgccgctgccttctctggatttgctgacaccgccg

SEQ ID NO: 507481 - DNA, 75 bp, synthetic construct
  source 1..75: mol_type = other DNA
tacgaacctttcaccttcgactacgaacatttgcatagcgcgccggaaggcaaacatattcccaccgcccgtccg

SEQ ID NO: 507482 - DNA, 75 bp, synthetic construct
  source 1..75: mol_type = other DNA
tccccaaaccctgctataacgcgttccgctctgctttggaacgcgcaggcattgaactcccctccggccagctta

SEQ ID NO: 507483 - DNA, 75 bp, synthetic construct
  source 1..75: mol_type = other DNA
gtacaaaatcacctatacatacacaaagggccggaaaaaccgtaccgttccgataagcaaagagctttatgacaa

SEQ ID NO: 507484 - DNA, 75 bp, synthetic construct
  source 1..75: mol_type = other DNA
gatgtctgcgctgggtgtgcgtaatctggcgggttataacgaaaaaattgctgaagccgatcgcatgatgcgtcc

SEQ ID NO: 507485 - DNA, 75 bp, synthetic construct
  source 1..75: mol_type = other DNA
cctggtggaagcgcgtctggctgatttccgtattaaagccgatgtcgtcaattactctccggggccggttatcac

SEQ ID NO: 507486 - DNA, 75 bp, synthetic construct
  source 1..75: mol_type = other DNA
gctttacgaagagatcatggcgcttgatgggttcaatttcttcacagactgctattttcaatttttatccgtgat

SEQ ID NO: 507487 - DNA, 75 bp, synthetic construct
  source 1..75: mol_type = other DNA
gaacatcagtccacactgagcgcggggtatcttcatgcccggacgaacgctcccggcagcgataatcttaacggg

SEQ ID NO: 507488 - DNA, 75 bp, synthetic construct
  source 1..75: mol_type = other DNA
atgcgtaaattatgtgcagccattttgtccgcagccatctgtctgtccgtatccggtgcgcctgcatgggcgtct

SEQ ID NO: 507489 - DNA, 75 bp, synthetic construct
  source 1..75: mol_type = other DNA
atgaaaattgcgctggtcattttcatcacccttgccctggcaggctgtgcgctgttatcactccatatgggggtg

SEQ ID NO: 507490 - DNA, 75 bp, synthetic construct
  source 1..75: mol_type = other DNA
caatggcgcgtactcaggctccgcactctgcaactgcgcagttcttcatcaacgtagttgataacgacttcctga

SEQ ID NO: 507491 - DNA, 75 bp, synthetic construct
  source 1..75: mol_type = other DNA
agtgttcaattttgaagctaaagcaataagtagttcggtattagaaggtaagggtatatctgtaaggatggatgg

SEQ ID NO: 507492 - DNA, 75 bp, synthetic construct
  source 1..75: mol_type = other DNA
atgcgtaaagtttgtgcagccatgttgtccgcagccatctgtctggccgtatccggtgcgcctgcatgggcgtct

SEQ ID NO: 507493 - DNA, 75 bp, synthetic construct
  source 1..75: mol_type = other DNA
agacgacactttctggtagttataaaagtgcacgtaaaatatatcaccaataataatgtttcatatgttaatcat

SEQ ID NO: 507494 - DNA, 75 bp, synthetic construct
  source 1..75: mol_type = other DNA
cccaaaattaccgcaaccaacgtcagaaatggatattgttaattatgttaagggttctggaagctttggggatag

SEQ ID NO: 507495 - DNA, 75 bp, synthetic construct
  source 1..75: mol_type = other DNA
aaaaaaccagatagtcaaatcactattattcgtgataatgtttctgttttcccttacttccttgataatatacct

SEQ ID NO: 507496 - DNA, 75 bp, synthetic construct
  source 1..75: mol_type = other DNA
ctgcggcccgattagctttattggtctcgtggtgccgcatatgatgcgtagcatcaccggtggacgtcaccgcag

SEQ ID NO: 507497 - DNA, 75 bp, synthetic construct
  source 1..75: mol_type = other DNA
ttattggaagaagtataatcttactaatgaaacaagcataattcgtgtgtcaaattctgctcgtggggcgaatgg

SEQ ID NO: 507498 - DNA, 75 bp, synthetic construct
  source 1..75: mol_type = other DNA
gcggtaatattgatgtgcttaaaggacggggaagtatttcatcgacacgtcagcgtgcaatctatccgtattttg

SEQ ID NO: 507499 - DNA, 75 bp, synthetic construct
  source 1..75: mol_type = other DNA
acaaaatcaaaggtgtggcaaccggtcgtagcggtatgcaccaggacgtgccaaaagaagacgttatcattgaaa

SEQ ID NO: 507500 - DNA, 75 bp, synthetic construct
  source 1..75: mol_type = other DNA
attgcttatgaaggctccggcagcggtgactggcgtaccaacagtttcatcgttggtgtcggttataaattctga

SEQ ID NO: 507501 - DNA, 75 bp, synthetic construct
  source 1..75: mol_type = other DNA
attcgccatactgtgcgttataccgccagtaatgctgctcgttttgccggattatgggaaagaaataatctcata

SEQ ID NO: 507502 - DNA, 75 bp, synthetic construct
  source 1..75: mol_type = other DNA
tgttaaaccaatggattatgatagtttatataaattcagtccagataaaatgatgtcaacgattgtttctgattt

SEQ ID NO: 507503 - DNA, 75 bp, synthetic construct
  source 1..75: mol_type = other DNA
caaaagccggggcgcgctgaatgatgacaccatcggtggcatggtgatttgtgacagctctgaacaggccaaaca

SEQ ID NO: 507504 - DNA, 75 bp, synthetic construct
  source 1..75: mol_type = other DNA
tcgtcaccaccaaagactacgacatcaacatccaacgcgtgtacttcctcgatgaagtccaccgcagctacaacc

SEQ ID NO: 507505 - DNA, 75 bp, synthetic construct
  source 1..75: mol_type = other DNA
aggcgctgcacaaccaccacggcaaagcggaaatcaccgtcgtcaacatccagaaattccgcgatgacccggatg

SEQ ID NO: 507506 - DNA, 75 bp, synthetic construct
  source 1..75: mol_type = other DNA
ctgatgacaaggcagacaacacggatatccggaaaacggcagaagaaaaagtgaaagccgctgaacgggagatgg

SEQ ID NO: 507507 - DNA, 75 bp, synthetic construct
  source 1..75: mol_type = other DNA
aaattcagccaactcggattaaaaaccgttgttcacgtcagcccggaaatgcaaattaatgcggcatattctatg

SEQ ID NO: 507508 - DNA, 75 bp, synthetic construct
  source 1..75: mol_type = other DNA
acgggcgataacaatgtggcaccgacgccggatgccagtgtggagcagacgcaggacgtgaaggagccggaagcg

SEQ ID NO: 507509 - DNA, 75 bp, synthetic construct
  source 1..75: mol_type = other DNA
aatttcacctatgcgccgagccaaactcaatattggaaccacggctacagcaccgaaactgacttcatctacgtt

SEQ ID NO: 507510 - DNA, 75 bp, synthetic construct
  source 1..75: mol_type = other DNA
gatatatttattacacctaaacctgaaaaattattagagagagttctttctatcgcgacggaagaaggtgacctt

SEQ ID NO: 507511 - DNA, 75 bp, synthetic construct
  source 1..75: mol_type = other DNA
gaaatagacgctgggatcaaacagggggcagacagagcattgtctgcccgtaaaaaagtgtttaacggaggtgga

SEQ ID NO: 507512 - DNA, 75 bp, synthetic construct
  source 1..75: mol_type = other DNA
tttcgttatatagtcgtcaagatggaattacttatgcaggtgtaaattcagtgctccatgcaatagaaaatgatg

SEQ ID NO: 507513 - DNA, 75 bp, synthetic construct
  source 1..75: mol_type = other DNA
gaggcgctgaaatattgcatcaactgcaaacgttgcgaagtcgcctgcccgtccgatgtgaagattggcgatatc

SEQ ID NO: 507514 - DNA, 75 bp, synthetic construct
  source 1..75: mol_type = other DNA
tcggcgatgcgcgcgccaccacgctcggtgtgtcggtgccccatacccgattctgggctttgttactagctgtcg

SEQ ID NO: 507515 - DNA, 75 bp, synthetic construct
  source 1..75: mol_type = other DNA
gtgccgttgctcattctgtttttgccgctgagcctgcgcttttgtcgcgatctcgacctgctggcgctgggcgat

SEQ ID NO: 507516 - DNA, 75 bp, synthetic construct
  source 1..75: mol_type = other DNA
tttgctgaagtggttgaaggcatggacgtggtagacaaaatcaaaggtgtggcaaccggtcgtagcggtatgcac

SEQ ID NO: 507517 - DNA, 75 bp, synthetic construct
  source 1..75: mol_type = other DNA
ccagcaatgccagcgaagttttctatgacggccgttataagtttatcggtggaacgctgagttatccggtatttg

SEQ ID NO: 507518 - DNA, 75 bp, synthetic construct
  source 1..75: mol_type = other DNA
cgataaattccccggagcagacgaaggggactatggatgcggtgaatggaatatggagcactcaatgctcgtcct

SEQ ID NO: 507519 - DNA, 75 bp, synthetic construct
  source 1..75: mol_type = other DNA
tctgccgctgagcctgagtttttgccgcgatctcgacctccttgcactcggcgatgcgcgcgccaccacgctcgg

SEQ ID NO: 507520 - DNA, 75 bp, synthetic construct
  source 1..75: mol_type = other DNA
ggcgctttctgcatgctgggccagcctgacggattatctgatgctctcgcgcccgcaggatgtgaacaacgccct

SEQ ID NO: 507521 - DNA, 75 bp, synthetic construct
  source 1..75: mol_type = other DNA
acaccacacgcccgtcgctgcgcaattttgtgttgagtcataccgacctgatgggtagcgtttccacgccgttcg

SEQ ID NO: 507522 - DNA, 75 bp, synthetic construct
  source 1..75: mol_type = other DNA
attatctcaatcaaatgcgcctcggacgattgccgaataatttctgggtacctcgatgcttgttttcaccacaag

SEQ ID NO: 507523 - DNA, 75 bp, synthetic construct
  source 1..75: mol_type = other DNA
cggtatgtacggtgtggcccagggaacgctattttgtggcgagtccatgttcagccggatggaaaacgcgtccaa

SEQ ID NO: 507524 - DNA, 75 bp, synthetic construct
  source 1..75: mol_type = other DNA
taatcgatactgtaaaatatgatgtaaaaagtgacgcagaatctacaggtattaacagcgttggtttacatgatt

SEQ ID NO: 507525 - DNA, 75 bp, synthetic construct
  source 1..75: mol_type = other DNA
ttaataaaatataacaaaggagagaaggccagtgtatcccgcccatcggcagaaacaattattaacggtttatcc

SEQ ID NO: 507526 - DNA, 75 bp, synthetic construct
  source 1..75: mol_type = other DNA
gattaaaaacgggcagtcagtcggttcgcattcagttcagtgcgtgtcgttcacgcaggttgtaggcgttggtcc

SEQ ID NO: 507527 - DNA, 75 bp, synthetic construct
  source 1..75: mol_type = other DNA
gaggcgctgaagtactgcattaactgcaaacgttgcgaagtcgcctgcccgtccgatgtgaagattggcgatatc

SEQ ID NO: 507528 - DNA, 75 bp, synthetic construct
  source 1..75: mol_type = other DNA
attatcgtgcgcgtaacttcccaggaacgctggactacgccgaacagcaacgctggctggagcaccgtcgtcagg

SEQ ID NO: 507529 - DNA, 75 bp, synthetic construct
  source 1..75: mol_type = other DNA
gtgatttttcaggtatttatggtagatttctgtcagattattggtcgaaatactatgataaatttaagttattac

SEQ ID NO: 507530 - DNA, 75 bp, synthetic construct
  source 1..75: mol_type = other DNA
accagaacaaggctttggtacatcggtgactatcttggtaagagtagatggtaatcttatcgtaagatccttatc

SEQ ID NO: 507531 - DNA, 75 bp, synthetic construct
  source 1..75: mol_type = other DNA
ggaaccctgaaaaatttatatgtcggaatagcgccagatatcggcgcagaacatgagggcgactattatggccca

SEQ ID NO: 507532 - DNA, 75 bp, synthetic construct
  source 1..75: mol_type = other DNA
gaacatagtaatgcccacgatgcgatggctgacgtgtacgccactattgccatggcgaagctggtaaaaacacgt

SEQ ID NO: 507533 - DNA, 75 bp, synthetic construct
  source 1..75: mol_type = other DNA
gtgcatctgaataagtgcccggtgctggcgcaggccaataccctgcgcccagaagacgctgaccgtttaggcatt

SEQ ID NO: 507534 - DNA, 75 bp, synthetic construct
  source 1..75: mol_type = other DNA
tgctgatgaattgcaaatgctggcacaacaatatgccgatgataaagagaaagtgtcgctgttaaaggcgctttg

SEQ ID NO: 507535 - DNA, 75 bp, synthetic construct
  source 1..75: mol_type = other DNA
aatcgccagcattgtctcgataacctgaaaattctgcgtgaaaatccgcaagtgcgtgaaaaagtggtggcgata

SEQ ID NO: 507536 - DNA, 75 bp, synthetic construct
  source 1..75: mol_type = other DNA
taccagttgggttgcgccgctggcatggcatcctgaaaatcgcaatgccgtgattatggtggatttagcgggaga

SEQ ID NO: 507537 - DNA, 75 bp, synthetic construct
  source 1..75: mol_type = other DNA
ttataatggctttttcagcgatgccgatcgcgcggcgatgaaaattgtgctggaaactgagccacgtaatttacc

SEQ ID NO: 507538 - DNA, 75 bp, synthetic construct
  source 1..75: mol_type = other DNA
aaaatggaacgctgtcgtcgtgaactggaagcgctgaagagaatagactcagcggtatataacaagcgtaaagcg

SEQ ID NO: 507539 - DNA, 75 bp, synthetic construct
  source 1..75: mol_type = other DNA
ctggcaatttgttgggattggttacggagatctttgttgcagtgacagctggcgcggtggcgtacctattggggc

SEQ ID NO: 507540 - DNA, 75 bp, synthetic construct
  source 1..75: mol_type = other DNA
actactaaactgaccgttaaccactttgacagtcgggcaccgcagaatgagacgctgagtccgaaaaatcatgtc

SEQ ID NO: 507541 - DNA, 75 bp, synthetic construct
  source 1..75: mol_type = other DNA
gtgcctatcattacactgattgtgatgagtggatttggtctgatcattccttttatctggccgccatttttcaat

SEQ ID NO: 507542 - DNA, 75 bp, synthetic construct
  source 1..75: mol_type = other DNA
ttataaccaatccgccttgggagaatataaaaccagattctagagagctcgatttttttgaaccatctatgaaat

SEQ ID NO: 507543 - DNA, 75 bp, synthetic construct
  source 1..75: mol_type = other DNA
gcagtggatgcctattaccgatatcgtgttgacaagatgtgtgctgatatatcaaaggatgtgttggacagattg

SEQ ID NO: 507544 - DNA, 75 bp, synthetic construct
  source 1..75: mol_type = other DNA
tctgcgttataactggcaggagagtcgccccgcggtgcttactgcattgctgggcgaggaagcggaaaacatcga

SEQ ID NO: 507545 - DNA, 75 bp, synthetic construct
  source 1..75: mol_type = other DNA
ggtaaagccagcgtcaatgacgcggatcggctacgcaaatacctggcgcgttttggtctgacatgggaagcaatg

SEQ ID NO: 507546 - DNA, 75 bp, synthetic construct
  source 1..75: mol_type = other DNA
cttatcgccggaacggtgcgcgatttgcgccagttggttgccgaaggcaaatttcgtgaagacctgtacgcgcga

SEQ ID NO: 507547 - DNA, 75 bp, synthetic construct
  source 1..75: mol_type = other DNA
tctgcgctataactggcaggagagtcgcccctccgcgcttacggcgttgctgggcgcagaggcagaaaacatcga

SEQ ID NO: 507548 - DNA, 75 bp, synthetic construct
  source 1..75: mol_type = other DNA
cttcaaccgcatgattgagcagatcgaaaaagtggcgatcaaatcccgcgcgccgatcctgcttaacggcccaac

SEQ ID NO: 507549 - DNA, 75 bp, synthetic construct
  source 1..75: mol_type = other DNA
cgcccttcggcacttacgacgttgctgggcgcagaggtggagaacatcgatctcttcgaccgaatgcaactggaa

SEQ ID NO: 507550 - DNA, 75 bp, synthetic construct
  source 1..75: mol_type = other DNA
tgcctttgttaatttacctgtattgtttgcgatagcgattcccttaggattattaaaagataaagaggataaagc

SEQ ID NO: 507551 - DNA, 75 bp, synthetic construct
  source 1..75: mol_type = other DNA
ttatgcgcgtcaccctggcgctgttctctgccggactggcaaccttcgcacttctctattgtgtgcaacctatcc

SEQ ID NO: 507552 - DNA, 75 bp, synthetic construct
  source 1..75: mol_type = other DNA
ccgcccatcctcgttgcgcccaaaaacgctgtttattaacttccgtctgcactgccgtgatcagggattaccctt

SEQ ID NO: 507553 - DNA, 75 bp, synthetic construct
  source 1..75: mol_type = other DNA
ttggtctgtcgttaagcggcgtagctgccgttggcatgacctaccttagcgaagagatccaccccagttttgtgg

SEQ ID NO: 507554 - DNA, 75 bp, synthetic construct
  source 1..75: mol_type = other DNA
gactgcctgcatgggcagatatacctccaccaacacgtgaagaacaaattgcatcagccgaaactaaaaagcagc

SEQ ID NO: 507555 - DNA, 75 bp, synthetic construct
  source 1..75: mol_type = other DNA
tcagctgaaactaaaaagcagcaattgattaatcaggccaacgattatatgaacagtagacaatgggttggtaaa

SEQ ID NO: 507556 - DNA, 75 bp, synthetic construct
  source 1..75: mol_type = other DNA
cttctctattgtgtgcaacctatccttccggtgctttcgcaggagtttggcttaacgcccgcgaacagtagtatt

SEQ ID NO: 507557 - DNA, 75 bp, synthetic construct
  source 1..75: mol_type = other DNA
ttattagtcgccagcatgtataaaaagatcgttaacttacgcattcctgagtcattaggtttttatagtggtccg

SEQ ID NO: 507558 - DNA, 75 bp, synthetic construct
  source 1..75: mol_type = other DNA
gagcagatggttaaggcacttggtggtaaagagaatattaaatccctggataattgcgtaactcgtttacgttta

SEQ ID NO: 507559 - DNA, 75 bp, synthetic construct
  source 1..75: mol_type = other DNA
ctattctcaaatttaacctgatgacggtaggccgtgaagagtccagtcctgtcacgctgaacgctcatgaggata

SEQ ID NO: 507560 - DNA, 75 bp, synthetic construct
  source 1..75: mol_type = other DNA
aaatcctccctgaatcacgccattttcgcccgacttcgctgcgccctaagacgttatttatcaactttcgtctgc

SEQ ID NO: 507561 - DNA, 75 bp, synthetic construct
  source 1..75: mol_type = other DNA
gtgaatcatatctacctgctgctgggagagctaaatacagtggccgaactttctatcgtgaccaacgccccggaa

SEQ ID NO: 507562 - DNA, 75 bp, synthetic construct
  source 1..75: mol_type = other DNA
cttcaggaattaggctgccagattgcgattgatgatttcggcaccggctacgccagctatgcgcggcttaaaaat

SEQ ID NO: 507563 - DNA, 75 bp, synthetic construct
  source 1..75: mol_type = other DNA
cgaactgggcgcagacgaacaggcaatgctgctaaaagccattgaagagaaaacctttacccgtttggcagcgat

SEQ ID NO: 507564 - DNA, 75 bp, synthetic construct
  source 1..75: mol_type = other DNA
gcttcctggaagtcgacgcgcaaaaaagttatttcattccgccgccgcagatgaaaaaagtcatgcatggcgacc

SEQ ID NO: 507565 - DNA, 75 bp, synthetic construct
  source 1..75: mol_type = other DNA
gtcatgcccgcgtccggaaggggctttgttccgccgcgtgctcaggctgcacaccagatggcgacttgcgcaatg

SEQ ID NO: 507566 - DNA, 75 bp, synthetic construct
  source 1..75: mol_type = other DNA
acgctgcaaaccacgcgcgatccagacatttatgctattggcgactgtgcgtcatgcccgcgtccggaagggggt

SEQ ID NO: 507567 - DNA, 75 bp, synthetic construct
  source 1..75: mol_type = other DNA
tttctatgctgaactgacacaatacatcacttttggtgacgatcactttgtaccgtggtgggttacccttgcgcg

SEQ ID NO: 507568 - DNA, 75 bp, synthetic construct
  source 1..75: mol_type = other DNA
gcccgcgtactgcgcgataagctcggttttggcatctataacgtgcatatgggctttgatccggcgaatgccgac

SEQ ID NO: 507569 - DNA, 75 bp, synthetic construct
  source 1..75: mol_type = other DNA
cgaagctggtgtatgaccaggtttctgactggctggaaaataccggtgactggcagcctgaaagtgaagcaattg

SEQ ID NO: 507570 - DNA, 75 bp, synthetic construct
  source 1..75: mol_type = other DNA
cttcaaccgcatgattgagcagatcgaaaaagtggcgatcaaatcccgcgcaccgatcctgcttaacggcccgac

SEQ ID NO: 507571 - DNA, 75 bp, synthetic construct
  source 1..75: mol_type = other DNA
atcaatctctggaccttcaccctgccggggctacgccagcgccaggaagatattgaaccgaacctggattatgaa

SEQ ID NO: 507572 - DNA, 75 bp, synthetic construct
  source 1..75: mol_type = other DNA
tgggcgcagaggcagaaaacatcgacctttttgacaggctgcaactggaacacgtgatagctctctgtcgccagg

SEQ ID NO: 507573 - DNA, 75 bp, synthetic construct
  source 1..75: mol_type = other DNA
gtcatgcccgcgtccggaagggggctttgttccgccgcgtgctcaggctgcacaccagatggcgacttgcgcaat

SEQ ID NO: 507574 - DNA, 75 bp, synthetic construct
  source 1..75: mol_type = other DNA
ttgactacgccattgaaaaagattgtgattgtcggcggcggtgctggtgggctggaaatggcaacacagctgggg

SEQ ID NO: 507575 - DNA, 75 bp, synthetic construct
  source 1..75: mol_type = other DNA
tcgatttaagccgttataacgctattgccagccgctttgccgaagaacgccagcaaaccctcgatttcctcaaat

SEQ ID NO: 507576 - DNA, 75 bp, synthetic construct
  source 1..75: mol_type = other DNA
caagaatgaccgtctggccatcgtgcctgatcatccactcttaaaagacgctattccttgccgcgctgcccgcgg

SEQ ID NO: 507577 - DNA, 75 bp, synthetic construct
  source 1..75: mol_type = other DNA
cgtcgcgcagatttgctggtttctgctggcggaagcgcgttatctacccgccaggttgatacaatcttcacctcc

SEQ ID NO: 507578 - DNA, 75 bp, synthetic construct
  source 1..75: mol_type = other DNA
aaggcacatgaacaacaaatggtaagcaatggcatgaagaaatgcccttactgtgcggagttgatcaaagaagag

SEQ ID NO: 507579 - DNA, 75 bp, synthetic construct
  source 1..75: mol_type = other DNA
cttgccaaacctcgacttgacccgactggtacagggacgaattcgataatccttgatggatttattgaacaagga

SEQ ID NO: 507580 - DNA, 75 bp, synthetic construct
  source 1..75: mol_type = other DNA
tatcgagcctaatctggattatgaagtggagcgccacgcctcactcaccggtgacagcgtgcgttttaacaccga

SEQ ID NO: 507581 - DNA, 75 bp, synthetic construct
  source 1..75: mol_type = other DNA
caaagtcgctttccgcagccggacgccagctttttgatgtttcgcgccagggcaaagccagcgtcaatgacgcgg

SEQ ID NO: 507582 - DNA, 75 bp, synthetic construct
  source 1..75: mol_type = other DNA
tcgccaggtgagcagtgattttcagcttatcgccggaacggtgcgcgatttgcgccagctggttgccgaaggcaa

SEQ ID NO: 507583 - DNA, 75 bp, synthetic construct
  source 1..75: mol_type = other DNA
tgatgttctggaagtaactgacaagggccaagaggttgagttttggaaccgtgagaatggtgcctgcgtcggtca

SEQ ID NO: 507584 - DNA, 75 bp, synthetic construct
  source 1..75: mol_type = other DNA
atggacgttggcggatgttcctgcatgggtggacaaaaaagcgttctccagcgtcaagggtatgaatgaacctga

SEQ ID NO: 507585 - DNA, 75 bp, synthetic construct
  source 1..75: mol_type = other DNA
caagagccgttggggccgacgaagtgatcgcacgattgttaatccctgtgaacgctaacattaccgccggtggga

SEQ ID NO: 507586 - DNA, 75 bp, synthetic construct
  source 1..75: mol_type = other DNA
gattttaaacttggcactcctgtaagggtcaatatttatagcaaagatgatgaagatcctatgttagcaggttta

SEQ ID NO: 507587 - DNA, 75 bp, synthetic construct
  source 1..75: mol_type = other DNA
acgcaggtttcatacaattggaaactatctggtattccaagttgggttgataaacaagcattcatagctgcaggc

SEQ ID NO: 507588 - DNA, 75 bp, synthetic construct
  source 1..75: mol_type = other DNA
gtgtgaaagggataaacgaacctgttgaaagtgtcatagctcttgttaaaaccagcaacggctggaaagccaatt

SEQ ID NO: 507589 - DNA, 75 bp, synthetic construct
  source 1..75: mol_type = other DNA
gtcattaaaatggcgacccgcaccgaactggcgaaccgctggtttgatttgatggatattaatgcgggcactatc

SEQ ID NO: 507590 - DNA, 75 bp, synthetic construct
  source 1..75: mol_type = other DNA
caagtggcttcaggaattaccgtgcaagtgtttacgacaggtcgcggcacgccatacggcctgatggcggtgccg

SEQ ID NO: 507591 - DNA, 75 bp, synthetic construct
  source 1..75: mol_type = other DNA
ttatgaggcttttgacgctgcaattaagagagcgaagatcgagcttcctgatgggcaattaactcatgtgctacg

SEQ ID NO: 507592 - DNA, 75 bp, synthetic construct
  source 1..75: mol_type = other DNA
tctggaggttggcgccggaaccgcagccactaccgcgccggtgctgaaggccacgcggcagtcgtaccacttcac

SEQ ID NO: 507593 - DNA, 75 bp, synthetic construct
  source 1..75: mol_type = other DNA
gtgctcggcatcaccaccagcgtccactgtgtggcaggcgtggtggactatgtagtaaaaatcattgaacgcgat

SEQ ID NO: 507594 - DNA, 75 bp, synthetic construct
  source 1..75: mol_type = other DNA
aagcgcgattgtagaagtgctgtcgccagggcagcgtccgaccaaacgtggattaatttacgccgcgacgccagc

SEQ ID NO: 507595 - DNA, 75 bp, synthetic construct
  source 1..75: mol_type = other DNA
atgattacaagattctgtgtggtggctatggtgagcttgaatgggactatgcgttaagtacctatggcaactcca

SEQ ID NO: 507596 - DNA, 75 bp, synthetic construct
  source 1..75: mol_type = other DNA
gcttggcgatcccatcgcttctgaattgacagcaggtgatttcacaaagtaccgggaagccagattaaaaggtga

SEQ ID NO: 507597 - DNA, 75 bp, synthetic construct
  source 1..75: mol_type = other DNA
atgtcgccagtaaaaccacgcacggtgaatcttgagcaacgtaacctatcatcggttttcggcacattgaaaaaa

SEQ ID NO: 507598 - DNA, 75 bp, synthetic construct
  source 1..75: mol_type = other DNA
ctaaccccggaggaaattaaacgtctgctggatgcctgtgctgattctcaaagccccagtctgctaatgattgca

SEQ ID NO: 507599 - DNA, 75 bp, synthetic construct
  source 1..75: mol_type = other DNA
gctggagtgaagctgaaaacctgcagggccatcagttatctaaataccgcatcacttataccaagacgaagggta

SEQ ID NO: 507600 - DNA, 75 bp, synthetic construct
  source 1..75: mol_type = other DNA
gagcatatatctcagggagctacatcggtatccgttattaatcatacgccaccaggaagttatattgccgtagat

SEQ ID NO: 507601 - DNA, 75 bp, synthetic construct
  source 1..75: mol_type = other DNA
ttaagcgatgccgaaggctgctggcacttggaacaggcggtgatgcgcggtgccccgtggcgactggcgatgcgc

SEQ ID NO: 507602 - DNA, 75 bp, synthetic construct
  source 1..75: mol_type = other DNA
ggtttaacgctcgctggcaggaggcctggcgtatgctttcacagcgtcatggcgacgctctgcctgtggaaccgc

SEQ ID NO: 507603 - DNA, 75 bp, synthetic construct
  source 1..75: mol_type = other DNA
tgattgtggtcacccgccgcgcgtggcgagtcgaggaaaatgaggcactctctgcgtcccatcacgcgctatggg

SEQ ID NO: 507604 - DNA, 75 bp, synthetic construct
  source 1..75: mol_type = other DNA
aaaaaggggcgcgacgcatcgccctgctggcgccgcgcgtggatgagtcatggctacgcgacgtggagggcgggc

SEQ ID NO: 507605 - DNA, 75 bp, synthetic construct
  source 1..75: mol_type = other DNA
tgcgcgttgaagcccgtcatcctgctggccagtggctgccgctatcgcccgccgagcctcttcctgcgccgcaaa

SEQ ID NO: 507606 - DNA, 75 bp, synthetic construct
  source 1..75: mol_type = other DNA
tcatgatggaagccccccacgttcaggcttgtgcgcaacacattacgcgctggctttgcgcaacctcaacgcaac

SEQ ID NO: 507607 - DNA, 75 bp, synthetic construct
  source 1..75: mol_type = other DNA
agcggcagaaacgtggctcgacaacatcgcgcatctgctgcgtttactgactgagcatacgccgggcgaaagcgt

SEQ ID NO: 507608 - DNA, 75 bp, synthetic construct
  source 1..75: mol_type = other DNA
caggatggcagcccgaacgccgggatgagcgaacatatcattctcgccacgctgcccggtcaggcggttagcgcc

SEQ ID NO: 507609 - DNA, 75 bp, synthetic construct
  source 1..75: mol_type = other DNA
tctcggtgatcctctccagcgcggtcaacaacgacggcaacagaaaggtcggctataccgccccttccgtcgccg

SEQ ID NO: 507610 - DNA, 75 bp, synthetic construct
  source 1..75: mol_type = other DNA
ggcgacgctctgcctgtggaaccgccccccgtcgtcgccccggagtggctagggaaggttcgcttaagctggcaa

SEQ ID NO: 507611 - DNA, 75 bp, synthetic construct
  source 1..75: mol_type = other DNA
gacggaaagagagtggttaatccgcgaaggtgaaagctggcgctgccgcattccgctcagcgagattcctgagcc

SEQ ID NO: 507612 - DNA, 75 bp, synthetic construct
  source 1..75: mol_type = other DNA
ctttcacagcgtcatggcgacgctctgcctgtggaaccgccccccgccgccgccccggagtggctggggaaggtt

SEQ ID NO: 507613 - DNA, 75 bp, synthetic construct
  source 1..75: mol_type = other DNA
cgcagtctcactatcacagcgctggctcgccgcacggggtgacaccctttggcttccttcactgtcgcccaatac

SEQ ID NO: 507614 - DNA, 75 bp, synthetic construct
  source 1..75: mol_type = other DNA
tgttggctgcatgtgctgaatctcaaagcccgagcctactaatgattaccaaaatatgcttagctaccggcgcac

SEQ ID NO: 507615 - DNA, 75 bp, synthetic construct
  source 1..75: mol_type = other DNA
tccttaaacaatgcgtaggcaaggagaagatctttttgacaaccatttttgaaaaatattttatttttattagtc

SEQ ID NO: 507616 - DNA, 75 bp, synthetic construct
  source 1..75: mol_type = other DNA
tcaactggaagagcggtaagtctgagaagtgcatcttctgctatccgcgtattgaagccggccagccgacaatat

SEQ ID NO: 507617 - DNA, 75 bp, synthetic construct
  source 1..75: mol_type = other DNA
tctgccgatgggcgttaccacgccagatatctggggcggtaaccgcaccccagaacaggaacgttatgccagctc

SEQ ID NO: 507618 - DNA, 75 bp, synthetic construct
  source 1..75: mol_type = other DNA
atgatgtacctgccgcgcctgtgcgaacactgccttaaccccagctgcgtggcgacctgccccagcggcgcgatc

SEQ ID NO: 507619 - DNA, 75 bp, synthetic construct
  source 1..75: mol_type = other DNA
gcaccctgaataccgcaccctgccgatggtctggtacgttcctccgctgtcaccgattcagtcttacgctgatgc

SEQ ID NO: 507620 - DNA, 75 bp, synthetic construct
  source 1..75: mol_type = other DNA
aagaagccctgaaacaaggtattccacaaaacgtgattgaagctgcccagcgttcgccagtctacaaaatggcga

SEQ ID NO: 507621 - DNA, 75 bp, synthetic construct
  source 1..75: mol_type = other DNA
tagtcaggcgttttctttacccgccgtgcgtcgcgcatatggacgtatgcagcaggtcgccagtcggattattgg

SEQ ID NO: 507622 - DNA, 75 bp, synthetic construct
  source 1..75: mol_type = other DNA
gcgccgccagtcagccccgcaaatgagcacgctacagcaaccactctgcgccccctggtatgtattttttcgccg

SEQ ID NO: 507623 - DNA, 75 bp, synthetic construct
  source 1..75: mol_type = other DNA
gagctggcgcaatataattcatggcttgattatctggacgcactggaaatggttgatatttccagtgctccagat

SEQ ID NO: 507624 - DNA, 75 bp, synthetic construct
  source 1..75: mol_type = other DNA
ctaccctatcgctggccttgtgatgctcagcgtcgcctggatgctgtggcgcagtaaacgcgccgcgctttggct

SEQ ID NO: 507625 - DNA, 75 bp, synthetic construct
  source 1..75: mol_type = other DNA
ttggatctgaaaaccaatgaagtggtgtggaagaaacgtattggtacgccgcaggacagtatgccattcccgatg

SEQ ID NO: 507626 - DNA, 75 bp, synthetic construct
  source 1..75: mol_type = other DNA
cacggcgggtaacgtgctgtttatcgccgctacggcagataactacctgcgcgcttacaacatgagcaacggtga

SEQ ID NO: 507627 - DNA, 75 bp, synthetic construct
  source 1..75: mol_type = other DNA
ttgctgctctgctctcaggaagttgttttagcgccgcccgtctcgtatggtgtggaggaagatgtcttccacccg

SEQ ID NO: 507628 - DNA, 75 bp, synthetic construct
  source 1..75: mol_type = other DNA
tgattgccgaaaatggcccggacgcgttttacaaaggcacaatagctgagcagattgcccaggagatgcagaaaa

SEQ ID NO: 507629 - DNA, 75 bp, synthetic construct
  source 1..75: mol_type = other DNA
acaaacgtccgctgtcgtcgatgtcaccaaccattgtggtgaaagacggtaaaacttggctggttaccggtagcc

SEQ ID NO: 507630 - DNA, 75 bp, synthetic construct
  source 1..75: mol_type = other DNA
ccgaatcacgaaaacagcaaagctatcttctggaaagagggcgaaccgctgaaaaagggcgacaagctggtgcag

SEQ ID NO: 507631 - DNA, 75 bp, synthetic construct
  source 1..75: mol_type = other DNA
gtaaatggatatgcgaatgctaccctgctgggcgcagcgggcggcgtgtgcgtaagcagttcgccaccaaaggcg

SEQ ID NO: 507632 - DNA, 75 bp, synthetic construct
  source 1..75: mol_type = other DNA
cacttaaaacaccttccggtaagattgaaatttattccagcaagctggcggaaattgcccgtacttgggaactgg

SEQ ID NO: 507633 - DNA, 75 bp, synthetic construct
  source 1..75: mol_type = other DNA
atgtccaaaaatgaccgaatggtgggcatcagccgcagaacactcgttaaatcaaccgcgataggttctctggcg

SEQ ID NO: 507634 - DNA, 75 bp, synthetic construct
  source 1..75: mol_type = other DNA
cgtataaagcggtcgaacgtacaccaataagtggcgattatcgcgggtatcaggtttactccatgccaccgccat

SEQ ID NO: 507635 - DNA, 75 bp, synthetic construct
  source 1..75: mol_type = other DNA
atgataaaaccgacgtttttacgccgggtggccattgctgctctgttcacaggaagttgttttagtacggtagcc

SEQ ID NO: 507636 - DNA, 75 bp, synthetic construct
  source 1..75: mol_type = other DNA
tggagaaatacggcaccatgccgctgaacaaagttgtgcagcccgcgtttaaactggcacgcgatggttttatcg

SEQ ID NO: 507637 - DNA, 75 bp, synthetic construct
  source 1..75: mol_type = other DNA
atgataaaaccgacgtttttacgccgggtggccattgctactctgctctcaggaagttgttttagcgccgccgcc

SEQ ID NO: 507638 - DNA, 75 bp, synthetic construct
  source 1..75: mol_type = other DNA
tttaaactggcacgcgatggttttatcgttaacgacgcgctggctgacgatctcaaaacctacggtagcgaagtg

SEQ ID NO: 507639 - DNA, 75 bp, synthetic construct
  source 1..75: mol_type = other DNA
aggaagttgttttagtacggtagccgcgccacctgtttcttatggtgtggaggaagatgtcttccatccggtacg

SEQ ID NO: 507640 - DNA, 75 bp, synthetic construct
  source 1..75: mol_type = other DNA
ccgctggaattattacggtattcccgcgtgctatgttgaatatgaaaattgtagatattcagagtttatataata

SEQ ID NO: 507641 - DNA, 75 bp, synthetic construct
  source 1..75: mol_type = other DNA
ggcgcagttatcttggcaatttacattactgcacgccgtggtcgcaaaaccagcccgcatcgcggcaaattgtca

SEQ ID NO: 507642 - DNA, 75 bp, synthetic construct
  source 1..75: mol_type = other DNA
agataaaatacgcattaataaagttaacgaaaaaattgacaccttatattttttcattacatcggaaaggcagaa

SEQ ID NO: 507643 - DNA, 75 bp, synthetic construct
  source 1..75: mol_type = other DNA
gatattttaatggctataagaaaagatgttttgaaacaaatagacaatattgatattgaggtaaataagctaaaa

SEQ ID NO: 507644 - DNA, 75 bp, synthetic construct
  source 1..75: mol_type = other DNA
gttttgtttacccagaaaagcagtcatcaatttcggtcgagcttaaaaatactgccagtaaagatatgctggtta

SEQ ID NO: 507645 - DNA, 75 bp, synthetic construct
  source 1..75: mol_type = other DNA
gggaaaatcacccaaagagctggcagaatctcaatttgcttatatgacaaatataagagtatccgaaatctttga

SEQ ID NO: 507646 - DNA, 75 bp, synthetic construct
  source 1..75: mol_type = other DNA
ctataaggggctttcgttacgggattatcagcaccagttcttctctgaggtattaagcgattttcccctgctggg

SEQ ID NO: 507647 - DNA, 75 bp, synthetic construct
  source 1..75: mol_type = other DNA
taacacgctggggaatggttgctaccggattactccaggggctggtttgctacttgctgataacctggcttgccg

SEQ ID NO: 507648 - DNA, 75 bp, synthetic construct
  source 1..75: mol_type = other DNA
gtttaatcgactctattcaaaagttgttcacgttaatcgccacggggttgctgccgttagtatcattgctaaccc

SEQ ID NO: 507649 - DNA, 75 bp, synthetic construct
  source 1..75: mol_type = other DNA
gcctgattcaaaccgctctgctggtcgccccattgtatgtgttcgtcgccgcctgggcgttatggctgcgggtcg

SEQ ID NO: 507650 - DNA, 75 bp, synthetic construct
  source 1..75: mol_type = other DNA
gccaggcttcactctctatcaactggtgagaacggcttgcccggcagcttcgatgtgtgctggagggagaataaa

SEQ ID NO: 507651 - DNA, 75 bp, synthetic construct
  source 1..75: mol_type = other DNA
tgaagtggcaaactgatggcatgaacccctggagagctgaaaaggcgctttgggattttggctgctatctgctgc

SEQ ID NO: 507652 - DNA, 75 bp, synthetic construct
  source 1..75: mol_type = other DNA
tatggcgcgttatcagagcggcaaaaacacgccagaccaggtaactatctacatgctcgaacagagcggtcgcta

SEQ ID NO: 507653 - DNA, 75 bp, synthetic construct
  source 1..75: mol_type = other DNA
atgccttacccgtatggagcgtaaaattaaatgttttacaaaataatgctattatgggtgcagtagcgatacatg

SEQ ID NO: 507654 - DNA, 75 bp, synthetic construct
  source 1..75: mol_type = other DNA
ataatgtattgcctgcatggaaagtaaatatgaatccgttgcagatggatgtgttaggctcacaagttaaaacgg

SEQ ID NO: 507655 - DNA, 75 bp, synthetic construct
  source 1..75: mol_type = other DNA
gttcccgccatcacaatttgctgagattgtatgtaacccggcattacagcagagggtacgcctggaaggcctcag

SEQ ID NO: 507656 - DNA, 75 bp, synthetic construct
  source 1..75: mol_type = other DNA
tcacaatatagcgcagcgcttctgccagggagctaacgacgacagtattgccaacttgcggtatgaaatgtctgc

SEQ ID NO: 507657 - DNA, 75 bp, synthetic construct
  source 1..75: mol_type = other DNA
cgttactcgcggtttctctgcttcccttctcttctgtcaacgctgtggcgttgcaggcaaaacagtatggcgatt

SEQ ID NO: 507658 - DNA, 75 bp, synthetic construct
  source 1..75: mol_type = other DNA
tcatggcgatcgagaaaaggcaaaagaactgaccaatgaagcttccgctttgctgtcagatgacagtaccgaatg

SEQ ID NO: 507659 - DNA, 75 bp, synthetic construct
  source 1..75: mol_type = other DNA
catttgctggcttttacttgtcaaccagaacgacatgatgaactgttaacgttagcgaatgaagtgatggttaag

SEQ ID NO: 507660 - DNA, 75 bp, synthetic construct
  source 1..75: mol_type = other DNA
atgaaaaatcatgaacttaaaaatctgacggattattccccggaggataaaccgtgggatgagcgccggagcttt

SEQ ID NO: 507661 - DNA, 75 bp, synthetic construct
  source 1..75: mol_type = other DNA
gctaaggactcttttagctataaaattgccatccttaaaaatgacagtgagctaaaacagtccattattgataat

SEQ ID NO: 507662 - DNA, 75 bp, synthetic construct
  source 1..75: mol_type = other DNA
atgcatcagtttcctttatcgtcacttatgattaatgtgctgatattctttttaatatgttgcacaaatgcgcaa

SEQ ID NO: 507663 - DNA, 75 bp, synthetic construct
  source 1..75: mol_type = other DNA
gttcagcgcagcctcgatatccaacagcgtagcgttcaacaattagcgaacaccattgtaaatagtcttattcaa

SEQ ID NO: 507664 - DNA, 75 bp, synthetic construct
  source 1..75: mol_type = other DNA
atttgctggcttttacttgtcaaccagaacgacatgatgaactgttaacgttagcgaatgaagtgatggttaagc

SEQ ID NO: 507665 - DNA, 75 bp, synthetic construct
  source 1..75: mol_type = other DNA
aaaatttattgatctacgtttcaacactcttggtggcgcaggtatacctagtaacattggcatcaatgcagctaa

SEQ ID NO: 507666 - DNA, 75 bp, synthetic construct
  source 1..75: mol_type = other DNA
atggataacgttgaactttcaccggcaacacgctgggggatgattgctaccggattacttcagggtctggtttgc

SEQ ID NO: 507667 - DNA, 75 bp, synthetic construct
  source 1..75: mol_type = other DNA
ccatggtgcatattgtggcgcttatgagccccggtcccgatttcttttttgtctctcagaccgctgtcagtcgtt

SEQ ID NO: 507668 - DNA, 75 bp, synthetic construct
  source 1..75: mol_type = other DNA
ccgaaagcgattatctattttggttcggtattctcattgtttgtcggcgataacgtcggcaccaccgagcgctgg

SEQ ID NO: 507669 - DNA, 75 bp, synthetic construct
  source 1..75: mol_type = other DNA
gttggcggtggtctgtatctttgctggatgggttaccagatgctgcgcggtgcgctgaaaaaagaggctgtttct

SEQ ID NO: 507670 - DNA, 75 bp, synthetic construct
  source 1..75: mol_type = other DNA
tatcagggcgtactgcaggctgatgcctatgcaggttataacgtactgtacgaaacgggccgggtgaaggaagcc

SEQ ID NO: 507671 - DNA, 75 bp, synthetic construct
  source 1..75: mol_type = other DNA
gtctctcagactgccgttagtcgttcccgtaaagaagcgatgatgggcgtgttgggtattacctgtggtgtaatg

SEQ ID NO: 507672 - DNA, 75 bp, synthetic construct
  source 1..75: mol_type = other DNA
ggcctggctgcatacgctgattatggttggcggtggcctgtatctctgctggatgggttaccagatgctacgcgg

SEQ ID NO: 507673 - DNA, 75 bp, synthetic construct
  source 1..75: mol_type = other DNA
acagcggcgataaagatgcttacggtctgaaggttaagggtgacagcatgtggccaaggattcagtcaggagaat

SEQ ID NO: 507674 - DNA, 75 bp, synthetic construct
  source 1..75: mol_type = other DNA
cggagctggcgcataacgtaggaatttcgattcctgccgccgggcatatgatctcgtattatgcgctgggggtgg

SEQ ID NO: 507675 - DNA, 75 bp, synthetic construct
  source 1..75: mol_type = other DNA
gtttttcggaaacggcgatgacgtttattatgatgttagttgggctggggatggttctgggaaatattctaagtg

SEQ ID NO: 507676 - DNA, 75 bp, synthetic construct
  source 1..75: mol_type = other DNA
atgcgccgtggttatcagcgcctgtcgaagtggatcgatggttttgccggagcgttatttgccggatttggcata

SEQ ID NO: 507677 - DNA, 75 bp, synthetic construct
  source 1..75: mol_type = other DNA
ggtggatttgtttattctcccgtgtatcacatcagtattcagaataaagggagcaatggcgagatagatacgcag

SEQ ID NO: 507678 - DNA, 75 bp, synthetic construct
  source 1..75: mol_type = other DNA
cgggaattttgccggtctcgaactttaaacaagcgaagaaatttgccgatatgaccaacgtgcgtattccggcgt

SEQ ID NO: 507679 - DNA, 75 bp, synthetic construct
  source 1..75: mol_type = other DNA
cggaaagctggttgcaaaccagccagcttgactacgcgattctccgtcccggcggcctgcttgatggtgcggcaa

SEQ ID NO: 507680 - DNA, 75 bp, synthetic construct
  source 1..75: mol_type = other DNA
gggatggctggcgctggtgtttattgccacgctagggatgagcggttggctaaagtggcaaattgatggcatgaa

SEQ ID NO: 507681 - DNA, 75 bp, synthetic construct
  source 1..75: mol_type = other DNA
ctttgactcagacagaaaagaatgggacgcgcttgatatgagtttacttccgaacgaaataacgaaagaaaaatt

SEQ ID NO: 507682 - DNA, 75 bp, synthetic construct
  source 1..75: mol_type = other DNA
ccgttcgaactggataaatatccgtcgaaaatgattgccggattgccggatcacgtacacaacgcggcgcgtatt

SEQ ID NO: 507683 - DNA, 75 bp, synthetic construct
  source 1..75: mol_type = other DNA
tggcgtgcctgcgaccgtcgcgttttcatccgttttactcttctccgtgatctcttttaaacagaagcgcctttg

SEQ ID NO: 507684 - DNA, 75 bp, synthetic construct
  source 1..75: mol_type = other DNA
tggcgttagatggagagcaacatcttcaggaacaggtatcggaaaaagtattagccgataatgtgttaattgccc

SEQ ID NO: 507685 - DNA, 75 bp, synthetic construct
  source 1..75: mol_type = other DNA
tgatggcaatgctgttgctaccgtggatacaacaaagccttcgcatccgcaatgacagtagccgctatcgctatt

SEQ ID NO: 507686 - DNA, 75 bp, synthetic construct
  source 1..75: mol_type = other DNA
gcactggggcggcgtaactacatgttcttcggctctgatggtggaggcgagagtgcggcagtgatgtacagcctg

SEQ ID NO: 507687 - DNA, 75 bp, synthetic construct
  source 1..75: mol_type = other DNA
tcagaaatggcagacaaactccgtcctctgtatatagcgctgaatgactatgttctggaggcaggaaaggtgcac

SEQ ID NO: 507688 - DNA, 75 bp, synthetic construct
  source 1..75: mol_type = other DNA
ccagtaagccagaatccccgggacgaaaatcgtcacgaaaacctctgccggcaaaacttccccgggagacacatc

SEQ ID NO: 507689 - DNA, 75 bp, synthetic construct
  source 1..75: mol_type = other DNA
atggtttccagcatctacgcagaagcggggctcgacccaaccttcgttaacggcgggctggtaaaagcggcgggg

SEQ ID NO: 507690 - DNA, 75 bp, synthetic construct
  source 1..75: mol_type = other DNA
cgaattgtcagcccacctgcttactccgggaaacgcctgaatgcggttctttgtctttaccttgttttaatttca

SEQ ID NO: 507691 - DNA, 75 bp, synthetic construct
  source 1..75: mol_type = other DNA
ctgcgcggcaatttcgcgcgccagcggcagcttaaacaaccctaccctgtctgccgataacgcgctttcattagt

SEQ ID NO: 507692 - DNA, 75 bp, synthetic construct
  source 1..75: mol_type = other DNA
ggatatagctgttaatccagatatgacagcattatgggctgaaaagcaggcagctattgaaaatggtgatctgac

SEQ ID NO: 507693 - DNA, 75 bp, synthetic construct
  source 1..75: mol_type = other DNA
gataaaccatctgacctcggtgaagaccgtaacggaagggcttgctcaggcaacagagcagcttgccgttgagca

SEQ ID NO: 507694 - DNA, 75 bp, synthetic construct
  source 1..75: mol_type = other DNA
tcagcgaagcgccgcaggttattgatgccctgaagtcagttttcgatcagccaatgaatgttgatacaacacgta

SEQ ID NO: 507695 - DNA, 75 bp, synthetic construct
  source 1..75: mol_type = other DNA
cgctggcgcgttcagttgctgatgccgtctatggcttctccatgacgcgtgcttacaccattccggcacaggcca

SEQ ID NO: 507696 - DNA, 75 bp, synthetic construct
  source 1..75: mol_type = other DNA
tatgcccgtgccagaaaaacaactgacagcggatttgaggcgtttcttggcgcggaaaccacagacgaaggtgaa

SEQ ID NO: 507697 - DNA, 75 bp, synthetic construct
  source 1..75: mol_type = other DNA
catgatggctggtttgaaagtgatagcgcaattgtgactaactgttttggtcatattatcgaatcacagccaccg

SEQ ID NO: 507698 - DNA, 75 bp, synthetic construct
  source 1..75: mol_type = other DNA
ccggcgaacggtgccaggtgattgttcctccggcctgtgagcgcgatacggtgtctatcaccatccgtaagccat

SEQ ID NO: 507699 - DNA, 75 bp, synthetic construct
  source 1..75: mol_type = other DNA
gcgacgtattcagggccagtctgacagcccgctgaccgccaaaggtgagcaacaggcgatgcaggtggcgacgcg

SEQ ID NO: 507700 - DNA, 75 bp, synthetic construct
  source 1..75: mol_type = other DNA
aagtcgcccgctgctggtgagccacgggattgcgctggggtgtctggtgagtaccatcctgggcttaccggcgtg

SEQ ID NO: 507701 - DNA, 75 bp, synthetic construct
  source 1..75: mol_type = other DNA
tggaacgtatgatacagttcttgttcttgaggataagaaaacagggaagctggggtttccggtaagggctaagaa

SEQ ID NO: 507702 - DNA, 75 bp, synthetic construct
  source 1..75: mol_type = other DNA
tgcatccgcaagcgttgggcgaggtgcaaatatccctaaaagtggatgataaccaggcgcaaattcagatggttt

SEQ ID NO: 507703 - DNA, 75 bp, synthetic construct
  source 1..75: mol_type = other DNA
gaaacatggcatccgctttgaagatgcggtgttggtgtttgatgatccacaacatttgtcacagcaagatcgcat

SEQ ID NO: 507704 - DNA, 75 bp, synthetic construct
  source 1..75: mol_type = other DNA
acacgcttccggcagtgaaaaaggcactggcaaatcttaaagacaatcgtgatttcaaaggactttaccttaagg

SEQ ID NO: 507705 - DNA, 75 bp, synthetic construct
  source 1..75: mol_type = other DNA
ttgatattgaaaaaatattgaagtatttatttttcttcgcctttgccgtattggtcattatttatggttataaag

SEQ ID NO: 507706 - DNA, 75 bp, synthetic construct
  source 1..75: mol_type = other DNA
tatcaggtcgaaaggttatttctgtaccggatgtgaatttaaaatctggaaaaatttttatggtaaagcattatc

SEQ ID NO: 507707 - DNA, 75 bp, synthetic construct
  source 1..75: mol_type = other DNA
gataaggcatgggcaaacggaacggctgcatcccttgcaggaaaaccggctacagttgaagcagcagcaactgat

SEQ ID NO: 507708 - DNA, 75 bp, synthetic construct
  source 1..75: mol_type = other DNA
catcttcgttcagtcctgagttggaggcttttcgtgcgcaaattgtagccaatgggcgcggagatattacattag

SEQ ID NO: 507709 - DNA, 75 bp, synthetic construct
  source 1..75: mol_type = other DNA
ggcatcaatgattataagtcctgataaatgtgtttatgatcctatcaagggaaacttcattataaaagatagtta

SEQ ID NO: 507710 - DNA, 75 bp, synthetic construct
  source 1..75: mol_type = other DNA
tgaccgtggctatttaattattgatgcaacgcttgccgttactgtaccggatagtgttgaaatcgtcacttatat

SEQ ID NO: 507711 - DNA, 75 bp, synthetic construct
  source 1..75: mol_type = other DNA
aattgaacccgcagcgccagcaggacaatctcaacgcctgagttctccctgcccttcatgcggcaaacaaattgt

SEQ ID NO: 507712 - DNA, 75 bp, synthetic construct
  source 1..75: mol_type = other DNA
gaggatacaaaggtacactttcagtaggacgcgtccagacccccattcttggcctgattgtgaatcgtacccgcg

SEQ ID NO: 507713 - DNA, 75 bp, synthetic construct
  source 1..75: mol_type = other DNA
gtcgcggattttgtcactgacccaacgattaaaaaattgttgaaggataaagataaagacaaaaaagatgaacat

SEQ ID NO: 507714 - DNA, 75 bp, synthetic construct
  source 1..75: mol_type = other DNA
gaagattgaacccgctgcgccagcagggcagtttcaacgcctggactctccctgcccttcctgtggtaaacatat

SEQ ID NO: 507715 - DNA, 75 bp, synthetic construct
  source 1..75: mol_type = other DNA
gaaaactataatcctgattacaaagcctggaaagttgaaacactccctttacgtctttaccccgtcaaataccag

SEQ ID NO: 507716 - DNA, 75 bp, synthetic construct
  source 1..75: mol_type = other DNA
ccaaccgttagcgtaccggacgtaaacgcactgagcaccgacgaacgcaacgtttacctggcaattgcacaacac

SEQ ID NO: 507717 - DNA, 75 bp, synthetic construct
  source 1..75: mol_type = other DNA
gaggcggtaggcagtcttgtgcagctgattgaccagcgggtgcaggcggtgatgctgtccatgcgacgtgacgga

SEQ ID NO: 507718 - DNA, 75 bp, synthetic construct
  source 1..75: mol_type = other DNA
ccgcgtctgggcagcaagatgggcgtaataaccaaaatcttcgccaacccggtggtgccgcagattgatgattac

SEQ ID NO: 507719 - DNA, 75 bp, synthetic construct
  source 1..75: mol_type = other DNA
cagaaacctgcgtgggtcgcatccgatatctgggcgtgctgctttacgacgctgaccgcatcgaggaagtgaacc

SEQ ID NO: 507720 - DNA, 75 bp, synthetic construct
  source 1..75: mol_type = other DNA
aggccgtggcggcagcccgcgggacggagatgcagattgctgcagaggcccgtctggcggccacacaggaacgcc

SEQ ID NO: 507721 - DNA, 75 bp, synthetic construct
  source 1..75: mol_type = other DNA
aggaagagtggcaaggcggctgggtccgcgatgtgaatggcaagatacgcccgcgtctgggcagcaagatgggtg

SEQ ID NO: 507722 - DNA, 75 bp, synthetic construct
  source 1..75: mol_type = other DNA
atgaaaatccgttcgcaagtcggcatggtgcttaatctcgataaatgtatcggctgccatacctgttcggtgacc

SEQ ID NO: 507723 - DNA, 75 bp, synthetic construct
  source 1..75: mol_type = other DNA
atggtctggtacgttcctccgctgtcgccgattcagtcctacgcagatgcgggcggtttgccgaaaagcgaaggc

SEQ ID NO: 507724 - DNA, 75 bp, synthetic construct
  source 1..75: mol_type = other DNA
gtgaaggcggggcgaacatggcccccaacgcgaaaaatttacgctatgcgattacggggttagataatatttcat

SEQ ID NO: 507725 - DNA, 75 bp, synthetic construct
  source 1..75: mol_type = other DNA
actttctgcaagttcattcttgccacaaccgcacccgggcaactgcggtcaaacatttgtgctcgataaagtcgg

SEQ ID NO: 507726 - DNA, 75 bp, synthetic construct
  source 1..75: mol_type = other DNA
aaagagatcaaagagagcgatgccggacaatttcttgccgataactacggtaaaacggtgaaccgcagcgctttt

SEQ ID NO: 507727 - DNA, 75 bp, synthetic construct
  source 1..75: mol_type = other DNA
ttaaccccagttgtgtagcgacctgccccagcggcgctatctacaaacgcgaagaagacggcattgtgctgatcg

SEQ ID NO: 507728 - DNA, 75 bp, synthetic construct
  source 1..75: mol_type = other DNA
ggtcagaaaatttgggaaagtgacgatatcgctgtccacgtcttttgcaacaatgcaggtaactggtcatctgct

SEQ ID NO: 507729 - DNA, 75 bp, synthetic construct
  source 1..75: mol_type = other DNA
tacgacagatacgttacatgatgatacgcatctggaaatgggtaatggtttgttgatgcgtattactgatcaaaa

SEQ ID NO: 507730 - DNA, 75 bp, synthetic construct
  source 1..75: mol_type = other DNA
taacgcgaagaatttacgctatgtgattacgggattagataatatttcattccttgactgtagtgtcgacgtccg

SEQ ID NO: 507731 - DNA, 75 bp, synthetic construct
  source 1..75: mol_type = other DNA
ccggttttatcgccgggaaaaacgccagactgcatcagggggttaatggtcagagcaacaaaacgctggcactgg

SEQ ID NO: 507732 - DNA, 75 bp, synthetic construct
  source 1..75: mol_type = other DNA
cagtaatcagagcagtagaaaaaagaagaacagtagcagtagcagtagcagtagcagtagcaggaacaacaacat

SEQ ID NO: 507733 - DNA, 75 bp, synthetic construct
  source 1..75: mol_type = other DNA
cgcttcccttccggcaggcgccagcctgccaggggttttcgcgcgggctgacaggcggcctccaccgcctgccct

SEQ ID NO: 507734 - DNA, 75 bp, synthetic construct
  source 1..75: mol_type = other DNA
gcgagcgtgaactgactctgtcccgcctgaagggggaagcgcgtgagcgtgcccggctgggttatgccgcggatg

SEQ ID NO: 507735 - DNA, 75 bp, synthetic construct
  source 1..75: mol_type = other DNA
gatttctccttcaccgttgacggtcgttaccgcgtggacgtgaaaggtgacggtgatggctttggtttatttcac

SEQ ID NO: 507736 - DNA, 75 bp, synthetic construct
  source 1..75: mol_type = other DNA
cggggtgcagagtttgccgctactgccggttttatcgccgggaaaaacgccagactgcatcagggggttaatggt

SEQ ID NO: 507737 - DNA, 75 bp, synthetic construct
  source 1..75: mol_type = other DNA
cagttaatactctcaagcggttagaagatgggcgcctgctgggtgacaatactgatggcataggtttgctaagcg

SEQ ID NO: 507738 - DNA, 75 bp, synthetic construct
  source 1..75: mol_type = other DNA
ctgtgcggtgacaatcactaatcggacggtatcccgcgcggaagagttgactaaattgtttgcgcacactggcag

SEQ ID NO: 507739 - DNA, 75 bp, synthetic construct
  source 1..75: mol_type = other DNA
agatggacgcctgctgggtgacaataccgatggtataggtttgttaagcgatctggaacgtctgtcttttatccg

SEQ ID NO: 507740 - DNA, 75 bp, synthetic construct
  source 1..75: mol_type = other DNA
atctggaacgtctgtcttttatccgccctggtttacgtattctgcttatcggcgctggtggagcatctcgcggcg

SEQ ID NO: 507741 - DNA, 75 bp, synthetic construct
  source 1..75: mol_type = other DNA
ggcacaggcggctcatgcctttcttctctggcacggtgttctgcctgatgtagaaccggtcatcaaactattgca

SEQ ID NO: 507742 - DNA, 75 bp, synthetic construct
  source 1..75: mol_type = other DNA
ttattaatgcaacatccagtggcattagtggcgatattccagcgattccagcatcgcttattcatccagatattt

SEQ ID NO: 507743 - DNA, 75 bp, synthetic construct
  source 1..75: mol_type = other DNA
cacccagcttaacaacaccctgcgcggggtatttttcaccagtgccgcacaggcgcaggcagacgccgtagcaga

SEQ ID NO: 507744 - DNA, 75 bp, synthetic construct
  source 1..75: mol_type = other DNA
ttcggcggcggataaactgcaactggaggcggcaaaactgcccgcgccgctgaaaaatattctgctggatttaac

SEQ ID NO: 507745 - DNA, 75 bp, synthetic construct
  source 1..75: mol_type = other DNA
gtgaaatcagtgcgacccagcgcaacgccggggagtggcaggggtttctgggactgctgcgtaaacaccgccccg

SEQ ID NO: 507746 - DNA, 75 bp, synthetic construct
  source 1..75: mol_type = other DNA
caggtgctgtcggtaaacagattggtttacttttcattgctgaaaaaactgctcccggccatgaacctctgccag

SEQ ID NO: 507747 - DNA, 75 bp, synthetic construct
  source 1..75: mol_type = other DNA
gccgatggcaggattttctggcaagcattcacagcatcaacagcgccggggaggacggtagccctggactagcgt

SEQ ID NO: 507748 - DNA, 75 bp, synthetic construct
  source 1..75: mol_type = other DNA
gacaaatacaacgcagcggagatccacgcctgggtactgaacgatctggaaaaccgcgatagcgtggcggagttc

SEQ ID NO: 507749 - DNA, 75 bp, synthetic construct
  source 1..75: mol_type = other DNA
cagcgcggacgattttaaccgtatctttgccagcggcggtgtgctggatgcgttctggacgaagcaactggcccc

SEQ ID NO: 507750 - DNA, 75 bp, synthetic construct
  source 1..75: mol_type = other DNA
ttctgcggcggataaactgcaactggaagcggcaaaactgcccgcaccgctgaaaaatattctgctggatctcac

SEQ ID NO: 507751 - DNA, 75 bp, synthetic construct
  source 1..75: mol_type = other DNA
gacggcaaagctattgcaggacatccacccggaagagcggttagagaaatcactggtggatgaccgtttcgccgc

SEQ ID NO: 507752 - DNA, 75 bp, synthetic construct
  source 1..75: mol_type = other DNA
ggtgatggagagcgtcgcatccctgtatgaccgcctgctggaccagctactgctcccgccgctggtgaaacgcat

SEQ ID NO: 507753 - DNA, 75 bp, synthetic construct
  source 1..75: mol_type = other DNA
atgaccttcaggtgctgcgtactctggcctcgccggattccccgctgatgcgcctgagtaaagcggtggtggagc

SEQ ID NO: 507754 - DNA, 75 bp, synthetic construct
  source 1..75: mol_type = other DNA
aggcgcaggcagacgcggtagccgatcagacgggcatctggcagcgttttgtccgggctataaaagggaaggcgg

SEQ ID NO: 507755 - DNA, 75 bp, synthetic construct
  source 1..75: mol_type = other DNA
ctgcatgtgctggaagttaacgtgtgtgagctctgctgcgcagagctgatgagcgatccgaatagctcaatgtac

SEQ ID NO: 507756 - DNA, 75 bp, synthetic construct
  source 1..75: mol_type = other DNA
cggcagcggcgcgtgtgcggcggtggcggtagggattcagcaaggtttgctggccgaagaagtacgcgtggaact

SEQ ID NO: 507757 - DNA, 75 bp, synthetic construct
  source 1..75: mol_type = other DNA
cgccgccgagcagacaatcttatgcggcgtggtgtcgatgggaaatccgcactgcgtgattcaggtcgatgatgt

SEQ ID NO: 507758 - DNA, 75 bp, synthetic construct
  source 1..75: mol_type = other DNA
atgccccgtctctgctctgcagagcgcctctctgaaagtatggttgatgaaatatttcagaagggggcggcatga

SEQ ID NO: 507759 - DNA, 75 bp, synthetic construct
  source 1..75: mol_type = other DNA
acgtcagagcgaaacaggccaggttaaccagctactggatattctcagacataaagcattaacgcagatggcaca

SEQ ID NO: 507760 - DNA, 75 bp, synthetic construct
  source 1..75: mol_type = other DNA
gctcgcatgccccgtctctgctcagcagagcgtctctctgaaagtatggtcgatgaaatatttcagaagggggct

SEQ ID NO: 507761 - DNA, 75 bp, synthetic construct
  source 1..75: mol_type = other DNA
ctcagcgcaagggctggattctctggtgcctttctggcgcttctatgccgccattgagagcttcctggaacctgc

SEQ ID NO: 507762 - DNA, 75 bp, synthetic construct
  source 1..75: mol_type = other DNA
ttttccgcatattgcccatcttgagcgcgagctggataaacgcggtcagtatgaaacctttaaagccgcgtttgc

SEQ ID NO: 507763 - DNA, 75 bp, synthetic construct
  source 1..75: mol_type = other DNA
cagaagctgcatgtgctggaagttcacgtgtgtgagcactgctgcgcagagttaatggcagaccctaacggacaa

SEQ ID NO: 507764 - DNA, 75 bp, synthetic construct
  source 1..75: mol_type = other DNA
gacctggttcagcgggcacagttacatcttgagcagatattctcatggtggagtgccgggcgatatgcgtccttt

SEQ ID NO: 507765 - DNA, 75 bp, synthetic construct
  source 1..75: mol_type = other DNA
cgtctgaacacactggactggcttggtggtcagggccgggagcaggcagataacgagtggcatgacgcgattaac

SEQ ID NO: 507766 - DNA, 75 bp, synthetic construct
  source 1..75: mol_type = other DNA
gttggggcgcgtttggtgatgtgatacgtcagggcgaaacaggccaggttaaccagttactggatattctcagac

SEQ ID NO: 507767 - DNA, 75 bp, synthetic construct
  source 1..75: mol_type = other DNA
cgcctgagtaaagcggtggtggagcagaccacgctggtaccgccgctggatgcgcaggccagacaaaaacaaatg

SEQ ID NO: 507768 - DNA, 75 bp, synthetic construct
  source 1..75: mol_type = other DNA
aaaagctggggtatgaaagtgaaaaacttaccggcgctggctgtacaagctggaaaaagatggggttattcgtat

SEQ ID NO: 507769 - DNA, 75 bp, synthetic construct
  source 1..75: mol_type = other DNA
atgaaaagcgcaccgaacttaaaaaaacagccttacgacaaaatgaccgaagtcattatttttgcgggtagtgat

SEQ ID NO: 507770 - DNA, 75 bp, synthetic construct
  source 1..75: mol_type = other DNA
aaaagttaactcaacattggttgaagaaaaacgcactcatgccttagagcgtgttgatctgcgcatcggacgtgt

SEQ ID NO: 507771 - DNA, 75 bp, synthetic construct
  source 1..75: mol_type = other DNA
aggccgcagggttgcacatggtgcggtcctctatgtggttggtgaaggcggtattggtgtaccgcgtcgcgtgag

SEQ ID NO: 507772 - DNA, 75 bp, synthetic construct
  source 1..75: mol_type = other DNA
acagtggcaggaacaggacgggcgactggctggcgataatgtgcctcccgttgtgctggctgatgatcaactgga

SEQ ID NO: 507773 - DNA, 75 bp, synthetic construct
  source 1..75: mol_type = other DNA
atgaccgaagtcattatttttgcgggtagtgatgcctgggcacatgcgaaacagtggcaggaacaggacgggcga

SEQ ID NO: 507774 - DNA, 75 bp, synthetic construct
  source 1..75: mol_type = other DNA
atgcaaacccggttaactgaagagatgcttcagaacgcacgtgcgctggaagccgacagcatcctgcgcgcctgt

SEQ ID NO: 507775 - DNA, 75 bp, synthetic construct
  source 1..75: mol_type = other DNA
atgcgttaacgcatcccgatctggcacgccagctgcgggataacaaaatgaatgcgctggaaagcggcaaaccgg

SEQ ID NO: 507776 - DNA, 75 bp, synthetic construct
  source 1..75: mol_type = other DNA
gcgcgcaataatattgatgcctggtggcccgcgattgaagcaggtgccgaggcaattttgcaaaccgccagcggt

SEQ ID NO: 507777 - DNA, 75 bp, synthetic construct
  source 1..75: mol_type = other DNA
gtgacatcgttgcccacttcggcaagcgcccgtatggctggccagacaatgaaatcttattgctcactgcaaggc

SEQ ID NO: 507778 - DNA, 75 bp, synthetic construct
  source 1..75: mol_type = other DNA
gcgcgatggcgaggacttctctaaaattcaagggcgttttagtacccgcttacagctgtcgagctcgaatacctc

SEQ ID NO: 507779 - DNA, 75 bp, synthetic construct
  source 1..75: mol_type = other DNA
tacggacgaccgagaaaatgccattcttaaggttttcctcaaagtctttaatgagcgtgtaggatactgcgctga

SEQ ID NO: 507780 - DNA, 75 bp, synthetic construct
  source 1..75: mol_type = other DNA
aagctgcctacgatttgcgggtagttgagctttttaccgacgctgacggggagttaatcacgtctctggttgtgg

SEQ ID NO: 507781 - DNA, 75 bp, synthetic construct
  source 1..75: mol_type = other DNA
tcctgtggctggtgaactggtcaatgagcattattggcgttacggttctgtgcctgatcatcggttttgtgtcac

SEQ ID NO: 507782 - DNA, 75 bp, synthetic construct
  source 1..75: mol_type = other DNA
tttcccgccgcgcattggcgattgtcggcgtggtgatgcttgcgctgctggtctggtttatcggaccgctggtgg

SEQ ID NO: 507783 - DNA, 75 bp, synthetic construct
  source 1..75: mol_type = other DNA
gcgcgtttggtgatgtgatacgtcagggcgaaacaggccaggttaaccagctactggatattctcagacataaag

SEQ ID NO: 507784 - DNA, 75 bp, synthetic construct
  source 1..75: mol_type = other DNA
gggatccgttttcctgtgtatcttattgtcacaaaaatggatctgttgccgggctttacggagtattttcgtggt

SEQ ID NO: 507785 - DNA, 75 bp, synthetic construct
  source 1..75: mol_type = other DNA
acggctgtcggagtttgtcgcctccgcatcagcggacgacgcctgggtaatgggccgggaaaacgcgcaaaaaaa

SEQ ID NO: 507786 - DNA, 75 bp, synthetic construct
  source 1..75: mol_type = other DNA
tgcctgatcatcggttttgtgtcaccgttgctggcctttggcgacgttcgcccgtttgcgccactgtggctgcgt

SEQ ID NO: 507787 - DNA, 75 bp, synthetic construct
  source 1..75: mol_type = other DNA
cgtgagcttgataagcgtggacagtttgatacctttagggccgccttcgcggacattaccgggtctcgctgggaa

SEQ ID NO: 507788 - DNA, 75 bp, synthetic construct
  source 1..75: mol_type = other DNA
aagcatgcaggagatgcacgtccctgctgacttgcaacactcgcttttacacccgatgcaacaatcgcgtaagaa

SEQ ID NO: 507789 - DNA, 75 bp, synthetic construct
  source 1..75: mol_type = other DNA
atgaaaaaacttaatgtgtcaattttttctattgcggcttgttttagtcttaatgtatttgctggtggaggagga

SEQ ID NO: 507790 - DNA, 75 bp, synthetic construct
  source 1..75: mol_type = other DNA
aaacaaggagcaacctcagatgatgagttaaaaatccttgggtatgatgttgatacatataatcttgtaaaaaat

SEQ ID NO: 507791 - DNA, 75 bp, synthetic construct
  source 1..75: mol_type = other DNA
atactgtcaaaaaagcattatcgatgggatttgaaaaagtacttgacgatcgtggttatgattctggggcgtact

SEQ ID NO: 507792 - DNA, 75 bp, synthetic construct
  source 1..75: mol_type = other DNA
caggcgtgggacgcgtttaataattcacgtcgttacagcgatttgcgtctgcataaagttcgtcgccatgatgaa

SEQ ID NO: 507793 - DNA, 75 bp, synthetic construct
  source 1..75: mol_type = other DNA
cggtaagatgaaagcgtttttttacattgcggtaatgttgccgatgtgggcgagctatatcgtcaaagcctatgc

SEQ ID NO: 507794 - DNA, 75 bp, synthetic construct
  source 1..75: mol_type = other DNA
gtgacgcagccgcgtttaaaacaggttgccctgtcggcaatttcggaggtcaacgctgagctgtatgagtttcgc

SEQ ID NO: 507795 - DNA, 75 bp, synthetic construct
  source 1..75: mol_type = other DNA
atcaggactatgacgccacggcgtcaggtgtgaaacggggggaggagctggcggaggccagcggtgatctgtggc

SEQ ID NO: 507796 - DNA, 75 bp, synthetic construct
  source 1..75: mol_type = other DNA
atgaaactgaaaaaactccccggatttagtttaggacttattgctctggcggtgggtaatgcatatgtaacacaa

SEQ ID NO: 507797 - DNA, 75 bp, synthetic construct
  source 1..75: mol_type = other DNA
taccgctggcgatccctggcattgcagccggctctatttttaccttctcgctaacgctgggcgattttattgtcc

SEQ ID NO: 507798 - DNA, 75 bp, synthetic construct
  source 1..75: mol_type = other DNA
ctgccggtgcaggcggcgctggagcgtttgccctcgtcacttttgcaagcctcagcggatttaggcgcacgtcca

SEQ ID NO: 507799 - DNA, 75 bp, synthetic construct
  source 1..75: mol_type = other DNA
gttcatttgcattattttgacggcggtgacggtggtaaccacggcgcatcatacccgtttgctgaccgctcagcg

SEQ ID NO: 507800 - DNA, 75 bp, synthetic construct
  source 1..75: mol_type = other DNA
aagccacgagcgccatgccttgcctggcgtcatcggtgacgatcttttgcgatttgggaagctgccactctgcct

SEQ ID NO: 507801 - DNA, 75 bp, synthetic construct
  source 1..75: mol_type = other DNA
tgcgcactgacggcacggtgactcagccgcgtttaaagcaggttgccctgtcggcaatttcggaggtcaacgcag

SEQ ID NO: 507802 - DNA, 75 bp, synthetic construct
  source 1..75: mol_type = other DNA
atgaagtttgttgcgccagaacaggcactggaacaggcggaaatcatcagaaacacgccgttctggcctgatgtg

SEQ ID NO: 507803 - DNA, 75 bp, synthetic construct
  source 1..75: mol_type = other DNA
accaggactatgatgccacggcatccggtgcgaagcgaggcgaggaactggcggaagccagcggtgatttatggc

SEQ ID NO: 507804 - DNA, 75 bp, synthetic construct
  source 1..75: mol_type = other DNA
cgaccatagccgggtggaaaggatcgccacggagaagctgcaaatgcagcatgtcgatccatcacaagaaaatat

SEQ ID NO: 507805 - DNA, 75 bp, synthetic construct
  source 1..75: mol_type = other DNA
cctatataaccgatgaagaatcaccgattgaaatcaaaaataatacttctacaagtaatggggagtatctaatca

SEQ ID NO: 507806 - DNA, 75 bp, synthetic construct
  source 1..75: mol_type = other DNA
tgagtgactggatcaccttctgggcatcagtcacagccaccacaataggcgtgatgaccatcagtgaaaaaatcg

SEQ ID NO: 507807 - DNA, 75 bp, synthetic construct
  source 1..75: mol_type = other DNA
accattgcacgcgactactggaataacggtattcgccatatcgtggcgctgcgtggcgacctgccgccgggaagt

SEQ ID NO: 507808 - DNA, 75 bp, synthetic construct
  source 1..75: mol_type = other DNA
taacctgagacgtaaagtcgatgccggcgccaaccgtgcgattactcaattcttcttcgatgtcgaaagctacct

SEQ ID NO: 507809 - DNA, 75 bp, synthetic construct
  source 1..75: mol_type = other DNA
gcgcgaacaatttcactttttacgcagcccggccccgtggttaattttcgccgccacgatgtttggcaacgcagg

SEQ ID NO: 507810 - DNA, 75 bp, synthetic construct
  source 1..75: mol_type = other DNA
tattatgatgttagtggggctagggatggtgctggggaatgtgctaagtggccggatttcaggacgttattcacc

SEQ ID NO: 507811 - DNA, 75 bp, synthetic construct
  source 1..75: mol_type = other DNA
tatgtactcattgagcctaacaccaaagtattcccgggtgatgaggtgtttgtcagaaccgttgaaggacacaac

SEQ ID NO: 507812 - DNA, 75 bp, synthetic construct
  source 1..75: mol_type = other DNA
actgagattaaagacgtgctggcttccgtggactgtctctgggcatgcgcctggaaaactggccaccggcaagca

SEQ ID NO: 507813 - DNA, 75 bp, synthetic construct
  source 1..75: mol_type = other DNA
ggggacgacgtttacggagacgaccctaccgttaatgctctgcaggactatgcggcagagctttccggtaaagaa

SEQ ID NO: 507814 - DNA, 75 bp, synthetic construct
  source 1..75: mol_type = other DNA
ggatggcgcaaatgtttgacggtctggatgacgatgccgaaacccgcaagctggtgggtgcgaatatcgccatgg

SEQ ID NO: 507815 - DNA, 75 bp, synthetic construct
  source 1..75: mol_type = other DNA
acggtattcgtcatatcgtggcgctgcgtggcgatctgccgccgggaagtggtaagccagaaatgtatgcttctg

SEQ ID NO: 507816 - DNA, 75 bp, synthetic construct
  source 1..75: mol_type = other DNA
tggtgacccatcttgacgtctcgcgtgaacaattggcggaagttgccgcccactggcatgcgttcctggcgcgtt

SEQ ID NO: 507817 - DNA, 75 bp, synthetic construct
  source 1..75: mol_type = other DNA
ctgtgactgcagccgatatcacccacgacggtgatgttgaaatcgtcaagccgcagcacgtgatctgccacctga

SEQ ID NO: 507818 - DNA, 75 bp, synthetic construct
  source 1..75: mol_type = other DNA
tgcgcactgacggtacggtgacgcagccgcgtttaaagcaggttgcgctgtcggcaatttcggaggtcaacgcag

SEQ ID NO: 507819 - DNA, 75 bp, synthetic construct
  source 1..75: mol_type = other DNA
ggccctgttctggaaaaccacgaacgcttcccggaacgtgccaatatcggttttatgcaagtggttaagcgcgag

SEQ ID NO: 507820 - DNA, 75 bp, synthetic construct
  source 1..75: mol_type = other DNA
tcccggcggtcgccttgatatcgcctggaaaggtccgggccatccgttatatatgacggggccggcggtacatgt

SEQ ID NO: 507821 - DNA, 75 bp, synthetic construct
  source 1..75: mol_type = other DNA
acgatccagatcagtttggcccagacttcaaagagcagttatctcaatcaggagcatacattaatgatgattcaa

SEQ ID NO: 507822 - DNA, 75 bp, synthetic construct
  source 1..75: mol_type = other DNA
tcacgctcagcgatcgcggcgaagagagccagcgctgcgtgatccgccatgtcgcctatatggggccgcagtatg

SEQ ID NO: 507823 - DNA, 75 bp, synthetic construct
  source 1..75: mol_type = other DNA
gaccgcgccgaccgccgaatggggcgtgatgattaacgacgcgcgccagtatatctggacccagccgctgcaaat

SEQ ID NO: 507824 - DNA, 75 bp, synthetic construct
  source 1..75: mol_type = other DNA
cgggatctccagcccttcacccgctacggcatcccgctgccgccgctaaaggcggtgatcaacaagctcgaccac

SEQ ID NO: 507825 - DNA, 75 bp, synthetic construct
  source 1..75: mol_type = other DNA
cccttcacccgctacggcatcccgctgccgccgctaaaggcggtgatcaacaagctcgaccacactaacgatgcc

SEQ ID NO: 507826 - DNA, 75 bp, synthetic construct
  source 1..75: mol_type = other DNA
cgtcttggatttaccttaaccgatgtccccgacagccatctgtgctgcgggtcggcgggaacgtatgcattaacg

SEQ ID NO: 507827 - DNA, 75 bp, synthetic construct
  source 1..75: mol_type = other DNA
cacgggatacggatgcagccactgtcgggcaactgaaccggaaggcggatgaggtgtacagtgacgtcagtggac

SEQ ID NO: 507828 - DNA, 75 bp, synthetic construct
  source 1..75: mol_type = other DNA
aagcacttaaggcgcgtgaccataccgatacggttgctgcagagaacagggagaatattatccggaacacggtgg

SEQ ID NO: 507829 - DNA, 75 bp, synthetic construct
  source 1..75: mol_type = other DNA
caacgccctgcgccgctgaaactatgcggatgctggccgaagagctgttcccgcaggtactcgccctgccccatc

SEQ ID NO: 507830 - DNA, 75 bp, synthetic construct
  source 1..75: mol_type = other DNA
gtaaaattgacactgacccggtaaatcctgaaaaccagattcaggtttatgtggagaacgaagacggttctcacg

SEQ ID NO: 507831 - DNA, 75 bp, synthetic construct
  source 1..75: mol_type = other DNA
cagggcggcacctcctttatggaggactacacttaccacttcgaaaaaggtaatgacctggtgctcggctcccat

SEQ ID NO: 507832 - DNA, 75 bp, synthetic construct
  source 1..75: mol_type = other DNA
tcaacacccaaaccggtccggccattgtcgccagcctgattgatctcggcgatcgttaccgtctgctggttaact

SEQ ID NO: 507833 - DNA, 75 bp, synthetic construct
  source 1..75: mol_type = other DNA
gcaacatgccgtggttaccggtcactggcaggataaacaagcccatgaacgtatcggctcctggatgcgccaggc

SEQ ID NO: 507834 - DNA, 75 bp, synthetic construct
  source 1..75: mol_type = other DNA
ctatttcaacgcggtttactgctgggcacgcgccatgctcaacgaacgataccaggactatgacgccacggcgtc

SEQ ID NO: 507835 - DNA, 75 bp, synthetic construct
  source 1..75: mol_type = other DNA
gcacgcgccatgctcaacgaacgttacctggactatgacgccacggcatcgggtgtgaagcgaggcgaggaactg

SEQ ID NO: 507836 - DNA, 75 bp, synthetic construct
  source 1..75: mol_type = other DNA
atggtgaggaaactaacgtttgaactaagaagccccatccatcagcagaacgctattcacgcggtacagcaaatt

SEQ ID NO: 507837 - DNA, 75 bp, synthetic construct
  source 1..75: mol_type = other DNA
cggactgaaaaatcaaattgctgattatcaacgttggcttgatgaaagttcgcagagtggttcgggtgctgaaat

SEQ ID NO: 507838 - DNA, 75 bp, synthetic construct
  source 1..75: mol_type = other DNA
accgcgcacggcggtcgcgagttcggcttcattggcgcgcgtatgcgtcagcaacatgccgtggttaccggtcac

SEQ ID NO: 507839 - DNA, 75 bp, synthetic construct
  source 1..75: mol_type = other DNA
caccctgccgaaactgccggtggcaaatgcgctgtggaaagcccagccagacctgccaaccgcttctgaagcgtg

SEQ ID NO: 507840 - DNA, 75 bp, synthetic construct
  source 1..75: mol_type = other DNA
tattatgcaaaggccgatgctttacgtaataactggaatgcaggactccaggaggggctgaccaactgggcagac

SEQ ID NO: 507841 - DNA, 75 bp, synthetic construct
  source 1..75: mol_type = other DNA
ttactgacttattgctagtggggtttaatagtggacctcaagctcttggcgagagaatgttaagtattctttcag

SEQ ID NO: 507842 - DNA, 75 bp, synthetic construct
  source 1..75: mol_type = other DNA
actgaaaggggaggaaaaagagcgggcccgactggggtatgcggcggatgacctgggttttgtgggggatccgta

SEQ ID NO: 507843 - DNA, 75 bp, synthetic construct
  source 1..75: mol_type = other DNA
ctgacccgctatgcagaagatggctgggtggaggtggataataacattgccgaaaacgccctacgactggtcagt

SEQ ID NO: 507844 - DNA, 75 bp, synthetic construct
  source 1..75: mol_type = other DNA
aatccacgatgttcacgtccgtaccccgtcagccctgacggaggaggcgctgaaacggatcggcgagctgtatgc

SEQ ID NO: 507845 - DNA, 75 bp, synthetic construct
  source 1..75: mol_type = other DNA
tatgagtgaagaagcgatggtcgaaaacgatctcaccggaccgtttatgccgcacggtatcggccatccgctggg

SEQ ID NO: 507846 - DNA, 75 bp, synthetic construct
  source 1..75: mol_type = other DNA
ttccatcagcgcatcgccaaactgctgcgtaaacatcaaatcatcaccgatatgagtgaagaagcgatggtcgaa

SEQ ID NO: 507847 - DNA, 75 bp, synthetic construct
  source 1..75: mol_type = other DNA
actgaggacgtggaagtaattgcgctgccgaaagccgatggcattggtagcctgttgccagctgcgcgcggcaat

SEQ ID NO: 507848 - DNA, 75 bp, synthetic construct
  source 1..75: mol_type = other DNA
ggcgtatgttcgtgatgaccgcaatgcagggtcagcgttggcacctgcagtgtggttcgcttacagcccggacag

SEQ ID NO: 507849 - DNA, 75 bp, synthetic construct
  source 1..75: mol_type = other DNA
aacgtcagcgaaaaacgaaaccgctgttgaaatccctggaaagctggttgcgtgaaaagatgaaaaccctgtcgc

SEQ ID NO: 507850 - DNA, 75 bp, synthetic construct
  source 1..75: mol_type = other DNA
agaagaagccctgaagcgaatcagtgaactgtacgccatcgaggatgaaatacggggattaccagagtcagagcg

SEQ ID NO: 507851 - DNA, 75 bp, synthetic construct
  source 1..75: mol_type = other DNA
gctgttgccaggcaataagaaaacgaagaccgggcggttatggacctgcgttcgtgacgaccgtaacgccgggtc

SEQ ID NO: 507852 - DNA, 75 bp, synthetic construct
  source 1..75: mol_type = other DNA
aacttcggcagtcgttccaaaaaagtcccccgccgtatcgcacaaatggaagccgatctgaaccggcttcagaaa

SEQ ID NO: 507853 - DNA, 75 bp, synthetic construct
  source 1..75: mol_type = other DNA
gtggctacgccacgtgatcagtgtcatcaacacctggccagccaaccgcgtgaaagagttgttgccctggaacgt

SEQ ID NO: 507854 - DNA, 75 bp, synthetic construct
  source 1..75: mol_type = other DNA
gcagaggaacggcaggcagtccggcaccaaaaagtgctgccgctgctggcgtcactggaggggtggctgcgggag

SEQ ID NO: 507855 - DNA, 75 bp, synthetic construct
  source 1..75: mol_type = other DNA
aaggggaatgccggcagagcagcggcttgctgaacgtcagcgaaaaatgaaaccgctgttgaaatccctggaaag

SEQ ID NO: 507856 - DNA, 75 bp, synthetic construct
  source 1..75: mol_type = other DNA
actcatcgaaccggcagggtaaacacccggagcaacacctccgccccttccggggtatcctgcaggcggatgcgt

SEQ ID NO: 507857 - DNA, 75 bp, synthetic construct
  source 1..75: mol_type = other DNA
tgtggttcgcttacagcccggacagaaaaggcatccatccgcagccccatcttgcggggttcagtggtgtactgc

SEQ ID NO: 507858 - DNA, 75 bp, synthetic construct
  source 1..75: mol_type = other DNA
gacctgcgttcgtgacgaccgtaacgccgggtcaacgctggcgccggcggtgtggttcgcttacagcccggacag

SEQ ID NO: 507859 - DNA, 75 bp, synthetic construct
  source 1..75: mol_type = other DNA
ccatcgagcggggtatcgcaggaccggggctgctggcccgcgtgctgatctcaaagtatgcagagcacaccccgc

SEQ ID NO: 507860 - DNA, 75 bp, synthetic construct
  source 1..75: mol_type = other DNA
ctgaacgtgtactgcagtaatggctgggtggaaatcgacaacaacatcgcagagaacgccttacggggagtggcc

SEQ ID NO: 507861 - DNA, 75 bp, synthetic construct
  source 1..75: mol_type = other DNA
ggttcagcggtgtcctgcaagcggatgcgtacgccgggttcaacgagctgtatcgcaatggtgggataacggaag

SEQ ID NO: 507862 - DNA, 75 bp, synthetic construct
  source 1..75: mol_type = other DNA
ggttcagaggtgtcctgcacgcggatgcgtacgccgggttcaacgagctgtatcgcaatggtgggataacggaag

SEQ ID NO: 507863 - DNA, 75 bp, synthetic construct
  source 1..75: mol_type = other DNA
gattcaggggtgtcctgcaggcggatgcgtacgccgggttcaacgagctgtatcgcaatggtgggataacggaag

SEQ ID NO: 507864 - DNA, 75 bp, synthetic construct
  source 1..75: mol_type = other DNA
aggcggatgcatacgccgggttcaacgagctgtaccgggatgaccggataacggaagccgcctgttgggctcatg

SEQ ID NO: 507865 - DNA, 75 bp, synthetic construct
  source 1..75: mol_type = other DNA
gcctggcgtcatagcagactggccggtcaaccgggtcagcgaactgcttccgtggcgcatagcactgccagctga

SEQ ID NO: 507866 - DNA, 75 bp, synthetic construct
  source 1..75: mol_type = other DNA
aacgctaccttcaccatatccttgacgtcattgctgactggccggtaaagcgggttggtgaactgctgccgtggc

SEQ ID NO: 507867 - DNA, 75 bp, synthetic construct
  source 1..75: mol_type = other DNA
actgaaaggggaggaaaaagagcgggcccgtctggggtatgcggcggatgaccttggttttgtgggggatccgta

SEQ ID NO: 507868 - DNA, 75 bp, synthetic construct
  source 1..75: mol_type = other DNA
tccccggtgcggtgaccattatcatgacggtcatcggcgcgattctcacctcgctggtggtggcgcgagaatggg

SEQ ID NO: 507869 - DNA, 75 bp, synthetic construct
  source 1..75: mol_type = other DNA
gtcgcgtgcgggcgctgtgcgtcaaagagacgcggcagatcattcgcgatccgagtagctggctgattgcggtgg

SEQ ID NO: 507870 - DNA, 75 bp, synthetic construct
  source 1..75: mol_type = other DNA
aatgccctgcgggcggtcagtctgggtcgtaaaaacttcctgttcttcggctctgaccatggtggtgagcgggga

SEQ ID NO: 507871 - DNA, 75 bp, synthetic construct
  source 1..75: mol_type = other DNA
gtcgcgtgcgggcgctgtgcgtcaaagagacgcggcagatcgttcgcgatccgagtagctggctgattgcagtgg

SEQ ID NO: 507872 - DNA, 75 bp, synthetic construct
  source 1..75: mol_type = other DNA
cgattacccgcaaccagttcaacgccgctcaggtggccctgaacgcggcttttctgccgtcgattatgctttccg

SEQ ID NO: 507873 - DNA, 75 bp, synthetic construct
  source 1..75: mol_type = other DNA
tcgctggtggtggcgcgggagtgggagcgcggcactatggaggctttgctctctacggagattacccgcacggaa

SEQ ID NO: 507874 - DNA, 75 bp, synthetic construct
  source 1..75: mol_type = other DNA
tacaccctgaaccagtggccggcactgacgtactatgcagatgatggctgggctgaagcagataacaacatcgcc

SEQ ID NO: 507875 - DNA, 75 bp, synthetic construct
  source 1..75: mol_type = other DNA
ctgttgggctcacgcccggcgtaaaatccatgatgttcacgttcgcactccctcagcactcacggatgaagcact

SEQ ID NO: 507876 - DNA, 75 bp, synthetic construct
  source 1..75: mol_type = other DNA
caacatcgctgaaaatgccctgcgggcggtcagtctgggtcgtaaaaacttcctgttcttcggctctgaccatgg

SEQ ID NO: 507877 - DNA, 75 bp, synthetic construct
  source 1..75: mol_type = other DNA
tccctggaaagctggttgcgtgaaaagatgaagaccctgtcgcgacactcagagttggcgaaggcgttcgcgtac

SEQ ID NO: 507878 - DNA, 75 bp, synthetic construct
  source 1..75: mol_type = other DNA
gatcgggacgtgcaaactgaacggagtggagccagaaagttacctccgctatgtccttgacgtcatagccgactg

SEQ ID NO: 507879 - DNA, 75 bp, synthetic construct
  source 1..75: mol_type = other DNA
tccggacggtacgggaaaaacatgcctgtactcagtgcgatgccatcgtgcaggcacctgcaccttcgcggccca

SEQ ID NO: 507880 - DNA, 75 bp, synthetic construct
  source 1..75: mol_type = other DNA
agacttttgaaccgcttatcgacgtccagactcgctactggtttaacccggcggcgattagccagcactttatta

SEQ ID NO: 507881 - DNA, 75 bp, synthetic construct
  source 1..75: mol_type = other DNA
ggatccagaaagctaccttcgccatgtgcttggcgtcatagcagactggccggtcaaccgggtcagcgaactgct

SEQ ID NO: 507882 - DNA, 75 bp, synthetic construct
  source 1..75: mol_type = other DNA
gcacgtccgcactgacggaagaagccctggagcagatcggtcagttgtacgccatagaggcggatataaggggaa

SEQ ID NO: 507883 - DNA, 75 bp, synthetic construct
  source 1..75: mol_type = other DNA
tggtcagtctgggccgcaaaaactacctgttcttcggttcggatcatggaggagagcggggagcgctgctgtaca

SEQ ID NO: 507884 - DNA, 75 bp, synthetic construct
  source 1..75: mol_type = other DNA
gctgcatgaatggatggtggagaagaatggcacgctgtcgaaaaaatccagactgggcgaagcgttcagctatgt

SEQ ID NO: 507885 - DNA, 75 bp, synthetic construct
  source 1..75: mol_type = other DNA
aactgagccgggcattactctccaactgggttgacgcatgttgtcagttaatgactccgctgaatgataccctgt

SEQ ID NO: 507886 - DNA, 75 bp, synthetic construct
  source 1..75: mol_type = other DNA
gctgaggcggacaataacatcgctgaaaatgcgttgcggatggtcagtctgggccgcaaaaactacctgttcttc

SEQ ID NO: 507887 - DNA, 75 bp, synthetic construct
  source 1..75: mol_type = other DNA
aacgcgaaatagaccatctgcaggcacagctggataagctgcgccggatgaacgtcggcagcagctccgaaaaag

SEQ ID NO: 507888 - DNA, 75 bp, synthetic construct
  source 1..75: mol_type = other DNA
aacgcgaaatagaccatctgcaggcacagctggataagctgcgccggatgaacctcggcagccgctcagaaaaag

SEQ ID NO: 507889 - DNA, 75 bp, synthetic construct
  source 1..75: mol_type = other DNA
aacgcgaaatagaccatctgcaggcacagctggataagctgcgccggatgaacatcggcagcggctccgaaaaag

SEQ ID NO: 507890 - DNA, 75 bp, synthetic construct
  source 1..75: mol_type = other DNA
cctatcgcgacactcagaactggcgaaagcgttcgcatacgccctgaaccagtggccggcgctgacgtactatgc

SEQ ID NO: 507891 - DNA, 75 bp, synthetic construct
  source 1..75: mol_type = other DNA
gtgggataacggaagctgcctgctgggctcatgcccgccgaaagatccacgatgtgcacgtccgcatcccgtcag

SEQ ID NO: 507892 - DNA, 75 bp, synthetic construct
  source 1..75: mol_type = other DNA
gcggcggttcactgagctatctgggcgaggataccaccgaacagctggagttgatacgtagcgcctttcgggtta

SEQ ID NO: 507893 - DNA, 75 bp, synthetic construct
  source 1..75: mol_type = other DNA
cgcgtggattggggatgcgctggatgggcgtgctattcgctatctttttgctcattgcctacggattgattttca

SEQ ID NO: 507894 - DNA, 75 bp, synthetic construct
  source 1..75: mol_type = other DNA
atgcctgactttttctcttttattaacagtgttctatggggatcagtgatgatctacctgctcttcggcgcaggt

SEQ ID NO: 507895 - DNA, 75 bp, synthetic construct
  source 1..75: mol_type = other DNA
acctatatgccgctggagggtatacaacttctccagaaagcgatgcgagcactaatgggttcctggggggcagag

SEQ ID NO: 507896 - DNA, 75 bp, synthetic construct
  source 1..75: mol_type = other DNA
ttacatttatgcagaaaataaccttttctttttacgcctgaacagccccaaagcgatctggtgcctgcgcatctg

SEQ ID NO: 507897 - DNA, 75 bp, synthetic construct
  source 1..75: mol_type = other DNA
tcggtatccgttattaccggatgcgtgactacagcaaccttggccacgcggaaattctggcccgcgttaaggagg

SEQ ID NO: 507898 - DNA, 75 bp, synthetic construct
  source 1..75: mol_type = other DNA
ctcttttcatgatgcgctggggctgatgtatccgatgaactggcgctgtagtggagacggcgaatgtgaaacctt

SEQ ID NO: 507899 - DNA, 75 bp, synthetic construct
  source 1..75: mol_type = other DNA
atgtacccgatgaactggcgcagcagtcagaacggcgagtgtgaaaccttcatgctggcggaaatggtctgcggt

SEQ ID NO: 507900 - DNA, 75 bp, synthetic construct
  source 1..75: mol_type = other DNA
gggttccgcgccgacgtcagacgtcggcaagctgctgatggagtttgtaaaaacgctggcctttgaaacgtccat

SEQ ID NO: 507901 - DNA, 75 bp, synthetic construct
  source 1..75: mol_type = other DNA
tggccgaagtctgggcggcaaagctgggttccgcgccgacgtcagacgtcggcaaactgctgatggagtttgtaa

SEQ ID NO: 507902 - DNA, 75 bp, synthetic construct
  source 1..75: mol_type = other DNA
atggaaaatgaacaacgccccacccgtggccgtctttccaaagtggatttactcccggacagcatccgggagcag

SEQ ID NO: 507903 - DNA, 75 bp, synthetic construct
  source 1..75: mol_type = other DNA
cttttggatgtgggttgccgcgtttatcggcatggcgacctcgtttgccgaatgttccctggcacaactttataa

SEQ ID NO: 507904 - DNA, 75 bp, synthetic construct
  source 1..75: mol_type = other DNA
ttcacgacccacgctgacggtttctaacctggacggtatggtcaccggaatggcggaagatatgcagagtctggt

SEQ ID NO: 507905 - DNA, 75 bp, synthetic construct
  source 1..75: mol_type = other DNA
ttcacgaccaacgctgacggtttctaacctggacggtatggtcaccggaatggcggaagatctgcagagtctggt

SEQ ID NO: 507906 - DNA, 75 bp, synthetic construct
  source 1..75: mol_type = other DNA
ggcaactggcagatatcataatggcctgcatggctattaccaatttgaccgccatattactgctctcgcctgtgg

SEQ ID NO: 507907 - DNA, 75 bp, synthetic construct
  source 1..75: mol_type = other DNA
tactcgctgtctttgccctgttggcgataacccacggtatttatggtgtcgcccgactgatgcaatggtttgtcc

SEQ ID NO: 507908 - DNA, 75 bp, synthetic construct
  source 1..75: mol_type = other DNA
gtcccaccattagtaaccggcatcatactcgctgtctttgccctgttggcgataacccacggtatttatggtgtc

SEQ ID NO: 507909 - DNA, 75 bp, synthetic construct
  source 1..75: mol_type = other DNA
gatgaacggaaagggcagcagtgcccgcccgtcgctgacggtgtccaatcttttcggccttgtcaccgggatggc

SEQ ID NO: 507910 - DNA, 75 bp, synthetic construct
  source 1..75: mol_type = other DNA
attttcccccgctggtgacaggcattattctcgctgtctttgctctgctggcaatcactcgcggtcttcatggcg

SEQ ID NO: 507911 - DNA, 75 bp, synthetic construct
  source 1..75: mol_type = other DNA
tcgttcagtttcgctacattcgccagtttggcaaaagtctcaaaaatagcgttcatccccaaccgggtggcttaa

SEQ ID NO: 507912 - DNA, 75 bp, synthetic construct
  source 1..75: mol_type = other DNA
cagagcgtgagctggccctgtcccgactgaacggggacgaaaaagagcggggccgcctggggtatgcggcggatg

SEQ ID NO: 507913 - DNA, 75 bp, synthetic construct
  source 1..75: mol_type = other DNA
ccgcgccgtttgccattgttggctccatcggtgtggtggcgcaaatgcccaactttaaccgcttcctgaaaagca

SEQ ID NO: 507914 - DNA, 75 bp, synthetic construct
  source 1..75: mol_type = other DNA
aaagccccggtggcatggttcatggttatggcctggcagcctcgcagttgcggcgtctgcgcgataaaaacattc

SEQ ID NO: 507915 - DNA, 75 bp, synthetic construct
  source 1..75: mol_type = other DNA
cattggcgttgtggcgcaaatgcccaacttcaaccgtttcctgaaaaacaaagatattgatatcgaactgcatac

SEQ ID NO: 507916 - DNA, 75 bp, synthetic construct
  source 1..75: mol_type = other DNA
cgcagctggccgaaagtggcattcagttagggcaaagcaacatcagtggcgaaagctttagtggtcagcagcagg

SEQ ID NO: 507917 - DNA, 75 bp, synthetic construct
  source 1..75: mol_type = other DNA
acgtaaacgactcattgaccgattcaccggcagcgcggcagagagcgccgatcgattgttgttacgctggtggca

SEQ ID NO: 507918 - DNA, 75 bp, synthetic construct
  source 1..75: mol_type = other DNA
ttgttgtctgaatatggtttgtttttggcgaaaatcgttaccgttgtgctagcgattgcggcgattgccgccatt

SEQ ID NO: 507919 - DNA, 75 bp, synthetic construct
  source 1..75: mol_type = other DNA
cttgcagaacgtcagcaaaaagctaaaccgcggctgaaatccctggaaagctggctgcgtgaaaaggtgaaaacg

SEQ ID NO: 507920 - DNA, 75 bp, synthetic construct
  source 1..75: mol_type = other DNA
aaaaggtatccacccgcagacccatcttgcggggttcagcggagtgctgcaggcggatgcgtacgccgggttcaa

SEQ ID NO: 507921 - DNA, 75 bp, synthetic construct
  source 1..75: mol_type = other DNA
cccgcgtgctgagttcaaagtatgcagagcacaccccgctgtaccgccagtctgaaatatacggccgccagggtg

SEQ ID NO: 507922 - DNA, 75 bp, synthetic construct
  source 1..75: mol_type = other DNA
gatgacgacgccctgccggtttccgcctctttacaagggcgtgcaacaggcaatagcggcgtagatattttcgcc

SEQ ID NO: 507923 - DNA, 75 bp, synthetic construct
  source 1..75: mol_type = other DNA
aaggttctctatcaaatcaaacagcgcagccttctcccgatattacaaacgagctagttaacgagttattgaaaa

SEQ ID NO: 507924 - DNA, 75 bp, synthetic construct
  source 1..75: mol_type = other DNA
gccggaggcgtcaggcaatggtagcggctggacgccgcctgaagtagacggagcgcctccccgcccgcaattttc

SEQ ID NO: 507925 - DNA, 75 bp, synthetic construct
  source 1..75: mol_type = other DNA
ggatttgaactgaacggcaagggcagtgctgcccgtccgacactgacggtttctaacctgcacggcatggtcacg

SEQ ID NO: 507926 - DNA, 75 bp, synthetic construct
  source 1..75: mol_type = other DNA
acgcgttcactttggggactggctggaatacacgcattggtgccatttccgtcgatgccacgaagtcgcatagta

SEQ ID NO: 507927 - DNA, 75 bp, synthetic construct
  source 1..75: mol_type = other DNA
tgtttcgtgatatgcagatgttgcctaactcgaaacaaaattttacgccacgggtgcaggggattgctcagagta

SEQ ID NO: 507928 - DNA, 75 bp, synthetic construct
  source 1..75: mol_type = other DNA
gacccggagcaggagctgacggaccggtgggtggtggagcagttatcagcgctgacggccatgacggcctcgttt

SEQ ID NO: 507929 - DNA, 75 bp, synthetic construct
  source 1..75: mol_type = other DNA
agcaacagcaaagccaacgcacagcaaaccatgaacctctggcgggggaagacgacgatacgcttctggttcccg

SEQ ID NO: 507930 - DNA, 75 bp, synthetic construct
  source 1..75: mol_type = other DNA
gcagatgtcatcgctgacggccatgacggcttcgtttgtgctggcgacaccgacggagacggacggggcgctgtt

SEQ ID NO: 507931 - DNA, 75 bp, synthetic construct
  source 1..75: mol_type = other DNA
gtcaccgcgggtggtgctctgggaaattgacctgacggtgcagggtggtgagcggtattttttctgcaatgagct

SEQ ID NO: 507932 - DNA, 75 bp, synthetic construct
  source 1..75: mol_type = other DNA
cagagcgtgagctggccctgtccggactgaaaggggacgaaaaagagcggggccgactggggtatgcggcggatg

SEQ ID NO: 507933 - DNA, 75 bp, synthetic construct
  source 1..75: mol_type = other DNA
aacgcggcaccatggaggctctgctctctacggagattacccgcacggagctgctgctgtgtaagctgatccctt

SEQ ID NO: 507934 - DNA, 75 bp, synthetic construct
  source 1..75: mol_type = other DNA
ggcggaggcggacaataacacagcagaaagagcgcttcgtgccgtctgtctcgggaaaaagaattacatgttctt

SEQ ID NO: 507935 - DNA, 75 bp, synthetic construct
  source 1..75: mol_type = other DNA
aagcgttcagctatgtactgaatcagtgggacgccctctgttattacagtgatgacggtctggcggagggggatg

SEQ ID NO: 507936 - DNA, 75 bp, synthetic construct
  source 1..75: mol_type = other DNA
aacggcgtggatccggaacgctatctgcattatgtacttgatgtcatcgccgactggcctgtgaaccgggtgggt

SEQ ID NO: 507937 - DNA, 75 bp, synthetic construct
  source 1..75: mol_type = other DNA
gaacggtggtattccctgatgcgccagtgaaaattttccttgacgcctcctcggaagaacgtgcgcatcgccgca

SEQ ID NO: 507938 - DNA, 75 bp, synthetic construct
  source 1..75: mol_type = other DNA
gacagatagggccggaggcggcaggcagtcttgtgcagctgattgaccagcgggtgcaggcggtgatgctgtcca

SEQ ID NO: 507939 - DNA, 75 bp, synthetic construct
  source 1..75: mol_type = other DNA
cggaatggctggcgcatttgccggtgcctttgccaccggacacctgatttcgctggccgatgagtggggttccgt

SEQ ID NO: 507940 - DNA, 75 bp, synthetic construct
  source 1..75: mol_type = other DNA
gtgtatgacccggcagtacagcgtccgttgcgtcagacccgcccccgtaagccgttccctgaatcactaccccgt

SEQ ID NO: 507941 - DNA, 75 bp, synthetic construct
  source 1..75: mol_type = other DNA
gacgtgcaaattaaacggcgtggatccggaacgctatctgcatcatgtacttgatgtcatcgccgactggcctgt

SEQ ID NO: 507942 - DNA, 75 bp, synthetic construct
  source 1..75: mol_type = other DNA
cgaagggatctggcagatctggcaaatgcagcgagcggaggacaacgggcagacttttgaaccgcttattgatgt

SEQ ID NO: 507943 - DNA, 75 bp, synthetic construct
  source 1..75: mol_type = other DNA
ggatgaagcccttcagcactatatcctgaccgacggcaaactccatgctgacgatacgcctgtcccggtgctgtt

SEQ ID NO: 507944 - DNA, 75 bp, synthetic construct
  source 1..75: mol_type = other DNA
tcaaagtatgcagagcacacaccgctgtatcgccagtcggagatctatgcccgccagggtgtagtgttgagtcgt

SEQ ID NO: 507945 - DNA, 75 bp, synthetic construct
  source 1..75: mol_type = other DNA
ggttgtgggcgtatgttcgtgacgaccgtaacgccgggtcaacgctggcgccggcggtgtggttcgcttacagcc

SEQ ID NO: 507946 - DNA, 75 bp, synthetic construct
  source 1..75: mol_type = other DNA
actgaagggggaggaaaaagagcgggcccgactggggtatgcggcggatgacctaggttttgtgggggatccgta

SEQ ID NO: 507947 - DNA, 75 bp, synthetic construct
  source 1..75: mol_type = other DNA
ggtatcgccggaccggggctgctggcccgcgtgttgacctcgaagtatgcagagcacaccccgctgtatcgccag

SEQ ID NO: 507948 - DNA, 75 bp, synthetic construct
  source 1..75: mol_type = other DNA
acgaccgtaacgccgggtcaacgctggcgccggcggtgtggttcgcttacagcccggacagaaaaggcatccatc

SEQ ID NO: 507949 - DNA, 75 bp, synthetic construct
  source 1..75: mol_type = other DNA
ttaacgcctcgccgattgtccgcctggtgacgcatcttgacgtctcgcgcgaacaactggcggaagtcgccgccc

SEQ ID NO: 507950 - DNA, 75 bp, synthetic construct
  source 1..75: mol_type = other DNA
cgaacaactggcggaagtcgccgcccactggcgcgcattcctggcgcgcattcctggcgcgttaaggagagagac

SEQ ID NO: 507951 - DNA, 75 bp, synthetic construct
  source 1..75: mol_type = other DNA
gtctggaaaacacccacaacggcaaagtactaccgcgtgaatacctgaaacaggcatgggaatttacccgcgagc

SEQ ID NO: 507952 - DNA, 75 bp, synthetic construct
  source 1..75: mol_type = other DNA
tcttcctgctgaaacagcgcctggccgaacaggaagcgctgatccacgccctgcaggaaaagctgaacgagcgtg

SEQ ID NO: 507953 - DNA, 75 bp, synthetic construct
  source 1..75: mol_type = other DNA
ctgctgaaacagcgcctggccgaacaggaagcgctgatccacgccctgcaggaaaagctgagcaaccgggagcgc

SEQ ID NO: 507954 - DNA, 75 bp, synthetic construct
  source 1..75: mol_type = other DNA
tacggcaaaagcgttcgcattgaaccgccccgggtttcctggagagtgttttatctgtgaactcaggctgccaga

SEQ ID NO: 507955 - DNA, 75 bp, synthetic construct
  source 1..75: mol_type = other DNA
actgaaaggggaagaaaaagagcgtgtccgactggggtatgcggcggatgacctcggttttgtgggtgaaccgta

SEQ ID NO: 507956 - DNA, 75 bp, synthetic construct
  source 1..75: mol_type = other DNA
aagtctcccgtcgtatcgcacagatggaagctgacctgaaggcacttcagaaagaaagtgatacccttaccggtc

SEQ ID NO: 507957 - DNA, 75 bp, synthetic construct
  source 1..75: mol_type = other DNA
gtgctacattaggtttgctgggaagaaagacagtcttatggatgaacttatcgctcaggataagcatggcaaaaa

SEQ ID NO: 507958 - DNA, 75 bp, synthetic construct
  source 1..75: mol_type = other DNA
tgccgaacgtcagttgaaaacgaaaccgctgctgaaatccctggaaagctggctgcgtgaaaagatgaaaaccct

SEQ ID NO: 507959 - DNA, 75 bp, synthetic construct
  source 1..75: mol_type = other DNA
gatccccaacactgaactgctgaccgggaaacgcctgcagccgtactacgatcgcgccgaccggccgcgcatcga

SEQ ID NO: 507960 - DNA, 75 bp, synthetic construct
  source 1..75: mol_type = other DNA
taaagcgttattagatactacaggtttctggcatgacgattttaataatgccacgccgaacgatatttgcgtggc

SEQ ID NO: 507961 - DNA, 75 bp, synthetic construct
  source 1..75: mol_type = other DNA
gttgatggtaaaagtgcaaccgctggcgaaaccctcggaagacgagttgcatcaggcgatgcttaacggcattcg

SEQ ID NO: 507962 - DNA, 75 bp, synthetic construct
  source 1..75: mol_type = other DNA
cggcggcaaatgcaggcccgacgggtgttacagcagatgagtgatgaacggttgagggacaatgggttaggctgg

SEQ ID NO: 507963 - DNA, 75 bp, synthetic construct
  source 1..75: mol_type = other DNA
cggcggcaaatgcaggcccgacgggtgttacagcagatgagtgatgaacggttgagggaaactgggttacgctgg

SEQ ID NO: 507964 - DNA, 75 bp, synthetic construct
  source 1..75: mol_type = other DNA
gtataaaaacacttatggtggcaggttcgctgtataccgaattgcagactgtgttctgaaccgccccgggaatcc

SEQ ID NO: 507965 - DNA, 75 bp, synthetic construct
  source 1..75: mol_type = other DNA
agccaataacgtcatcaatgattgtaagtcaagaacaatgtatttatgatcaagccaaaggaaactttgttataa

SEQ ID NO: 507966 - DNA, 75 bp, synthetic construct
  source 1..75: mol_type = other DNA
gcgctgacagagcagaagcggctgattgatgagcagtccagtcgggtgaaatccctgcaggaacaaatcgccggg

SEQ ID NO: 507967 - DNA, 75 bp, synthetic construct
  source 1..75: mol_type = other DNA
tctcaatgtaagtttcctgttagttcaggaaatttccagtgcccgccagagtctattcagtgtccaattacactg

SEQ ID NO: 507968 - DNA, 75 bp, synthetic construct
  source 1..75: mol_type = other DNA
gcgctgccggtcgatattgatgagttagtacaacgctgcccgcagctggtacagcaatcggacaccgtggagtgg

SEQ ID NO: 507969 - DNA, 75 bp, synthetic construct
  source 1..75: mol_type = other DNA
gaatggttgatcgcaccgttattattgcagggcagcgcctcgccggatgcgcggattttactggcgctgccggtc

SEQ ID NO: 507970 - DNA, 75 bp, synthetic construct
  source 1..75: mol_type = other DNA
attcagtgtccaattacactagagagacccgaagaaggagtgtttgtcaaaaattcagatagttcagcagtatgc

SEQ ID NO: 507971 - DNA, 75 bp, synthetic construct
  source 1..75: mol_type = other DNA
cggcggcaaatgcaggcccgacgggtgttacagcagatgagtgatgaacggttgagggacattgggttatgctgg

SEQ ID NO: 507972 - DNA, 75 bp, synthetic construct
  source 1..75: mol_type = other DNA
aagctacctacgcaatgtacttgacgtcatagccgactggccgatgaaccgggtcagcgaactgctcccttggcg

SEQ ID NO: 507973 - DNA, 75 bp, synthetic construct
  source 1..75: mol_type = other DNA
aagctacctacgcaatgtacttgacgtcatagctgactggccgatgaaccgggtcagcgaactgctcccctggcg

SEQ ID NO: 507974 - DNA, 75 bp, synthetic construct
  source 1..75: mol_type = other DNA
aagctacctacgcaatgtacttgacgtcatagcagactggccgttgaaccgggtcagcgaactgctcccatggcg

SEQ ID NO: 507975 - DNA, 75 bp, synthetic construct
  source 1..75: mol_type = other DNA
gggattcagtaactgggtggacaatgcatccgattacgcctctcaggcagcacagctggcaacggaggggatttc

SEQ ID NO: 507976 - DNA, 75 bp, synthetic construct
  source 1..75: mol_type = other DNA
cgaacgtcagttgaaaacgaaaccgctgctgaaatccctggaaagctggctgcgtgaaaagatgaaaaccctgtc

SEQ ID NO: 507977 - DNA, 75 bp, synthetic construct
  source 1..75: mol_type = other DNA
gtgaaaagatgaaaaccctgtcgcgacactcagaactggcgaaagcgttcgcatacgccctgaaccagtggccgg

SEQ ID NO: 507978 - DNA, 75 bp, synthetic construct
  source 1..75: mol_type = other DNA
aacagcacattgccgaacaggagacactgaaacgctctctgctggaaaaactggccgaccgggagcggaaaatag

SEQ ID NO: 507979 - DNA, 75 bp, synthetic construct
  source 1..75: mol_type = other DNA
atgagcggtgcggcaaaggggtggatccaataacacgttttaacacccagaccaagatgatagaacaagtctcac

SEQ ID NO: 507980 - DNA, 75 bp, synthetic construct
  source 1..75: mol_type = other DNA
cggcggcaaatgcaggcccgacgggtgttacagcagatgagtgatgaacggttgagggacagtgggttaagctgg

SEQ ID NO: 507981 - DNA, 75 bp, synthetic construct
  source 1..75: mol_type = other DNA
tgaacgtcagcgaaaaacgaaaccgctgttgaaatccctggaaagctggttgcgtgaaaagatgaagaccctgtt

SEQ ID NO: 507982 - DNA, 75 bp, synthetic construct
  source 1..75: mol_type = other DNA
ataacatcgctgaaaatgcgttgcggatggtcagtctggtgcggtatgctggcagtatcacgttgattacagcat

SEQ ID NO: 507983 - DNA, 75 bp, synthetic construct
  source 1..75: mol_type = other DNA
gggtggatgcatgctgccggctgctgtctccgctggaagaggcgcttcatggctatgtcatgactgacggcaaac

SEQ ID NO: 507984 - DNA, 75 bp, synthetic construct
  source 1..75: mol_type = other DNA
tgttacgttgccctgcactataactcctcggacagacgctttatcgacaatctgctgcgtcaccatcgggagccc

SEQ ID NO: 507985 - DNA, 75 bp, synthetic construct
  source 1..75: mol_type = other DNA
ggttgcgtgaaaagatgaagaccctgttcttcggctctggccatggtggtgagcggggagcgctactgtacagcc

SEQ ID NO: 507986 - DNA, 75 bp, synthetic construct
  source 1..75: mol_type = other DNA
gttgaaatccctggaaagctggttgcgtgaaaagatgaagaccctgtcgcgatactcagagttggcgaaggcgtt

SEQ ID NO: 507987 - DNA, 75 bp, synthetic construct
  source 1..75: mol_type = other DNA
gggagttactgacggacatgaataaccggccaatgaaggggtacggcaatcaaacccgtgcagaacgcttccgca

SEQ ID NO: 507988 - DNA, 75 bp, synthetic construct
  source 1..75: mol_type = other DNA
gtgccgaagctgctcatccccgataatctcaaaagtgcagtcaaaaaagccgatcgctatgagcctgtcatcaac

SEQ ID NO: 507989 - DNA, 75 bp, synthetic construct
  source 1..75: mol_type = other DNA
aaggcacaggcgggtgacaaagcgatgggatactcgcacttctgccgttgctaccgggagtggaaaaaaacgcga

SEQ ID NO: 507990 - DNA, 75 bp, synthetic construct
  source 1..75: mol_type = other DNA
actgaatggggaggaaaaagagcgggcccgactggggtatgcggcggatgaccttggttttgtgggggatccgta

SEQ ID NO: 507991 - DNA, 75 bp, synthetic construct
  source 1..75: mol_type = other DNA
ctgaaacagcgcctggccgaacaggaagtgctgatccacgccctgcaggaaaagctgagcaaccgggagcgcgaa

SEQ ID NO: 507992 - DNA, 75 bp, synthetic construct
  source 1..75: mol_type = other DNA
aaaagtggaaaacagcgtcctcatcctcgaacgatggcttcttgctcgcatccataatgaaaccttccgcacgct

SEQ ID NO: 507993 - DNA, 75 bp, synthetic construct
  source 1..75: mol_type = other DNA
agatacgttgggtaaataccggggaaaacaagccgatcaggaacggcatcagaaagtgttgtgctacagacaagt

SEQ ID NO: 507994 - DNA, 75 bp, synthetic construct
  source 1..75: mol_type = other DNA
ttttttttgaattttataagagctataaaaaacggtgcgaacgctgttttcttaagcacttttccgcacaactta

SEQ ID NO: 507995 - DNA, 75 bp, synthetic construct
  source 1..75: mol_type = other DNA
actgaaaggggaggaaaaagagcgggcccggctggggtatgcggcggatgacctaggttttgtgggggatccgta

SEQ ID NO: 507996 - DNA, 75 bp, synthetic construct
  source 1..75: mol_type = other DNA
agctcaagttcgacaagaagctgactaaccgttgtatcggactgacgttacacatcaacgcctcaaccgtttttg

SEQ ID NO: 507997 - DNA, 75 bp, synthetic construct
  source 1..75: mol_type = other DNA
ccttcccggagaaaaatggctgcggctttacctttggtgatggctgccacggttcagataccaaattcaatctgt

SEQ ID NO: 507998 - DNA, 75 bp, synthetic construct
  source 1..75: mol_type = other DNA
ccgttatctcggcgtgctgctgtacgatgctgacgccattgaacgtgcggccagcaccgagaacgagaaagatct

SEQ ID NO: 507999 - DNA, 75 bp, synthetic construct
  source 1..75: mol_type = other DNA
aaggcgtggagtacgcgtggttcaataacgttgaaaccaagccgggccaggggttccctactgactgggaaaacc

SEQ ID NO: 508000 - DNA, 75 bp, synthetic construct
  source 1..75: mol_type = other DNA
gcccccgcgccttcacggcccatcgagtggggtatcgccggaccggggctgctggcccgcgtgctgacctcgaag

SEQ ID NO: 508001 - DNA, 75 bp, synthetic construct
  source 1..75: mol_type = other DNA
gtaaaacccgtaccggacggctgtgggtttatgttcgtgacgatcgcaacgccggttcgaccatgccggcagcgg

SEQ ID NO: 508002 - DNA, 75 bp, synthetic construct
  source 1..75: mol_type = other DNA
ggctatgtcatgactgacggcaaactccatgccgatgataccccggtccaggtactgatgccgggtaataagaag

SEQ ID NO: 508003 - DNA, 75 bp, synthetic construct
  source 1..75: mol_type = other DNA
tctgctgaccgccggtgataccaaaccggtactgcgcgcgctgaaacgtatgctggcgatgcgtcattacaaacg

SEQ ID NO: 508004 - DNA, 75 bp, synthetic construct
  source 1..75: mol_type = other DNA
cctgctgggctcatgcccgccgaaagatccacgatgtgcacgtccgcatcccgtcagcactgacggaagaagccc

SEQ ID NO: 508005 - DNA, 75 bp, synthetic construct
  source 1..75: mol_type = other DNA
actgttgtggatggaatacaaggcacaggcgggtgacaaagcgatgggatactcgcacttccgccgttgctaccg

SEQ ID NO: 508006 - DNA, 75 bp, synthetic construct
  source 1..75: mol_type = other DNA
tgaacccggcatgtgtggcgacctgcccgagcggtgcgatttacaagcgtgaagaagatggcatcgtcctgatcg

SEQ ID NO: 508007 - DNA, 75 bp, synthetic construct
  source 1..75: mol_type = other DNA
tgcgggcgaactgggtagcaacggcattctgccagacgttgaaagtctgcgtatcccggttcagtatctggcgaa

SEQ ID NO: 508008 - DNA, 75 bp, synthetic construct
  source 1..75: mol_type = other DNA
tgctgggtaaaatcttcgctaaccctcatctgccggggatcgacgattattacgagccgttcgattttgactatc

SEQ ID NO: 508009 - DNA, 75 bp, synthetic construct
  source 1..75: mol_type = other DNA
gcggaagcattgcaatggcatctgctggactcgggtgcaatttatcgcgtactggcgctggcggcattgcatcat

SEQ ID NO: 508010 - DNA, 75 bp, synthetic construct
  source 1..75: mol_type = other DNA
ccgaagaaacgcgttccggcaaatccggaaaaagtgctgaaactgacaggcgcacgcggcaacaacctgaaagac

SEQ ID NO: 508011 - DNA, 75 bp, synthetic construct
  source 1..75: mol_type = other DNA
acgttcgtggcggacgctgcgaggcctgtcagggcgatggcgtgatcaaagtggagatgcacttcctgccggata

SEQ ID NO: 508012 - DNA, 75 bp, synthetic construct
  source 1..75: mol_type = other DNA
gagctttccggtggtaccgcggtagtggcggatatggacgacccgaaagcggaagagctgctgttttccgccaac

SEQ ID NO: 508013 - DNA, 75 bp, synthetic construct
  source 1..75: mol_type = other DNA
aggttccggtaaatcgacgctgattaacgacacgctgtttccgattgcccaacgccagttgaatggcgcaaccat

SEQ ID NO: 508014 - DNA, 75 bp, synthetic construct
  source 1..75: mol_type = other DNA
ggtacgtgaagaattagccaagtttatcagcaatcgtccgtgcgccagctgcgaagggacgcgtctgcgtcggga

SEQ ID NO: 508015 - DNA, 75 bp, synthetic construct
  source 1..75: mol_type = other DNA
attgaggggctttctcccgccatctcaattgaacagaaatcgacgtctcataacccgcgttccacagtggggacc

SEQ ID NO: 508016 - DNA, 75 bp, synthetic construct
  source 1..75: mol_type = other DNA
gatcgatatcgaccaaagcccaattggtcgtactccgcgttctaacccggcgacctataccggcgtgtttacgcc

SEQ ID NO: 508017 - DNA, 75 bp, synthetic construct
  source 1..75: mol_type = other DNA
gttctggcaaatcctcgctcgctttcgacaccttatatgccgaagggcagcgccgttacgttgaatccctttccg

SEQ ID NO: 508018 - DNA, 75 bp, synthetic construct
  source 1..75: mol_type = other DNA
tggtaacccatctcgatgtctcgcgtgaacaactggcagaagtcgcagcccactggcgcgctttcctggcgcgtt

SEQ ID NO: 508019 - DNA, 75 bp, synthetic construct
  source 1..75: mol_type = other DNA
acgtccgtggcggacgctgcgaggcctgtcagggcgacggcgtgatcaaagtggagatgcacttcctgccggata

SEQ ID NO: 508020 - DNA, 75 bp, synthetic construct
  source 1..75: mol_type = other DNA
cgcacgcggtaataacctgaaagacgtgacgctgacgctgccagtcggtctgtttacctgcatcacaggggtttc

SEQ ID NO: 508021 - DNA, 75 bp, synthetic construct
  source 1..75: mol_type = other DNA
acgccgctgcctgctatctccgacatgagcattggtcatgcgatggagtttttcaacaatctcaaactcgccggg

SEQ ID NO: 508022 - DNA, 75 bp, synthetic construct
  source 1..75: mol_type = other DNA
ttgtacgccatagaggcggatataaggggaatgccggcagaacagcggcttgctgaacgtcagcgaaaaacgaaa

SEQ ID NO: 508023 - DNA, 75 bp, synthetic construct
  source 1..75: mol_type = other DNA
tgagcaaaacatgcaggtttgcgtaccgtctactccggcacaggtttaccacatgctgcgtcgtcaggcgctgcg

SEQ ID NO: 508024 - DNA, 75 bp, synthetic construct
  source 1..75: mol_type = other DNA
tgcgcaggtggttatcgaccagttcatttcttctggtgaacagaaatggggccggatgtgtggtctggtaatgct

SEQ ID NO: 508025 - DNA, 75 bp, synthetic construct
  source 1..75: mol_type = other DNA
gatccgccacgctggcaacagcggcacccgcgaagtggttctcgggatggcgcaccgtggtcgtctgaacgtgct

SEQ ID NO: 508026 - DNA, 75 bp, synthetic construct
  source 1..75: mol_type = other DNA
ttgagaaaaaatgccggcctgaaataccaggcaacaccggaagggctgcgctatccggcctcaagaggtctgcgg

SEQ ID NO: 508027 - DNA, 75 bp, synthetic construct
  source 1..75: mol_type = other DNA
gcacggttattatcccggcccgaccacgcaaacctaaagataaaccaaaagcagaaaacggcgtcctcatcgtcg

SEQ ID NO: 508028 - DNA, 75 bp, synthetic construct
  source 1..75: mol_type = other DNA
gcggtgatccacaaccagtctaacggttccacttacacgccgctgcaacacatccataacggccagggcgcgttc

SEQ ID NO: 508029 - DNA, 75 bp, synthetic construct
  source 1..75: mol_type = other DNA
gggctgggtggatgcatgctgccggcagctgtctccgctggaagagacgcttcatggctatgtgctgactgacgg

SEQ ID NO: 508030 - DNA, 75 bp, synthetic construct
  source 1..75: mol_type = other DNA
actgaatggggaggaaaaagagcgggcccgtctggggtatgcggcggatgacctaggttttgtgggggatccgta

SEQ ID NO: 508031 - DNA, 75 bp, synthetic construct
  source 1..75: mol_type = other DNA
actgaacggggaggaaaaagagcgggcccgcctggggtatgcggcggatgacctcggttttgtgggggatccgta

SEQ ID NO: 508032 - DNA, 75 bp, synthetic construct
  source 1..75: mol_type = other DNA
tggctgccggtgagaaactgttcgactggggcggcgcggaaaacctcgcttacgccacgctggttgacgaaggca

SEQ ID NO: 508033 - DNA, 75 bp, synthetic construct
  source 1..75: mol_type = other DNA
cccgtctggcgctcgatttccgtaacacctttaaacgtgatgtcttcatcgacctggtatgctaccgccgtcacg

SEQ ID NO: 508034 - DNA, 75 bp, synthetic construct
  source 1..75: mol_type = other DNA
ccgttccctgaatcactaccccgtgacgaaaagcgactgttgccagcggcgccgtgctgcccgaactgcggcggt

SEQ ID NO: 508035 - DNA, 75 bp, synthetic construct
  source 1..75: mol_type = other DNA
tccgggaaaaatgggatgaactggttatccgcctggggcgttcgcctgagcagcgttgcgtgaatcacatttctg

SEQ ID NO: 508036 - DNA, 75 bp, synthetic construct
  source 1..75: mol_type = other DNA
agagcgtgagctggccctgtccagactgaaaggggaagaaaaagagcgtgtccggctggggtatgcggcggatga

SEQ ID NO: 508037 - DNA, 75 bp, synthetic construct
  source 1..75: mol_type = other DNA
acaacagcctgctggcggtgcgcgacgacctgctggaagcggcgaatggcaccaatactgccgattcgctcgcaa

SEQ ID NO: 508038 - DNA, 75 bp, synthetic construct
  source 1..75: mol_type = other DNA
tgccgtgatctggggagtcttcatctggagagaatttgccagtgcgccagccggaaccaataaactgctgctgac

SEQ ID NO: 508039 - DNA, 75 bp, synthetic construct
  source 1..75: mol_type = other DNA
gccagaatcgccagttgcgggtggaaaaaatcctgaatcgttcgggcatccagcctctgcacagcaaatgctcgt

SEQ ID NO: 508040 - DNA, 75 bp, synthetic construct
  source 1..75: mol_type = other DNA
gacgtgtcatgaaaaacattgcggcagttggggttcttgaacgtattcgcagacttgcaccacaggggtcggttc

SEQ ID NO: 508041 - DNA, 75 bp, synthetic construct
  source 1..75: mol_type = other DNA
cgaaattcgaacggcgcactccacgccagtaatcatcctgaaggcggcgcagtaatgacattaacctggcctgaa

SEQ ID NO: 508042 - DNA, 75 bp, synthetic construct
  source 1..75: mol_type = other DNA
cgcatatttgaaccattttttaccactaaacgtagaggaatggggttgggactggcaatagtcagcgaaattgtc

SEQ ID NO: 508043 - DNA, 75 bp, synthetic construct
  source 1..75: mol_type = other DNA
tcagcgaattgcgcatttcaatacacaactcaaaaccgcagcaatatttattcttgatacgcaaggaaaggctat

SEQ ID NO: 508044 - DNA, 75 bp, synthetic construct
  source 1..75: mol_type = other DNA
ccatcgtcagactacggtgtcgaacggcgtggaagtggataccaacgtggcggcgagcgatttcttcggcagtaa

SEQ ID NO: 508045 - DNA, 75 bp, synthetic construct
  source 1..75: mol_type = other DNA
ggcgtcgatcacctttaccggactggaagtggcaatggaagctaccctcaagacttactcgaaagtgagtgagtt

SEQ ID NO: 508046 - DNA, 75 bp, synthetic construct
  source 1..75: mol_type = other DNA
ggcgtggaagtggataccaacgtggcggcgagcgatttcttcggcagcaatttagatgtgctcaacacactgaat

SEQ ID NO: 508047 - DNA, 75 bp, synthetic construct
  source 1..75: mol_type = other DNA
ccggaaccaataaactgctgctgaccatgtttatttcatacattgtgggtattgttcttattatcgccgctaatc

SEQ ID NO: 508048 - DNA, 75 bp, synthetic construct
  source 1..75: mol_type = other DNA
tgttgccagatggctcatcagcctatacccgtgacggctctttccaggtggatcagaacgggcagctggtgacgg

SEQ ID NO: 508049 - DNA, 75 bp, synthetic construct
  source 1..75: mol_type = other DNA
caccgaaacgcaatcctccggcgcaccgaacgaaagtacaccgggtctgaacggcgcggggctgctgtatcaagg

SEQ ID NO: 508050 - DNA, 75 bp, synthetic construct
  source 1..75: mol_type = other DNA
gtatgttgaaacgtctaacgtcaacgtggcggaagagctggtcaacatgatccaggtacagcgtgcttacgaaat

SEQ ID NO: 508051 - DNA, 75 bp, synthetic construct
  source 1..75: mol_type = other DNA
cgccagtggggcaaccaggaagatttggcgtgtgcgcagtggatctgggggcgaatcgtgagtctttacgagcag

SEQ ID NO: 508052 - DNA, 75 bp, synthetic construct
  source 1..75: mol_type = other DNA
tgcgtaaccagaagctgggctttatttatcagtttcaccacctgctgccggattttaccgccctggaaaacgtgg

SEQ ID NO: 508053 - DNA, 75 bp, synthetic construct
  source 1..75: mol_type = other DNA
tcttccagttgcttggggagttgaatcgcttgcagggcaccgccttcctggtggttactcacgacctgcaactgg

SEQ ID NO: 508054 - DNA, 75 bp, synthetic construct
  source 1..75: mol_type = other DNA
gctgccagtgacgatggtgagatcacgcgaccgaaagagcccaactggacggcgtgggccaatgacgtgcgcaca

SEQ ID NO: 508055 - DNA, 75 bp, synthetic construct
  source 1..75: mol_type = other DNA
gaaaaatgggacgaactggtcatccgcctgggacgttcacctgtacagcgttgtgtgaatcatatttctgaaccg

SEQ ID NO: 508056 - DNA, 75 bp, synthetic construct
  source 1..75: mol_type = other DNA
aactacgggagcgagcttttagatggtggcaaattgagcgaatccatcggttcaaaatgcgccgctccatcaggt

SEQ ID NO: 508057 - DNA, 75 bp, synthetic construct
  source 1..75: mol_type = other DNA
aaacgggtcttgacgcccagcaaaccaatatggacgtcattgccaataatctggcaaacgtcagtaccaacggtt

SEQ ID NO: 508058 - DNA, 75 bp, synthetic construct
  source 1..75: mol_type = other DNA
aaatgaaacgctccattggttcaaaacgacccaatgtcatcgggtcaaaatggcctgatgatcttacagagaata

SEQ ID NO: 508059 - DNA, 75 bp, synthetic construct
  source 1..75: mol_type = other DNA
tgacgtgtgcgcagtggatctgggggcgggttttaaacctgtacgagcaggctgcgagcgatgatggtgagatca

SEQ ID NO: 508060 - DNA, 75 bp, synthetic construct
  source 1..75: mol_type = other DNA
ccatcgagcaattttatgttttaccctatatgctctcaacagaccatatcatccgtcaggcggtaattacgcctg

SEQ ID NO: 508061 - DNA, 75 bp, synthetic construct
  source 1..75: mol_type = other DNA
cgtacagcattgcaacgaattaacccgcaccttagtgagaagaagtgtgaggaagcgctaaaacaggtgatgcag

SEQ ID NO: 508062 - DNA, 75 bp, synthetic construct
  source 1..75: mol_type = other DNA
acccaaccacagcttgaagttttattacaggggttgcttaatcctgtaacgctgctggatataatccgccacttt

SEQ ID NO: 508063 - DNA, 75 bp, synthetic construct
  source 1..75: mol_type = other DNA
ttgaagtaatggcgattgagtacctgcaagggctgggctatgagtacgtatatggtccggacattgaaccttgtg

SEQ ID NO: 508064 - DNA, 75 bp, synthetic construct
  source 1..75: mol_type = other DNA
aaatatggttatccgcctgatatgtcattgctcgccacagagactgttttgaagcaggctgaacttttagctgga

SEQ ID NO: 508065 - DNA, 75 bp, synthetic construct
  source 1..75: mol_type = other DNA
gtcattaatcagctcaccatcaaagaaggcaaccatacccgccggccggatcttattttgttcatcaacggtctg

SEQ ID NO: 508066 - DNA, 75 bp, synthetic construct
  source 1..75: mol_type = other DNA
caaaggagggacgtttgagtagcgcttctaaacctgatagctacgaaaaagtccctctgatttctaatgttgctg

SEQ ID NO: 508067 - DNA, 75 bp, synthetic construct
  source 1..75: mol_type = other DNA
cggttttgatcctaacttttccacccagaaggccgacacaacacgaatgatggtgctttttttcggcagttctgg

SEQ ID NO: 508068 - DNA, 75 bp, synthetic construct
  source 1..75: mol_type = other DNA
catcgttgcctcgtcgcccaattatgtggcttccagccagaccctgaaaaaatatctggataaaacggtggtgat

SEQ ID NO: 508069 - DNA, 75 bp, synthetic construct
  source 1..75: mol_type = other DNA
gaaaaatcccccgcgtcagcgccagtgcttcattaatgcgcgcaccggtgttccacagtgtggccagcagcatct

SEQ ID NO: 508070 - DNA, 75 bp, synthetic construct
  source 1..75: mol_type = other DNA
ggggattttcagtgttgccaccatcgtctgcagctggctgacgtaccaggagtcggagagcggaaccagccggtg

SEQ ID NO: 508071 - DNA, 75 bp, synthetic construct
  source 1..75: mol_type = other DNA
actgggaacgagtgtatggagtaataccccgcgacggtgccacacagcaggaacgccgagaaaatattcttataa

SEQ ID NO: 508072 - DNA, 75 bp, synthetic construct
  source 1..75: mol_type = other DNA
gctatctgcgacatattccttaaacgcatcgttaaagggaaagggctggatgtcattgttgataaaacaggcgaa

SEQ ID NO: 508073 - DNA, 75 bp, synthetic construct
  source 1..75: mol_type = other DNA
agaagaaaaatatttcgatgctgtgctggccgggctgtgcgtgggttacgccacagaacgtcatgcgggcaccaa

SEQ ID NO: 508074 - DNA, 75 bp, synthetic construct
  source 1..75: mol_type = other DNA
cgcttttactgccgcaatcgtccttatctgaccttcacccagacgccaaaagagttccccagctggctgaaagag

SEQ ID NO: 508075 - DNA, 75 bp, synthetic construct
  source 1..75: mol_type = other DNA
ccgcgaagccgcgccaggccccgatgagcggcttcgagcgttacctgacgctgtgggtggccctgtgcatcgtcg

SEQ ID NO: 508076 - DNA, 75 bp, synthetic construct
  source 1..75: mol_type = other DNA
cgttactttcctttggtgcccctgtactggaagaaacatttaaagaccttaaacccgcttttacttattgccatt

SEQ ID NO: 508077 - DNA, 75 bp, synthetic construct
  source 1..75: mol_type = other DNA
aatcccttacttcaaaagccttgccgccagtctgggctataccatcaccattacggagccgcgaccgttccgggt

SEQ ID NO: 508078 - DNA, 75 bp, synthetic construct
  source 1..75: mol_type = other DNA
caggcattgcattgtgccttttaaccggtatgcgtgacccttttaaaccgccggaagatctatgccggattagcg

SEQ ID NO: 508079 - DNA, 75 bp, synthetic construct
  source 1..75: mol_type = other DNA
atgacacctcagcaagaaaacgcccttcgcagtattgcccgtcaggctaattatgaaatcaaaaaagccagacag

SEQ ID NO: 508080 - DNA, 75 bp, synthetic construct
  source 1..75: mol_type = other DNA
ggggataaatcgctgcggtgaccgtctgctgataccggaaatccgctgggtgtggcaggtcaatgttatcgggac

SEQ ID NO: 508081 - DNA, 75 bp, synthetic construct
  source 1..75: mol_type = other DNA
tatcgtcggcgcgatgaatatcggcctttcgacacccggtgccggcattttctcgctctttttacttcatgataa

SEQ ID NO: 508082 - DNA, 75 bp, synthetic construct
  source 1..75: mol_type = other DNA
tgagttccaaatctatactggttcggaactgaatcatgtcacggggcagaacatatgttgggctacctcggtgct

SEQ ID NO: 508083 - DNA, 75 bp, synthetic construct
  source 1..75: mol_type = other DNA
tgcttctgcgactaatgtcactgtttaatgttgataacgacagtgagctggctcgtatgctgaatgttaatagac

SEQ ID NO: 508084 - DNA, 75 bp, synthetic construct
  source 1..75: mol_type = other DNA
cctatcgtgttcaccagcttgctcaatcaatatgaggcgagctgggaaacggatgatacgctgttcaaccaaccg

SEQ ID NO: 508085 - DNA, 75 bp, synthetic construct
  source 1..75: mol_type = other DNA
ttttgcgggggttacgtcacatcgcccgtgctcacgaggaaacagccaaagttgcagctgccgttggaaaaccaa

SEQ ID NO: 508086 - DNA, 75 bp, synthetic construct
  source 1..75: mol_type = other DNA
ctggcggatgatgagctcagggcgcgtattcagtcggcaacgacgcccgatgaattgctctcggcgctggatgac

SEQ ID NO: 508087 - DNA, 75 bp, synthetic construct
  source 1..75: mol_type = other DNA
gtaaactcctcctgttgtatcgtctttgcctctcgggtcgtaatctttataaacagaatttgggtaatgactcca

SEQ ID NO: 508088 - DNA, 75 bp, synthetic construct
  source 1..75: mol_type = other DNA
atgaaagaagtcaaaaaaaggggtaatgactccaacttattgatagtgttttatgttcagataatgcccgatgac

SEQ ID NO: 508089 - DNA, 75 bp, synthetic construct
  source 1..75: mol_type = other DNA
tacagcgtaaaacgcataatattgctgcgggtaatgactccaacttattgatagtgttttatgttcagataatgc

SEQ ID NO: 508090 - DNA, 75 bp, synthetic construct
  source 1..75: mol_type = other DNA
cgggctgaccaagatggccgagtcgagccccggcctgacctacgccaagctgtcctggctgcaagcctggcacat

SEQ ID NO: 508091 - DNA, 75 bp, synthetic construct
  source 1..75: mol_type = other DNA
gacagcctgctgacagcggttctgatttcactgtttactgaccgccgggcactggcatcggatgaaatccctgat

SEQ ID NO: 508092 - DNA, 75 bp, synthetic construct
  source 1..75: mol_type = other DNA
ggatggcattgatatgctgaccgacgacagcctgacaaccgatgtgacaatctccctgtttaccgaccggcgcgc

SEQ ID NO: 508093 - DNA, 75 bp, synthetic construct
  source 1..75: mol_type = other DNA
cttccggctccaccggtaccccgaaaggagtgatgatcgaccaccgtgcggccatgaacacgctggaagacatca

SEQ ID NO: 508094 - DNA, 75 bp, synthetic construct
  source 1..75: mol_type = other DNA
tcagaaaccagcgttctgcaaccgcgcctgccgttgattgccattccaacgaccgccggaaccggctctgaaacc

SEQ ID NO: 508095 - DNA, 75 bp, synthetic construct
  source 1..75: mol_type = other DNA
tggccttatgcgtagtctggccgtcaaaggaattgccatcacgctctggccgtgtccggtgggcgaaccgtgtat

SEQ ID NO: 508096 - DNA, 75 bp, synthetic construct
  source 1..75: mol_type = other DNA
tctttcaggcattcgataccctgaatctgcaacgggtaaaaacatttagcgttccgccagtgacgctcagcggtc

SEQ ID NO: 508097 - DNA, 75 bp, synthetic construct
  source 1..75: mol_type = other DNA
cattgaagcgtatagcgcactgaacgccacaccgtttaccgacagtctggcgattggcgccattgcgatgattgg

SEQ ID NO: 508098 - DNA, 75 bp, synthetic construct
  source 1..75: mol_type = other DNA
atgttgctgccaacggtgatggaatttaaccggatggtttgtcgtgaacgctttagtcagattggtcgggcactg

SEQ ID NO: 508099 - DNA, 75 bp, synthetic construct
  source 1..75: mol_type = other DNA
taaatcactgccgaaagcggtgggctacggtcacgaccttgccgcgcgcgagagtatgttgctggcttcatgcat

SEQ ID NO: 508100 - DNA, 75 bp, synthetic construct
  source 1..75: mol_type = other DNA
ttttacaggggttacggcacatcgcccatgcacacgaggaaacagccaaacttgcaactgccgttggaaaaccaa

SEQ ID NO: 508101 - DNA, 75 bp, synthetic construct
  source 1..75: mol_type = other DNA
cagccagtatgcgctgatcgagttgattgacgaacgggaaacgttgaatgtggtgctatgcggcgacggtgatgg

SEQ ID NO: 508102 - DNA, 75 bp, synthetic construct
  source 1..75: mol_type = other DNA
attccctacggtcggggtctgcgcaaccagccagtatacgtgctaaatgcgcaactggaggaatgtccggtcggg

SEQ ID NO: 508103 - DNA, 75 bp, synthetic construct
  source 1..75: mol_type = other DNA
gcttaccccgttgctggctacccttgatgcgtcaacgctagcctacacacaacaagtggcgcgccccgtgtttga

SEQ ID NO: 508104 - DNA, 75 bp, synthetic construct
  source 1..75: mol_type = other DNA
aatgtgcatatgattttggaagggctgaatcctgcggtgcgcgatgaccatgaccaagtgcgagcaccggtgttt

SEQ ID NO: 508105 - DNA, 75 bp, synthetic construct
  source 1..75: mol_type = other DNA
ctgttattgtgcctgaattacctttgacagatgcttctgtttactatgagattttagaaaaaaatgctcgtgtga

SEQ ID NO: 508106 - DNA, 75 bp, synthetic construct
  source 1..75: mol_type = other DNA
gcagtctgttgttggtttttactcgctctattcctgtgatttctgactgtgttgcaatgggcattgaaggtcgct

SEQ ID NO: 508107 - DNA, 75 bp, synthetic construct
  source 1..75: mol_type = other DNA
ttaagaaaattagtaacaatgcgcgtcctaaaaggcttggatactacgcatcatggctctggatgatgtttgtat

SEQ ID NO: 508108 - DNA, 75 bp, synthetic construct
  source 1..75: mol_type = other DNA
cttatttcaacgtgttgaatgccattgacgttctttcctatactcaggcgcaaaaagaagcgatctaccgtcagt

SEQ ID NO: 508109 - DNA, 75 bp, synthetic construct
  source 1..75: mol_type = other DNA
gcctgatagcccggcactgaactgcaccccaaatgttggacataatctgacatctgaaggtgcagtttatgaaac

SEQ ID NO: 508110 - DNA, 75 bp, synthetic construct
  source 1..75: mol_type = other DNA
gtcatttatgtgcacgatctcccgatgccggaattattacgccatgcaaaagcggtggtgacgattaacagtacg

SEQ ID NO: 508111 - DNA, 75 bp, synthetic construct
  source 1..75: mol_type = other DNA
gggtatttattggtgaagacgcaggttaattgggtttattatggggggaacacaacaaactgccaacataatata

SEQ ID NO: 508112 - DNA, 75 bp, synthetic construct
  source 1..75: mol_type = other DNA
cccgtccacggacatatttacgctgaacaagggcgaccatgccggcgaacagcgcgtcagtctgaaagcccgcct

SEQ ID NO: 508113 - DNA, 75 bp, synthetic construct
  source 1..75: mol_type = other DNA
atttgatgagcatttcaagggaatcactggacctctaattgtagcagtttctttctggtctgtaagatctataag

SEQ ID NO: 508114 - DNA, 75 bp, synthetic construct
  source 1..75: mol_type = other DNA
cagtgttgctttattaggctgcaattcattgattgcatggaggaaattttttattcttgttttttctagagtttt

SEQ ID NO: 508115 - DNA, 75 bp, synthetic construct
  source 1..75: mol_type = other DNA
actttttaacccgacatcctgatgcgattgtgtttagtgcaaaaaaacgtcagtggggaaatcaggaggatttgg

SEQ ID NO: 508116 - DNA, 75 bp, synthetic construct
  source 1..75: mol_type = other DNA
cgcacgtaataaccttgataacgcggtagagcagctgcgccagatcaccggtaactactatccggaactggcggc

SEQ ID NO: 508117 - DNA, 75 bp, synthetic construct
  source 1..75: mol_type = other DNA
acagacaaatttgcgaaatgtttggtcgggtacagcgggatccattctgggtaaaaaacatcatgagcccgtcaa

SEQ ID NO: 508118 - DNA, 75 bp, synthetic construct
  source 1..75: mol_type = other DNA
gttttatgccgaatatctgaatcacaaaaactccaatgaattccctcagtttgcgcctgacaacccacaaaactg

SEQ ID NO: 508119 - DNA, 75 bp, synthetic construct
  source 1..75: mol_type = other DNA
acgtatcaagggcatttgcaccagttctggcaggctgattttaaaccggatatgaaactgtttaagaagtttcgt

SEQ ID NO: 508120 - DNA, 75 bp, synthetic construct
  source 1..75: mol_type = other DNA
aacccttcaagctggacgatgttcgcgaagcactggctgaagtcggcattaccggcatgacggtcactgaggtga

SEQ ID NO: 508121 - DNA, 75 bp, synthetic construct
  source 1..75: mol_type = other DNA
tcagtccagtaacgacttcctgcgtctgaaacaggaactcgctaacggcacactgaagcaagagaacggcaaagc

SEQ ID NO: 508122 - DNA, 75 bp, synthetic construct
  source 1..75: mol_type = other DNA
gtttactgatactcctgcctctggtagcaaccagtaagccattgattccaataatgaagacactttttacggatg

SEQ ID NO: 508123 - DNA, 75 bp, synthetic construct
  source 1..75: mol_type = other DNA
aggccgcgttgatccgacgctagggaagcggttaaagccggatggggatggctggattgttccccccgcagccgc

SEQ ID NO: 508124 - DNA, 75 bp, synthetic construct
  source 1..75: mol_type = other DNA
tgtagtgttgggtgcaattagtttgacgtctgcttttgtgtttgcagataaaccagacgttgccaaatcggcaaa

SEQ ID NO: 508125 - DNA, 75 bp, synthetic construct
  source 1..75: mol_type = other DNA
ttaatggggtttattatggggagatggtttttaacaagataaaactggatgaatattttcagagcgtgtcgtgtc

SEQ ID NO: 508126 - DNA, 75 bp, synthetic construct
  source 1..75: mol_type = other DNA
tatgaaactgtttaagaagtttcgtgggtatttattggtgaagacacaggttaatggggtttattatggggaata

SEQ ID NO: 508127 - DNA, 75 bp, synthetic construct
  source 1..75: mol_type = other DNA
ttaatggggtttattatggggatagatgttttgaacatgatattaaggtggataaggattttggtagtattacgc

SEQ ID NO: 508128 - DNA, 75 bp, synthetic construct
  source 1..75: mol_type = other DNA
tatgaaactgtttaagaagtttcgggggtatttattgatgaagacacaagttaatggggtttattatgggagaac

SEQ ID NO: 508129 - DNA, 75 bp, synthetic construct
  source 1..75: mol_type = other DNA
tcctctgctttggtgactgccgcccattgcataaagaagcaaaacgctgggcaacgtcgaaagggatccgctttc

SEQ ID NO: 508130 - DNA, 75 bp, synthetic construct
  source 1..75: mol_type = other DNA
acgtatcaagggcatttgcaccagttctggcaggccgattttaaaccggatatgaaactgtttaagaagtttcgc

SEQ ID NO: 508131 - DNA, 75 bp, synthetic construct
  source 1..75: mol_type = other DNA
gtcagagaaagagatgacgcgctttatgaatctggcttttcaacatatggccgataccgcagagcgtctgaacga

SEQ ID NO: 508132 - DNA, 75 bp, synthetic construct
  source 1..75: mol_type = other DNA
ttctccgcaagagattgaaccggaacagtggctggttgccgtgtggggtggggctgactatgtgccgcgctgggc

SEQ ID NO: 508133 - DNA, 75 bp, synthetic construct
  source 1..75: mol_type = other DNA
cccggtacactgttcatggtggaacaaatcacaccggacagtgtgattctggaatacaacggcaacaggcagacg

SEQ ID NO: 508134 - DNA, 75 bp, synthetic construct
  source 1..75: mol_type = other DNA
taacatcggggtgtactaatcaacggggagcaggtcatttactccctctttttgcctgggcactaccaatcagtc

SEQ ID NO: 508135 - DNA, 75 bp, synthetic construct
  source 1..75: mol_type = other DNA
atgtggcagcctgatcactcaggcaaaatactctccaggaaaaccggagcggttcaacttaaaaagttgaattta

SEQ ID NO: 508136 - DNA, 75 bp, synthetic construct
  source 1..75: mol_type = other DNA
atgaaaactggaccgttaaacgaaagtgagttggaatggctggatgatatcctgaccaaatacaacactgaacac

SEQ ID NO: 508137 - DNA, 75 bp, synthetic construct
  source 1..75: mol_type = other DNA
ttgtattgaaggcacactttgcgaacatgtcgtactggcagtacaggcctttgtccaggcaaaagcgcagcaagc

SEQ ID NO: 508138 - DNA, 75 bp, synthetic construct
  source 1..75: mol_type = other DNA
cgggtgatgatgacaaaaacccgtgcctgggcgctggacgcagaaactacgcctgtggcaccgctaccttctgcc

SEQ ID NO: 508139 - DNA, 75 bp, synthetic construct
  source 1..75: mol_type = other DNA
gacgcgtcacagaacaaacaactgcagattgagcagattcaggaagaaaccgccctgtatgaagcgatgctggca

SEQ ID NO: 508140 - DNA, 75 bp, synthetic construct
  source 1..75: mol_type = other DNA
aacggctggcgttatcaggaaaggagtcttatgaatcaggctgaaatgctggcaaatgagttagcagcatttggt

SEQ ID NO: 508141 - DNA, 75 bp, synthetic construct
  source 1..75: mol_type = other DNA
cagcttcaaccagtgcgccctttgcagttgaacgtatggcgtcccttttacaacagcaggatgatcctgtgtgtc

SEQ ID NO: 508142 - DNA, 75 bp, synthetic construct
  source 1..75: mol_type = other DNA
tatggtgttacttattggcatctggcgcatcagcttcatggggttacaacctgccatcggcatccggtagcgctt

SEQ ID NO: 508143 - DNA, 75 bp, synthetic construct
  source 1..75: mol_type = other DNA
agggaattcatgtggtaatgaataattatctctatggcactcgacagattatttctaaaaaacccattcgcactg

SEQ ID NO: 508144 - DNA, 75 bp, synthetic construct
  source 1..75: mol_type = other DNA
atgacgccggtctttatagccagaaaatcactgctgagcaggatgcggcaatgttgaaagctatgcagaaacaag

SEQ ID NO: 508145 - DNA, 75 bp, synthetic construct
  source 1..75: mol_type = other DNA
cttcgccaggcttccgcttattttgcgaaggcggagttcgaccgcctctggaaaaaatatgccactgctggataa

SEQ ID NO: 508146 - DNA, 75 bp, synthetic construct
  source 1..75: mol_type = other DNA
aaaaaaatgaaagtctgaagaaaaagggaattcatgtggtaatgaataattatctctatggcactcgacagatta

SEQ ID NO: 508147 - DNA, 75 bp, synthetic construct
  source 1..75: mol_type = other DNA
tatggttctggaaagtcaggacgaatatgactcacaatgggcgtcaatttgttccattgctccaaagaatggctg

SEQ ID NO: 508148 - DNA, 75 bp, synthetic construct
  source 1..75: mol_type = other DNA
catgcgttactgggcagacctattaaataaaaaaagtaatggcgaaataacacttgcgctctatcccagctccca

SEQ ID NO: 508149 - DNA, 75 bp, synthetic construct
  source 1..75: mol_type = other DNA
gggaacgcgttcgcatcacgcgcagcagtcagggcacaccgcaggcagaacacctgccggagccaaaaccccgcc

SEQ ID NO: 508150 - DNA, 75 bp, synthetic construct
  source 1..75: mol_type = other DNA
gtgtcatggtgacatgctacagattgtggcagacgacggtttacagattcggcggatagaaatagaccaggagtg

SEQ ID NO: 508151 - DNA, 75 bp, synthetic construct
  source 1..75: mol_type = other DNA
actggagcgagagagatattatctcatcatcattaataaatgatgttttatctcaggggcagtactcgatgtcac

SEQ ID NO: 508152 - DNA, 75 bp, synthetic construct
  source 1..75: mol_type = other DNA
accggaccctgcagaatggcgggcgtcaggccgctgcggcagcccgggagcagcgacgtgccctggcagaactga

SEQ ID NO: 508153 - DNA, 75 bp, synthetic construct
  source 1..75: mol_type = other DNA
aagcgctcactgactctaatcagtggtgtcgtgcaaaccctgaagccttcagcgtttttattgaatcagggcatg

SEQ ID NO: 508154 - DNA, 75 bp, synthetic construct
  source 1..75: mol_type = other DNA
atgacccgttcatgtcgatggtgtcaggccaacccggaaaaattcaccattttcgtggagagcggcaacattgaa

SEQ ID NO: 508155 - DNA, 75 bp, synthetic construct
  source 1..75: mol_type = other DNA
gtgttgaagagcaagggcgtgtactcattgaacaggcaattgaacaaccgctggatccacaacgcctggcgaccg

SEQ ID NO: 508156 - DNA, 75 bp, synthetic construct
  source 1..75: mol_type = other DNA
aaacttttaacgaagtatggcacgaacgcgttgctggtaggcggtggcgcggtggctggtacggtgctgtggaac

SEQ ID NO: 508157 - DNA, 75 bp, synthetic construct
  source 1..75: mol_type = other DNA
cgtacggaacgtttgatccttgcgctggtctttgccgctaaaagtgatggtcatattgatgccaaagaacgtgcg

SEQ ID NO: 508158 - DNA, 75 bp, synthetic construct
  source 1..75: mol_type = other DNA
gattaattggtatttccctcagttacttaatacctatgagggtgaaaagatttattttgataagttggggtatga

SEQ ID NO: 508159 - DNA, 75 bp, synthetic construct
  source 1..75: mol_type = other DNA
tttcatacttactgggcgaaaatggtatacttgaagaaatagataagctctacgaatcaaatgatcacggaattg

SEQ ID NO: 508160 - DNA, 75 bp, synthetic construct
  source 1..75: mol_type = other DNA
ggtaatgaattaaaaattagaacaagaatgatgaaaatcctccggaatggcaaaatcaatatatataaatatatg

SEQ ID NO: 508161 - DNA, 75 bp, synthetic construct
  source 1..75: mol_type = other DNA
atgaggctgtaatggatcgcatttattgtgttattggaacaattcatgttgatatacatatgttgcgcaatgcca

SEQ ID NO: 508162 - DNA, 75 bp, synthetic construct
  source 1..75: mol_type = other DNA
ggtcgcctctatattacgcctgaagggcatgcttgccatgcatattttcgcgaagtcagcggtaatggtatccgc

SEQ ID NO: 508163 - DNA, 75 bp, synthetic construct
  source 1..75: mol_type = other DNA
acagttcattcagtggtgccaagagttattcccgtatagcgaaagccggctgataccggaagatacgataaaact

SEQ ID NO: 508164 - DNA, 75 bp, synthetic construct
  source 1..75: mol_type = other DNA
gcaatcgaccagcaattgcgtgaagccggcgtggaagagcaggggcgtgtactcattgagcaggcaatcgaacaa

SEQ ID NO: 508165 - DNA, 75 bp, synthetic construct
  source 1..75: mol_type = other DNA
atgatggctcatattaagtcctcatcttatatcaaaaataatgatggtagtgagataatgaagtttgttatgaat

SEQ ID NO: 508166 - DNA, 75 bp, synthetic construct
  source 1..75: mol_type = other DNA
gattttcttgatgccttgaattttatggataatatgggaaaggtggataaaaataaaattcttttgtatttggat

SEQ ID NO: 508167 - DNA, 75 bp, synthetic construct
  source 1..75: mol_type = other DNA
atttaataatgttgagtctgtatttaataaagtgcctgtcagcattttagtaaatgatatttttctgaaggattt

SEQ ID NO: 508168 - DNA, 75 bp, synthetic construct
  source 1..75: mol_type = other DNA
agttaaataattcgcaggagttaaataactcgcaggacttaaaaaattcgcaggtgagttgtaaaggttcagttg

SEQ ID NO: 508169 - DNA, 75 bp, synthetic construct
  source 1..75: mol_type = other DNA
tctttgttgtctcctggattctggggcgtcagggtaaacaacagagcgaaaatgaagtcacaggtggtcgtcagc

SEQ ID NO: 508170 - DNA, 75 bp, synthetic construct
  source 1..75: mol_type = other DNA
cgggcagttgatatagcaaaaacagagcagtgggggagagttgttgagaaagagtgcggaagatgcaaaggtgtc

SEQ ID NO: 508171 - DNA, 75 bp, synthetic construct
  source 1..75: mol_type = other DNA
tggaaagacatgaggatgaaacaagaacggagataacaattgatgtcagtttatcaggtgttgtgatttcggagg

SEQ ID NO: 508172 - DNA, 75 bp, synthetic construct
  source 1..75: mol_type = other DNA
agttgctatttaatgaagtgcctgtcagcattttggtaaatgatatttttttgaaggttttttttatgaagcaac

SEQ ID NO: 508173 - DNA, 75 bp, synthetic construct
  source 1..75: mol_type = other DNA
aatggcaaaattaatatatatgaatatattaataaagaacagctagaaaaattaaatcctccggaaaatttacgt

SEQ ID NO: 508174 - DNA, 75 bp, synthetic construct
  source 1..75: mol_type = other DNA
ataaggaacgaacatctgctattaatgcctcatgtatgtgatgaatcgatttcatacttactgggcgaaaatggt

SEQ ID NO: 508175 - DNA, 75 bp, synthetic construct
  source 1..75: mol_type = other DNA
atcataagttaaataatcgtcagaagttaaataattcgcaggagttaaataattcacaggatttaaataattcgc

SEQ ID NO: 508176 - DNA, 75 bp, synthetic construct
  source 1..75: mol_type = other DNA
atttcagtcctcagggaatgcacatcagcgacgacgtgaaaggaacttcgccggatcgtctcaccggtacagatg

SEQ ID NO: 508177 - DNA, 75 bp, synthetic construct
  source 1..75: mol_type = other DNA
tggactgtcgaagagtgcaaggcgatcaaggaagagtaccaacagaaacttaaaaaactgcgaaatagcagaagt

SEQ ID NO: 508178 - DNA, 75 bp, synthetic construct
  source 1..75: mol_type = other DNA
ctgaaggtgacggaggccatttcgacagggctgaaaatctccggtgccagtacggcagaggcgggctcggtgatc

SEQ ID NO: 508179 - DNA, 75 bp, synthetic construct
  source 1..75: mol_type = other DNA
tacgccaatcactggcggaaatgccattacccaggccgacgcagcagagcaaggagttgtgatcaagcctgcaca

SEQ ID NO: 508180 - DNA, 75 bp, synthetic construct
  source 1..75: mol_type = other DNA
gcctgcacaaaattccaccgttgctgttgcgtcgcaaccgacaattacgcccgaattcaagtccgaagtgcgaca

SEQ ID NO: 508181 - DNA, 75 bp, synthetic construct
  source 1..75: mol_type = other DNA
aatccaaatacagttttatgcgcctgattaatttgatgtacgacctggtgacctgccttaccacaacgccgctac

SEQ ID NO: 508182 - DNA, 75 bp, synthetic construct
  source 1..75: mol_type = other DNA
aatcaagaaaaatcacgcttaatactaaggttatttgatgatgttaagttgctatttaatgaagtgcctgtcagc

SEQ ID NO: 508183 - DNA, 75 bp, synthetic construct
  source 1..75: mol_type = other DNA
gttatgtggattttagcaaacgctccaacgaagcgggtagaaatatgatggctcatattgagtcctcatcttata

SEQ ID NO: 508184 - DNA, 75 bp, synthetic construct
  source 1..75: mol_type = other DNA
ggaaatagaaattacactttccactatcactactatggggactcgtcaaggacatacggctattatatttcaaca

SEQ ID NO: 508185 - DNA, 75 bp, synthetic construct
  source 1..75: mol_type = other DNA
atgaatggtttataccaaaatatcaaaatcaatggtggtgttctccagatttgtggaaccaagatagcactcgaa

SEQ ID NO: 508186 - DNA, 75 bp, synthetic construct
  source 1..75: mol_type = other DNA
tgggtttaagcgcaacctatggacaaacaggaaacaaggttgcagccggagccgtccagtcagtcattggtgtca

SEQ ID NO: 508187 - DNA, 75 bp, synthetic construct
  source 1..75: mol_type = other DNA
atattaatgatgtaagaatactggattggtgttttaataaaagaatgcaatattttggtgattctgaaaagataa

SEQ ID NO: 508188 - DNA, 75 bp, synthetic construct
  source 1..75: mol_type = other DNA
aggcagtaaatcactggcatgaaccaaccgccgcgctgatgcgtccgtttcgtgaactgccggactggcgcattg

SEQ ID NO: 508189 - DNA, 75 bp, synthetic construct
  source 1..75: mol_type = other DNA
actggctggcactgctgctgttcgtattatgctcagtaaacagctggccgttgcggatggttaaaggaattgttg

SEQ ID NO: 508190 - DNA, 75 bp, synthetic construct
  source 1..75: mol_type = other DNA
attatgctctgtaaacagctggccgttacggatggttaaaggaacagttgtggggacaactgacacattgcgtga

SEQ ID NO: 508191 - DNA, 75 bp, synthetic construct
  source 1..75: mol_type = other DNA
agtcgactggtcagtcatcaggatggcaaatggcaggtcagccacggcccgttcgaaagctacgatcatctcggt

SEQ ID NO: 508192 - DNA, 75 bp, synthetic construct
  source 1..75: mol_type = other DNA
cgtgagatgatgcttgaattgatcaaccagccggaacactttaaacagtggtttggcgagtttatatcccagtca

SEQ ID NO: 508193 - DNA, 75 bp, synthetic construct
  source 1..75: mol_type = other DNA
ggcgatattctttatattccgccgggattcccgcacgaaggctacgcgctggaaaatgcgatgaactactctgtc

SEQ ID NO: 508194 - DNA, 75 bp, synthetic construct
  source 1..75: mol_type = other DNA
gatcccgaaattcaacaactggcagaagaaaccggtggctgtatttctgattctctggaaatggcgcgcttcggt

SEQ ID NO: 508195 - DNA, 75 bp, synthetic construct
  source 1..75: mol_type = other DNA
agaaaccgccaaaatcctcagcccggaaaaaacagtgttgatgccaacccttcaggccgaatgttctttagattt

SEQ ID NO: 508196 - DNA, 75 bp, synthetic construct
  source 1..75: mol_type = other DNA
catccagaatcaccacaagctattgtcgatatggcggatgcggtcggttccaccagtcaactgatcgctgctgcg

SEQ ID NO: 508197 - DNA, 75 bp, synthetic construct
  source 1..75: mol_type = other DNA
aaagcgtattaccgtgagaaaataaaacgtctgctaaaagaacgtaatgcggtgatggttgcccactactatacc

SEQ ID NO: 508198 - DNA, 75 bp, synthetic construct
  source 1..75: mol_type = other DNA
cagctgcgcgcattgtccgtggatggccatgaatggccttcaggccatcgcagaggcattagaacaggaaggaag

SEQ ID NO: 508199 - DNA, 75 bp, synthetic construct
  source 1..75: mol_type = other DNA
caaacacgaagtccatgttgaagaaatgctgcgagagagggcgctggtaccactcaatcgtatgctgaattttgc

SEQ ID NO: 508200 - DNA, 75 bp, synthetic construct
  source 1..75: mol_type = other DNA
gagttattagaaaagccattagccagtacattagaaaaaataaagaaagaacatctgctattaatgcctcatgta

SEQ ID NO: 508201 - DNA, 75 bp, synthetic construct
  source 1..75: mol_type = other DNA
tctcgcttcccggcgaaccgtcgtgacatcgccgttgtggtcgcagaaaacgttcctgctgcggatattttatcc

SEQ ID NO: 508202 - DNA, 75 bp, synthetic construct
  source 1..75: mol_type = other DNA
cgatatcactaacgaagcaacgctgccgaagcgtgcgaccatcactttacgtcgcagcaaactggatcgtctgat

SEQ ID NO: 508203 - DNA, 75 bp, synthetic construct
  source 1..75: mol_type = other DNA
gtgtagaaccggttgccggtagcttccacggcgtggttgttggtgaagtggttgagtgtgcgcagcatccgaacg

SEQ ID NO: 508204 - DNA, 75 bp, synthetic construct
  source 1..75: mol_type = other DNA
attgcagaatgtcatgttaactgcctggttgaaacagatgctcaggctcatgcaaacgcagcatttatagcagag

SEQ ID NO: 508205 - DNA, 75 bp, synthetic construct
  source 1..75: mol_type = other DNA
aatgtgctttcttcagcccgctatctatcaccggtcgtgctcgtcgtcatggcctgcatactgatgcgtctcacc

SEQ ID NO: 508206 - DNA, 75 bp, synthetic construct
  source 1..75: mol_type = other DNA
ccgaagcgtgcgaccattactctgcgtcgtagcaaactggatcgtctgatcggccatcatattgccgatgaacag

SEQ ID NO: 508207 - DNA, 75 bp, synthetic construct
  source 1..75: mol_type = other DNA
gtgagcgaaattgactatcaggcacttcgtgaaaaggcagaaaaagcaacgtggggagactgggactcatataaa

SEQ ID NO: 508208 - DNA, 75 bp, synthetic construct
  source 1..75: mol_type = other DNA
gtgcagaacgcccgcgcacagtacgataccgtgctggcgaacgaagtgaccgcacgtaataaccttgataacgcg

SEQ ID NO: 508209 - DNA, 75 bp, synthetic construct
  source 1..75: mol_type = other DNA
cgctgaacgtcagcgtctgaaagagccggaacgtgaaaatcgtgaactgcgccgcagtaacgatatccttcgcca

SEQ ID NO: 508210 - DNA, 75 bp, synthetic construct
  source 1..75: mol_type = other DNA
ctgaaactcgatgacaacaccatcgaaatcagcgtaacgccaaaccgtgccgattgcttaggcattatcggcgtg

SEQ ID NO: 508211 - DNA, 75 bp, synthetic construct
  source 1..75: mol_type = other DNA
gatgctgtgctccttttctgagctgggaatttctgacgatcacagcggcattatcgaactgcctgcagatgcgcc

SEQ ID NO: 508212 - DNA, 75 bp, synthetic construct
  source 1..75: mol_type = other DNA
cattccggttggtgcaaccattgacgatacgttgccgattgcagtagaagcgcctgaagcctgcccacgttatct

SEQ ID NO: 508213 - DNA, 75 bp, synthetic construct
  source 1..75: mol_type = other DNA
tacagggcttgatgtcgctggtgatggtaatgcaacggtaaccgcatattatcgccctgttcagtttctgataaa

SEQ ID NO: 508214 - DNA, 75 bp, synthetic construct
  source 1..75: mol_type = other DNA
tccgggaacaacaagaagttaaggcggggcaaaaaatagcgaccatgggtagcaccggaaccagttcaacacgct

SEQ ID NO: 508215 - DNA, 75 bp, synthetic construct
  source 1..75: mol_type = other DNA
tgcgcagggaccagaatggcgcggatatccaggacaaaggaacctttatcgataacctcggtttacgggaaacgg

SEQ ID NO: 508216 - DNA, 75 bp, synthetic construct
  source 1..75: mol_type = other DNA
atggccggtatgtacagaatgttcagcttggagcacagagctatcattcacccggaggcaatgaaatgtcatgga

SEQ ID NO: 508217 - DNA, 75 bp, synthetic construct
  source 1..75: mol_type = other DNA
caaaatcaatatatatgaatatattaataatgaacagttgggaaaattaaatcctccggaagatttacgtatagt

SEQ ID NO: 508218 - DNA, 75 bp, synthetic construct
  source 1..75: mol_type = other DNA
ttagatacctggtatgtgggaatgaatgattttgcccgaattgccggagggcagaatagcagaagcaatattctt

SEQ ID NO: 508219 - DNA, 75 bp, synthetic construct
  source 1..75: mol_type = other DNA
gtgaactgcgtttcgcccgctggtcagagattgatttcacaaaccgagtctggacgatacccgcgacgcgagaac

SEQ ID NO: 508220 - DNA, 75 bp, synthetic construct
  source 1..75: mol_type = other DNA
tgctgatgccggtgcggaagcccagcgtcttgcccgtggttatcttggtctggggacgcttgccacaaaaaacag

SEQ ID NO: 508221 - DNA, 75 bp, synthetic construct
  source 1..75: mol_type = other DNA
cgttacctgcgcagggaccagaatggcgcggatatccaggacaaaggaacctttatcgataacctcggtttacgg

SEQ ID NO: 508222 - DNA, 75 bp, synthetic construct
  source 1..75: mol_type = other DNA
tccggcgcagagtaataccaccacctggtttaccgagggggacggacagaaaggtatcagctggattggtcagga

SEQ ID NO: 508223 - DNA, 75 bp, synthetic construct
  source 1..75: mol_type = other DNA
gttacctgcgcagggagcagaacggcgcagacattccggataaaggcgcttttatcgataacgttggtttacggg

SEQ ID NO: 508224 - DNA, 75 bp, synthetic construct
  source 1..75: mol_type = other DNA
ggaaaagtggcgtttggcctttccgttgagcacgtcgaacacgcgattccgatgctgattaaccatctgaaataa

SEQ ID NO: 508225 - DNA, 75 bp, synthetic construct
  source 1..75: mol_type = other DNA
ggcagataacgtcggcggtgtgtattaccggccgttgcagtatctgttaaatggggcatgggtgacggcagcgag

SEQ ID NO: 508226 - DNA, 75 bp, synthetic construct
  source 1..75: mol_type = other DNA
taaatcgctgccgaaagcggtgggctacgggcacgaccttgccgcgcgcgaaagtatgttgctcgcatcatgcat

SEQ ID NO: 508227 - DNA, 75 bp, synthetic construct
  source 1..75: mol_type = other DNA
catcgggcctggttacttaaacaagggaaactgttagccagtggacgccgggatgaagttttgacgccgccgaac

SEQ ID NO: 508228 - DNA, 75 bp, synthetic construct
  source 1..75: mol_type = other DNA
cactttagagcagttatcgaaaaaatttcgtgccagcgtcagttatatttgccatgaatttaccaaagagtatcg

SEQ ID NO: 508229 - DNA, 75 bp, synthetic construct
  source 1..75: mol_type = other DNA
cgcaaagtaaaaatagccaaacatcttcgttatgggacgcatttgcctatacgttagcaattctttactacgaaa

SEQ ID NO: 508230 - DNA, 75 bp, synthetic construct
  source 1..75: mol_type = other DNA
ggcattgagctaccttatcaagctggcgcaacgtataacgttgaactgaacggcgatctgaagaatgtgagcagt

SEQ ID NO: 508231 - DNA, 75 bp, synthetic construct
  source 1..75: mol_type = other DNA
caaaatagaatctgctaccggaatgccggtggctgccagtcaactctctgccagttggcagaattttggcccgac

SEQ ID NO: 508232 - DNA, 75 bp, synthetic construct
  source 1..75: mol_type = other DNA
gtgaggcgattgccggggattttactgcttactggagccgcgctcgttgtgatcgctgccctgctggttagcggc

SEQ ID NO: 508233 - DNA, 75 bp, synthetic construct
  source 1..75: mol_type = other DNA
ggtcaggtcattggctatgtggcatttagtccggttgatgtgcagggcgaagacctgcaatgggtcggcatggca

SEQ ID NO: 508234 - DNA, 75 bp, synthetic construct
  source 1..75: mol_type = other DNA
ttgatgcgccgggtattgatgccctgctgcgtcgctcattcgaaagtgatgcggaagcgaagctggttcacgatc

SEQ ID NO: 508235 - DNA, 75 bp, synthetic construct
  source 1..75: mol_type = other DNA
ccaggtcggttacgttgacgggatgcccgcccgcctgtggctgtgtctggataacctgttacttgacgggctgag

SEQ ID NO: 508236 - DNA, 75 bp, synthetic construct
  source 1..75: mol_type = other DNA
gcgtcagttatatttgccatgaatttaccaaagagtatcgtatttcccctattaactatgttattcaacggcgta

SEQ ID NO: 508237 - DNA, 75 bp, synthetic construct
  source 1..75: mol_type = other DNA
aatgagttcggctatgccgcagtggtgacgctgggcgatccggcgctgtacagtcgtttcggctttgaactggcg

SEQ ID NO: 508238 - DNA, 75 bp, synthetic construct
  source 1..75: mol_type = other DNA
ttagtccggttgatgtgcagggcgaagacctgcaatgggtcggcatggcaccgttggcggttgatgaaaaatacc

SEQ ID NO: 508239 - DNA, 75 bp, synthetic construct
  source 1..75: mol_type = other DNA
actaatggactgattgatactggtttttcgcggctcactgccgatggtgaatgggttaacaatccggggaatgaa

SEQ ID NO: 508240 - DNA, 75 bp, synthetic construct
  source 1..75: mol_type = other DNA
tgctgaaccttgagcgtctgatgtacatcaagtccttcatcgacaagctgagtgactttgttgagcaggtttaca

SEQ ID NO: 508241 - DNA, 75 bp, synthetic construct
  source 1..75: mol_type = other DNA
gctgggccgtattattggtcgtaccgttcactgctgtgaattgcaggatatcctgcaaaaccaatacagtgcact

SEQ ID NO: 508242 - DNA, 75 bp, synthetic construct
  source 1..75: mol_type = other DNA
gttggtagagctactcaccacatcgctgattgcgctggatgaccagtacagcgaggtgagccagaaaacagccag

SEQ ID NO: 508243 - DNA, 75 bp, synthetic construct
  source 1..75: mol_type = other DNA
gaagcaccgcgcggtatgctctctcactggatggtgatcaaagacggtattatcagtaactaccaggcggttgtt

SEQ ID NO: 508244 - DNA, 75 bp, synthetic construct
  source 1..75: mol_type = other DNA
tcaggaaagcgcgaagcactcctggtataaagacgaagcgccgcaggcaccgtgggaaggtaccaccattccggc

SEQ ID NO: 508245 - DNA, 75 bp, synthetic construct
  source 1..75: mol_type = other DNA
gtctacccagaacaaactgaatgaaatcgttgcgatttatcagaaactgactggcaacacgctggaagtggcgca

SEQ ID NO: 508246 - DNA, 75 bp, synthetic construct
  source 1..75: mol_type = other DNA
gttggcgggaaaaacaataaacgcagtgacgaactacggattcgcgccagcaatctggagctggcggggctggaa

SEQ ID NO: 508247 - DNA, 75 bp, synthetic construct
  source 1..75: mol_type = other DNA
cgcttcaggcggtggaaaagacccggtttcaggcatcgtggagcgatctggcatggaagcaatggaaattactgc

SEQ ID NO: 508248 - DNA, 75 bp, synthetic construct
  source 1..75: mol_type = other DNA
ttgaactggactttattaacgacggtttatggatgaaaaccgatggcgttaatctgggcggtgtgcgggccactg

SEQ ID NO: 508249 - DNA, 75 bp, synthetic construct
  source 1..75: mol_type = other DNA
atgattggcgggctgatcctggggattgcggaggcgctctcttctgcctatctgagtacggaatataaagatgtg

SEQ ID NO: 508250 - DNA, 75 bp, synthetic construct
  source 1..75: mol_type = other DNA
cttcctcatctggcgcaaaacgagcatacagaaagggtaaacctttgagtgaggcagagcgacagagagcagctt

SEQ ID NO: 508251 - DNA, 75 bp, synthetic construct
  source 1..75: mol_type = other DNA
gcgttcaacccagccgagcggcaagatcaacacgctggcgctggatatcccgcttcaggcggcagagaaaacccg

SEQ ID NO: 508252 - DNA, 75 bp, synthetic construct
  source 1..75: mol_type = other DNA
actggcccatcaggtactcaaccccgaagtctggccggtattcgatctccaggtcggttacgttgacgggatgcc

SEQ ID NO: 508253 - DNA, 75 bp, synthetic construct
  source 1..75: mol_type = other DNA
cccgtaaaccgttaccggcttcacttccccgtgaaaacccgggtcatccggccggaagaggaatgctgtccggcc

SEQ ID NO: 508254 - DNA, 75 bp, synthetic construct
  source 1..75: mol_type = other DNA
cttctggcccatgttgttaccgggaaatatgcagaccatctgccgttataccgccagtcagaaatataccgtcgc

SEQ ID NO: 508255 - DNA, 75 bp, synthetic construct
  source 1..75: mol_type = other DNA
ggatctggatatcaaaattgatcgtacagaagcatttaacctgtttatcaagaagtttcagtcggttagcttgct

SEQ ID NO: 508256 - DNA, 75 bp, synthetic construct
  source 1..75: mol_type = other DNA
atgaatctgacgactctgacccaccgcgatgcgttgtgtctgaatgcgcgctttaccagccgtgaagaggccatc

SEQ ID NO: 508257 - DNA, 75 bp, synthetic construct
  source 1..75: mol_type = other DNA
aatatggacaaaatggacaaaatggacaagatgaaaaaggatgatatgggtaaaaaagacagcatgaaccagtaa

SEQ ID NO: 508258 - DNA, 75 bp, synthetic construct
  source 1..75: mol_type = other DNA
gcctgaagcctcagataatgaaggacgaacacgggcggcgctggcagagcagaaccggctgattgatgaacaggc

SEQ ID NO: 508259 - DNA, 75 bp, synthetic construct
  source 1..75: mol_type = other DNA
cgtgtttaaactgcgcgaacatagcacgacggcacggaccgaagtgatcgctggttttaccaccttcctgacgat

SEQ ID NO: 508260 - DNA, 75 bp, synthetic construct
  source 1..75: mol_type = other DNA
cgtggcagatcggtatgggcgcaatcttctggggcgctgtcggactgcttcttttgaccattttccgcgttcgtt

SEQ ID NO: 508261 - DNA, 75 bp, synthetic construct
  source 1..75: mol_type = other DNA
cgagcgtaatgactgtcgtgggtcatgtagatttagccgggtcgtttaacctcgggctggcaggggtgattttct

SEQ ID NO: 508262 - DNA, 75 bp, synthetic construct
  source 1..75: mol_type = other DNA
cgcaacattcacgcggcggtgctggtttctatcgtggtgacgacgctgctgggctggatgctgggtgatgtccac

SEQ ID NO: 508263 - DNA, 75 bp, synthetic construct
  source 1..75: mol_type = other DNA
agtatcggtaacctgacttcccacagcgtgctgctggggatcctcggtttcttcatcattgcgattctggcctcg

SEQ ID NO: 508264 - DNA, 75 bp, synthetic construct
  source 1..75: mol_type = other DNA
atgagtcaacaacacactacccagacttctggtcaggggatgctggaacgcgtgtttaaactacgcgaacatggc

SEQ ID NO: 508265 - DNA, 75 bp, synthetic construct
  source 1..75: mol_type = other DNA
tgagttgctctcggcgctggatgacaagggaggcacgcaaccttctgcctctttttccaacgcgccaactatcgt

SEQ ID NO: 508266 - DNA, 75 bp, synthetic construct
  source 1..75: mol_type = other DNA
cgctgcacccgcaaatcaaccagattctgggcgatttcacctcgctgatgctgctgagctggcatcccggcgaaa

SEQ ID NO: 508267 - DNA, 75 bp, synthetic construct
  source 1..75: mol_type = other DNA
gtgtctggataacctgttacttgacgggctgagcatgcagattctgttggcggagctggagcacggctaccgcta

SEQ ID NO: 508268 - DNA, 75 bp, synthetic construct
  source 1..75: mol_type = other DNA
actaccaggcgctgaagcgtcgtcatacccctgaagcggaaaacccggccgaagcggatttaccccagggcgaca

SEQ ID NO: 508269 - DNA, 75 bp, synthetic construct
  source 1..75: mol_type = other DNA
ttatcaactggcaatgtcaccagagaaaccgacttcttccagcaaggcggcgatagctgctggcgacccgtctga

SEQ ID NO: 508270 - DNA, 75 bp, synthetic construct
  source 1..75: mol_type = other DNA
gcctcccgttaagcaggcggagcaaggtacagagcgcacatcgcgcgtatgccctgagcactctcagccacacat

SEQ ID NO: 508271 - DNA, 75 bp, synthetic construct
  source 1..75: mol_type = other DNA
tctggctcgatcaccagatttatgaatccgaaggcgaactgcgctttaactgggattttgtcgccgcgctgtttc

SEQ ID NO: 508272 - DNA, 75 bp, synthetic construct
  source 1..75: mol_type = other DNA
gtggcaactgtccaatagcgaagagtcttcaccgtttcgtgaaaccaactacgaaccgcaattgttccttggttt

SEQ ID NO: 508273 - DNA, 75 bp, synthetic construct
  source 1..75: mol_type = other DNA
aactcaatagtgcaaccgcctgtatttttgcggctgaagtcgccatcaaggagagtgagcgttttaatggcattc

SEQ ID NO: 508274 - DNA, 75 bp, synthetic construct
  source 1..75: mol_type = other DNA
gaagaaaactcctggctgtggatgtaccgcaagctgggcggcgggatgctcgggattttgatggtgccggtgctc

SEQ ID NO: 508275 - DNA, 75 bp, synthetic construct
  source 1..75: mol_type = other DNA
gctgcatgaaggcattttccgtatcgctctgcaacagccgcaggcgctggcggtaacggacatgcgttatcagtg

SEQ ID NO: 508276 - DNA, 75 bp, synthetic construct
  source 1..75: mol_type = other DNA
gaagcggatttaccccagggcgacattgaaaatatcaccaaactgctcgtaaggcatcagactgcttttcccttt

SEQ ID NO: 508277 - DNA, 75 bp, synthetic construct
  source 1..75: mol_type = other DNA
aatgctgcatatcgcctttcgccccgacgggcagcaggtctggctaccgcaaccttactggaacggcgtcaccgt

SEQ ID NO: 508278 - DNA, 75 bp, synthetic construct
  source 1..75: mol_type = other DNA
cagcacctacggggccagcggttcttataaatcgttcctggctatttcctggtcgtgtcatgttgccacaggtat

SEQ ID NO: 508279 - DNA, 75 bp, synthetic construct
  source 1..75: mol_type = other DNA
aaaggcgtgggagaaaaaacatggtgtgaaactaaataatctgtatctggtaaaccgtccggttttcccggttcg

SEQ ID NO: 508280 - DNA, 75 bp, synthetic construct
  source 1..75: mol_type = other DNA
cttgggccaaaacaactggcagagctggataacctgcgcattgtggatgatggccgtcgtgccgtgcggatttac

SEQ ID NO: 508281 - DNA, 75 bp, synthetic construct
  source 1..75: mol_type = other DNA
atgaaactggcaccgaacgtaaaactgttaccgaaagataaacacaccgaagcggttatttttgcgggtgataat

SEQ ID NO: 508282 - DNA, 75 bp, synthetic construct
  source 1..75: mol_type = other DNA
tggagagggaaacgggtaaacctgttcgcatgattattctggacacgctggcgcgttgctttggcggcaatgatg

SEQ ID NO: 508283 - DNA, 75 bp, synthetic construct
  source 1..75: mol_type = other DNA
gcgtcgtgtaaaagcctgggaggttgtgcacggtgagcaggtgaaaaatctgtatctggtaaaccgtcccatctt

SEQ ID NO: 508284 - DNA, 75 bp, synthetic construct
  source 1..75: mol_type = other DNA
cctttcatgaaaatacgcagccagcgcccaattgagcagattgaaccattagaactgctaaccgtcctgcaaaaa

SEQ ID NO: 508285 - DNA, 75 bp, synthetic construct
  source 1..75: mol_type = other DNA
ttctgcattttccgttaatccagatgactttccctgcagtgagcagcatctgaggtgtccgataaccctgtgtat

SEQ ID NO: 508286 - DNA, 75 bp, synthetic construct
  source 1..75: mol_type = other DNA
cagctcaacggagggagctcttttctgcaggcatttagtctgtatatggagcaaactcgctcagcttcatctttg

SEQ ID NO: 508287 - DNA, 75 bp, synthetic construct
  source 1..75: mol_type = other DNA
ccctgctgaactggagcgcatagaggaggccgggaacaagacggaaaatcacacggctttatggggttgtatccg

SEQ ID NO: 508288 - DNA, 75 bp, synthetic construct
  source 1..75: mol_type = other DNA
tcgagaagaaatcattaagacttttgagcaagatgtgttcccgttcattggtaaacgccatatcagtgaaatcaa

SEQ ID NO: 508289 - DNA, 75 bp, synthetic construct
  source 1..75: mol_type = other DNA
actcaacacttcccgttccttactgaaagtgaattgcctgattttgtcaatgctctggaaaactatcaaggcagt

SEQ ID NO: 508290 - DNA, 75 bp, synthetic construct
  source 1..75: mol_type = other DNA
catgtcggtaacgccggaactgacgctggcgaatatccgtgcgctgtttaatccggcgaattacgacatcattgt

SEQ ID NO: 508291 - DNA, 75 bp, synthetic construct
  source 1..75: mol_type = other DNA
gtgatcgcgcctaacgatatccgtctgatgcgtgaacgtgatggacgtaaccaccgcgacatgtgtgtactgttc

SEQ ID NO: 508292 - DNA, 75 bp, synthetic construct
  source 1..75: mol_type = other DNA
cgctggtggtggtggatgagccgcgcccacccgttgaactggagcgcatcgaggaggcaggcaacaagacggaaa

SEQ ID NO: 508293 - DNA, 75 bp, synthetic construct
  source 1..75: mol_type = other DNA
gcgcgcaataacattgatgcctggtggcccgcgattgaagcaggtgccgaggcaattttgcagactgccagcggt

SEQ ID NO: 508294 - DNA, 75 bp, synthetic construct
  source 1..75: mol_type = other DNA
aaaactggcaattcgcggcgataaaaaactggccttccactgcccgtgtaccctgcaacatgcgcaaaagctgaa

SEQ ID NO: 508295 - DNA, 75 bp, synthetic construct
  source 1..75: mol_type = other DNA
tgtggcgcgttcgtcaaagagtatgggcagatgctgaaaaacgatgcgttgtatgccgataaagcgcgtcaggtc

SEQ ID NO: 508296 - DNA, 75 bp, synthetic construct
  source 1..75: mol_type = other DNA
tggatctaccggatacgacacgcaactggattacgtggttaaggggattattccggcggtatcgctatgcagcat

SEQ ID NO: 508297 - DNA, 75 bp, synthetic construct
  source 1..75: mol_type = other DNA
tcgctggtggtggtggataagccgcgccctcccgttgaactggagcgcatcgaggaggcaggcaacaagacggaa

SEQ ID NO: 508298 - DNA, 75 bp, synthetic construct
  source 1..75: mol_type = other DNA
acgctgtcaacttccgggctggggcgctttctggtgtttctctatatctggctgccgttcatgatcctgcccgtg

SEQ ID NO: 508299 - DNA, 75 bp, synthetic construct
  source 1..75: mol_type = other DNA
tttaccttgtaaaccgtcccatctttccggctgtcccgcttgatgttgatgaactggttattgctgccagccagg

SEQ ID NO: 508300 - DNA, 75 bp, synthetic construct
  source 1..75: mol_type = other DNA
ccggtcacgcacacagcacggcgacaagtgcacgatcccgctgttacgtgacgatatgaaaaagctggggtacga

SEQ ID NO: 508301 - DNA, 75 bp, synthetic construct
  source 1..75: mol_type = other DNA
aggacagaacgggcgaaagggtgcggatgattgtcattgacacgctggcccgttgctttggtggtcatgatgaaa

SEQ ID NO: 508302 - DNA, 75 bp, synthetic construct
  source 1..75: mol_type = other DNA
cccggaaacaggagtttttgtcaaaaatgcacggtgctcaaacgtctgttctttatacgatataaatgccctgac

SEQ ID NO: 508303 - DNA, 75 bp, synthetic construct
  source 1..75: mol_type = other DNA
ccctgtctgttgttctgccgctgcttttactggccggctgctcctctccacctcagaaactacaacagcgtgaag

SEQ ID NO: 508304 - DNA, 75 bp, synthetic construct
  source 1..75: mol_type = other DNA
ggggcggtgatggtggactcaccacagctgaacgtcagcgtctgaaagagctggaacgtgaaaatcgtgaactgc

SEQ ID NO: 508305 - DNA, 75 bp, synthetic construct
  source 1..75: mol_type = other DNA
ctgttaatcatcgttctcagggcagttgttgccgttgcaaacgcgctgattgctgttctggaactgattcgtcag

SEQ ID NO: 508306 - DNA, 75 bp, synthetic construct
  source 1..75: mol_type = other DNA
agacagcgaacgacaggcgaaccacgaaacagtgcagtttgattttctggggtatacgttcagggcgagaagggc

SEQ ID NO: 508307 - DNA, 75 bp, synthetic construct
  source 1..75: mol_type = other DNA
cgataatatcccccacgatttattactcagggcagtggataaacattgtgcggataaatgggtaagactgtctat

SEQ ID NO: 508308 - DNA, 75 bp, synthetic construct
  source 1..75: mol_type = other DNA
aacgtcacgccggtgcttgataatgcagcaggaaaaccgtttacgctgaccagatggacgaatgcagcctttgag

SEQ ID NO: 508309 - DNA, 75 bp, synthetic construct
  source 1..75: mol_type = other DNA
acggccggaggtttcttatcctgccgccggggatgaaaaccgaagccatcccttacgacgggacgacatggatcc

SEQ ID NO: 508310 - DNA, 75 bp, synthetic construct
  source 1..75: mol_type = other DNA
tgtaccgttaaatattgaattgacacatatcgctgcgacacatactgccggaatattattgtgtacgttatgttt

SEQ ID NO: 508311 - DNA, 75 bp, synthetic construct
  source 1..75: mol_type = other DNA
catcaagtctttcatcgacaaactgagcgactttgttgagcaggtttacaaggttgataccgcggttatcgccgc

SEQ ID NO: 508312 - DNA, 75 bp, synthetic construct
  source 1..75: mol_type = other DNA
ggccgctgcggcagcccgggagcagcgacgtgccctggcagaactgaacagccagttgacggaaatccgcggttc

SEQ ID NO: 508313 - DNA, 75 bp, synthetic construct
  source 1..75: mol_type = other DNA
cgaaagcgagaagagaatcagcgccgccatcctcgaccacgaccggaagctgtcctcagccatgagccagcgcac

SEQ ID NO: 508314 - DNA, 75 bp, synthetic construct
  source 1..75: mol_type = other DNA
agaagtctgtcagagcggagctgagcgaaagcgagaagagaatcagcgccgccatcctcgaccacgaccggaagc

SEQ ID NO: 508315 - DNA, 75 bp, synthetic construct
  source 1..75: mol_type = other DNA
aatggttttgccggatggaatggtcaggcccgcatcgagcagccgcaggagggttatgccatcatcatggaaacg

SEQ ID NO: 508316 - DNA, 75 bp, synthetic construct
  source 1..75: mol_type = other DNA
tccggttgctgaaccgtcgatatgaaaaagcgagcatcgtgctgacgtcaaataaagggttcgccgactggggag

SEQ ID NO: 508317 - DNA, 75 bp, synthetic construct
  source 1..75: mol_type = other DNA
atatcattagcgctacatatccctctaaatataatcatccttctttctgaaagtgaagagacaaatgatgagttt

SEQ ID NO: 508318 - DNA, 75 bp, synthetic construct
  source 1..75: mol_type = other DNA
tgtcgatttccacccagccattactgcagtacacgttcagtgcatcccactgtttcagcaggtatgcgaacgctt

SEQ ID NO: 508319 - DNA, 75 bp, synthetic construct
  source 1..75: mol_type = other DNA
caattattacataaaagccacaaaaccataagtaatcagaaattatcagctatgcaaaaactaggtgttaaaacc

SEQ ID NO: 508320 - DNA, 75 bp, synthetic construct
  source 1..75: mol_type = other DNA
ttatgttatcgggcagatccctggtggctggttgctggatcgttttggttcaaaacgcgtctacttctggtcgat

SEQ ID NO: 508321 - DNA, 75 bp, synthetic construct
  source 1..75: mol_type = other DNA
acatacagtgacactactggcgcctcagagagttccacccgctggggggtggacaagccgctgtataaggacctc

SEQ ID NO: 508322 - DNA, 75 bp, synthetic construct
  source 1..75: mol_type = other DNA
caggacgtgagtaatctgaatcacccgaaatcagacctcaataaagggcagtatggctgtgtggggcatgccctg

SEQ ID NO: 508323 - DNA, 75 bp, synthetic construct
  source 1..75: mol_type = other DNA
cggatacgtatgatcgtcctgacccgcgtattaagcaactggcgcgtcgcagcacggtgacaccgggcggtgcgg

SEQ ID NO: 508324 - DNA, 75 bp, synthetic construct
  source 1..75: mol_type = other DNA
ctggatgcagggcgagtttgatttaaaacagggagcgtacgccagtcagcccgccatgtttgatgccatggtgga

SEQ ID NO: 508325 - DNA, 75 bp, synthetic construct
  source 1..75: mol_type = other DNA
tcggacagggattgcatattgccaaaaagctgttgccctttatgccggaaaatgcgggtattttgttagtgccgt

SEQ ID NO: 508326 - DNA, 75 bp, synthetic construct
  source 1..75: mol_type = other DNA
cagagagttccacccgctggggggtggacaagccgctgtataaggacctcattggtcgtacaaaagccgcgctgg

SEQ ID NO: 508327 - DNA, 75 bp, synthetic construct
  source 1..75: mol_type = other DNA
cggaatgtctcatagcgcgctggcggcagcttctgtggcgaaaccgacaacggtagaaaccaaagcggaagctcc

SEQ ID NO: 508328 - DNA, 75 bp, synthetic construct
  source 1..75: mol_type = other DNA
agcgttatcagtgacacaaaccaggacagaacgccccgcatcacagccagtatcaaccgcacagataaccagtca

SEQ ID NO: 508329 - DNA, 75 bp, synthetic construct
  source 1..75: mol_type = other DNA
atgacgacaccaaccagaagaataagtttctatctgaagccagctgccgtcaagaacgaaggagaagcatgcgca

SEQ ID NO: 508330 - DNA, 75 bp, synthetic construct
  source 1..75: mol_type = other DNA
accaccagcggcgcggcaatatgtgaacaatgccatcaattagttggccaggacctgcatcaagaattaacaaaa

SEQ ID NO: 508331 - DNA, 75 bp, synthetic construct
  source 1..75: mol_type = other DNA
gccagacccggcatgattactgcccccagtcgtccatgatccggggggtgatgtcaccgggtctggtggggcgct

SEQ ID NO: 508332 - DNA, 75 bp, synthetic construct
  source 1..75: mol_type = other DNA
ataaattcaaaagtaagcgtgcagcaagaaccgtattgacggggatgtgttattcagtcggcagtgctacgcgcc

SEQ ID NO: 508333 - DNA, 75 bp, synthetic construct
  source 1..75: mol_type = other DNA
attccaggggccacaaccggaagaagcgatccgcgccctgctggataaagtgctgccgcgcgaagaagaactgaa

SEQ ID NO: 508334 - DNA, 75 bp, synthetic construct
  source 1..75: mol_type = other DNA
tggctggacagccttacaccagaagcccgcaaaagcggccaacgtgtggcttttctggccgggctggcacttctg

SEQ ID NO: 508335 - DNA, 75 bp, synthetic construct
  source 1..75: mol_type = other DNA
acagaacgccccgtgtcacagccagcaccaaccgcacagataaccagtcagatggccggaaatatccgggcgtta

SEQ ID NO: 508336 - DNA, 75 bp, synthetic construct
  source 1..75: mol_type = other DNA
aggagatcctcgctgcgctgggtacgggtgatgcactggcgtcgaagtatcgccgccagctgtatgcgttgttgt

SEQ ID NO: 508337 - DNA, 75 bp, synthetic construct
  source 1..75: mol_type = other DNA
aggagatccttgctgcgctggggaccggtgatgcactggcgtcgaagtatcgccgccagctgtatgcgttgttgt

SEQ ID NO: 508338 - DNA, 75 bp, synthetic construct
  source 1..75: mol_type = other DNA
ttgcgctgaaccgttctgaagatgcagaagcggtgctgaaaaccattccgttgcaggatcaggacacccgctacc

SEQ ID NO: 508339 - DNA, 75 bp, synthetic construct
  source 1..75: mol_type = other DNA
tggttgatgagattggttttacgttcagggagacagatgtttctgatgacggagaaccagaatacacgcgaaacg

SEQ ID NO: 508340 - DNA, 75 bp, synthetic construct
  source 1..75: mol_type = other DNA
tgccgctgctgaaagaagcctggcagttgtcaaatcagagcggggagatcggcctgctgctggcagaaacactga

SEQ ID NO: 508341 - DNA, 75 bp, synthetic construct
  source 1..75: mol_type = other DNA
tccagaacgggcaaccggtagatggcttccaggggccgcaaccggaagaggcgatccgcgccctgctggataaag

SEQ ID NO: 508342 - DNA, 75 bp, synthetic construct
  source 1..75: mol_type = other DNA
gacgcgacaggcgtcgattaacaatatcccggtttctggactggtatcgcgatttaccgtggaacccgcggtgca

SEQ ID NO: 508343 - DNA, 75 bp, synthetic construct
  source 1..75: mol_type = other DNA
atcggtttttggtacactgaaaaagctgggccactggtcagcccccaaccctcttgccgggcttccaacatttaa

SEQ ID NO: 508344 - DNA, 75 bp, synthetic construct
  source 1..75: mol_type = other DNA
ctagcaccggaagaaattaagcgcctgctggatgcctgcgctgattcccaaagccccagcctgctgatgattgca

SEQ ID NO: 508345 - DNA, 75 bp, synthetic construct
  source 1..75: mol_type = other DNA
ttgaagcttatccgtgagtctgaacgtctgaaaatgaaggaggtagctgaactagctggcatcaactacaccaca

SEQ ID NO: 508346 - DNA, 75 bp, synthetic construct
  source 1..75: mol_type = other DNA
attgttcttgattaccagaatggagtgtttttttccaaagaaaataatggtgatattttgaaggatgtggcaaaa

SEQ ID NO: 508347 - DNA, 75 bp, synthetic construct
  source 1..75: mol_type = other DNA
aaacttaactgggaagaggacgaagagctgcagaatgccgttctggttgatgagattggttttacgttcagggag

SEQ ID NO: 508348 - DNA, 75 bp, synthetic construct
  source 1..75: mol_type = other DNA
gctgggttgggcagtaatggctgataccgcgccaaaagagatcagcggtctttccggtggcctgttcaacatgtt

SEQ ID NO: 508349 - DNA, 75 bp, synthetic construct
  source 1..75: mol_type = other DNA
ctcctggacaccaccgggccggttgcgcgcacgaacagcagttatgacggtacaaatcgtcgtaacccgctgaat

SEQ ID NO: 508350 - DNA, 75 bp, synthetic construct
  source 1..75: mol_type = other DNA
tggcggtcaccgcgatgcgccaggcattaaacgacgtcgcttttcgtggacgagtggttatcggcgaaggagaaa

SEQ ID NO: 508351 - DNA, 75 bp, synthetic construct
  source 1..75: mol_type = other DNA
atgcgccaggcattaaacgacgtcgcttttcgtgggcgagtggttatcggcgagggggaacgatatcctctttag

SEQ ID NO: 508352 - DNA, 75 bp, synthetic construct
  source 1..75: mol_type = other DNA
acagaacgccccgcatcacagccagtatcaactgcacagataaccagtcagatggccggaaatatccgggcgtta

SEQ ID NO: 508353 - DNA, 75 bp, synthetic construct
  source 1..75: mol_type = other DNA
tgattgtcgatttactcggcaatgtttccgccaaatcccgccagtggtcacaggagctgggggcgttctcccgag

SEQ ID NO: 508354 - DNA, 75 bp, synthetic construct
  source 1..75: mol_type = other DNA
agcggggatgtggtggtcagcggtgacggcaaaaccgtgcgcgaccgtaaaaaacgcggccccggacgcgggcgg

SEQ ID NO: 508355 - DNA, 75 bp, synthetic construct
  source 1..75: mol_type = other DNA
aaaaggtgcccagaaaaacgccatgaattcctggacgggaatgacgtccatgatgggcgacgtctgggacggatt

SEQ ID NO: 508356 - DNA, 75 bp, synthetic construct
  source 1..75: mol_type = other DNA
aagtggattttggtatcaccgaagggttgcgcagccgttaccgccagaagcaacttgtggccacaggtaagagcc

SEQ ID NO: 508357 - DNA, 75 bp, synthetic construct
  source 1..75: mol_type = other DNA
gcgaacaactggcagagagcgccggtaaacagggcttcttcggtcgtatgatgagccgtgccggtggtctgcttt

SEQ ID NO: 508358 - DNA, 75 bp, synthetic construct
  source 1..75: mol_type = other DNA
cagtatcctgaccggatacgggataaacgtttaccagttgctggccgataaactgggtgtaaaccagaagatcat

SEQ ID NO: 508359 - DNA, 75 bp, synthetic construct
  source 1..75: mol_type = other DNA
gtacgctggcgaaaatttcagaaaccagcgtgctgcaaccgcgcctgccgttgattgccatcccaaccaccgcag

SEQ ID NO: 508360 - DNA, 75 bp, synthetic construct
  source 1..75: mol_type = other DNA
ggtcttgggttgtgccacgcgatggcgcatcagccgggcgcggcgctgcatattccacacggtctcgcgaacgct

SEQ ID NO: 508361 - DNA, 75 bp, synthetic construct
  source 1..75: mol_type = other DNA
tagtcagattggtcgggcgctgcgaactaaaaaatccgacgatcgtgacgctattaacgcggtaagtgagctgat

SEQ ID NO: 508362 - DNA, 75 bp, synthetic construct
  source 1..75: mol_type = other DNA
ccactgttcccggaacgcagccaggacgcggccagcgttttatgaactttcttaccggggtaaatcctgctgccg

SEQ ID NO: 508363 - DNA, 75 bp, synthetic construct
  source 1..75: mol_type = other DNA
tatttcaggtgatggccgaacaggcaaaaggtgcccagaaaaatgccatgaactcctggacagggatgacctcca

SEQ ID NO: 508364 - DNA, 75 bp, synthetic construct
  source 1..75: mol_type = other DNA
cgaagtacctgatgtatatgtatctcgcctcccgtgcgctgaaggtgctcaggtttgcggggacgggggcattac

SEQ ID NO: 508365 - DNA, 75 bp, synthetic construct
  source 1..75: mol_type = other DNA
cggggggaagtatctccgatgtgaaggcgggccagaacatccccggaaccacttatcacgtggaaaaaatcacgc

SEQ ID NO: 508366 - DNA, 75 bp, synthetic construct
  source 1..75: mol_type = other DNA
cctgggggcactgacccgtatgctggatcgcctggtctgtaaaggctgggtggaaaggttgccgaacccgaatga

SEQ ID NO: 508367 - DNA, 75 bp, synthetic construct
  source 1..75: mol_type = other DNA
gggtgaggtggctgtctatgacgatcaggggcagtctgtgacgctgacccgggaggggatcgtggtggacggtgc

SEQ ID NO: 508368 - DNA, 75 bp, synthetic construct
  source 1..75: mol_type = other DNA
gtcctgacccgttccggtattgtggtgaacggggccgggaagcccattatttttcaaaacgcgcctaaagcgcgc

SEQ ID NO: 508369 - DNA, 75 bp, synthetic construct
  source 1..75: mol_type = other DNA
tcggcctaatccatcttctccaccaaccataccgacggaaaatgaaagccgatacattcgccagttgcttgatgc

SEQ ID NO: 508370 - DNA, 75 bp, synthetic construct
  source 1..75: mol_type = other DNA
aagttcgttggcaaaattgaagatgttggtatggctatttttgggattgaaaaatctcgcacagcaagatcgggt

SEQ ID NO: 508371 - DNA, 75 bp, synthetic construct
  source 1..75: mol_type = other DNA
aatggggctgaacgccttctttgccttcgtggtcgtgggggcgatgggcatctcctggcagaccgggatgggcgc

SEQ ID NO: 508372 - DNA, 75 bp, synthetic construct
  source 1..75: mol_type = other DNA
gttgaacagtattatattcagaaattaatcgaccagcaccaaagtggcttaaatgcagcaataattgaattaaat

SEQ ID NO: 508373 - DNA, 75 bp, synthetic construct
  source 1..75: mol_type = other DNA
gctggtgtaattcaggacttaagtataaaaagtgccatcttggtcgagatcgtgaaactccggtatccaaagccg

SEQ ID NO: 508374 - DNA, 75 bp, synthetic construct
  source 1..75: mol_type = other DNA
cccgctttaacagccgcattaaacgccaaagcgaacaatggcaactggtcttactggttgatcaaagcggatcga

SEQ ID NO: 508375 - DNA, 75 bp, synthetic construct
  source 1..75: mol_type = other DNA
atgactaaaaatacacgtttttcccccgaagtccgtcaacgggcagttcgtatggttctggaaagttgggcggca

SEQ ID NO: 508376 - DNA, 75 bp, synthetic construct
  source 1..75: mol_type = other DNA
ccacgtactttgcctttgcaaaaggggcagggctgatgggggaggccggacctgaagccatcatgcccctgaccc

SEQ ID NO: 508377 - DNA, 75 bp, synthetic construct
  source 1..75: mol_type = other DNA
gggaggggatcgtggtggacggtgcaggtaaaacgatcacgtttcgcaatgcgcccagagcacgttttgaaatgg

SEQ ID NO: 508378 - DNA, 75 bp, synthetic construct
  source 1..75: mol_type = other DNA
atgttttatgaagggagcaatgcctcagcatcaggttacggggtaacttacgtaagggacaggcagatggcagct

SEQ ID NO: 508379 - DNA, 75 bp, synthetic construct
  source 1..75: mol_type = other DNA
acccgtgtttgtccgcggacatgctgcttttgccgaaggggttggcgaaattttaacgccggtgaatccgccaga

SEQ ID NO: 508380 - DNA, 75 bp, synthetic construct
  source 1..75: mol_type = other DNA
cttcgcgacaatctttccggaatgccacatgcagagtgggggcatcacattgatgccataatccggcaggagaag

SEQ ID NO: 508381 - DNA, 75 bp, synthetic construct
  source 1..75: mol_type = other DNA
cgactggatatgccggtcgtgcagtacgatttcagtcgcctgcaggcacagagtaacgggctgttcagcgaagcc

SEQ ID NO: 508382 - DNA, 75 bp, synthetic construct
  source 1..75: mol_type = other DNA
caaccattttcgtcgtcataaaccccctgccgttatcgtgctgcccaccggcgcaggtaaaagcctggtgatagc

SEQ ID NO: 508383 - DNA, 75 bp, synthetic construct
  source 1..75: mol_type = other DNA
gaaaatcacctattacgatgaagacggcgcggatgtgagtgagcgtttccgtctgcaaacgcccgcccagcgaac

SEQ ID NO: 508384 - DNA, 75 bp, synthetic construct
  source 1..75: mol_type = other DNA
gcgctgctgccacaacaggggctgggactggtctgcggtgccaccggctccggcaagtccacgctgctggcagca

SEQ ID NO: 508385 - DNA, 75 bp, synthetic construct
  source 1..75: mol_type = other DNA
gcattactggcagaaggtgtgatggtatcgggaagcgggcaaatcgacttgcagcgttatcgctggaactactaa

SEQ ID NO: 508386 - DNA, 75 bp, synthetic construct
  source 1..75: mol_type = other DNA
attttaacttcggcgtattctcaaccaagctcttccccaacccgcgccaccattctcaccggacaatactccatc

SEQ ID NO: 508387 - DNA, 75 bp, synthetic construct
  source 1..75: mol_type = other DNA
cttcgcgacaatctttccggaatgccacatgcagagtgggggcatcacattgatgccataatccggcaggaaaaa

SEQ ID NO: 508388 - DNA, 75 bp, synthetic construct
  source 1..75: mol_type = other DNA
attgccgccggagaatccgggcacgtctgccttgccacctgccacacccactcaccgggtgaaaccatttcaagg

SEQ ID NO: 508389 - DNA, 75 bp, synthetic construct
  source 1..75: mol_type = other DNA
cgaagatccggttgaatatattctcggacgggacactgacctgctcaaacctcaccagtcacagattggccggca

SEQ ID NO: 508390 - DNA, 75 bp, synthetic construct
  source 1..75: mol_type = other DNA
gaatgaaaggccaatactggcaggtacgtgaaaaagtgttcgattatgaaggtcgttatcgccgggcgcatgaat

SEQ ID NO: 508391 - DNA, 75 bp, synthetic construct
  source 1..75: mol_type = other DNA
gagtttaaaacctttgatgagtttcgcgaggcgctgtggctggaggtgagtcaggatccggagttgatagcgcag

SEQ ID NO: 508392 - DNA, 75 bp, synthetic construct
  source 1..75: mol_type = other DNA
tacccccgctcacgatgtcgatggccccctgattacctggacgccggaaaatccggaacatgggtatgttccggg

SEQ ID NO: 508393 - DNA, 75 bp, synthetic construct
  source 1..75: mol_type = other DNA
tattattatattcagctaagaaatgcttcattaactgctattcatgtaaacatttctgacaataatcttcctacc

SEQ ID NO: 508394 - DNA, 75 bp, synthetic construct
  source 1..75: mol_type = other DNA
ggtatcggtctgttcattggtatgatgggactgaagaatgcaggtgtgattgtcgctaacccggaaacgctggtc

SEQ ID NO: 508395 - DNA, 75 bp, synthetic construct
  source 1..75: mol_type = other DNA
ttttcggaaattaatcagttacgtattagtcagggctttacaccttttgcccccgacgaaggacactatattggt

SEQ ID NO: 508396 - DNA, 75 bp, synthetic construct
  source 1..75: mol_type = other DNA
ttcccgagtagtgtgttggcgactcaaatatggggaaaatggtcgctcagtggcgtactcagtgcaacccgcggc

SEQ ID NO: 508397 - DNA, 75 bp, synthetic construct
  source 1..75: mol_type = other DNA
gcggacgatggtcaactgacggcggataaagtcgttcctgcgttaatcagccagctgggggtattgcgtgatgaa

SEQ ID NO: 508398 - DNA, 75 bp, synthetic construct
  source 1..75: mol_type = other DNA
cggctggatatgccggtagtgcaatatgatttcagccgcttacaggcacagagcaacgggctgttcagcgaagcg

SEQ ID NO: 508399 - DNA, 75 bp, synthetic construct
  source 1..75: mol_type = other DNA
cacccggcgctgagcgcgatgtgttaattgatgattttaaagcccagcgttttcgctatctggtcaacgtcgcgg

SEQ ID NO: 508400 - DNA, 75 bp, synthetic construct
  source 1..75: mol_type = other DNA
ggctacaattttgcaaactcattgataaaagctcaccgctactgtctaatgccatcaatcagaatgagcggttat

SEQ ID NO: 508401 - DNA, 75 bp, synthetic construct
  source 1..75: mol_type = other DNA
cacgctacttgttatcggaaccattgttgcccggcatctggatcgcaaaaaatctctcaaatatacttcacagat

SEQ ID NO: 508402 - DNA, 75 bp, synthetic construct
  source 1..75: mol_type = other DNA
agaaaacatcaaagaaataaaactaaaaaatgagacaacatatatttatcttcctaatccaaccattttaataac

SEQ ID NO: 508403 - DNA, 75 bp, synthetic construct
  source 1..75: mol_type = other DNA
cggaagcgtaaaccgacgcgcgacgagcgacacgctatccgggactttttaatcagcatagaccgctgggagaca

SEQ ID NO: 508404 - DNA, 75 bp, synthetic construct
  source 1..75: mol_type = other DNA
acatctgcggtacgccaaaagacgcgttcctgaaagtctgcgaatacatcgccgaaaccagtgctcacgataaaa

SEQ ID NO: 508405 - DNA, 75 bp, synthetic construct
  source 1..75: mol_type = other DNA
accagaaggttttcggcccctttaataaaaatttcgggggagtgaaattcgtaaaaaccattaacggtataaccg

SEQ ID NO: 508406 - DNA, 75 bp, synthetic construct
  source 1..75: mol_type = other DNA
ggaaagcgccggttcttggtgtgctttcagtcctggtgatcccgaagaaagtaaaatgtcgcagatggcagatct

SEQ ID NO: 508407 - DNA, 75 bp, synthetic construct
  source 1..75: mol_type = other DNA
ggcgaagtgttggtgctcaactttgaagacggttgctcgacgaccaacatcatcaagaagatccaacaggataaa

SEQ ID NO: 508408 - DNA, 75 bp, synthetic construct
  source 1..75: mol_type = other DNA
agataccggctttggtgtgatgaccgaagaggaactgaagcttgctgtagcggcagcgcgtaaacgcggcgaaaa

SEQ ID NO: 508409 - DNA, 75 bp, synthetic construct
  source 1..75: mol_type = other DNA
acgagcggattaatcaggcgctgagttcgattggcgcgctggtgctttctgactacgccaaaggtgcgctggcaa

SEQ ID NO: 508410 - DNA, 75 bp, synthetic construct
  source 1..75: mol_type = other DNA
tggctgattgcaaacgtcaggacccaattctggctctggtagtcaagatatgcttaagcacaggcgcacgctggc

SEQ ID NO: 508411 - DNA, 75 bp, synthetic construct
  source 1..75: mol_type = other DNA
aatagacaacggctatcacaaagacccggcgaagtggatcgccaaacctataactgtcaatcgcgagcagcaata

SEQ ID NO: 508412 - DNA, 75 bp, synthetic construct
  source 1..75: mol_type = other DNA
attcaaagaggctgagaaagaaatgtcctggctaactttgtctcagctcccggagctgtttcgagcctgtgagca

SEQ ID NO: 508413 - DNA, 75 bp, synthetic construct
  source 1..75: mol_type = other DNA
tctgtccctgttcactgccagccaatgaccgatacagataccaaacccaaaggtaatcacggtccatatgaacga

SEQ ID NO: 508414 - DNA, 75 bp, synthetic construct
  source 1..75: mol_type = other DNA
ctcggtcataccgacatcaaaatgacaatgcgttacgcacatttcgccccagaccatctggaggatgcagtaagg

SEQ ID NO: 508415 - DNA, 75 bp, synthetic construct
  source 1..75: mol_type = other DNA
atctgtttttggtacactgaaaaagctgggccactggtcagcccccaacccgcttgccgggcttccaacatttaa

SEQ ID NO: 508416 - DNA, 75 bp, synthetic construct
  source 1..75: mol_type = other DNA
gggtaaagcgccgctgcatatgccaactcaggcgcaggaagtgtatgacgttaccggtgcgggcgacacggtgat

SEQ ID NO: 508417 - DNA, 75 bp, synthetic construct
  source 1..75: mol_type = other DNA
gatgcttataagtatctgtcagatcctgaagacagattgatgtacaaagatgagaaagcacctaatcttgtacat

SEQ ID NO: 508418 - DNA, 75 bp, synthetic construct
  source 1..75: mol_type = other DNA
atgagcaatcttacttatcttcagggctatcccgaacagctactttcgcaggtgcgcacgctgattaacgagcag

SEQ ID NO: 508419 - DNA, 75 bp, synthetic construct
  source 1..75: mol_type = other DNA
tccatgtgctaaaaaacgcgctcgggttacatactgccgtttcgcgtgtgcagggcggcaagctgaaagcaaaag

SEQ ID NO: 508420 - DNA, 75 bp, synthetic construct
  source 1..75: mol_type = other DNA
ataaagaaaaatcgttattaagcatatatgttccagggtttattttttcctgtttagctctaatactttgtgtgt

SEQ ID NO: 508421 - DNA, 75 bp, synthetic construct
  source 1..75: mol_type = other DNA
ttactaaaaaccaccgacaatagagtttctccaccaactgaaattgaagatgtattatctgggattattttccac

SEQ ID NO: 508422 - DNA, 75 bp, synthetic construct
  source 1..75: mol_type = other DNA
aagtttagggggaaaggattagaaaaaagaattacagccaacacattcaatgcctatatgagcagggccagaaaa

SEQ ID NO: 508423 - DNA, 75 bp, synthetic construct
  source 1..75: mol_type = other DNA
gcttctttgccaatgcggcggctggcgtggtggtcggcaaactggggacatccacggtttcgccgatcgagctgg

SEQ ID NO: 508424 - DNA, 75 bp, synthetic construct
  source 1..75: mol_type = other DNA
taccggctttggtgtgatgaccgaagaggaactgaagcttgctgtagcggcggcgcgtaaacgcggtgaaaaagt

SEQ ID NO: 508425 - DNA, 75 bp, synthetic construct
  source 1..75: mol_type = other DNA
tccacggtttcgccgatcgagctggaaaacgctgtacgtggacgcgcagataccggctttggcgtgatgaccgaa

SEQ ID NO: 508426 - DNA, 75 bp, synthetic construct
  source 1..75: mol_type = other DNA
ataccgctgtttcgcgtgtgcagggcggcaagctgaaagcaaaagcagagatccgcgtcgctaccgtgtttcgca

SEQ ID NO: 508427 - DNA, 75 bp, synthetic construct
  source 1..75: mol_type = other DNA
gtgctgaaaaacgcgctcggattacataccgctgtttcgcgtgtgcagggcggcaagctgaaagcaaaagcagag

SEQ ID NO: 508428 - DNA, 75 bp, synthetic construct
  source 1..75: mol_type = other DNA
ttaggcgaagatcgtttcaatgatttagaggaaggtgtaccttacgaactgaatattcatcttgtctatgattct

SEQ ID NO: 508429 - DNA, 75 bp, synthetic construct
  source 1..75: mol_type = other DNA
gggggcttaaacgagatatcacaccgtgtttcggagcacgactggtgcaggaaggtcatcgtctgcattttctgg

SEQ ID NO: 508430 - DNA, 75 bp, synthetic construct
  source 1..75: mol_type = other DNA
atctatggctaatgacagggttagtagaatacaggtgcagttgaataatacaatcaacagtcataaaaaggctat

SEQ ID NO: 508431 - DNA, 75 bp, synthetic construct
  source 1..75: mol_type = other DNA
agaatacagatgcagttgaataacacaatcaatagccataagaaggttgtcgctgattatgagcaacgtctacag

SEQ ID NO: 508432 - DNA, 75 bp, synthetic construct
  source 1..75: mol_type = other DNA
gcgacatgacgccgtgcttcggtgcaaggcttgtgcaggaaggctgtcgcctgcattttctggcggaccgtgcag

SEQ ID NO: 508433 - DNA, 75 bp, synthetic construct
  source 1..75: mol_type = other DNA
tacaagaaggcgaccgcctgcattttcttgctgatcgggccggatttaacggtgctttctgcgacgatgacgcgc

SEQ ID NO: 508434 - DNA, 75 bp, synthetic construct
  source 1..75: mol_type = other DNA
tcaccctgtaccacaacggttttacctgcgaagccgacacccttggcagttgcggctacgtatacatcgccattt

SEQ ID NO: 508435 - DNA, 75 bp, synthetic construct
  source 1..75: mol_type = other DNA
gaattagaaataatccagtcaatgccaggcgtttactttcgcccaagaacaagaaaacaaactatcatttctgat

SEQ ID NO: 508436 - DNA, 75 bp, synthetic construct
  source 1..75: mol_type = other DNA
agcttttagggtttagctcctatcatcattttttgggatttaacgctttcaataattgtgtaggtggtgcatcgg

SEQ ID NO: 508437 - DNA, 75 bp, synthetic construct
  source 1..75: mol_type = other DNA
agatttaataatcaggtgggcggggcgacagaatgcgatttaatggaacacctgatagaaacccttgcatctaac

SEQ ID NO: 508438 - DNA, 75 bp, synthetic construct
  source 1..75: mol_type = other DNA
aagaaccttagttaaactgacagaagaatggcctgagaaaaaagaccatatccttgatgaaatccagcgccaaaa

SEQ ID NO: 508439 - DNA, 75 bp, synthetic construct
  source 1..75: mol_type = other DNA
tggatttcgattggcatcctcgccattgtggcgctgatcctctggcactacacccgtaatcgcaatttaatggat

SEQ ID NO: 508440 - DNA, 75 bp, synthetic construct
  source 1..75: mol_type = other DNA
ttttatcatttttccactttaacaacattttgctccacttttccacgaccaaacaacttgaaatctggttaaaat

SEQ ID NO: 508441 - DNA, 75 bp, synthetic construct
  source 1..75: mol_type = other DNA
cagcaggcacgacaccggaagccgattcagcgtatgcgctgaaagccgattcgggcgctgtgcagcaggtgatga

SEQ ID NO: 508442 - DNA, 75 bp, synthetic construct
  source 1..75: mol_type = other DNA
gctgggttgcagccgggcgacaatcagcaaagctgttaagcaaagaactaccgggaagatatcaactgagcaaga

SEQ ID NO: 508443 - DNA, 75 bp, synthetic construct
  source 1..75: mol_type = other DNA
tgttccggctcctgaaggactgtcagcaaaacgatatcttgctggtagaggatgtggacaggctttcacgcctgg

SEQ ID NO: 508444 - DNA, 75 bp, synthetic construct
  source 1..75: mol_type = other DNA
gctcctggacacaggtacagaaggtgctagggtgcagccgtggcacaatcagtagcgcaataaaacgtaaacccc

SEQ ID NO: 508445 - DNA, 75 bp, synthetic construct
  source 1..75: mol_type = other DNA
gtaagccgcaagcattgggagaagtggcgggaacattacaaaagtaatatgagttacgatgagtggaagcagaaa

SEQ ID NO: 508446 - DNA, 75 bp, synthetic construct
  source 1..75: mol_type = other DNA
cgggttatggcggtgaatgtgccgacgacctggattaattctggtatgagtgagtttgacagccggttgtttgca

SEQ ID NO: 508447 - DNA, 75 bp, synthetic construct
  source 1..75: mol_type = other DNA
attatcaggttgatagaaagcggtagctcctggacacaggtacagaaagtgctagggtgcagccgtggcacaata

SEQ ID NO: 508448 - DNA, 75 bp, synthetic construct
  source 1..75: mol_type = other DNA
ccctggttgctcccggtaagcggcacgaacaaccagcgttgtgtgaatcatatttctgaacctgatacagaaatt

SEQ ID NO: 508449 - DNA, 75 bp, synthetic construct
  source 1..75: mol_type = other DNA
aggcttgccaggttgctggcattgaagtggtatctgcgccagttgcctctggcattcgcatcaaaggagaaaatg

SEQ ID NO: 508450 - DNA, 75 bp, synthetic construct
  source 1..75: mol_type = other DNA
aaaaagaaataacggtacagctttcaaataacgccgaccgtccggcgctggcgcaggcctggctggataacggcg

SEQ ID NO: 508451 - DNA, 75 bp, synthetic construct
  source 1..75: mol_type = other DNA
ggctcccgtcttgagcgcccggaactttttcgtcttctgagagattgccagcaaaatgacattttgcttatcgag

SEQ ID NO: 508452 - DNA, 75 bp, synthetic construct
  source 1..75: mol_type = other DNA
acaatgcacgcactgtttaacgaaccactgcagggcgagtccgccaatacaagtaatattgtggagattttttga

SEQ ID NO: 508453 - DNA, 75 bp, synthetic construct
  source 1..75: mol_type = other DNA
aaacccgaagaaatccgctttcagtgcctggaaggccagattgcgcgagggggtgccaccagaggccatgctgga

SEQ ID NO: 508454 - DNA, 75 bp, synthetic construct
  source 1..75: mol_type = other DNA
atgggaagaaagaaaaagaacaacttaaaacgtattgaaaaaaacagtaatttcaattcaaaaagacaacgtcca

SEQ ID NO: 508455 - DNA, 75 bp, synthetic construct
  source 1..75: mol_type = other DNA
actggtgctggcaattgggtttgcagcaggctggggagcagctactgaaaacggttcttacccgtttacgtcagc

SEQ ID NO: 508456 - DNA, 75 bp, synthetic construct
  source 1..75: mol_type = other DNA
ccgggtagacgaactgtttttagcccaccagcttccggtggctatttacagttattgccagtatcaggacggtgc

SEQ ID NO: 508457 - DNA, 75 bp, synthetic construct
  source 1..75: mol_type = other DNA
atgagcgagccgttaattgtcggcatccggcatcatagtccggcctgcgcccgactggtgaaatcgttaatcgaa

SEQ ID NO: 508458 - DNA, 75 bp, synthetic construct
  source 1..75: mol_type = other DNA
ggtgtgcaactccccggcatttctctttctgcggcggtagccttactggagcgacgcagtcaggcaattcatgcc

SEQ ID NO: 508459 - DNA, 75 bp, synthetic construct
  source 1..75: mol_type = other DNA
cgctccaggaagccgcacgcaataaattagaagtcgatatgctggatgcggatggaatcagcagtatcactgcat

SEQ ID NO: 508460 - DNA, 75 bp, synthetic construct
  source 1..75: mol_type = other DNA
agtacactgacgctggccggcaacggtgaagaacagtggaaattaaccccgtcgattagccaacatgcggcattg

SEQ ID NO: 508461 - DNA, 75 bp, synthetic construct
  source 1..75: mol_type = other DNA
cgtctaccgctcatcagttgctgatgcgctgccaggcgttacttattcaactgctccataacggctggcgctatc

SEQ ID NO: 508462 - DNA, 75 bp, synthetic construct
  source 1..75: mol_type = other DNA
atgacagtgatgacgcttaatctcgttgaaaaacagccagcagctatgcgccggataattggtaagcatctggcc

SEQ ID NO: 508463 - DNA, 75 bp, synthetic construct
  source 1..75: mol_type = other DNA
atgacagtgatgacgctcaatctcgtcgaaaaacagccagcaactatgcgccggataattggtaagcatctggcc

SEQ ID NO: 508464 - DNA, 75 bp, synthetic construct
  source 1..75: mol_type = other DNA
gtacaggaatctcttttccggcggagcttaccttaaatcgctttacccccgatggactggcgcaaagtcaggtgc

SEQ ID NO: 508465 - DNA, 75 bp, synthetic construct
  source 1..75: mol_type = other DNA
tgcatcggctggcgatactggagatcccggggatagtgcgccagcagggaagtacactaacgcttgcgggtaacg

SEQ ID NO: 508466 - DNA, 75 bp, synthetic construct
  source 1..75: mol_type = other DNA
atgtggcgcgaatacacgcaggaaattaacacgccggaattgccctcgctggcagatgccgttacaggttgttat

SEQ ID NO: 508467 - DNA, 75 bp, synthetic construct
  source 1..75: mol_type = other DNA
cttagccaggcggcgttagcgggtctggcgtccttcagtcaacaattactggaacaactcacattattaatcgcc

SEQ ID NO: 508468 - DNA, 75 bp, synthetic construct
  source 1..75: mol_type = other DNA
attattataatcagatgatggagcgcgaacggctaacggtttgctttcatgcacagttaaaacagcgtcacgcaa

SEQ ID NO: 508469 - DNA, 75 bp, synthetic construct
  source 1..75: mol_type = other DNA
cgtcacgcaacgatgcgttttgaagaaatgaacgacgtcgaacgtgaacggctggtttgtgcaattgatgaattg

SEQ ID NO: 508470 - DNA, 75 bp, synthetic construct
  source 1..75: mol_type = other DNA
ccgatctggcctgggcaacgatgcacgcactgtttaacgaaccgctgcagggcgagtccgccaataccagtaata

SEQ ID NO: 508471 - DNA, 75 bp, synthetic construct
  source 1..75: mol_type = other DNA
agacatggcccattttagggggtatatggcgcttaatagcctgcaatatgcaggagttcgagaaacagacttact

SEQ ID NO: 508472 - DNA, 75 bp, synthetic construct
  source 1..75: mol_type = other DNA
gtctgggagaaagccgactggcaaacaggctgaacagtctgctccggcgttttgacgatcgcgatctctaccaca

SEQ ID NO: 508473 - DNA, 75 bp, synthetic construct
  source 1..75: mol_type = other DNA
ataaacctgactgcccccacgtcagatacgtcactaactcatgcggcagccgtgcctgcccgtcctgcggaaaaa

SEQ ID NO: 508474 - DNA, 75 bp, synthetic construct
  source 1..75: mol_type = other DNA
agcccccgggcgtggtgcctggacgccatttgctgaattttcgccggagtggcaggcgctacaagccgctcgtcg

SEQ ID NO: 508475 - DNA, 75 bp, synthetic construct
  source 1..75: mol_type = other DNA
gccttatggcggctggatgaaattagcggtatgcaaggcgcgcagatattaacaaacgacgttatgcgcggctat

SEQ ID NO: 508476 - DNA, 75 bp, synthetic construct
  source 1..75: mol_type = other DNA
ctacgcgctacccgcatggataacagcgacacgctgtgggatcacctgttcgaagatgaaagccagcaagctgtg

SEQ ID NO: 508477 - DNA, 75 bp, synthetic construct
  source 1..75: mol_type = other DNA
tcgaaaaacagccagcaactatgcgccggataattggtaagcatctggccgtccctcgctggcaggatacatgtg

SEQ ID NO: 508478 - DNA, 75 bp, synthetic construct
  source 1..75: mol_type = other DNA
atgagcgagccgttaattgtcggcatccggcatcatagcccagcctgtgccaggctggtgaaatcgttaatcgaa

SEQ ID NO: 508479 - DNA, 75 bp, synthetic construct
  source 1..75: mol_type = other DNA
atccggcgaggcgctgcacggtttgctggcattagcccgtcatcaactggcctgtcagccggcatttatcgccgg

SEQ ID NO: 508480 - DNA, 75 bp, synthetic construct
  source 1..75: mol_type = other DNA
cttacacgctgataacgcattaaccgaacatgagcttgtggcactgtgggaaagtataacagggacaattaaata

SEQ ID NO: 508481 - DNA, 75 bp, synthetic construct
  source 1..75: mol_type = other DNA
ttgcagtggtaccggactaacaccccgtaagcaggtcattcgtaaggtttcatacccatggggtaaagcaccata

SEQ ID NO: 508482 - DNA, 75 bp, synthetic construct
  source 1..75: mol_type = other DNA
atggcgacaagccagatcacgatgatgacactcatcctgacgatgaacctccgcagccaccacgcggtggtcgac

SEQ ID NO: 508483 - DNA, 75 bp, synthetic construct
  source 1..75: mol_type = other DNA
tctggcgctggtgaaaacgttgagcgatgccggatgtcgggtgattgccgaagggcgatacaacacgccagcgca

SEQ ID NO: 508484 - DNA, 75 bp, synthetic construct
  source 1..75: mol_type = other DNA
tatcgactcgaccggcgttggtcacggggtttatgagaacgtgaaagctttctttcctgccgtccgggagtttgt

SEQ ID NO: 508485 - DNA, 75 bp, synthetic construct
  source 1..75: mol_type = other DNA
gaaacctcaaaagcagccagttgaacaatgccctggtgctgagaagcagtagggttgaggtgttggagcaggagg

SEQ ID NO: 508486 - DNA, 75 bp, synthetic construct
  source 1..75: mol_type = other DNA
ttttctattccatattattttaaaaacaaattaaaaaaatactatccagatttactcattgcgacggttgatggt

SEQ ID NO: 508487 - DNA, 75 bp, synthetic construct
  source 1..75: mol_type = other DNA
acatctccgggttcttttactctcaaaaactaggtagaaccgtccagtacgaatcagggcttgagtttaaagtaa

SEQ ID NO: 508488 - DNA, 75 bp, synthetic construct
  source 1..75: mol_type = other DNA
gaacctgcgctggcggaagttgcgcacaaactgactggtggcctgcaactacccaatgacgaaaccggtgactgt

SEQ ID NO: 508489 - DNA, 75 bp, synthetic construct
  source 1..75: mol_type = other DNA
tttggtggcattccgcgtcaggtttctgtgccgctggctgccgtgctggctatctacgcccgtgaaaatggcgca

SEQ ID NO: 508490 - DNA, 75 bp, synthetic construct
  source 1..75: mol_type = other DNA
ttaaaactcttattaactcaataggtaattcaccatatgatgtagcagtgtggatttaccgtattgttcaccgtg

SEQ ID NO: 508491 - DNA, 75 bp, synthetic construct
  source 1..75: mol_type = other DNA
catggcgtgaaatgatggagttacgtacacgatacgagattcatcgtttagatcttattgcatatatcattcagt

SEQ ID NO: 508492 - DNA, 75 bp, synthetic construct
  source 1..75: mol_type = other DNA
ggtactacgctttctggctataccacacctgaaacgccagaagagcccgatctggcgctggtgaaaacattgagc

SEQ ID NO: 508493 - DNA, 75 bp, synthetic construct
  source 1..75: mol_type = other DNA
caacatcagtattgattggctatctggcggcaaataccaccacgctgcatctggggtctggcggcgtgatgttac

SEQ ID NO: 508494 - DNA, 75 bp, synthetic construct
  source 1..75: mol_type = other DNA
gtggttgttaggctccagcctttacagcgcacaactggcggcgcagcttggtctgccgtttgcgtttgcctcaca

SEQ ID NO: 508495 - DNA, 75 bp, synthetic construct
  source 1..75: mol_type = other DNA
tcatggcttgcagtcgatcctgcgcgaaaccgacgccgatgagattatggttaacgggcagattttcgaccacca

SEQ ID NO: 508496 - DNA, 75 bp, synthetic construct
  source 1..75: mol_type = other DNA
aaacgctgctgaatctgatttctattgcgtgtgattttaatcaggaaattcaccgggcattaatcgccgagctgc

SEQ ID NO: 508497 - DNA, 75 bp, synthetic construct
  source 1..75: mol_type = other DNA
cgaacagttcggtacgctcaatacgctctatccggggcgaatcgatttggggctgggtcgtgcgccaggtagtga

SEQ ID NO: 508498 - DNA, 75 bp, synthetic construct
  source 1..75: mol_type = other DNA
cgaaggttcttcagcgcgggaagcgttctcccactctctcgatctcgcccgtctggctgaaaagcgcggctatca

SEQ ID NO: 508499 - DNA, 75 bp, synthetic construct
  source 1..75: mol_type = other DNA
tttattaatggtcaatatcgtatgccattcgcatgtgtatattccagcatcagtatctggcagagcacaaaacac

SEQ ID NO: 508500 - DNA, 75 bp, synthetic construct
  source 1..75: mol_type = other DNA
aaccaggtgcatacattaacaccaggtgagtctctcgatgcctggactatgcggggaaatcttaaacaaccaaac

SEQ ID NO: 508501 - DNA, 75 bp, synthetic construct
  source 1..75: mol_type = other DNA
cagccaatgcaaaactggaatgggattacactcaggatattacattttattcatctctgaattatacgggaaaac

SEQ ID NO: 508502 - DNA, 75 bp, synthetic construct
  source 1..75: mol_type = other DNA
tcgctactggctggcggaacaccacaatatgaccggcattgccagtgctgccacatcggtgttaattggctatct

SEQ ID NO: 508503 - DNA, 75 bp, synthetic construct
  source 1..75: mol_type = other DNA
cgaaggttcttcagcgcgagaagcattctcccactctctcgatctcgcccgtctggctgaaaagcgcggctatca

SEQ ID NO: 508504 - DNA, 75 bp, synthetic construct
  source 1..75: mol_type = other DNA
caggctatggcgagaaaatcccggtgtggttattaggctccagcctttacagcgcacaactggcggcgcagctcg

SEQ ID NO: 508505 - DNA, 75 bp, synthetic construct
  source 1..75: mol_type = other DNA
cagctctttacccagaatctggcgcgaatggcggaacaggcgggggttaaattccgctttaatacgccagtcgat

SEQ ID NO: 508506 - DNA, 75 bp, synthetic construct
  source 1..75: mol_type = other DNA
cgaagaactgaaagtggaggcgttcggctgcaaattgctgatcacttccattctggacgttgatccaaagggcgg

SEQ ID NO: 508507 - DNA, 75 bp, synthetic construct
  source 1..75: mol_type = other DNA
ctgtgtctgttagcgggatggatgcgcatctcgtggggaccggtaatcttttttttgtgccttggtaaagcgtta

SEQ ID NO: 508508 - DNA, 75 bp, synthetic construct
  source 1..75: mol_type = other DNA
cgctatttccgtagctggctgggtgtctctgccaccgactgactataaagccgactggaacgactatcaccaaca

SEQ ID NO: 508509 - DNA, 75 bp, synthetic construct
  source 1..75: mol_type = other DNA
tgacagacattgagcaggaaaaagtcgcgcaatttttgtcacgtgaaggaattcgcaatttcctcgcccgtctcg

SEQ ID NO: 508510 - DNA, 75 bp, synthetic construct
  source 1..75: mol_type = other DNA
gtggcttcgacatcacagtgggcagacatacccaactggatggtgcggtgattgcctccactgccacaccggata

SEQ ID NO: 508511 - DNA, 75 bp, synthetic construct
  source 1..75: mol_type = other DNA
agcagaggcgtctgcagacagtggggcttatcagtgacataggcagtcaggtggcggatattgcgcggacgcagg

SEQ ID NO: 508512 - DNA, 75 bp, synthetic construct
  source 1..75: mol_type = other DNA
aggaaaaacggcagtattacaataacgttacggaactattttatataagaatccagcaccttaaggacaacatcc

SEQ ID NO: 508513 - DNA, 75 bp, synthetic construct
  source 1..75: mol_type = other DNA
acaaggtgttaaacgcatttttgtttatctgaaagatgaatctgtattttgcagcgataaggatggagaacaatt

SEQ ID NO: 508514 - DNA, 75 bp, synthetic construct
  source 1..75: mol_type = other DNA
gataacgccttctgtcgcgtcgtggatcagaccaataaagaactggcccgctatcagctgacggaacaaggtgct

SEQ ID NO: 508515 - DNA, 75 bp, synthetic construct
  source 1..75: mol_type = other DNA
tgtctggcgttgaattgtttctttatggcgagctaatcaatgaacctccgtttaatggcgaagtccgtttgtttg

SEQ ID NO: 508516 - DNA, 75 bp, synthetic construct
  source 1..75: mol_type = other DNA
acctaggacaccggaatatccggcatacggtgatttatacagcttcaaattcggaccgctttgaacggttatgga

SEQ ID NO: 508517 - DNA, 75 bp, synthetic construct
  source 1..75: mol_type = other DNA
gcaactgggactttaccgcccttggccatgcctgtcgcggccgcacaattgacgatatgcactccgatatcgttt

SEQ ID NO: 508518 - DNA, 75 bp, synthetic construct
  source 1..75: mol_type = other DNA
ggcaccattaagtacgtatggaccaccaacggcccggagccgcttgactaccaacgttcaccactggattacgaa

SEQ ID NO: 508519 - DNA, 75 bp, synthetic construct
  source 1..75: mol_type = other DNA
atgagcatgagcattgttgagttcgttaaacagcaagagcagttattctgcggagcattgactgaacagacggtg

SEQ ID NO: 508520 - DNA, 75 bp, synthetic construct
  source 1..75: mol_type = other DNA
tgccgggctgattcaggagggcgataaacaacggatggtgtttaaagggctggaaaccgtgcgcaccgactggac

SEQ ID NO: 508521 - DNA, 75 bp, synthetic construct
  source 1..75: mol_type = other DNA
gcttcttcgatccgcgcctggcgtcgtcgatcaccatgcgtggtcatcagatcatgcggcaaaccaaagcgttga

SEQ ID NO: 508522 - DNA, 75 bp, synthetic construct
  source 1..75: mol_type = other DNA
tctggctgacacagcacggggaaatctgtccagcgcacagaacgctatcatcaatgttgccgctataggcataac

SEQ ID NO: 508523 - DNA, 75 bp, synthetic construct
  source 1..75: mol_type = other DNA
tcactcccgcatcagatgagattatcaatgagatcactcaggcaatcaccgaaattaacaagacatgggatgacc

SEQ ID NO: 508524 - DNA, 75 bp, synthetic construct
  source 1..75: mol_type = other DNA
aaccagaccagcacacagaacgcgatcatcaacgttgcggctatcggtatttcgctaaacccagctcagaagctg

SEQ ID NO: 508525 - DNA, 75 bp, synthetic construct
  source 1..75: mol_type = other DNA
acggcctgccggttgacaggcacggcggttcggtggctgcgtttggtcatctctattttccgcgtatgcatcgcg

SEQ ID NO: 508526 - DNA, 75 bp, synthetic construct
  source 1..75: mol_type = other DNA
gctggcgttaaaggattttcaccgccagccggtgtatggcctttactgtcgcgcccatcgccagttgatgaatta

SEQ ID NO: 508527 - DNA, 75 bp, synthetic construct
  source 1..75: mol_type = other DNA
tttcgatctggagtatgttgccagccgtccgcaactactggaaaaactcaacgcctggtttgcaactcacgatcc

SEQ ID NO: 508528 - DNA, 75 bp, synthetic construct
  source 1..75: mol_type = other DNA
gctggactataaaagcctgtacccgtcgatcatccgcacctttctgattgatcccgtcgggctggtggaaggcat

SEQ ID NO: 508529 - DNA, 75 bp, synthetic construct
  source 1..75: mol_type = other DNA
ccgataccggcagtaaaaagcgttatgccgggctgattcaggagggcgacaaacagcggatggtgtttaaagggc

SEQ ID NO: 508530 - DNA, 75 bp, synthetic construct
  source 1..75: mol_type = other DNA
gtcgatcaccatgcgcggccatcagatcatgcgacaaaccaaagcattaattgaagcacagggttatgacgtgat

SEQ ID NO: 508531 - DNA, 75 bp, synthetic construct
  source 1..75: mol_type = other DNA
ctgcaagataatgaaagcatatatcaaagagcaggcatttaagcctaacacttgggggcacagtttcattaaggg

SEQ ID NO: 508532 - DNA, 75 bp, synthetic construct
  source 1..75: mol_type = other DNA
tcagtaaagatgtcatgtttgttgaaattcatctctcagaggcttctacagaagacatcattgagcatctgaaaa

SEQ ID NO: 508533 - DNA, 75 bp, synthetic construct
  source 1..75: mol_type = other DNA
agaggctaagaggtcaaggcagctttcgcaataccttaatcaagcgggcatcagtaaagatgtcatgtttgttga

SEQ ID NO: 508534 - DNA, 75 bp, synthetic construct
  source 1..75: mol_type = other DNA
ccggatatggaggtgaactcgcagccatcggtgcgtgaagtgcgttttggtgacgggtactcacagcgtatggcg

SEQ ID NO: 508535 - DNA, 75 bp, synthetic construct
  source 1..75: mol_type = other DNA
acaaaggcccgcgccgtcagccggaaaagaatgttttcaccgatgagcagattgagaagctggaagaaatcttcc

SEQ ID NO: 508536 - DNA, 75 bp, synthetic construct
  source 1..75: mol_type = other DNA
gtatggatcggttatgaccccgcaaaaggtactcagaacggcgacagtgccggatgcgtggtggtggcaccgcca

SEQ ID NO: 508537 - DNA, 75 bp, synthetic construct
  source 1..75: mol_type = other DNA
tggctctattctcaataatcgaactaattttcattttcgagaatgggtgaaaaaatggtttctgttccccatacg

SEQ ID NO: 508538 - DNA, 75 bp, synthetic construct
  source 1..75: mol_type = other DNA
tatatggtggtatatgtaaaaaggcgcatgctgccacagagttagcagaaggtttacggctaaatttatttatga

SEQ ID NO: 508539 - DNA, 75 bp, synthetic construct
  source 1..75: mol_type = other DNA
tcttccggattcgcccttgccgcattacttaatgctaatattgagttgggtaatgacccaatcattggtatagaa

SEQ ID NO: 508540 - DNA, 75 bp, synthetic construct
  source 1..75: mol_type = other DNA
ccgatctggcttgggcaacgatgcacgcactgtttaacgaaccgctgcagggcgagtccgccaataccagcaata

SEQ ID NO: 508541 - DNA, 75 bp, synthetic construct
  source 1..75: mol_type = other DNA
cgtcgaatacatcggcatcgatgcgaccgggctcggacagggcgttttccagttagtgcgctcattctacccggc

SEQ ID NO: 508542 - DNA, 75 bp, synthetic construct
  source 1..75: mol_type = other DNA
cgagctcaccggcgacccgattgtgctcggcaacaatggcgcggagctgatgtttctcggcaccaatgccaacac

SEQ ID NO: 508543 - DNA, 75 bp, synthetic construct
  source 1..75: mol_type = other DNA
tgaactgtgccgggtggtctgcgcgggtcgggatgttgcgcgttgagttcagcgcggagtttaagcaggtggtga

SEQ ID NO: 508544 - DNA, 75 bp, synthetic construct
  source 1..75: mol_type = other DNA
acaagccgcacaagggaaaacagtcacagtcactgagctataacgggaccgcgggtgccaactttggtgcctggc

SEQ ID NO: 508545 - DNA, 75 bp, synthetic construct
  source 1..75: mol_type = other DNA
cggccggacacagtgtgtggtggacatcccggcacatccggacccggcacaacagttgctgctgccctgtcgtca

SEQ ID NO: 508546 - DNA, 75 bp, synthetic construct
  source 1..75: mol_type = other DNA
ccgttaccggaatgacttcacgggacgtgagaaggagctgtacaccgtcacgctcaacaagaacttcgaggactg

SEQ ID NO: 508547 - DNA, 75 bp, synthetic construct
  source 1..75: mol_type = other DNA
tgtttgccgtgctgcgtctggcagacaacagccatccgccgtttggtgccagcgtgacaaacgcgaaaggccgtg

SEQ ID NO: 508548 - DNA, 75 bp, synthetic construct
  source 1..75: mol_type = other DNA
gagtggaagtacgcccgaatccggcagaagggttgctgtacatcaatatgccgcaggcctggctggagtattccg

SEQ ID NO: 508549 - DNA, 75 bp, synthetic construct
  source 1..75: mol_type = other DNA
ggtacggccagctacagcggcagcatgagcaatgaccgttacaccaacaccgtggggtacagcgacacgctgaac

SEQ ID NO: 508550 - DNA, 75 bp, synthetic construct
  source 1..75: mol_type = other DNA
gccgtctcaaacacagatgagtgggttctttagccacggcagcccactggctaatattgcagccaatttttcaac

SEQ ID NO: 508551 - DNA, 75 bp, synthetic construct
  source 1..75: mol_type = other DNA
tcagttactcagttattacggtactacaggtattaacgcaggggcatggcgcttacgtggcgactaccagggtaa

SEQ ID NO: 508552 - DNA, 75 bp, synthetic construct
  source 1..75: mol_type = other DNA
atggcttgctctacaacaccgactggatcaaacagacgctggatgtcccgtcgatccacttcgattccgcctggg

SEQ ID NO: 508553 - DNA, 75 bp, synthetic construct
  source 1..75: mol_type = other DNA
ccggttcggcggtaattctggttaaagcaatgatctcattcggtcaaatgctctatccgatgctggtgagctata

SEQ ID NO: 508554 - DNA, 75 bp, synthetic construct
  source 1..75: mol_type = other DNA
tggggcgattgatcagtattttattcttcggagtgatctccgataagtttggtcgtcgggcggtgatattaatgg

SEQ ID NO: 508555 - DNA, 75 bp, synthetic construct
  source 1..75: mol_type = other DNA
gcattaaaaaccatctcttattacagtatgggttcgctggtctgtgtctttatttttgccgcactactgaaaaaa

SEQ ID NO: 508556 - DNA, 75 bp, synthetic construct
  source 1..75: mol_type = other DNA
atgctctatcgaaacttgaaaatcacctcagctttagacgaaatatatggtggtatatgtaaaaaggcgcatgct

SEQ ID NO: 508557 - DNA, 75 bp, synthetic construct
  source 1..75: mol_type = other DNA
agatggaagcattcacgttgccagccataccgggattctgataatggcgccagaagaccgccccaacgagttagg

SEQ ID NO: 508558 - DNA, 75 bp, synthetic construct
  source 1..75: mol_type = other DNA
gaactcctgggcatgaccgaaggggatttagactggctggccgatactgttgtcgccttcatgcaagagatttga

SEQ ID NO: 508559 - DNA, 75 bp, synthetic construct
  source 1..75: mol_type = other DNA
gaagtgccgcaaggtgtgaaatgtacaatcgatgaaatggtaagagcgctacaaccaaggtatgctgcatctgaa

SEQ ID NO: 508560 - DNA, 75 bp, synthetic construct
  source 1..75: mol_type = other DNA
gattgatttgattgatttactggtgcaactatggcgtggcaagatgacaatcatcatttctgttattgtcgctat

SEQ ID NO: 508561 - DNA, 75 bp, synthetic construct
  source 1..75: mol_type = other DNA
gcgaagcgctggagtcgatgattaagcatgaggcgacccgtccgttggtgttctcgccaaactactatcagactc

SEQ ID NO: 508562 - DNA, 75 bp, synthetic construct
  source 1..75: mol_type = other DNA
ctgggcaaaaccatgacccggaacagattgatttgattgatttactagtgcagttgtggcgtggcaagatgacaa

SEQ ID NO: 508563 - DNA, 75 bp, synthetic construct
  source 1..75: mol_type = other DNA
tcgatattgtccgcaatggtgatgaatttttcgaaacacagagtcgcaatgtaaccgactggatgcaactaccag

SEQ ID NO: 508564 - DNA, 75 bp, synthetic construct
  source 1..75: mol_type = other DNA
gagcacattgcagcctttatgcaacgtatggctgaaagacctgcggtgaaagccgcgttaacggcggaaggattg

SEQ ID NO: 508565 - DNA, 75 bp, synthetic construct
  source 1..75: mol_type = other DNA
accggaagagtacaaaccgacagttcgcgcgcagctggagaagaagctgcaatatgtgaacgaggcactgaagga

SEQ ID NO: 508566 - DNA, 75 bp, synthetic construct
  source 1..75: mol_type = other DNA
aggacttaaagacacacactcatcaccttcccggaatgttatagatcatggtatttctcgccatgatgcagagca

SEQ ID NO: 508567 - DNA, 75 bp, synthetic construct
  source 1..75: mol_type = other DNA
aggacttaaagacacacattcatcacttgcccggaatgttataaataatggtatttctcgtcatcatgcaaagca

SEQ ID NO: 508568 - DNA, 75 bp, synthetic construct
  source 1..75: mol_type = other DNA
ctttccgggcctacaccattcagctctatgtttatggatacatttcgaggactcggcaatgcaaagctttcactc

SEQ ID NO: 508569 - DNA, 75 bp, synthetic construct
  source 1..75: mol_type = other DNA
gcggttctgctgggtggcatggttggggcgggtattgtactggggcgtaatgcgctgcgtaattacaacgcgaaa

SEQ ID NO: 508570 - DNA, 75 bp, synthetic construct
  source 1..75: mol_type = other DNA
ctaccagagccgtttgctggtgtggctggcgagtttgagtttgctggtagcattcgttggtgcaatgaccgtgca

SEQ ID NO: 508571 - DNA, 75 bp, synthetic construct
  source 1..75: mol_type = other DNA
tggtcgcctatctggtggtggtgttcgggatctctgtctacgcgatgcgtaaacggagcgcgggcacgttcctta

SEQ ID NO: 508572 - DNA, 75 bp, synthetic construct
  source 1..75: mol_type = other DNA
tattctcggcaagaagtttgcgattcttgcgcgccgctacaatgcagtgacgctgaacgatatgctgtttgcccg

SEQ ID NO: 508573 - DNA, 75 bp, synthetic construct
  source 1..75: mol_type = other DNA
gcatgctgctacagaattagcagaaggtttacggctaaatttatttatgaagagccctttcgatcctgttgagga

SEQ ID NO: 508574 - DNA, 75 bp, synthetic construct
  source 1..75: mol_type = other DNA
gtttcttttgcaggaaaggaatatgagttaaaggtcattgatgaaaaaacgcctattctttttcagtggtttgaa

SEQ ID NO: 508575 - DNA, 75 bp, synthetic construct
  source 1..75: mol_type = other DNA
ggtggctttcgcgccagcgtgctgaacgacaccatgcaagggctggtgatgctgattggcaccgttgtgctgctt

SEQ ID NO: 508576 - DNA, 75 bp, synthetic construct
  source 1..75: mol_type = other DNA
gcgcatccatgatccctttagttttcacgacggcgtttatttattaccagggtaaagagttggggttggctgctg

SEQ ID NO: 508577 - DNA, 75 bp, synthetic construct
  source 1..75: mol_type = other DNA
aaatcaggtgcgggttatgcatcaggtgttgtaataggactttatgatgataaagaaaacagcattcagcttaaa

SEQ ID NO: 508578 - DNA, 75 bp, synthetic construct
  source 1..75: mol_type = other DNA
ctgggcaaaaccatgacccggaacagattgatttactggtccaactatggcgtggcaagatgacaattatcattt

SEQ ID NO: 508579 - DNA, 75 bp, synthetic construct
  source 1..75: mol_type = other DNA
gacggcagaattcttctttactgattgtacaaatgttaacaatatcaaaatatcattttctggagataaagtgga

SEQ ID NO: 508580 - DNA, 75 bp, synthetic construct
  source 1..75: mol_type = other DNA
tattgcagctgtactgaaagacagtagcaatacagttgtaactccaggcatgatagatacgtcagtaaatctgaa

SEQ ID NO: 508581 - DNA, 75 bp, synthetic construct
  source 1..75: mol_type = other DNA
ttttccagttattttctgttcccttttacttctggttaagtaaaaaaataaatctgcgatggctgttgatggcgg

SEQ ID NO: 508582 - DNA, 75 bp, synthetic construct
  source 1..75: mol_type = other DNA
cagcaaacgggcatgagcgccatagacccattgcgatacaaacgggcctcatctcctttagttgacgacaattcc

SEQ ID NO: 508583 - DNA, 75 bp, synthetic construct
  source 1..75: mol_type = other DNA
cgcgcggcatttttcccgtctataagcctgaccagcggaatatcaaccgccagtagcgatctatcgtcattattt

SEQ ID NO: 508584 - DNA, 75 bp, synthetic construct
  source 1..75: mol_type = other DNA
gatggagcagcagaacaagattgatgatgcaaaacgcgcccaggcgtttgaagactacatgcttggtaaaagcaa

SEQ ID NO: 508585 - DNA, 75 bp, synthetic construct
  source 1..75: mol_type = other DNA
cctgcaactggtgctgggaacgtaccacgcacttccgtcagaaaaagggatgaaagacggggagatcgcgccagt

SEQ ID NO: 508586 - DNA, 75 bp, synthetic construct
  source 1..75: mol_type = other DNA
gatttttaatgccggcagaaacaaagccaatctgaaactcgctgaaattcgtcagcagcagtcggtggttaatta

SEQ ID NO: 508587 - DNA, 75 bp, synthetic construct
  source 1..75: mol_type = other DNA
atggatttatcaccagaagacgcaaagtttttacgagaactgcaacaccgtatgctcagcattatcgaacagcaa

SEQ ID NO: 508588 - DNA, 75 bp, synthetic construct
  source 1..75: mol_type = other DNA
aacccggtatggatgcggcttcggctccttccgtcagggaagtgcgctttggtgatggttactcccagcgctcgc

SEQ ID NO: 508589 - DNA, 75 bp, synthetic construct
  source 1..75: mol_type = other DNA
ctgccgggctgaacgctgacctgaaaacgtacagcgtgacgctgtctgtctcccgtgaggaggccacggcgctgg

SEQ ID NO: 508590 - DNA, 75 bp, synthetic construct
  source 1..75: mol_type = other DNA
agatagcctcaagcacccgcagtcattctacttaactaagatttccccgcaaaccgtttttgtccagcacaataa

SEQ ID NO: 508591 - DNA, 75 bp, synthetic construct
  source 1..75: mol_type = other DNA
cggcggggctgaatgctgacctgaaaacataccgtgtgacgctttccgtgacccgggaggaggcccgacatctgg

SEQ ID NO: 508592 - DNA, 75 bp, synthetic construct
  source 1..75: mol_type = other DNA
agcaagccattctggatcttacctattcccggcaggtcaatgaaattaatcttttcactgcgctgggtggcggtt

SEQ ID NO: 508593 - DNA, 75 bp, synthetic construct
  source 1..75: mol_type = other DNA
cacaggcgggctgcatggcgtgcagaggatgccagacggggacaccgccgcgcacgtgggtattcccgacagtgg

SEQ ID NO: 508594 - DNA, 75 bp, synthetic construct
  source 1..75: mol_type = other DNA
catccggtgcggcggatgcgctgggcgggaagataacgcagatccacgattcggttacgctactgatgaacgcgc

SEQ ID NO: 508595 - DNA, 75 bp, synthetic construct
  source 1..75: mol_type = other DNA
tgcgcttttactgagagcctcagaggctgccggttcgctggcaggtcgcgcagggcaggcggcggcctgcgtgtc

SEQ ID NO: 508596 - DNA, 75 bp, synthetic construct
  source 1..75: mol_type = other DNA
attattataatcagatgatggagcgcgaacggctaacggtttgctttcatgcgcagttaaaacaacgtcacgcaa

SEQ ID NO: 508597 - DNA, 75 bp, synthetic construct
  source 1..75: mol_type = other DNA
cacgaaagcgaaccgtaaggcgggtatgtatcgcgagcaggaagaacgggcggcacaccgtaacgactggatgta

SEQ ID NO: 508598 - DNA, 75 bp, synthetic construct
  source 1..75: mol_type = other DNA
gcactgagccgggctgtaataagcgcgtgaagtccggaaagtgtgaagagcacaggcgggctgcatggcgtgcag

SEQ ID NO: 508599 - DNA, 75 bp, synthetic construct
  source 1..75: mol_type = other DNA
taacatacagcggtggtctgaaaggtgacaagccgaccacacaggagtacgacgcgagactggagctcagctatg

SEQ ID NO: 508600 - DNA, 75 bp, synthetic construct
  source 1..75: mol_type = other DNA
gatcggtgaagctctgactaataactgtgatttgagaatggcagccctgaaggttgaagaggcccgagcccagtt

SEQ ID NO: 508601 - DNA, 75 bp, synthetic construct
  source 1..75: mol_type = other DNA
cgaacaaaaaattcagtcagcctttaaagatgtttccgacacgcttgtgctgcgcgacagccttagccagcaact

SEQ ID NO: 508602 - DNA, 75 bp, synthetic construct
  source 1..75: mol_type = other DNA
agccgaaaccgaaccggccagcccctgagccgaacgatatggatgcggcgtttctggccgaaactggcctgtccg

SEQ ID NO: 508603 - DNA, 75 bp, synthetic construct
  source 1..75: mol_type = other DNA
attttattcctaaaattgaaattcctatttttaatgctggcaggaacaaagccaatctgaagctggctgaaattc

SEQ ID NO: 508604 - DNA, 75 bp, synthetic construct
  source 1..75: mol_type = other DNA
tgacaagccgaccacgcaggagtacgacgcgggtctggagctcagctatgagctcgatttttttggcaaacttaa

SEQ ID NO: 508605 - DNA, 75 bp, synthetic construct
  source 1..75: mol_type = other DNA
tgacctgtgccgcctggtcatcacgggttcgcatgctgggggttgaattcagagcagagtttaagcaggtggtga

SEQ ID NO: 508606 - DNA, 75 bp, synthetic construct
  source 1..75: mol_type = other DNA
cccgcctttccgtggggcaggcgcagcgcgtggcggtggcccgtgcgttactaaatccctgttcgctattactgt

SEQ ID NO: 508607 - DNA, 75 bp, synthetic construct
  source 1..75: mol_type = other DNA
tctaccgctcctgccacaaggcgttgatacgcctgttggcgaccaggctgcccgcctttccgtggggcaggcgca

SEQ ID NO: 508608 - DNA, 75 bp, synthetic construct
  source 1..75: mol_type = other DNA
ccttatgcataccgacagataaaggtgacctgtgccgggtggtctgcgcgggtcgggatgttgcgcgttgagttc

SEQ ID NO: 508609 - DNA, 75 bp, synthetic construct
  source 1..75: mol_type = other DNA
accagcggggagttgggcgacgctggtactcgagcaaattgacgatatgcatgattactatgctcgctacctgcc

SEQ ID NO: 508610 - DNA, 75 bp, synthetic construct
  source 1..75: mol_type = other DNA
gtcagattattgagcaaggacgttacgcggaattaagcgtggctggtggtcctttctccacattgctggcccatc

SEQ ID NO: 508611 - DNA, 75 bp, synthetic construct
  source 1..75: mol_type = other DNA
gcagcggttcaggtaaaagctcactgctgaacgcgctttctggttttctctcatatcagggatcgctacgaatca

SEQ ID NO: 508612 - DNA, 75 bp, synthetic construct
  source 1..75: mol_type = other DNA
tttgactacaacatcaacgggacagtgaataagccgcatcaggggaaacagtcccagtcgctgaactataacgga

SEQ ID NO: 508613 - DNA, 75 bp, synthetic construct
  source 1..75: mol_type = other DNA
tacagtcatcgtagtccgctggcaaatttgtccgcgaatattgcatccctgcagaaaggatatacgtctttcggc

SEQ ID NO: 508614 - DNA, 75 bp, synthetic construct
  source 1..75: mol_type = other DNA
gaggaacccgtcttctggtggataccgatggtgtcggaggtgtgccggttgacggcggccgggtctccaccaacc

SEQ ID NO: 508615 - DNA, 75 bp, synthetic construct
  source 1..75: mol_type = other DNA
ggatcggttatgacccggcaaaaggtacgcagaacggcgacagcgccggatgcgtggtggtggcaccgccagccg

SEQ ID NO: 508616 - DNA, 75 bp, synthetic construct
  source 1..75: mol_type = other DNA
cgtcgaatacatcggaattgatgccaccggcctcggtgtcggcgtgttccagctcgtgcgctcgttctatcccgc

SEQ ID NO: 508617 - DNA, 75 bp, synthetic construct
  source 1..75: mol_type = other DNA
tcgtcgtttaacaccgcaaaaaagcgatccacaacatctgcaggaaatatatcaggatattgttagtatgttgat

SEQ ID NO: 508618 - DNA, 75 bp, synthetic construct
  source 1..75: mol_type = other DNA
ttttccagccattgcgcgatctcggtacgttttatcatgctaaagcccaggctgttggtgcagctgacagtctga

SEQ ID NO: 508619 - DNA, 75 bp, synthetic construct
  source 1..75: mol_type = other DNA
cttccggtggggcaacaattaccggaaaaggtgcggcgttacatgcagggggaatgtccggtggaacacgtcttc

SEQ ID NO: 508620 - DNA, 75 bp, synthetic construct
  source 1..75: mol_type = other DNA
acgcgtggcggtggctcgtgcgttactaaatccctgctcgctattactgttggatgaacccgctgccagcctcga

SEQ ID NO: 508621 - DNA, 75 bp, synthetic construct
  source 1..75: mol_type = other DNA
ttccagccattacgcgatctcggtacgttttatcatgctaaagcccaggcggttggcgcagccgacagcctgaaa

SEQ ID NO: 508622 - DNA, 75 bp, synthetic construct
  source 1..75: mol_type = other DNA
tgacctgtgccgcctggtcatcacgggttcgcatgctgcgggttgaattcagggcggagtttaagcaggtggtga

SEQ ID NO: 508623 - DNA, 75 bp, synthetic construct
  source 1..75: mol_type = other DNA
tgacctgtgccgcctggtcatcacgggttcgcatgctgtgggttgaattcagtgccgagtttaagcaggtggtga

SEQ ID NO: 508624 - DNA, 75 bp, synthetic construct
  source 1..75: mol_type = other DNA
atacggtgagcgtcaaccgctactttaatgttttcggactgcagggcgtggcggttggattgtcagcctcaaggt

SEQ ID NO: 508625 - DNA, 75 bp, synthetic construct
  source 1..75: mol_type = other DNA
gaggctgaggatctgtttatcacatcacctgaaggcaaaaccctggctggcccgctgaacttcacactatcagct

SEQ ID NO: 508626 - DNA, 75 bp, synthetic construct
  source 1..75: mol_type = other DNA
acgtttatggaaaccccgctcgcccatccgcagcgtggcgaggtggaattagcatcgaccgatccggtgaccatt

SEQ ID NO: 508627 - DNA, 75 bp, synthetic construct
  source 1..75: mol_type = other DNA
tattctgctgggcactgcgccgttaatcccgttgtttatggcgttagttggaatgggcgccgccgatgcaaaccg

SEQ ID NO: 508628 - DNA, 75 bp, synthetic construct
  source 1..75: mol_type = other DNA
cattctgctgggcaccgctccattaatcccgttatttatggctttggttgggatgggcgcagccgatgcgaaccg

SEQ ID NO: 508629 - DNA, 75 bp, synthetic construct
  source 1..75: mol_type = other DNA
accggaatcatggcgtaagcatctctcctgggttggtcaaaatccacaattaccagcagcaacactacgagataa

SEQ ID NO: 508630 - DNA, 75 bp, synthetic construct
  source 1..75: mol_type = other DNA
gaggccgaggatctgtttatcacgtcgccggaaggtaaaacgctggccggaccgttgaactttactttgccagca

SEQ ID NO: 508631 - DNA, 75 bp, synthetic construct
  source 1..75: mol_type = other DNA
aaaacattagaaacgatccaagatgcattacaaaatagtttcatagaccgttcttgcatgctttcaatagctcac

SEQ ID NO: 508632 - DNA, 75 bp, synthetic construct
  source 1..75: mol_type = other DNA
ctctccgaaggtgattttcctgcacatgattggctctcatccgaatccgtgtgaccgacttaactcctggccgaa

SEQ ID NO: 508633 - DNA, 75 bp, synthetic construct
  source 1..75: mol_type = other DNA
acaacagttttattgtcgcgttgttgcagaccacggcggatgaggctgcggagtttaccgggatgattcctgttt

SEQ ID NO: 508634 - DNA, 75 bp, synthetic construct
  source 1..75: mol_type = other DNA
aaacagatgacaaactgttgttacaggaaacagaacgtgcgctggcggatacatcctctccgaagataattttcc

SEQ ID NO: 508635 - DNA, 75 bp, synthetic construct
  source 1..75: mol_type = other DNA
atggcggagataactgagcttaaaacgtttctctttgagacgacgcttacgaatcagcacggggctgacaactgg

SEQ ID NO: 508636 - DNA, 75 bp, synthetic construct
  source 1..75: mol_type = other DNA
agtccgtcagcagaaaaatcagtgcccgtcatttcgcaggcatttttcagtggctgactggtattcgtactgaaa

SEQ ID NO: 508637 - DNA, 75 bp, synthetic construct
  source 1..75: mol_type = other DNA
cccgaaaaattgcctgttatcttgccagcatcagtaaactggataactttcttggtcagcttgatggtatccttc

SEQ ID NO: 508638 - DNA, 75 bp, synthetic construct
  source 1..75: mol_type = other DNA
atttcggcggagtttgtaaaaccgccgaagccctgggtattaagcatccgtctgtttcagagtggcctgagatta

SEQ ID NO: 508639 - DNA, 75 bp, synthetic construct
  source 1..75: mol_type = other DNA
gatgcccgcattgcgttgctggaaaaagagtccgacccggcctgtcaccagacgggccacaacagcggcgtgatc

SEQ ID NO: 508640 - DNA, 75 bp, synthetic construct
  source 1..75: mol_type = other DNA
tcggcggcatttttgtgccgtccagcggcattgtcagctaccgcgacgtgacggcggcgatggcaaaaatcttcc

SEQ ID NO: 508641 - DNA, 75 bp, synthetic construct
  source 1..75: mol_type = other DNA
ttgtctaattcgtcagattctgaccagacggttcaggctgtacgcttacgtatgacgtacggtaaaatcaacaac

SEQ ID NO: 508642 - DNA, 75 bp, synthetic construct
  source 1..75: mol_type = other DNA
catgatggggtctcatccgaacccgtgtgaccggcttcactcctggccgaatcattacctggagcagtatccccg

SEQ ID NO: 508643 - DNA, 75 bp, synthetic construct
  source 1..75: mol_type = other DNA
cctctccgaaggtgattttcctgcacatgatggggtctcatccgaacccgtgtgaccggcttcactcctggccga

SEQ ID NO: 508644 - DNA, 75 bp, synthetic construct
  source 1..75: mol_type = other DNA
ggtcgataacttatttattctgccggtcgcggagtgtatttcgctcggttgggatagcagccgccagacactgga

SEQ ID NO: 508645 - DNA, 75 bp, synthetic construct
  source 1..75: mol_type = other DNA
atcatcttagcgtctaatccgggcgggatgccgtggcaaagcaccaaagcaggagcccctcacaccgcgtatatc

SEQ ID NO: 508646 - DNA, 75 bp, synthetic construct
  source 1..75: mol_type = other DNA
gctattaacaccggtaatgaaatggagaacgctggtgaggctctggtgtggctggtcgactactactacaaggag

SEQ ID NO: 508647 - DNA, 75 bp, synthetic construct
  source 1..75: mol_type = other DNA
gtcggtgctgaacaccagacgatgcgcttcaaagtgacgttcgatgcgtcagatcgcgtcgccgataccatcaaa

SEQ ID NO: 508648 - DNA, 75 bp, synthetic construct
  source 1..75: mol_type = other DNA
tatccggcgtttctgttttttggtgtccggggaggagcaaaacgtcgtcgtagccatcatcgtggtgcatccggt

SEQ ID NO: 508649 - DNA, 75 bp, synthetic construct
  source 1..75: mol_type = other DNA
tcgactttaaacaaccaaaggagctggagtttaatcgcgcccgtctgcgtcgggcatttgtgcagatcgggcgcg

SEQ ID NO: 508650 - DNA, 75 bp, synthetic construct
  source 1..75: mol_type = other DNA
tatcccgtccatccaagcagcattcgacaacccgaattcacaagctgtcgtgcttcgcataaacagccctggcgg

SEQ ID NO: 508651 - DNA, 75 bp, synthetic construct
  source 1..75: mol_type = other DNA
gtttttattcttcctgggtatttctgcaataacctctgccgcatgcggatacactgagaaaaatgctacgggaaa

SEQ ID NO: 508652 - DNA, 75 bp, synthetic construct
  source 1..75: mol_type = other DNA
cgcgccaaagaatcagtacaactcattcggcaaatataaatacagaagctgcgaagacattcttgaaggcgttaa

SEQ ID NO: 508653 - DNA, 75 bp, synthetic construct
  source 1..75: mol_type = other DNA
aaagaaagagttattcgttgtattgataactggtatgaccttgcatacccaccatcagaacaggagaaagcaaaa

SEQ ID NO: 508654 - DNA, 75 bp, synthetic construct
  source 1..75: mol_type = other DNA
acctacacctgaacaggttctaaaagcattcactgacgcagcattgcagaaaaacaccgtagaagagcttaaaca

SEQ ID NO: 508655 - DNA, 75 bp, synthetic construct
  source 1..75: mol_type = other DNA
acaacagttttattgtcgcgttgctgcagaccacggctgatgaggctgcagagtttaccgggatgattcctgttt

SEQ ID NO: 508656 - DNA, 75 bp, synthetic construct
  source 1..75: mol_type = other DNA
ttctgctccttgcacacagaaataccctcacatccattacagcgctgttatttctgttctgttgtgcactgtatg

SEQ ID NO: 508657 - DNA, 75 bp, synthetic construct
  source 1..75: mol_type = other DNA
catgcaactgattgatgtctacccggacgcccgcattgcgttgctggagaaagagtccggcccggcctgtcacca

SEQ ID NO: 508658 - DNA, 75 bp, synthetic construct
  source 1..75: mol_type = other DNA
ttcccctgattattaccgccagtgacatcacatctcaccagtccgtcagcagaaaaatcagtgcccgtcatttcg

SEQ ID NO: 508659 - DNA, 75 bp, synthetic construct
  source 1..75: mol_type = other DNA
accagattgttaaccacctgatttaccccatccccgacccggcaatgccgtttttgggcgttcatctcactcgta

SEQ ID NO: 508660 - DNA, 75 bp, synthetic construct
  source 1..75: mol_type = other DNA
ttggcggtatttttgtgccgtccagcggcattgtcagctaccgcgaagtaacggcggcgatggcaaaaatcttcc

SEQ ID NO: 508661 - DNA, 75 bp, synthetic construct
  source 1..75: mol_type = other DNA
cgtttcgttcttttctgtccctcaggaattgtaccagcgcagttcgcagctctatcaaccggttctgtcggcaat

SEQ ID NO: 508662 - DNA, 75 bp, synthetic construct
  source 1..75: mol_type = other DNA
tcgttggtaaatcaataaattctgacgccatatccggaaaagtgctttccgggcaaagaaaacatatgtctaaaa

SEQ ID NO: 508663 - DNA, 75 bp, synthetic construct
  source 1..75: mol_type = other DNA
atgaacctgttatggtttttaacggagagagaatagttcctgcggacggccttaagtcacagcctgtgattcttc

SEQ ID NO: 508664 - DNA, 75 bp, synthetic construct
  source 1..75: mol_type = other DNA
agtacggttgtgcgccgcaccgttggttgaagggacgctggctgcgacggtcagcgcggcgtcaggtgcggatat

SEQ ID NO: 508665 - DNA, 75 bp, synthetic construct
  source 1..75: mol_type = other DNA
atagcgcccgactgggagaaggtgttggtgaattagcccgtcagatgctgatgagcgatagttgtaaaatcgccg

SEQ ID NO: 508666 - DNA, 75 bp, synthetic construct
  source 1..75: mol_type = other DNA
aggctacagcgttcccctgattattaccgccagtgacatcacgtctcatcagtccgtcagcaggaaaatcagtgc

SEQ ID NO: 508667 - DNA, 75 bp, synthetic construct
  source 1..75: mol_type = other DNA
ttgcggatggttaaaggaactgttgtggggacaactgacacattgcgtgaaatgcagcgttataaacaactgagt

SEQ ID NO: 508668 - DNA, 75 bp, synthetic construct
  source 1..75: mol_type = other DNA
aagccttctattatcaaccggttttatgcacagtgcaggcgaaatcaactctgacagcggaacaagaacaggaac

SEQ ID NO: 508669 - DNA, 75 bp, synthetic construct
  source 1..75: mol_type = other DNA
gaactgctggcggcggcaagcgaactccttcagcatgaacattgcacggcagaatatgcctggcagcaagttctt

SEQ ID NO: 508670 - DNA, 75 bp, synthetic construct
  source 1..75: mol_type = other DNA
ccgttggtgaatcaataaattctgacgccatttccggaaaagtactttccggacaaagaaaaaatatatctaaaa

SEQ ID NO: 508671 - DNA, 75 bp, synthetic construct
  source 1..75: mol_type = other DNA
ctatcatcaggaatagtggcgttgcctttggtaccagtggtgctcgaggcctcgttacagaattcacccccgaag

SEQ ID NO: 508672 - DNA, 75 bp, synthetic construct
  source 1..75: mol_type = other DNA
accaaaatcggttcaccgtacgttattgctgaattttcagagctggctaaacagtatcaggcaatttcaggcttt

SEQ ID NO: 508673 - DNA, 75 bp, synthetic construct
  source 1..75: mol_type = other DNA
tggtgatggcgatcgtcctttggttgctgacgaaaatggcgtttggttacggggtgatatattaggactattttg

SEQ ID NO: 508674 - DNA, 75 bp, synthetic construct
  source 1..75: mol_type = other DNA
cggattattatcataaatagagatattctgcatataagggcatcagggaacgcaccagaaatacgatgctatgct

SEQ ID NO: 508675 - DNA, 75 bp, synthetic construct
  source 1..75: mol_type = other DNA
tggattgaggatcatatttgataataatgatattattcatttgcgtgcatctggaaatgcacctgagttaagatg

SEQ ID NO: 508676 - DNA, 75 bp, synthetic construct
  source 1..75: mol_type = other DNA
ttaaaaggtaaaagagttggcttttacgagcattcaagcgctggtcgtgacttatacattcctatttttgaaaag

SEQ ID NO: 508677 - DNA, 75 bp, synthetic construct
  source 1..75: mol_type = other DNA
tcatgcagacattaacccgaatgaggctgtgttgctggaatgcgttaccacaatggtgactaatctgttgtttga

SEQ ID NO: 508678 - DNA, 75 bp, synthetic construct
  source 1..75: mol_type = other DNA
tcagtgcccgtcatttcgcaggcatttttcagtggctgactggtattcgtactgaaaatataccgccattcaacc

SEQ ID NO: 508679 - DNA, 75 bp, synthetic construct
  source 1..75: mol_type = other DNA
tgtcggtcagcgatagtgctaatcctgttcatcatgatggccatatacaaggaggctacagcgttcccctgatta

SEQ ID NO: 508680 - DNA, 75 bp, synthetic construct
  source 1..75: mol_type = other DNA
ttcaaaactcttggcggagttgccaccacgatttacctactcaaatagagttcaaaattttgcaacaagcaaaag

SEQ ID NO: 508681 - DNA, 75 bp, synthetic construct
  source 1..75: mol_type = other DNA
ttttgcgatcaaaacggcattcgctatgacaactgcggcaagatgctggtcgccacgtctcagctcgaaatggaa

SEQ ID NO: 508682 - DNA, 75 bp, synthetic construct
  source 1..75: mol_type = other DNA
cggcggcaaacggtatcgagcgcgagtggttaaacgccgtggaactgcgcgagcgcgaaccgaatatcaccgggc

SEQ ID NO: 508683 - DNA, 75 bp, synthetic construct
  source 1..75: mol_type = other DNA
gtgatcaacaccggtagccgtctgatcccgctcagtctcgcctggcgttcgcttgccgatcatcaaagtgccgcc

SEQ ID NO: 508684 - DNA, 75 bp, synthetic construct
  source 1..75: mol_type = other DNA
ggcgaatactggcgttgggttggtcagggcgtgccggacattctctcttttggtgacgaattatcgccgcaaaat

SEQ ID NO: 508685 - DNA, 75 bp, synthetic construct
  source 1..75: mol_type = other DNA
aagaactgacgggaacggtcactttccgccatttgctgcgcttctcgcaaaaagggcaattcgttctgcctcctg

SEQ ID NO: 508686 - DNA, 75 bp, synthetic construct
  source 1..75: mol_type = other DNA
tcggtcagaaatgcgttttctgggcagcgattattttcctggttctgctgctggtgagcggtgtgattatctggc

SEQ ID NO: 508687 - DNA, 75 bp, synthetic construct
  source 1..75: mol_type = other DNA
tatcgcgtgggcgacaaaccggcggcaggactgtttatcttcagtcagcaggataacgaaccggtggcgctggtg

SEQ ID NO: 508688 - DNA, 75 bp, synthetic construct
  source 1..75: mol_type = other DNA
tttctatccgctggggcgtaacaatgtgcgtaccagctccagtctgtcgtttatcagctacgaccaggcactctc

SEQ ID NO: 508689 - DNA, 75 bp, synthetic construct
  source 1..75: mol_type = other DNA
gctggaatgcgttaccacaatggtgactaatctgttgtttgattatggcggcgataaagaccctgatgaatggga

SEQ ID NO: 508690 - DNA, 75 bp, synthetic construct
  source 1..75: mol_type = other DNA
agaccgaggtggtggtgggcggcgtggaggccaacatggccatcgccggggcgttaaccactcccggctgtgcgg

SEQ ID NO: 508691 - DNA, 75 bp, synthetic construct
  source 1..75: mol_type = other DNA
acggctcactctggccttgcctcgaaggtattccggccagcgacattatccagattgttcctcttcgcccaggcc

SEQ ID NO: 508692 - DNA, 75 bp, synthetic construct
  source 1..75: mol_type = other DNA
gggtggcgtgatcaacaccggtagccgtctgatcccgctcagtctcgcctggcgttcgcttgccgatcatcaaag

SEQ ID NO: 508693 - DNA, 75 bp, synthetic construct
  source 1..75: mol_type = other DNA
cgccgctaacgacattcgtcagatgattcaggataaccgtctgcggctgatgcaactggcggggcccggagcgcg

SEQ ID NO: 508694 - DNA, 75 bp, synthetic construct
  source 1..75: mol_type = other DNA
agcaagcgataaatggcgagattcagttgttgattgctgcctgtcaacgttgccctgcaaaggtcgtattagtga

SEQ ID NO: 508695 - DNA, 75 bp, synthetic construct
  source 1..75: mol_type = other DNA
gtcgtctgttacaggaaaaacgcaaaaccatcggtatgcgtgtgccttctaacccgattgcgcaggccttgcttg

SEQ ID NO: 508696 - DNA, 75 bp, synthetic construct
  source 1..75: mol_type = other DNA
cgatagatacgtctgttccggtcagcgtaaccggtggtctggctggagaattttcactggaacaggcagtgggta

SEQ ID NO: 508697 - DNA, 75 bp, synthetic construct
  source 1..75: mol_type = other DNA
ttctgcagtcgtggtgaaaacaccgtctggcgacgttaaagcccgttcgatacccgctggaaacatcgagctgct

SEQ ID NO: 508698 - DNA, 75 bp, synthetic construct
  source 1..75: mol_type = other DNA
tcttccctactccgctgtcccctcatgtatttgcccgcgtttgtgtggtgaaacctgacgaactggtgcctattc

SEQ ID NO: 508699 - DNA, 75 bp, synthetic construct
  source 1..75: mol_type = other DNA
atcatatgactctaaaaaggggagcttacaatggagatatgataaaaacgcaggagtgggaacattaagtcaaga

SEQ ID NO: 508700 - DNA, 75 bp, synthetic construct
  source 1..75: mol_type = other DNA
ttatactttcagatgctaatcaagttaacccagataaaatatcatggggatatagaggcggcactcttgatttaa

SEQ ID NO: 508701 - DNA, 75 bp, synthetic construct
  source 1..75: mol_type = other DNA
atgcgatatatagcaggcattgatatcggcaactcatccacagaggttgcgctggcaacgctcaatgcgtctggc

SEQ ID NO: 508702 - DNA, 75 bp, synthetic construct
  source 1..75: mol_type = other DNA
tgcagtttgccggcgattacaaggtgtctgccctgaacggccagacatggatgggtggcgggattatcacagata

SEQ ID NO: 508703 - DNA, 75 bp, synthetic construct
  source 1..75: mol_type = other DNA
acaagtttcagggtatccaatttctgcatagtgcaatcgaagaactgaatgagaaaactggagtaacgctgacag

SEQ ID NO: 508704 - DNA, 75 bp, synthetic construct
  source 1..75: mol_type = other DNA
gttgctgaaaaaagcgcagttgaagtccactgtgatgccacaggttcagcaatatgcgtgggataaagcagcaaa

SEQ ID NO: 508705 - DNA, 75 bp, synthetic construct
  source 1..75: mol_type = other DNA
accgttttcgccctcaatgctgaagagactaaaaatattgttcctgtcgcgcgggcgctaatcggcaaccgttca

SEQ ID NO: 508706 - DNA, 75 bp, synthetic construct
  source 1..75: mol_type = other DNA
tctggcgacgttaaagcccgttcgatacccgccggaaatatcgaactgctttctgccgggcgcacaatgcgggtt

SEQ ID NO: 508707 - DNA, 75 bp, synthetic construct
  source 1..75: mol_type = other DNA
gtcaatatttttggagggaaaggatcaccgggagacctgtattatgacagttctaccgggaactattacatcctg

SEQ ID NO: 508708 - DNA, 75 bp, synthetic construct
  source 1..75: mol_type = other DNA
agcgcctgcttccggattaccaggcaatcgaagctcgtgtggacgcagccattcggcagaagttcggtctaccaa

SEQ ID NO: 508709 - DNA, 75 bp, synthetic construct
  source 1..75: mol_type = other DNA
gccgtctgctacaggaaaaacgcaaaaccatcggtatgcgcgtgccgtctaatcctatcgctcaggcgttacttg

SEQ ID NO: 508710 - DNA, 75 bp, synthetic construct
  source 1..75: mol_type = other DNA
aaccccatcgctcaggcgttacttgaggtgttgggtgaaccgatgctttccacttcgttaatgctgccgggtagc

SEQ ID NO: 508711 - DNA, 75 bp, synthetic construct
  source 1..75: mol_type = other DNA
taaaatttttacctcgccactgcgcccgagagtctgcgcaggcttacaagccagtgcagaaatgtgcggcaacac

SEQ ID NO: 508712 - DNA, 75 bp, synthetic construct
  source 1..75: mol_type = other DNA
gatttggacagtattaacaatgctgatttcaatagtgccgaaataaaacttaaagataaaaaaaagacaaaaaca

SEQ ID NO: 508713 - DNA, 75 bp, synthetic construct
  source 1..75: mol_type = other DNA
tacgccgggcaattacacgttcatcctgaaaggaacgaaagaggtacctcgccgtctgttgcaggaaaaacgcaa

SEQ ID NO: 508714 - DNA, 75 bp, synthetic construct
  source 1..75: mol_type = other DNA
gagcgcatttgtcgtattcgtcagctgccggacggtcacaactttactctgatgtgtcgcgatctttctgagctt

SEQ ID NO: 508715 - DNA, 75 bp, synthetic construct
  source 1..75: mol_type = other DNA
tatcggtgcaggtgatgaccagatcacgctgtccggtttgctgtacccggaaattaccggcggtgaggtgtcgct

SEQ ID NO: 508716 - DNA, 75 bp, synthetic construct
  source 1..75: mol_type = other DNA
caacaaaaacaacccgtggacgcgttactacctggcgcgtgaactgcggttatcactcaaaccggagaggcgacg

SEQ ID NO: 508717 - DNA, 75 bp, synthetic construct
  source 1..75: mol_type = other DNA
ggtgaaaaccccggttaccagacaggccgcctggctaaatccatcggttacatggtgccaaaagcaagcggacgg

SEQ ID NO: 508718 - DNA, 75 bp, synthetic construct
  source 1..75: mol_type = other DNA
ccgaaagtctgtgcaggcttacaagccagcgctgaaatgtgcggtaactcgcgtcagcaggcaatgacctggctt

SEQ ID NO: 508719 - DNA, 75 bp, synthetic construct
  source 1..75: mol_type = other DNA
atggaatgccgtccgggttgcggggcgtgttgcaccgccccctcaatctccagccctattcccggtatgccagat

SEQ ID NO: 508720 - DNA, 75 bp, synthetic construct
  source 1..75: mol_type = other DNA
tttttgagctgcgcacgttgccgcatcagcagttacagcaaaacaaaagctggcggcatgtgaaaaatgagcgcg

SEQ ID NO: 508721 - DNA, 75 bp, synthetic construct
  source 1..75: mol_type = other DNA
tagtctcgctttcttctttatctgtttacagattaagaaatagtgatgattttgaagttaaagataaatatggct

SEQ ID NO: 508722 - DNA, 75 bp, synthetic construct
  source 1..75: mol_type = other DNA
tgttcatctttgcttcactacatgaaggttttgggttgccggttctggaagcaatgtcgtgcggtgcgccggtga

SEQ ID NO: 508723 - DNA, 75 bp, synthetic construct
  source 1..75: mol_type = other DNA
atgaaagagcttgagttaaagaaatcgattactgctcatggcgagacactctccgtactggagtttgatgagccc

SEQ ID NO: 508724 - DNA, 75 bp, synthetic construct
  source 1..75: mol_type = other DNA
cgaccagatgtctccggcagacctgaatgcagcggcgtggcttgtggctggttttccctccaagcctgacggctg

SEQ ID NO: 508725 - DNA, 75 bp, synthetic construct
  source 1..75: mol_type = other DNA
ctatcgtcaccaattggagcgggcaacttgattttgttaattcacaaaattcatggctggttgactatcagttca

SEQ ID NO: 508726 - DNA, 75 bp, synthetic construct
  source 1..75: mol_type = other DNA
ggcttctgcttaccgcataagggcctgatggaactagtagaatccgtccatagactcaagcaagccggtaaaccg

SEQ ID NO: 508727 - DNA, 75 bp, synthetic construct
  source 1..75: mol_type = other DNA
gcgttcactcgtcgtgacaatgttatcttaatcattaagacttttaacaatccgcacaatgaaattgacgcatgg

SEQ ID NO: 508728 - DNA, 75 bp, synthetic construct
  source 1..75: mol_type = other DNA
ccggcagatatgacgcgctgggctgaaattaaaaagaatctgcgcttcaggatgcggcaggaagtcaggacgaat

SEQ ID NO: 508729 - DNA, 75 bp, synthetic construct
  source 1..75: mol_type = other DNA
tgtcaggtggcatttgtgttgccgggtgagcgagtcatgatggccttcacctacgccagaaccacaccgctgacc

SEQ ID NO: 508730 - DNA, 75 bp, synthetic construct
  source 1..75: mol_type = other DNA
gagtgaagcgctcaactggttaaaggttgatggcgttgtcagcgaggttattcctgttgcaaggatcgtcctgcc

SEQ ID NO: 508731 - DNA, 75 bp, synthetic construct
  source 1..75: mol_type = other DNA
ctccgtactggagtttgatgagcccaccgggaaggatgtccgcgagctggggtatccctaccagatgaatcagga

SEQ ID NO: 508732 - DNA, 75 bp, synthetic construct
  source 1..75: mol_type = other DNA
tgccagtggtgcgccagccagccaggacaacgcgctgctggttcgagttactgctgccgtatccgttctggtccg

SEQ ID NO: 508733 - DNA, 75 bp, synthetic construct
  source 1..75: mol_type = other DNA
gtgctgatttttgaagatgccgatattgaacgcgcgctggacgctgccctgttcaccatcttctcgatcaacggc

SEQ ID NO: 508734 - DNA, 75 bp, synthetic construct
  source 1..75: mol_type = other DNA
tgaaacgcgatctggaggattctccggtacgcatcacggcctatattgaagatgttgatgcgctggcgcaggcgg

SEQ ID NO: 508735 - DNA, 75 bp, synthetic construct
  source 1..75: mol_type = other DNA
gcgtgggcggtgacggtcggttctgcaatcacgcgtcttgagcacatttgtcagtggtacaacacagcgatgaaa

SEQ ID NO: 508736 - DNA, 75 bp, synthetic construct
  source 1..75: mol_type = other DNA
taaagaagaactattaattgaattagtaagatttgataatgtaaagaacataaaatcgattgatattgattttct

SEQ ID NO: 508737 - DNA, 75 bp, synthetic construct
  source 1..75: mol_type = other DNA
accgacattgcgcagtcattcatggctatccgtcgcgccaccaccgccagcggcaaccgcccgacctatgaagcc

SEQ ID NO: 508738 - DNA, 75 bp, synthetic construct
  source 1..75: mol_type = other DNA
tctggcgctggtgaaaacgttgagcgacgccggatgtagggtgattgccgaagggcgttacaacacgcctgctca

SEQ ID NO: 508739 - DNA, 75 bp, synthetic construct
  source 1..75: mol_type = other DNA
gcccgcgtccggtgcctgttgaaacgctgctggcacgtattcaccatcacggtttactggcgatgaccgactgtt

SEQ ID NO: 508740 - DNA, 75 bp, synthetic construct
  source 1..75: mol_type = other DNA
ataaaaccgagcggcccggcactacgtattttgaatacattggcaataaaaggaccggaagtttttgcaaagtaa

SEQ ID NO: 508741 - DNA, 75 bp, synthetic construct
  source 1..75: mol_type = other DNA
gcaatgcgcgcaggtcatctcaaaacgggagctccatgccggggtgagcgtattgaaaaatataaccagcttatg

SEQ ID NO: 508742 - DNA, 75 bp, synthetic construct
  source 1..75: mol_type = other DNA
aatcctgcatggtgcattgggagagcagatagaattggttggcgacgatctgtttgtgaccaacgtaaagtatat

SEQ ID NO: 508743 - DNA, 75 bp, synthetic construct
  source 1..75: mol_type = other DNA
aataataaagactttaataacttttgggttacataatttttcttgtttggaagtttacaattacatactgtactt

SEQ ID NO: 508744 - DNA, 75 bp, synthetic construct
  source 1..75: mol_type = other DNA
agatactcaatagatagtataatacaggcaaacaatgcagcatcaaaatctttcccttatatcgttatacatgac

SEQ ID NO: 508745 - DNA, 75 bp, synthetic construct
  source 1..75: mol_type = other DNA
ttaccaaaccaatacttattatgaaaaacacaatacacagcatcgtgaccaacagcaacgattccgtcacactgc

SEQ ID NO: 508746 - DNA, 75 bp, synthetic construct
  source 1..75: mol_type = other DNA
aaaaataaatatgtccatctggtgacattttcaaacggtaaattagagagcgtggaaaatctgagcgtaccggta

SEQ ID NO: 508747 - DNA, 75 bp, synthetic construct
  source 1..75: mol_type = other DNA
aaaggcttaagccgcgatgcgtcaacgtgtctgcggttgaccaatgaaggtcgtttctgggcaagcaacattttg

SEQ ID NO: 508748 - DNA, 75 bp, synthetic construct
  source 1..75: mol_type = other DNA
tcggcggaaaaaatgtggcgtgggcgcagtctgaaatcactgcatggatggtggatcgcattgccgaacgtaacc

SEQ ID NO: 508749 - DNA, 75 bp, synthetic construct
  source 1..75: mol_type = other DNA
atgcaagctgttttttcttccccgtctcccgccccagtgacgccactgatgccgctgccggacatcacgcaggag

SEQ ID NO: 508750 - DNA, 75 bp, synthetic construct
  source 1..75: mol_type = other DNA
ggggaatttccgccgcaggtgagtcttggcggtaaaaatgtggcctggctgcactctgaaatcaccgcatggatg

SEQ ID NO: 508751 - DNA, 75 bp, synthetic construct
  source 1..75: mol_type = other DNA
tggaagacgcgggctggcactgcatcagtaacagccactggggccgcaccacacgcgaacgcaatctctataact

SEQ ID NO: 508752 - DNA, 75 bp, synthetic construct
  source 1..75: mol_type = other DNA
caaacgacttcacctcgtaaacgactggtttatctgcatattcctttttgcgcgacacactgcacgttttgtggt

SEQ ID NO: 508753 - DNA, 75 bp, synthetic construct
  source 1..75: mol_type = other DNA
gagttttgatgaatgcggtaagagtaaatatgtccatctggtgacattttcaaacggcaaattagagagcgtgga

SEQ ID NO: 508754 - DNA, 75 bp, synthetic construct
  source 1..75: mol_type = other DNA
aagtcctgctggtacgccggagccgcgaacagcgcgagcgtgtattggccagccaacagcgtgaaactctcagcg

SEQ ID NO: 508755 - DNA, 75 bp, synthetic construct
  source 1..75: mol_type = other DNA
cccgcacgttatacaaccgttttgttgtcaatttacagcaaactggctgtcatctggtggtactggcaggaaacc

SEQ ID NO: 508756 - DNA, 75 bp, synthetic construct
  source 1..75: mol_type = other DNA
gattattgttgccggtgatgttttcgataccggctcgccgcccagttacgcccgtactttatataaccgttttgt

SEQ ID NO: 508757 - DNA, 75 bp, synthetic construct
  source 1..75: mol_type = other DNA
ggcatctcggccagaacttctacagtaaaagccgcgaagctgaacaccaggcctttcttgactggctgctggaaa

SEQ ID NO: 508758 - DNA, 75 bp, synthetic construct
  source 1..75: mol_type = other DNA
gatgaatcgcagcatcaacgcttgcaacatcttttcgccacgacattgcagaccctcgccggagaacacgaagca

SEQ ID NO: 508759 - DNA, 75 bp, synthetic construct
  source 1..75: mol_type = other DNA
aacaatcgtgatgatctctccggccttggggaggaagaggctaattcgggaaaggggaaatcggctgtcaatgac

SEQ ID NO: 508760 - DNA, 75 bp, synthetic construct
  source 1..75: mol_type = other DNA
acaactgcataataatgataactcatgatattgagcttgttaatgataatatggaagttatttatcttaataaca

SEQ ID NO: 508761 - DNA, 75 bp, synthetic construct
  source 1..75: mol_type = other DNA
taatagccgcaagggaaagaattaatgaagtcttggtgtctgttggattgtcaaatattaataataatgtatcat

SEQ ID NO: 508762 - DNA, 75 bp, synthetic construct
  source 1..75: mol_type = other DNA
ggagctggaaattttatggggccagccgataacccgcgatgctgatcgtaatgccgcagtgaatgcgttgcatca

SEQ ID NO: 508763 - DNA, 75 bp, synthetic construct
  source 1..75: mol_type = other DNA
ctgtagtaggatcaaaagagtggtgggaaggctggcaaaaacggtcttttgctcacatttcaaatggttataaat

SEQ ID NO: 508764 - DNA, 75 bp, synthetic construct
  source 1..75: mol_type = other DNA
gctcacatttcaaatggttataaacacatttatatagcgattaattcaccagagatatttctactggtttgttct

SEQ ID NO: 508765 - DNA, 75 bp, synthetic construct
  source 1..75: mol_type = other DNA
gaaaaacgatataccatacaaattaatatcagaaggaaattgtacgggatatcatctgccagccaaacaaaccat

SEQ ID NO: 508766 - DNA, 75 bp, synthetic construct
  source 1..75: mol_type = other DNA
taccgtttccgaatttaaagcgaacaaagtaaaaaactggtacagccggatccacactctgaaaccaacacaaaa

SEQ ID NO: 508767 - DNA, 75 bp, synthetic construct
  source 1..75: mol_type = other DNA
atcatttaatcagaattaaattagataacgaatatcagtctgattttttatgttatttaattaactcacctttta

SEQ ID NO: 508768 - DNA, 75 bp, synthetic construct
  source 1..75: mol_type = other DNA
gcgttttgcccgttggcctgaaattgatttcaaaaatgcgctctggacgatacctgcagaacgtgaagaactaca

SEQ ID NO: 508769 - DNA, 75 bp, synthetic construct
  source 1..75: mol_type = other DNA
cctgcgcggcaatttcgcgcgccagcggcagcataaataaccctaccctgtctgctgataacgcgctttcattag

SEQ ID NO: 508770 - DNA, 75 bp, synthetic construct
  source 1..75: mol_type = other DNA
acagtagacagttttggtgctgacgatggttttatggcgggtctggtatatagctttctggagggaaacaatttc

SEQ ID NO: 508771 - DNA, 75 bp, synthetic construct
  source 1..75: mol_type = other DNA
tggcggcgtcgggcgcaatatctcccacaatctggcactactgggccgtgacgtgcatttactctcggtgattgg

SEQ ID NO: 508772 - DNA, 75 bp, synthetic construct
  source 1..75: mol_type = other DNA
gccagcgtcttttttatcgtctgcgctcacgcacgccagaattatggtgggctgggcaggggagccgaaaggctc

SEQ ID NO: 508773 - DNA, 75 bp, synthetic construct
  source 1..75: mol_type = other DNA
gctggaatgcaaatgccatcccggcgatgcaaattgtcggtacgcgcgcagccttgtttaccttcaaaacgcata

SEQ ID NO: 508774 - DNA, 75 bp, synthetic construct
  source 1..75: mol_type = other DNA
agtccggtatcccacagcgctctaattgcccgagaactaggcattggctggatttgccagcagggagagaagctg

SEQ ID NO: 508775 - DNA, 75 bp, synthetic construct
  source 1..75: mol_type = other DNA
aaagtgatggaggccatcgaatctgttgccgatgccgaccatgtgctggtcatgatggatatgggtagcgcatta

SEQ ID NO: 508776 - DNA, 75 bp, synthetic construct
  source 1..75: mol_type = other DNA
gcccggtaggtagcctgttctatgatttctttggtccgaacaccatgaaatctgatatttccatttcagtatctg

SEQ ID NO: 508777 - DNA, 75 bp, synthetic construct
  source 1..75: mol_type = other DNA
tgccttacaccaacttctcaccgatttacgaaggtaaatgcggtatgagcggtggccgtgtagaagggaaagtga

SEQ ID NO: 508778 - DNA, 75 bp, synthetic construct
  source 1..75: mol_type = other DNA
atggtaaacctggtcatagtttcacatagcagccgactgggagaaggtgtcggtgaattagcccgtcagatgtta

SEQ ID NO: 508779 - DNA, 75 bp, synthetic construct
  source 1..75: mol_type = other DNA
atggctacagtcccaacttccccatacctgaaaatcgaagtcgtcaacggcaaggccgttattttctccctgcat

SEQ ID NO: 508780 - DNA, 75 bp, synthetic construct
  source 1..75: mol_type = other DNA
tatgaatctcagcggcaaagccgtcgctgcgatggccagtttcttccgtatcaacccggatgaaattttggttgc

SEQ ID NO: 508781 - DNA, 75 bp, synthetic construct
  source 1..75: mol_type = other DNA
aaagagcaatggaatgacacgcgcaatctgcgccagaaagtgaataaacgcactgaaaaagagtgggataaagcc

SEQ ID NO: 508782 - DNA, 75 bp, synthetic construct
  source 1..75: mol_type = other DNA
tcaaaattgagattattaacggtaaggccgttattttctccctgcatgtagcctgccatttcaagcgcatgcacc

SEQ ID NO: 508783 - DNA, 75 bp, synthetic construct
  source 1..75: mol_type = other DNA
ggcgatatacgacgcgccagcgtcttttttatcgtccgcgctcacgcacgccagaattatggtgggctgggcagg

SEQ ID NO: 508784 - DNA, 75 bp, synthetic construct
  source 1..75: mol_type = other DNA
ggtctgatgatgcttcagcttgggttaagtctgcgcacaatgcggtactacgagagctgcattgaagcattccat

SEQ ID NO: 508785 - DNA, 75 bp, synthetic construct
  source 1..75: mol_type = other DNA
aattgcaatccgttatatcgatatggaaatattaaagatgacaaaacgctgcatctacgatttcagtctgaaaca

SEQ ID NO: 508786 - DNA, 75 bp, synthetic construct
  source 1..75: mol_type = other DNA
accagttttcttccgcttgacagacggcaatgaagaacagaaaaagaaaaatcttttagaaaaaataaatcgttt

SEQ ID NO: 508787 - DNA, 75 bp, synthetic construct
  source 1..75: mol_type = other DNA
tgcaaaacaaaaaaaaataaaaaaatcatgtttgtatttgcaggagaaaaacaacgccaccttgataaaagctca

SEQ ID NO: 508788 - DNA, 75 bp, synthetic construct
  source 1..75: mol_type = other DNA
atgaaaaagtccccttcctcagccaaaaagaaattatgcttcgtcattatgggatttggaaaaaaaacagattac

SEQ ID NO: 508789 - DNA, 75 bp, synthetic construct
  source 1..75: mol_type = other DNA
tggagatactcgaaaaccagcgagaagaagccagacagatgcgcagggaggcaaataaagagggccggaaaaaag

SEQ ID NO: 508790 - DNA, 75 bp, synthetic construct
  source 1..75: mol_type = other DNA
caggtgataatgctttcaggtatatacctaaaggttttatatttgatgccactggtcactcatcattttataata

SEQ ID NO: 508791 - DNA, 75 bp, synthetic construct
  source 1..75: mol_type = other DNA
caggatgaccgcagaatatttacccgcgatgtacgtctgaatattgtctctttgcaggaaagcctgcatctggat

SEQ ID NO: 508792 - DNA, 75 bp, synthetic construct
  source 1..75: mol_type = other DNA
tataagatatatatgggaaactagtcgtctttcgagtaaatggaaaaaactaatcaaaggtggagattacaaaaa

SEQ ID NO: 508793 - DNA, 75 bp, synthetic construct
  source 1..75: mol_type = other DNA
atgaataccaataacatcaaaaaatatgccccacaggcccgtaacgatttccgtgatgcggtgatccagaagcta

SEQ ID NO: 508794 - DNA, 75 bp, synthetic construct
  source 1..75: mol_type = other DNA
acctatatttttcaggttaattgaaggtaacgaatctcaaaaaaataaaactttaaaaaaacgtgaaagtaacta

SEQ ID NO: 508795 - DNA, 75 bp, synthetic construct
  source 1..75: mol_type = other DNA
agcagatacaaaccggcagtatgggggatatgtttgctgaaaataacgcgttaacacaaaccgacagcgcagaat

SEQ ID NO: 508796 - DNA, 75 bp, synthetic construct
  source 1..75: mol_type = other DNA
tgtctacagctaacaatgatgagttcttgcgtttctggcatgaggtttctatacaaaatattggttttggttgca

SEQ ID NO: 508797 - DNA, 75 bp, synthetic construct
  source 1..75: mol_type = other DNA
ggagctattagcaaaaatatttggcgagaaatcaaagatatttcttttttagataaagccattcttttatatgaa

SEQ ID NO: 508798 - DNA, 75 bp, synthetic construct
  source 1..75: mol_type = other DNA
tcctgccgggagcaccgttatatgacacggttgtgattgtcactggtgagagtgtgcgcagggattatatgtcgg

SEQ ID NO: 508799 - DNA, 75 bp, synthetic construct
  source 1..75: mol_type = other DNA
tgggaacaactgacacattgcgtgaaatgcagcgttatgaacaactgagtcagcacgggactgacaactggaaaa

SEQ ID NO: 508800 - DNA, 75 bp, synthetic construct
  source 1..75: mol_type = other DNA
aggatacagcacatggtggatatccaatcagggaaaactgggggagcatgacacacgcatctctgttattgcttc

SEQ ID NO: 508801 - DNA, 75 bp, synthetic construct
  source 1..75: mol_type = other DNA
gcagaccacggcggatgaggctgcggagtttaccgggatgattcctgtttatcattttctggtcagtgccgcgat

SEQ ID NO: 508802 - DNA, 75 bp, synthetic construct
  source 1..75: mol_type = other DNA
ggaaacagaacgtgcgctggcggataaatcctcgccgaaggtgattttcctgcacatgattggctctcatccgaa

SEQ ID NO: 508803 - DNA, 75 bp, synthetic construct
  source 1..75: mol_type = other DNA
tgggaacaactgacacattacgtgaaatgcagcgttataaacaactgagtcagcacggggctgacagctggaaaa

SEQ ID NO: 508804 - DNA, 75 bp, synthetic construct
  source 1..75: mol_type = other DNA
cgcgcgccaaaaacgtttacggccacatcattcactggttggagcataacggtgacccgaccgcgctgcagtttg

SEQ ID NO: 508805 - DNA, 75 bp, synthetic construct
  source 1..75: mol_type = other DNA
aggcacggtcgccggtgccgcggcagcgttcccatttctgctgaaacaggaaaacgcgctggcgaaagtggtctc

SEQ ID NO: 508806 - DNA, 75 bp, synthetic construct
  source 1..75: mol_type = other DNA
atgacacggatattaaatgaaaaagtccccttcctcagccaaaaagaaattatgcttcgtcattatgggatttgg

SEQ ID NO: 508807 - DNA, 75 bp, synthetic construct
  source 1..75: mol_type = other DNA
aggccagaggcggtgagattatctataacgccgaagtcagcgcgctcagtgagcataaaaacggcgtggtgatac

SEQ ID NO: 508808 - DNA, 75 bp, synthetic construct
  source 1..75: mol_type = other DNA
gtacccgtcagggcggcgaatatgaagcgtcgacgctgattagctgttctggcctgatggctgaccggctggtga

SEQ ID NO: 508809 - DNA, 75 bp, synthetic construct
  source 1..75: mol_type = other DNA
catgcaactgattgatgtctatcccgacgcccgtattgcattgctggaaaaagagtccggcccggcctgccatca

SEQ ID NO: 508810 - DNA, 75 bp, synthetic construct
  source 1..75: mol_type = other DNA
ttaacccaaactgacagcgcagaatatcagctgctgatgcgcacgctgaaacgctttgtgaatgcaaaaacgctg

SEQ ID NO: 508811 - DNA, 75 bp, synthetic construct
  source 1..75: mol_type = other DNA
gatgaagctggcgggcgatcgtgacgaagagctgtaccgtgaactattgcttgcacagtgccatgcgctgcacgg

SEQ ID NO: 508812 - DNA, 75 bp, synthetic construct
  source 1..75: mol_type = other DNA
ttgatctggatgacggcgttaaggttaactacggcaaatttggcgatctgctggcggatgtgaaggcgatcaccg

SEQ ID NO: 508813 - DNA, 75 bp, synthetic construct
  source 1..75: mol_type = other DNA
gaccttattgtaacctccatgcgaaccaacagtgattacggcatccctacgcttaatggcgccgccctgctcaca

SEQ ID NO: 508814 - DNA, 75 bp, synthetic construct
  source 1..75: mol_type = other DNA
gtttccgctctcgtgatattccaaagatgattttggagaacaacctctacggcctagacatagatgatcgtgcag

SEQ ID NO: 508815 - DNA, 75 bp, synthetic construct
  source 1..75: mol_type = other DNA
actttcagaatagagaatcagctaaaaaaagtaaccgtaaatggtttccctacaataagggcggggagtacagga

SEQ ID NO: 508816 - DNA, 75 bp, synthetic construct
  source 1..75: mol_type = other DNA
ctatggcacatttaggcgctcgagcttttggacagatatctggtgaggtggttcaaaccactgcatgggtaattt

SEQ ID NO: 508817 - DNA, 75 bp, synthetic construct
  source 1..75: mol_type = other DNA
atgcacacagtttcatcagcaccatcgtcccccactgccgcgcacctgatgccggtttcagccccgattcaggaa

SEQ ID NO: 508818 - DNA, 75 bp, synthetic construct
  source 1..75: mol_type = other DNA
tcggcggaaaaaatgtggcgtgggcgcagtctgaaatcactgcatggatggcggatcgcattgccgaacgcaacc

SEQ ID NO: 508819 - DNA, 75 bp, synthetic construct
  source 1..75: mol_type = other DNA
tccccgtctcccgcccctgtgacgccactgatgccgctgccggacatcacgcaggagcgttttttacgtctgccg

SEQ ID NO: 508820 - DNA, 75 bp, synthetic construct
  source 1..75: mol_type = other DNA
gtcaaaatgttctttgtgatgccggtgatctggttctgggtgctggtggcgtgccgcctaattgaacctgaacgc

SEQ ID NO: 508821 - DNA, 75 bp, synthetic construct
  source 1..75: mol_type = other DNA
ttttatgcaccctggctggctgtgtccagaaagcgccgttgcctccagaagtatcaggggaactggttccagtaa

SEQ ID NO: 508822 - DNA, 75 bp, synthetic construct
  source 1..75: mol_type = other DNA
gtaaaaatgtcgcctgggcacagtctgaggtcagcgcatggatggcggaccgtatcagcgcccgtgggcggggat

SEQ ID NO: 508823 - DNA, 75 bp, synthetic construct
  source 1..75: mol_type = other DNA
ttgaaaatactaagaaattaattgaaatagctaaaaatgactgggatatggctgaaacatcttgggggtttaaac

SEQ ID NO: 508824 - DNA, 75 bp, synthetic construct
  source 1..75: mol_type = other DNA
caatgcaaccccatatatcgttatagcaatggcaaaaattataaaaacactgaagatttattattaaatgataca

SEQ ID NO: 508825 - DNA, 75 bp, synthetic construct
  source 1..75: mol_type = other DNA
gtattattccactaactgaccaagaatggttcaaagacgacgcaaccaatcgtttccgtgagtttgtccaagttg

SEQ ID NO: 508826 - DNA, 75 bp, synthetic construct
  source 1..75: mol_type = other DNA
tcggtcgtcaatggctgcaaacctacccagactctgccattaaaacgcagatggaatactacattgagcctgctg

SEQ ID NO: 508827 - DNA, 75 bp, synthetic construct
  source 1..75: mol_type = other DNA
ttattgctaacaaatcagatgcacaatcaatcagaaataattattccagcttactggaaattcaacaaaaatata

SEQ ID NO: 508828 - DNA, 75 bp, synthetic construct
  source 1..75: mol_type = other DNA
attggagatttatgtgatgcacgtaaaggtatggggacgggagacaatgcttcatttgtaagagcttggcatgaa

SEQ ID NO: 508829 - DNA, 75 bp, synthetic construct
  source 1..75: mol_type = other DNA
tttggtcttgatatcgacgaccgcgcagcccaactttccggttttgcattattaatgatggcgcgtcaggatgac

SEQ ID NO: 508830 - DNA, 75 bp, synthetic construct
  source 1..75: mol_type = other DNA
gtaactttcaagataaactgtatgaacagctagttaatattgaaaaaaatattaataacataatcgaagaaatac

SEQ ID NO: 508831 - DNA, 75 bp, synthetic construct
  source 1..75: mol_type = other DNA
aacatcctggcctgcatgaactctaaatatatcaactactctgcaagtttaatttgtcctacgcttaactttaca

SEQ ID NO: 508832 - DNA, 75 bp, synthetic construct
  source 1..75: mol_type = other DNA
ggagagattgtatcgtctggctgttgaaggtgatattcagcagaaagaggctgcggcagagctgatcccatatat

SEQ ID NO: 508833 - DNA, 75 bp, synthetic construct
  source 1..75: mol_type = other DNA
caagaaggcaatccaaaacaattcccggtaataaatgagcgtttaaaaacggccactacaaatgattttaagaaa

SEQ ID NO: 508834 - DNA, 75 bp, synthetic construct
  source 1..75: mol_type = other DNA
ttatgtcgaaaacggtaatataaatcaagaaggcaatccaaaacaattcccggtaataaatgagcgtttaaaaac

SEQ ID NO: 508835 - DNA, 75 bp, synthetic construct
  source 1..75: mol_type = other DNA
cagcgaactgcgcagctatgacgaccgcctgcgtcactatgctgatatgagaatcagtattgatctcgacgatgg

SEQ ID NO: 508836 - DNA, 75 bp, synthetic construct
  source 1..75: mol_type = other DNA
ataacaactgcactgcagctggcgcgcgcgacccctgtatttatcaggaaaaacttcaatgtggttctggagaga

SEQ ID NO: 508837 - DNA, 75 bp, synthetic construct
  source 1..75: mol_type = other DNA
ggatttcggccggcagctgcgtgagcacgttcgttccggcacagggctgaccctcggcgtcggaatgggaccgac

SEQ ID NO: 508838 - DNA, 75 bp, synthetic construct
  source 1..75: mol_type = other DNA
gggacgaggcatcgcacctgagtggcaaatgaaacgagaaatgctttctcctgcatatacgaccaggtggaacga

SEQ ID NO: 508839 - DNA, 75 bp, synthetic construct
  source 1..75: mol_type = other DNA
gaaccgtattacgggaatgtggccagtgaaaaactgctaatccccacgcaggatacacgggatatcattgccgct

SEQ ID NO: 508840 - DNA, 75 bp, synthetic construct
  source 1..75: mol_type = other DNA
agtgggattttttaggtctggaaatgccgcagtggctgctcggtatttttatcgcttacctgattgtcgcggtgc

SEQ ID NO: 508841 - DNA, 75 bp, synthetic construct
  source 1..75: mol_type = other DNA
cgttctatgcgagctgcgagaaagtttttcgtcccgacctgcggaacaaacctgttgttgttcttagcaacaacg

SEQ ID NO: 508842 - DNA, 75 bp, synthetic construct
  source 1..75: mol_type = other DNA
agcctggcgtgcagtatttcttggttctgcactcttctgggtggttgtcgcactactgatatggaaagtgtgggg

SEQ ID NO: 508843 - DNA, 75 bp, synthetic construct
  source 1..75: mol_type = other DNA
ccgatcaaacctccccactcccgcacatgctgcctcgcccggaaacgttcgccgttgcaatgcgtgagctgggcg

SEQ ID NO: 508844 - DNA, 75 bp, synthetic construct
  source 1..75: mol_type = other DNA
aacgttccgtggacggaactggtgcgcgaaggcgaactaaaaacgaccgatgaactggatgcgatattttttggt

SEQ ID NO: 508845 - DNA, 75 bp, synthetic construct
  source 1..75: mol_type = other DNA
gatgagatgtttctcgatatccgtggtatagacaactgcatcgactatgaggactttggccggcagctacgcgaa

SEQ ID NO: 508846 - DNA, 75 bp, synthetic construct
  source 1..75: mol_type = other DNA
agctgttcgacgaacgtccgccacgtcctcacagcgccgagctgatgaaggttctcgatggcattaatcattccg

SEQ ID NO: 508847 - DNA, 75 bp, synthetic construct
  source 1..75: mol_type = other DNA
cgtctgccagtacgccgagcgcgcagcagaaaagttgcgaggtgagcggcagtactgccggcatatcagcatctt

SEQ ID NO: 508848 - DNA, 75 bp, synthetic construct
  source 1..75: mol_type = other DNA
ttcgttgcgcctctgctgctggctgtcgggataacgctaatactgcgtctgacaagcaacgccgaagcacgcgta

SEQ ID NO: 508849 - DNA, 75 bp, synthetic construct
  source 1..75: mol_type = other DNA
acgggctggagaaggcgaaagccaatggcgttaagctgggacgcaaggaagccaccgacaccactcaaaaggtgc

SEQ ID NO: 508850 - DNA, 75 bp, synthetic construct
  source 1..75: mol_type = other DNA
aagggctgcaattctatgaagtggttcctgtcgcattagtggtcgcggggacgcaaatggctacaggccaccgta

SEQ ID NO: 508851 - DNA, 75 bp, synthetic construct
  source 1..75: mol_type = other DNA
tgcccgctctttctactggaagccggaaaactgtctgccggaggcagagacagcagaatacagggagtcagtccc

SEQ ID NO: 508852 - DNA, 75 bp, synthetic construct
  source 1..75: mol_type = other DNA
cccccgcgagatacgcttgaagatgtgtggttatcaggcttattttagtcgtacggggagaaaggaaattccttc

SEQ ID NO: 508853 - DNA, 75 bp, synthetic construct
  source 1..75: mol_type = other DNA
agtcagaccggcaacgaggcagaccttaatccgaacgtcgctaaccgcaacaaaggcgggcgtcgcaaaccgaaa

SEQ ID NO: 508854 - DNA, 75 bp, synthetic construct
  source 1..75: mol_type = other DNA
ggatgtggagggcgaagcactgaaggaatgtctgcgccccaaccgcagggttgaaataaccggacagagcgttcg

SEQ ID NO: 508855 - DNA, 75 bp, synthetic construct
  source 1..75: mol_type = other DNA
ttcgttgcgcctctgctgctggccgtcgggataacgctaatactgcgtctgacaagcaatgccgaagcacgcgta

SEQ ID NO: 508856 - DNA, 75 bp, synthetic construct
  source 1..75: mol_type = other DNA
atgaacccgccaattaattttttgccctggcgacagcaacgccggaccgtaatactgcgtctgacaggcagcgcc

SEQ ID NO: 508857 - DNA, 75 bp, synthetic construct
  source 1..75: mol_type = other DNA
tttttctgtcattgacacaccatgaagagcgcgacgcattaattcgactacgggcgagtcaccaccagcagtggg

SEQ ID NO: 508858 - DNA, 75 bp, synthetic construct
  source 1..75: mol_type = other DNA
gacggagattatgtctgccagttcaagatccttttcgacaggcacatggatgcaagatcatttttctggaaaccg

SEQ ID NO: 508859 - DNA, 75 bp, synthetic construct
  source 1..75: mol_type = other DNA
gtgcagagtctgtcaaggaatggtttataagccgaggatttaaggccgaaaggatacaagcaacaggccgggggg

SEQ ID NO: 508860 - DNA, 75 bp, synthetic construct
  source 1..75: mol_type = other DNA
ccctgaatggcaaatgaaacgggaaatgctctcgccttcgtatacaacacaatggactgagatccccgttgcttc

SEQ ID NO: 508861 - DNA, 75 bp, synthetic construct
  source 1..75: mol_type = other DNA
aatgttccgtggacggaactggtgcgcgaaggcgaactaaaaacgaccgatgaactggatgcgatattttttggc

SEQ ID NO: 508862 - DNA, 75 bp, synthetic construct
  source 1..75: mol_type = other DNA
gctcttcccacagagtttacctgcgggcgatggcgggttgtctctggggcagggggttattgttgcggcgcgttg

SEQ ID NO: 508863 - DNA, 75 bp, synthetic construct
  source 1..75: mol_type = other DNA
tccaactgcgtattcgtggcaaagtgcagggcgtcggttttcgtccgtttgtctggcagctggcacagcaattaa

SEQ ID NO: 508864 - DNA, 75 bp, synthetic construct
  source 1..75: mol_type = other DNA
catgacgcgcatccgggctatgtctccagccagtgggcgcgcgaaatgaatctgccgacgcaaacggtgctgcat

SEQ ID NO: 508865 - DNA, 75 bp, synthetic construct
  source 1..75: mol_type = other DNA
ggctgcgcctgactttaaccgcagggcatgaaataccggatatcgaccgtctgctggaggtgctgcatggcaacg

SEQ ID NO: 508866 - DNA, 75 bp, synthetic construct
  source 1..75: mol_type = other DNA
cgttttcgtagtggagtacagggttcgccatttactctcgcggactcatgcagtgccatccagccattaatcgtt

SEQ ID NO: 508867 - DNA, 75 bp, synthetic construct
  source 1..75: mol_type = other DNA
tacgtgcgtcgctggcggtcattcgcagtgatgagggtgatgcacggcgcgaaaaactggcggcactcattacgc

SEQ ID NO: 508868 - DNA, 75 bp, synthetic construct
  source 1..75: mol_type = other DNA
gtacagacgcaaacctatgaattatgcgatggcgtcgctggcggctatgactggcaacgcgtacagcaacttgcc

SEQ ID NO: 508869 - DNA, 75 bp, synthetic construct
  source 1..75: mol_type = other DNA
cagagatggacggcatcaaggcactaaaggagatgcgcagccgtgaaacccgaacccccgttattctgatgacgg

SEQ ID NO: 508870 - DNA, 75 bp, synthetic construct
  source 1..75: mol_type = other DNA
gtggtgttgatggatatccgcatgccagagatggacggcatcaaggcactaaaggagatgcgcagccgtgaaacc

SEQ ID NO: 508871 - DNA, 75 bp, synthetic construct
  source 1..75: mol_type = other DNA
accgtattaaacgcgctaaagggacagggcgtgatccgaaatctcctaagttatcgggaagacatatacatgcca

SEQ ID NO: 508872 - DNA, 75 bp, synthetic construct
  source 1..75: mol_type = other DNA
aacacctttcctcacttatgaaactttaaaaggtggaaagcaggttacgatttggggtaaagacctgaaaaatca

SEQ ID NO: 508873 - DNA, 75 bp, synthetic construct
  source 1..75: mol_type = other DNA
gtggtgttgatggatatccgcatgccagagatggacggcatcaaggcactcaaggagatgcgcagccatgagaca

SEQ ID NO: 508874 - DNA, 75 bp, synthetic construct
  source 1..75: mol_type = other DNA
aaaacatggttatctaagattgaagataaatcaaatgagctatttttagattttatcgcattctccatacttgaa

SEQ ID NO: 508875 - DNA, 75 bp, synthetic construct
  source 1..75: mol_type = other DNA
aacaaggtggctaccgggcgcttaataaaggcaaagtcgactctgcctctgcggttattattctcgaaagttatt

SEQ ID NO: 508876 - DNA, 75 bp, synthetic construct
  source 1..75: mol_type = other DNA
aacagggcggctatcgggcgctaaataaaggcaaagtcgactctgcctctgcggttattattctcgaaagctatt

SEQ ID NO: 508877 - DNA, 75 bp, synthetic construct
  source 1..75: mol_type = other DNA
acgacgctgaaacggatatcgttagcgcctttagcctcactgcgccattgcttgatgcctttaacgatttaagcc

SEQ ID NO: 508878 - DNA, 75 bp, synthetic construct
  source 1..75: mol_type = other DNA
ttatcgtcagctgcggttctggtgtaacagcagccgtggttttgttggcactcgcgacgctggatgtgccaaacg

SEQ ID NO: 508879 - DNA, 75 bp, synthetic construct
  source 1..75: mol_type = other DNA
tgctgccgtagatattcccgtggcgagcgataacccagtgcactatgcggatgccattcgttataatgctcgaac

SEQ ID NO: 508880 - DNA, 75 bp, synthetic construct
  source 1..75: mol_type = other DNA
tgaaaggtgaagtgtttgtggtggtggtggcgttaggtgacgacaaaccagacctgtcaaccctgcgggcgttta

SEQ ID NO: 508881 - DNA, 75 bp, synthetic construct
  source 1..75: mol_type = other DNA
cttccggcgggaattgactacatcaaagtgctggaacgtattcacccggacaaagacgtagacggtttccatcct

SEQ ID NO: 508882 - DNA, 75 bp, synthetic construct
  source 1..75: mol_type = other DNA
tctggctgggtactaacttccaactgcctgatactcggtatcatttctcagcatcgaccagattattctcgcgtt

SEQ ID NO: 508883 - DNA, 75 bp, synthetic construct
  source 1..75: mol_type = other DNA
gagggtatttctatgatagtgcggtccatttatttcaggtttcaaaaaaaatgaaggtggggggctattatataa

SEQ ID NO: 508884 - DNA, 75 bp, synthetic construct
  source 1..75: mol_type = other DNA
catgaacgccttatccgacctactgttctgctccagcacaggcctgataagacgcgctggcgtcacatcaggcaa

SEQ ID NO: 508885 - DNA, 75 bp, synthetic construct
  source 1..75: mol_type = other DNA
tggtattcctgactgccggaattgttttatggatagttatgaatattatttttgatgcctgtattgattcgtgga

SEQ ID NO: 508886 - DNA, 75 bp, synthetic construct
  source 1..75: mol_type = other DNA
aaccctgcatcgcaaatttatgtcgcaagcaaacgcaaggcttgtgaagaagtcgggttcgtctcccgctcttat

SEQ ID NO: 508887 - DNA, 75 bp, synthetic construct
  source 1..75: mol_type = other DNA
atgaaaatgacctttacctctactctgattgcttctgccgttgcgctggcgactttaacgggtgccgcgcaggca

SEQ ID NO: 508888 - DNA, 75 bp, synthetic construct
  source 1..75: mol_type = other DNA
gcattacagaggagcaccgtctggtatacgcggttactgatgattcactgctcattgcagcatgtcgttatcatt

SEQ ID NO: 508889 - DNA, 75 bp, synthetic construct
  source 1..75: mol_type = other DNA
ggaaacagataagcgaattgttaaaaagatcaatgaacttatcaaagatacccgcagaacgccatttgaaggtaa

SEQ ID NO: 508890 - DNA, 75 bp, synthetic construct
  source 1..75: mol_type = other DNA
cctttcaaaccttcccgcataggtgaactggctactgtgaatccaggcaccgatcttacggttgttgatgccagt

SEQ ID NO: 508891 - DNA, 75 bp, synthetic construct
  source 1..75: mol_type = other DNA
tcccgtattagcggatcgtaaaccgttatggcaatacgctgaaaaactcgatgacacctattgtgctggctgcca

SEQ ID NO: 508892 - DNA, 75 bp, synthetic construct
  source 1..75: mol_type = other DNA
gcagggaatacgaaaataccgctactgattaacggtagcctgaatattcttaatattattattagcggcatattg

SEQ ID NO: 508893 - DNA, 75 bp, synthetic construct
  source 1..75: mol_type = other DNA
tggaagtgctgcgctacggcagccgcccgtatatttttaccgcctccccttctccttcctgcattgcgaccgtgc

SEQ ID NO: 508894 - DNA, 75 bp, synthetic construct
  source 1..75: mol_type = other DNA
gtgccggtgataatcggttcgaaagaggaagggttacgtatctggcgcgagcttatctcgctgggcgtttatgtg

SEQ ID NO: 508895 - DNA, 75 bp, synthetic construct
  source 1..75: mol_type = other DNA
gtcttgctggcgagcgactgcaatttagtgataacggtttaacaccgtttggcacctgtattgatgaagtgtatt

SEQ ID NO: 508896 - DNA, 75 bp, synthetic construct
  source 1..75: mol_type = other DNA
tacaggagtgggttaagcagaaaaaggggctgaacggcaagagtgcaaacagcgggagggtagtcttcctggcaa

SEQ ID NO: 508897 - DNA, 75 bp, synthetic construct
  source 1..75: mol_type = other DNA
atggttacgttttggggaaattatgaggggatctctcagagttatgcgccgcacctggcgttagagaaagagatt

SEQ ID NO: 508898 - DNA, 75 bp, synthetic construct
  source 1..75: mol_type = other DNA
ataacgaggccatcgccgaaggtcaggctgcgttagcggcacaaggcaccggcaccaccggttctcgaatggcta

SEQ ID NO: 508899 - DNA, 75 bp, synthetic construct
  source 1..75: mol_type = other DNA
atgacaagccgcagccgccaggctgcctactcggaaactcatcgccaggaaatggccgaaacagtatggaaagaa

SEQ ID NO: 508900 - DNA, 75 bp, synthetic construct
  source 1..75: mol_type = other DNA
cgcctttatcaccgaattacagcagtccctgacgaaaacattccgcgccaaaggcgatctgtttgtttttgtgga

SEQ ID NO: 508901 - DNA, 75 bp, synthetic construct
  source 1..75: mol_type = other DNA
gaaaccggtgaaggcttaacggaaaagctctttaagtacgatatttaccgcaagatgcttgcggattacttcgag

SEQ ID NO: 508902 - DNA, 75 bp, synthetic construct
  source 1..75: mol_type = other DNA
gaaacagaaatggggcaccatgcaaaaggtgctgtccagtaaatcgcgtttgcagcaaattgtgaacgatatctt

SEQ ID NO: 508903 - DNA, 75 bp, synthetic construct
  source 1..75: mol_type = other DNA
atgctggacgtcgccggtcagcgtcacgtcacctgggcacgactgcgtggtctgagcgacaaacagaccgaacgc

SEQ ID NO: 508904 - DNA, 75 bp, synthetic construct
  source 1..75: mol_type = other DNA
gcatgacacaaaaacgtgttatccagttattcaccgatcatctcggttatcactatcttggtaactggcacaaaa

SEQ ID NO: 508905 - DNA, 75 bp, synthetic construct
  source 1..75: mol_type = other DNA
cgatgccgccagcatcaaaggcgaagaaacgggcgaagggttaacggagaaactctctaaacacgccacctatcg

SEQ ID NO: 508906 - DNA, 75 bp, synthetic construct
  source 1..75: mol_type = other DNA
aaaacggcgaaaactacctgcggattaattttggcacccagcgctactggctggagcagtccattaaccgaatgc

SEQ ID NO: 508907 - DNA, 75 bp, synthetic construct
  source 1..75: mol_type = other DNA
caccgtacgaatacgtcacgttctgccatacctgccgtcgttttgatttatacgaaacagaagtggagatgaagg

SEQ ID NO: 508908 - DNA, 75 bp, synthetic construct
  source 1..75: mol_type = other DNA
gcgagttacgcccggaaccggcggatgagattgccaaagtgttacttaataacacgaatgaggtgtttaacatgc

SEQ ID NO: 508909 - DNA, 75 bp, synthetic construct
  source 1..75: mol_type = other DNA
catgggagccggaagaaatatcagtcttcaatataatcgctctgttttcaggctatcctgaagaggatggaaaac

SEQ ID NO: 508910 - DNA, 75 bp, synthetic construct
  source 1..75: mol_type = other DNA
ggaatggggatcgtcacgtcggcacttctggctatggttgcccattttattacccgctctgccactggtggcggg

SEQ ID NO: 508911 - DNA, 75 bp, synthetic construct
  source 1..75: mol_type = other DNA
atctgtacgatgcggagcagccgtacacgccggtggcggccatcacgggcgcggagggagtcaaaaaatctggta

SEQ ID NO: 508912 - DNA, 75 bp, synthetic construct
  source 1..75: mol_type = other DNA
cgaacaactgaaactggcgaaacgctacgatctcccggtaatccttcattcacggcgcacgcatgacaagctggc

SEQ ID NO: 508913 - DNA, 75 bp, synthetic construct
  source 1..75: mol_type = other DNA
cacccaggatccacaggttaaacacgtcgttgtgattctgatttggctaaatgctttatttatgcctatttggtc

SEQ ID NO: 508914 - DNA, 75 bp, synthetic construct
  source 1..75: mol_type = other DNA
ctggcggcaaaaccggccataatcgccttgcaaatcatacgcggcaatgaaagcctctacctactaatgcgttaa

SEQ ID NO: 508915 - DNA, 75 bp, synthetic construct
  source 1..75: mol_type = other DNA
actgttaaaccttaacggtgaattaattggcatcaacaccgcaatccttgccccgggcggcggtagcgtaggaat

SEQ ID NO: 508916 - DNA, 75 bp, synthetic construct
  source 1..75: mol_type = other DNA
aagcagcaacgtatggtggaaggagaaatgctgtttattccggcgcgcgcggctaatttaccggtcaacaacaaa

SEQ ID NO: 508917 - DNA, 75 bp, synthetic construct
  source 1..75: mol_type = other DNA
cccagcctgcaacgtggcgaaggtgaagcgatgcttactgccctcacccatctcagccgttcgccgctggagcag

SEQ ID NO: 508918 - DNA, 75 bp, synthetic construct
  source 1..75: mol_type = other DNA
cagccgcgcagcgattttctctatcacagcatttgtaactgggttcaggataattatgcccagccgctcacccgc

SEQ ID NO: 508919 - DNA, 75 bp, synthetic construct
  source 1..75: mol_type = other DNA
tgactggtcaacccttaaaggtgggcgcaaaaaaataggcaatgataattatgtctatatgttgtggcgttacaa

SEQ ID NO: 508920 - DNA, 75 bp, synthetic construct
  source 1..75: mol_type = other DNA
agctcacttataactcagcgtctactgacaaagttacataggcagggaatgcttatgagaacaatgggagctgac

SEQ ID NO: 508921 - DNA, 75 bp, synthetic construct
  source 1..75: mol_type = other DNA
acagtttttgggcgtctataatacgtggagatctatcagagctttcacagcctacagatgatgaatcgcttctga

SEQ ID NO: 508922 - DNA, 75 bp, synthetic construct
  source 1..75: mol_type = other DNA
cgggttgaatcttgaaggtctggaaaactttatccagacagatgcttccattaaccgcggtaactccggcggtgc

SEQ ID NO: 508923 - DNA, 75 bp, synthetic construct
  source 1..75: mol_type = other DNA
tcaggaaaaaatcgcaattattcaacagactatggagcctggcatgaccgtgtcccacgtggcgcgtttgcatgg

SEQ ID NO: 508924 - DNA, 75 bp, synthetic construct
  source 1..75: mol_type = other DNA
agcaggaaaggataatctcgctgcatacttttgtgccggatgcgatggcaacctttatccattaaccggccacat

SEQ ID NO: 508925 - DNA, 75 bp, synthetic construct
  source 1..75: mol_type = other DNA
agcacaatgaccctgaatctgatctccggccttgaccgatacgaacgagtgagtgtgaccagggacagtgacaaa

SEQ ID NO: 508926 - DNA, 75 bp, synthetic construct
  source 1..75: mol_type = other DNA
cacaacgtagaagtcgccaatctggtgctgattgttctctccatcgtcgtcaccatcatcttctttcgtcaggca

SEQ ID NO: 508927 - DNA, 75 bp, synthetic construct
  source 1..75: mol_type = other DNA
gtaagattggtctggtcacgctgggcgttgcagtagtgatgctgatgatggtgccctggctgaaacgaatgattg

SEQ ID NO: 508928 - DNA, 75 bp, synthetic construct
  source 1..75: mol_type = other DNA
gtaagattggcctggttacgctgggcgttgcggtggtgatgctgctgatggtgccgtggctgaaacgaatgattg

SEQ ID NO: 508929 - DNA, 75 bp, synthetic construct
  source 1..75: mol_type = other DNA
tgtatgctgccttagggttgcatccggggatgttggaaaaacattgcgatgcgtcgctggagcagttacagcagg

SEQ ID NO: 508930 - DNA, 75 bp, synthetic construct
  source 1..75: mol_type = other DNA
cgcgccgtactcatgacaaactggcgatgcaccttaaacgccacgatttgccacgcactggcgtagtccacggtt

SEQ ID NO: 508931 - DNA, 75 bp, synthetic construct
  source 1..75: mol_type = other DNA
gcgttagcggaaaaatatcaaccgctgtatggcgcgttagggttgcatccggggatgttagaaaaacatagcgat

SEQ ID NO: 508932 - DNA, 75 bp, synthetic construct
  source 1..75: mol_type = other DNA
taagaccatctccgttagtaccgcgctgaaaacgtccgatgacacaccgctggcggttctttatgccagccagct

SEQ ID NO: 508933 - DNA, 75 bp, synthetic construct
  source 1..75: mol_type = other DNA
ataccctgaccaagccctctttaacgcgaatgacgcttcgcggtggcccggtatctgatgctgttgagttgtcgt

SEQ ID NO: 508934 - DNA, 75 bp, synthetic construct
  source 1..75: mol_type = other DNA
ctatgtgtacgtcgaggtgaagcttccccagggcgctctggatataaactactatcgcccagtgaacacgtacca

SEQ ID NO: 508935 - DNA, 75 bp, synthetic construct
  source 1..75: mol_type = other DNA
acgtagaaatcgccaacctggtactgattattctctccattgtggtgacgattatcttcttccgtcaggcattca

SEQ ID NO: 508936 - DNA, 75 bp, synthetic construct
  source 1..75: mol_type = other DNA
cattctgcgactgaaagatctggattttgaagtaccggtcagccgtagcaaagtaaaagaattcaggcagttaat

SEQ ID NO: 508937 - DNA, 75 bp, synthetic construct
  source 1..75: mol_type = other DNA
atcatttcatcgttgatacaactcctccacgctataagagtatttatccgagtcaaaacgcaggttacgacatgg

SEQ ID NO: 508938 - DNA, 75 bp, synthetic construct
  source 1..75: mol_type = other DNA
atgatgttcaacaacaacaactggaagctgtcagtcaccgacatcaacctttatgaaaacactgtgagtctggac

SEQ ID NO: 508939 - DNA, 75 bp, synthetic construct
  source 1..75: mol_type = other DNA
aacaggtcaaagctgaacgccggacctacggtgagaaccttcgtagtgctacccattccgctggtcgctcccgtg

SEQ ID NO: 508940 - DNA, 75 bp, synthetic construct
  source 1..75: mol_type = other DNA
tggcaacttcttcagtaatgacctgatgaccgcctatggtcgccgccagcagaacaagcgagccgaagctgagcg

SEQ ID NO: 508941 - DNA, 75 bp, synthetic construct
  source 1..75: mol_type = other DNA
acctccgcagtgctacccattccgctggtcgctcacgtgcatcaattatggctgacctcgatagtggcgctaact

SEQ ID NO: 508942 - DNA, 75 bp, synthetic construct
  source 1..75: mol_type = other DNA
atgttattcaataaccaagactggaaactgtcagtcaccgacatcaatctctacgagaatactgtgagtctggac

SEQ ID NO: 508943 - DNA, 75 bp, synthetic construct
  source 1..75: mol_type = other DNA
agactggaaactgtcagtcaccgacatcaatctctacgagaatactgtgagtctggacggtcagttctatccgct

SEQ ID NO: 508944 - DNA, 75 bp, synthetic construct
  source 1..75: mol_type = other DNA
acgggtatgcgaattttctccgtattcaaaaggccaggggggaacaggccagggatgatagcgcggcctctgcat

SEQ ID NO: 508945 - DNA, 75 bp, synthetic construct
  source 1..75: mol_type = other DNA
ttttgaatttgcacagtcgcagtttgaacataataaagacgttgatcagcgtgactttgattacaaagccaaagt

SEQ ID NO: 508946 - DNA, 75 bp, synthetic construct
  source 1..75: mol_type = other DNA
aacaacagaaaaataacgagcgcgattttgaatttgcacagtcgcagtttgaacataataaagacgttgatcagc

SEQ ID NO: 508947 - DNA, 75 bp, synthetic construct
  source 1..75: mol_type = other DNA
attatcgaaatgcgtcactgggtatggagcagcagcgactccagttgcagaaatacaaccagcgacggcttgagt

SEQ ID NO: 508948 - DNA, 75 bp, synthetic construct
  source 1..75: mol_type = other DNA
gtacatatgatcttaatgtcaggaatgccgaccgtgaatatgcgctgaaagagagggaacacaaagcagcgcaga

SEQ ID NO: 508949 - DNA, 75 bp, synthetic construct
  source 1..75: mol_type = other DNA
gactttgccactcaggcggaatccatccgcaaactcaccgaaaaatacaacgtcgaatacatcggtattgatgcc

SEQ ID NO: 508950 - DNA, 75 bp, synthetic construct
  source 1..75: mol_type = other DNA
agctcaccaccgccgcacgttactgccagctcatcatgaaggagcagaaagaagggaaagacttcaaggaaattg

SEQ ID NO: 508951 - DNA, 75 bp, synthetic construct
  source 1..75: mol_type = other DNA
aaacctcgcctgggggatttccgtcgccagcttattggacaggtaaaagagacgttgcaaaaaagcaaaaaaaca

SEQ ID NO: 508952 - DNA, 75 bp, synthetic construct
  source 1..75: mol_type = other DNA
gtggatcacttttcatccgtcgttgacaataacgagcgcgattttgaatttgcgcagtctcagtttgaacataat

SEQ ID NO: 508953 - DNA, 75 bp, synthetic construct
  source 1..75: mol_type = other DNA
aaccgcatcaacagaaaattcagcaacagaaaacccaacagcttttacagaagtggcagacgtgggcggcgggcg

SEQ ID NO: 508954 - DNA, 75 bp, synthetic construct
  source 1..75: mol_type = other DNA
tgattcgtccgggtacctatgccgcgtcgctgccgctacgtccggtgatggtgtttatacccgatcagaaacgac

SEQ ID NO: 508955 - DNA, 75 bp, synthetic construct
  source 1..75: mol_type = other DNA
taagatcttcaaaattcctgtaaataaatggaccattcccacagcggccctgggtggcatatttattgtcagcgg

SEQ ID NO: 508956 - DNA, 75 bp, synthetic construct
  source 1..75: mol_type = other DNA
gcagtgaagagggggatgctcggcgcgaaaaactggcggcactcattacgcgttttcgtgccggagtgcagggtt

SEQ ID NO: 508957 - DNA, 75 bp, synthetic construct
  source 1..75: mol_type = other DNA
agaaatacaaccagcgacggcttgagtataacgatatgctggcgcgcgatcagcctgtgatggctgcgcttggaa

SEQ ID NO: 508958 - DNA, 75 bp, synthetic construct
  source 1..75: mol_type = other DNA
ggcgcgaaaggttatgtcattaattccgcaggcggaaatgaccagatgttcggtactgcaaccatctacaaataa

SEQ ID NO: 508959 - DNA, 75 bp, synthetic construct
  source 1..75: mol_type = other DNA
atgagcggatttgcacagggcttacttgccggattcagcacggttgaccaggcaatgacccgtcgtaaggagctt

SEQ ID NO: 508960 - DNA, 75 bp, synthetic construct
  source 1..75: mol_type = other DNA
gtcagagggtaatccgctgaggctgatggcgaatgatggctatgcagcgaaagcgggtcaggccgtgaacaacct

SEQ ID NO: 508961 - DNA, 75 bp, synthetic construct
  source 1..75: mol_type = other DNA
aagtggcagacgtgggcggcgggcgatccggttaaacaggagtttgtaaaagaggctgccgccaatgcgcctgct

SEQ ID NO: 508962 - DNA, 75 bp, synthetic construct
  source 1..75: mol_type = other DNA
ttgccggattcagcacggttgaccaggcaatgacccgtcgtaaggaacttggtttgcgagaagcacagcttgctc

SEQ ID NO: 508963 - DNA, 75 bp, synthetic construct
  source 1..75: mol_type = other DNA
gggtcagtggttaagcgccgaaactatacagacgcaaacctatgaattatgcgatggcgtcgccggcggctatga

SEQ ID NO: 508964 - DNA, 75 bp, synthetic construct
  source 1..75: mol_type = other DNA
gttctccgcgtcgtcaggagttgcttgcgcagcttggcgtcacctttgaacgtattgttacgggtattgaggagc

SEQ ID NO: 508965 - DNA, 75 bp, synthetic construct
  source 1..75: mol_type = other DNA
ttcagaacgttaacagatgaagacatcgcgggctatgtcgccagcggtgaaccgttagataaagcaggtgcatac

SEQ ID NO: 508966 - DNA, 75 bp, synthetic construct
  source 1..75: mol_type = other DNA
cgtattgttacgggcattgaggagcagcgtcagccgcaggagagcgcgcagcagtatgttgtgcgtctggcgcgc

SEQ ID NO: 508967 - DNA, 75 bp, synthetic construct
  source 1..75: mol_type = other DNA
ggaaaagggtctttcacttattgaagcatcgatggttctggctttgtctgcaatagttgtgtctggcgttatgtt

SEQ ID NO: 508968 - DNA, 75 bp, synthetic construct
  source 1..75: mol_type = other DNA
gcgacgcagaacatgcggcgcagatgttacgcaaattatcgggacagacccatcaggtaatgacagcagtggcgc

SEQ ID NO: 508969 - DNA, 75 bp, synthetic construct
  source 1..75: mol_type = other DNA
gggggcggatactatcgtgatcctgaacggagaagtgttagagaaaccgcgcgacgcagaacatgcggcgcagat

SEQ ID NO: 508970 - DNA, 75 bp, synthetic construct
  source 1..75: mol_type = other DNA
acaagtgttctgctgcaaaaagtgttctggtaaagcgtgggatttttattcagagcgggcggaataccggcatta

SEQ ID NO: 508971 - DNA, 75 bp, synthetic construct
  source 1..75: mol_type = other DNA
atggcaaacactgctgagatattcaattttccagtgccggatgaggcacaaaaggagcagcgcgtggcagatctc

SEQ ID NO: 508972 - DNA, 75 bp, synthetic construct
  source 1..75: mol_type = other DNA
cgaagataaactcagtgacgatgtgtttatcgagtcggtgttcagtaaggcttatgagcttctgcctgtgccggt

SEQ ID NO: 508973 - DNA, 75 bp, synthetic construct
  source 1..75: mol_type = other DNA
gatagtcctgaagcgggaatggtgcctgagttaccttcagtcgcaaaaagcgccgattctggtgaaactgcaact

SEQ ID NO: 508974 - DNA, 75 bp, synthetic construct
  source 1..75: mol_type = other DNA
aatatacagtacgtgtaagtgagccaaacccaggcttggctaatctactcttagaacaattcggtgggccacagg

SEQ ID NO: 508975 - DNA, 75 bp, synthetic construct
  source 1..75: mol_type = other DNA
aagattaagaatccatttggaggaatattacatgtagcttcaaacaatggaggaggttatgctcttctccttgac

SEQ ID NO: 508976 - DNA, 75 bp, synthetic construct
  source 1..75: mol_type = other DNA
tgttcagatgatggaagaacgcgccgcgccgatgcgtgcaaaagtatgccctgtggatgttgactccgacccagg

SEQ ID NO: 508977 - DNA, 75 bp, synthetic construct
  source 1..75: mol_type = other DNA
caacaaatgaggcgttgcagccgttttttaacagcgatgaactgttttgccgtattggtgggattgactcgctgg

SEQ ID NO: 508978 - DNA, 75 bp, synthetic construct
  source 1..75: mol_type = other DNA
catggcgcatttcaaaataccaaaactgcaatcgctaaaattacctgagtacatggactttgttgcttcccgtcc

SEQ ID NO: 508979 - DNA, 75 bp, synthetic construct
  source 1..75: mol_type = other DNA
gtactcacctgccttgcggatatcagtaccgcgttgagtcgcctggcaggtaaagaacctatgctgacccgctcg

SEQ ID NO: 508980 - DNA, 75 bp, synthetic construct
  source 1..75: mol_type = other DNA
attcaaagtggatcaggaggtcagaaagctggtggaggctggccgtaaatttattatggagccggtgccgcgtga

SEQ ID NO: 508981 - DNA, 75 bp, synthetic construct
  source 1..75: mol_type = other DNA
gatcccggcgtctcagatcgaccgcctggcaactctgccgacctacgaagaagcaattgcacgcctgttggcaac

SEQ ID NO: 508982 - DNA, 75 bp, synthetic construct
  source 1..75: mol_type = other DNA
cgtgaaaaaagcacctatttctccatcagatgctgcaggtatgtgtaatggcgctactaataaagtagtggctta

SEQ ID NO: 508983 - DNA, 75 bp, synthetic construct
  source 1..75: mol_type = other DNA
aatctcccaaaatcagcttgtattagccttgcaactttaaatttaggtacatcagctgccggatatggtgttatg

SEQ ID NO: 508984 - DNA, 75 bp, synthetic construct
  source 1..75: mol_type = other DNA
cgatagcagcgggaaaaagaccgctattactccatcagatgctgcaggtcgctgtcaagatggcaatgaaaacaa

SEQ ID NO: 508985 - DNA, 75 bp, synthetic construct
  source 1..75: mol_type = other DNA
ctggcggtgtttgtggtggcgatccgcctgcgtcatgatattcacgcctcgttgccgattcttatcgttggtacg

SEQ ID NO: 508986 - DNA, 75 bp, synthetic construct
  source 1..75: mol_type = other DNA
taaagtgaaagatccggcggtcattatgccgcgagcatttttgctggcgataggcgttaccacactgctctatat

SEQ ID NO: 508987 - DNA, 75 bp, synthetic construct
  source 1..75: mol_type = other DNA
ggctctatcgttactgtacctgatgacgctggcggtgagtatcgcgatggtggctcgtgcctttggcgcttatgc

SEQ ID NO: 508988 - DNA, 75 bp, synthetic construct
  source 1..75: mol_type = other DNA
aataaagggaaaaaatatcatctgttcttggatgaggtgagaaggaatctgagagttatttactctgcgtatcgt

SEQ ID NO: 508989 - DNA, 75 bp, synthetic construct
  source 1..75: mol_type = other DNA
accgatgctcgaaaaggtgatgccttcagtggtcagcattaacgtagaaggtagcacaaccgttaatacgccgcg

SEQ ID NO: 508990 - DNA, 75 bp, synthetic construct
  source 1..75: mol_type = other DNA
tgcatgttcagggggttcagcgggtggagctgattgagccaaagcaaaacattaccgtcagtgatgtgcagtcag

SEQ ID NO: 508991 - DNA, 75 bp, synthetic construct
  source 1..75: mol_type = other DNA
tagtaggggttattttctcttgttctgcgttggctcagacagaggaacaggcgcaaaaggaactgaaacgttatc

SEQ ID NO: 508992 - DNA, 75 bp, synthetic construct
  source 1..75: mol_type = other DNA
acacgtgtgcattgtcactctctccggcaaaccttaactttcaacaggtcagctttagtcagtttgaaaatagtg

SEQ ID NO: 508993 - DNA, 75 bp, synthetic construct
  source 1..75: mol_type = other DNA
tgacctttgccgacagtgcgccgggtgtcagtgacgatcagctacaaaaattgtttgaacgtttttatcgcaccg

SEQ ID NO: 508994 - DNA, 75 bp, synthetic construct
  source 1..75: mol_type = other DNA
gtaatacgcagacaccggcagtgatggaatctgacacggattatcgtctgcgtattcagcaggcgtttgaaggtt

SEQ ID NO: 508995 - DNA, 75 bp, synthetic construct
  source 1..75: mol_type = other DNA
cgtattgcgtgaagataccattccgtttctggaggctctgaaagccagcggtaagcagcgaattttgctcaccaa

SEQ ID NO: 508996 - DNA, 75 bp, synthetic construct
  source 1..75: mol_type = other DNA
gaacccatacttcaggccgcacgggcacaactggaggcgtggctggcagagcagcgaagaattggtcgtgacgtg

SEQ ID NO: 508997 - DNA, 75 bp, synthetic construct
  source 1..75: mol_type = other DNA
tgccgacaccacagattattgaaacgccggattttgaagtcatcctggcggaagtgaaagaagacatcattacgt

SEQ ID NO: 508998 - DNA, 75 bp, synthetic construct
  source 1..75: mol_type = other DNA
ccggaccgtccggcgcgtatgagtattttgcccggagcgcaagcggtcttgtccgtgatgcgcgcgccatcagcc

SEQ ID NO: 508999 - DNA, 75 bp, synthetic construct
  source 1..75: mol_type = other DNA
cctatcccgccgaacagcgtgaagccgtttccgccgcgctggagctggaatcggaacccctgaacgttatcgccc

SEQ ID NO: 509000 - DNA, 75 bp, synthetic construct
  source 1..75: mol_type = other DNA
ggccgcgcattttgcgaaaaactggcgcagcaggcaggcatcgatcagtcacatccggcgctgcaacgctggtat

SEQ ID NO: 509001 - DNA, 75 bp, synthetic construct
  source 1..75: mol_type = other DNA
agcctgatcttcacctgtatggtaggcgtgatcaccacgcttcaggcctatgtcttaacgtggatgattccttaa

SEQ ID NO: 509002 - DNA, 75 bp, synthetic construct
  source 1..75: mol_type = other DNA
cgccgcactgcaagccaccgcggctcaacaaattggcgtctccgatctgttactggttgccgccaacaccaccgg

SEQ ID NO: 509003 - DNA, 75 bp, synthetic construct
  source 1..75: mol_type = other DNA
aggttgatatgacgctggctcacaccggttacacggcaggtcaggtgctgcgcgcctggacaccgttcctgttcc

SEQ ID NO: 509004 - DNA, 75 bp, synthetic construct
  source 1..75: mol_type = other DNA
ctgaagttgtcattgatagccttgtacaggaaaaaataatccctgtaaaaaaaagagaagcggcgattcaaacta

SEQ ID NO: 509005 - DNA, 75 bp, synthetic construct
  source 1..75: mol_type = other DNA
gacatcattcgctcgtctattctttcgataacccctgaccagcgcctgcaaatgctgatcgtcggtttctgtttc

SEQ ID NO: 509006 - DNA, 75 bp, synthetic construct
  source 1..75: mol_type = other DNA
taacttcattgggccggagctgccggacattatctcttcgctggtatcgctgctctgcctgacgctattcctcaa

SEQ ID NO: 509007 - DNA, 75 bp, synthetic construct
  source 1..75: mol_type = other DNA
atggtgaggtactacggttttttgagtccggcgaaacggcggttactggaagaagtggtgtacatcataacggag

SEQ ID NO: 509008 - DNA, 75 bp, synthetic construct
  source 1..75: mol_type = other DNA
ccacacatgtggcggtgtacttcggctcttacctgaaaaagccaccggtgccgatgagtcggctggagcattatg

SEQ ID NO: 509009 - DNA, 75 bp, synthetic construct
  source 1..75: mol_type = other DNA
aagtggtcagtttgtatgcgcatttggtccagccagttttagatgcccaggcgcggcgcgaaatcagccgttcgg

SEQ ID NO: 509010 - DNA, 75 bp, synthetic construct
  source 1..75: mol_type = other DNA
tttatgaccattatcgtcctgttctggatcatggcgattatggatggctggcgcggtatcaaagaaacctggcct

SEQ ID NO: 509011 - DNA, 75 bp, synthetic construct
  source 1..75: mol_type = other DNA
cgccgccctgcaagccactgcagcacaacaaattggcgtttctgacctgttgttggttgccgccaacaccaccgg

SEQ ID NO: 509012 - DNA, 75 bp, synthetic construct
  source 1..75: mol_type = other DNA
cgcagccttactggtcggcctgggctttaaaccactgtacgccgccgggctgtgcctgattgttaacaccgcacc

SEQ ID NO: 509013 - DNA, 75 bp, synthetic construct
  source 1..75: mol_type = other DNA
atgcctgccgttgacctttcccagttaccggaacccgccatcatagcggagcctgactttgaggcaattctggct

SEQ ID NO: 509014 - DNA, 75 bp, synthetic construct
  source 1..75: mol_type = other DNA
caaaaggaggcgttaaataaatttgcggattacgtcttatccctggctggcgttaatccgatcttatcaaagaac

SEQ ID NO: 509015 - DNA, 75 bp, synthetic construct
  source 1..75: mol_type = other DNA
cacctcgacctggataacggggtatggaccgtcccggcggcggtggcgaagacaagaagtgaaatcaggcgggga

SEQ ID NO: 509016 - DNA, 75 bp, synthetic construct
  source 1..75: mol_type = other DNA
gtgagtatattgccgatgatgtcagcacgaagcaatggatggatatatttggcgagatcactgcggcgggccacg

SEQ ID NO: 509017 - DNA, 75 bp, synthetic construct
  source 1..75: mol_type = other DNA
tcatctggtccagccggttttagatgcccaggcgcggcgcgaaatcagccgctctgccgctgaatcaacgttgat

SEQ ID NO: 509018 - DNA, 75 bp, synthetic construct
  source 1..75: mol_type = other DNA
aggggtaacggcaaatgcaaagaaaaacggaatgttttttctttgataagtaacttgtcatcaagtttcacagcg

SEQ ID NO: 509019 - DNA, 75 bp, synthetic construct
  source 1..75: mol_type = other DNA
tccaagcgagatagctgatcgtgatggcctgtcagccaggataagcccaaaagggaaaattactttccagtaccg

SEQ ID NO: 509020 - DNA, 75 bp, synthetic construct
  source 1..75: mol_type = other DNA
tgatggtgtttatacccgatcagaaacgacaaatcgtggcgcagttccgtcagaactccttgctgcgactggctc

SEQ ID NO: 509021 - DNA, 75 bp, synthetic construct
  source 1..75: mol_type = other DNA
tatttacgcccaggtggcggtctactctgatcatttcagccatgtctcggtgatgcgcaaagtgctattacgcat

SEQ ID NO: 509022 - DNA, 75 bp, synthetic construct
  source 1..75: mol_type = other DNA
attcagcggtaagctggcagccattagtccagccgttcccggcggagcttatcagtcgaccggcaccttacagac

SEQ ID NO: 509023 - DNA, 75 bp, synthetic construct
  source 1..75: mol_type = other DNA
tagtgattatagacaggaaatattttattgcgagcaatacattaaaatggttgaggatttttatattcaaaatgg

SEQ ID NO: 509024 - DNA, 75 bp, synthetic construct
  source 1..75: mol_type = other DNA
agcgtgagcgcaatggccgagtgtctccaatcatcgatctgaccgcgcaagagctcgctaccgtttttgacggtg

SEQ ID NO: 509025 - DNA, 75 bp, synthetic construct
  source 1..75: mol_type = other DNA
atgatgccaatcatggtcgaagtcgtggatgaatcacagccggtgatcggtggtgaagacttccattgggcaacg

SEQ ID NO: 509026 - DNA, 75 bp, synthetic construct
  source 1..75: mol_type = other DNA
atggattatcaaagcagtctgacctttctgaatctgcaaatcagcggcatcagagaggccattgaagggaaataa

SEQ ID NO: 509027 - DNA, 75 bp, synthetic construct
  source 1..75: mol_type = other DNA
tctctgcctgcggcgcatcgtgaaccgctggtcaccgtgtttcgttccatctctgaaaccatgtttaaagttacc

SEQ ID NO: 509028 - DNA, 75 bp, synthetic construct
  source 1..75: mol_type = other DNA
gcgcgaaaaccattatctacttcgaggtgatcaccaccgtcgccatcattttggggatcactctggcgaacgtct

SEQ ID NO: 509029 - DNA, 75 bp, synthetic construct
  source 1..75: mol_type = other DNA
tgagcgaaattatgatgctatcattgagtttggaagtggagtttcaactttattgatagctaaaggtcttatggc

SEQ ID NO: 509030 - DNA, 75 bp, synthetic construct
  source 1..75: mol_type = other DNA
ctgagtgttgctggcccgtcaggcgcatacgagtattttgcccgcagcgccagcggtctggtgcgtgatgcgcgg

SEQ ID NO: 509031 - DNA, 75 bp, synthetic construct
  source 1..75: mol_type = other DNA
gacccagctcatcatcaaaccgcagaaaaccggcggggacttcaaggaaattgacctgctgggacgccagattga

SEQ ID NO: 509032 - DNA, 75 bp, synthetic construct
  source 1..75: mol_type = other DNA
aaagggattgctggcgtgccgggcgtgtcgtttgtggtgttgctggcaacgctgggtagcgtaggtattccgctg

SEQ ID NO: 509033 - DNA, 75 bp, synthetic construct
  source 1..75: mol_type = other DNA
gcatccgttattacaacatggtcgtatgatgccctgggagcgggggcggagatggttctgtcgctgagcggtatg

SEQ ID NO: 509034 - DNA, 75 bp, synthetic construct
  source 1..75: mol_type = other DNA
caggcgcgagtcagttcgtcattaccacgatgctggcagccgggagtagtttgtgggtcgctgcgctgaccgtca

SEQ ID NO: 509035 - DNA, 75 bp, synthetic construct
  source 1..75: mol_type = other DNA
cgacagattgcttttctacggatggggatggatatcaatgcctggctggtttcccgctcactgtggaatgcggaa

SEQ ID NO: 509036 - DNA, 75 bp, synthetic construct
  source 1..75: mol_type = other DNA
ttcatacagataatgtatgcacgatgatgaaaaagatagaggaacagcaaaaggaaatatatactcaaattaata

SEQ ID NO: 509037 - DNA, 75 bp, synthetic construct
  source 1..75: mol_type = other DNA
aaccggaggaaacatggctggattgtttaagttcgatatatccaccgacaggcgtcatggtcattggtgctggaa

SEQ ID NO: 509038 - DNA, 75 bp, synthetic construct
  source 1..75: mol_type = other DNA
gcgcatccgttattacaacatggtcgtatgatgccctgggtgcgggggcggagatggttctgtcgctgagcggta

SEQ ID NO: 509039 - DNA, 75 bp, synthetic construct
  source 1..75: mol_type = other DNA
tgccgcgtttaagctggcccagttcacccaccgcaagatcggcagcattgggaaaaaagaggttaaaaaactcaa

SEQ ID NO: 509040 - DNA, 75 bp, synthetic construct
  source 1..75: mol_type = other DNA
ttgaaaacctgcaagccggacaacaggaaaaacgcgttgtcaaacttcaggatggtacccttctcaaccgctact

SEQ ID NO: 509041 - DNA, 75 bp, synthetic construct
  source 1..75: mol_type = other DNA
ccgctactgggacgatcgcgatacgccacgaccagagtcatgggtggaagatattgccaccgccaaaagcaatcc

SEQ ID NO: 509042 - DNA, 75 bp, synthetic construct
  source 1..75: mol_type = other DNA
ccgcgttgaagcaatacctgccgcaaatgcaaaaagaatatgcttactggatggacggtgttgaaaacctgcaag

SEQ ID NO: 509043 - DNA, 75 bp, synthetic construct
  source 1..75: mol_type = other DNA
ctttctttgcgttgatggtggagttactggcgcaacatgaaggcgacgccgcgttgaaacagtatctgccacaac

SEQ ID NO: 509044 - DNA, 75 bp, synthetic construct
  source 1..75: mol_type = other DNA
ttacagtgggtcgcgacagaaggattacaaaacaacgggcaaaaagaggtggcgaatatccattacaggatggct

SEQ ID NO: 509045 - DNA, 75 bp, synthetic construct
  source 1..75: mol_type = other DNA
ggtcgttttcgggaagtgtattactgggacagttacttcaccatgctggggcttggcgaaagcggtcactgggat

SEQ ID NO: 509046 - DNA, 75 bp, synthetic construct
  source 1..75: mol_type = other DNA
atccggacggaacgggaaacctgaacgatatggagcacctgaaacagtcagtcagggacatcctgaccaccccgc

SEQ ID NO: 509047 - DNA, 75 bp, synthetic construct
  source 1..75: mol_type = other DNA
cctggctggcgactcaggaaaacggcgagcaggttgagcatgaagagacgccgtatccgctggtcgatgatctgg

SEQ ID NO: 509048 - DNA, 75 bp, synthetic construct
  source 1..75: mol_type = other DNA
ccgtgcgcgcccggaaagccaggagttgaatatcctgcgcgggattctggcttctattgagcagcagaataaagg

SEQ ID NO: 509049 - DNA, 75 bp, synthetic construct
  source 1..75: mol_type = other DNA
accagagcggatttgatctgcgccatttcgttaacgtcaatttcaccctgccgaaagagggcgagaaatatgttc

SEQ ID NO: 509050 - DNA, 75 bp, synthetic construct
  source 1..75: mol_type = other DNA
ctacagcgcggcagtttgacggacagatggtcgtcgacgtgaccggccaaatcaccgataccggcgagagccttt

SEQ ID NO: 509051 - DNA, 75 bp, synthetic construct
  source 1..75: mol_type = other DNA
ccactgagcgcagttttgacgggcgaatgacagttacgttaaacggccagcacaacgacaccggccagcaacttt

SEQ ID NO: 509052 - DNA, 75 bp, synthetic construct
  source 1..75: mol_type = other DNA
gaaaaatacttgtggaacgatcaacacggctggtatgccgattacgatctgaagagtaataaagtacgtaatcag

SEQ ID NO: 509053 - DNA, 75 bp, synthetic construct
  source 1..75: mol_type = other DNA
tggtggcgcttacctctgcggaaatggccgctacggctattcaggagatgtgggttcgtggcgctccgcttattg

SEQ ID NO: 509054 - DNA, 75 bp, synthetic construct
  source 1..75: mol_type = other DNA
gtgaacaaattggattacatggtgcagaagtcatccgcgaaatagcccagaaaaaaccggccgggagtgtggtca

SEQ ID NO: 509055 - DNA, 75 bp, synthetic construct
  source 1..75: mol_type = other DNA
tccctctattaatggtctcaacaacattaatactttctgggtgtaaagaaaaagtttacgctgttgaatactatt

SEQ ID NO: 509056 - DNA, 75 bp, synthetic construct
  source 1..75: mol_type = other DNA
acccttgtggcgcaaactgtggctcaacgtgatgccgcaggatgaatctgacttaccgctacccaaaaaatttga

SEQ ID NO: 509057 - DNA, 75 bp, synthetic construct
  source 1..75: mol_type = other DNA
ttggccttgttctctttacagttgaatgcacccgcgggcggcaaaggctatcgcaccggtttacgcggcggtggg

SEQ ID NO: 509058 - DNA, 75 bp, synthetic construct
  source 1..75: mol_type = other DNA
gtgcggtggtaactgatgatcaggtcaacaaactccaggcgtactggggaatgcctcggcgcttacgtgttgatt

SEQ ID NO: 509059 - DNA, 75 bp, synthetic construct
  source 1..75: mol_type = other DNA
cgggacattctgctgacgccacagggtagccgcattgcccgtcgtgaatatggttctctgctgtcggcactgata

SEQ ID NO: 509060 - DNA, 75 bp, synthetic construct
  source 1..75: mol_type = other DNA
ttaaaagcaattttgacggttcaatggtggtggggctgaccgggcggcgtaataacggtgtgcctgtttcccttt

SEQ ID NO: 509061 - DNA, 75 bp, synthetic construct
  source 1..75: mol_type = other DNA
gtggcgaatatccattacaggatggctttggctggaccaacggcgtgacgctgaaaatgctggatttgatctgcc

SEQ ID NO: 509062 - DNA, 75 bp, synthetic construct
  source 1..75: mol_type = other DNA
aggatgcaaacacaagctggatggtcgaagactcatttccacgagcgttacgcgagtacaacgaaatggttgatg

SEQ ID NO: 509063 - DNA, 75 bp, synthetic construct
  source 1..75: mol_type = other DNA
tggttccctcctgtcggttttaatagatcagccacaaaatccggcattacacctgcaggtcatgtcggcagtgta

SEQ ID NO: 509064 - DNA, 75 bp, synthetic construct
  source 1..75: mol_type = other DNA
tggctccctgctgttggcgctaatagcccagccacaaaatccggcgttacgcctgcaggtcatgtcggcagtgta

SEQ ID NO: 509065 - DNA, 75 bp, synthetic construct
  source 1..75: mol_type = other DNA
cagaaatgccattatcatgtcgcgattgcggctaacccggaatacagttcgctgaacctggcgatggcggttcag

SEQ ID NO: 509066 - DNA, 75 bp, synthetic construct
  source 1..75: mol_type = other DNA
cattttgttataagcgtaaagcattgataactctaactaacttagtatcggttattcaagcgaagaaaatacttg

SEQ ID NO: 509067 - DNA, 75 bp, synthetic construct
  source 1..75: mol_type = other DNA
cgcgatttggctttgtaccgggaaatcgctccgaataacatcacctttgatggtagcgacaagatctatcgtatc

SEQ ID NO: 509068 - DNA, 75 bp, synthetic construct
  source 1..75: mol_type = other DNA
gtgctggagcaggtaagtcgggcgctggaagtgatggtggtgctggtcaccgcctgcggcatgttgctgttgctg

SEQ ID NO: 509069 - DNA, 75 bp, synthetic construct
  source 1..75: mol_type = other DNA
aaagttccgcccctgccagcggcattgtttatgaactgtttgtcgccggcaaaggcaaaacctttacagcgaaac

SEQ ID NO: 509070 - DNA, 75 bp, synthetic construct
  source 1..75: mol_type = other DNA
acactctgcaatgaaaggcgcttttagtcagctctatggttatacaagtgatcagggtggaatacgtcatgcgct

SEQ ID NO: 509071 - DNA, 75 bp, synthetic construct
  source 1..75: mol_type = other DNA
aacggaagaagatgtcaatcctaccttagctgaagctaaatttatgttagtcacatgcagtgcgtttagtaatta

SEQ ID NO: 509072 - DNA, 75 bp, synthetic construct
  source 1..75: mol_type = other DNA
atgcgagaaataacagaatcacagttaagatatatttccggggcgggaggtgcgccagcgacttcagctaatgcc

SEQ ID NO: 509073 - DNA, 75 bp, synthetic construct
  source 1..75: mol_type = other DNA
aaccgcgcgacatggaaagctattgtgaatggaagctgatagcaaaatacacggtcgattataaggggatttttt

SEQ ID NO: 509074 - DNA, 75 bp, synthetic construct
  source 1..75: mol_type = other DNA
aaccgcgcgacatgcttaattattgcgattggaacctgatagcgaaatacacggtcgattataaaggggttttct

SEQ ID NO: 509075 - DNA, 75 bp, synthetic construct
  source 1..75: mol_type = other DNA
cagcaccattgaagggcgtgttgtctggagcgagtccgcccgctggatgctgagcgagcgccgctaccgctatta

SEQ ID NO: 509076 - DNA, 75 bp, synthetic construct
  source 1..75: mol_type = other DNA
cagcggcaccattgaaggccgtgttgtctggagcgagtacgcccgatggatgctgagcgaacgccgctaccgcta

SEQ ID NO: 509077 - DNA, 75 bp, synthetic construct
  source 1..75: mol_type = other DNA
atgcaaccggaactgctggcgctgtgtttttccctgccagaacccatccctgagctgacacctgctcaactgccg

SEQ ID NO: 509078 - DNA, 75 bp, synthetic construct
  source 1..75: mol_type = other DNA
aggaaacatacgctgtggtacctggaaggccagctcagtattagacggaatatacggtggagtatgtaaaaaggc

SEQ ID NO: 509079 - DNA, 75 bp, synthetic construct
  source 1..75: mol_type = other DNA
tggcgctggtgtttggtcgtgagcgcgtcggcttgaccaatgaagagttgcagaagtgtcattatcatgtcgcga

SEQ ID NO: 509080 - DNA, 75 bp, synthetic construct
  source 1..75: mol_type = other DNA
tcggtcaactcagtggcagcaggttggataaatgcgataaccatggggcagggctggaaagggacaatagcctag

SEQ ID NO: 509081 - DNA, 75 bp, synthetic construct
  source 1..75: mol_type = other DNA
gccgtggttgttgatctgttctcacgcaaaattatcggctggtccatgcaatcccggatgacaaaagacattgtc

SEQ ID NO: 509082 - DNA, 75 bp, synthetic construct
  source 1..75: mol_type = other DNA
gcgggggccagcgatgtgattggtaatgctcacatcgtcgatacgctcgacgaagcgttagccggttgtagcctg

SEQ ID NO: 509083 - DNA, 75 bp, synthetic construct
  source 1..75: mol_type = other DNA
gttatcgcctatgaagtgcgtatggcctggctggcgacccaggaaaacggcgagcaggttgagcatgcagagacg

SEQ ID NO: 509084 - DNA, 75 bp, synthetic construct
  source 1..75: mol_type = other DNA
cgttggcttgaccaatgaagagttgcaaaagtgccattatcatgtcgccattgccgctaacccggaatacagttc

SEQ ID NO: 509085 - DNA, 75 bp, synthetic construct
  source 1..75: mol_type = other DNA
tgccatgataatgcggttgcagaaagttttttccagttgttgaaacgcgaacggataaagaaaaagatctacgga

SEQ ID NO: 509086 - DNA, 75 bp, synthetic construct
  source 1..75: mol_type = other DNA
tcctgaacgcactgctgatggctgtatggcggcgtaatcccgaaaaaaaggtgctggttcattcggatcagggca

SEQ ID NO: 509087 - DNA, 75 bp, synthetic construct
  source 1..75: mol_type = other DNA
aaatgacccaataattggtatagaagcctatcccggtaccgcggagatccatgcaaaaatgggatataacgttat

SEQ ID NO: 509088 - DNA, 75 bp, synthetic construct
  source 1..75: mol_type = other DNA
actgccatgataatgcggttgtagaaagttttttccagttgttgaaacgtgaacggataaagaaaaagatctacg

SEQ ID NO: 509089 - DNA, 75 bp, synthetic construct
  source 1..75: mol_type = other DNA
gcaaaattatcggctggtccatgcaatcccggatgacaaaagacattgtcctgaacgcacagctgatggctgtat

SEQ ID NO: 509090 - DNA, 75 bp, synthetic construct
  source 1..75: mol_type = other DNA
gacccacgaaggctggctgtatcttgccgttgttgttgatctgttctcacgcaaaattatcggctggtccatgca

SEQ ID NO: 509091 - DNA, 75 bp, synthetic construct
  source 1..75: mol_type = other DNA
gaaacggaagaactggcacgaattgcactggcatcactggaacgcgaactgattcgccacgagcatgccaaatgg

SEQ ID NO: 509092 - DNA, 75 bp, synthetic construct
  source 1..75: mol_type = other DNA
aactagttttcctttactggttacgtgtgagatcggcgttatatcagcttattacggctttgtgagcgttaatgg

SEQ ID NO: 509093 - DNA, 75 bp, synthetic construct
  source 1..75: mol_type = other DNA
ttcacagcgccgtgctggcatcagcgatgctgaaattaccgctgctatggaagataaattgaagatcaacatgga

SEQ ID NO: 509094 - DNA, 75 bp, synthetic construct
  source 1..75: mol_type = other DNA
ctggcgatcctcgcggatcggtcgacgatcaacaacgaagccttgtttaatagtctggagatggggctggtcgcg

SEQ ID NO: 509095 - DNA, 75 bp, synthetic construct
  source 1..75: mol_type = other DNA
gcctacgttttgctgagctatctgctatggcgcagctggcggcgcactattccccgcgtagatggcgttcgcaag

SEQ ID NO: 509096 - DNA, 75 bp, synthetic construct
  source 1..75: mol_type = other DNA
gccgtggctacttgccatcccacacgtcgcatttgccgccagcgtcctgctactgtttgcggaaggcggtctggt

SEQ ID NO: 509097 - DNA, 75 bp, synthetic construct
  source 1..75: mol_type = other DNA
ggcgcaactgacaaattcgctcctgctggttttgcgccaattgccattggtctggccttaaccctgattcactta

SEQ ID NO: 509098 - DNA, 75 bp, synthetic construct
  source 1..75: mol_type = other DNA
tggaacgcgaacagattcgccacgagcatgccaaatggtctgactccacatttggctgcgttgcccccattggtc

SEQ ID NO: 509099 - DNA, 75 bp, synthetic construct
  source 1..75: mol_type = other DNA
ttaatcgaaggcatggaggtttcccttgatgtaagcacttgtgatgcggatttaggtaatcgctatttcggtacc

SEQ ID NO: 509100 - DNA, 75 bp, synthetic construct
  source 1..75: mol_type = other DNA
aacctgacgatctcagcgagtgggctgatatgcagttcctgttgtgggatgcacagcgccgtgctggtatcagtg

SEQ ID NO: 509101 - DNA, 75 bp, synthetic construct
  source 1..75: mol_type = other DNA
ttgaattgttcattaaaaatccgcttgaaaacggacttacccgtggcgaacaaatggaactggcacgaattgctc

SEQ ID NO: 509102 - DNA, 75 bp, synthetic construct
  source 1..75: mol_type = other DNA
ggtctggcattaacgctgattcacttaatcagtattccggtgactaacacttccgttaacccggcgcgcagtact

SEQ ID NO: 509103 - DNA, 75 bp, synthetic construct
  source 1..75: mol_type = other DNA
ctttgctcctgttactgctgtggctggaatgggggccacagcgtcgccagttgtggctatggttgcccattttat

SEQ ID NO: 509104 - DNA, 75 bp, synthetic construct
  source 1..75: mol_type = other DNA
tgattacaaaaaatatagagctttcacgtatttatcaggaaatatcttggatgacgtaactcactggatgccgct

SEQ ID NO: 509105 - DNA, 75 bp, synthetic construct
  source 1..75: mol_type = other DNA
aagaacccggcaactctccggtaattccggatggtttatccacggtatgcgctgaggcttatcaggttgtaggag

SEQ ID NO: 509106 - DNA, 75 bp, synthetic construct
  source 1..75: mol_type = other DNA
gataacctgtcacagcaaaaacttgttcacagagatgtgctgccgttctcgcttccggcaactccggatggttgg

SEQ ID NO: 509107 - DNA, 75 bp, synthetic construct
  source 1..75: mol_type = other DNA
caccacgagcatgccaaatggtctgactccacatttggctgcgttggccccattggtccactgaaacacctctca

SEQ ID NO: 509108 - DNA, 75 bp, synthetic construct
  source 1..75: mol_type = other DNA
gaacctgacgatctcagcgagtgggctgatatgcagttcctgttgtgggatgcacagcgccgtgctggtatcagt

SEQ ID NO: 509109 - DNA, 75 bp, synthetic construct
  source 1..75: mol_type = other DNA
cgttctttatgcgcaatatcgagacggagagtttttcgatattgtccgcaatggtgatgaatttttcgaaacaca

SEQ ID NO: 509110 - DNA, 75 bp, synthetic construct
  source 1..75: mol_type = other DNA
tcctcttgcggtaaagacactctctatttctctctgcgctatttgcccgtcgcgcacggcattctcgagtattaa

SEQ ID NO: 509111 - DNA, 75 bp, synthetic construct
  source 1..75: mol_type = other DNA
aaccggtgtgctctgtgtggttctgctggcgatcctcgcagatcagtcgactaacaatcacgtggcgctgctcaa

SEQ ID NO: 509112 - DNA, 75 bp, synthetic construct
  source 1..75: mol_type = other DNA
ggattcactgggctacagccgctggcaatgcctgaactggctgctgttgccctccgccgctcctgcgctggcaat

SEQ ID NO: 509113 - DNA, 75 bp, synthetic construct
  source 1..75: mol_type = other DNA
aactggcacgaattgcgctggcatcactggaacgcgaacagattcgccacgagcatgccaaatggtctgactcca

SEQ ID NO: 509114 - DNA, 75 bp, synthetic construct
  source 1..75: mol_type = other DNA
caaatggaactggcacgaattgcactggcatcactggaacgcgaacagattcgccacgagcatgccaaatggtct

SEQ ID NO: 509115 - DNA, 75 bp, synthetic construct
  source 1..75: mol_type = other DNA
atgcagtttctgttgtgggatgcacagcgccgtgctggtatcagtgatgctgaaattaccgctgcaatggaaaat

SEQ ID NO: 509116 - DNA, 75 bp, synthetic construct
  source 1..75: mol_type = other DNA
tatctgcaagccagcgcagattgccaaactgcctcacccgccagcggcattgtttatgagttgtttgtcgcgggc

SEQ ID NO: 509117 - DNA, 75 bp, synthetic construct
  source 1..75: mol_type = other DNA
atgggttcttatgatttgagtgtttttctgaaagagttcggggcaacggttaatttagcgttgcctgacattgtg

SEQ ID NO: 509118 - DNA, 75 bp, synthetic construct
  source 1..75: mol_type = other DNA
ggttttctgcgcgcagactggggtactgacgggctgtgaggtgcttgtccgctgggaacatccacaaacgggaat

SEQ ID NO: 509119 - DNA, 75 bp, synthetic construct
  source 1..75: mol_type = other DNA
ctatcaccatatcgtcacgcctgaagccatcagtctggcgttggaaaaccacgaattcaaaccgtggatccaacc

SEQ ID NO: 509120 - DNA, 75 bp, synthetic construct
  source 1..75: mol_type = other DNA
gaaatgtatttcagaggtgtcctttattcgtcagtaccggattgagtgtgtcttgctagggtttataatctattt

SEQ ID NO: 509121 - DNA, 75 bp, synthetic construct
  source 1..75: mol_type = other DNA
ctgatgaaacagactgcggatattctgatgccggtaaaacatttgctgccggataatttccatattggcatcaac

SEQ ID NO: 509122 - DNA, 75 bp, synthetic construct
  source 1..75: mol_type = other DNA
agcttacaccgacataacattacttttgccctggacgattttggtaccggttatgcgacctatcgctacttgcaa

SEQ ID NO: 509123 - DNA, 75 bp, synthetic construct
  source 1..75: mol_type = other DNA
aaaacaatggggtgcaatacgtcatgtggaggcatcctctaacaccttaccgtatgccgcttaaagagggaggag

SEQ ID NO: 509124 - DNA, 75 bp, synthetic construct
  source 1..75: mol_type = other DNA
cgacaacatgaaagcgcgctgttggtacgaacaccatttcccgctgctgctcaataaaaaagaaggccagatacc

SEQ ID NO: 509125 - DNA, 75 bp, synthetic construct
  source 1..75: mol_type = other DNA
gatttggttttgattttgaagatatgaaggttcgttgttggtatgaacaccatttcccgctgttgttaaacaaaa

SEQ ID NO: 509126 - DNA, 75 bp, synthetic construct
  source 1..75: mol_type = other DNA
agacggaacgacaggcaagctggcaccagtcgatctggctgatgaaaatgttgtcgatatcgctgcgccgcgggc

SEQ ID NO: 509127 - DNA, 75 bp, synthetic construct
  source 1..75: mol_type = other DNA
tcaataaaaaagaaggccagataccgaaactgcggctggctgcgcaaacggcttcacggattctaagtctgttac

SEQ ID NO: 509128 - DNA, 75 bp, synthetic construct
  source 1..75: mol_type = other DNA
cgatctggttttcccctggcttggcccgacgcgcaccagcgaactggccggtgcggtggtaaccgatgagcaggt

SEQ ID NO: 509129 - DNA, 75 bp, synthetic construct
  source 1..75: mol_type = other DNA
aatgaaggagaaaaaagaatcaattgaagaaaccgttgcgcggtggctagaggcgcaaaaaggtcgtcgcgccta

SEQ ID NO: 509130 - DNA, 75 bp, synthetic construct
  source 1..75: mol_type = other DNA
ctgccgataatatagcgggtgtttattacagacccgttcaaaagtatataaatggcacctggtataatgtagcga

SEQ ID NO: 509131 - DNA, 75 bp, synthetic construct
  source 1..75: mol_type = other DNA
ctttaaacaaaatggcgatggtaatctggatgtttatgctaataacgtccatgttatgcgctttgtctccggaag

SEQ ID NO: 509132 - DNA, 75 bp, synthetic construct
  source 1..75: mol_type = other DNA
gtccgaattttacaccaccaccagaaaaccttcagcaggagatgttggtgcactgccgttatctggtggtcaact

SEQ ID NO: 509133 - DNA, 75 bp, synthetic construct
  source 1..75: mol_type = other DNA
gcgactggtttaatgatggcaatcccacttgggatgacggtgatggcgaagacctgtatctcaaagaggtaaccc

SEQ ID NO: 509134 - DNA, 75 bp, synthetic construct
  source 1..75: mol_type = other DNA
cctgatgcactgaacacgctgaacgagctggctgcggcgctgggcaacgacccgaattttgcgaccaccatgact

SEQ ID NO: 509135 - DNA, 75 bp, synthetic construct
  source 1..75: mol_type = other DNA
caaaatataccgctcaggacgccacgacggcacaaaaagggatagtccagctcagtagtgccaccaacagcacgt

SEQ ID NO: 509136 - DNA, 75 bp, synthetic construct
  source 1..75: mol_type = other DNA
cggtcgcagtgctgttgccccggttgatctcattttgctgaaagattgcctgtggtatgacgcgcaaagcctgaa

SEQ ID NO: 509137 - DNA, 75 bp, synthetic construct
  source 1..75: mol_type = other DNA
agaaccacagcaagataacatagtcgcattaccagcagacacagaacaaacagaggatgaactaccgtttgccgt

SEQ ID NO: 509138 - DNA, 75 bp, synthetic construct
  source 1..75: mol_type = other DNA
aatgaaggagaaaaaagaatcaattgaagaaatcgttgcgcgatggctagctgcgcaaaagggtcgtcgcgccta

SEQ ID NO: 509139 - DNA, 75 bp, synthetic construct
  source 1..75: mol_type = other DNA
ttaaatggtatcggttttgcccagaagctaaatatggaagttgatagcgcccaacatctggtggtacgcgatgtg

SEQ ID NO: 509140 - DNA, 75 bp, synthetic construct
  source 1..75: mol_type = other DNA
caaaaatgtctgtttatccctggcgactggttaggtcgcattgaagccagcctacaggatgtcggcgcacagatt

SEQ ID NO: 509141 - DNA, 75 bp, synthetic construct
  source 1..75: mol_type = other DNA
gaaagcgggtccggcgatacttaacactcttctgacagccattaatgaacgtcacttccgcaatggcgcccatgt

SEQ ID NO: 509142 - DNA, 75 bp, synthetic construct
  source 1..75: mol_type = other DNA
aaatgaacaaactctggatctgaaagcggacgaaaccggtaaggtcagtttcccggtagagtggggcgcttatcg

SEQ ID NO: 509143 - DNA, 75 bp, synthetic construct
  source 1..75: mol_type = other DNA
acaaggctttatgtgatgctttgaatcaaaagcagattacattaaatgaaatacaggatcttttcttggaaagag

SEQ ID NO: 509144 - DNA, 75 bp, synthetic construct
  source 1..75: mol_type = other DNA
aattttgcgggatgaagcggcaaggctgattgatttctatgaagaatggctggggcttccatccatgtactggga

SEQ ID NO: 509145 - DNA, 75 bp, synthetic construct
  source 1..75: mol_type = other DNA
ctactggaactggtcagaagatgaaggctggcagtcacagtttgatcaaaaagatctgatcgaaaatgaacaaac

SEQ ID NO: 509146 - DNA, 75 bp, synthetic construct
  source 1..75: mol_type = other DNA
ctgcaggcgttgggcatcaaaggcgacagtgatgagaaacgccgtgcatcggtcgatatcggcatttcccgtttg

SEQ ID NO: 509147 - DNA, 75 bp, synthetic construct
  source 1..75: mol_type = other DNA
gcatgttaatgctggcgctggcagggtgcgacaacaacgataacgcgccaacagcggttaaaaaagatacccctt

SEQ ID NO: 509148 - DNA, 75 bp, synthetic construct
  source 1..75: mol_type = other DNA
gaagtgcataaaccgctgtgcgcagtgggtgcaccagcccaggttcgcaaagcagtagtgaagatgctgatggcg

SEQ ID NO: 509149 - DNA, 75 bp, synthetic construct
  source 1..75: mol_type = other DNA
ccatattcccccggcgtcgaaagcccggaggattatgttgaagctgtgttgaccgctgcgacctcgtgttctgcg

SEQ ID NO: 509150 - DNA, 75 bp, synthetic construct
  source 1..75: mol_type = other DNA
agctggccgcaagtctgctttcgcccataaagttaaaaatggtggtaagaattatcaacgcaacgttcaggaacg

SEQ ID NO: 509151 - DNA, 75 bp, synthetic construct
  source 1..75: mol_type = other DNA
aaatcgcactgaggcagcgagaatatgtcgtcagagttgcggggttgcgtaagcatccgcccggcgatgatggct

SEQ ID NO: 509152 - DNA, 75 bp, synthetic construct
  source 1..75: mol_type = other DNA
ctaaggatgatagaattgcatggggacttttttctatatcgatattgattcagttggcgagtattagatataacg

SEQ ID NO: 509153 - DNA, 75 bp, synthetic construct
  source 1..75: mol_type = other DNA
ctggctttggtgaaccatatggttatcaagtcgcggattgattgggatgaggttattgctcgcgttgatcgcgtg

SEQ ID NO: 509154 - DNA, 75 bp, synthetic construct
  source 1..75: mol_type = other DNA
tttagtaaagatgacgaaaaaactataactacccgcgatatccaacccagcgtcggttttgccagtcgtggttcg

SEQ ID NO: 509155 - DNA, 75 bp, synthetic construct
  source 1..75: mol_type = other DNA
tgggttactacctgtacggagcgcctgctaacggtaataccttgcaggggcagcttttcctgcggccactgcgtg

SEQ ID NO: 509156 - DNA, 75 bp, synthetic construct
  source 1..75: mol_type = other DNA
actgataaaccgcaaaaactgaacgtcgccctgaccgccagcggtttgcttgaactggtcagcgattctcccacg

SEQ ID NO: 509157 - DNA, 75 bp, synthetic construct
  source 1..75: mol_type = other DNA
aacaggcgatctggcctgccgatacgttgccagggatccgcccacagtttacggcgaaatcggtttacgattatc

SEQ ID NO: 509158 - DNA, 75 bp, synthetic construct
  source 1..75: mol_type = other DNA
gtgcagatgctgcttcgggtttgccactgttgcaacttggcgttgcgctgaaaacgatgggcgatgcgacgcgtg

SEQ ID NO: 509159 - DNA, 75 bp, synthetic construct
  source 1..75: mol_type = other DNA
ctccttgctggaagaaaataaactgctacccgatgagcagaacactttgctgaacacgctttcgcagcaggcgtt

SEQ ID NO: 509160 - DNA, 75 bp, synthetic construct
  source 1..75: mol_type = other DNA
aacatcgcacgttatatcaaggagttaaaagcctatccgtacggttgtctggaacaaaccgccagcggcctgttc

SEQ ID NO: 509161 - DNA, 75 bp, synthetic construct
  source 1..75: mol_type = other DNA
caggaaagtaacgcgttgttcctggctgcccgtacgattcaggatttaccgggtaaatggcaggcgcaaacctct

SEQ ID NO: 509162 - DNA, 75 bp, synthetic construct
  source 1..75: mol_type = other DNA
ttgttgttgagcggcaaaccaccgctgaacatcgcacgttatatcaaagagttaaaagcgtatccgtacggctgt

SEQ ID NO: 509163 - DNA, 75 bp, synthetic construct
  source 1..75: mol_type = other DNA
ccgtcagcaaaaagcaccactgggtgcgctgcgtgaaatctgggagcatcgtgcagatgccgcttctgcaacttg

SEQ ID NO: 509164 - DNA, 75 bp, synthetic construct
  source 1..75: mol_type = other DNA
tcgcgccaacacgggcgataaccagtatcggatgtgggatttccacgttgaagattttatgccggaacgcatggc

SEQ ID NO: 509165 - DNA, 75 bp, synthetic construct
  source 1..75: mol_type = other DNA
gcgacacttcgcgtctgacgctggatatcactaatcttactgataaaccgcaaaaactgaacgttgccctgaccg

SEQ ID NO: 509166 - DNA, 75 bp, synthetic construct
  source 1..75: mol_type = other DNA
agtacgctggtggtgcgtcctggcgataaatctcgctctgcgacgccaaaacgcgcggttggtgtgttgcatctg

SEQ ID NO: 509167 - DNA, 75 bp, synthetic construct
  source 1..75: mol_type = other DNA
aacatgtgatgaatgataaaggtaaagaaaataaaaaaatcacacagaatattgtcttctcgcctccagtttcag

SEQ ID NO: 509168 - DNA, 75 bp, synthetic construct
  source 1..75: mol_type = other DNA
cgctctaacgtgcgtgaaaagacggtgcgtgggcagtacaccgcaggttttgcgcagggcaaaaaagtgccgggt

SEQ ID NO: 509169 - DNA, 75 bp, synthetic construct
  source 1..75: mol_type = other DNA
tggcgctgggctggcgtaccgttctacctgcgtaccggtaaacgtctgccgactaaatgctctgaagtggtagtc

SEQ ID NO: 509170 - DNA, 75 bp, synthetic construct
  source 1..75: mol_type = other DNA
ccaaagttgtccgcgaggcgctcgaaactttcatgaaagaaaccattgatgaaggtttatgggacaccctgagtg

SEQ ID NO: 509171 - DNA, 75 bp, synthetic construct
  source 1..75: mol_type = other DNA
ctggtaagggtcaggtgatggctgaagagcttaaggggcaattagctgaagctgttcctggtatggttcaggtat

SEQ ID NO: 509172 - DNA, 75 bp, synthetic construct
  source 1..75: mol_type = other DNA
caacttgacagcaatctgacaagttctttagggcaacttgaaaggaagtttaataagacctttgataagattgaa

SEQ ID NO: 509173 - DNA, 75 bp, synthetic construct
  source 1..75: mol_type = other DNA
gcatccgcgatgaaaaagtgaaagtactgaagtctctgcgccgcatcgaccgctccaacgtacgcgaaaaaaccg

SEQ ID NO: 509174 - DNA, 75 bp, synthetic construct
  source 1..75: mol_type = other DNA
tcagcatcatcggatcgtcgggatcggggaaaagtacctttctgcgttgcattaactttctcgaaaaaccgagcg

SEQ ID NO: 509175 - DNA, 75 bp, synthetic construct
  source 1..75: mol_type = other DNA
ccagacacgtaccgattttggtaaagccggatacggtggcgcagcgccgccgaaaggcgaaacccatcgctacat

SEQ ID NO: 509176 - DNA, 75 bp, synthetic construct
  source 1..75: mol_type = other DNA
atgaaactcatcagtaatgatctgcgcgatggcgataagttgccacatcgtcatgtctttaacggcatgggttac

SEQ ID NO: 509177 - DNA, 75 bp, synthetic construct
  source 1..75: mol_type = other DNA
attaaagcactggatgtcgccactaacgtgttgcaacgtaatccgaatattaaagcgatctattgcgcgaatgac

SEQ ID NO: 509178 - DNA, 75 bp, synthetic construct
  source 1..75: mol_type = other DNA
taaagcgatctattgcgcgaatgacacgatggcaatgggtgttgctcaggcagtcgcaaacgccggaaaaacggg

SEQ ID NO: 509179 - DNA, 75 bp, synthetic construct
  source 1..75: mol_type = other DNA
ggcgatggaaccggaagttttactgtttgatgaacctacttcggcgctcgatcctgaactggtaggcgaagtgtt

SEQ ID NO: 509180 - DNA, 75 bp, synthetic construct
  source 1..75: mol_type = other DNA
tttatgggctatctgctaaagctgggtcaatggataattcaaaattcaatgaagcccttgctaaactaaattcaa

SEQ ID NO: 509181 - DNA, 75 bp, synthetic construct
  source 1..75: mol_type = other DNA
taataagacctttgacaagattgaacagagagtaagaaacacaagagttttccagtttaccaccagatttaatga

SEQ ID NO: 509182 - DNA, 75 bp, synthetic construct
  source 1..75: mol_type = other DNA
acaatgccacaatgaatattgcaagattcaatcatccagaattaaacaacattaagcaagattcagcattaacga

SEQ ID NO: 509183 - DNA, 75 bp, synthetic construct
  source 1..75: mol_type = other DNA
tttatgacctttagcagtaatagctacgacaaatatgcagaaactatgctattaagttcatcattcccagaagat

SEQ ID NO: 509184 - DNA, 75 bp, synthetic construct
  source 1..75: mol_type = other DNA
ttgggggtagggcagatagcgcaagcagagattcagttgcggcatgtgttctggctttccactcttggattaacg

SEQ ID NO: 509185 - DNA, 75 bp, synthetic construct
  source 1..75: mol_type = other DNA
atggcacaatttaaagttgatgattttctgattgagctaggttttagctctcagaaagttttaaaaggcttggaa

SEQ ID NO: 509186 - DNA, 75 bp, synthetic construct
  source 1..75: mol_type = other DNA
gttaggtgaccgtatggctggtgcatttaagctattcgctgaagcattgggtatgactgctacagagcttgataa

SEQ ID NO: 509187 - DNA, 75 bp, synthetic construct
  source 1..75: mol_type = other DNA
ggtgctttccagttatttgccagaagccttgggatgactacagaagaattagacaaggccatgaaagacggtaag

SEQ ID NO: 509188 - DNA, 75 bp, synthetic construct
  source 1..75: mol_type = other DNA
gcttttaatcgtgagttagcaaagttaaatcagtctcttcgtgaaacactttctaagtttaacaagaccaccagc

SEQ ID NO: 509189 - DNA, 75 bp, synthetic construct
  source 1..75: mol_type = other DNA
tctgacccgctgcgtggcgtgggcaaatatctctgttcaggttctttttccactcgctgtcacctttaccccagt

SEQ ID NO: 509190 - DNA, 75 bp, synthetic construct
  source 1..75: mol_type = other DNA
atgacctttagcagtaatctctacaaccaatatgcagaatctacgttattaagttcatcattcccagaagatgat

SEQ ID NO: 509191 - DNA, 75 bp, synthetic construct
  source 1..75: mol_type = other DNA
gttcaatatttcaccagcgcattttctgttcccgggactggaagatagctgtatgaagtttctatccaccttccc

SEQ ID NO: 509192 - DNA, 75 bp, synthetic construct
  source 1..75: mol_type = other DNA
gatcagtttatcccgcaggcagagtccaccggattaattgccccgataacgcaacagttgatgtatcaggtcgaa

SEQ ID NO: 509193 - DNA, 75 bp, synthetic construct
  source 1..75: mol_type = other DNA
agttaaaagcgggaaaaatcgtcgccatcaaagggattggcggatttcatctcgcctgtgatgcacgtaacagtg

SEQ ID NO: 509194 - DNA, 75 bp, synthetic construct
  source 1..75: mol_type = other DNA
caaattgttcccgatgccgctacttgccctgcttgccttgccgaaatgaataccccaggcgaacggcgttatcgt

SEQ ID NO: 509195 - DNA, 75 bp, synthetic construct
  source 1..75: mol_type = other DNA
gctggatggcggtgatgtcattgctttgacgctcgacggtatcggtatgggggagaacggcgctttgtggggcgg

SEQ ID NO: 509196 - DNA, 75 bp, synthetic construct
  source 1..75: mol_type = other DNA
ataccaaaggtctggaaatattaagcgcagaaattatcaatgcgctacgttcaggacttgatgaaaatacattac

SEQ ID NO: 509197 - DNA, 75 bp, synthetic construct
  source 1..75: mol_type = other DNA
cagatcgcgacagaatttcgatgatttctgaactggcgagcgccagcggtattgccggaatgtgcggtggtcagg

SEQ ID NO: 509198 - DNA, 75 bp, synthetic construct
  source 1..75: mol_type = other DNA
gtggcccgcatcttgaatgggtaagtcatggcgaacataccgaacaagaggccgcgttacaggcggctatcgcac

SEQ ID NO: 509199 - DNA, 75 bp, synthetic construct
  source 1..75: mol_type = other DNA
accatgtcaatgcaggatcactctcacgattcggatatccctcagtctggccacgcaggccatcatcagacagac

SEQ ID NO: 509200 - DNA, 75 bp, synthetic construct
  source 1..75: mol_type = other DNA
gccggcagacagaggcagggccggaagaacggttgcgtattgcactgttgaatgtggattacgtcagcaatgctg

SEQ ID NO: 509201 - DNA, 75 bp, synthetic construct
  source 1..75: mol_type = other DNA
taaaaaacaatatgagtaccctgttttttctcatgttcaggccgggatgttctcgcctgagcttagaacctttac

SEQ ID NO: 509202 - DNA, 75 bp, synthetic construct
  source 1..75: mol_type = other DNA
ggcaagtgtgcaacagcaaaactggagcgtgctggcgcgggccattgagcgtggaatcaatgctccgctggcatc

SEQ ID NO: 509203 - DNA, 75 bp, synthetic construct
  source 1..75: mol_type = other DNA
gtgctggtggataaaaaatacatctccgaactttgtgacgatatcgcccctggccttaacgaagtcggggtgatg

SEQ ID NO: 509204 - DNA, 75 bp, synthetic construct
  source 1..75: mol_type = other DNA
ttcaattgcatcagcactgcccgccgctggcgcgtattgatagcgtcgagcgtgagccgtacatctggtcacaac

SEQ ID NO: 509205 - DNA, 75 bp, synthetic construct
  source 1..75: mol_type = other DNA
accagcgactgcaaggcgctttcccatcgacgtatgcgctggcggccaaattagaccagctcctgcaacatacaa

SEQ ID NO: 509206 - DNA, 75 bp, synthetic construct
  source 1..75: mol_type = other DNA
accatcaggtaacacgcttcgccggatagtacagcagacaccctgcgtagaatccctgcaaacgtccgcaggccc

SEQ ID NO: 509207 - DNA, 75 bp, synthetic construct
  source 1..75: mol_type = other DNA
acggccagcaatcctgtatgcctgccggaaaaatacggaaaccttcttcacgagcgccatccggacctgtttgcc

SEQ ID NO: 509208 - DNA, 75 bp, synthetic construct
  source 1..75: mol_type = other DNA
ggttgacaccgtgcgaacggacacaacggccagcaatcctgtatgcctgccggaaaaatacggaaaccttcttca

SEQ ID NO: 509209 - DNA, 75 bp, synthetic construct
  source 1..75: mol_type = other DNA
aaccgcgcgacatggaaaattattgtgaatggaaattggtggcaaaatacacggtcgattataaaggggctttct

SEQ ID NO: 509210 - DNA, 75 bp, synthetic construct
  source 1..75: mol_type = other DNA
gcagatggcgatcctggttaacgaggcgcagtacatgtttgtccttcagccgtggtgtgttgtagaccttaacga

SEQ ID NO: 509211 - DNA, 75 bp, synthetic construct
  source 1..75: mol_type = other DNA
gccatccggacctgtttgccggtgctcaggggagtatttcacgcagtgcattttttaatgacagcctgacgctga

SEQ ID NO: 509212 - DNA, 75 bp, synthetic construct
  source 1..75: mol_type = other DNA
gatttccccgctgaaggcgctgaattacctgatccaccagcttgagtccgatatcgtaaccattgattatcgcgt

SEQ ID NO: 509213 - DNA, 75 bp, synthetic construct
  source 1..75: mol_type = other DNA
gacatggtggatgtaaacgtctatcaggaaaatatcttccataccaaaatgctgcttaaagaattcgatcttaag

SEQ ID NO: 509214 - DNA, 75 bp, synthetic construct
  source 1..75: mol_type = other DNA
atattgaagtctctacctgcggcgtgatttctccgctgaaggcgctgaattacctgatccaccagcttgagtccg

SEQ ID NO: 509215 - DNA, 75 bp, synthetic construct
  source 1..75: mol_type = other DNA
ttatcggtgcaggtaacattctcgttcgtaaccaaaatattgtaggtctgacgacggcagcggatatctgggtga

SEQ ID NO: 509216 - DNA, 75 bp, synthetic construct
  source 1..75: mol_type = other DNA
tgatcctggccgcaattgtttgtggtgctattggcatagaaaggcaaatacgcggcaaaggtgctggtttacgta

SEQ ID NO: 509217 - DNA, 75 bp, synthetic construct
  source 1..75: mol_type = other DNA
atggtactttgttgacggaaggcgtagcaattatgcagtatcttgccgacagcgtccccgaccgccagttgctgg

SEQ ID NO: 509218 - DNA, 75 bp, synthetic construct
  source 1..75: mol_type = other DNA
atggattacgaatttctgcgtgatgtaaccggagtggtaaaggtgcgcatgtccatggggcatgaagtcatcggg

SEQ ID NO: 509219 - DNA, 75 bp, synthetic construct
  source 1..75: mol_type = other DNA
caatactggagccgcattttcataacgactcctatggctaccgaccgcataaatccgcacatgatgctctcagag

SEQ ID NO: 509220 - DNA, 75 bp, synthetic construct
  source 1..75: mol_type = other DNA
ccgttatcacaatcgtctggatatctttacccaaagtctggaaaacggcgcggcccagcaaggaattgaagtctc

SEQ ID NO: 509221 - DNA, 75 bp, synthetic construct
  source 1..75: mol_type = other DNA
gcccgatcaacccatcaagttagacgtgattaaacccgacgggcaggtactcaggagcgtcgttagtcagccgga

SEQ ID NO: 509222 - DNA, 75 bp, synthetic construct
  source 1..75: mol_type = other DNA
gcgttcatcttattagtatcgcgctttctgttgggctattaaccttacgtttctggctacgttatcagaagcatc

SEQ ID NO: 509223 - DNA, 75 bp, synthetic construct
  source 1..75: mol_type = other DNA
cagcaggcgcgcattattgcctccccgctgacgttggtggtgctgtacatcatcattaaactcgccaccacaaaa

SEQ ID NO: 509224 - DNA, 75 bp, synthetic construct
  source 1..75: mol_type = other DNA
atgacaagtttttctacgttgcttagcgttcatctcattagtatcgcgctttctgttgggctattgaccttacgt

SEQ ID NO: 509225 - DNA, 75 bp, synthetic construct
  source 1..75: mol_type = other DNA
ccagcgggtctggaactggaaaaccagaacctggcgaacggcagcgccagtctggaacaaagtggtggcgaagtg

SEQ ID NO: 509226 - DNA, 75 bp, synthetic construct
  source 1..75: mol_type = other DNA
gcggttgccgttgatgaataccaaccggtaacgctggtatatctggcgcgggcggtgacgccgggaacgtatcag

SEQ ID NO: 509227 - DNA, 75 bp, synthetic construct
  source 1..75: mol_type = other DNA
cactgcgcgacaacgcgttgatgctctccttgctggaagagaacaaactgttgccagatgatcagaacaccttat

SEQ ID NO: 509228 - DNA, 75 bp, synthetic construct
  source 1..75: mol_type = other DNA
tgcgctgtgggataaaaacggtgacgaagagtactggctgacggcttacgtgatggatttcctggtccgcgcagg

SEQ ID NO: 509229 - DNA, 75 bp, synthetic construct
  source 1..75: mol_type = other DNA
gtcatattcttggtactgatggtaagagcaaatcgctggactcgttacgtagcggcgatctggtgctggtgtggt

SEQ ID NO: 509230 - DNA, 75 bp, synthetic construct
  source 1..75: mol_type = other DNA
cgtgccgacagacgccattaaccggggtaatgagcgtctgctgcgctatttacaagatccgggcatgatgtcgat

SEQ ID NO: 509231 - DNA, 75 bp, synthetic construct
  source 1..75: mol_type = other DNA
catggttaattaaactactgactattcgctggcgcgaatggttaacagattactaccttaatcgggtaatgactc

SEQ ID NO: 509232 - DNA, 75 bp, synthetic construct
  source 1..75: mol_type = other DNA
cagggaatacgaaaataccgctgcttataaacggcagcctgaatattcttaatattattattagcggtatattaa

SEQ ID NO: 509233 - DNA, 75 bp, synthetic construct
  source 1..75: mol_type = other DNA
gcatttagtctcggtaaacgtgatcgacggcgagccagagtagcgacacggcaatcattggtaatcatgacgttg

SEQ ID NO: 509234 - DNA, 75 bp, synthetic construct
  source 1..75: mol_type = other DNA
gaaatgtggtttcactttctgcaattagggtcggctttgaatatctcctctgctttacgccacactcgctggcac

SEQ ID NO: 509235 - DNA, 75 bp, synthetic construct
  source 1..75: mol_type = other DNA
gccaatcaactggaattcgctggcgatgaaatggaagaggggatgaactactacgatgaagagagcttgtcgctg

SEQ ID NO: 509236 - DNA, 75 bp, synthetic construct
  source 1..75: mol_type = other DNA
aaaacctggccttgcttgatgaagtggaacaagcggcgcacgcattgaaaggtagcgaacgttcctggcaacggg

SEQ ID NO: 509237 - DNA, 75 bp, synthetic construct
  source 1..75: mol_type = other DNA
gatcgacggcgagccagagtagcaacacggcaatcattggtgatcatgacgttatttgccgtgctgttggcaatt

SEQ ID NO: 509238 - DNA, 75 bp, synthetic construct
  source 1..75: mol_type = other DNA
ttttcaattgcggctcttatcacttacccggaagtgcgctcggctctgcttctacgatcattacaggccgaaggt

SEQ ID NO: 509239 - DNA, 75 bp, synthetic construct
  source 1..75: mol_type = other DNA
aatcatcccatgcaatgagaactgcaacattgtaggcaaggttatcgccagtcaatggcctgaagagacgtttgg

SEQ ID NO: 509240 - DNA, 75 bp, synthetic construct
  source 1..75: mol_type = other DNA
ggttatattctgggcattgtgcttggctggggagtcgtcggtgtctggatggggatgtttgccgactgggccgtt

SEQ ID NO: 509241 - DNA, 75 bp, synthetic construct
  source 1..75: mol_type = other DNA
gggaagttatgggaattggcattccagcaagtgtggagtcggttttgtttaccagcggcagattgttaacacaaa

SEQ ID NO: 509242 - DNA, 75 bp, synthetic construct
  source 1..75: mol_type = other DNA
ttaagtacttttctggttagttggttaggcaaagatgcgatggccggcgtgggtctggcagacagttttaatata

SEQ ID NO: 509243 - DNA, 75 bp, synthetic construct
  source 1..75: mol_type = other DNA
acacttcaaaggtgaaaaagacagcaggatgctaatgaacgtgggaacgaatgtggaagttaaagacaatatgcg

SEQ ID NO: 509244 - DNA, 75 bp, synthetic construct
  source 1..75: mol_type = other DNA
tattttatgtagttcgataaccaccctgacctcactcgatttcctcggcttcggtctgccgctcggttcaccgtc

SEQ ID NO: 509245 - DNA, 75 bp, synthetic construct
  source 1..75: mol_type = other DNA
tgctggcaggcgcgctgcaaggttattatggtggaaaagtcgatctctggggacaacgctttattgaggtgtggt

SEQ ID NO: 509246 - DNA, 75 bp, synthetic construct
  source 1..75: mol_type = other DNA
tgagtttgtgttctgaacttatcgctaacgataaaccgttgctggtgcgttatgacggcagttggtatttcccgt

SEQ ID NO: 509247 - DNA, 75 bp, synthetic construct
  source 1..75: mol_type = other DNA
acgccgtcaaaacgcgactgcaaaaagcaggttttacgcatatctccatcctgagtgacgcgctaagcgaacctt

SEQ ID NO: 509248 - DNA, 75 bp, synthetic construct
  source 1..75: mol_type = other DNA
tgaccagaaaggtgctgtagcgtctctgacttccgttgctaaactaccgtttgcttacgctaaagatggtatctc

SEQ ID NO: 509249 - DNA, 75 bp, synthetic construct
  source 1..75: mol_type = other DNA
ggcatcgcgggcctgtcggtggcgacggactccctgtctgctatcaaatatgcccgcgtgaaaccaatccgtgac

SEQ ID NO: 509250 - DNA, 75 bp, synthetic construct
  source 1..75: mol_type = other DNA
tcaacatcggggaggacaccacctgtgacgtggatgaacttatcaccatcggggaggttacatggctcacagcgt

SEQ ID NO: 509251 - DNA, 75 bp, synthetic construct
  source 1..75: mol_type = other DNA
atccggcgaggtacaggacggcgaggtcactgtcatcgtgcaggctgaagaagccggtgtggcgggcaatcttgc

SEQ ID NO: 509252 - DNA, 75 bp, synthetic construct
  source 1..75: mol_type = other DNA
ggccccgagattttcgccatgccagcgccagttcacggccgttatcaggtgtatatcaactactatggcggacgc

SEQ ID NO: 509253 - DNA, 75 bp, synthetic construct
  source 1..75: mol_type = other DNA
cgcacattataaattttactgtgaatttgagaaagcatgggttgaagaagaactaaacttgacactgaaggacaa

SEQ ID NO: 509254 - DNA, 75 bp, synthetic construct
  source 1..75: mol_type = other DNA
ttgtgatatggctatttctaatcatctatgtttatttttgtgagttattcagaagtcactggatagcagtctggt

SEQ ID NO: 509255 - DNA, 75 bp, synthetic construct
  source 1..75: mol_type = other DNA
tattgtcctgattagcttactatcatggggatttttcggccaacggttggacctgccagccattataggcatgat

SEQ ID NO: 509256 - DNA, 75 bp, synthetic construct
  source 1..75: mol_type = other DNA
gaatacccgcagtttggtaacaacgatccgcgtgtagatgacctggctgttgacctggtagaacgtttcatgaag

SEQ ID NO: 509257 - DNA, 75 bp, synthetic construct
  source 1..75: mol_type = other DNA
ctggaagggaaaactgagttgaaagcgttgctcgactggcagcaggcgattagctggcgtggtgagttaacgctt

SEQ ID NO: 509258 - DNA, 75 bp, synthetic construct
  source 1..75: mol_type = other DNA
cggcacggtggaagcgccacaactactggcagatatcaccgcgcgcggcctgcgctggcaggaactttccgtggc

SEQ ID NO: 509259 - DNA, 75 bp, synthetic construct
  source 1..75: mol_type = other DNA
actgccagaaaacccggattccctgatcctgccagcgcactccggtagcggtaagccatctatcggtgtagataa

SEQ ID NO: 509260 - DNA, 75 bp, synthetic construct
  source 1..75: mol_type = other DNA
tgagaagcaatatcaggcggatgacctgaaactgaaacttaccggcaaaatgaccgattacacgatctctatgcg

SEQ ID NO: 509261 - DNA, 75 bp, synthetic construct
  source 1..75: mol_type = other DNA
aacctgtttaccctcgatggtcgcgtggatgtcccttgggcgcgcatcgtggtgcacgatctgccggaaagcgca

SEQ ID NO: 509262 - DNA, 75 bp, synthetic construct
  source 1..75: mol_type = other DNA
ctcgtcaccctgaatgcgaaaggcagcgaaaagcagcacgagctacaactgcggattcagggcgagccggtttcc

SEQ ID NO: 509263 - DNA, 75 bp, synthetic construct
  source 1..75: mol_type = other DNA
ctgccacaccgttgcggcgctgaaagccgaaaccaaagccggtacgggctgcggcggttgtattccgctggtcac

SEQ ID NO: 509264 - DNA, 75 bp, synthetic construct
  source 1..75: mol_type = other DNA
acctgtgcgaacactttgcttattcgcgtcaggaactgttccatttgatccgcgttgaaggcattaaaaccttcg

SEQ ID NO: 509265 - DNA, 75 bp, synthetic construct
  source 1..75: mol_type = other DNA
tcggtaacggtatggtcggccatcgctttatcgaagatcttcttgataaatctgatgcggccaactttgatatta

SEQ ID NO: 509266 - DNA, 75 bp, synthetic construct
  source 1..75: mol_type = other DNA
tctggaagaagagatggcgcgcctgcgtgaagcggtagtgtgtgagtggactgaaacggtcaataccccgtctgc

SEQ ID NO: 509267 - DNA, 75 bp, synthetic construct
  source 1..75: mol_type = other DNA
tggaactggaaaatcgttataaaggcattcgtgcgccgcacaaaatcaagttcggtgtttctggctgtactcgtg

SEQ ID NO: 509268 - DNA, 75 bp, synthetic construct
  source 1..75: mol_type = other DNA
gcgtcagctgattgaagcgggtttcgaaactggtcatgcctatgcgaaagcgctgcgtatggcgaaaacctgcgt

SEQ ID NO: 509269 - DNA, 75 bp, synthetic construct
  source 1..75: mol_type = other DNA
atgagaaacaggaaactttcattgtaccgatgcgtaatgctggcgagttgacgctggtgaaaagttttgactggt

SEQ ID NO: 509270 - DNA, 75 bp, synthetic construct
  source 1..75: mol_type = other DNA
aacaggcaattaaacaggcgcatccgctgaaacatgtggaagctgctttcgaaagccaacaccagtttatcgata

SEQ ID NO: 509271 - DNA, 75 bp, synthetic construct
  source 1..75: mol_type = other DNA
tttaattgtggtgttctgtctcctgctccgggtggacgcatgtcaaaagtgcaggattttctgctgaatactgtg

SEQ ID NO: 509272 - DNA, 75 bp, synthetic construct
  source 1..75: mol_type = other DNA
ctaagtgcttcgaaatatcgtcgaaagcgctcggtatggatcgcgtggagaacgaggacgacgaaatcccgaacc

SEQ ID NO: 509273 - DNA, 75 bp, synthetic construct
  source 1..75: mol_type = other DNA
tctgtttaccgagcaggcgacagaggatgtcagcgcgacacacctttccaccagtctgtcatttgcggaaatcga

SEQ ID NO: 509274 - DNA, 75 bp, synthetic construct
  source 1..75: mol_type = other DNA
cagtttgctcgctgaaactaaccgtcatttaaatcaacttaatgccctgttagaaagtatggatgatggcgtgat

SEQ ID NO: 509275 - DNA, 75 bp, synthetic construct
  source 1..75: mol_type = other DNA
ctgttgctacatccggttgaacagatgaggcaattgatgaccagccaattaggtaaagttagtcatacttttgct

SEQ ID NO: 509276 - DNA, 75 bp, synthetic construct
  source 1..75: mol_type = other DNA
cgaactattacttgttttaggcatcattgctgcattagtggtagcggcttttattgtttatcccaaggttcaggc

SEQ ID NO: 509277 - DNA, 75 bp, synthetic construct
  source 1..75: mol_type = other DNA
agtggtcaacaaaaactggccaccgagttagagtttttccagtatcgattttccgattcgtttggggggaaccca

SEQ ID NO: 509278 - DNA, 75 bp, synthetic construct
  source 1..75: mol_type = other DNA
cagtttttcacaatcgatcaattacccggcgtcgtccgtcaacatggcagatgatcaaaatatctcagcgcagat

SEQ ID NO: 509279 - DNA, 75 bp, synthetic construct
  source 1..75: mol_type = other DNA
aaggccgttgcgtgcagccgggcgacaggttcagggatttgctgcaacaagtcggggagcctttcgggacattgc

SEQ ID NO: 509280 - DNA, 75 bp, synthetic construct
  source 1..75: mol_type = other DNA
gtgcagaaccagcagggcggcagtggcggcactatcacggcaggttacgatttcaaagctaacaaagaaatttaa

SEQ ID NO: 509281 - DNA, 75 bp, synthetic construct
  source 1..75: mol_type = other DNA
gtgcagaaccagcagggcggcagtggcggcactatcaccgcaggctacgacttcaaggccaataaagaaatttaa

SEQ ID NO: 509282 - DNA, 75 bp, synthetic construct
  source 1..75: mol_type = other DNA
gggaaccagctttattttgttgctccatcctgtggaacagatgcggcagttgatgaccagtcaattaggaaaagt

SEQ ID NO: 509283 - DNA, 75 bp, synthetic construct
  source 1..75: mol_type = other DNA
acccgctcctgcccggcggaaatggccgtcagccagtcgctggcggccctgcgctggctgcaggcccagggctgt

SEQ ID NO: 509284 - DNA, 75 bp, synthetic construct
  source 1..75: mol_type = other DNA
tgactgacctgaccgaagactcaaccctcgttgatggctttctggcgcaaatacattgtctgccatgcgtgccgg

SEQ ID NO: 509285 - DNA, 75 bp, synthetic construct
  source 1..75: mol_type = other DNA
atgcagatctggacgccaccgtcaacgccattatgggcggagcatttggttccgcgggcgaacgctgtatggcgc

SEQ ID NO: 509286 - DNA, 75 bp, synthetic construct
  source 1..75: mol_type = other DNA
ccgaaggcagcaacagtgtgcaggtcatcagccccgatgggcaaagccgacaaaaaatgcagttttactccacac

SEQ ID NO: 509287 - DNA, 75 bp, synthetic construct
  source 1..75: mol_type = other DNA
gccgcagagaattgaatccgatggttcatttgcacgcccttatattttcactgaaggcagcaacagcgtgcaggt

SEQ ID NO: 509288 - DNA, 75 bp, synthetic construct
  source 1..75: mol_type = other DNA
caaaaaatgcagttttactcaacgccgggggctggagtgatccgcgcgcgtttacggctggttctctcgtgggat

SEQ ID NO: 509289 - DNA, 75 bp, synthetic construct
  source 1..75: mol_type = other DNA
ccgccgacactacgggaacgtctggccagcatgacgccatcagagcagaaaaaggtgctccagcaggctacccgt

SEQ ID NO: 509290 - DNA, 75 bp, synthetic construct
  source 1..75: mol_type = other DNA
tctcaacaccttatgtgttagttgatgaaatgataagagaagcaagcgcagaagctggaattatatttgatcgag

SEQ ID NO: 509291 - DNA, 75 bp, synthetic construct
  source 1..75: mol_type = other DNA
tgagtcggctggaactggcacacggcggcacgctgtttcttgaaaagattgaatatctggcggtggagttacagt

SEQ ID NO: 509292 - DNA, 75 bp, synthetic construct
  source 1..75: mol_type = other DNA
gtcctgatggcaggcaacatcatcccggcaccaaggcgccataccggtattgcagctgcacgacgtgcagcaaag

SEQ ID NO: 509293 - DNA, 75 bp, synthetic construct
  source 1..75: mol_type = other DNA
taccgtacccgactcgtttttgggcttctgcgctaattgcaaagccgcatgtcctgatggctgacaacatcatcc

SEQ ID NO: 509294 - DNA, 75 bp, synthetic construct
  source 1..75: mol_type = other DNA
cggcaccaaagcaccgccataccggtattgcagctgcacgacgtgcagcaaagaaacgcaggagagcaaaacgat

SEQ ID NO: 509295 - DNA, 75 bp, synthetic construct
  source 1..75: mol_type = other DNA
agacgttttgaggcgttaactggcatgacgcccgcccgctggctgctcaatgagcgcttaatacgagtacaggat

SEQ ID NO: 509296 - DNA, 75 bp, synthetic construct
  source 1..75: mol_type = other DNA
gcagggagtgctgcagggatcgatctgtgcttacatatcgtgcgtaaagattatggtcacgaaattgcaaacaat

SEQ ID NO: 509297 - DNA, 75 bp, synthetic construct
  source 1..75: mol_type = other DNA
gaatatttaattacggattcgtttgagagttcagggacttttgaaagtgatggtggtgggggaaggattcgaacc

SEQ ID NO: 509298 - DNA, 75 bp, synthetic construct
  source 1..75: mol_type = other DNA
ggagacgttgattggtcgcttcagttctgccttctctgcattagcagaaacgctggataatcaggaagaaccaga

SEQ ID NO: 509299 - DNA, 75 bp, synthetic construct
  source 1..75: mol_type = other DNA
gtgctgctgggcggcatggttggcgcggggattgtgctggggcgtaacgctctgcgtaattacaacgcgaaataa

SEQ ID NO: 509300 - DNA, 75 bp, synthetic construct
  source 1..75: mol_type = other DNA
ccggtaataaagctggccagaatgaaaaacgattctacaaagatatgattaaccttgctgattcagagtacagca

SEQ ID NO: 509301 - DNA, 75 bp, synthetic construct
  source 1..75: mol_type = other DNA
tgcgccgagcaggcagggcaggagtctcggtttatctacattgaagagctcggtttgggcgtcggcggcgtactg

SEQ ID NO: 509302 - DNA, 75 bp, synthetic construct
  source 1..75: mol_type = other DNA
tgtggctggaagatgcccggcgcagcggcattattccgcgtgatgccgatcagtacaatgccattcaggaacgcc

SEQ ID NO: 509303 - DNA, 75 bp, synthetic construct
  source 1..75: mol_type = other DNA
atgaaaaaggtattcgcaaaatctcttctggtagcggcaatgttttccgttgcaggttctgcattagcagtacaa

SEQ ID NO: 509304 - DNA, 75 bp, synthetic construct
  source 1..75: mol_type = other DNA
gaagcttctcatccttccccgcatgggcagaatatttaattgcggattcgttgggaagttcagggacttttgaaa

SEQ ID NO: 509305 - DNA, 75 bp, synthetic construct
  source 1..75: mol_type = other DNA
cctgcggcaacgctctctcgctggcgctcgagtcgaaccttggtcgaagcttctcatccttccccgcatgggcag

SEQ ID NO: 509306 - DNA, 75 bp, synthetic construct
  source 1..75: mol_type = other DNA
aagaagtagtttttgatggatgtatgaatgtattgtcattaccttcaggatggaaagcaattacacctaaaaaaa

SEQ ID NO: 509307 - DNA, 75 bp, synthetic construct
  source 1..75: mol_type = other DNA
ctgtttcttatgttgggcaaactgcagagggcgcacaaatgaagttggcccaatacattcagcaagttgacgata

SEQ ID NO: 509308 - DNA, 75 bp, synthetic construct
  source 1..75: mol_type = other DNA
cacggcttcgatgatattttcgtctttgtgcctaatgaaggactggtgactctcgcctcttccttgctggcgaca

SEQ ID NO: 509309 - DNA, 75 bp, synthetic construct
  source 1..75: mol_type = other DNA
aacctttgaccttcctgaaatgcaggaggatgaaatcctcgcgacggtggtcactgacagcctgtgcctctcttc

SEQ ID NO: 509310 - DNA, 75 bp, synthetic construct
  source 1..75: mol_type = other DNA
ggccaaggtacacgagcacgagatgttccattgccgccaatcacgattcgtatgattgagtctgaagtgattgct

SEQ ID NO: 509311 - DNA, 75 bp, synthetic construct
  source 1..75: mol_type = other DNA
caggatgaagaactggcggcgattctggcgcgtcatcagggagtctggtccggcgaggcggagcagtacctgctc

SEQ ID NO: 509312 - DNA, 75 bp, synthetic construct
  source 1..75: mol_type = other DNA
aatttcagccgggccagcgctatgtgattcaggccaacctgcaattgccggatcgcccggactgccccggctact

SEQ ID NO: 509313 - DNA, 75 bp, synthetic construct
  source 1..75: mol_type = other DNA
atgaaaacaacagctctgcgtctttatggcaaacgtgacctgcgtctggaaacctttgaccttcctgaaatgcag

SEQ ID NO: 509314 - DNA, 75 bp, synthetic construct
  source 1..75: mol_type = other DNA
ttatgttggtgaaacacctgaaggtgcgcagaaacagctggcgaagtatatccagcaagttgacgaccaggtaaa

SEQ ID NO: 509315 - DNA, 75 bp, synthetic construct
  source 1..75: mol_type = other DNA
ctggctgtgctgctgggcggtatggttggcgcggggattgtgctggggcgtaacgcgctgcgcaattacaacgcg

SEQ ID NO: 509316 - DNA, 75 bp, synthetic construct
  source 1..75: mol_type = other DNA
aaaagttgatgatcttgatattcatgcttaccgctatgtaatgaaaccgacgttacctattcgtcgcgatagccc

SEQ ID NO: 509317 - DNA, 75 bp, synthetic construct
  source 1..75: mol_type = other DNA
gcggtgctgctgggcggcatggttggcgcggggattgtgctggggcgtaacgcgctgcgtaattacaacgcgaaa

SEQ ID NO: 509318 - DNA, 75 bp, synthetic construct
  source 1..75: mol_type = other DNA
gtgctgctgggcggcatggttggcgcggggattgtgttggggcgtaatgctctgcgtaattacaacgcgaagtaa

SEQ ID NO: 509319 - DNA, 75 bp, synthetic construct
  source 1..75: mol_type = other DNA
tacattcagcaagttgatgataaagtaaatcaagagctagaaaaggatctcaaggacaaccttgctttgggacgg

SEQ ID NO: 509320 - DNA, 75 bp, synthetic construct
  source 1..75: mol_type = other DNA
tcagaccaccaaaggtgtactggaaaccggtatttaccgtggcgtggtaagcatctatctgtcccaggatatcta

SEQ ID NO: 509321 - DNA, 75 bp, synthetic construct
  source 1..75: mol_type = other DNA
atcaccgtgccgccgatggtacgaatggatgtatcgccagatgttgtattcgaggctacaccaaacctgtttacc

SEQ ID NO: 509322 - DNA, 75 bp, synthetic construct
  source 1..75: mol_type = other DNA
ccgactggagccagattgaaaactggcgggcgcgggtaacagcgaagggcagtaaagtgcggatcaccgtgccgc

SEQ ID NO: 509323 - DNA, 75 bp, synthetic construct
  source 1..75: mol_type = other DNA
gcggtggtgaatctcaaccgcttcgacctggccatgctgaaaccgtttatgccagaaaccactcaggccagcggt

SEQ ID NO: 509324 - DNA, 75 bp, synthetic construct
  source 1..75: mol_type = other DNA
attattttcagccatattttgagaatatccttgaatgtcgggtatgggttaccgttggacaactctggaaacagg

SEQ ID NO: 509325 - DNA, 75 bp, synthetic construct
  source 1..75: mol_type = other DNA
tgacccgtgatattgcgctggattaccgcaataaggagcaaaaaatcagcatcgggccacactgctggcttaacc

SEQ ID NO: 509326 - DNA, 75 bp, synthetic construct
  source 1..75: mol_type = other DNA
aacttgacgtacgcgttgagcaaatctcgcagccggatgtaaatatcaacctcgtcactctgaatgccaaaggta

SEQ ID NO: 509327 - DNA, 75 bp, synthetic construct
  source 1..75: mol_type = other DNA
ggcacggcgcagctgtcagacaactggccggtggatatcaccctcaacagcacactgaacgtggagccgttgaaa

SEQ ID NO: 509328 - DNA, 75 bp, synthetic construct
  source 1..75: mol_type = other DNA
aaggtgaaaaggtgaagctgaaagtgggcggcgcgctgcgcgaacagctggagattggcgttaatctttccggtc

SEQ ID NO: 509329 - DNA, 75 bp, synthetic construct
  source 1..75: mol_type = other DNA
ctgaaactgaaactcaccggtaaaatgaccgattacacgctctctatgcgcacggcagtgaagggacaggagatc

SEQ ID NO: 509330 - DNA, 75 bp, synthetic construct
  source 1..75: mol_type = other DNA
ccgaactgggctggaccatccgcctgactaataatggtcagttcgatggtcaggtgcaggtgaccgatccacaag

SEQ ID NO: 509331 - DNA, 75 bp, synthetic construct
  source 1..75: mol_type = other DNA
ttgatcgtaaagaagaacgctggaagggaacacttagtaatacccgcttccagacgccagtcgggccgtgggcgc

SEQ ID NO: 509332 - DNA, 75 bp, synthetic construct
  source 1..75: mol_type = other DNA
ggtatcttcacgggtaaagcggacgttgcctgggacaccacgaaagaggggctgccgcagggcagtatcaccctt

SEQ ID NO: 509333 - DNA, 75 bp, synthetic construct
  source 1..75: mol_type = other DNA
tcaatgaagcagcaaaaagcgccatgcaggcagagcttatttgctctctgatgatggggaacacaggtgaaatga

SEQ ID NO: 509334 - DNA, 75 bp, synthetic construct
  source 1..75: mol_type = other DNA
gaaacgctgattgcggcggcagggggatttgtgacgcaagaaggtgtggctgaaggtgagaatggcataagtttt

SEQ ID NO: 509335 - DNA, 75 bp, synthetic construct
  source 1..75: mol_type = other DNA
cgttggccgcattttgccgaagcaacggcccgcagcgctgcgctttgcgctgaacaagagagcctgttagatgaa

SEQ ID NO: 509336 - DNA, 75 bp, synthetic construct
  source 1..75: mol_type = other DNA
gaagacgaaagtaatcaggatgatagctacgatcgtaacttcctgcgcctgcgcgtggtgccgttattacagcag

SEQ ID NO: 509337 - DNA, 75 bp, synthetic construct
  source 1..75: mol_type = other DNA
gcttccgatgcgttaactaacggttctctggctaaaaacctgatgtttgctcaaaccaccaaaggtgttctggag

SEQ ID NO: 509338 - DNA, 75 bp, synthetic construct
  source 1..75: mol_type = other DNA
cgacgatcaatgtgaaacgtttctgctggcgctaaaacgcggtagcggtcctgcagggctttcggctatggcgga

SEQ ID NO: 509339 - DNA, 75 bp, synthetic construct
  source 1..75: mol_type = other DNA
cgttggccgcattttgccgaagcaacggcccgcagtgccgcactttgtgctgaacaagagagcctgctggatgaa

SEQ ID NO: 509340 - DNA, 75 bp, synthetic construct
  source 1..75: mol_type = other DNA
tgatgctgaatttacagaagccgcacaaaaaactctaaacacgattaaagagtttgatttggttgatggcttaga

SEQ ID NO: 509341 - DNA, 75 bp, synthetic construct
  source 1..75: mol_type = other DNA
tgaaggccattattggcggagcgggcttaggctttgccctaccaggcggattatctttcctgcttcctgctttta

SEQ ID NO: 509342 - DNA, 75 bp, synthetic construct
  source 1..75: mol_type = other DNA
tgccctgattaagcagcttacaggcagggcggggggctggctgattgcggcatcgggtgatgatgcaatatgcgt

SEQ ID NO: 509343 - DNA, 75 bp, synthetic construct
  source 1..75: mol_type = other DNA
cctgggttatgcattgcgagaacatctgccaacagtggcaggtgccgctggtggttgaacgagtacaacttgcgg

SEQ ID NO: 509344 - DNA, 75 bp, synthetic construct
  source 1..75: mol_type = other DNA
ggattaaatccgtcaccgggcaaagcgaaaccattgtgccgtggcagacgtggctacaaccgctggaattaccgg

SEQ ID NO: 509345 - DNA, 75 bp, synthetic construct
  source 1..75: mol_type = other DNA
ggcctttagcggcgggcttgactccaccgttctgctgcatcagttggtgcagtggcggacggaaaatccgggcgt

SEQ ID NO: 509346 - DNA, 75 bp, synthetic construct
  source 1..75: mol_type = other DNA
atggttacgtaggcaaggacgaggcccggcaacaaattagcggttatatcctgaattattacaatagcgtcaggc

SEQ ID NO: 509347 - DNA, 75 bp, synthetic construct
  source 1..75: mol_type = other DNA
aattattacaatagcgtcaggcctcaccattacaacggtgggttgacgccggaagaatcagagaacagataccgt

SEQ ID NO: 509348 - DNA, 75 bp, synthetic construct
  source 1..75: mol_type = other DNA
gcatcccgtactgaaagcatgagtgggcagatgagtgaagatctgtcgcaacagtttgcacagtatgtgatgaaa

SEQ ID NO: 509349 - DNA, 75 bp, synthetic construct
  source 1..75: mol_type = other DNA
ctgacccatacaccataatcttttctcagcccagccctttacgtcaggtgccgaataataattacagttttctgc

SEQ ID NO: 509350 - DNA, 75 bp, synthetic construct
  source 1..75: mol_type = other DNA
tcgaaaaactggaagagatttttttcgcggagtctttcgagtatcagctccgctggcaccgcgccgggcttgagc

SEQ ID NO: 509351 - DNA, 75 bp, synthetic construct
  source 1..75: mol_type = other DNA
ttgatgtccgactcgctgaacggttcacgatagttgccagactgagtgacagccactcagttgtcagcctctgtt

SEQ ID NO: 509352 - DNA, 75 bp, synthetic construct
  source 1..75: mol_type = other DNA
cagccgacggggaaactgctgggataacagtccaatggaacgcttcttccgcagtctgaaaacagaatgggtgcc

SEQ ID NO: 509353 - DNA, 75 bp, synthetic construct
  source 1..75: mol_type = other DNA
tcgagaaactggatgaattatttttcgaccagtctttcgagtaccagttgcagtggtaccgtgcagggctggaac

SEQ ID NO: 509354 - DNA, 75 bp, synthetic construct
  source 1..75: mol_type = other DNA
tatggtgcggagatattacctatatctgggcagggaatcgctggtgctatctggcggttgttatggatctttttg

SEQ ID NO: 509355 - DNA, 75 bp, synthetic construct
  source 1..75: mol_type = other DNA
acaacggtgggttgacgccggaagaatcagagaacagatatcgtttttactgtaaaaccgtggccaatattactt

SEQ ID NO: 509356 - DNA, 75 bp, synthetic construct
  source 1..75: mol_type = other DNA
tgcgccctctgccacacctattactccagaccagcaacgtatccgcgaactggaaaagcaggttcgccgcctgga

SEQ ID NO: 509357 - DNA, 75 bp, synthetic construct
  source 1..75: mol_type = other DNA
aatacctgagccatcaggagagactgtgaaaaaaatgattgatggtaaaaatgaacgactgaaggggccattatg

SEQ ID NO: 509358 - DNA, 75 bp, synthetic construct
  source 1..75: mol_type = other DNA
atggcatcccgtactgaaagcatgagtgggcagatgagtgaagacctgtcgcaacagtttgcacagtatgtgatg

SEQ ID NO: 509359 - DNA, 75 bp, synthetic construct
  source 1..75: mol_type = other DNA
agaataataaatataatgaagaaaagctggctcaggaaagaatacctggtgctgatagtccgaaagagcttttag

SEQ ID NO: 509360 - DNA, 75 bp, synthetic construct
  source 1..75: mol_type = other DNA
atactgacaataatgctgattcccgtgtggatcagttgtctgcagccctgaattcagcgaaacagagttacgacc

SEQ ID NO: 509361 - DNA, 75 bp, synthetic construct
  source 1..75: mol_type = other DNA
cgggccagccatgatgcacgtcatgatattgatgccagagctacacaagactttaaagaggccagcgattacttt

SEQ ID NO: 509362 - DNA, 75 bp, synthetic construct
  source 1..75: mol_type = other DNA
ccggaccctgacctgttattcagggaactgctcagtgacagttacagctatttctacggggccagccagtcggcc

SEQ ID NO: 509363 - DNA, 75 bp, synthetic construct
  source 1..75: mol_type = other DNA
acagactatcgagacaatatcggggatactcaggacagtatacgtggcgaggaaaatattgtaagagggcagtat

SEQ ID NO: 509364 - DNA, 75 bp, synthetic construct
  source 1..75: mol_type = other DNA
ggctctgcgggggcgcgcacgctggctgacatgctgacccaaaacggcgtcccgatgagccgttaccgtgccggg

SEQ ID NO: 509365 - DNA, 75 bp, synthetic construct
  source 1..75: mol_type = other DNA
caggcctcaccattacaacggtgggttgacgccggaagaatcagagaacagatatcgtttttactgtaaaaccgt

SEQ ID NO: 509366 - DNA, 75 bp, synthetic construct
  source 1..75: mol_type = other DNA
gcattatctcagaataataaatataatgaagagcgagaaagtcaaaagataatacctgagccatcagaagatggc

SEQ ID NO: 509367 - DNA, 75 bp, synthetic construct
  source 1..75: mol_type = other DNA
tcttcagccagatgctcggtgacagctacagttatttctacggctccagccagtcggccagccagattatccgtc

SEQ ID NO: 509368 - DNA, 75 bp, synthetic construct
  source 1..75: mol_type = other DNA
tcgccagtctattacgtaacggttgccaggtcacacattgcaaatcgacgcgcggctggattgaaacaccggacg

SEQ ID NO: 509369 - DNA, 75 bp, synthetic construct
  source 1..75: mol_type = other DNA
atgaggtgcgtggtcagccgcgggacgtcatgttccatagcgaccagggaagtcaatatacaggactgaaatatc

SEQ ID NO: 509370 - DNA, 75 bp, synthetic construct
  source 1..75: mol_type = other DNA
accgtattcgcgacattctcaaatcccgacagattggcgcgacgttctatttttcccgcgaggcactgctgcgcg

SEQ ID NO: 509371 - DNA, 75 bp, synthetic construct
  source 1..75: mol_type = other DNA
aagggaagtcttgatcgaacggatgatgattcacattctgcaagtagtggcagcagagctacccatgatgctcgc

SEQ ID NO: 509372 - DNA, 75 bp, synthetic construct
  source 1..75: mol_type = other DNA
tgtgtttgccctgatgtggctgcagtcatggccaatgttgtacgccattctgaacagtgccatgacattttatgc

SEQ ID NO: 509373 - DNA, 75 bp, synthetic construct
  source 1..75: mol_type = other DNA
tgtttggcgcggaactggtagtgaaaagcaccgactttctgtcccgcaatccggaaatcatcaatctttttcagg

SEQ ID NO: 509374 - DNA, 75 bp, synthetic construct
  source 1..75: mol_type = other DNA
gaaaaacgcaccgcaggatgccgaagctattctgacaaataccagttcgccggagattgcagaacgccgtcgggc

SEQ ID NO: 509375 - DNA, 75 bp, synthetic construct
  source 1..75: mol_type = other DNA
atattattgctgatcatcaggggcatcaggccattattgagcaaagaacgcaggacagtaatatccgtaatgatg

SEQ ID NO: 509376 - DNA, 75 bp, synthetic construct
  source 1..75: mol_type = other DNA
gtacagcggcacaacgtgatggatttgctgggctgggtggccgtgtttgtgcttatcagcctgctggttaatgtc

SEQ ID NO: 509377 - DNA, 75 bp, synthetic construct
  source 1..75: mol_type = other DNA
agatgttacttatatcggaaaatatatgctctcttccggaagtaaaaaagaatactatggttttagcataattag

SEQ ID NO: 509378 - DNA, 75 bp, synthetic construct
  source 1..75: mol_type = other DNA
tggtgattatgttcgcccattgttacccggtaatgtatatttacaagacggacggatttgttcaaaaccagacga

SEQ ID NO: 509379 - DNA, 75 bp, synthetic construct
  source 1..75: mol_type = other DNA
gcagattattgataacagtgacctggtcaaagtccatcgggtggataatgtgccggtcggtctggcgatgccact

SEQ ID NO: 509380 - DNA, 75 bp, synthetic construct
  source 1..75: mol_type = other DNA
ggatcaccagttatgcagcacgtaatggtgactcagccagcctggtgaatctggccaccacgtcatcgatggaga

SEQ ID NO: 509381 - DNA, 75 bp, synthetic construct
  source 1..75: mol_type = other DNA
ccactttcactgacgacccgtatcgggcatgcaatggtggccagttacgagatgatctacacgcaaccggacagt

SEQ ID NO: 509382 - DNA, 75 bp, synthetic construct
  source 1..75: mol_type = other DNA
tggggtaggcatcagaggtggatttaaggggagcttggatgcaacggatgatgactcacattcagcaagtagtgg

SEQ ID NO: 509383 - DNA, 75 bp, synthetic construct
  source 1..75: mol_type = other DNA
atggcccttgaccttatggcggccttttcggaaacgccgccgcctctagattatgttttacctaacatggttgcc

SEQ ID NO: 509384 - DNA, 75 bp, synthetic construct
  source 1..75: mol_type = other DNA
ggtggtgattgatcacaacgtgggtgcgggtgtgattaccgatggccatttgttacacgcgggaagcagtagcct

SEQ ID NO: 509385 - DNA, 75 bp, synthetic construct
  source 1..75: mol_type = other DNA
tggtggaagactcactggagttggcgcttcaggacgaattgccactgctggatcgcataattactcatattgatc

SEQ ID NO: 509386 - DNA, 75 bp, synthetic construct
  source 1..75: mol_type = other DNA
gcagccattaactgtggattcattgtgtctggctgcgttgcagggcgatctgctggcaaaagatattattactgg

SEQ ID NO: 509387 - DNA, 75 bp, synthetic construct
  source 1..75: mol_type = other DNA
accgacgtcacgcagtcgtttatgtccatccgcaaaactatgaccagcagcgggcgcagcgccacgtacgaggcc

SEQ ID NO: 509388 - DNA, 75 bp, synthetic construct
  source 1..75: mol_type = other DNA
agttttttatccgccaccagaaaaaacttgagcgtctaacttcgattgccataaccttgccgggaattattgata

SEQ ID NO: 509389 - DNA, 75 bp, synthetic construct
  source 1..75: mol_type = other DNA
tgccgggaattattgatacggaaaatggtattgtacatcgcatgccgttctacgaggatgtaaaagagatgccgc

SEQ ID NO: 509390 - DNA, 75 bp, synthetic construct
  source 1..75: mol_type = other DNA
ttcaacattgacccgatgtcttccgtaattttgcaacctcagccaaatggtgagctatgggcaattgatgaattg

SEQ ID NO: 509391 - DNA, 75 bp, synthetic construct
  source 1..75: mol_type = other DNA
ccgaatcggccttgttatgggaatgtgtgacattgaagacatcaaaaacaccatccctttcatcaaaatagagta

SEQ ID NO: 509392 - DNA, 75 bp, synthetic construct
  source 1..75: mol_type = other DNA
cgaggtcaatttgttagatttggaataaataaagtaaattatggagaacgtgcgccagatcgttggttacagaga

SEQ ID NO: 509393 - DNA, 75 bp, synthetic construct
  source 1..75: mol_type = other DNA
gatcgtatcatttcccatatcgatcagttttttattcgccaccagaaaaaacttgagcgtctaacttcgattgcc

SEQ ID NO: 509394 - DNA, 75 bp, synthetic construct
  source 1..75: mol_type = other DNA
tcgatctttcccgtctggcgcagctggctcctgccagtatcactaaaattgtccgtgagatgctcgaagcacacc

SEQ ID NO: 509395 - DNA, 75 bp, synthetic construct
  source 1..75: mol_type = other DNA
tcatcctgcaaccgcagccaaatggtgaactgtgggctgtggacgaattggtgttgttctcttctaacacggctg

SEQ ID NO: 509396 - DNA, 75 bp, synthetic construct
  source 1..75: mol_type = other DNA
caaactggcgtcggacgcaccggggaactgtatgcctatatgcactacggcgtgacgcccgatctgttaaccact

SEQ ID NO: 509397 - DNA, 75 bp, synthetic construct
  source 1..75: mol_type = other DNA
atgtctcagccaattacgcgtgaaaactttgatgaatggatgatacctgtttacgctccggcaccgtttattccg

SEQ ID NO: 509398 - DNA, 75 bp, synthetic construct
  source 1..75: mol_type = other DNA
gggatcagcaggggaaagagtatatcgacttcgcgggtggcattgcggtgaacgcgctgggccatgcgcatccgg

SEQ ID NO: 509399 - DNA, 75 bp, synthetic construct
  source 1..75: mol_type = other DNA
cttttttattgttttattaattttattgctgcttatcttctggaacatacaatttaaaatatttaatgagttaat

SEQ ID NO: 509400 - DNA, 75 bp, synthetic construct
  source 1..75: mol_type = other DNA
tttttttgtattgttttttttcttgttcctgtctgttgcttcagcccttttcagtggtgcggtaacaatttacgc

SEQ ID NO: 509401 - DNA, 75 bp, synthetic construct
  source 1..75: mol_type = other DNA
tgccggaggtaacgtggtgcgttttgctccggcgctgaatgtcagcgaagaagaagtgacgacggggctggatcg

SEQ ID NO: 509402 - DNA, 75 bp, synthetic construct
  source 1..75: mol_type = other DNA
ttaatagcagtaatggtccggagcaaattgatttacttgatttagtgctacagctgtggcgtggaaagtgggtaa

SEQ ID NO: 509403 - DNA, 75 bp, synthetic construct
  source 1..75: mol_type = other DNA
cggcgctggcatggcactatcttccaacacaattaccgctggcggtgctgctaagtttactggtgggctacatcg

SEQ ID NO: 509404 - DNA, 75 bp, synthetic construct
  source 1..75: mol_type = other DNA
atgggcaaagaatataaaactctcattaataaagcacttgaacgattttattttcgcttaagtgcatcaggcgct

SEQ ID NO: 509405 - DNA, 75 bp, synthetic construct
  source 1..75: mol_type = other DNA
ttagatggttagaaaatttaataaaagagtcaaagaaaaaccctgatgatataattttttatcgaggtcatttaa

SEQ ID NO: 509406 - DNA, 75 bp, synthetic construct
  source 1..75: mol_type = other DNA
tgggtttgagttctctaatatattcatctcagacgattataagatttttatttttaaaacaacaagagcaattaa

SEQ ID NO: 509407 - DNA, 75 bp, synthetic construct
  source 1..75: mol_type = other DNA
tcgctaagcttgagaaatttggtcaaactgaaaaagaaaagcatgtatctgcattggaaaccgctgtagttttga

SEQ ID NO: 509408 - DNA, 75 bp, synthetic construct
  source 1..75: mol_type = other DNA
aatccagcgtttgttgcacaggcacaacaggcgttttccggtcttaatgagcagcaacgcaacgatatgggcgat

SEQ ID NO: 509409 - DNA, 75 bp, synthetic construct
  source 1..75: mol_type = other DNA
caccacgccactgctgttttatggcgaaacgctgattgcggcggcaggagtatttatgacgcaagaaggtatggc

SEQ ID NO: 509410 - DNA, 75 bp, synthetic construct
  source 1..75: mol_type = other DNA
gatgcccgtcgcgcggcgattatccgccgctggctggcagggcagaatgcgccgatgccttcccgcgacgcgttg

SEQ ID NO: 509411 - DNA, 75 bp, synthetic construct
  source 1..75: mol_type = other DNA
gttggaaccaaggttgttaaagccgcaggaggaacactcgatgtggcagctacggcagcagcatgtacgaatgcc

SEQ ID NO: 509412 - DNA, 75 bp, synthetic construct
  source 1..75: mol_type = other DNA
gacttccgcgcccaggcggacgctatcaaaaagctgacgcagcagtacaacgtgacctatatcggtatcgactca

SEQ ID NO: 509413 - DNA, 75 bp, synthetic construct
  source 1..75: mol_type = other DNA
cacctggggatgaacagtctcggacccgaaaaatactttgacctacaggataaaatgcagggccgccaggttacc

SEQ ID NO: 509414 - DNA, 75 bp, synthetic construct
  source 1..75: mol_type = other DNA
ctttacgttgggaccggaagcggtggtcgacaaagtgcgccatgcttttattagcgagaagccgaagatgcgcta

SEQ ID NO: 509415 - DNA, 75 bp, synthetic construct
  source 1..75: mol_type = other DNA
tccggtgacgctggtgacctgggcggtaatggtgcttaagcgcctgctgccggggcgcgtgatggacaaaatatt

SEQ ID NO: 509416 - DNA, 75 bp, synthetic construct
  source 1..75: mol_type = other DNA
atgcgctttttataccatcaatggccttttcaatattagtgttttcgtttaatggtggtattatttcaaaaataa

SEQ ID NO: 509417 - DNA, 75 bp, synthetic construct
  source 1..75: mol_type = other DNA
ctgctggcggatgatttagcgcactgtcaaacgccgcaggggacgctgcagattgcgccaatgctggcgatgagt

SEQ ID NO: 509418 - DNA, 75 bp, synthetic construct
  source 1..75: mol_type = other DNA
taaatctgatgtcattagttcctgacttcagactggaaggattgaaagaagctcaaacctttgccacaacacagc

SEQ ID NO: 509419 - DNA, 75 bp, synthetic construct
  source 1..75: mol_type = other DNA
tatcctggtcaattagagaagattcagtctggtatgaagtgggcagacgaagaccagcgcaattctatcggcacc

SEQ ID NO: 509420 - DNA, 75 bp, synthetic construct
  source 1..75: mol_type = other DNA
ttatgacgtggctttttacgccgacgatttggatgcgattaacgagctttccgaactcgtctgcgctgcagaatg

SEQ ID NO: 509421 - DNA, 75 bp, synthetic construct
  source 1..75: mol_type = other DNA
cagaacagcatacatggcgaggaaaatattgtaagaggacagtattctgaactgcagaatcaccataaaacagaa

SEQ ID NO: 509422 - DNA, 75 bp, synthetic construct
  source 1..75: mol_type = other DNA
aatacctgagccatcagaagagactgtgaaaaaaatgattgatgagaaaaagaatcaactgaagggatcattatg

SEQ ID NO: 509423 - DNA, 75 bp, synthetic construct
  source 1..75: mol_type = other DNA
gcattatctcagaataataaatataatgaagagcgagaaagtcaaaagataatacctgagccatcagaagagact

SEQ ID NO: 509424 - DNA, 75 bp, synthetic construct
  source 1..75: mol_type = other DNA
ggtgggctgacgccggtgaaccgccccgggtttcctggagagtgttttatctgtgaactcaggctgccagatcat

SEQ ID NO: 509425 - DNA, 75 bp, synthetic construct
  source 1..75: mol_type = other DNA
ctcatctggagaagagctttaaaccgaaatttatgggtgttggaggtggtattggtgtgagggctggtgttaaag

SEQ ID NO: 509426 - DNA, 75 bp, synthetic construct
  source 1..75: mol_type = other DNA
atggtacagactatcctgacgggaattgccattggtattttcccgcttctggtactggcagctgtcttcaacaaa

SEQ ID NO: 509427 - DNA, 75 bp, synthetic construct
  source 1..75: mol_type = other DNA
gataagctgaattttgatacgaataccggaggcaagacctggcattattatgtgcagcagatatttggcggcaga

SEQ ID NO: 509428 - DNA, 75 bp, synthetic construct
  source 1..75: mol_type = other DNA
gttggcgctaaggttggtgggggagccagtattgacggtagtgatctggactcacatgaagccagtagtggcagc

SEQ ID NO: 509429 - DNA, 75 bp, synthetic construct
  source 1..75: mol_type = other DNA
cgcagtggccgtgatgtgggtacagcggcacaacgtgatggatttgctgggctgggtggccgtgtttgtgcttat

SEQ ID NO: 509430 - DNA, 75 bp, synthetic construct
  source 1..75: mol_type = other DNA
tggtatcaatgcaacgcgtcagattgcagcggcacaacaggaaatggcccgggaagcatcgaacagagcagaaag

SEQ ID NO: 509431 - DNA, 75 bp, synthetic construct
  source 1..75: mol_type = other DNA
ccaatggtacagactatcctgacgggaattgccattggtattttcccgcttctggtactggcagctgtcttcaac

SEQ ID NO: 509432 - DNA, 75 bp, synthetic construct
  source 1..75: mol_type = other DNA
caattaacgcactgaaagaaggtattaccagtaatgctgcccgcaatggtgacaccgccagcctggtcagtctgg

SEQ ID NO: 509433 - DNA, 75 bp, synthetic construct
  source 1..75: mol_type = other DNA
cgttgaatacatcggcattgacgcaaccggcctcggtctcggcgtgttccagctggtgcgctcattttacccggc

SEQ ID NO: 509434 - DNA, 75 bp, synthetic construct
  source 1..75: mol_type = other DNA
gtgaagcgaaacaggcggatcttattttatatgctcgcttaccggcgcagctaagcggaagtctggctgacccaa

SEQ ID NO: 509435 - DNA, 75 bp, synthetic construct
  source 1..75: mol_type = other DNA
gcggcgcgctgtcactggacgccgggcaaacgctgttcactggcggcagtgtgttaccgccatcaaccttaaaat

SEQ ID NO: 509436 - DNA, 75 bp, synthetic construct
  source 1..75: mol_type = other DNA
gctggttattgaacgttggcacagtggagcttgactctgcttgcctggcaaaattgccacaggaagagccctctc

SEQ ID NO: 509437 - DNA, 75 bp, synthetic construct
  source 1..75: mol_type = other DNA
tattttcgcttaagtgcatcaggcgctcatgctgaacgtgcagcccgtgactcattgaccagggcaatccggagt

SEQ ID NO: 509438 - DNA, 75 bp, synthetic construct
  source 1..75: mol_type = other DNA
gcgatttcgtgctgcatatggatgggctggcgaatgattttctccctgacgctggccgctggcagtggcgctact

SEQ ID NO: 509439 - DNA, 75 bp, synthetic construct
  source 1..75: mol_type = other DNA
ggcgataatctccaggcgtggctggaacagaatacccgactcccgaaaacgggttgcccatcaggaaatgagtgt

SEQ ID NO: 509440 - DNA, 75 bp, synthetic construct
  source 1..75: mol_type = other DNA
cgcattacgcgtaatggtctggtcattcctgatctccgttatctggtggcggattgccagttggcgcatatcacc

SEQ ID NO: 509441 - DNA, 75 bp, synthetic construct
  source 1..75: mol_type = other DNA
cagccgcgccgaagaccctcgcgcagtggcaagccatgttgcctaacacctggatcaatattgataaactgatct

SEQ ID NO: 509442 - DNA, 75 bp, synthetic construct
  source 1..75: mol_type = other DNA
tcaataaagcacctgagcgctttcattttcgcataagcgcatcaggcactcatgctgagctcgcagcccgagagt

SEQ ID NO: 509443 - DNA, 75 bp, synthetic construct
  source 1..75: mol_type = other DNA
agcgaactggttagcgccgtcaatccgaaacaattcgccatgtccggggcatttagtggtgcattgccgttatgg

SEQ ID NO: 509444 - DNA, 75 bp, synthetic construct
  source 1..75: mol_type = other DNA
ggcgataatctccaggtatggctggagcagaatgcccagctaccggaaactggctgcccatcaggaaaagagtgt

SEQ ID NO: 509445 - DNA, 75 bp, synthetic construct
  source 1..75: mol_type = other DNA
gtgctgacgcaagggcaagcaggtaagggcaacgcggtgctcaatttcggcccaggaaaactgagcatggataac

SEQ ID NO: 509446 - DNA, 75 bp, synthetic construct
  source 1..75: mol_type = other DNA
cctttccgtgggtgggcggcgaagcaacgcatgtagttatcccaaatgaggtcatggcacaggattgcctgctgg

SEQ ID NO: 509447 - DNA, 75 bp, synthetic construct
  source 1..75: mol_type = other DNA
gaggaggcccggaagttaggtgtcgcaacagtgattgccggtggtggcgatggcaccattaatgaagtttctacg

SEQ ID NO: 509448 - DNA, 75 bp, synthetic construct
  source 1..75: mol_type = other DNA
tcttgatggcgaaccgttgagtgggcaaaacttccatattgaaatacttccggcagcattgcgctgtcgattacc

SEQ ID NO: 509449 - DNA, 75 bp, synthetic construct
  source 1..75: mol_type = other DNA
gggcgtcaggccggtggcggtcaacaattgtgcccgaacgcgttaattaacgatggcttgctgcaactgcgcatt

SEQ ID NO: 509450 - DNA, 75 bp, synthetic construct
  source 1..75: mol_type = other DNA
tgctaagatcgagaaactgctggcatggctggaaacgctgaaggctgaactgggtattccgaaatctatccgtga

SEQ ID NO: 509451 - DNA, 75 bp, synthetic construct
  source 1..75: mol_type = other DNA
gagcgtgttcacagtgcggcaactatcgcgggtatcgcgttcgcgaacgccttcctgggtgtatgtcactcaatg

SEQ ID NO: 509452 - DNA, 75 bp, synthetic construct
  source 1..75: mol_type = other DNA
caacggttatgctgaccagatcacttccgtactgaaagcggctggcgttgaaactgaagtcttcttcgaagtaga

SEQ ID NO: 509453 - DNA, 75 bp, synthetic construct
  source 1..75: mol_type = other DNA
attaggaaccgccaatgattttgccaccagtgtagggattcctgaggcactggataaggcgctgaaactggcaat

SEQ ID NO: 509454 - DNA, 75 bp, synthetic construct
  source 1..75: mol_type = other DNA
gcgcctcgcgcgggtaaaccgctacggccagaccggcaacgaagcggatttaaacccgaacgtggccaaccgcaa

SEQ ID NO: 509455 - DNA, 75 bp, synthetic construct
  source 1..75: mol_type = other DNA
tactgacctgcgagtcggttcacatcgttgcagaagtggatgatgagatgtgcaaacagggaatgccccgttttg

SEQ ID NO: 509456 - DNA, 75 bp, synthetic construct
  source 1..75: mol_type = other DNA
cgacggcttattgcaactacgcattttcactggtgacgacattattcccgcccttgtttcgacattaaagtcaga

SEQ ID NO: 509457 - DNA, 75 bp, synthetic construct
  source 1..75: mol_type = other DNA
tggataaggcgctgaaactagcaattgctggtgacgctattgcgattgatatggcgcaggtcaacaaacaaacct

SEQ ID NO: 509458 - DNA, 75 bp, synthetic construct
  source 1..75: mol_type = other DNA
gctttatcaatatggcgacgggcggatttggtacgcgcatcaccacggaaacaccggagaaattaaaagccgcac

SEQ ID NO: 509459 - DNA, 75 bp, synthetic construct
  source 1..75: mol_type = other DNA
tctcagggtggtatcggtgacctgtataacttcaaactcgcaccttccctgaccctgggttgtggttcctggggt

SEQ ID NO: 509460 - DNA, 75 bp, synthetic construct
  source 1..75: mol_type = other DNA
tatctcgataaaaataaagttccatcttatatagagcttaaatcactggatgatatttatcatcatagcgacatc

SEQ ID NO: 509461 - DNA, 75 bp, synthetic construct
  source 1..75: mol_type = other DNA
gatgccattatcaccggcaacgatcctttagacagagacgttctagaacaagcaacaaaactgaaagttatttca

SEQ ID NO: 509462 - DNA, 75 bp, synthetic construct
  source 1..75: mol_type = other DNA
aaaccactttgcttctgaatatatctacaacgcctataaagatgaaaaaacctgtggtgttctgtctgaagacga

SEQ ID NO: 509463 - DNA, 75 bp, synthetic construct
  source 1..75: mol_type = other DNA
tccccgcccacgtttctgaaaccgtttgtggctggtgtctgtgcggcattgctggcggtcagcgtggccattccg

SEQ ID NO: 509464 - DNA, 75 bp, synthetic construct
  source 1..75: mol_type = other DNA
caggtggtgacccccggtcattaccggattatgctgccctgcgcgatgaaatcagcaaactgacccacccggcac

SEQ ID NO: 509465 - DNA, 75 bp, synthetic construct
  source 1..75: mol_type = other DNA
aggcatcgtagtgcacaaagctctcaatgccaattctatttccgttgcagagatggccatcctgatgatgctctc

SEQ ID NO: 509466 - DNA, 75 bp, synthetic construct
  source 1..75: mol_type = other DNA
tcagaaatatccgctggcagactatgcactgaccccggatatggcgattgttgacgccaacctggttatggatat

SEQ ID NO: 509467 - DNA, 75 bp, synthetic construct
  source 1..75: mol_type = other DNA
gaacgcagctatcgttggtcaaccggcgtataaaattgctgaactggcaggcttctctgttccagaaaatactaa

SEQ ID NO: 509468 - DNA, 75 bp, synthetic construct
  source 1..75: mol_type = other DNA
aatattaattggcgaagtgagtacgactgatatcagcgaaccgttcgcacacgaaaaactgtctccaacgttggc

SEQ ID NO: 509469 - DNA, 75 bp, synthetic construct
  source 1..75: mol_type = other DNA
tactacggtcgtgattatgtagaaggtgaaactgcagcgaaaaaagaagccgctccggctaaagctgagaaaaaa

SEQ ID NO: 509470 - DNA, 75 bp, synthetic construct
  source 1..75: mol_type = other DNA
gactctgggttgtggttcttggggaggtaactccatctctgaaaacgttggtccgaaacacctgatcaacaagaa

SEQ ID NO: 509471 - DNA, 75 bp, synthetic construct
  source 1..75: mol_type = other DNA
accgtactgcggcaaaaatccagaaactgctgggctggctggaagaaatcaaagctgaactgggtattcctaagt

SEQ ID NO: 509472 - DNA, 75 bp, synthetic construct
  source 1..75: mol_type = other DNA
gaatgcaacgggttttatgatgttccgcgccctcgcccgacgccgccggtaagacgaaacacaacggagcacccc

SEQ ID NO: 509473 - DNA, 75 bp, synthetic construct
  source 1..75: mol_type = other DNA
ggcgagtgcgactatgacgcctttgatgaggcgtattgtggcgaggctgaaagcgaggaggattttgcttatggc

SEQ ID NO: 509474 - DNA, 75 bp, synthetic construct
  source 1..75: mol_type = other DNA
acctgaacgcgcactgcaaggcaaagtggttttaccactggcaacaggcggcacagtggctcatctattggcggt

SEQ ID NO: 509475 - DNA, 75 bp, synthetic construct
  source 1..75: mol_type = other DNA
cgattatgcccttaagccagttttaagtgcgatgaaagcccaggagatcctgcacggcgtgtttgccgatgactc

SEQ ID NO: 509476 - DNA, 75 bp, synthetic construct
  source 1..75: mol_type = other DNA
acggctaaagcgattgctgaacagtgcgatgtcattattaccatgctgccaaactccccgcatgtaaaagaggtg

SEQ ID NO: 509477 - DNA, 75 bp, synthetic construct
  source 1..75: mol_type = other DNA
agcactggccgttactgggctgtgggagatggatgacctacagcttttgtatttatttcagagtgttatgttatg

SEQ ID NO: 509478 - DNA, 75 bp, synthetic construct
  source 1..75: mol_type = other DNA
acggggtgccacaaatactgcgcagttactttgattatgaatcctatgcgcgcgatttattcagtagcggttatg

SEQ ID NO: 509479 - DNA, 75 bp, synthetic construct
  source 1..75: mol_type = other DNA
cagccgctataagcccggcaagttgcaccgcgatacagagtttatgattgcccgcgatatgctgattcgccctga

SEQ ID NO: 509480 - DNA, 75 bp, synthetic construct
  source 1..75: mol_type = other DNA
ttgcacgcgattttctaattcggcctgaaactgtgctggctatcgtccattcccgctttagcaacgcccacaccc

SEQ ID NO: 509481 - DNA, 75 bp, synthetic construct
  source 1..75: mol_type = other DNA
gagcgtattgaccgaacctttgacatggctcttggcagtgaaaacgccgaaactatgataatgagaacgcggtta

SEQ ID NO: 509482 - DNA, 75 bp, synthetic construct
  source 1..75: mol_type = other DNA
ctgtttacgtgggtacgtatcacaaatacaactgcggcagcattttcggcaaatggtttgatctgacggagtttg

SEQ ID NO: 509483 - DNA, 75 bp, synthetic construct
  source 1..75: mol_type = other DNA
acgtcattctctgttccacatggaaactgtggtcgatgccagccgtatgatttctgatatggcccggttgatggg

SEQ ID NO: 509484 - DNA, 75 bp, synthetic construct
  source 1..75: mol_type = other DNA
tggaaatatattaatggcttttattgagaattggataaaggttaatggtggatggaaaatgcagtttatatcgta

SEQ ID NO: 509485 - DNA, 75 bp, synthetic construct
  source 1..75: mol_type = other DNA
ctgggaaacgttatggatgctgagtatcggggtgattgcagccattctgtttgagtgtgctgcaaagttaatccg

SEQ ID NO: 509486 - DNA, 75 bp, synthetic construct
  source 1..75: mol_type = other DNA
atttggacgttttcaaccccaatattatgattataaatttggtagtagattaaaactacctaatgtaaattggaa

SEQ ID NO: 509487 - DNA, 75 bp, synthetic construct
  source 1..75: mol_type = other DNA
cgctcggagctgccagagtatgacatgagcggggcatggttctggcgggtactgtggcgattcagggcatattac

SEQ ID NO: 509488 - DNA, 75 bp, synthetic construct
  source 1..75: mol_type = other DNA
ggacttgatatgcagacaggggaaggcggtcagggactgtcaggaggacagaggcagatggttgccctgacgaga

SEQ ID NO: 509489 - DNA, 75 bp, synthetic construct
  source 1..75: mol_type = other DNA
aagacgaaacgcaactgagcagcctgctgttgatgatgcggtgtggtgcaactggcgtcgctcattaccctgggt

SEQ ID NO: 509490 - DNA, 75 bp, synthetic construct
  source 1..75: mol_type = other DNA
gaatggactgattctttgcatttaatgatgaatgaaagtacgcggcagtcattatcaaaaaaagcgtaccagttc

SEQ ID NO: 509491 - DNA, 75 bp, synthetic construct
  source 1..75: mol_type = other DNA
ctattggttaagcaatcctccggctgctttccttaccaacattaagaagactggcactaagcagagtttaaagat

SEQ ID NO: 509492 - DNA, 75 bp, synthetic construct
  source 1..75: mol_type = other DNA
agtgatgtctccttttcttataagcccggattacccgacgcattgtgcggtctgtcgctctgtatccggcccgga

SEQ ID NO: 509493 - DNA, 75 bp, synthetic construct
  source 1..75: mol_type = other DNA
cggaagaggaacactccggtcctgaagatataccttcagtgaaggcgattctgaataccctgctccccctggaga

SEQ ID NO: 509494 - DNA, 75 bp, synthetic construct
  source 1..75: mol_type = other DNA
tctgcttccgcaatatgatacagatatctctgcccggggaaacagcctgtggaacaaggcagttcacatcatcaa

SEQ ID NO: 509495 - DNA, 75 bp, synthetic construct
  source 1..75: mol_type = other DNA
ttctgcttgatgaacccacgacgggtcttgatctgcagacagagaacattggtaagcgtcaacggagcaccgtat

SEQ ID NO: 509496 - DNA, 75 bp, synthetic construct
  source 1..75: mol_type = other DNA
tctggcaggaatattactgcagcgaccgctttcccgtcatattaatgcctccatgcgggaatcatcgcagcgtca

SEQ ID NO: 509497 - DNA, 75 bp, synthetic construct
  source 1..75: mol_type = other DNA
cagccagtgtcgcccgctcgtccatacgggtaaaaaataccagtaatgtcataatctgcttttccacagcagttc

SEQ ID NO: 509498 - DNA, 75 bp, synthetic construct
  source 1..75: mol_type = other DNA
gtaccagtacgccggggctgggtctgctgttgtggatgcaaaaagtctatggcaataacgccccgcaagcctggc

SEQ ID NO: 509499 - DNA, 75 bp, synthetic construct
  source 1..75: mol_type = other DNA
tatggcctgtttttaaaaggcgaaagcgatctggtactgagctacaccacctctccggcttatcacattctcgaa

SEQ ID NO: 509500 - DNA, 75 bp, synthetic construct
  source 1..75: mol_type = other DNA
gaactgaaactggtggcgctggaagatggcgtttcgctgctcaaccgtctgcggatggaaggcaaaaacagcaaa

SEQ ID NO: 509501 - DNA, 75 bp, synthetic construct
  source 1..75: mol_type = other DNA
ttctccggcttttcagaatgcgatcccaaccggcaactggatgtatccggtggcaaacgtcacgctgcctgccgg

SEQ ID NO: 509502 - DNA, 75 bp, synthetic construct
  source 1..75: mol_type = other DNA
gcaccagtactcctggtctgggcctgctgctatggatgcaaaaaatctatggcaatgacgccccacaggcctggc

SEQ ID NO: 509503 - DNA, 75 bp, synthetic construct
  source 1..75: mol_type = other DNA
tgaaaaacccgccacaaagcctgaaagaactggttgagagcgatcaaaactggcgggtgatttatcaggatccgc

SEQ ID NO: 509504 - DNA, 75 bp, synthetic construct
  source 1..75: mol_type = other DNA
ccgcagccaccggtttgcctgcgtttgactacctttggtcgttcagaaagcgatctggcgcaaagcctggacacg

SEQ ID NO: 509505 - DNA, 75 bp, synthetic construct
  source 1..75: mol_type = other DNA
cggcctgtggttttgctgtgcaacttaaccgttgcctgatgttctttaccccaggcgtgccttcggaatttaaag

SEQ ID NO: 509506 - DNA, 75 bp, synthetic construct
  source 1..75: mol_type = other DNA
tgaccacttttggtcgttcggaaagcgatctggcacaaagcctggatgcgttgcaactgccgccaggtgtgacga

SEQ ID NO: 509507 - DNA, 75 bp, synthetic construct
  source 1..75: mol_type = other DNA
aaacgatgatctggcagcctgagttcacagataaaacactctccaggaaaaccggggcggttcagatccataaca

SEQ ID NO: 509508 - DNA, 75 bp, synthetic construct
  source 1..75: mol_type = other DNA
caggaagaaacactggcgcagacagcgcactggataacggaacggcgggcgaaccatttcgctgggctggcgctg

SEQ ID NO: 509509 - DNA, 75 bp, synthetic construct
  source 1..75: mol_type = other DNA
tcaccattcttcgcgaacgtagtcagcacgccgatgtgctgatcgttaacggcgggctgggaccgaccagcgatg

SEQ ID NO: 509510 - DNA, 75 bp, synthetic construct
  source 1..75: mol_type = other DNA
taccgcaatgtgtttactgaagatgaccagggaacgcatttccggctggttatccgtaatgctgaaggtcagttg

SEQ ID NO: 509511 - DNA, 75 bp, synthetic construct
  source 1..75: mol_type = other DNA
gcggctcgccagtgacggcttctcagacaataaacctcattcatttcacccatcaggccacgtcttctccgggag

SEQ ID NO: 509512 - DNA, 75 bp, synthetic construct
  source 1..75: mol_type = other DNA
ctttctcacgcgagcaggctgttgtcatcacaacagcttaccacaatgtgtttatcgacgatgaccagggaactc

SEQ ID NO: 509513 - DNA, 75 bp, synthetic construct
  source 1..75: mol_type = other DNA
atgccgggttgtacatcacgtttattgcccgaaggccctttctcacgcgaacaggctgttgccgtcaaaacagct

SEQ ID NO: 509514 - DNA, 75 bp, synthetic construct
  source 1..75: mol_type = other DNA
gcggcgctgtccggtctgttccagccgtacagtgtgggtaaattcaacgccacggcagccctgggtggttacagt

SEQ ID NO: 509515 - DNA, 60 bp, synthetic construct
  source 1..60: mol_type = other DNA
atgcgtgcactggcgcgacatccgacgccattcatggccatatcaatgattttctggtgc

SEQ ID NO: 509516 - DNA, 75 bp, synthetic construct
  source 1..75: mol_type = other DNA
gaacatgaacttcattatatcggtatcgacaccgctaaagagaaactggatgtcgatgtgttgcgtcctgatggt

SEQ ID NO: 509517 - DNA, 75 bp, synthetic construct
  source 1..75: mol_type = other DNA
acggctaaagccatcgctgaacagtgcgatgtcatcattaccatgctgccaaactctccgcacgtgaaagaggtg

SEQ ID NO: 509518 - DNA, 75 bp, synthetic construct
  source 1..75: mol_type = other DNA
cggtgccgctgcacacgctgctgatacccgcattggtgtaacaatctataagtacgacgataactttatgtctgt

SEQ ID NO: 509519 - DNA, 75 bp, synthetic construct
  source 1..75: mol_type = other DNA
atgttatcaaagagctgaatgacaaaggcattaaaactgaacagctacagttagacaccgcaatgtgggataccg

SEQ ID NO: 509520 - DNA, 75 bp, synthetic construct
  source 1..75: mol_type = other DNA
cgctggcggtgctggaattctgaacccgatgccggaaaggtgcttaatacgcggctcgccagtgacggtcttctc

SEQ ID NO: 509521 - DNA, 75 bp, synthetic construct
  source 1..75: mol_type = other DNA
tatccgcaatgccgaagggcagctacgctggcggtgctggaattttgaacctgatgccggaaaacagctaaatcc

SEQ ID NO: 509522 - DNA, 75 bp, synthetic construct
  source 1..75: mol_type = other DNA
gcacagtaccggaatgtctttatcgaggatgatcagggaacgcattttcgcctggttgtccgcaataacagtggc

SEQ ID NO: 509523 - DNA, 75 bp, synthetic construct
  source 1..75: mol_type = other DNA
gatttaagcgcactcgccgcagcgacagccaaaggtgaaagcctggttcttcatgaagcctggctcaatgagatg

SEQ ID NO: 509524 - DNA, 75 bp, synthetic construct
  source 1..75: mol_type = other DNA
cagccgcgcggcttcaatgttgatcacagcggcaagtatctgattgccgccgggcaaaaatctcaccacatctcg

SEQ ID NO: 509525 - DNA, 75 bp, synthetic construct
  source 1..75: mol_type = other DNA
acggtaatatcgaatgtgtccagacgctggatatgatgccggaaaacttctccgacacccgttgggcggctgata

SEQ ID NO: 509526 - DNA, 75 bp, synthetic construct
  source 1..75: mol_type = other DNA
atccaaacgaacaatatgcgtattgcgtcaatgagttaaacagctcagtggatgtctgggaactgaaagatccgc

SEQ ID NO: 509527 - DNA, 75 bp, synthetic construct
  source 1..75: mol_type = other DNA
ccgtaaagtcaccattcagcgtccactgcgtgccaaactagatattaccgctgcgggcattgctgcatttgtgca

SEQ ID NO: 509528 - DNA, 75 bp, synthetic construct
  source 1..75: mol_type = other DNA
agaggtgctgccacatgtaccggatgcctttattgatcactcagtgcgtgatgaaaaagacggcgaagtgggcat

SEQ ID NO: 509529 - DNA, 75 bp, synthetic construct
  source 1..75: mol_type = other DNA
acggcaatattgagtgtgtacagacgctggatatgatgcctgaaagcttctctgatacccgctgggcggctgata

SEQ ID NO: 509530 - DNA, 75 bp, synthetic construct
  source 1..75: mol_type = other DNA
agaaacacccttttcttggcaatcatttcaaactgcaccctgaaaaagggttggtacatatcagtgaagcatggg

SEQ ID NO: 509531 - DNA, 75 bp, synthetic construct
  source 1..75: mol_type = other DNA
gcctgctgttgctgtcgaaaccatcggaacgcgagaaagggtacttttatgattcgcatcaccggttggcccata

SEQ ID NO: 509532 - DNA, 75 bp, synthetic construct
  source 1..75: mol_type = other DNA
gtgattaatcgtatacagaatgaatctgcctggttagcactgatagaacagtataaagacaattgggaactggca

SEQ ID NO: 509533 - DNA, 75 bp, synthetic construct
  source 1..75: mol_type = other DNA
atcaacgccaccgacctgtggacttcaatccgcaacgagggcaacaagcgccgtattgtcagcgatgagcagcgc

SEQ ID NO: 509534 - DNA, 75 bp, synthetic construct
  source 1..75: mol_type = other DNA
ccgtattgtcagcgatgagcagcgccgccagattctggacatctacgccgcatgcgaaaccggtacgctttcccg

SEQ ID NO: 509535 - DNA, 75 bp, synthetic construct
  source 1..75: mol_type = other DNA
gggtagcaccaagacgcgccgcaatctggaagactacatcgccctgttttcggataacgcccgcgctatcttcga

SEQ ID NO: 509536 - DNA, 75 bp, synthetic construct
  source 1..75: mol_type = other DNA
taatactgcaatggcagtattatcttatcactttctggagaagaacgataaaatcagaaaaataatcacatcctg

SEQ ID NO: 509537 - DNA, 75 bp, synthetic construct
  source 1..75: mol_type = other DNA
atgtgggactgactccctgttttattgcccgaaggccctttctcacgcgaacaggcggttggcgtcacaacagct

SEQ ID NO: 509538 - DNA, 75 bp, synthetic construct
  source 1..75: mol_type = other DNA
atgttggactggcgccctgttttattgcccgaaggccctttctcacgcgaacaggcggttggcgtcacaacagct

SEQ ID NO: 509539 - DNA, 75 bp, synthetic construct
  source 1..75: mol_type = other DNA
atgttggactgcccccctgttttattgcccgaaggccctttctcacgcgaacaggcggttggcgtcacaacagct

SEQ ID NO: 509540 - DNA, 75 bp, synthetic construct
  source 1..75: mol_type = other DNA
ccggggatgaagtgttacacgggcaaatcgttgacactaacgctgcctggctggccgattttttctttcatcagg

SEQ ID NO: 509541 - DNA, 75 bp, synthetic construct
  source 1..75: mol_type = other DNA
atgagtcaggtgatcctcgatttacaactggcatgtgaagataattccgggttaccggaagagagccagtttcaa

SEQ ID NO: 509542 - DNA, 75 bp, synthetic construct
  source 1..75: mol_type = other DNA
cgcatatggtggtgcacggcagtctgcatttgttaggttacgatcacatcgaagatgacgaagcagaagaaatgg

SEQ ID NO: 509543 - DNA, 75 bp, synthetic construct
  source 1..75: mol_type = other DNA
tcgtttgggtattcctgatgaacctgatggacttactacctatcgatctgctgccatatatcgcagaacactgga

SEQ ID NO: 509544 - DNA, 75 bp, synthetic construct
  source 1..75: mol_type = other DNA
tttcagcttctggccaaccctgttccagtatgaggtcattctggagtcaccggccagcggcatattctatgttgg

SEQ ID NO: 509545 - DNA, 75 bp, synthetic construct
  source 1..75: mol_type = other DNA
aaccgaaaaagcctggaacaggactaaagaagcggcacagcaggccggagatgctgtaagtgaaaaggtgagcga

SEQ ID NO: 509546 - DNA, 75 bp, synthetic construct
  source 1..75: mol_type = other DNA
atgttggactgacaccctgttttattgcccgaaggccctttctcacgcgaacaggcggttggcgtcacaacagct

SEQ ID NO: 509547 - DNA, 75 bp, synthetic construct
  source 1..75: mol_type = other DNA
atgtaggactggctccctgttttattgcccgaaggccctttctcacgcgaacaggcggttggcgtcacaacagct

SEQ ID NO: 509548 - DNA, 75 bp, synthetic construct
  source 1..75: mol_type = other DNA
tattccgtagcgtagccagaaaggcgaccagcggcgtaccgggtaagtttcagaccgcgattgagctggtaatcg

SEQ ID NO: 509549 - DNA, 75 bp, synthetic construct
  source 1..75: mol_type = other DNA
ttctggccacacttccggcggatgtattttttgtgcgtcagtaccgggatatttacgcggggatttgcagacagg

SEQ ID NO: 509550 - DNA, 75 bp, synthetic construct
  source 1..75: mol_type = other DNA
cacaggttctttccaccccaatgcagccgcctcagccgcgcagatacagcaataaacgaaccgacagtagtaaga

SEQ ID NO: 509551 - DNA, 75 bp, synthetic construct
  source 1..75: mol_type = other DNA
ttaccggcgtttttataacggacattttctgcctgtagaccaggaaagcgcacaggttctttccaccccaatgca

SEQ ID NO: 509552 - DNA, 75 bp, synthetic construct
  source 1..75: mol_type = other DNA
attctgggctcgcgtaatgattacgcaggtgtcgaaaaactcggatataaccgtgcgattaaccgtaaaaaatat

SEQ ID NO: 509553 - DNA, 75 bp, synthetic construct
  source 1..75: mol_type = other DNA
catgtaaatattactaatctgcatggtcgggatctgattagtgaagttgatatattgggtaatgaaataacgctg

SEQ ID NO: 509554 - DNA, 75 bp, synthetic construct
  source 1..75: mol_type = other DNA
ttcatttattacctttttatccatggtcatctgatgatgggttttcggtaattgattatcatcaggtcgccattg

SEQ ID NO: 509555 - DNA, 75 bp, synthetic construct
  source 1..75: mol_type = other DNA
gcgagaggcatagcagaaatcaacatcacgaaacagcgtaatggcacgctgggtaccatttaccggcgttttcat

SEQ ID NO: 509556 - DNA, 75 bp, synthetic construct
  source 1..75: mol_type = other DNA
gtacatattggtgatgtgcttccggaagtggttgagcgtgttgaatgccggaatcagggactggaaaaatccaga

SEQ ID NO: 509557 - DNA, 75 bp, synthetic construct
  source 1..75: mol_type = other DNA
gtgcaatgagatgccggaacttgccccggtgattactgataccgggcgcaaaacctgggtgaagtcgtcactgga

SEQ ID NO: 509558 - DNA, 75 bp, synthetic construct
  source 1..75: mol_type = other DNA
aagggcttaaaggcctggcaaaatccggtggattaccggttattgcgctgagccaactttcccgtggagttgagt

SEQ ID NO: 509559 - DNA, 75 bp, synthetic construct
  source 1..75: mol_type = other DNA
aagtggttgagcgtgttgaatgccggaatcagggactggaaaaatccagaacgttgatgaccggtattgatgaac

SEQ ID NO: 509560 - DNA, 75 bp, synthetic construct
  source 1..75: mol_type = other DNA
gaaatgaaaaccgcaatggtgctcaaggcaaaagacgttattcgccgtggctgtctggaatatgacgtcagcgcc

SEQ ID NO: 509561 - DNA, 75 bp, synthetic construct
  source 1..75: mol_type = other DNA
atgttcatttgttgccgttttatccatggtcatctgatgatggcttttcggtaattgattatcatcaggtcgcca

SEQ ID NO: 509562 - DNA, 75 bp, synthetic construct
  source 1..75: mol_type = other DNA
ggcgcgtttcattaagggggtggagctgatgaccggacgcaatatctggatggtggaccaggcgaacctgaccat

SEQ ID NO: 509563 - DNA, 75 bp, synthetic construct
  source 1..75: mol_type = other DNA
atagcagaaatcaacatcacgaaacagcgtaatggcacactcgggaccatttaccgacgttttcataacgggcat

SEQ ID NO: 509564 - DNA, 75 bp, synthetic construct
  source 1..75: mol_type = other DNA
cacagattctttccaccccaatgcagcagccccagccgcgcagatacagcaacaaacgaactgacagcagtaaga

SEQ ID NO: 509565 - DNA, 75 bp, synthetic construct
  source 1..75: mol_type = other DNA
ggatcaacgtcgacgtgataataaagatactcctggtaataccccgggactaaagcctagtaaatctacagggaa

SEQ ID NO: 509566 - DNA, 75 bp, synthetic construct
  source 1..75: mol_type = other DNA
aaaaacctttattggtgaaccaggaccgatgggacgcattctggtcagaggtgaagcaggtcatgacatcattcc

SEQ ID NO: 509567 - DNA, 75 bp, synthetic construct
  source 1..75: mol_type = other DNA
gccgccgtcagcattgatgttcgtaatatgccggagtcaccagaaatattcgaacaggcgatgagtaacctgcct

SEQ ID NO: 509568 - DNA, 75 bp, synthetic construct
  source 1..75: mol_type = other DNA
ttaatgacgtagcaccaggtacagtgatcattaccgaaaccaatgttccgcacaaagacaacattgcttactttg

SEQ ID NO: 509569 - DNA, 75 bp, synthetic construct
  source 1..75: mol_type = other DNA
cataaagacaacattgcttactttggcgcaggcacatatggtgtaccagttctcgctgccgccactggtgctgca

SEQ ID NO: 509570 - DNA, 75 bp, synthetic construct
  source 1..75: mol_type = other DNA
atgcgttaagccgccgtgagagtagcgatgaagaacgttgcgccaggtttatccttgcccatgcgattttgttaa

SEQ ID NO: 509571 - DNA, 75 bp, synthetic construct
  source 1..75: mol_type = other DNA
gaaagcgaaatattagcgctggtcgaggcattacagcaggaaggtgcattagtaggtaatgctgccaacttactg

SEQ ID NO: 509572 - DNA, 75 bp, synthetic construct
  source 1..75: mol_type = other DNA
gttggctttatgtggaaagagccgggaacaagctgcatccatctggaaaaaacacatctgattatcaaactgtta

SEQ ID NO: 509573 - DNA, 75 bp, synthetic construct
  source 1..75: mol_type = other DNA
gcgcaggcgatgacgaagcacatatggtgtaccagtttctcgctgccgccactggtgctgcatgcggtgcaaaaa

SEQ ID NO: 509574 - DNA, 75 bp, synthetic construct
  source 1..75: mol_type = other DNA
gaactagccccggtgattaccgacaccggacgtaaaacctgggtgaagtcttcactggagcactatgttgcagcg

SEQ ID NO: 509575 - DNA, 75 bp, synthetic construct
  source 1..75: mol_type = other DNA
gtggcgctgaaatatatcccgcttctggccgggatcccgcgctcgtctgcagcgcagatgacgaagctggatatt

SEQ ID NO: 509576 - DNA, 75 bp, synthetic construct
  source 1..75: mol_type = other DNA
cgatcatcgcccacaaagaaacactgcatgtgttggaaatacgtgagcctacgtatgacgagattgaggcgctgg

SEQ ID NO: 509577 - DNA, 75 bp, synthetic construct
  source 1..75: mol_type = other DNA
cttgtttaataaatcaactattgttgacttgtcaagtgagacaatatctgagagtaaatctctttcaggccgtat

SEQ ID NO: 509578 - DNA, 75 bp, synthetic construct
  source 1..75: mol_type = other DNA
cggcatacagaaccctggactgcgatcacacatgccgcatcataggcaaggtagttaaggctcagtggcctgaag

SEQ ID NO: 509579 - DNA, 75 bp, synthetic construct
  source 1..75: mol_type = other DNA
gatccctactacgttactccggaatatctgcaatttgtacttgaacgcttcgaaataacggatattgtaataaag

SEQ ID NO: 509580 - DNA, 75 bp, synthetic construct
  source 1..75: mol_type = other DNA
ttcaagcataccgacttcggcaagatcattttgccgtttactctgctgcgtcgattggagtgcgcactggagtct

SEQ ID NO: 509581 - DNA, 75 bp, synthetic construct
  source 1..75: mol_type = other DNA
ttgttcattgacggtgcaatagcgttaacgtttacgcagtcaagaaacgaaacgatcatcccagtcgaacagcaa

SEQ ID NO: 509582 - DNA, 75 bp, synthetic construct
  source 1..75: mol_type = other DNA
ttgttcatagacggtgcaatcgcgttaacgtttacgcagtcaagaaacgaaatgatcatcccagtcgaacagcaa

SEQ ID NO: 509583 - DNA, 75 bp, synthetic construct
  source 1..75: mol_type = other DNA
gtgcaatacctaatgtcgttgaggtaatacgtcgcatcaatgaaggttccactcagccatttctttgcaaatgtg

SEQ ID NO: 509584 - DNA, 75 bp, synthetic construct
  source 1..75: mol_type = other DNA
ctgcgtgaccagtacattccctccggtatttcttcttcattgttgtgatgatccgcttgtcccggttaataacag

SEQ ID NO: 509585 - DNA, 75 bp, synthetic construct
  source 1..75: mol_type = other DNA
gactttgctggacttatctacccggttatatcaatgagtgatgaaataactcatcagggttcaaaagagagactg

SEQ ID NO: 509586 - DNA, 75 bp, synthetic construct
  source 1..75: mol_type = other DNA
attctgataggagatacacaccgctttatcaacgctgcatacaaaaatcatctgaatatccagttaggagatggc

SEQ ID NO: 509587 - DNA, 75 bp, synthetic construct
  source 1..75: mol_type = other DNA
ttttgggtatttcgaggaagagtagctaatcgctttggttatgaacaatatggtaaacatagtgaggatattctt

SEQ ID NO: 509588 - DNA, 75 bp, synthetic construct
  source 1..75: mol_type = other DNA
gtttctaaggagtaccgttgtcaaaggcacacgggtatgaacacggacaacacgatgaatgctttagctatttga

SEQ ID NO: 509589 - DNA, 75 bp, synthetic construct
  source 1..75: mol_type = other DNA
agtccaaagagagtttctaaggagtaccgttgtcaaaggcacacgggtatgaataagggcaacacgatgaatgct

SEQ ID NO: 509590 - DNA, 75 bp, synthetic construct
  source 1..75: mol_type = other DNA
ataacgctgttcgtacgcattttgaaccttatgagcggcatttcaaagaaatcggatttaatgaaaataccatta

SEQ ID NO: 509591 - DNA, 75 bp, synthetic construct
  source 1..75: mol_type = other DNA
gttacagaaattacgtgatgcgaatacctgtgacgcagctgaagatgccctgaaggatgcgcagaacatgattgt

SEQ ID NO: 509592 - DNA, 75 bp, synthetic construct
  source 1..75: mol_type = other DNA
ctatttctccaccccgtccacgctggcgcacgacgcctacccgttctggtcgggtgaactgtttaaccggggacg

SEQ ID NO: 509593 - DNA, 75 bp, synthetic construct
  source 1..75: mol_type = other DNA
ctctgtgcggacggccagtggcggcagattgtcaccattgaggacgccctgaaaggcggctgcacattgttcgac

SEQ ID NO: 509594 - DNA, 75 bp, synthetic construct
  source 1..75: mol_type = other DNA
aagatatggagccggaagatctgttgaaagcgttacatcaggctgctgctggcgaaatggtattaagcgaggcgt

SEQ ID NO: 509595 - DNA, 75 bp, synthetic construct
  source 1..75: mol_type = other DNA
agccacgttgccgtgcgcctgtcaccgttcggccgcatttatgacctcgcgccgtatgaaggtgaagagcaaacc

SEQ ID NO: 509596 - DNA, 75 bp, synthetic construct
  source 1..75: mol_type = other DNA
atctgtctggcctggcgttaaaaaaccgtgtagtcatggcaccgatgacccgcacccgcaccatgaatgaggtgc

SEQ ID NO: 509597 - DNA, 75 bp, synthetic construct
  source 1..75: mol_type = other DNA
aaaaatatctacaatgcactaacatccagacagtgacgatgcctgttcctgcgaagtttttacgtgcttcaaatg

SEQ ID NO: 509598 - DNA, 75 bp, synthetic construct
  source 1..75: mol_type = other DNA
gcacatgctgaaaaaaatgaagctcaagtctcgtgtggaagccgcggtatgggtacatcaggaacgcattttctg

SEQ ID NO: 509599 - DNA, 75 bp, synthetic construct
  source 1..75: mol_type = other DNA
atcgcccgccgcctggatatcacagaaagcacagtaaaggtgcacgtaaagcacatgctgaaaaaaatgaagctc

SEQ ID NO: 509600 - DNA, 75 bp, synthetic construct
  source 1..75: mol_type = other DNA
gttactcaagctcagaaagtctcgaaacttgactgttacagagcttgcccaacgatctggtgtcagtcaggcgat

SEQ ID NO: 509601 - DNA, 75 bp, synthetic construct
  source 1..75: mol_type = other DNA
attcgtgaaacagcccagattgcaaaactaatgaacgaggcaaaaactcaagctgaagtaaatgcggctattggt

SEQ ID NO: 509602 - DNA, 75 bp, synthetic construct
  source 1..75: mol_type = other DNA
gtccggcgcgaaagtctgggctgccgacgaatttggcgctgttctcgaccgtgtaaccgcccaggttgtggcgtc

SEQ ID NO: 509603 - DNA, 75 bp, synthetic construct
  source 1..75: mol_type = other DNA
ctggcgcgaactggaagaacaagtacgccagccgttgaccgaaatagagatgatcgccgcaatggctgcaaatgc

SEQ ID NO: 509604 - DNA, 75 bp, synthetic construct
  source 1..75: mol_type = other DNA
atggatatctgcattcttgaaaagccatcaatgaccagcattgagatcgcggagctggtgggaaaacgtcatgac

SEQ ID NO: 509605 - DNA, 75 bp, synthetic construct
  source 1..75: mol_type = other DNA
atctttccgggcaaacgctttgggtgatgagtggtagccttgattttcgagtcaaaaatcagacccatcatttac

SEQ ID NO: 509606 - DNA, 75 bp, synthetic construct
  source 1..75: mol_type = other DNA
caccgtcgactgctcctcaatgaggaatcctggaacctggttatggaagccatcactaatccgccagcaccgaat

SEQ ID NO: 509607 - DNA, 75 bp, synthetic construct
  source 1..75: mol_type = other DNA
atgcttttagctacggcactgttaattgttggtttacttttggtcgtatacagtgccgatcgtctggtatttgcc

SEQ ID NO: 509608 - DNA, 75 bp, synthetic construct
  source 1..75: mol_type = other DNA
ttatttttgcgttgctgtgctggcgacgctcccctcaaccaggccgcggcgtagggggattattaataagcggat

SEQ ID NO: 509609 - DNA, 75 bp, synthetic construct
  source 1..75: mol_type = other DNA
gttccggcaaatccgttgtgctgcgcgagttgcaacgacagatgaaggatgaagggctgtctgtagcctccatcg

SEQ ID NO: 509610 - DNA, 75 bp, synthetic construct
  source 1..75: mol_type = other DNA
tggacatcgacctgtcccacagcaatctgtcccccggcctgctgtgcgcagacgggcagtaccgccagatagtca

SEQ ID NO: 509611 - DNA, 75 bp, synthetic construct
  source 1..75: mol_type = other DNA
catcggcgggtgatcctcaatgaggaatcctggacgcgggtgatggatgcgctgagtaatccaccgtcacttggt

SEQ ID NO: 509612 - DNA, 75 bp, synthetic construct
  source 1..75: mol_type = other DNA
ccaaatcgataagctggaagatgtggtgaaagtgcagcgtaatcagtccgatccgacaatgtttaacaagattgc

SEQ ID NO: 509613 - DNA, 75 bp, synthetic construct
  source 1..75: mol_type = other DNA
gtgaaagcggaaccggatttcggcgtgaagatcccggcacaaccgcagttgatgctcgatatggaacaggcccgt

SEQ ID NO: 509614 - DNA, 75 bp, synthetic construct
  source 1..75: mol_type = other DNA
aggcgaaacactgaagatcaacatccttgatcacgacattccggaagatccggcagaagaatggctgggatcgtg

SEQ ID NO: 509615 - DNA, 75 bp, synthetic construct
  source 1..75: mol_type = other DNA
tcgtgaatatgacaccttttgtggggctatcgataaactcgaggcagaactcaaagattccggtgcaaaacagac

SEQ ID NO: 509616 - DNA, 75 bp, synthetic construct
  source 1..75: mol_type = other DNA
attcaatcattaaatccttattgaaccaaagctcagagataaaaaaggctatagccgaaaaaggacaaaactcac

SEQ ID NO: 509617 - DNA, 75 bp, synthetic construct
  source 1..75: mol_type = other DNA
ctggaaagtcattgaagcggcctggggcgctccaaaattttaccttatcagccatattcccggcgctgactacat

SEQ ID NO: 509618 - DNA, 75 bp, synthetic construct
  source 1..75: mol_type = other DNA
ggctggtacgaatggagcagcgatccaaaaaatccggtagcaaccggtgaacgcggcccggacagtagcaaataa

SEQ ID NO: 509619 - DNA, 75 bp, synthetic construct
  source 1..75: mol_type = other DNA
ttctggcaggcgttgcaccgccgcgatgttcaggttcctgaccttctgtctctgcgaggtaatgcccatgcgtaa

SEQ ID NO: 509620 - DNA, 75 bp, synthetic construct
  source 1..75: mol_type = other DNA
ctcgtcttgataccgcgctagaaactttctggcaggcgttgcaccgccgcgatgttcaggttcctgacctactgt

SEQ ID NO: 509621 - DNA, 75 bp, synthetic construct
  source 1..75: mol_type = other DNA
ttaacgttgaaggcattctctgcctgccgattcaggactgcgacaaaagccatatctggctactggtcaaggatg

SEQ ID NO: 509622 - DNA, 75 bp, synthetic construct
  source 1..75: mol_type = other DNA
gctttggcgcaatcggtattggtagtcgtgaatatgacaccttttgtggggctatcgataaactcgaggcagaac

SEQ ID NO: 509623 - DNA, 75 bp, synthetic construct
  source 1..75: mol_type = other DNA
cagaatcccgatctttctgcagtacgctttggcgcaatcggcattggcagtcgcgaatacgacactttttgtgga

SEQ ID NO: 509624 - DNA, 75 bp, synthetic construct
  source 1..75: mol_type = other DNA
ccatccgggcgtaatgacccacgtttgtggcctttttgcccgccgcgcttttaacgttgaaggcattctttgtct

SEQ ID NO: 509625 - DNA, 75 bp, synthetic construct
  source 1..75: mol_type = other DNA
tgatccactggcgtacagtcgtgactacagcgtgatgttgctggtgagcattatttttgcgttgctgtgctggcg

SEQ ID NO: 509626 - DNA, 75 bp, synthetic construct
  source 1..75: mol_type = other DNA
tatggttattcatactcgtgaaggccatcgtgcagacttaagcgactgcccgccagccaaactgacgcgcggcgg

SEQ ID NO: 509627 - DNA, 75 bp, synthetic construct
  source 1..75: mol_type = other DNA
tggcagccgcacgtcaaaaaggaattatggttattcatactcgtgaaggccatcgtgcagacttaagcgactgcc

SEQ ID NO: 509628 - DNA, 75 bp, synthetic construct
  source 1..75: mol_type = other DNA
ggctggcatcacatacgcccagctggtggcatccagccaggcaatcgatattaagcgtgcaaataacgccgtgga

SEQ ID NO: 509629 - DNA, 75 bp, synthetic construct
  source 1..75: mol_type = other DNA
atgatcgacatgcagcgtgactttgtcgaagcagggggcttcggtgaggcactgggcaatgatgtttcactggta

SEQ ID NO: 509630 - DNA, 75 bp, synthetic construct
  source 1..75: mol_type = other DNA
tctgattttgcaaaagcgtggtatcaagacacttattgtttgtggcgtgactaccgaagtttgcgtaaccaccac

SEQ ID NO: 509631 - DNA, 75 bp, synthetic construct
  source 1..75: mol_type = other DNA
tctgattttgcaaaaccacggtatcaagacgctgatagtttgtggtgttacaaccgaagtttgcgtaaccaccac

SEQ ID NO: 509632 - DNA, 75 bp, synthetic construct
  source 1..75: mol_type = other DNA
caaccaaaaaaagtgaaatttcttcattttttcacacttatttatcgcgttgatttggtgattatgatgataaaa

SEQ ID NO: 509633 - DNA, 75 bp, synthetic construct
  source 1..75: mol_type = other DNA
ggcacaccactcccgcacaggtgaaaacagagaaaaccgcacgacatttacaaccaaaaaaagtgaaatttcttc

SEQ ID NO: 509634 - DNA, 75 bp, synthetic construct
  source 1..75: mol_type = other DNA
atattgggtaataattgtaagttgattataaagaataactgtagtatacgtggggctattcatttgaggcagaac

SEQ ID NO: 509635 - DNA, 75 bp, synthetic construct
  source 1..75: mol_type = other DNA
acgctgacgccagcgtccggctggtgctcatttgtcagcacgacgccagcgccgggtcagacgatattcccgccc

SEQ ID NO: 509636 - DNA, 75 bp, synthetic construct
  source 1..75: mol_type = other DNA
accgccagccgctgcaaccggcggttggcgcgatgcttgccgacttcaccaatattcttctgctggataccgcct

SEQ ID NO: 509637 - DNA, 75 bp, synthetic construct
  source 1..75: mol_type = other DNA
cgcctttagcaaccgggccggcgagtatggcgtgacgccgacaatggcactggcgacctgtttttctgccgtgct

SEQ ID NO: 509638 - DNA, 75 bp, synthetic construct
  source 1..75: mol_type = other DNA
tggcggcgaagcgttctgcctcagagcagaaactgcagcagtgggtagcccaacagagtctggcagagttgtgcc

SEQ ID NO: 509639 - DNA, 75 bp, synthetic construct
  source 1..75: mol_type = other DNA
accgtacattgaccgggcatctggcgatgtatcatttctctccaaccgaaacttcccggcaaaacttgctgcgtg

SEQ ID NO: 509640 - DNA, 75 bp, synthetic construct
  source 1..75: mol_type = other DNA
cattcaggaagaagcgccttcgctggggaaaccggtgctggtgatgcgcgataccactgagcgtccggaagcggt

SEQ ID NO: 509641 - DNA, 75 bp, synthetic construct
  source 1..75: mol_type = other DNA
gaagggctaaaacctattcttgccgagttcaaacctgatgtggtgctggtgcacggtgataccaccaccacgctg

SEQ ID NO: 509642 - DNA, 75 bp, synthetic construct
  source 1..75: mol_type = other DNA
tttagccgttggtgtagccctcggatcaaacattatcaatattttgctgatcctcggtctggctgcgctggtacg

SEQ ID NO: 509643 - DNA, 75 bp, synthetic construct
  source 1..75: mol_type = other DNA
ggcccggcacgctgcgtgacctggttgatgtgatcagtgctgaactgcaccgtcaggggattgaatctgctcagg

SEQ ID NO: 509644 - DNA, 75 bp, synthetic construct
  source 1..75: mol_type = other DNA
cgctggcaaccagcctggcggcgttttatcagcgtattcctgttggtcacgttgaggctggtctgcgcacgggcg

SEQ ID NO: 509645 - DNA, 75 bp, synthetic construct
  source 1..75: mol_type = other DNA
gctcatacggtttccggccgggattaaattgtcatgctgctttgaaggctttgcaacagcaaacgttccgcaact

SEQ ID NO: 509646 - DNA, 75 bp, synthetic construct
  source 1..75: mol_type = other DNA
tatgctgatgatatggtatttacctttgagttctttagtgaagcaaaacgcttctttaggaggctaccaaaaggc

SEQ ID NO: 509647 - DNA, 75 bp, synthetic construct
  source 1..75: mol_type = other DNA
ataatgtcgctggtggatttgatgccgataattttgcgttggtgacaaaatttcccggccagtattcaggaagag

SEQ ID NO: 509648 - DNA, 75 bp, synthetic construct
  source 1..75: mol_type = other DNA
gcgtcactgcgcagcatcgggagatgcttgatcaggtgctgaaactcttttccattgtacctgactacgatctca

SEQ ID NO: 509649 - DNA, 75 bp, synthetic construct
  source 1..75: mol_type = other DNA
atgattaaaaagctatcagtttttttgatggatacagtagcggcggtacgctgcgtgaaatctgataaaaaagca

SEQ ID NO: 509650 - DNA, 75 bp, synthetic construct
  source 1..75: mol_type = other DNA
tttgttttcatcgcggatggtggattaggggcagcattttcaagagaatgtgcgaaagaaaaaaatagagactgt

SEQ ID NO: 509651 - DNA, 75 bp, synthetic construct
  source 1..75: mol_type = other DNA
agttggcagcatcaccatgtcgattatctgtttcctaattatgccgaggcaaaattactcaccgggaaagagaca

SEQ ID NO: 509652 - DNA, 75 bp, synthetic construct
  source 1..75: mol_type = other DNA
tgataatattttattgcgtagttcgttaagaaatgaacttgatattatttatcatgattggaagttaattaaaca

SEQ ID NO: 509653 - DNA, 75 bp, synthetic construct
  source 1..75: mol_type = other DNA
tgactctcttgcatacggtcagtaaagatttttctgattcgtcactgagaggggattatgtcctcccgataggat

SEQ ID NO: 509654 - DNA, 75 bp, synthetic construct
  source 1..75: mol_type = other DNA
ggagccagcgacagcaataaatatcgccagatccacgacgccttcgaaaaaaccgggcgtcactggctgtacaat

SEQ ID NO: 509655 - DNA, 75 bp, synthetic construct
  source 1..75: mol_type = other DNA
atagggagatatattcagcgtaggaggataaccagggcagcccttctgttacggctaacaagtctaacaattacg

SEQ ID NO: 509656 - DNA, 75 bp, synthetic construct
  source 1..75: mol_type = other DNA
tcggttctaagcgtcggtgccaccaccggcgtaaaaaacagaaagctggtcgaacaattgctggaagaatacgaa

SEQ ID NO: 509657 - DNA, 75 bp, synthetic construct
  source 1..75: mol_type = other DNA
tggtgattttgctgctctggcgaaagagaaatcagccgatattatctctgcccgtaatggcggcgatatggggtg

SEQ ID NO: 509658 - DNA, 75 bp, synthetic construct
  source 1..75: mol_type = other DNA
cagtacgcgcaggcactgcgtaatcagctcactacccagcagctgattaacggcgttgcgggcaccgactttatg

SEQ ID NO: 509659 - DNA, 75 bp, synthetic construct
  source 1..75: mol_type = other DNA
ggcggcgtttgcactgccactgccagcgaaagacaaaccgagctacggtatggcgaccgatatgcaaggtaatgt

SEQ ID NO: 509660 - DNA, 75 bp, synthetic construct
  source 1..75: mol_type = other DNA
atgaaaaacgacagtttaattacgcggtataaaatacttaaaggcgaacgcgatgagtctatcttcaccataata

SEQ ID NO: 509661 - DNA, 75 bp, synthetic construct
  source 1..75: mol_type = other DNA
cctggtagaactggatgcacctgagctccccatacttgatggaagcgcaagagaatttattgattctcttatcaa

SEQ ID NO: 509662 - DNA, 75 bp, synthetic construct
  source 1..75: mol_type = other DNA
aatgttaatgatataaaaaaatatattgaagattcatttgaagaaagcttctttcctgtggatattgggcaaccc

SEQ ID NO: 509663 - DNA, 75 bp, synthetic construct
  source 1..75: mol_type = other DNA
tgatccgtgggccaggcgcagggcgcgatgtcaccgccggggcgattcagtcggatattaatcgtctggcgcagt

SEQ ID NO: 509664 - DNA, 75 bp, synthetic construct
  source 1..75: mol_type = other DNA
tcttttcgttatgaacagattaatgccagaccaattgattacaaagaagcgttttcaacacaagactttgatttg

SEQ ID NO: 509665 - DNA, 75 bp, synthetic construct
  source 1..75: mol_type = other DNA
ctgttcgcccgtgagcagagcacgctttcggcgcgtaccggctttgaatttgtgctggcaggtgtggtggacagc

SEQ ID NO: 509666 - DNA, 75 bp, synthetic construct
  source 1..75: mol_type = other DNA
ctgcttgattgagtttcaggtgcccaccagccaggatttcaaactggcgcataaagagatcgaccagatcctgaa

SEQ ID NO: 509667 - DNA, 75 bp, synthetic construct
  source 1..75: mol_type = other DNA
atcgaattacttaagtactctggaaggaattttattgttttatagaaataatgatatgcagcaagactatcaaaa

SEQ ID NO: 509668 - DNA, 75 bp, synthetic construct
  source 1..75: mol_type = other DNA
tgttcagtctgtttaccgttattggctttaatactcaggctaacgaacatcatcatgaaaccatgagtgaagcac

SEQ ID NO: 509669 - DNA, 75 bp, synthetic construct
  source 1..75: mol_type = other DNA
ccttatcgagcaggttaagaacgcgaaggatacgaagtccacccaagatgcaacgaacgccgttgctcttgaaca

SEQ ID NO: 509670 - DNA, 75 bp, synthetic construct
  source 1..75: mol_type = other DNA
atggatgcaaaaactttgagtatttcttacccgtagagagaagtggcattaactatatacccaaaacaaaagaat

SEQ ID NO: 509671 - DNA, 75 bp, synthetic construct
  source 1..75: mol_type = other DNA
tagatgaaggtatttatgcgcgctttacatataaaggagagatagatgggtatgccacttacatcaataatatct

SEQ ID NO: 509672 - DNA, 75 bp, synthetic construct
  source 1..75: mol_type = other DNA
tgctgcaattttgctacacctcggaagtggcggacagtgccctgaaaattctcgacgaagcgggattacctggcg

SEQ ID NO: 509673 - DNA, 75 bp, synthetic construct
  source 1..75: mol_type = other DNA
aagcaaaagacaccattcgccgcggttgcctcgagtacgacgtcagcgcgaccgatatcacgcagtcgtttatgt

SEQ ID NO: 509674 - DNA, 75 bp, synthetic construct
  source 1..75: mol_type = other DNA
cctggggcgcactggcgtgtgtaggactggtactgatgatttggctgtatcaggcgcttaagttcagaaaccgcg

SEQ ID NO: 509675 - DNA, 75 bp, synthetic construct
  source 1..75: mol_type = other DNA
gtgaaaccgttggcagatgttcaggaacaagttaaggcattggttcagcacaacaaagctgaacaacaggcgaaa

SEQ ID NO: 509676 - DNA, 75 bp, synthetic construct
  source 1..75: mol_type = other DNA
gtacctcgcaggggaaatatctgaatggctggtttaaccgtctggatctgctcgccagcgcctgtcgggaggttc

SEQ ID NO: 509677 - DNA, 75 bp, synthetic construct
  source 1..75: mol_type = other DNA
agctattcattaattctatagagaaagatgatgtctacatagccaattgtatagaaaaaggtaagactgaattta

SEQ ID NO: 509678 - DNA, 75 bp, synthetic construct
  source 1..75: mol_type = other DNA
tcgatggtagcgtgccgtttaccgagctggtggatcaggcgtggcagcagggcttaaccgaacctgacccgcgtg

SEQ ID NO: 509679 - DNA, 75 bp, synthetic construct
  source 1..75: mol_type = other DNA
cattatatgccacatatcagtctgatgatcctgtagctggtactttctcagacagtgcaatattagaaattagtg

SEQ ID NO: 509680 - DNA, 75 bp, synthetic construct
  source 1..75: mol_type = other DNA
cgatgccaatggcaaagcgcgtgtgggcgtggaagcggtgcgtgaagaccatccgctggcatcactgctgccgtg

SEQ ID NO: 509681 - DNA, 75 bp, synthetic construct
  source 1..75: mol_type = other DNA
cttgatgcccgcgagtttttacgcgctgaacgcgccgcgcagccgcaggttgatgaagggctttcttacccgttg

SEQ ID NO: 509682 - DNA, 75 bp, synthetic construct
  source 1..75: mol_type = other DNA
gagaaagcccagcaggccattggcctgaacatggaacaaatcaaggccgagaagcaggacttcatcaaaacggtg

SEQ ID NO: 509683 - DNA, 75 bp, synthetic construct
  source 1..75: mol_type = other DNA
cgccgaaggcaaactctacaccgaccataaaattggtaatccgtttgataacttcgcccagacttgtgcgaactg

SEQ ID NO: 509684 - DNA, 75 bp, synthetic construct
  source 1..75: mol_type = other DNA
ggcaaaaataacgtgacttgcatcgactgccacatgccgaaagtacaaaacgctgaaggcaaactctataccgat

SEQ ID NO: 509685 - DNA, 75 bp, synthetic construct
  source 1..75: mol_type = other DNA
gacagcattgataagactgccgaaacggatgaagaacgggaagcacgatatgcagccttgcagcaggagtggcgt

SEQ ID NO: 509686 - DNA, 75 bp, synthetic construct
  source 1..75: mol_type = other DNA
cgaaggacagttttctggtcttcggcgatatggacctgtttgaggtccagccagcctcatcgccacggggattac

SEQ ID NO: 509687 - DNA, 75 bp, synthetic construct
  source 1..75: mol_type = other DNA
tccgctgagtgcgagcaaacaacataccggaagcagattgactccgcccatgaaatcgttcttaaagaacagcag

SEQ ID NO: 509688 - DNA, 75 bp, synthetic construct
  source 1..75: mol_type = other DNA
ggttattcaggatattggacatcttttttggaggataagacaaagtttaatgctaattatgattttaatataaaa

SEQ ID NO: 509689 - DNA, 75 bp, synthetic construct
  source 1..75: mol_type = other DNA
taaccgagcctgacccgcgtgatgacctttccggcaaagacgtgatgcgcaagctggtgattctggcgcgtgaag

SEQ ID NO: 509690 - DNA, 75 bp, synthetic construct
  source 1..75: mol_type = other DNA
ttgcccgcctaacgcctttaattcaggtatcgacttattattactggaaccaggaaaaacgcaccgcctgttttt

SEQ ID NO: 509691 - DNA, 75 bp, synthetic construct
  source 1..75: mol_type = other DNA
tgggtattcatccttatttaacctgcaacttaacatctgttgatgaatatctgttccagcttccggcaaaccagg

SEQ ID NO: 509692 - DNA, 75 bp, synthetic construct
  source 1..75: mol_type = other DNA
caaacagtctcgtgctcaagattatttttggtatcattatcgtgtcgttcatattgaccggcgtgagtggttacc

SEQ ID NO: 509693 - DNA, 75 bp, synthetic construct
  source 1..75: mol_type = other DNA
gaaaacggcgcgccgggcatcaactctgacatcatcaccgtagacggcgaccgcgcattcgtgctgcgcatcagc

SEQ ID NO: 509694 - DNA, 75 bp, synthetic construct
  source 1..75: mol_type = other DNA
atgatggacagcttacgcacggctgcaaacagtctcgtgctcaagattatttttggtatcattatcgtgtcgttc

SEQ ID NO: 509695 - DNA, 75 bp, synthetic construct
  source 1..75: mol_type = other DNA
cgccgcgccctcatggccccatgcagacgtcagcaaatctggatgaagtctgcgaagcgcatctggcaacgttac

SEQ ID NO: 509696 - DNA, 75 bp, synthetic construct
  source 1..75: mol_type = other DNA
agattaaccgcgagcgcgaggccttcctggcggcacagcagggaagtacttcaacggagttgtttaccaccattg

SEQ ID NO: 509697 - DNA, 75 bp, synthetic construct
  source 1..75: mol_type = other DNA
taaccaccgcccatagcgttccgtttgatggaaaagcaacgttatttgttgctgagcgcacacttcaggaaggta

SEQ ID NO: 509698 - DNA, 75 bp, synthetic construct
  source 1..75: mol_type = other DNA
tgagatcgcaagccagaatattggtactgtgaccgcaccttatggtgtgggtattcatccttatttaacctgcaa

SEQ ID NO: 509699 - DNA, 75 bp, synthetic construct
  source 1..75: mol_type = other DNA
tgccgggcggtaagttccgtattcttgagcgtcaccagtggcgcggaatggacttccgcgcccaggctgacgcca

SEQ ID NO: 509700 - DNA, 75 bp, synthetic construct
  source 1..75: mol_type = other DNA
ttttctgtcggccagtaaaacacaggcgtatgtgttccgcgaatacatcatcgcctttgcccgtctggttgacgt

SEQ ID NO: 509701 - DNA, 75 bp, synthetic construct
  source 1..75: mol_type = other DNA
catcggagggcatgggggcgctgaaactcttcctttcgcgagcgtttaatcctaacggcaatattctccctggca

SEQ ID NO: 509702 - DNA, 75 bp, synthetic construct
  source 1..75: mol_type = other DNA
ttggtgaggacaatgccgttgagtcaggtaatggacggaccatggggatcattaaagcctatcaggacggtaatg

SEQ ID NO: 509703 - DNA, 75 bp, synthetic construct
  source 1..75: mol_type = other DNA
agattgcggttaagtttagagatgaaatacgtcccaggtttggtatcatgagggcacgagagtttatcatgaaag

SEQ ID NO: 509704 - DNA, 75 bp, synthetic construct
  source 1..75: mol_type = other DNA
ggacatatctaagaatgaattccgtgtattaacttacatcttggaatacatggagtttggaaaccttattaacct

SEQ ID NO: 509705 - DNA, 75 bp, synthetic construct
  source 1..75: mol_type = other DNA
ttaaattaatcacggtcatcctgtctcatttcctgatacagatatatatgtggccagattttctgacagcgaaaa

SEQ ID NO: 509706 - DNA, 75 bp, synthetic construct
  source 1..75: mol_type = other DNA
cagtgaagaagaacttgagcagcttaaccagctactcaatcgattttcatatatcccgcagaaacgctggcaaat

SEQ ID NO: 509707 - DNA, 75 bp, synthetic construct
  source 1..75: mol_type = other DNA
gtgcgggttcagttgtggtaaaaccgattgagaacaaaggcatttatgcaggaaacccggcaagactgctcagaa

SEQ ID NO: 509708 - DNA, 75 bp, synthetic construct
  source 1..75: mol_type = other DNA
ttatttgtgagaacgtaacactgggggagaactgcttcattggtcataacgtgacgttcgccaacgatctgtttc

SEQ ID NO: 509709 - DNA, 75 bp, synthetic construct
  source 1..75: mol_type = other DNA
ggaagccggatacagtcgcacacgtttatttgtgagaacgtaacactgggtgagaactgcttcattggtcataac

SEQ ID NO: 509710 - DNA, 75 bp, synthetic construct
  source 1..75: mol_type = other DNA
tctggcgcaggtgctggggatggttgatgtcaaagtcctcgatcacctgattgtgggcggcagcgatatttactc

SEQ ID NO: 509711 - DNA, 75 bp, synthetic construct
  source 1..75: mol_type = other DNA
tgtttcgtacagattattacaccggggttaatgaaaaggatctaacggacctgatagccagatataatgtgctga

SEQ ID NO: 509712 - DNA, 75 bp, synthetic construct
  source 1..75: mol_type = other DNA
gtgtcatctgtatttaaaggtcgtgtgagtatgaaatttatggaatgtgctgtccgggatgtgatttatgggacc

SEQ ID NO: 509713 - DNA, 75 bp, synthetic construct
  source 1..75: mol_type = other DNA
ttatcaaaatctttctcaacaggaaagacgaggattagccctcgaaacagtaaatcaaaatgtttatacagatgc

SEQ ID NO: 509714 - DNA, 75 bp, synthetic construct
  source 1..75: mol_type = other DNA
tctgtacggcatcccgactaccggcctgcgcttctttacggtctatggtccgtggggacgcccggatatggcgct

SEQ ID NO: 509715 - DNA, 75 bp, synthetic construct
  source 1..75: mol_type = other DNA
gcaggcccgtctggatcgcctggcatctccggcattccatttccagcagctggatctggccgaccgtgaaggtat

SEQ ID NO: 509716 - DNA, 75 bp, synthetic construct
  source 1..75: mol_type = other DNA
gccagatcagccgtgcgcgtacgttcggtttcatgcgtgatatcgaatatctgcagtctcgtggtttgtgcctgg

SEQ ID NO: 509717 - DNA, 75 bp, synthetic construct
  source 1..75: mol_type = other DNA
agcatcgatgtttacaactacggcaagatgaagcgtgacttcacttacattgatgacatcgctgaagccattatt

SEQ ID NO: 509718 - DNA, 75 bp, synthetic construct
  source 1..75: mol_type = other DNA
ttggctttaaaccgcagacctcagttaaagacggggtgaaaaacttcgtggagtggtatcgcgctttctacaagg

SEQ ID NO: 509719 - DNA, 75 bp, synthetic construct
  source 1..75: mol_type = other DNA
ccgatgcagactggaccgtcgagaccggttccccggcaaccagctccgcgccttatcgggtttacaacattggta

SEQ ID NO: 509720 - DNA, 75 bp, synthetic construct
  source 1..75: mol_type = other DNA
aaaagtatataaaagaacaaaggaaaatgaggaagcaaggaggaatcctgttgacatagagtctcatatgcagaa

SEQ ID NO: 509721 - DNA, 75 bp, synthetic construct
  source 1..75: mol_type = other DNA
catctggaaaaaataaaaggcttagagcaactcctatatctagccgcggagcgagaagagttccatgttcatata

SEQ ID NO: 509722 - DNA, 75 bp, synthetic construct
  source 1..75: mol_type = other DNA
ggtcacctctatatcaactcaaatatttttgctaaagggatgagtcatcaactggataagaaacgtaaagaacag

SEQ ID NO: 509723 - DNA, 75 bp, synthetic construct
  source 1..75: mol_type = other DNA
tgttatcgaagttaacgcgccggaaatcccgatcatggacggcagcgccgctccgtttgtatacctgctgcttga

SEQ ID NO: 509724 - DNA, 75 bp, synthetic construct
  source 1..75: mol_type = other DNA
ttattcagctatgtcaaaaagtgaaagaagaaccctatccttagaaactgagaccaaagaaatctatactgacgc

SEQ ID NO: 509725 - DNA, 75 bp, synthetic construct
  source 1..75: mol_type = other DNA
aaaagtatataaaagaacaaaagaaaatgaggaagcaagaagaaactctgttgaaacaaacgctcatatgaagaa

SEQ ID NO: 509726 - DNA, 75 bp, synthetic construct
  source 1..75: mol_type = other DNA
cgagcttaccggcgacccgattgtgctcggcaacaatggtgcggagctgatgtttcttggtaccaatgccaacac

SEQ ID NO: 509727 - DNA, 75 bp, synthetic construct
  source 1..75: mol_type = other DNA
atgatcgaagtaaaacacctgaaaacgctacaagcgttgcggaactgcggctcgctcgcagccgctgcggcgacg

SEQ ID NO: 509728 - DNA, 75 bp, synthetic construct
  source 1..75: mol_type = other DNA
tgcaacagggcgagctggatctggtgatgacgtccgatattctgccgcgcagtggcctgcattattcgccgatgt

SEQ ID NO: 509729 - DNA, 75 bp, synthetic construct
  source 1..75: mol_type = other DNA
caggcgttagcccgtcgctgaaaagcgtcgataacaccttattgttgattcagatggttgccgcgcggatgggta

SEQ ID NO: 509730 - DNA, 75 bp, synthetic construct
  source 1..75: mol_type = other DNA
tacaagtggcgaattacctgatgaaaacgcccgcaaacaaggtctttttgtctatccatcactgaccgtaacctg

SEQ ID NO: 509731 - DNA, 75 bp, synthetic construct
  source 1..75: mol_type = other DNA
cgaccgactgcattcacgtaaattacgaaccttgaggtgtactggcaatagcggacactaccatttgttcttttt

SEQ ID NO: 509732 - DNA, 75 bp, synthetic construct
  source 1..75: mol_type = other DNA
ttgatcgttcaatgagtgccggtttaacgcgttattttccgacgacagaactggcccaaataggcgatgaaacag

SEQ ID NO: 509733 - DNA, 75 bp, synthetic construct
  source 1..75: mol_type = other DNA
gcagttgccatgttttacggcagtgggagcagagatagcgctgatgtccggcagtgcttttgccgttacgcacca

SEQ ID NO: 509734 - DNA, 75 bp, synthetic construct
  source 1..75: mol_type = other DNA
agcatgtccctgccttcaatacagatcatatgattcaatattatataaatgccaaagaatggaacaatgccaggg

SEQ ID NO: 509735 - DNA, 75 bp, synthetic construct
  source 1..75: mol_type = other DNA
ctcaccagtttagcgatctggaacaacgccttggcttccggctatttgtgcgtaagagccagccgcttcgcttta

SEQ ID NO: 509736 - DNA, 75 bp, synthetic construct
  source 1..75: mol_type = other DNA
atatcaaaggcaaagtgctgaatgcgccggtctggcaactgatgggcggcctggttcgcgacaaaattaaagcct

SEQ ID NO: 509737 - DNA, 75 bp, synthetic construct
  source 1..75: mol_type = other DNA
taatctatctgaatatgatccatatttatctattaaagcatatagaaataattatacatactcgcatgcaggaga

SEQ ID NO: 509738 - DNA, 75 bp, synthetic construct
  source 1..75: mol_type = other DNA
gcgctatttccgaacacctgcaaattggcattcgggcgatcgatttgctgcgcgcagaaggcgaccgactgcatt

SEQ ID NO: 509739 - DNA, 75 bp, synthetic construct
  source 1..75: mol_type = other DNA
tcgccgggcaaagcgccagtgagcagccgtcatattatctctatacctcgggcacaacgggtaaacccaagtgcg

SEQ ID NO: 509740 - DNA, 75 bp, synthetic construct
  source 1..75: mol_type = other DNA
ggaaaaagatgcaatcagttggagtcagttagtagaacagcaccaggttacactctggtgttcagttcctgcgat

SEQ ID NO: 509741 - DNA, 75 bp, synthetic construct
  source 1..75: mol_type = other DNA
gactgatgttagtgtcgatgtgttaggcggtaacgtgctgatgaaacaattacgtatgccgcaacatgacccggc

SEQ ID NO: 509742 - DNA, 75 bp, synthetic construct
  source 1..75: mol_type = other DNA
tctgactataattcaatctaactatagtttacttaataaaggatatggctttgagcgattacaaaagctaggtgg

SEQ ID NO: 509743 - DNA, 75 bp, synthetic construct
  source 1..75: mol_type = other DNA
acgccgaaaaacaacagcaaacggtgctacccgccctgcccgcgcctgtggagcggatagacctcaccaccttca

SEQ ID NO: 509744 - DNA, 75 bp, synthetic construct
  source 1..75: mol_type = other DNA
gagaacgtcttaacgccgagtttggctgtcacttaactgggcacgatttgattaagtgcaaaaatatcagcgacg

SEQ ID NO: 509745 - DNA, 75 bp, synthetic construct
  source 1..75: mol_type = other DNA
cgatagatttattacgagctgagggggatcggttacactctcgtaaactgcgaacattcaatgaacccccgttcc

SEQ ID NO: 509746 - DNA, 75 bp, synthetic construct
  source 1..75: mol_type = other DNA
gaacatctgcaaattggcattcgggcgatcgatttgctgcgcgcagaaggcgaccgactgcattcgcgtaaatta

SEQ ID NO: 509747 - DNA, 75 bp, synthetic construct
  source 1..75: mol_type = other DNA
cagtattgccgaagtacaacgtgcgctctatgacgcaactaagctggtgagtggcagacctggtgaggaagtgaa

SEQ ID NO: 509748 - DNA, 75 bp, synthetic construct
  source 1..75: mol_type = other DNA
ccgaagtgattaatctggtgacagcgaaaaatattacggctgatttgcaaggtcgttatccgtggactgaagaag

SEQ ID NO: 509749 - DNA, 75 bp, synthetic construct
  source 1..75: mol_type = other DNA
tgtcagccggaacatctgaagggccgttcagcgggcgccggcagggcgtggccacccatctgtttgtgtcggtac

SEQ ID NO: 509750 - DNA, 75 bp, synthetic construct
  source 1..75: mol_type = other DNA
gctgtaatgctcgcttttgatgcttatatggcagcgttaccgtttattgttttagttacaaattggtcgtcatgg

SEQ ID NO: 509751 - DNA, 75 bp, synthetic construct
  source 1..75: mol_type = other DNA
cagggcttctctggtgaagacgctatcgtggatatgctgggtaccgacatcgcgtattacaacggtgaggacaaa

SEQ ID NO: 509752 - DNA, 75 bp, synthetic construct
  source 1..75: mol_type = other DNA
tcaccgttgagccgattgaacaggcgatcctcgtgtctcaccaaacaaagctttgggaccagaagtcgaccactg

SEQ ID NO: 509753 - DNA, 75 bp, synthetic construct
  source 1..75: mol_type = other DNA
gtcctctctcgtgatggcgactctcagtcccatgaccttgagattctcggtaaggtattcgtggtcgctgaggct

SEQ ID NO: 509754 - DNA, 75 bp, synthetic construct
  source 1..75: mol_type = other DNA
cctgaggggatcttaagcaatcagaagccaatgactacgcatttttataagccggatcatgaagttagacggcaa

SEQ ID NO: 509755 - DNA, 75 bp, synthetic construct
  source 1..75: mol_type = other DNA
acccgcaggtctatgccctccagttagctaagacggttaaggctatgctgaacggtgtacttaaagacgctcaag

SEQ ID NO: 509756 - DNA, 75 bp, synthetic construct
  source 1..75: mol_type = other DNA
ttgttgaccacttcaggtcaggagattgtcgtcgaaccgattgaacaggctattctcatctctgagcagactaag

SEQ ID NO: 509757 - DNA, 75 bp, synthetic construct
  source 1..75: mol_type = other DNA
gcacagcacattggcggctgtgatgacttgtatgcattggatgcacgtggtggactggatcccctgctgaaataa

SEQ ID NO: 509758 - DNA, 75 bp, synthetic construct
  source 1..75: mol_type = other DNA
cagcttgcggcatatttacaaacctccctgaccgcaacgcaagaggagattatcggctacgcacaaacgctccac

SEQ ID NO: 509759 - DNA, 75 bp, synthetic construct
  source 1..75: mol_type = other DNA
aggcgggtaagttagagaagtgggacacgctgctgaatcacgattcgcttgctgatttggttcggggacgcattc

SEQ ID NO: 509760 - DNA, 75 bp, synthetic construct
  source 1..75: mol_type = other DNA
atgactatgactaaagatgctttacagtttggcattgagcctgttcgtatcaccgataccgacaacattcagatt

SEQ ID NO: 509761 - DNA, 75 bp, synthetic construct
  source 1..75: mol_type = other DNA
cgacaccgacaacattcagattaacgaaggtttgccaactaacgcagaccctcaggtctacgcctttgagctggc

SEQ ID NO: 509762 - DNA, 75 bp, synthetic construct
  source 1..75: mol_type = other DNA
aggctgacgctatcatggatgccctgtatgagaacaccgagtcttctttcggtactgaggtttctgactacggca

SEQ ID NO: 509763 - DNA, 75 bp, synthetic construct
  source 1..75: mol_type = other DNA
gtgcaaagtcaacgaccggagccagcagcatgggcaatggagaaagcccaagacttacagcagatgctgaactca

SEQ ID NO: 509764 - DNA, 75 bp, synthetic construct
  source 1..75: mol_type = other DNA
caacagatgattcaggccttcaggtcagtggtgacaattctgtcacggtgctggcagaagtgcgttgcagtcgta

SEQ ID NO: 509765 - DNA, 75 bp, synthetic construct
  source 1..75: mol_type = other DNA
tgtacgaatactacagacgactggtgatgatgcgggagccgtggcgggtgtggttcatgcagcgaccggtgcaga

SEQ ID NO: 509766 - DNA, 75 bp, synthetic construct
  source 1..75: mol_type = other DNA
gaagccgaagccgaagccgaagccgaagccgaagccggacaggatgctccccggaaaaagaccggtaacaaagcg

SEQ ID NO: 509767 - DNA, 75 bp, synthetic construct
  source 1..75: mol_type = other DNA
gtcgatgcccccatcggtaagccgccagtcttttatcgtgctgatagcgaatgggctgcactgttcgctgcgtta

SEQ ID NO: 509768 - DNA, 75 bp, synthetic construct
  source 1..75: mol_type = other DNA
caaaccgaagtctgcggcttttctgctgcaaaaacgctggaccggcatgaacttcggtgaaaaaccgcagcaggg

SEQ ID NO: 509769 - DNA, 75 bp, synthetic construct
  source 1..75: mol_type = other DNA
gagcgtgctggcgctgcctgtaaagctgcgggcgcaaaacgcgcgctgccgttaccagtgagcgtaccgtctcac

SEQ ID NO: 509770 - DNA, 75 bp, synthetic construct
  source 1..75: mol_type = other DNA
gcaatcaggaagtgtggtagccaggttgtttacgagcaggtgggagccttcattgaatctgtacaggatatcccg

SEQ ID NO: 509771 - DNA, 75 bp, synthetic construct
  source 1..75: mol_type = other DNA
ctaacgcgactatcgaaagtctccgtgctgatgtttctgctggtcgtaagcgcctgcaagtcgccgccacctgtg

SEQ ID NO: 509772 - DNA, 75 bp, synthetic construct
  source 1..75: mol_type = other DNA
cagcatgggcaatggagaaagcccaagacttacagcagatgctgaactcaattattaccgtctccgaagtggaat

SEQ ID NO: 509773 - DNA, 75 bp, synthetic construct
  source 1..75: mol_type = other DNA
tatatcaacaactacaaacgaacccgaatccagatgcaatgctgaggactgatgaatcccctaatgatttttatc

SEQ ID NO: 509774 - DNA, 75 bp, synthetic construct
  source 1..75: mol_type = other DNA
gccattaagaagtgcggtagtgtggctatttacgaaaatgtggaaagatttctaggaagtgtgcaagttattgat

SEQ ID NO: 509775 - DNA, 75 bp, synthetic construct
  source 1..75: mol_type = other DNA
tgtgcgaatgtatcttttcccatactcgtgagttttacgattaccttgccttcaaagatcgacttcctgatcggg

SEQ ID NO: 509776 - DNA, 75 bp, synthetic construct
  source 1..75: mol_type = other DNA
gatattttgatatgctccaggaatggaagtcgagacctaattggcaagtgtgcatttgtatctgacgctgatgag

SEQ ID NO: 509777 - DNA, 75 bp, synthetic construct
  source 1..75: mol_type = other DNA
ggacgccgggcaggaggtggagatgccggagccggagaagaagaaacgagaaatgattcagttgtggggggagta

SEQ ID NO: 509778 - DNA, 75 bp, synthetic construct
  source 1..75: mol_type = other DNA
gcgggatatgcgctgggcggtggcgcgtatccaggacaagccgcgctgcatcgtgagtcaaatctgatgaagacc

SEQ ID NO: 509779 - DNA, 75 bp, synthetic construct
  source 1..75: mol_type = other DNA
atggcaactggcgcaaacggaaattcgcgccccggtgagtggatgggtgactaatctcactacccgcatcggcga

SEQ ID NO: 509780 - DNA, 75 bp, synthetic construct
  source 1..75: mol_type = other DNA
gaaaaaggcgagccgagcgaacacctcattaaagatttgttcgcggatggcgttcttgttgcggttaatccaatc

SEQ ID NO: 509781 - DNA, 75 bp, synthetic construct
  source 1..75: mol_type = other DNA
aatagccagcagtcctcagataaacggaatagcaacccaaaaacaatgcaagaagattacactgcatttacgtga

SEQ ID NO: 509782 - DNA, 75 bp, synthetic construct
  source 1..75: mol_type = other DNA
atggtgccattttgccacaaacttgaggaaaaactcatgacaagcaatcgctgccgtgaaattaaaacgccacca

SEQ ID NO: 509783 - DNA, 75 bp, synthetic construct
  source 1..75: mol_type = other DNA
atgaaaataaaagaaaacgcctccctgactctgacagggataccttctgtaggaaagccagggtattattcacct

SEQ ID NO: 509784 - DNA, 75 bp, synthetic construct
  source 1..75: mol_type = other DNA
aggcttggaggtggattgcaatatataaaggataaaaatgggaatcttacaccggtatatacaaatggtggtttc

SEQ ID NO: 509785 - DNA, 75 bp, synthetic construct
  source 1..75: mol_type = other DNA
acagacaacaatgctagcagccaggctttcagcggtaaaacaaaatcgctagggggaggggtgtatgcatcaggt

SEQ ID NO: 509786 - DNA, 75 bp, synthetic construct
  source 1..75: mol_type = other DNA
aacgttacagggtcacgtttccagtatcggtcgggcgatttatgatcagagcattgaaagtgattccagcctgat

SEQ ID NO: 509787 - DNA, 75 bp, synthetic construct
  source 1..75: mol_type = other DNA
cgatttatcagaagttgagggtaaacagcagcgtattaatatttcgttgcctgatatattgattcgtcgtattga

SEQ ID NO: 509788 - DNA, 75 bp, synthetic construct
  source 1..75: mol_type = other DNA
ttaccagttcgatttgctggcaaatggagaaacggttttacaggatgcttctggtaaaaaacacttcaaaggtga

SEQ ID NO: 509789 - DNA, 75 bp, synthetic construct
  source 1..75: mol_type = other DNA
taatcggtatctctgtgtttctggtgggttctattatagttgcgctgataaacgtatatatcaagtatttggtgg

SEQ ID NO: 509790 - DNA, 75 bp, synthetic construct
  source 1..75: mol_type = other DNA
aaaggtgatattttgatatgctccaggaatggaagtcgagacctaattggcaagtgtgcatttgtatctgacgct

SEQ ID NO: 509791 - DNA, 75 bp, synthetic construct
  source 1..75: mol_type = other DNA
aatatgaggcttataaagattcaggtgttgaatggataggggccataccagttcactggaattcatttcctttgt

SEQ ID NO: 509792 - DNA, 75 bp, synthetic construct
  source 1..75: mol_type = other DNA
ctcgcgacctgaaagcgattagcctcccacagaagaggcaggccagcaggcactggaagcgtttgctgcggcctg

SEQ ID NO: 509793 - DNA, 75 bp, synthetic construct
  source 1..75: mol_type = other DNA
tgatcccaatgtgccaatgaaagactccggtgtggattggattggtaagattccagcgcattgggacgttaagag

SEQ ID NO: 509794 - DNA, 75 bp, synthetic construct
  source 1..75: mol_type = other DNA
ccccttctaaaaatgaacgagatggaattattacgtacattaacagattaaatggtgatgttgagcgagctatag

SEQ ID NO: 509795 - DNA, 75 bp, synthetic construct
  source 1..75: mol_type = other DNA
ctatcagtctatttggacaaaggagtaataaaattcgatgacgttgatgcaaaacgtacaaatacaaccagttcg

SEQ ID NO: 509796 - DNA, 75 bp, synthetic construct
  source 1..75: mol_type = other DNA
cagacgaatatgggatactacagcgagcttcttactacattacaaagaaatggcatcagtattgaaaacatcgtt

SEQ ID NO: 509797 - DNA, 75 bp, synthetic construct
  source 1..75: mol_type = other DNA
ccaggtcacccaggcgcatcagagcctgaccctcgacgagctttatcagatgatccgcgaaggcgcggacggcgt

SEQ ID NO: 509798 - DNA, 75 bp, synthetic construct
  source 1..75: mol_type = other DNA
ggtgacagaggcccatctgcgggctttacagcaggacttgcaggcactgacaccggaaaactgtcagacacggtt

SEQ ID NO: 509799 - DNA, 75 bp, synthetic construct
  source 1..75: mol_type = other DNA
atcattatatctttatttttaccatattatttttccataataaataacattcaaatcacctcaatgtcatcaaca

SEQ ID NO: 509800 - DNA, 75 bp, synthetic construct
  source 1..75: mol_type = other DNA
ttttattactttcatttgttactataataatgaccggtacacggagtagtttattggtttttatcatattgactc

SEQ ID NO: 509801 - DNA, 75 bp, synthetic construct
  source 1..75: mol_type = other DNA
gaaagtaatcttaaggcacaaaatttacagcttgatgccgaagataaaaaagcgatcgccgcactggattgcaac

SEQ ID NO: 509802 - DNA, 75 bp, synthetic construct
  source 1..75: mol_type = other DNA
ccgggaactggcggcgattatctggcgattacactgctcactttcccaacttgaacaagcaccgccgcaaggtac

SEQ ID NO: 509803 - DNA, 75 bp, synthetic construct
  source 1..75: mol_type = other DNA
ttgcccaccatcatcagcctgccgcccgggaactggcggcgattatctggcgattacactgctcactttcccaac

SEQ ID NO: 509804 - DNA, 75 bp, synthetic construct
  source 1..75: mol_type = other DNA
cgatccgttatcgcgagtgcgtgataactgtattgcactgttgcggggagtcatgagtgagcgtggcgtccaaca

SEQ ID NO: 509805 - DNA, 75 bp, synthetic construct
  source 1..75: mol_type = other DNA
tttttctcggcaccaactccaacaccgcacagagccataacggcgacctgtacgtcgacgagattttctggatcc

SEQ ID NO: 509806 - DNA, 75 bp, synthetic construct
  source 1..75: mol_type = other DNA
atggatgaaaatgctttagggtttgcctcatactggcgcaactcgcttgcggatgctgagtcaggaaagggcagt

SEQ ID NO: 509807 - DNA, 75 bp, synthetic construct
  source 1..75: mol_type = other DNA
ctggatgacattaatctgcgcattgcgcagggtgaatttgtcgccattatgggcgcttctggttctggtaaaacc

SEQ ID NO: 509808 - DNA, 75 bp, synthetic construct
  source 1..75: mol_type = other DNA
aattgcgcgactgggaatcgcgttccgatccgttatcgcgagtacggataactgtatttcactgttgcggggagt

SEQ ID NO: 509809 - DNA, 75 bp, synthetic construct
  source 1..75: mol_type = other DNA
tctgcgtggcttggcttttgtacctgggcctgcgcgcatttcacgaataacgtggcctatgcatttcaactggcg

SEQ ID NO: 509810 - DNA, 75 bp, synthetic construct
  source 1..75: mol_type = other DNA
ttccctctcagcgagctgcaggcgtgcatggtagacagctgggaaatctggaccgactttcatgcactggcgctg

SEQ ID NO: 509811 - DNA, 75 bp, synthetic construct
  source 1..75: mol_type = other DNA
aacgcccgccgccacacgtgaaattctcgaacagttgctgacggcgcttgccagttcgcaaactgatttttacac

SEQ ID NO: 509812 - DNA, 75 bp, synthetic construct
  source 1..75: mol_type = other DNA
acctcagcagcggtagtaagctttcccaccgtaggcggcgtcatcagcaaaagcctgggacgtatcgccggcagt

SEQ ID NO: 509813 - DNA, 75 bp, synthetic construct
  source 1..75: mol_type = other DNA
aacctgccgcccgagaactggcggcaattgtctggcggctgtactgctcgctttcgcaacttgagcaagcaccgc

SEQ ID NO: 509814 - DNA, 75 bp, synthetic construct
  source 1..75: mol_type = other DNA
tctctgcattacgtgctaatacagagctcttgagaatctttagagaacaaagaaacgcggaagaaccagagctta

SEQ ID NO: 509815 - DNA, 75 bp, synthetic construct
  source 1..75: mol_type = other DNA
gattaaaaatcctgagcaatatgaactcgctgagcacggttatattgttaaaacggctcaatctggcggtgccag

SEQ ID NO: 509816 - DNA, 75 bp, synthetic construct
  source 1..75: mol_type = other DNA
caaacgaatatgggatactacagcgagctactcaccacgctacaaagaaatggcatcagtattgaaaacatcgtt

SEQ ID NO: 509817 - DNA, 75 bp, synthetic construct
  source 1..75: mol_type = other DNA
ataggtacgttaagtgcagaaatgaagcttcaggatttgcatgtcgagccgctgttcgagtcagagttcgtactg

SEQ ID NO: 509818 - DNA, 75 bp, synthetic construct
  source 1..75: mol_type = other DNA
actaactccctgtccaaaacgccaatgctgaaagcgcagcatccggaatatgaaacctggagtgcgggcattcac

SEQ ID NO: 509819 - DNA, 75 bp, synthetic construct
  source 1..75: mol_type = other DNA
atgaacgatacgatacctcaatggtttattgcggtgataacctgaagggtgagattgaggctatttataatagtc

SEQ ID NO: 509820 - DNA, 75 bp, synthetic construct
  source 1..75: mol_type = other DNA
gacgccttttagcgcgcaggtatccactatcaaacaggcgctgggtaaacaaggcatcagtacaggcgcgaatga

SEQ ID NO: 509821 - DNA, 75 bp, synthetic construct
  source 1..75: mol_type = other DNA
ggcaaatcgcttcatgaagttgtcggtatcgtgacgccttttagcgcgcaggtatccactatcaaacaggcgctg

SEQ ID NO: 509822 - DNA, 75 bp, synthetic construct
  source 1..75: mol_type = other DNA
gaaagttaaagatggcataaatgaacgcatcaaaaccgataccagtttatgcctgcctcaggatatcagtgatac

SEQ ID NO: 509823 - DNA, 75 bp, synthetic construct
  source 1..75: mol_type = other DNA
gaaactaataaagttttgttggtaagtaataaaaaaatacgaacagagaagattgacgttgttgtacgacttgca

SEQ ID NO: 509824 - DNA, 75 bp, synthetic construct
  source 1..75: mol_type = other DNA
gtttgcgggtaaacgcaaagtgctgaacattttcccgagtattgataccggtgtttgcgccgcatcagtacgtaa

SEQ ID NO: 509825 - DNA, 75 bp, synthetic construct
  source 1..75: mol_type = other DNA
gcaacccggttacagtcgccaattccatcccgcaagtgggtagcaaagcgcagacttttactctcgtggcaaaag

SEQ ID NO: 509826 - DNA, 75 bp, synthetic construct
  source 1..75: mol_type = other DNA
actggtgcaatggccggacgatggttacctgagctgaaaagcttcggcgcttattttccctcaagcactcgtaaa

SEQ ID NO: 509827 - DNA, 75 bp, synthetic construct
  source 1..75: mol_type = other DNA
cgagggcgcaataaagccgataagatggacatcgacctgtcccacagcaatctggcccccggcctgctgtgcgca

SEQ ID NO: 509828 - DNA, 75 bp, synthetic construct
  source 1..75: mol_type = other DNA
atgacagcggccattcagctgtatccctatcagcagtcgtggtttctggatcgtgcccgtttcaagattggtatg

SEQ ID NO: 509829 - DNA, 75 bp, synthetic construct
  source 1..75: mol_type = other DNA
gtgctggttccggtgtttatgacttttccccttccaaagaaacctgcggtatgtgccaagggcatgggaaatttg

SEQ ID NO: 509830 - DNA, 75 bp, synthetic construct
  source 1..75: mol_type = other DNA
ccatacccggcgcagcatcggcaataacgctgcccgcctggtaaaaggcattcccttcagggaatgccactcata

SEQ ID NO: 509831 - DNA, 75 bp, synthetic construct
  source 1..75: mol_type = other DNA
ttaactggcttactcgctgtggggaaatcttcagcaaagagagcgattatcttaccgggctggatcgtgaaattg

SEQ ID NO: 509832 - DNA, 75 bp, synthetic construct
  source 1..75: mol_type = other DNA
aacgcagtattggtcaccaggatcccggcgcgacctcggtgatgttttatgatgcaaatgttggcgttagccgca

SEQ ID NO: 509833 - DNA, 75 bp, synthetic construct
  source 1..75: mol_type = other DNA
tggctattaacgccactgacggaccgtcagggccggtggtggcgcgttcgcggcgccgccgtgaagccgcccaca

SEQ ID NO: 509834 - DNA, 75 bp, synthetic construct
  source 1..75: mol_type = other DNA
gctgggacgccagccagaactgcccgactggatttatgacggggtaacgctcggcattcagggcggcactgaggt

SEQ ID NO: 509835 - DNA, 75 bp, synthetic construct
  source 1..75: mol_type = other DNA
gatttcagcgccttcacgccgatgatgcgcacccacgaaggcaaccgtcctggcgacaactggcagtttgacggc

SEQ ID NO: 509836 - DNA, 75 bp, synthetic construct
  source 1..75: mol_type = other DNA
atatcaacccgtatgttgccagcgataaagacctctgcgaagaagcggcaaagcgcggctatctggcaaaagatg

SEQ ID NO: 509837 - DNA, 75 bp, synthetic construct
  source 1..75: mol_type = other DNA
catcgttatttatactgaacctacagatcttcacaaaggaattgcagctctaaaaaccgctggaattactgattt

SEQ ID NO: 509838 - DNA, 75 bp, synthetic construct
  source 1..75: mol_type = other DNA
cgcggctatctggcaaaagatgcctccggcggcgattatctggtggagttcggtgagttctacggcggcgtggtt

SEQ ID NO: 509839 - DNA, 75 bp, synthetic construct
  source 1..75: mol_type = other DNA
tttgtgaaaaacaaagaggacttcagcatggtcggcggcttctttaaaccgctaacgaaaccgggcttaggcgtg

SEQ ID NO: 509840 - DNA, 75 bp, synthetic construct
  source 1..75: mol_type = other DNA
tgtcgccatgttgagcacccttcataaaaaacaaatgcagtatgcaggaaaaaaaataagtgttcaacacttgac

SEQ ID NO: 509841 - DNA, 75 bp, synthetic construct
  source 1..75: mol_type = other DNA
tgccagaagcggatgtgtcactctcatgcaaacaacatcaagttctgacctgcattgctaatcaaatgacgacag

SEQ ID NO: 509842 - DNA, 75 bp, synthetic construct
  source 1..75: mol_type = other DNA
agcgcagaacaaacagaatatcggcacgggaattggtacgggtgcagctatgggcgctgctgttggtggtctccc

SEQ ID NO: 509843 - DNA, 75 bp, synthetic construct
  source 1..75: mol_type = other DNA
aattatccaggaacaaacattgatgcaaaagagcgtgaaattagaaaatctattgaattcaggagcgaactgaat

SEQ ID NO: 509844 - DNA, 75 bp, synthetic construct
  source 1..75: mol_type = other DNA
atggtaactaaaaaggtaaaaacaaaccacccgtactatcgtgttttatctggcacctccatgccgtttccccac

SEQ ID NO: 509845 - DNA, 75 bp, synthetic construct
  source 1..75: mol_type = other DNA
tgaactccttagattgattcgcactaatactctgcaggatgcagcaattcatctttcaggctgcctgcaatatgc

SEQ ID NO: 509846 - DNA, 75 bp, synthetic construct
  source 1..75: mol_type = other DNA
taaccctttctcctgaactggcacgcctggcaaggcaatattcatatcacggatttgctgaaggtaaaaagaata

SEQ ID NO: 509847 - DNA, 75 bp, synthetic construct
  source 1..75: mol_type = other DNA
atctgccgctgcataaccatatgtcgctccaggagcaaaacatcgttatcgaggtactgcatgactattttaaat

SEQ ID NO: 509848 - DNA, 75 bp, synthetic construct
  source 1..75: mol_type = other DNA
tggttcgcgacaaaattaaagcctacagttgggtcggcggcgatcgtccggcggatgttatcgacggcattaaaa

SEQ ID NO: 509849 - DNA, 75 bp, synthetic construct
  source 1..75: mol_type = other DNA
agccagccgtattgcccacggcgtaccggttggcggcgaactggaaatggtcgatggcaccacgctgtcgcactc

SEQ ID NO: 509850 - DNA, 75 bp, synthetic construct
  source 1..75: mol_type = other DNA
agcgcgatcgtagcggcgggatgcgtctggcgcaggcgctcacccgggcgatgtcggaaatcggtcactgcgccg

SEQ ID NO: 509851 - DNA, 75 bp, synthetic construct
  source 1..75: mol_type = other DNA
tgggcgctgccgttggtggtctccccggtgcggctattggtgctgtcataggtggtcttgctggctcgttgtttt

SEQ ID NO: 509852 - DNA, 75 bp, synthetic construct
  source 1..75: mol_type = other DNA
gtaaaatgccattctcaacagatgattcagtcgaccaccccgtttcgttgtatgctgccacaaaaaaagctaatg

SEQ ID NO: 509853 - DNA, 75 bp, synthetic construct
  source 1..75: mol_type = other DNA
tgcccacactgccagtgcatccagtacggatttggggacaaaagcaacatcgtcatttgattacggtactaaaac

SEQ ID NO: 509854 - DNA, 75 bp, synthetic construct
  source 1..75: mol_type = other DNA
caagtgctggggagcataaacatactgtcggtattggtgctcatacgcactctgttgcgattggttcgcatggac

SEQ ID NO: 509855 - DNA, 75 bp, synthetic construct
  source 1..75: mol_type = other DNA
tcccatacgagggcctgggcaacaggtgtcaacgacggatgaaaagtgatccacttatatctccaccaacggccc

SEQ ID NO: 509856 - DNA, 75 bp, synthetic construct
  source 1..75: mol_type = other DNA
acgcgaaaaccatcgcggaactggttgaacagttcaatctgccgattgagaaaacggttaagactctgctggtta

SEQ ID NO: 509857 - DNA, 75 bp, synthetic construct
  source 1..75: mol_type = other DNA
taaacactacttcggtatcaactgggatcgcgatgtcgctaccccggaaattgctgatatccgtaacgtggtggc

SEQ ID NO: 509858 - DNA, 75 bp, synthetic construct
  source 1..75: mol_type = other DNA
gattcgtaatgagctgagttcttacaaacagttaccgctgaacttctatcagatccagaccaagttccgtgatga

SEQ ID NO: 509859 - DNA, 75 bp, synthetic construct
  source 1..75: mol_type = other DNA
gtacgtgctcaatgtggtttccagttctcttccgcttcctcgcccactcgctcactaacgttcggtcgctggggc

SEQ ID NO: 509860 - DNA, 75 bp, synthetic construct
  source 1..75: mol_type = other DNA
cgtcgcaacggcgagaaacagttaattaagactggtgacatcgtcgattatctggtgaaacagattaaaggctga

SEQ ID NO: 509861 - DNA, 75 bp, synthetic construct
  source 1..75: mol_type = other DNA
atgcgtactagccaatacctgctctccactcttaaggagacacctgccgacgccgaggtgatcagccatcagctg

SEQ ID NO: 509862 - DNA, 75 bp, synthetic construct
  source 1..75: mol_type = other DNA
aaactcatctgcaaatactaactcaacagggaaccatgctcatacagtaggtattggggcgcataaccatactgt

SEQ ID NO: 509863 - DNA, 75 bp, synthetic construct
  source 1..75: mol_type = other DNA
cccaaaatggacgaatttagtagtcagttgctgggatatttcactttagcgctttataccagtgccccttcaaaa

SEQ ID NO: 509864 - DNA, 75 bp, synthetic construct
  source 1..75: mol_type = other DNA
atacatcacggcataatgagttttctatcggtgccagcgcctctctgtgggagtgtatgcttaatcaatggctgg

SEQ ID NO: 509865 - DNA, 75 bp, synthetic construct
  source 1..75: mol_type = other DNA
aacggtttaaattttatctggagcaacacggctggatcgttgcccgtaaagaacaactggtggaacggttgatgc

SEQ ID NO: 509866 - DNA, 75 bp, synthetic construct
  source 1..75: mol_type = other DNA
ccgctttatgccatatggctacaaaataaaaatagcgataaaaatgcgttgattcgcgatctattgaaaattaac

SEQ ID NO: 509867 - DNA, 75 bp, synthetic construct
  source 1..75: mol_type = other DNA
actttatgccagcaccccttctaaattaaaaggagatcttaactatctgcgactggaatgggggccagattttca

SEQ ID NO: 509868 - DNA, 75 bp, synthetic construct
  source 1..75: mol_type = other DNA
cggatcgcccaacggcagtcactggtaaaacaactgcatgaacgtcagcttgatcttcttattaccactgaagcg

SEQ ID NO: 509869 - DNA, 75 bp, synthetic construct
  source 1..75: mol_type = other DNA
agtgaaagtctggctggatgtgtgctggacgggaacgctgaccagcgtctggaatgtgcagagcaaaatcacggt

SEQ ID NO: 509870 - DNA, 75 bp, synthetic construct
  source 1..75: mol_type = other DNA
aactgggtgaactggcggttttaagtcgtagtgatgttctgccggttggtgtgccgcttccgtggtcaacggata

SEQ ID NO: 509871 - DNA, 75 bp, synthetic construct
  source 1..75: mol_type = other DNA
catttgaacagtggaaggcgctgcagggtgccactggcgagcctgtcctgctggacgaatttgtttttgcgaacg

SEQ ID NO: 509872 - DNA, 75 bp, synthetic construct
  source 1..75: mol_type = other DNA
ccggctgcgcagattgttcaccggcagcccgttacccgcaccggcgtggtgaatgaaaacggggtggtgtattcc

SEQ ID NO: 509873 - DNA, 75 bp, synthetic construct
  source 1..75: mol_type = other DNA
aacttacgttgattcaggtaataacacacaaaatcaggtgccacgctggggatccgcgtctaactcatcatcagc

SEQ ID NO: 509874 - DNA, 75 bp, synthetic construct
  source 1..75: mol_type = other DNA
ccggctgcacagattgttcaccggcagtctgttacccgcaccggtgtggtggatgaaaacggtgtggtctattcc

SEQ ID NO: 509875 - DNA, 75 bp, synthetic construct
  source 1..75: mol_type = other DNA
atgaaaaataaatcaggtaattcttattatagagaagcggtcgatattcatagctcactagagctttcatttata

SEQ ID NO: 509876 - DNA, 75 bp, synthetic construct
  source 1..75: mol_type = other DNA
catatgccacaggatgatccgcaaacccgtcgcttgattcattttggtcgtcaggcggcgcgcagcagttttccg

SEQ ID NO: 509877 - DNA, 75 bp, synthetic construct
  source 1..75: mol_type = other DNA
caatttatcaatgctcaggcggcgcgtgttttacgtctggatgtgacggcaagtcagggaagagcaatcacggaa

SEQ ID NO: 509878 - DNA, 75 bp, synthetic construct
  source 1..75: mol_type = other DNA
cggcgctggaagatgccctggaatatatggcgccacgagcgtgcgttttgcttattctcgatgaaactgcctgca

SEQ ID NO: 509879 - DNA, 75 bp, synthetic construct
  source 1..75: mol_type = other DNA
accacttaatgtggaaaagcaacgtagcgaagcgacatttcgaactaatcttgtgcagcataataaacaagcgga

SEQ ID NO: 509880 - DNA, 75 bp, synthetic construct
  source 1..75: mol_type = other DNA
cccaaaaattgcgatcatgccgttcaggttgctgatgccagtatccgtacccccgataataaagtcatattagaa

SEQ ID NO: 509881 - DNA, 75 bp, synthetic construct
  source 1..75: mol_type = other DNA
ggattcaatgacggcacgtattgcgccgagggaattattggtacttgtgcgctatcgttagcggctatctctggt

SEQ ID NO: 509882 - DNA, 75 bp, synthetic construct
  source 1..75: mol_type = other DNA
cacggcaccgaaggcgaagtctatgctaatccgcaacgctgcccgcaaataaatcttattggccgcgaagggatg

SEQ ID NO: 509883 - DNA, 75 bp, synthetic construct
  source 1..75: mol_type = other DNA
cgctggcggagcatcatgacctggacctgccgtactgctttaaccgcaaagaggcaaaagaccacggtgaaggcg

SEQ ID NO: 509884 - DNA, 75 bp, synthetic construct
  source 1..75: mol_type = other DNA
cgtttttacgctgaagcgttggtggattccggcattgagttcgatctgctgtttggccctgcttacaaagggatc

SEQ ID NO: 509885 - DNA, 75 bp, synthetic construct
  source 1..75: mol_type = other DNA
aattcattgaagcccatccggggtgtacttccggagacattgcggatgcttttgccggttactcacggcagcgcg

SEQ ID NO: 509886 - DNA, 75 bp, synthetic construct
  source 1..75: mol_type = other DNA
ctgaatggttgggattgaccgtatttgaacattgctggcaggacggcggcaatatcggatttgtcagttttgttg

SEQ ID NO: 509887 - DNA, 75 bp, synthetic construct
  source 1..75: mol_type = other DNA
gaacatccagatggcttgctgtctggcggcggcgggcgaagtggcaaccattagcgatggtctggcgcgcattaa

SEQ ID NO: 509888 - DNA, 75 bp, synthetic construct
  source 1..75: mol_type = other DNA
atgagtctattaaatgacgttcagaaattcattgaagcccatccggggtgtacttccggggacattgcggatgct

SEQ ID NO: 509889 - DNA, 75 bp, synthetic construct
  source 1..75: mol_type = other DNA
atgtcggcactaacgacccgcgggtgattttgtgcctgacccgccaggcggaaaaactggtcagggagatggcgg

SEQ ID NO: 509890 - DNA, 75 bp, synthetic construct
  source 1..75: mol_type = other DNA
tcccgcgcctgactgagagagcgcaggagctggaaccacaaccagttcgtgaaaccagacctgtgcgcaatttct

SEQ ID NO: 509891 - DNA, 75 bp, synthetic construct
  source 1..75: mol_type = other DNA
cgcgtcgtgagcggtgcttacggaaaagcagcaagcgagctgtatcgggtgatgagtggtatctgtcagggaatt

SEQ ID NO: 509892 - DNA, 75 bp, synthetic construct
  source 1..75: mol_type = other DNA
cgtgctaatcgcgggccgttggtgatggaggtgaatgcgtcgccggggctggaaggaatagaaaaaccaccggta

SEQ ID NO: 509893 - DNA, 75 bp, synthetic construct
  source 1..75: mol_type = other DNA
tcctgcggcgtcttctattcactacaaaggccgcaagttaccccattttgacgctgtgatcccgcgtattggcac

SEQ ID NO: 509894 - DNA, 75 bp, synthetic construct
  source 1..75: mol_type = other DNA
agcgcgttctgcagtcagcaagcaagttacgtcagagtgggcgtgtggctcaccgttgtgaaggggatacacgca

SEQ ID NO: 509895 - DNA, 75 bp, synthetic construct
  source 1..75: mol_type = other DNA
atgagtctcttcaatgacgttcagaaattcattgaagcccatccggggtgtacttccggcgacattgcggatgct

SEQ ID NO: 509896 - DNA, 75 bp, synthetic construct
  source 1..75: mol_type = other DNA
atgagtctattgaatgacgttcagaaattcattgaagcccatccggggtgtacttccggagacattgcggatgct

SEQ ID NO: 509897 - DNA, 75 bp, synthetic construct
  source 1..75: mol_type = other DNA
atgagtctatttaatgacgttcagaaattcattgaagcccatccggggtgtacttccggtgacattgcggatgct

SEQ ID NO: 509898 - DNA, 75 bp, synthetic construct
  source 1..75: mol_type = other DNA
cgtcgtgagcggtgcttacggaaaagcagcaagcgcgctgcatcgggtgaagagtggtatctgtcagggaattac

SEQ ID NO: 509899 - DNA, 75 bp, synthetic construct
  source 1..75: mol_type = other DNA
aattcattgaagcccatccggggtgtacttccggagacattgcggatgcttttgcaggttactcacggcagcgag

SEQ ID NO: 509900 - DNA, 75 bp, synthetic construct
  source 1..75: mol_type = other DNA
tcgagaaactcgaagagattttccttgagcagtctttcgactatcaactcgaatggtggcgcgctgggctggcgc

SEQ ID NO: 509901 - DNA, 75 bp, synthetic construct
  source 1..75: mol_type = other DNA
cctggcgtgaatcccgtggcgatatcggtaaaggaatggagagcgtaccttcgggcggtggcagccaggatatta

SEQ ID NO: 509902 - DNA, 75 bp, synthetic construct
  source 1..75: mol_type = other DNA
aaaatattgtaagaggcagtattctgagttgcaaaatcatcataaacagaggcatttctcagaataataaatata

SEQ ID NO: 509903 - DNA, 75 bp, synthetic construct
  source 1..75: mol_type = other DNA
ataatatggtcacagaatataaagggaatataggtgatactcagaacagcgtacgtggcgaggaaaatattgtaa

SEQ ID NO: 509904 - DNA, 75 bp, synthetic construct
  source 1..75: mol_type = other DNA
gatgaaaattttgtaaaagggcagtattctgaactacaaaatcaccataaaacagaagcattatctcagaataat

SEQ ID NO: 509905 - DNA, 75 bp, synthetic construct
  source 1..75: mol_type = other DNA
gagctggaaacagcgcgaccagtgggacgaaacggcaccgctgaaccgggtcgaaagcaccttagaggcccggct

SEQ ID NO: 509906 - DNA, 75 bp, synthetic construct
  source 1..75: mol_type = other DNA
aacctaaaattcttggtgttggtggtggcgtaggtgttagaggtggtggtcgggcaagtattgactggagtgatg

SEQ ID NO: 509907 - DNA, 75 bp, synthetic construct
  source 1..75: mol_type = other DNA
gccagccagattatgcgccagaacgtcacaataaatgccctgaaagagggtatcaccagtaatgccgcccgtaat

SEQ ID NO: 509908 - DNA, 75 bp, synthetic construct
  source 1..75: mol_type = other DNA
ttctcatttcaaattactgtaatgcttccgattgttttgaaattacaggaaaagcatataacatagatccattaa

SEQ ID NO: 509909 - DNA, 75 bp, synthetic construct
  source 1..75: mol_type = other DNA
tgttatgcttctgattgttttgaaattactggaaaagcatataatatagacccattaatattaaaagcaattgca

SEQ ID NO: 509910 - DNA, 75 bp, synthetic construct
  source 1..75: mol_type = other DNA
aagaatgcctggtgctgacagtccacagaaactgatgaaaagagcaaaggagtatcaggataagcacaagcaata

SEQ ID NO: 509911 - DNA, 75 bp, synthetic construct
  source 1..75: mol_type = other DNA
tccctgggaggctgaatcttttgaggttattttgctgtgtggcttaccgggtatgggcaaagatcgctatatcag

SEQ ID NO: 509912 - DNA, 75 bp, synthetic construct
  source 1..75: mol_type = other DNA
tgaacagtgccagggaattgacgttatcagccttgatgatatgcggcggcgaatcaatgccagcccggatgacaa

SEQ ID NO: 509913 - DNA, 75 bp, synthetic construct
  source 1..75: mol_type = other DNA
cgcggcagtgatccgcgcgttagatggcgatatgaatggtcgtctgctggcgcgtcatgacgtcaaaggcgacaa

SEQ ID NO: 509914 - DNA, 75 bp, synthetic construct
  source 1..75: mol_type = other DNA
aacctaaaattcttggggttggtggtggagttggtgtcagaggcggatttaagggaagtcttgatcgaacggatg

SEQ ID NO: 509915 - DNA, 75 bp, synthetic construct
  source 1..75: mol_type = other DNA
aacctaaaattcttggtgttggtggtggggtaggcatcagaggtggatttaaggggagcctggatgcaacggatg

SEQ ID NO: 509916 - DNA, 75 bp, synthetic construct
  source 1..75: mol_type = other DNA
atataaagggaatataggtgatactcagaacagcatacgtggcgaggaaaatattgtaagaggacagtattctga

SEQ ID NO: 509917 - DNA, 75 bp, synthetic construct
  source 1..75: mol_type = other DNA
gctcagccgttaccagaacaactatcacttcggagggaattcactgtgaatgaagtttatgtgattgccggtggt

SEQ ID NO: 509918 - DNA, 75 bp, synthetic construct
  source 1..75: mol_type = other DNA
gaacagtgccatgacattctatgcgaagatgaatggtgcgccggtcgtgctgtctgaactctctcagatacagct

SEQ ID NO: 509919 - DNA, 75 bp, synthetic construct
  source 1..75: mol_type = other DNA
tatccggattggcgacctgccgattatccgggattccgaaatccagaacttctgtctgcacggcacggtcggggc

SEQ ID NO: 509920 - DNA, 75 bp, synthetic construct
  source 1..75: mol_type = other DNA
cgcaccattcgccgcattcagtccatccactatctggatcgcaaagacccggaaatgcaggtgcacatcctctga

SEQ ID NO: 509921 - DNA, 75 bp, synthetic construct
  source 1..75: mol_type = other DNA
cctgcgcaatgttgcggcggcgctcggcaaaccgttgagcgaactgacggtaacgattctggctaaaccacgcca

SEQ ID NO: 509922 - DNA, 75 bp, synthetic construct
  source 1..75: mol_type = other DNA
acaacgaagagaatcgtcgcattggcgagcaggagctggcacgctgcaaagcgatgggcatcgaagccggtaaag

SEQ ID NO: 509923 - DNA, 75 bp, synthetic construct
  source 1..75: mol_type = other DNA
cggcgctggctggctacaaatggttaggacgcggcgataaaaacaccgcggacggcgcggcggtaaacgccatgc

SEQ ID NO: 509924 - DNA, 75 bp, synthetic construct
  source 1..75: mol_type = other DNA
tatgtatatggagaagctgatcgtcggaccgggagctaagggcgccattgacctgaatctgccgttggcggataa

SEQ ID NO: 509925 - DNA, 75 bp, synthetic construct
  source 1..75: mol_type = other DNA
aggcattagccgcaaaggcaatatcgccaccaccgaaacgctgctgatccgtggtaaatcacgcaccattcgtcg

SEQ ID NO: 509926 - DNA, 75 bp, synthetic construct
  source 1..75: mol_type = other DNA
ggaaccggaaccacaaccagttcgagaaaccagacctgtgcgcaatttctatgtcggcactaacgatccacgggt

SEQ ID NO: 509927 - DNA, 75 bp, synthetic construct
  source 1..75: mol_type = other DNA
caaccttcgttgtcctataatcctttttcaattttaaaggtacagaagaagttcagaacacgatctgagctggaa

SEQ ID NO: 509928 - DNA, 75 bp, synthetic construct
  source 1..75: mol_type = other DNA
caaaaacgaccagctatatcgatctcgaaaaccgggttattcgcttttacgacacaaaaaaccgcaatgaccatg

SEQ ID NO: 509929 - DNA, 75 bp, synthetic construct
  source 1..75: mol_type = other DNA
tatgaggcattacaacggattgagttgcatatgcttatcactgcacctaaattgtataatgcacttttagcatca

SEQ ID NO: 509930 - DNA, 75 bp, synthetic construct
  source 1..75: mol_type = other DNA
ctaatgactgcacctaaattgtataatgcacttttagcatctgcgaagtatccgccattaccagaaaggaaagag

SEQ ID NO: 509931 - DNA, 75 bp, synthetic construct
  source 1..75: mol_type = other DNA
ttcatatgctgatgacagtacctgagttgtataatacacttttggcttcggcgaaatatcaaccattgccaacaa

SEQ ID NO: 509932 - DNA, 75 bp, synthetic construct
  source 1..75: mol_type = other DNA
tacttggcagaaccaaacccgctaaaccaaacactctcaatgtgttagacaaagctgagaatcggttgaaagaat

SEQ ID NO: 509933 - DNA, 75 bp, synthetic construct
  source 1..75: mol_type = other DNA
gacagtcctgttaggtgccagaaaagaagaaacagcatctttgtgttggagagaagctatcaccaatgaagaagc

SEQ ID NO: 509934 - DNA, 75 bp, synthetic construct
  source 1..75: mol_type = other DNA
aagttgaccaaaaggaatcctaatgcagtgaagcgggaagctgacgtttctgaactcactcttagtgaaattttt

SEQ ID NO: 509935 - DNA, 75 bp, synthetic construct
  source 1..75: mol_type = other DNA
tagaagagacatagtaaacgatacggtaacccagaaggacaaacagaagtgggttttcccggcccgttcttctcg

SEQ ID NO: 509936 - DNA, 75 bp, synthetic construct
  source 1..75: mol_type = other DNA
aagacttatgtgggttttcccggcccgttccaaaagaagcaaagtcgggtattactctgacagtaaaagcttgcg

SEQ ID NO: 509937 - DNA, 75 bp, synthetic construct
  source 1..75: mol_type = other DNA
aatcgaaagattcgattctacgacacgaagaaccgaaatgatcacgagcttcctatctgtgatgctgtgaaacgg
